United States Patent Application Publication US 2019/0048337 A1 - sequence listing, part 2

SEQ ID NO: 29592 - RNA, 22 nt, Artificial Sequence
  Synthetic
cccagugucccaggaaugaaca

SEQ ID NO: 29593 - RNA, 23 nt, Artificial Sequence
  Synthetic
ucccagugucccaggaaugaaca

SEQ ID NO: 29594 - RNA, 24 nt, Artificial Sequence
  Synthetic
cucccagugucccaggaaugaaca

SEQ ID NO: 29595 - RNA, 18 nt, Artificial Sequence
  Synthetic
cauaugaaagcaugaaca

SEQ ID NO: 29596 - RNA, 19 nt, Artificial Sequence
  Synthetic
ucauaugaaagcaugaaca

SEQ ID NO: 29597 - RNA, 20 nt, Artificial Sequence
  Synthetic
cucauaugaaagcaugaaca

SEQ ID NO: 29598 - RNA, 21 nt, Artificial Sequence
  Synthetic
ucucauaugaaagcaugaaca

SEQ ID NO: 29599 - RNA, 22 nt, Artificial Sequence
  Synthetic
aucucauaugaaagcaugaaca

SEQ ID NO: 29600 - RNA, 23 nt, Artificial Sequence
  Synthetic
uaucucauaugaaagcaugaaca

SEQ ID NO: 29601 - RNA, 18 nt, Artificial Sequence
  Synthetic
uaagaaacuauaugaaca

SEQ ID NO: 29602 - RNA, 20 nt, Artificial Sequence
  Synthetic
aguaagaaacuauaugaaca

SEQ ID NO: 29603 - RNA, 21 nt, Artificial Sequence
  Synthetic
uaguaagaaacuauaugaaca

SEQ ID NO: 29604 - RNA, 18 nt, Artificial Sequence
  Synthetic
ugcuucucuuuaugaaca

SEQ ID NO: 29605 - RNA, 19 nt, Artificial Sequence
  Synthetic
cugcuucucuuuaugaaca

SEQ ID NO: 29606 - RNA, 20 nt, Artificial Sequence
  Synthetic
ucugcuucucuuuaugaaca

SEQ ID NO: 29607 - RNA, 21 nt, Artificial Sequence
  Synthetic
aucugcuucucuuuaugaaca

SEQ ID NO: 29608 - RNA, 22 nt, Artificial Sequence
  Synthetic
caucugcuucucuuuaugaaca

SEQ ID NO: 29609 - RNA, 18 nt, Artificial Sequence
  Synthetic
cauuuaacaagcugaaca

SEQ ID NO: 29610 - RNA, 19 nt, Artificial Sequence
  Synthetic
acauuuaacaagcugaaca

SEQ ID NO: 29611 - RNA, 21 nt, Artificial Sequence
  Synthetic
agacauuuaacaagcugaaca

SEQ ID NO: 29612 - RNA, 23 nt, Artificial Sequence
  Synthetic
agagacauuuaacaagcugaaca

SEQ ID NO: 29613 - RNA, 24 nt, Artificial Sequence
  Synthetic
uagagacauuuaacaagcugaaca

SEQ ID NO: 29614 - RNA, 18 nt, Artificial Sequence
  Synthetic
auggaauucuugugaaca

SEQ ID NO: 29615 - RNA, 19 nt, Artificial Sequence
  Synthetic
cauggaauucuugugaaca

SEQ ID NO: 29616 - RNA, 20 nt, Artificial Sequence
  Synthetic
ccauggaauucuugugaaca

SEQ ID NO: 29617 - RNA, 21 nt, Artificial Sequence
  Synthetic
cccauggaauucuugugaaca

SEQ ID NO: 29618 - RNA, 24 nt, Artificial Sequence
  Synthetic
aggcccauggaauucuugugaaca

SEQ ID NO: 29619 - RNA, 18 nt, Artificial Sequence
  Synthetic
uagcaaaagaauugaaca

SEQ ID NO: 29620 - RNA, 20 nt, Artificial Sequence
  Synthetic
aguagcaaaagaauugaaca

SEQ ID NO: 29621 - RNA, 21 nt, Artificial Sequence
  Synthetic
uaguagcaaaagaauugaaca

SEQ ID NO: 29622 - RNA, 23 nt, Artificial Sequence
  Synthetic
cguaguagcaaaagaauugaaca

SEQ ID NO: 29623 - RNA, 24 nt, Artificial Sequence
  Synthetic
acguaguagcaaaagaauugaaca

SEQ ID NO: 29624 - RNA, 24 nt, Artificial Sequence
  Synthetic
agggcuauuuuggugacuugaaca

SEQ ID NO: 29625 - RNA, 18 nt, Artificial Sequence
  Synthetic
auucuuuauuuuugaaca

SEQ ID NO: 29626 - RNA, 19 nt, Artificial Sequence
  Synthetic
cauucuuuauuuuugaaca

SEQ ID NO: 29627 - RNA, 20 nt, Artificial Sequence
  Synthetic
ucauucuuuauuuuugaaca

SEQ ID NO: 29628 - RNA, 21 nt, Artificial Sequence
  Synthetic
aucauucuuuauuuuugaaca

SEQ ID NO: 29629 - RNA, 22 nt, Artificial Sequence
  Synthetic
uaucauucuuuauuuuugaaca

SEQ ID NO: 29630 - RNA, 23 nt, Artificial Sequence
  Synthetic
uuaucauucuuuauuuuugaaca

SEQ ID NO: 29631 - RNA, 24 nt, Artificial Sequence
  Synthetic
uuuaucauucuuuauuuuugaaca

SEQ ID NO: 29632 - RNA, 18 nt, Artificial Sequence
  Synthetic
uugcaucguuuuugaaca

SEQ ID NO: 29633 - RNA, 19 nt, Artificial Sequence
  Synthetic
uuugcaucguuuuugaaca

SEQ ID NO: 29634 - RNA, 20 nt, Artificial Sequence
  Synthetic
cuuugcaucguuuuugaaca

SEQ ID NO: 29635 - RNA, 21 nt, Artificial Sequence
  Synthetic
acuuugcaucguuuuugaaca

SEQ ID NO: 29636 - RNA, 22 nt, Artificial Sequence
  Synthetic
uacuuugcaucguuuuugaaca

SEQ ID NO: 29637 - RNA, 23 nt, Artificial Sequence
  Synthetic
cuacuuugcaucguuuuugaaca

SEQ ID NO: 29638 - RNA, 24 nt, Artificial Sequence
  Synthetic
ucuacuuugcaucguuuuugaaca

SEQ ID NO: 29639 - RNA, 22 nt, Artificial Sequence
  Synthetic
ugccuuauauccagaaauaaca

SEQ ID NO: 29640 - RNA, 24 nt, Artificial Sequence
  Synthetic
agugccuuauauccagaaauaaca

SEQ ID NO: 29641 - RNA, 22 nt, Artificial Sequence
  Synthetic
agaauauucaaacuuaauaaca

SEQ ID NO: 29642 - RNA, 24 nt, Artificial Sequence
  Synthetic
ugagaauauucaaacuuaauaaca

SEQ ID NO: 29643 - RNA, 18 nt, Artificial Sequence
  Synthetic
ccaaauauggagauaaca

SEQ ID NO: 29644 - RNA, 19 nt, Artificial Sequence
  Synthetic
uccaaauauggagauaaca

SEQ ID NO: 29645 - RNA, 20 nt, Artificial Sequence
  Synthetic
uuccaaauauggagauaaca

SEQ ID NO: 29646 - RNA, 21 nt, Artificial Sequence
  Synthetic
auuccaaauauggagauaaca

SEQ ID NO: 29647 - RNA, 22 nt, Artificial Sequence
  Synthetic
cauuccaaauauggagauaaca

SEQ ID NO: 29648 - RNA, 23 nt, Artificial Sequence
  Synthetic
acauuccaaauauggagauaaca

SEQ ID NO: 29649 - RNA, 24 nt, Artificial Sequence
  Synthetic
aacauuccaaauauggagauaaca

SEQ ID NO: 29650 - RNA, 18 nt, Artificial Sequence
  Synthetic
cuucuuuuagggauaaca

SEQ ID NO: 29651 - RNA, 19 nt, Artificial Sequence
  Synthetic
ucuucuuuuagggauaaca

SEQ ID NO: 29652 - RNA, 20 nt, Artificial Sequence
  Synthetic
aucuucuuuuagggauaaca

SEQ ID NO: 29653 - RNA, 21 nt, Artificial Sequence
  Synthetic
caucuucuuuuagggauaaca

SEQ ID NO: 29654 - RNA, 22 nt, Artificial Sequence
  Synthetic
acaucuucuuuuagggauaaca

SEQ ID NO: 29655 - RNA, 23 nt, Artificial Sequence
  Synthetic
uacaucuucuuuuagggauaaca

SEQ ID NO: 29656 - RNA, 24 nt, Artificial Sequence
  Synthetic
cuacaucuucuuuuagggauaaca

SEQ ID NO: 29657 - RNA, 19 nt, Artificial Sequence
  Synthetic
uguguacacaguucuaaca

SEQ ID NO: 29658 - RNA, 20 nt, Artificial Sequence
  Synthetic
uuguguacacaguucuaaca

SEQ ID NO: 29659 - RNA, 21 nt, Artificial Sequence
  Synthetic
uuuguguacacaguucuaaca

SEQ ID NO: 29660 - RNA, 22 nt, Artificial Sequence
  Synthetic
auuuguguacacaguucuaaca

SEQ ID NO: 29661 - RNA, 23 nt, Artificial Sequence
  Synthetic
aauuuguguacacaguucuaaca

SEQ ID NO: 29662 - RNA, 24 nt, Artificial Sequence
  Synthetic
uaauuuguguacacaguucuaaca

SEQ ID NO: 29663 - RNA, 18 nt, Artificial Sequence
  Synthetic
aacaauaugaugguaaca

SEQ ID NO: 29664 - RNA, 19 nt, Artificial Sequence
  Synthetic
uaacaauaugaugguaaca

SEQ ID NO: 29665 - RNA, 20 nt, Artificial Sequence
  Synthetic
uuaacaauaugaugguaaca

SEQ ID NO: 29666 - RNA, 21 nt, Artificial Sequence
  Synthetic
cuuaacaauaugaugguaaca

SEQ ID NO: 29667 - RNA, 22 nt, Artificial Sequence
  Synthetic
ccuuaacaauaugaugguaaca

SEQ ID NO: 29668 - RNA, 23 nt, Artificial Sequence
  Synthetic
uccuuaacaauaugaugguaaca

SEQ ID NO: 29669 - RNA, 24 nt, Artificial Sequence
  Synthetic
uuccuuaacaauaugaugguaaca

SEQ ID NO: 29670 - RNA, 18 nt, Artificial Sequence
  Synthetic
uuacuuauugaauuaaca

SEQ ID NO: 29671 - RNA, 19 nt, Artificial Sequence
  Synthetic
uuuacuuauugaauuaaca

SEQ ID NO: 29672 - RNA, 20 nt, Artificial Sequence
  Synthetic
uuuuacuuauugaauuaaca

SEQ ID NO: 29673 - RNA, 22 nt, Artificial Sequence
  Synthetic
aguuuuacuuauugaauuaaca

SEQ ID NO: 29674 - RNA, 23 nt, Artificial Sequence
  Synthetic
uaguuuuacuuauugaauuaaca

SEQ ID NO: 29675 - RNA, 21 nt, Artificial Sequence
  Synthetic
caaugauuaaguucauuaaca

SEQ ID NO: 29676 - RNA, 22 nt, Artificial Sequence
  Synthetic
ucaaugauuaaguucauuaaca

SEQ ID NO: 29677 - RNA, 23 nt, Artificial Sequence
  Synthetic
uucaaugauuaaguucauuaaca

SEQ ID NO: 29678 - RNA, 24 nt, Artificial Sequence
  Synthetic
auucaaugauuaaguucauuaaca

SEQ ID NO: 29679 - RNA, 19 nt, Artificial Sequence
  Synthetic
ugugcccguuagauuaaca

SEQ ID NO: 29680 - RNA, 20 nt, Artificial Sequence
  Synthetic
augugcccguuagauuaaca

SEQ ID NO: 29681 - RNA, 21 nt, Artificial Sequence
  Synthetic
aaugugcccguuagauuaaca

SEQ ID NO: 29682 - RNA, 22 nt, Artificial Sequence
  Synthetic
caaugugcccguuagauuaaca

SEQ ID NO: 29683 - RNA, 23 nt, Artificial Sequence
  Synthetic
ucaaugugcccguuagauuaaca

SEQ ID NO: 29684 - RNA, 24 nt, Artificial Sequence
  Synthetic
aucaaugugcccguuagauuaaca

SEQ ID NO: 29685 - RNA, 18 nt, Artificial Sequence
  Synthetic
uuaggacuaugauuaaca

SEQ ID NO: 29686 - RNA, 19 nt, Artificial Sequence
  Synthetic
uuuaggacuaugauuaaca

SEQ ID NO: 29687 - RNA, 22 nt, Artificial Sequence
  Synthetic
ugguuuaggacuaugauuaaca

SEQ ID NO: 29688 - RNA, 23 nt, Artificial Sequence
  Synthetic
cugguuuaggacuaugauuaaca

SEQ ID NO: 29689 - RNA, 24 nt, Artificial Sequence
  Synthetic
ccugguuuaggacuaugauuaaca

SEQ ID NO: 29690 - RNA, 21 nt, Artificial Sequence
  Synthetic
cuauggucagccauauuaaca

SEQ ID NO: 29691 - RNA, 22 nt, Artificial Sequence
  Synthetic
ucuauggucagccauauuaaca

SEQ ID NO: 29692 - RNA, 24 nt, Artificial Sequence
  Synthetic
ugucuauggucagccauauuaaca

SEQ ID NO: 29693 - RNA, 18 nt, Artificial Sequence
  Synthetic
cauccuagccauaacaca

SEQ ID NO: 29694 - RNA, 19 nt, Artificial Sequence
  Synthetic
ucauccuagccauaacaca

SEQ ID NO: 29695 - RNA, 20 nt, Artificial Sequence
  Synthetic
aucauccuagccauaacaca

SEQ ID NO: 29696 - RNA, 21 nt, Artificial Sequence
  Synthetic
caucauccuagccauaacaca

SEQ ID NO: 29697 - RNA, 22 nt, Artificial Sequence
  Synthetic
ucaucauccuagccauaacaca

SEQ ID NO: 29698 - RNA, 23 nt, Artificial Sequence
  Synthetic
uucaucauccuagccauaacaca

SEQ ID NO: 29699 - RNA, 19 nt, Artificial Sequence
  Synthetic
agaagcauuuagacacaca

SEQ ID NO: 29700 - RNA, 20 nt, Artificial Sequence
  Synthetic
uagaagcauuuagacacaca

SEQ ID NO: 29701 - RNA, 21 nt, Artificial Sequence
  Synthetic
auagaagcauuuagacacaca

SEQ ID NO: 29702 - RNA, 22 nt, Artificial Sequence
  Synthetic
uauagaagcauuuagacacaca

SEQ ID NO: 29703 - RNA, 23 nt, Artificial Sequence
  Synthetic
auauagaagcauuuagacacaca

SEQ ID NO: 29704 - RNA, 24 nt, Artificial Sequence
  Synthetic
aauauagaagcauuuagacacaca

SEQ ID NO: 29705 - RNA, 22 nt, Artificial Sequence
  Synthetic
agaugggagccuccaucacaca

SEQ ID NO: 29706 - RNA, 23 nt, Artificial Sequence
  Synthetic
uagaugggagccuccaucacaca

SEQ ID NO: 29707 - RNA, 24 nt, Artificial Sequence
  Synthetic
cuagaugggagccuccaucacaca

SEQ ID NO: 29708 - RNA, 18 nt, Artificial Sequence
  Synthetic
uguugauagacagacaca

SEQ ID NO: 29709 - RNA, 19 nt, Artificial Sequence
  Synthetic
auguugauagacagacaca

SEQ ID NO: 29710 - RNA, 20 nt, Artificial Sequence
  Synthetic
uauguugauagacagacaca

SEQ ID NO: 29711 - RNA, 21 nt, Artificial Sequence
  Synthetic
uuauguugauagacagacaca

SEQ ID NO: 29712 - RNA, 22 nt, Artificial Sequence
  Synthetic
auuauguugauagacagacaca

SEQ ID NO: 29713 - RNA, 18 nt, Artificial Sequence
  Synthetic
uaaucuaugguagacaca

SEQ ID NO: 29714 - RNA, 19 nt, Artificial Sequence
  Synthetic
auaaucuaugguagacaca

SEQ ID NO: 29715 - RNA, 20 nt, Artificial Sequence
  Synthetic
aauaaucuaugguagacaca

SEQ ID NO: 29716 - RNA, 21 nt, Artificial Sequence
  Synthetic
uaauaaucuaugguagacaca

SEQ ID NO: 29717 - RNA, 22 nt, Artificial Sequence
  Synthetic
auaauaaucuaugguagacaca

SEQ ID NO: 29718 - RNA, 23 nt, Artificial Sequence
  Synthetic
uauaauaaucuaugguagacaca

SEQ ID NO: 29719 - RNA, 24 nt, Artificial Sequence
  Synthetic
auauaauaaucuaugguagacaca

SEQ ID NO: 29720 - RNA, 19 nt, Artificial Sequence
  Synthetic
uggguauuuguuagacaca

SEQ ID NO: 29721 - RNA, 20 nt, Artificial Sequence
  Synthetic
auggguauuuguuagacaca

SEQ ID NO: 29722 - RNA, 21 nt, Artificial Sequence
  Synthetic
aauggguauuuguuagacaca

SEQ ID NO: 29723 - RNA, 22 nt, Artificial Sequence
  Synthetic
caauggguauuuguuagacaca

SEQ ID NO: 29724 - RNA, 23 nt, Artificial Sequence
  Synthetic
ucaauggguauuuguuagacaca

SEQ ID NO: 29725 - RNA, 19 nt, Artificial Sequence
  Synthetic
uguucucaacccugacaca

SEQ ID NO: 29726 - RNA, 20 nt, Artificial Sequence
  Synthetic
cuguucucaacccugacaca

SEQ ID NO: 29727 - RNA, 21 nt, Artificial Sequence
  Synthetic
ucuguucucaacccugacaca

SEQ ID NO: 29728 - RNA, 22 nt, Artificial Sequence
  Synthetic
uucuguucucaacccugacaca

SEQ ID NO: 29729 - RNA, 23 nt, Artificial Sequence
  Synthetic
cuucuguucucaacccugacaca

SEQ ID NO: 29730 - RNA, 19 nt, Artificial Sequence
  Synthetic
uggugacccccuugacaca

SEQ ID NO: 29731 - RNA, 20 nt, Artificial Sequence
  Synthetic
uuggugacccccuugacaca

SEQ ID NO: 29732 - RNA, 21 nt, Artificial Sequence
  Synthetic
uuuggugacccccuugacaca

SEQ ID NO: 29733 - RNA, 22 nt, Artificial Sequence
  Synthetic
cuuuggugacccccuugacaca

SEQ ID NO: 29734 - RNA, 23 nt, Artificial Sequence
  Synthetic
acuuuggugacccccuugacaca

SEQ ID NO: 29735 - RNA, 24 nt, Artificial Sequence
  Synthetic
cacuuuggugacccccuugacaca

SEQ ID NO: 29736 - RNA, 19 nt, Artificial Sequence
  Synthetic
aguucucuucaucuacaca

SEQ ID NO: 29737 - RNA, 20 nt, Artificial Sequence
  Synthetic
caguucucuucaucuacaca

SEQ ID NO: 29738 - RNA, 21 nt, Artificial Sequence
  Synthetic
ucaguucucuucaucuacaca

SEQ ID NO: 29739 - RNA, 22 nt, Artificial Sequence
  Synthetic
uucaguucucuucaucuacaca

SEQ ID NO: 29740 - RNA, 23 nt, Artificial Sequence
  Synthetic
cuucaguucucuucaucuacaca

SEQ ID NO: 29741 - RNA, 24 nt, Artificial Sequence
  Synthetic
acuucaguucucuucaucuacaca

SEQ ID NO: 29742 - RNA, 18 nt, Artificial Sequence
  Synthetic
cuucuaccuuauuacaca

SEQ ID NO: 29743 - RNA, 19 nt, Artificial Sequence
  Synthetic
acuucuaccuuauuacaca

SEQ ID NO: 29744 - RNA, 20 nt, Artificial Sequence
  Synthetic
uacuucuaccuuauuacaca

SEQ ID NO: 29745 - RNA, 21 nt, Artificial Sequence
  Synthetic
cuacuucuaccuuauuacaca

SEQ ID NO: 29746 - RNA, 22 nt, Artificial Sequence
  Synthetic
ucuacuucuaccuuauuacaca

SEQ ID NO: 29747 - RNA, 23 nt, Artificial Sequence
  Synthetic
uucuacuucuaccuuauuacaca

SEQ ID NO: 29748 - RNA, 24 nt, Artificial Sequence
  Synthetic
uuucuacuucuaccuuauuacaca

SEQ ID NO: 29749 - RNA, 18 nt, Artificial Sequence
  Synthetic
cuaugaaauguaaccaca

SEQ ID NO: 29750 - RNA, 19 nt, Artificial Sequence
  Synthetic
ccuaugaaauguaaccaca

SEQ ID NO: 29751 - RNA, 20 nt, Artificial Sequence
  Synthetic
accuaugaaauguaaccaca

SEQ ID NO: 29752 - RNA, 21 nt, Artificial Sequence
  Synthetic
aaccuaugaaauguaaccaca

SEQ ID NO: 29753 - RNA, 22 nt, Artificial Sequence
  Synthetic
uaaccuaugaaauguaaccaca

SEQ ID NO: 29754 - RNA, 23 nt, Artificial Sequence
  Synthetic
cuaaccuaugaaauguaaccaca

SEQ ID NO: 29755 - RNA, 24 nt, Artificial Sequence
  Synthetic
acuaaccuaugaaauguaaccaca

SEQ ID NO: 29756 - RNA, 19 nt, Artificial Sequence
  Synthetic
aggccagaaauuaaccaca

SEQ ID NO: 29757 - RNA, 22 nt, Artificial Sequence
  Synthetic
uggaggccagaaauuaaccaca

SEQ ID NO: 29758 - RNA, 23 nt, Artificial Sequence
  Synthetic
auggaggccagaaauuaaccaca

SEQ ID NO: 29759 - RNA, 24 nt, Artificial Sequence
  Synthetic
cauggaggccagaaauuaaccaca

SEQ ID NO: 29760 - RNA, 18 nt, Artificial Sequence
  Synthetic
aaaugcaggcacaccaca

SEQ ID NO: 29761 - RNA, 19 nt, Artificial Sequence
  Synthetic
aaaaugcaggcacaccaca

SEQ ID NO: 29762 - RNA, 21 nt, Artificial Sequence
  Synthetic
ugaaaaugcaggcacaccaca

SEQ ID NO: 29763 - RNA, 23 nt, Artificial Sequence
  Synthetic
agugaaaaugcaggcacaccaca

SEQ ID NO: 29764 - RNA, 24 nt, Artificial Sequence
  Synthetic
cagugaaaaugcaggcacaccaca

SEQ ID NO: 29765 - RNA, 18 nt, Artificial Sequence
  Synthetic
caaacagguggcaccaca

SEQ ID NO: 29766 - RNA, 19 nt, Artificial Sequence
  Synthetic
ccaaacagguggcaccaca

SEQ ID NO: 29767 - RNA, 20 nt, Artificial Sequence
  Synthetic
uccaaacagguggcaccaca

SEQ ID NO: 29768 - RNA, 21 nt, Artificial Sequence
  Synthetic
uuccaaacagguggcaccaca

SEQ ID NO: 29769 - RNA, 22 nt, Artificial Sequence
  Synthetic
uuuccaaacagguggcaccaca

SEQ ID NO: 29770 - RNA, 23 nt, Artificial Sequence
  Synthetic
cuuuccaaacagguggcaccaca

SEQ ID NO: 29771 - RNA, 24 nt, Artificial Sequence
  Synthetic
ucuuuccaaacagguggcaccaca

SEQ ID NO: 29772 - RNA, 19 nt, Artificial Sequence
  Synthetic
aggauguuagaaagccaca

SEQ ID NO: 29773 - RNA, 21 nt, Artificial Sequence
  Synthetic
ugaggauguuagaaagccaca

SEQ ID NO: 29774 - RNA, 22 nt, Artificial Sequence
  Synthetic
augaggauguuagaaagccaca

SEQ ID NO: 29775 - RNA, 24 nt, Artificial Sequence
  Synthetic
ugaugaggauguuagaaagccaca

SEQ ID NO: 29776 - RNA, 19 nt, Artificial Sequence
  Synthetic
agugacugcccaagccaca

SEQ ID NO: 29777 - RNA, 20 nt, Artificial Sequence
  Synthetic
aagugacugcccaagccaca

SEQ ID NO: 29778 - RNA, 22 nt, Artificial Sequence
  Synthetic
agaagugacugcccaagccaca

SEQ ID NO: 29779 - RNA, 24 nt, Artificial Sequence
  Synthetic
agagaagugacugcccaagccaca

SEQ ID NO: 29780 - RNA, 18 nt, Artificial Sequence
  Synthetic
caaggaaaaguagccaca

SEQ ID NO: 29781 - RNA, 19 nt, Artificial Sequence
  Synthetic
ccaaggaaaaguagccaca

SEQ ID NO: 29782 - RNA, 21 nt, Artificial Sequence
  Synthetic
ugccaaggaaaaguagccaca

SEQ ID NO: 29783 - RNA, 23 nt, Artificial Sequence
  Synthetic
ugugccaaggaaaaguagccaca

SEQ ID NO: 29784 - RNA, 24 nt, Artificial Sequence
  Synthetic
augugccaaggaaaaguagccaca

SEQ ID NO: 29785 - RNA, 18 nt, Artificial Sequence
  Synthetic
cucuaaacuuuagccaca

SEQ ID NO: 29786 - RNA, 19 nt, Artificial Sequence
  Synthetic
ucucuaaacuuuagccaca

SEQ ID NO: 29787 - RNA, 20 nt, Artificial Sequence
  Synthetic
cucucuaaacuuuagccaca

SEQ ID NO: 29788 - RNA, 21 nt, Artificial Sequence
  Synthetic
ucucucuaaacuuuagccaca

SEQ ID NO: 29789 - RNA, 22 nt, Artificial Sequence
  Synthetic
uucucucuaaacuuuagccaca

SEQ ID NO: 29790 - RNA, 23 nt, Artificial Sequence
  Synthetic
uuucucucuaaacuuuagccaca

SEQ ID NO: 29791 - RNA, 24 nt, Artificial Sequence
  Synthetic
uuuucucucuaaacuuuagccaca

SEQ ID NO: 29792 - RNA, 18 nt, Artificial Sequence
  Synthetic
cagucucaaaaggccaca

SEQ ID NO: 29793 - RNA, 19 nt, Artificial Sequence
  Synthetic
acagucucaaaaggccaca

SEQ ID NO: 29794 - RNA, 20 nt, Artificial Sequence
  Synthetic
uacagucucaaaaggccaca

SEQ ID NO: 29795 - RNA, 21 nt, Artificial Sequence
  Synthetic
auacagucucaaaaggccaca

SEQ ID NO: 29796 - RNA, 22 nt, Artificial Sequence
  Synthetic
aauacagucucaaaaggccaca

SEQ ID NO: 29797 - RNA, 23 nt, Artificial Sequence
  Synthetic
uaauacagucucaaaaggccaca

SEQ ID NO: 29798 - RNA, 24 nt, Artificial Sequence
  Synthetic
auaauacagucucaaaaggccaca

SEQ ID NO: 29799 - RNA, 18 nt, Artificial Sequence
  Synthetic
acccuucuucaauccaca

SEQ ID NO: 29800 - RNA, 19 nt, Artificial Sequence
  Synthetic
uacccuucuucaauccaca

SEQ ID NO: 29801 - RNA, 20 nt, Artificial Sequence
  Synthetic
auacccuucuucaauccaca

SEQ ID NO: 29802 - RNA, 21 nt, Artificial Sequence
  Synthetic
uauacccuucuucaauccaca

SEQ ID NO: 29803 - RNA, 22 nt, Artificial Sequence
  Synthetic
uuauacccuucuucaauccaca

SEQ ID NO: 29804 - RNA, 23 nt, Artificial Sequence
  Synthetic
uuuauacccuucuucaauccaca

SEQ ID NO: 29805 - RNA, 24 nt, Artificial Sequence
  Synthetic
auuuauacccuucuucaauccaca

SEQ ID NO: 29806 - RNA, 18 nt, Artificial Sequence
  Synthetic
auaggauagcccuccaca

SEQ ID NO: 29807 - RNA, 19 nt, Artificial Sequence
  Synthetic
cauaggauagcccuccaca

SEQ ID NO: 29808 - RNA, 18 nt, Artificial Sequence
  Synthetic
uuuacuuuuccuuccaca

SEQ ID NO: 29809 - RNA, 19 nt, Artificial Sequence
  Synthetic
cuuuacuuuuccuuccaca

SEQ ID NO: 29810 - RNA, 20 nt, Artificial Sequence
  Synthetic
ucuuuacuuuuccuuccaca

SEQ ID NO: 29811 - RNA, 21 nt, Artificial Sequence
  Synthetic
uucuuuacuuuuccuuccaca

SEQ ID NO: 29812 - RNA, 22 nt, Artificial Sequence
  Synthetic
uuucuuuacuuuuccuuccaca

SEQ ID NO: 29813 - RNA, 23 nt, Artificial Sequence
  Synthetic
auuucuuuacuuuuccuuccaca

SEQ ID NO: 29814 - RNA, 24 nt, Artificial Sequence
  Synthetic
uauuucuuuacuuuuccuuccaca

SEQ ID NO: 29815 - RNA, 18 nt, Artificial Sequence
  Synthetic
uuuccauggccaagcaca

SEQ ID NO: 29816 - RNA, 19 nt, Artificial Sequence
  Synthetic
cuuuccauggccaagcaca

SEQ ID NO: 29817 - RNA, 22 nt, Artificial Sequence
  Synthetic
uggcuuuccauggccaagcaca

SEQ ID NO: 29818 - RNA, 23 nt, Artificial Sequence
  Synthetic
uuggcuuuccauggccaagcaca

SEQ ID NO: 29819 - RNA, 24 nt, Artificial Sequence
  Synthetic
uuuggcuuuccauggccaagcaca

SEQ ID NO: 29820 - RNA, 18 nt, Artificial Sequence
  Synthetic
aagcccuacauacgcaca

SEQ ID NO: 29821 - RNA, 19 nt, Artificial Sequence
  Synthetic
uaagcccuacauacgcaca

SEQ ID NO: 29822 - RNA, 20 nt, Artificial Sequence
  Synthetic
auaagcccuacauacgcaca

SEQ ID NO: 29823 - RNA, 21 nt, Artificial Sequence
  Synthetic
uauaagcccuacauacgcaca

SEQ ID NO: 29824 - RNA, 23 nt, Artificial Sequence
  Synthetic
aguauaagcccuacauacgcaca

SEQ ID NO: 29825 - RNA, 24 nt, Artificial Sequence
  Synthetic
aaguauaagcccuacauacgcaca

SEQ ID NO: 29826 - RNA, 20 nt, Artificial Sequence
  Synthetic
uggcucucguggaaggcaca

SEQ ID NO: 29827 - RNA, 21 nt, Artificial Sequence
  Synthetic
auggcucucguggaaggcaca

SEQ ID NO: 29828 - RNA, 22 nt, Artificial Sequence
  Synthetic
aauggcucucguggaaggcaca

SEQ ID NO: 29829 - RNA, 23 nt, Artificial Sequence
  Synthetic
aaauggcucucguggaaggcaca

SEQ ID NO: 29830 - RNA, 24 nt, Artificial Sequence
  Synthetic
caaauggcucucguggaaggcaca

SEQ ID NO: 29831 - RNA, 18 nt, Artificial Sequence
  Synthetic
uaaaauuugucuugcaca

SEQ ID NO: 29832 - RNA, 19 nt, Artificial Sequence
  Synthetic
uuaaaauuugucuugcaca

SEQ ID NO: 29833 - RNA, 20 nt, Artificial Sequence
  Synthetic
uuuaaaauuugucuugcaca

SEQ ID NO: 29834 - RNA, 21 nt, Artificial Sequence
  Synthetic
uuuuaaaauuugucuugcaca

SEQ ID NO: 29835 - RNA, 22 nt, Artificial Sequence
  Synthetic
uuuuuaaaauuugucuugcaca

SEQ ID NO: 29836 - RNA, 23 nt, Artificial Sequence
  Synthetic
cuuuuuaaaauuugucuugcaca

SEQ ID NO: 29837 - RNA, 24 nt, Artificial Sequence
  Synthetic
ucuuuuuaaaauuugucuugcaca

SEQ ID NO: 29838 - RNA, 18 nt, Artificial Sequence
  Synthetic
aguucaaaaguaaucaca

SEQ ID NO: 29839 - RNA, 19 nt, Artificial Sequence
  Synthetic
aaguucaaaaguaaucaca

SEQ ID NO: 29840 - RNA, 20 nt, Artificial Sequence
  Synthetic
caaguucaaaaguaaucaca

SEQ ID NO: 29841 - RNA, 21 nt, Artificial Sequence
  Synthetic
ccaaguucaaaaguaaucaca

SEQ ID NO: 29842 - RNA, 22 nt, Artificial Sequence
  Synthetic
accaaguucaaaaguaaucaca

SEQ ID NO: 29843 - RNA, 23 nt, Artificial Sequence
  Synthetic
uaccaaguucaaaaguaaucaca

SEQ ID NO: 29844 - RNA, 24 nt, Artificial Sequence
  Synthetic
cuaccaaguucaaaaguaaucaca

SEQ ID NO: 29845 - RNA, 21 nt, Artificial Sequence
  Synthetic
auaggcaagggcaagaucaca

SEQ ID NO: 29846 - RNA, 22 nt, Artificial Sequence
  Synthetic
uauaggcaagggcaagaucaca

SEQ ID NO: 29847 - RNA, 24 nt, Artificial Sequence
  Synthetic
aguauaggcaagggcaagaucaca

SEQ ID NO: 29848 - RNA, 18 nt, Artificial Sequence
  Synthetic
aauuaaaguaauaucaca

SEQ ID NO: 29849 - RNA, 19 nt, Artificial Sequence
  Synthetic
uaauuaaaguaauaucaca

SEQ ID NO: 29850 - RNA, 20 nt, Artificial Sequence
  Synthetic
uuaauuaaaguaauaucaca

SEQ ID NO: 29851 - RNA, 21 nt, Artificial Sequence
  Synthetic
auuaauuaaaguaauaucaca

SEQ ID NO: 29852 - RNA, 22 nt, Artificial Sequence
  Synthetic
uauuaauuaaaguaauaucaca

SEQ ID NO: 29853 - RNA, 24 nt, Artificial Sequence
  Synthetic
aguauuaauuaaaguaauaucaca

SEQ ID NO: 29854 - RNA, 18 nt, Artificial Sequence
  Synthetic
cccuuggcuacacucaca

SEQ ID NO: 29855 - RNA, 19 nt, Artificial Sequence
  Synthetic
acccuuggcuacacucaca

SEQ ID NO: 29856 - RNA, 21 nt, Artificial Sequence
  Synthetic
agacccuuggcuacacucaca

SEQ ID NO: 29857 - RNA, 22 nt, Artificial Sequence
  Synthetic
uagacccuuggcuacacucaca

SEQ ID NO: 29858 - RNA, 23 nt, Artificial Sequence
  Synthetic
uuagacccuuggcuacacucaca

SEQ ID NO: 29859 - RNA, 18 nt, Artificial Sequence
  Synthetic
aauauucauagacucaca

SEQ ID NO: 29860 - RNA, 19 nt, Artificial Sequence
  Synthetic
aaauauucauagacucaca

SEQ ID NO: 29861 - RNA, 21 nt, Artificial Sequence
  Synthetic
ugaaauauucauagacucaca

SEQ ID NO: 29862 - RNA, 23 nt, Artificial Sequence
  Synthetic
ugugaaauauucauagacucaca

SEQ ID NO: 29863 - RNA, 24 nt, Artificial Sequence
  Synthetic
uugugaaauauucauagacucaca

SEQ ID NO: 29864 - RNA, 18 nt, Artificial Sequence
  Synthetic
aacacguggucucucaca

SEQ ID NO: 29865 - RNA, 19 nt, Artificial Sequence
  Synthetic
aaacacguggucucucaca

SEQ ID NO: 29866 - RNA, 20 nt, Artificial Sequence
  Synthetic
caaacacguggucucucaca

SEQ ID NO: 29867 - RNA, 24 nt, Artificial Sequence
  Synthetic
ugggcaaacacguggucucucaca

SEQ ID NO: 29868 - RNA, 18 nt, Artificial Sequence
  Synthetic
caucccaguaaagucaca

SEQ ID NO: 29869 - RNA, 19 nt, Artificial Sequence
  Synthetic
acaucccaguaaagucaca

SEQ ID NO: 29870 - RNA, 21 nt, Artificial Sequence
  Synthetic
agacaucccaguaaagucaca

SEQ ID NO: 29871 - RNA, 22 nt, Artificial Sequence
  Synthetic
uagacaucccaguaaagucaca

SEQ ID NO: 29872 - RNA, 23 nt, Artificial Sequence
  Synthetic
uuagacaucccaguaaagucaca

SEQ ID NO: 29873 - RNA, 19 nt, Artificial Sequence
  Synthetic
ugucagccaagaagucaca

SEQ ID NO: 29874 - RNA, 21 nt, Artificial Sequence
  Synthetic
ugugucagccaagaagucaca

SEQ ID NO: 29875 - RNA, 22 nt, Artificial Sequence
  Synthetic
uugugucagccaagaagucaca

SEQ ID NO: 29876 - RNA, 23 nt, Artificial Sequence
  Synthetic
auugugucagccaagaagucaca

SEQ ID NO: 29877 - RNA, 24 nt, Artificial Sequence
  Synthetic
aauugugucagccaagaagucaca

SEQ ID NO: 29878 - RNA, 21 nt, Artificial Sequence
  Synthetic
uaccuuaauuuugacgucaca

SEQ ID NO: 29879 - RNA, 22 nt, Artificial Sequence
  Synthetic
auaccuuaauuuugacgucaca

SEQ ID NO: 29880 - RNA, 23 nt, Artificial Sequence
  Synthetic
uauaccuuaauuuugacgucaca

SEQ ID NO: 29881 - RNA, 24 nt, Artificial Sequence
  Synthetic
auauaccuuaauuuugacgucaca

SEQ ID NO: 29882 - RNA, 18 nt, Artificial Sequence
  Synthetic
auucucaaagaggucaca

SEQ ID NO: 29883 - RNA, 19 nt, Artificial Sequence
  Synthetic
uauucucaaagaggucaca

SEQ ID NO: 29884 - RNA, 20 nt, Artificial Sequence
  Synthetic
cuauucucaaagaggucaca

SEQ ID NO: 29885 - RNA, 21 nt, Artificial Sequence
  Synthetic
acuauucucaaagaggucaca

SEQ ID NO: 29886 - RNA, 22 nt, Artificial Sequence
  Synthetic
uacuauucucaaagaggucaca

SEQ ID NO: 29887 - RNA, 23 nt, Artificial Sequence
  Synthetic
cuacuauucucaaagaggucaca

SEQ ID NO: 29888 - RNA, 24 nt, Artificial Sequence
  Synthetic
ucuacuauucucaaagaggucaca

SEQ ID NO: 29889 - RNA, 21 nt, Artificial Sequence
  Synthetic
agugcauucuaaaaugucaca

SEQ ID NO: 29890 - RNA, 22 nt, Artificial Sequence
  Synthetic
cagugcauucuaaaaugucaca

SEQ ID NO: 29891 - RNA, 24 nt, Artificial Sequence
  Synthetic
ugcagugcauucuaaaaugucaca

SEQ ID NO: 29892 - RNA, 18 nt, Artificial Sequence
  Synthetic
uaguauuauacauucaca

SEQ ID NO: 29893 - RNA, 19 nt, Artificial Sequence
  Synthetic
auaguauuauacauucaca

SEQ ID NO: 29894 - RNA, 20 nt, Artificial Sequence
  Synthetic
aauaguauuauacauucaca

SEQ ID NO: 29895 - RNA, 22 nt, Artificial Sequence
  Synthetic
ugaauaguauuauacauucaca

SEQ ID NO: 29896 - RNA, 23 nt, Artificial Sequence
  Synthetic
cugaauaguauuauacauucaca

SEQ ID NO: 29897 - RNA, 24 nt, Artificial Sequence
  Synthetic
ucugaauaguauuauacauucaca

SEQ ID NO: 29898 - RNA, 23 nt, Artificial Sequence
  Synthetic
agguucaggaagaauuauucaca

SEQ ID NO: 29899 - RNA, 24 nt, Artificial Sequence
  Synthetic
uagguucaggaagaauuauucaca

SEQ ID NO: 29900 - RNA, 18 nt, Artificial Sequence
  Synthetic
ccuccauggcauuucaca

SEQ ID NO: 29901 - RNA, 20 nt, Artificial Sequence
  Synthetic
ugccuccauggcauuucaca

SEQ ID NO: 29902 - RNA, 21 nt, Artificial Sequence
  Synthetic
cugccuccauggcauuucaca

SEQ ID NO: 29903 - RNA, 22 nt, Artificial Sequence
  Synthetic
ccugccuccauggcauuucaca

SEQ ID NO: 29904 - RNA, 24 nt, Artificial Sequence
  Synthetic
agccugccuccauggcauuucaca

SEQ ID NO: 29905 - RNA, 19 nt, Artificial Sequence
  Synthetic
ugaaggauucacuuucaca

SEQ ID NO: 29906 - RNA, 20 nt, Artificial Sequence
  Synthetic
cugaaggauucacuuucaca

SEQ ID NO: 29907 - RNA, 19 nt, Artificial Sequence
  Synthetic
uggcauuuugacuuucaca

SEQ ID NO: 29908 - RNA, 20 nt, Artificial Sequence
  Synthetic
auggcauuuugacuuucaca

SEQ ID NO: 29909 - RNA, 22 nt, Artificial Sequence
  Synthetic
ugauggcauuuugacuuucaca

SEQ ID NO: 29910 - RNA, 23 nt, Artificial Sequence
  Synthetic
augauggcauuuugacuuucaca

SEQ ID NO: 29911 - RNA, 24 nt, Artificial Sequence
  Synthetic
caugauggcauuuugacuuucaca

SEQ ID NO: 29912 - RNA, 21 nt, Artificial Sequence
  Synthetic
uguguuacuuuuauuuucaca

SEQ ID NO: 29913 - RNA, 22 nt, Artificial Sequence
  Synthetic
uuguguuacuuuuauuuucaca

SEQ ID NO: 29914 - RNA, 23 nt, Artificial Sequence
  Synthetic
cuuguguuacuuuuauuuucaca

SEQ ID NO: 29915 - RNA, 24 nt, Artificial Sequence
  Synthetic
ucuuguguuacuuuuauuuucaca

SEQ ID NO: 29916 - RNA, 18 nt, Artificial Sequence
  Synthetic
aaggcguagaaaaagaca

SEQ ID NO: 29917 - RNA, 19 nt, Artificial Sequence
  Synthetic
uaaggcguagaaaaagaca

SEQ ID NO: 29918 - RNA, 20 nt, Artificial Sequence
  Synthetic
cuaaggcguagaaaaagaca

SEQ ID NO: 29919 - RNA, 21 nt, Artificial Sequence
  Synthetic
ccuaaggcguagaaaaagaca

SEQ ID NO: 29920 - RNA, 22 nt, Artificial Sequence
  Synthetic
uccuaaggcguagaaaaagaca

SEQ ID NO: 29921 - RNA, 23 nt, Artificial Sequence
  Synthetic
uuccuaaggcguagaaaaagaca

SEQ ID NO: 29922 - RNA, 24 nt, Artificial Sequence
  Synthetic
uuuccuaaggcguagaaaaagaca

SEQ ID NO: 29923 - RNA, 18 nt, Artificial Sequence
  Synthetic
uauacaguaacaaagaca

SEQ ID NO: 29924 - RNA, 19 nt, Artificial Sequence
  Synthetic
cuauacaguaacaaagaca

SEQ ID NO: 29925 - RNA, 20 nt, Artificial Sequence
  Synthetic
acuauacaguaacaaagaca

SEQ ID NO: 29926 - RNA, 21 nt, Artificial Sequence
  Synthetic
cacuauacaguaacaaagaca

SEQ ID NO: 29927 - RNA, 23 nt, Artificial Sequence
  Synthetic
agcacuauacaguaacaaagaca

SEQ ID NO: 29928 - RNA, 24 nt, Artificial Sequence
  Synthetic
cagcacuauacaguaacaaagaca

SEQ ID NO: 29929 - RNA, 21 nt, Artificial Sequence
  Synthetic
agaaagaaaccaagaaagaca

SEQ ID NO: 29930 - RNA, 22 nt, Artificial Sequence
  Synthetic
aagaaagaaaccaagaaagaca

SEQ ID NO: 29931 - RNA, 24 nt, Artificial Sequence
  Synthetic
ugaagaaagaaaccaagaaagaca

SEQ ID NO: 29932 - RNA, 18 nt, Artificial Sequence
  Synthetic
uaaaccaguugaaagaca

SEQ ID NO: 29933 - RNA, 19 nt, Artificial Sequence
  Synthetic
auaaaccaguugaaagaca

SEQ ID NO: 29934 - RNA, 20 nt, Artificial Sequence
  Synthetic
aauaaaccaguugaaagaca

SEQ ID NO: 29935 - RNA, 22 nt, Artificial Sequence
  Synthetic
ugaauaaaccaguugaaagaca

SEQ ID NO: 29936 - RNA, 23 nt, Artificial Sequence
  Synthetic
augaauaaaccaguugaaagaca

SEQ ID NO: 29937 - RNA, 24 nt, Artificial Sequence
  Synthetic
aaugaauaaaccaguugaaagaca

SEQ ID NO: 29938 - RNA, 18 nt, Artificial Sequence
  Synthetic
ccuuuggcaaccaagaca

SEQ ID NO: 29939 - RNA, 19 nt, Artificial Sequence
  Synthetic
uccuuuggcaaccaagaca

SEQ ID NO: 29940 - RNA, 20 nt, Artificial Sequence
  Synthetic
cuccuuuggcaaccaagaca

SEQ ID NO: 29941 - RNA, 21 nt, Artificial Sequence
  Synthetic
ccuccuuuggcaaccaagaca

SEQ ID NO: 29942 - RNA, 22 nt, Artificial Sequence
  Synthetic
cccuccuuuggcaaccaagaca

SEQ ID NO: 29943 - RNA, 23 nt, Artificial Sequence
  Synthetic
ccccuccuuuggcaaccaagaca

SEQ ID NO: 29944 - RNA, 24 nt, Artificial Sequence
  Synthetic
uccccuccuuuggcaaccaagaca

SEQ ID NO: 29945 - RNA, 18 nt, Artificial Sequence
  Synthetic
cacuguuuccccaagaca

SEQ ID NO: 29946 - RNA, 19 nt, Artificial Sequence
  Synthetic
ucacuguuuccccaagaca

SEQ ID NO: 29947 - RNA, 21 nt, Artificial Sequence
  Synthetic
agucacuguuuccccaagaca

SEQ ID NO: 29948 - RNA, 22 nt, Artificial Sequence
  Synthetic
uagucacuguuuccccaagaca

SEQ ID NO: 29949 - RNA, 23 nt, Artificial Sequence
  Synthetic
uuagucacuguuuccccaagaca

SEQ ID NO: 29950 - RNA, 18 nt, Artificial Sequence
  Synthetic
uuuaaaauugagaagaca

SEQ ID NO: 29951 - RNA, 19 nt, Artificial Sequence
  Synthetic
uuuuaaaauugagaagaca

SEQ ID NO: 29952 - RNA, 20 nt, Artificial Sequence
  Synthetic
cuuuuaaaauugagaagaca

SEQ ID NO: 29953 - RNA, 21 nt, Artificial Sequence
  Synthetic
ucuuuuaaaauugagaagaca

SEQ ID NO: 29954 - RNA, 22 nt, Artificial Sequence
  Synthetic
uucuuuuaaaauugagaagaca

SEQ ID NO: 29955 - RNA, 23 nt, Artificial Sequence
  Synthetic
uuucuuuuaaaauugagaagaca

SEQ ID NO: 29956 - RNA, 24 nt, Artificial Sequence
  Synthetic
uuuucuuuuaaaauugagaagaca

SEQ ID NO: 29957 - RNA, 21 nt, Artificial Sequence
  Synthetic
cucccacaaaggaggaagaca

SEQ ID NO: 29958 - RNA, 22 nt, Artificial Sequence
  Synthetic
ucucccacaaaggaggaagaca

SEQ ID NO: 29959 - RNA, 23 nt, Artificial Sequence
  Synthetic
cucucccacaaaggaggaagaca

SEQ ID NO: 29960 - RNA, 24 nt, Artificial Sequence
  Synthetic
acucucccacaaaggaggaagaca

SEQ ID NO: 29961 - RNA, 18 nt, Artificial Sequence
  Synthetic
auuaucacuuugaagaca

SEQ ID NO: 29962 - RNA, 19 nt, Artificial Sequence
  Synthetic
uauuaucacuuugaagaca

SEQ ID NO: 29963 - RNA, 20 nt, Artificial Sequence
  Synthetic
auauuaucacuuugaagaca

SEQ ID NO: 29964 - RNA, 21 nt, Artificial Sequence
  Synthetic
aauauuaucacuuugaagaca

SEQ ID NO: 29965 - RNA, 23 nt, Artificial Sequence
  Synthetic
ugaauauuaucacuuugaagaca

SEQ ID NO: 29966 - RNA, 18 nt, Artificial Sequence
  Synthetic
cuugggaaggaacagaca

SEQ ID NO: 29967 - RNA, 19 nt, Artificial Sequence
  Synthetic
ucuugggaaggaacagaca

SEQ ID NO: 29968 - RNA, 22 nt, Artificial Sequence
  Synthetic
uggucuugggaaggaacagaca

SEQ ID NO: 29969 - RNA, 23 nt, Artificial Sequence
  Synthetic
cuggucuugggaaggaacagaca

SEQ ID NO: 29970 - RNA, 24 nt, Artificial Sequence
  Synthetic
ucuggucuugggaaggaacagaca

SEQ ID NO: 29971 - RNA, 19 nt, Artificial Sequence
  Synthetic
ugaugcucaaggacagaca

SEQ ID NO: 29972 - RNA, 20 nt, Artificial Sequence
  Synthetic
augaugcucaaggacagaca

SEQ ID NO: 29973 - RNA, 22 nt, Artificial Sequence
  Synthetic
agaugaugcucaaggacagaca

SEQ ID NO: 29974 - RNA, 24 nt, Artificial Sequence
  Synthetic
agagaugaugcucaaggacagaca

SEQ ID NO: 29975 - RNA, 18 nt, Artificial Sequence
  Synthetic
acucuaccacugcagaca

SEQ ID NO: 29976 - RNA, 19 nt, Artificial Sequence
  Synthetic
cacucuaccacugcagaca

SEQ ID NO: 29977 - RNA, 20 nt, Artificial Sequence
  Synthetic
ccacucuaccacugcagaca

SEQ ID NO: 29978 - RNA, 21 nt, Artificial Sequence
  Synthetic
accacucuaccacugcagaca

SEQ ID NO: 29979 - RNA, 22 nt, Artificial Sequence
  Synthetic
caccacucuaccacugcagaca

SEQ ID NO: 29980 - RNA, 24 nt, Artificial Sequence
  Synthetic
ugcaccacucuaccacugcagaca

SEQ ID NO: 29981 - RNA, 18 nt, Artificial Sequence
  Synthetic
ugacucaaguuagagaca

SEQ ID NO: 29982 - RNA, 22 nt, Artificial Sequence
  Synthetic
agggugacucaaguuagagaca

SEQ ID NO: 29983 - RNA, 23 nt, Artificial Sequence
  Synthetic
cagggugacucaaguuagagaca

SEQ ID NO: 29984 - RNA, 20 nt, Artificial Sequence
  Synthetic
ugguucuaaaaagggagaca

SEQ ID NO: 29985 - RNA, 21 nt, Artificial Sequence
  Synthetic
uugguucuaaaaagggagaca

SEQ ID NO: 29986 - RNA, 23 nt, Artificial Sequence
  Synthetic
uguugguucuaaaaagggagaca

SEQ ID NO: 29987 - RNA, 24 nt, Artificial Sequence
  Synthetic
auguugguucuaaaaagggagaca

SEQ ID NO: 29988 - RNA, 18 nt, Artificial Sequence
  Synthetic
auuuucuuucuggagaca

SEQ ID NO: 29989 - RNA, 19 nt, Artificial Sequence
  Synthetic
cauuuucuuucuggagaca

SEQ ID NO: 29990 - RNA, 20 nt, Artificial Sequence
  Synthetic
acauuuucuuucuggagaca

SEQ ID NO: 29991 - RNA, 18 nt, Artificial Sequence
  Synthetic
aucuuauuugcugagaca

SEQ ID NO: 29992 - RNA, 21 nt, Artificial Sequence
  Synthetic
uggaucuuauuugcugagaca

SEQ ID NO: 29993 - RNA, 22 nt, Artificial Sequence
  Synthetic
cuggaucuuauuugcugagaca

SEQ ID NO: 29994 - RNA, 23 nt, Artificial Sequence
  Synthetic
acuggaucuuauuugcugagaca

SEQ ID NO: 29995 - RNA, 24 nt, Artificial Sequence
  Synthetic
cacuggaucuuauuugcugagaca

SEQ ID NO: 29996 - RNA, 18 nt, Artificial Sequence
  Synthetic
aaucugucauuuaggaca

SEQ ID NO: 29997 - RNA, 19 nt, Artificial Sequence
  Synthetic
uaaucugucauuuaggaca

SEQ ID NO: 29998 - RNA, 21 nt, Artificial Sequence
  Synthetic
aguaaucugucauuuaggaca

SEQ ID NO: 29999 - RNA, 22 nt, Artificial Sequence
  Synthetic
uaguaaucugucauuuaggaca

SEQ ID NO: 30000 - RNA, 23 nt, Artificial Sequence
  Synthetic
auaguaaucugucauuuaggaca

SEQ ID NO: 30001 - RNA, 18 nt, Artificial Sequence
  Synthetic
ucuuucuuggaagggaca

SEQ ID NO: 30002 - RNA, 19 nt, Artificial Sequence
  Synthetic
uucuuucuuggaagggaca

SEQ ID NO: 30003 - RNA, 20 nt, Artificial Sequence
  Synthetic
uuucuuucuuggaagggaca

SEQ ID NO: 30004 - RNA, 21 nt, Artificial Sequence
  Synthetic
auuucuuucuuggaagggaca

SEQ ID NO: 30005 - RNA, 22 nt, Artificial Sequence
  Synthetic
cauuucuuucuuggaagggaca

SEQ ID NO: 30006 - RNA, 23 nt, Artificial Sequence
  Synthetic
ccauuucuuucuuggaagggaca

SEQ ID NO: 30007 - RNA, 24 nt, Artificial Sequence
  Synthetic
uccauuucuuucuuggaagggaca

SEQ ID NO: 30008 - RNA, 18 nt, Artificial Sequence
  Synthetic
ccuaacucugaggggaca

SEQ ID NO: 30009 - RNA, 20 nt, Artificial Sequence
  Synthetic
ugccuaacucugaggggaca

SEQ ID NO: 30010 - RNA, 21 nt, Artificial Sequence
  Synthetic
augccuaacucugaggggaca

SEQ ID NO: 30011 - RNA, 22 nt, Artificial Sequence
  Synthetic
caugccuaacucugaggggaca

SEQ ID NO: 30012 - RNA, 23 nt, Artificial Sequence
  Synthetic
ucaugccuaacucugaggggaca

SEQ ID NO: 30013 - RNA, 18 nt, Artificial Sequence
  Synthetic
ccucccacuguggggaca

SEQ ID NO: 30014 - RNA, 19 nt, Artificial Sequence
  Synthetic
uccucccacuguggggaca

SEQ ID NO: 30015 - RNA, 20 nt, Artificial Sequence
  Synthetic
cuccucccacuguggggaca

SEQ ID NO: 30016 - RNA, 22 nt, Artificial Sequence
  Synthetic
ugcuccucccacuguggggaca

SEQ ID NO: 30017 - RNA, 23 nt, Artificial Sequence
  Synthetic
augcuccucccacuguggggaca

SEQ ID NO: 30018 - RNA, 24 nt, Artificial Sequence
  Synthetic
caugcuccucccacuguggggaca

SEQ ID NO: 30019 - RNA, 18 nt, Artificial Sequence
  Synthetic
uuuuuaaaguuugggaca

SEQ ID NO: 30020 - RNA, 19 nt, Artificial Sequence
  Synthetic
uuuuuuaaaguuugggaca

SEQ ID NO: 30021 - RNA, 21 nt, Artificial Sequence
  Synthetic
uguuuuuuaaaguuugggaca

SEQ ID NO: 30022 - RNA, 22 nt, Artificial Sequence
  Synthetic
auguuuuuuaaaguuugggaca

SEQ ID NO: 30023 - RNA, 23 nt, Artificial Sequence
  Synthetic
aauguuuuuuaaaguuugggaca

SEQ ID NO: 30024 - RNA, 24 nt, Artificial Sequence
  Synthetic
aaauguuuuuuaaaguuugggaca

SEQ ID NO: 30025 - RNA, 18 nt, Artificial Sequence
  Synthetic
ugaaggaaugaauggaca

SEQ ID NO: 30026 - RNA, 19 nt, Artificial Sequence
  Synthetic
cugaaggaaugaauggaca

SEQ ID NO: 30027 - RNA, 20 nt, Artificial Sequence
  Synthetic
ccugaaggaaugaauggaca

SEQ ID NO: 30028 - RNA, 21 nt, Artificial Sequence
  Synthetic
uccugaaggaaugaauggaca

SEQ ID NO: 30029 - RNA, 22 nt, Artificial Sequence
  Synthetic
auccugaaggaaugaauggaca

SEQ ID NO: 30030 - RNA, 23 nt, Artificial Sequence
  Synthetic
uauccugaaggaaugaauggaca

SEQ ID NO: 30031 - RNA, 24 nt, Artificial Sequence
  Synthetic
auauccugaaggaaugaauggaca

SEQ ID NO: 30032 - RNA, 21 nt, Artificial Sequence
  Synthetic
auaaacauguacacauggaca

SEQ ID NO: 30033 - RNA, 22 nt, Artificial Sequence
  Synthetic
uauaaacauguacacauggaca

SEQ ID NO: 30034 - RNA, 24 nt, Artificial Sequence
  Synthetic
uguauaaacauguacacauggaca

SEQ ID NO: 30035 - RNA, 18 nt, Artificial Sequence
  Synthetic
cgcuaugucacauggaca

SEQ ID NO: 30036 - RNA, 19 nt, Artificial Sequence
  Synthetic
acgcuaugucacauggaca

SEQ ID NO: 30037 - RNA, 20 nt, Artificial Sequence
  Synthetic
aacgcuaugucacauggaca

SEQ ID NO: 30038 - RNA, 21 nt, Artificial Sequence
  Synthetic
uaacgcuaugucacauggaca

SEQ ID NO: 30039 - RNA, 22 nt, Artificial Sequence
  Synthetic
auaacgcuaugucacauggaca

SEQ ID NO: 30040 - RNA, 23 nt, Artificial Sequence
  Synthetic
aauaacgcuaugucacauggaca

SEQ ID NO: 30041 - RNA, 21 nt, Artificial Sequence
  Synthetic
acaucucugaucucauggaca

SEQ ID NO: 30042 - RNA, 22 nt, Artificial Sequence
  Synthetic
aacaucucugaucucauggaca

SEQ ID NO: 30043 - RNA, 23 nt, Artificial Sequence
  Synthetic
aaacaucucugaucucauggaca

SEQ ID NO: 30044 - RNA, 24 nt, Artificial Sequence
  Synthetic
aaaacaucucugaucucauggaca

SEQ ID NO: 30045 - RNA, 18 nt, Artificial Sequence
  Synthetic
uucucauacagauggaca

SEQ ID NO: 30046 - RNA, 19 nt, Artificial Sequence
  Synthetic
auucucauacagauggaca

SEQ ID NO: 30047 - RNA, 20 nt, Artificial Sequence
  Synthetic
aauucucauacagauggaca

SEQ ID NO: 30048 - RNA, 21 nt, Artificial Sequence
  Synthetic
aaauucucauacagauggaca

SEQ ID NO: 30049 - RNA, 22 nt, Artificial Sequence
  Synthetic
caaauucucauacagauggaca

SEQ ID NO: 30050 - RNA, 23 nt, Artificial Sequence
  Synthetic
acaaauucucauacagauggaca

SEQ ID NO: 30051 - RNA, 24 nt, Artificial Sequence
  Synthetic
uacaaauucucauacagauggaca

SEQ ID NO: 30052 - RNA, 18 nt, Artificial Sequence
  Synthetic
aaaacugcaacuuggaca

SEQ ID NO: 30053 - RNA, 20 nt, Artificial Sequence
  Synthetic
agaaaacugcaacuuggaca

SEQ ID NO: 30054 - RNA, 22 nt, Artificial Sequence
  Synthetic
agagaaaacugcaacuuggaca

SEQ ID NO: 30055 - RNA, 24 nt, Artificial Sequence
  Synthetic
ugagagaaaacugcaacuuggaca

SEQ ID NO: 30056 - RNA, 18 nt, Artificial Sequence
  Synthetic
aaacacgaaguaaugaca

SEQ ID NO: 30057 - RNA, 19 nt, Artificial Sequence
  Synthetic
caaacacgaaguaaugaca

SEQ ID NO: 30058 - RNA, 20 nt, Artificial Sequence
  Synthetic
acaaacacgaaguaaugaca

SEQ ID NO: 30059 - RNA, 21 nt, Artificial Sequence
  Synthetic
aacaaacacgaaguaaugaca

SEQ ID NO: 30060 - RNA, 23 nt, Artificial Sequence
  Synthetic
agaacaaacacgaaguaaugaca

SEQ ID NO: 30061 - RNA, 18 nt, Artificial Sequence
  Synthetic
agccuuuucauccugaca

SEQ ID NO: 30062 - RNA, 19 nt, Artificial Sequence
  Synthetic
cagccuuuucauccugaca

SEQ ID NO: 30063 - RNA, 20 nt, Artificial Sequence
  Synthetic
ccagccuuuucauccugaca

SEQ ID NO: 30064 - RNA, 22 nt, Artificial Sequence
  Synthetic
agccagccuuuucauccugaca

SEQ ID NO: 30065 - RNA, 23 nt, Artificial Sequence
  Synthetic
aagccagccuuuucauccugaca

SEQ ID NO: 30066 - RNA, 24 nt, Artificial Sequence
  Synthetic
uaagccagccuuuucauccugaca

SEQ ID NO: 30067 - RNA, 21 nt, Artificial Sequence
  Synthetic
uggcagaaaaaaaaagugaca

SEQ ID NO: 30068 - RNA, 22 nt, Artificial Sequence
  Synthetic
uuggcagaaaaaaaaagugaca

SEQ ID NO: 30069 - RNA, 23 nt, Artificial Sequence
  Synthetic
uuuggcagaaaaaaaaagugaca

SEQ ID NO: 30070 - RNA, 18 nt, Artificial Sequence
  Synthetic
cacugcaucuuauugaca

SEQ ID NO: 30071 - RNA, 19 nt, Artificial Sequence
  Synthetic
ccacugcaucuuauugaca

SEQ ID NO: 30072 - RNA, 20 nt, Artificial Sequence
  Synthetic
uccacugcaucuuauugaca

SEQ ID NO: 30073 - RNA, 21 nt, Artificial Sequence
  Synthetic
cuccacugcaucuuauugaca

SEQ ID NO: 30074 - RNA, 22 nt, Artificial Sequence
  Synthetic
ucuccacugcaucuuauugaca

SEQ ID NO: 30075 - RNA, 23 nt, Artificial Sequence
  Synthetic
uucuccacugcaucuuauugaca

SEQ ID NO: 30076 - RNA, 24 nt, Artificial Sequence
  Synthetic
uuucuccacugcaucuuauugaca

SEQ ID NO: 30077 - RNA, 18 nt, Artificial Sequence
  Synthetic
aucaguugcuaguugaca

SEQ ID NO: 30078 - RNA, 19 nt, Artificial Sequence
  Synthetic
uaucaguugcuaguugaca

SEQ ID NO: 30079 - RNA, 20 nt, Artificial Sequence
  Synthetic
uuaucaguugcuaguugaca

SEQ ID NO: 30080 - RNA, 21 nt, Artificial Sequence
  Synthetic
cuuaucaguugcuaguugaca

SEQ ID NO: 30081 - RNA, 22 nt, Artificial Sequence
  Synthetic
acuuaucaguugcuaguugaca

SEQ ID NO: 30082 - RNA, 23 nt, Artificial Sequence
  Synthetic
uacuuaucaguugcuaguugaca

SEQ ID NO: 30083 - RNA, 24 nt, Artificial Sequence
  Synthetic
uuacuuaucaguugcuaguugaca

SEQ ID NO: 30084 - RNA, 18 nt, Artificial Sequence
  Synthetic
acugugaaaugguugaca

SEQ ID NO: 30085 - RNA, 19 nt, Artificial Sequence
  Synthetic
aacugugaaaugguugaca

SEQ ID NO: 30086 - RNA, 20 nt, Artificial Sequence
  Synthetic
caacugugaaaugguugaca

SEQ ID NO: 30087 - RNA, 18 nt, Artificial Sequence
  Synthetic
uauggaaagugguugaca

SEQ ID NO: 30088 - RNA, 21 nt, Artificial Sequence
  Synthetic
agguauggaaagugguugaca

SEQ ID NO: 30089 - RNA, 23 nt, Artificial Sequence
  Synthetic
ugagguauggaaagugguugaca

SEQ ID NO: 30090 - RNA, 18 nt, Artificial Sequence
  Synthetic
auugcucuccuguugaca

SEQ ID NO: 30091 - RNA, 19 nt, Artificial Sequence
  Synthetic
cauugcucuccuguugaca

SEQ ID NO: 30092 - RNA, 20 nt, Artificial Sequence
  Synthetic
acauugcucuccuguugaca

SEQ ID NO: 30093 - RNA, 21 nt, Artificial Sequence
  Synthetic
aacauugcucuccuguugaca

SEQ ID NO: 30094 - RNA, 22 nt, Artificial Sequence
  Synthetic
uaacauugcucuccuguugaca

SEQ ID NO: 30095 - RNA, 23 nt, Artificial Sequence
  Synthetic
auaacauugcucuccuguugaca

SEQ ID NO: 30096 - RNA, 24 nt, Artificial Sequence
  Synthetic
uauaacauugcucuccuguugaca

SEQ ID NO: 30097 - RNA, 21 nt, Artificial Sequence
  Synthetic
aggacuuuucugguuuugaca

SEQ ID NO: 30098 - RNA, 23 nt, Artificial Sequence
  Synthetic
ugaggacuuuucugguuuugaca

SEQ ID NO: 30099 - RNA, 24 nt, Artificial Sequence
  Synthetic
cugaggacuuuucugguuuugaca

SEQ ID NO: 30100 - RNA, 21 nt, Artificial Sequence
  Synthetic
uuuaaaaacauuauaaauaca

SEQ ID NO: 30101 - RNA, 22 nt, Artificial Sequence
  Synthetic
uuuuaaaaacauuauaaauaca

SEQ ID NO: 30102 - RNA, 23 nt, Artificial Sequence
  Synthetic
uuuuuaaaaacauuauaaauaca

SEQ ID NO: 30103 - RNA, 24 nt, Artificial Sequence
  Synthetic
uuuuuuaaaaacauuauaaauaca

SEQ ID NO: 30104 - RNA, 21 nt, Artificial Sequence
  Synthetic
uauaauuauucauuaaauaca

SEQ ID NO: 30105 - RNA, 22 nt, Artificial Sequence
  Synthetic
auauaauuauucauuaaauaca

SEQ ID NO: 30106 - RNA, 23 nt, Artificial Sequence
  Synthetic
cauauaauuauucauuaaauaca

SEQ ID NO: 30107 - RNA, 18 nt, Artificial Sequence
  Synthetic
auuauggcuuagaauaca

SEQ ID NO: 30108 - RNA, 19 nt, Artificial Sequence
  Synthetic
uauuauggcuuagaauaca

SEQ ID NO: 30109 - RNA, 20 nt, Artificial Sequence
  Synthetic
uuauuauggcuuagaauaca

SEQ ID NO: 30110 - RNA, 21 nt, Artificial Sequence
  Synthetic
uuuauuauggcuuagaauaca

SEQ ID NO: 30111 - RNA, 22 nt, Artificial Sequence
  Synthetic
cuuuauuauggcuuagaauaca

SEQ ID NO: 30112 - RNA, 23 nt, Artificial Sequence
  Synthetic
ucuuuauuauggcuuagaauaca

SEQ ID NO: 30113 - RNA, 24 nt, Artificial Sequence
  Synthetic
cucuuuauuauggcuuagaauaca

SEQ ID NO: 30114 - RNA, 18 nt, Artificial Sequence
  Synthetic
agaaaauguaggaauaca

SEQ ID NO: 30115 - RNA, 19 nt, Artificial Sequence
  Synthetic
aagaaaauguaggaauaca

SEQ ID NO: 30116 - RNA, 20 nt, Artificial Sequence
  Synthetic
uaagaaaauguaggaauaca

SEQ ID NO: 30117 - RNA, 21 nt, Artificial Sequence
  Synthetic
cuaagaaaauguaggaauaca

SEQ ID NO: 30118 - RNA, 22 nt, Artificial Sequence
  Synthetic
ucuaagaaaauguaggaauaca

SEQ ID NO: 30119 - RNA, 23 nt, Artificial Sequence
  Synthetic
uucuaagaaaauguaggaauaca

SEQ ID NO: 30120 - RNA, 24 nt, Artificial Sequence
  Synthetic
cuucuaagaaaauguaggaauaca

SEQ ID NO: 30121 - RNA, 18 nt, Artificial Sequence
  Synthetic
cauacacuuaauaauaca

SEQ ID NO: 30122 - RNA, 19 nt, Artificial Sequence
  Synthetic
ucauacacuuaauaauaca

SEQ ID NO: 30123 - RNA, 20 nt, Artificial Sequence
  Synthetic
aucauacacuuaauaauaca

SEQ ID NO: 30124 - RNA, 21 nt, Artificial Sequence
  Synthetic
uaucauacacuuaauaauaca

SEQ ID NO: 30125 - RNA, 22 nt, Artificial Sequence
  Synthetic
auaucauacacuuaauaauaca

SEQ ID NO: 30126 - RNA, 23 nt, Artificial Sequence
  Synthetic
uauaucauacacuuaauaauaca

SEQ ID NO: 30127 - RNA, 24 nt, Artificial Sequence
  Synthetic
uuauaucauacacuuaauaauaca

SEQ ID NO: 30128 - RNA, 18 nt, Artificial Sequence
  Synthetic
ugacuuuauguuaauaca

SEQ ID NO: 30129 - RNA, 19 nt, Artificial Sequence
  Synthetic
cugacuuuauguuaauaca

SEQ ID NO: 30130 - RNA, 20 nt, Artificial Sequence
  Synthetic
ucugacuuuauguuaauaca

SEQ ID NO: 30131 - RNA, 21 nt, Artificial Sequence
  Synthetic
aucugacuuuauguuaauaca

SEQ ID NO: 30132 - RNA, 22 nt, Artificial Sequence
  Synthetic
aaucugacuuuauguuaauaca

SEQ ID NO: 30133 - RNA, 23 nt, Artificial Sequence
  Synthetic
aaaucugacuuuauguuaauaca

SEQ ID NO: 30134 - RNA, 21 nt, Artificial Sequence
  Synthetic
aacuacuaccacagacauaca

SEQ ID NO: 30135 - RNA, 23 nt, Artificial Sequence
  Synthetic
agaacuacuaccacagacauaca

SEQ ID NO: 30136 - RNA, 18 nt, Artificial Sequence
  Synthetic
aaaugagauuaccauaca

SEQ ID NO: 30137 - RNA, 19 nt, Artificial Sequence
  Synthetic
uaaaugagauuaccauaca

SEQ ID NO: 30138 - RNA, 20 nt, Artificial Sequence
  Synthetic
uuaaaugagauuaccauaca

SEQ ID NO: 30139 - RNA, 21 nt, Artificial Sequence
  Synthetic
cuuaaaugagauuaccauaca

SEQ ID NO: 30140 - RNA, 21 nt, Artificial Sequence
  Synthetic
aaaaaaauuagagagcauaca

SEQ ID NO: 30141 - RNA, 23 nt, Artificial Sequence
  Synthetic
agaaaaaaauuagagagcauaca

SEQ ID NO: 30142 - RNA, 24 nt, Artificial Sequence
  Synthetic
aagaaaaaaauuagagagcauaca

SEQ ID NO: 30143 - RNA, 18 nt, Artificial Sequence
  Synthetic
uugcuuugcuuucauaca

SEQ ID NO: 30144 - RNA, 19 nt, Artificial Sequence
  Synthetic
uuugcuuugcuuucauaca

SEQ ID NO: 30145 - RNA, 20 nt, Artificial Sequence
  Synthetic
auuugcuuugcuuucauaca

SEQ ID NO: 30146 - RNA, 21 nt, Artificial Sequence
  Synthetic
uauuugcuuugcuuucauaca

SEQ ID NO: 30147 - RNA, 23 nt, Artificial Sequence
  Synthetic
uguauuugcuuugcuuucauaca

SEQ ID NO: 30148 - RNA, 21 nt, Artificial Sequence
  Synthetic
ugagaaauaaagaaauauaca

SEQ ID NO: 30149 - RNA, 22 nt, Artificial Sequence
  Synthetic
cugagaaauaaagaaauauaca

SEQ ID NO: 30150 - RNA, 23 nt, Artificial Sequence
  Synthetic
ccugagaaauaaagaaauauaca

SEQ ID NO: 30151 - RNA, 21 nt, Artificial Sequence
  Synthetic
ucaaauuuuauuuuauauaca

SEQ ID NO: 30152 - RNA, 22 nt, Artificial Sequence
  Synthetic
aucaaauuuuauuuuauauaca

SEQ ID NO: 30153 - RNA, 23 nt, Artificial Sequence
  Synthetic
aaucaaauuuuauuuuauauaca

SEQ ID NO: 30154 - RNA, 24 nt, Artificial Sequence
  Synthetic
uaaucaaauuuuauuuuauauaca

SEQ ID NO: 30155 - RNA, 18 nt, Artificial Sequence
  Synthetic
aucugaacauacuauaca

SEQ ID NO: 30156 - RNA, 19 nt, Artificial Sequence
  Synthetic
aaucugaacauacuauaca

SEQ ID NO: 30157 - RNA, 20 nt, Artificial Sequence
  Synthetic
aaaucugaacauacuauaca

SEQ ID NO: 30158 - RNA, 21 nt, Artificial Sequence
  Synthetic
caaaucugaacauacuauaca

SEQ ID NO: 30159 - RNA, 23 nt, Artificial Sequence
  Synthetic
ugcaaaucugaacauacuauaca

SEQ ID NO: 30160 - RNA, 24 nt, Artificial Sequence
  Synthetic
augcaaaucugaacauacuauaca

SEQ ID NO: 30161 - RNA, 18 nt, Artificial Sequence
  Synthetic
auuuuacucuucuauaca

SEQ ID NO: 30162 - RNA, 19 nt, Artificial Sequence
  Synthetic
aauuuuacucuucuauaca

SEQ ID NO: 30163 - RNA, 20 nt, Artificial Sequence
  Synthetic
caauuuuacucuucuauaca

SEQ ID NO: 30164 - RNA, 21 nt, Artificial Sequence
  Synthetic
ccaauuuuacucuucuauaca

SEQ ID NO: 30165 - RNA, 22 nt, Artificial Sequence
  Synthetic
cccaauuuuacucuucuauaca

SEQ ID NO: 30166 - RNA, 23 nt, Artificial Sequence
  Synthetic
ucccaauuuuacucuucuauaca

SEQ ID NO: 30167 - RNA, 18 nt, Artificial Sequence
  Synthetic
cauuggggguccccuaca

SEQ ID NO: 30168 - RNA, 19 nt, Artificial Sequence
  Synthetic
ccauuggggguccccuaca

SEQ ID NO: 30169 - RNA, 21 nt, Artificial Sequence
  Synthetic
agccauuggggguccccuaca

SEQ ID NO: 30170 - RNA, 22 nt, Artificial Sequence
  Synthetic
aagccauuggggguccccuaca

SEQ ID NO: 30171 - RNA, 23 nt, Artificial Sequence
  Synthetic
aaagccauuggggguccccuaca

SEQ ID NO: 30172 - RNA, 24 nt, Artificial Sequence
  Synthetic
uaaagccauuggggguccccuaca

SEQ ID NO: 30173 - RNA, 18 nt, Artificial Sequence
  Synthetic
cuuuuuagaagggcuaca

SEQ ID NO: 30174 - RNA, 19 nt, Artificial Sequence
  Synthetic
ucuuuuuagaagggcuaca

SEQ ID NO: 30175 - RNA, 20 nt, Artificial Sequence
  Synthetic
uucuuuuuagaagggcuaca

SEQ ID NO: 30176 - RNA, 21 nt, Artificial Sequence
  Synthetic
auucuuuuuagaagggcuaca

SEQ ID NO: 30177 - RNA, 23 nt, Artificial Sequence
  Synthetic
agauucuuuuuagaagggcuaca

SEQ ID NO: 30178 - RNA, 24 nt, Artificial Sequence
  Synthetic
aagauucuuuuuagaagggcuaca

SEQ ID NO: 30179 - RNA, 18 nt, Artificial Sequence
  Synthetic
cugacaguaucugcuaca

SEQ ID NO: 30180 - RNA, 19 nt, Artificial Sequence
  Synthetic
acugacaguaucugcuaca

SEQ ID NO: 30181 - RNA, 20 nt, Artificial Sequence
  Synthetic
cacugacaguaucugcuaca

SEQ ID NO: 30182 - RNA, 18 nt, Artificial Sequence
  Synthetic
cauauuucaaaaaguaca

SEQ ID NO: 30183 - RNA, 19 nt, Artificial Sequence
  Synthetic
ucauauuucaaaaaguaca

SEQ ID NO: 30184 - RNA, 20 nt, Artificial Sequence
  Synthetic
uucauauuucaaaaaguaca

SEQ ID NO: 30185 - RNA, 21 nt, Artificial Sequence
  Synthetic
cuucauauuucaaaaaguaca

SEQ ID NO: 30186 - RNA, 22 nt, Artificial Sequence
  Synthetic
ccuucauauuucaaaaaguaca

SEQ ID NO: 30187 - RNA, 23 nt, Artificial Sequence
  Synthetic
uccuucauauuucaaaaaguaca

SEQ ID NO: 30188 - RNA, 24 nt, Artificial Sequence
  Synthetic
uuccuucauauuucaaaaaguaca

SEQ ID NO: 30189 - RNA, 18 nt, Artificial Sequence
  Synthetic
uuucuuucuuuuaguaca

SEQ ID NO: 30190 - RNA, 19 nt, Artificial Sequence
  Synthetic
cuuucuuucuuuuaguaca

SEQ ID NO: 30191 - RNA, 20 nt, Artificial Sequence
  Synthetic
ccuuucuuucuuuuaguaca

SEQ ID NO: 30192 - RNA, 22 nt, Artificial Sequence
  Synthetic
ugccuuucuuucuuuuaguaca

SEQ ID NO: 30193 - RNA, 24 nt, Artificial Sequence
  Synthetic
ugugccuuucuuucuuuuaguaca

SEQ ID NO: 30194 - RNA, 18 nt, Artificial Sequence
  Synthetic
cugcugagaaaauguaca

SEQ ID NO: 30195 - RNA, 19 nt, Artificial Sequence
  Synthetic
acugcugagaaaauguaca

SEQ ID NO: 30196 - RNA, 20 nt, Artificial Sequence
  Synthetic
aacugcugagaaaauguaca

SEQ ID NO: 30197 - RNA, 21 nt, Artificial Sequence
  Synthetic
caacugcugagaaaauguaca

SEQ ID NO: 30198 - RNA, 22 nt, Artificial Sequence
  Synthetic
acaacugcugagaaaauguaca

SEQ ID NO: 30199 - RNA, 24 nt, Artificial Sequence
  Synthetic
agacaacugcugagaaaauguaca

SEQ ID NO: 30200 - RNA, 18 nt, Artificial Sequence
  Synthetic
uuuuuguucucauguaca

SEQ ID NO: 30201 - RNA, 19 nt, Artificial Sequence
  Synthetic
cuuuuuguucucauguaca

SEQ ID NO: 30202 - RNA, 20 nt, Artificial Sequence
  Synthetic
ucuuuuuguucucauguaca

SEQ ID NO: 30203 - RNA, 19 nt, Artificial Sequence
  Synthetic
agaagcagaacgauguaca

SEQ ID NO: 30204 - RNA, 20 nt, Artificial Sequence
  Synthetic
cagaagcagaacgauguaca

SEQ ID NO: 30205 - RNA, 21 nt, Artificial Sequence
  Synthetic
ucagaagcagaacgauguaca

SEQ ID NO: 30206 - RNA, 22 nt, Artificial Sequence
  Synthetic
uucagaagcagaacgauguaca

SEQ ID NO: 30207 - RNA, 24 nt, Artificial Sequence
  Synthetic
aguucagaagcagaacgauguaca

SEQ ID NO: 30208 - RNA, 22 nt, Artificial Sequence
  Synthetic
ugagaaaaaaaaaauguguaca

SEQ ID NO: 30209 - RNA, 24 nt, Artificial Sequence
  Synthetic
ugugagaaaaaaaaaauguguaca

SEQ ID NO: 30210 - RNA, 22 nt, Artificial Sequence
  Synthetic
agaaagcugaaagaauuguaca

SEQ ID NO: 30211 - RNA, 23 nt, Artificial Sequence
  Synthetic
cagaaagcugaaagaauuguaca

SEQ ID NO: 30212 - RNA, 24 nt, Artificial Sequence
  Synthetic
acagaaagcugaaagaauuguaca

SEQ ID NO: 30213 - RNA, 21 nt, Artificial Sequence
  Synthetic
uaaaaauugaacucuuguaca

SEQ ID NO: 30214 - RNA, 22 nt, Artificial Sequence
  Synthetic
uuaaaaauugaacucuuguaca

SEQ ID NO: 30215 - RNA, 23 nt, Artificial Sequence
  Synthetic
cuuaaaaauugaacucuuguaca

SEQ ID NO: 30216 - RNA, 24 nt, Artificial Sequence
  Synthetic
ucuuaaaaauugaacucuuguaca

SEQ ID NO: 30217 - RNA, 19 nt, Artificial Sequence
  Synthetic
aguaauuuacagaauuaca

SEQ ID NO: 30218 - RNA, 20 nt, Artificial Sequence
  Synthetic
aaguaauuuacagaauuaca

SEQ ID NO: 30219 - RNA, 22 nt, Artificial Sequence
  Synthetic
agaaguaauuuacagaauuaca

SEQ ID NO: 30220 - RNA, 24 nt, Artificial Sequence
  Synthetic
agagaaguaauuuacagaauuaca

SEQ ID NO: 30221 - RNA, 18 nt, Artificial Sequence
  Synthetic
uaacaaaauugaauuaca

SEQ ID NO: 30222 - RNA, 19 nt, Artificial Sequence
  Synthetic
cuaacaaaauugaauuaca

SEQ ID NO: 30223 - RNA, 20 nt, Artificial Sequence
  Synthetic
ccuaacaaaauugaauuaca

SEQ ID NO: 30224 - RNA, 21 nt, Artificial Sequence
  Synthetic
uccuaacaaaauugaauuaca

SEQ ID NO: 30225 - RNA, 22 nt, Artificial Sequence
  Synthetic
uuccuaacaaaauugaauuaca

SEQ ID NO: 30226 - RNA, 23 nt, Artificial Sequence
  Synthetic
uuuccuaacaaaauugaauuaca

SEQ ID NO: 30227 - RNA, 24 nt, Artificial Sequence
  Synthetic
auuuccuaacaaaauugaauuaca

SEQ ID NO: 30228 - RNA, 23 nt, Artificial Sequence
  Synthetic
agguuuauuuuuucuuaauuaca

SEQ ID NO: 30229 - RNA, 24 nt, Artificial Sequence
  Synthetic
aagguuuauuuuuucuuaauuaca

SEQ ID NO: 30230 - RNA, 18 nt, Artificial Sequence
  Synthetic
cuggaacaaagcauuaca

SEQ ID NO: 30231 - RNA, 20 nt, Artificial Sequence
  Synthetic
agcuggaacaaagcauuaca

SEQ ID NO: 30232 - RNA, 21 nt, Artificial Sequence
  Synthetic
uagcuggaacaaagcauuaca

SEQ ID NO: 30233 - RNA, 22 nt, Artificial Sequence
  Synthetic
auagcuggaacaaagcauuaca

SEQ ID NO: 30234 - RNA, 23 nt, Artificial Sequence
  Synthetic
uauagcuggaacaaagcauuaca

SEQ ID NO: 30235 - RNA, 24 nt, Artificial Sequence
  Synthetic
uuauagcuggaacaaagcauuaca

SEQ ID NO: 30236 - RNA, 18 nt, Artificial Sequence
  Synthetic
acuaaagucacucuuaca

SEQ ID NO: 30237 - RNA, 19 nt, Artificial Sequence
  Synthetic
uacuaaagucacucuuaca

SEQ ID NO: 30238 - RNA, 20 nt, Artificial Sequence
  Synthetic
auacuaaagucacucuuaca

SEQ ID NO: 30239 - RNA, 21 nt, Artificial Sequence
  Synthetic
aauacuaaagucacucuuaca

SEQ ID NO: 30240 - RNA, 22 nt, Artificial Sequence
  Synthetic
uaauacuaaagucacucuuaca

SEQ ID NO: 30241 - RNA, 23 nt, Artificial Sequence
  Synthetic
cuaauacuaaagucacucuuaca

SEQ ID NO: 30242 - RNA, 24 nt, Artificial Sequence
  Synthetic
ccuaauacuaaagucacucuuaca

SEQ ID NO: 30243 - RNA, 18 nt, Artificial Sequence
  Synthetic
auaaugcacacuguuaca

SEQ ID NO: 30244 - RNA, 19 nt, Artificial Sequence
  Synthetic
cauaaugcacacuguuaca

SEQ ID NO: 30245 - RNA, 20 nt, Artificial Sequence
  Synthetic
ucauaaugcacacuguuaca

SEQ ID NO: 30246 - RNA, 22 nt, Artificial Sequence
  Synthetic
agucauaaugcacacuguuaca

SEQ ID NO: 30247 - RNA, 23 nt, Artificial Sequence
  Synthetic
aagucauaaugcacacuguuaca

SEQ ID NO: 30248 - RNA, 24 nt, Artificial Sequence
  Synthetic
uaagucauaaugcacacuguuaca

SEQ ID NO: 30249 - RNA, 18 nt, Artificial Sequence
  Synthetic
aucccccccuccuuuaca

SEQ ID NO: 30250 - RNA, 19 nt, Artificial Sequence
  Synthetic
uaucccccccuccuuuaca

SEQ ID NO: 30251 - RNA, 20 nt, Artificial Sequence
  Synthetic
auaucccccccuccuuuaca

SEQ ID NO: 30252 - RNA, 21 nt, Artificial Sequence
  Synthetic
aauaucccccccuccuuuaca

SEQ ID NO: 30253 - RNA, 22 nt, Artificial Sequence
  Synthetic
aaauaucccccccuccuuuaca

SEQ ID NO: 30254 - RNA, 23 nt, Artificial Sequence
  Synthetic
uaaauaucccccccuccuuuaca

SEQ ID NO: 30255 - RNA, 24 nt, Artificial Sequence
  Synthetic
auaaauaucccccccuccuuuaca

SEQ ID NO: 30256 - RNA, 19 nt, Artificial Sequence
  Synthetic
ugguuaucuggucuuuaca

SEQ ID NO: 30257 - RNA, 20 nt, Artificial Sequence
  Synthetic
augguuaucuggucuuuaca

SEQ ID NO: 30258 - RNA, 21 nt, Artificial Sequence
  Synthetic
aaugguuaucuggucuuuaca

SEQ ID NO: 30259 - RNA, 22 nt, Artificial Sequence
  Synthetic
aaaugguuaucuggucuuuaca

SEQ ID NO: 30260 - RNA, 23 nt, Artificial Sequence
  Synthetic
aaaaugguuaucuggucuuuaca

SEQ ID NO: 30261 - RNA, 24 nt, Artificial Sequence
  Synthetic
uaaaaugguuaucuggucuuuaca

SEQ ID NO: 30262 - RNA, 18 nt, Artificial Sequence
  Synthetic
uggggguaguaguuuaca

SEQ ID NO: 30263 - RNA, 19 nt, Artificial Sequence
  Synthetic
uuggggguaguaguuuaca

SEQ ID NO: 30264 - RNA, 20 nt, Artificial Sequence
  Synthetic
uuuggggguaguaguuuaca

SEQ ID NO: 30265 - RNA, 21 nt, Artificial Sequence
  Synthetic
cuuuggggguaguaguuuaca

SEQ ID NO: 30266 - RNA, 23 nt, Artificial Sequence
  Synthetic
agcuuuggggguaguaguuuaca

SEQ ID NO: 30267 - RNA, 24 nt, Artificial Sequence
  Synthetic
aagcuuuggggguaguaguuuaca

SEQ ID NO: 30268 - RNA, 18 nt, Artificial Sequence
  Synthetic
acaauauaaacguuuaca

SEQ ID NO: 30269 - RNA, 19 nt, Artificial Sequence
  Synthetic
cacaauauaaacguuuaca

SEQ ID NO: 30270 - RNA, 20 nt, Artificial Sequence
  Synthetic
ucacaauauaaacguuuaca

SEQ ID NO: 30271 - RNA, 21 nt, Artificial Sequence
  Synthetic
aucacaauauaaacguuuaca

SEQ ID NO: 30272 - RNA, 22 nt, Artificial Sequence
  Synthetic
uaucacaauauaaacguuuaca

SEQ ID NO: 30273 - RNA, 23 nt, Artificial Sequence
  Synthetic
auaucacaauauaaacguuuaca

SEQ ID NO: 30274 - RNA, 24 nt, Artificial Sequence
  Synthetic
uauaucacaauauaaacguuuaca

SEQ ID NO: 30275 - RNA, 19 nt, Artificial Sequence
  Synthetic
ugugggcugaugguuuaca

SEQ ID NO: 30276 - RNA, 20 nt, Artificial Sequence
  Synthetic
uugugggcugaugguuuaca

SEQ ID NO: 30277 - RNA, 21 nt, Artificial Sequence
  Synthetic
uuugugggcugaugguuuaca

SEQ ID NO: 30278 - RNA, 22 nt, Artificial Sequence
  Synthetic
auuugugggcugaugguuuaca

SEQ ID NO: 30279 - RNA, 23 nt, Artificial Sequence
  Synthetic
aauuugugggcugaugguuuaca

SEQ ID NO: 30280 - RNA, 24 nt, Artificial Sequence
  Synthetic
uaauuugugggcugaugguuuaca

SEQ ID NO: 30281 - RNA, 18 nt, Artificial Sequence
  Synthetic
caagacuaaauuuuuaca

SEQ ID NO: 30282 - RNA, 20 nt, Artificial Sequence
  Synthetic
ugcaagacuaaauuuuuaca

SEQ ID NO: 30283 - RNA, 21 nt, Artificial Sequence
  Synthetic
augcaagacuaaauuuuuaca

SEQ ID NO: 30284 - RNA, 22 nt, Artificial Sequence
  Synthetic
uaugcaagacuaaauuuuuaca

SEQ ID NO: 30285 - RNA, 24 nt, Artificial Sequence
  Synthetic
aguaugcaagacuaaauuuuuaca

SEQ ID NO: 30286 - RNA, 18 nt, Artificial Sequence
  Synthetic
caaaggcuguuuuuuaca

SEQ ID NO: 30287 - RNA, 19 nt, Artificial Sequence
  Synthetic
ucaaaggcuguuuuuuaca

SEQ ID NO: 30288 - RNA, 20 nt, Artificial Sequence
  Synthetic
cucaaaggcuguuuuuuaca

SEQ ID NO: 30289 - RNA, 21 nt, Artificial Sequence
  Synthetic
ccucaaaggcuguuuuuuaca

SEQ ID NO: 30290 - RNA, 22 nt, Artificial Sequence
  Synthetic
accucaaaggcuguuuuuuaca

SEQ ID NO: 30291 - RNA, 23 nt, Artificial Sequence
  Synthetic
aaccucaaaggcuguuuuuuaca

SEQ ID NO: 30292 - RNA, 24 nt, Artificial Sequence
  Synthetic
uaaccucaaaggcuguuuuuuaca

SEQ ID NO: 30293 - RNA, 18 nt, Artificial Sequence
  Synthetic
caaaaacagauaaaacca

SEQ ID NO: 30294 - RNA, 19 nt, Artificial Sequence
  Synthetic
ccaaaaacagauaaaacca

SEQ ID NO: 30295 - RNA, 20 nt, Artificial Sequence
  Synthetic
cccaaaaacagauaaaacca

SEQ ID NO: 30296 - RNA, 22 nt, Artificial Sequence
  Synthetic
ugcccaaaaacagauaaaacca

SEQ ID NO: 30297 - RNA, 23 nt, Artificial Sequence
  Synthetic
uugcccaaaaacagauaaaacca

SEQ ID NO: 30298 - RNA, 18 nt, Artificial Sequence
  Synthetic
aaugagaacuacaaacca

SEQ ID NO: 30299 - RNA, 19 nt, Artificial Sequence
  Synthetic
uaaugagaacuacaaacca

SEQ ID NO: 30300 - RNA, 20 nt, Artificial Sequence
  Synthetic
auaaugagaacuacaaacca

SEQ ID NO: 30301 - RNA, 22 nt, Artificial Sequence
  Synthetic
ugauaaugagaacuacaaacca

SEQ ID NO: 30302 - RNA, 23 nt, Artificial Sequence
  Synthetic
cugauaaugagaacuacaaacca

SEQ ID NO: 30303 - RNA, 18 nt, Artificial Sequence
  Synthetic
auguuucaugugaaacca

SEQ ID NO: 30304 - RNA, 19 nt, Artificial Sequence
  Synthetic
uauguuucaugugaaacca

SEQ ID NO: 30305 - RNA, 20 nt, Artificial Sequence
  Synthetic
auauguuucaugugaaacca

SEQ ID NO: 30306 - RNA, 21 nt, Artificial Sequence
  Synthetic
cauauguuucaugugaaacca

SEQ ID NO: 30307 - RNA, 22 nt, Artificial Sequence
  Synthetic
acauauguuucaugugaaacca

SEQ ID NO: 30308 - RNA, 24 nt, Artificial Sequence
  Synthetic
agacauauguuucaugugaaacca

SEQ ID NO: 30309 - RNA, 18 nt, Artificial Sequence
  Synthetic
uaaagguggaauaaacca

SEQ ID NO: 30310 - RNA, 19 nt, Artificial Sequence
  Synthetic
auaaagguggaauaaacca

SEQ ID NO: 30311 - RNA, 20 nt, Artificial Sequence
  Synthetic
cauaaagguggaauaaacca

SEQ ID NO: 30312 - RNA, 21 nt, Artificial Sequence
  Synthetic
ucauaaagguggaauaaacca

SEQ ID NO: 30313 - RNA, 22 nt, Artificial Sequence
  Synthetic
uucauaaagguggaauaaacca

SEQ ID NO: 30314 - RNA, 23 nt, Artificial Sequence
  Synthetic
uuucauaaagguggaauaaacca

SEQ ID NO: 30315 - RNA, 19 nt, Artificial Sequence
  Synthetic
aggaugccgcuggcaacca

SEQ ID NO: 30316 - RNA, 20 nt, Artificial Sequence
  Synthetic
uaggaugccgcuggcaacca

SEQ ID NO: 30317 - RNA, 21 nt, Artificial Sequence
  Synthetic
cuaggaugccgcuggcaacca

SEQ ID NO: 30318 - RNA, 22 nt, Artificial Sequence
  Synthetic
acuaggaugccgcuggcaacca

SEQ ID NO: 30319 - RNA, 23 nt, Artificial Sequence
  Synthetic
cacuaggaugccgcuggcaacca

SEQ ID NO: 30320 - RNA, 24 nt, Artificial Sequence
  Synthetic
ccacuaggaugccgcuggcaacca

SEQ ID NO: 30321 - RNA, 19 nt, Artificial Sequence
  Synthetic
agcccagaaaccagaacca

SEQ ID NO: 30322 - RNA, 20 nt, Artificial Sequence
  Synthetic
aagcccagaaaccagaacca

SEQ ID NO: 30323 - RNA, 21 nt, Artificial Sequence
  Synthetic
aaagcccagaaaccagaacca

SEQ ID NO: 30324 - RNA, 22 nt, Artificial Sequence
  Synthetic
caaagcccagaaaccagaacca

SEQ ID NO: 30325 - RNA, 23 nt, Artificial Sequence
  Synthetic
ccaaagcccagaaaccagaacca

SEQ ID NO: 30326 - RNA, 24 nt, Artificial Sequence
  Synthetic
accaaagcccagaaaccagaacca

SEQ ID NO: 30327 - RNA, 18 nt, Artificial Sequence
  Synthetic
aaauuuuauugagaacca

SEQ ID NO: 30328 - RNA, 19 nt, Artificial Sequence
  Synthetic
caaauuuuauugagaacca

SEQ ID NO: 30329 - RNA, 20 nt, Artificial Sequence
  Synthetic
ucaaauuuuauugagaacca

SEQ ID NO: 30330 - RNA, 21 nt, Artificial Sequence
  Synthetic
cucaaauuuuauugagaacca

SEQ ID NO: 30331 - RNA, 23 nt, Artificial Sequence
  Synthetic
agcucaaauuuuauugagaacca

SEQ ID NO: 30332 - RNA, 24 nt, Artificial Sequence
  Synthetic
uagcucaaauuuuauugagaacca

SEQ ID NO: 30333 - RNA, 21 nt, Artificial Sequence
  Synthetic
acagucaaacucguagaacca

SEQ ID NO: 30334 - RNA, 23 nt, Artificial Sequence
  Synthetic
agacagucaaacucguagaacca

SEQ ID NO: 30335 - RNA, 18 nt, Artificial Sequence
  Synthetic
cuggcaaccuaugaacca

SEQ ID NO: 30336 - RNA, 20 nt, Artificial Sequence
  Synthetic
ugcuggcaaccuaugaacca

SEQ ID NO: 30337 - RNA, 21 nt, Artificial Sequence
  Synthetic
augcuggcaaccuaugaacca

SEQ ID NO: 30338 - RNA, 22 nt, Artificial Sequence
  Synthetic
caugcuggcaaccuaugaacca

SEQ ID NO: 30339 - RNA, 23 nt, Artificial Sequence
  Synthetic
ucaugcuggcaaccuaugaacca

SEQ ID NO: 30340 - RNA, 24 nt, Artificial Sequence
  Synthetic
cucaugcuggcaaccuaugaacca

SEQ ID NO: 30341 - RNA, 18 nt, Artificial Sequence
  Synthetic
ccgucauggugauaacca

SEQ ID NO: 30342 - RNA, 19 nt, Artificial Sequence
  Synthetic
accgucauggugauaacca

SEQ ID NO: 30343 - RNA, 20 nt, Artificial Sequence
  Synthetic
uaccgucauggugauaacca

SEQ ID NO: 30344 - RNA, 21 nt, Artificial Sequence
  Synthetic
auaccgucauggugauaacca

SEQ ID NO: 30345 - RNA, 22 nt, Artificial Sequence
  Synthetic
aauaccgucauggugauaacca

SEQ ID NO: 30346 - RNA, 23 nt, Artificial Sequence
  Synthetic
uaauaccgucauggugauaacca

SEQ ID NO: 30347 - RNA, 24 nt, Artificial Sequence
  Synthetic
auaauaccgucauggugauaacca

SEQ ID NO: 30348 - RNA, 18 nt, Artificial Sequence
  Synthetic
ccauuaacaauauaacca

SEQ ID NO: 30349 - RNA, 19 nt, Artificial Sequence
  Synthetic
uccauuaacaauauaacca

SEQ ID NO: 30350 - RNA, 20 nt, Artificial Sequence
  Synthetic
auccauuaacaauauaacca

SEQ ID NO: 30351 - RNA, 21 nt, Artificial Sequence
  Synthetic
uauccauuaacaauauaacca

SEQ ID NO: 30352 - RNA, 23 nt, Artificial Sequence
  Synthetic
aguauccauuaacaauauaacca

SEQ ID NO: 30353 - RNA, 24 nt, Artificial Sequence
  Synthetic
aaguauccauuaacaauauaacca

SEQ ID NO: 30354 - RNA, 18 nt, Artificial Sequence
  Synthetic
acugcaaauauauaacca

SEQ ID NO: 30355 - RNA, 19 nt, Artificial Sequence
  Synthetic
uacugcaaauauauaacca

SEQ ID NO: 30356 - RNA, 20 nt, Artificial Sequence
  Synthetic
uuacugcaaauauauaacca

SEQ ID NO: 30357 - RNA, 21 nt, Artificial Sequence
  Synthetic
auuacugcaaauauauaacca

SEQ ID NO: 30358 - RNA, 22 nt, Artificial Sequence
  Synthetic
uauuacugcaaauauauaacca

SEQ ID NO: 30359 - RNA, 23 nt, Artificial Sequence
  Synthetic
auauuacugcaaauauauaacca

SEQ ID NO: 30360 - RNA, 24 nt, Artificial Sequence
  Synthetic
aauauuacugcaaauauauaacca

SEQ ID NO: 30361 - RNA, 18 nt, Artificial Sequence
  Synthetic
augggccuaaucuaacca

SEQ ID NO: 30362 - RNA, 20 nt, Artificial Sequence
  Synthetic
agaugggccuaaucuaacca

SEQ ID NO: 30363 - RNA, 21 nt, Artificial Sequence
  Synthetic
cagaugggccuaaucuaacca

SEQ ID NO: 30364 - RNA, 22 nt, Artificial Sequence
  Synthetic
ucagaugggccuaaucuaacca

SEQ ID NO: 30365 - RNA, 23 nt, Artificial Sequence
  Synthetic
uucagaugggccuaaucuaacca

SEQ ID NO: 30366 - RNA, 24 nt, Artificial Sequence
  Synthetic
auucagaugggccuaaucuaacca

SEQ ID NO: 30367 - RNA, 18 nt, Artificial Sequence
  Synthetic
uguuaaguccucuaacca

SEQ ID NO: 30368 - RNA, 20 nt, Artificial Sequence
  Synthetic
aguguuaaguccucuaacca

SEQ ID NO: 30369 - RNA, 21 nt, Artificial Sequence
  Synthetic
aaguguuaaguccucuaacca

SEQ ID NO: 30370 - RNA, 22 nt, Artificial Sequence
  Synthetic
aaaguguuaaguccucuaacca

SEQ ID NO: 30371 - RNA, 23 nt, Artificial Sequence
  Synthetic
uaaaguguuaaguccucuaacca

SEQ ID NO: 30372 - RNA, 18 nt, Artificial Sequence
  Synthetic
cuccaaacgcucacacca

SEQ ID NO: 30373 - RNA, 19 nt, Artificial Sequence
  Synthetic
acuccaaacgcucacacca

SEQ ID NO: 30374 - RNA, 21 nt, Artificial Sequence
  Synthetic
ugacuccaaacgcucacacca

SEQ ID NO: 30375 - RNA, 22 nt, Artificial Sequence
  Synthetic
cugacuccaaacgcucacacca

SEQ ID NO: 30376 - RNA, 23 nt, Artificial Sequence
  Synthetic
ucugacuccaaacgcucacacca

SEQ ID NO: 30377 - RNA, 24 nt, Artificial Sequence
  Synthetic
cucugacuccaaacgcucacacca

SEQ ID NO: 30378 - RNA, 18 nt, Artificial Sequence
  Synthetic
uuucaguacaauacacca

SEQ ID NO: 30379 - RNA, 19 nt, Artificial Sequence
  Synthetic
uuuucaguacaauacacca

SEQ ID NO: 30380 - RNA, 20 nt, Artificial Sequence
  Synthetic
auuuucaguacaauacacca

SEQ ID NO: 30381 - RNA, 21 nt, Artificial Sequence
  Synthetic
uauuuucaguacaauacacca

SEQ ID NO: 30382 - RNA, 22 nt, Artificial Sequence
  Synthetic
uuauuuucaguacaauacacca

SEQ ID NO: 30383 - RNA, 23 nt, Artificial Sequence
  Synthetic
cuuauuuucaguacaauacacca

SEQ ID NO: 30384 - RNA, 24 nt, Artificial Sequence
  Synthetic
ucuuauuuucaguacaauacacca

SEQ ID NO: 30385 - RNA, 19 nt, Artificial Sequence
  Synthetic
agcagccuuuuagccacca

SEQ ID NO: 30386 - RNA, 20 nt, Artificial Sequence
  Synthetic
uagcagccuuuuagccacca

SEQ ID NO: 30387 - RNA, 21 nt, Artificial Sequence
  Synthetic
cuagcagccuuuuagccacca

SEQ ID NO: 30388 - RNA, 22 nt, Artificial Sequence
  Synthetic
acuagcagccuuuuagccacca

SEQ ID NO: 30389 - RNA, 23 nt, Artificial Sequence
  Synthetic
aacuagcagccuuuuagccacca

SEQ ID NO: 30390 - RNA, 24 nt, Artificial Sequence
  Synthetic
aaacuagcagccuuuuagccacca

SEQ ID NO: 30391 - RNA, 18 nt, Artificial Sequence
  Synthetic
aagugaguuuggccacca

SEQ ID NO: 30392 - RNA, 19 nt, Artificial Sequence
  Synthetic
caagugaguuuggccacca

SEQ ID NO: 30393 - RNA, 20 nt, Artificial Sequence
  Synthetic
acaagugaguuuggccacca

SEQ ID NO: 30394 - RNA, 21 nt, Artificial Sequence
  Synthetic
aacaagugaguuuggccacca

SEQ ID NO: 30395 - RNA, 22 nt, Artificial Sequence
  Synthetic
aaacaagugaguuuggccacca

SEQ ID NO: 30396 - RNA, 23 nt, Artificial Sequence
  Synthetic
aaaacaagugaguuuggccacca

SEQ ID NO: 30397 - RNA, 23 nt, Artificial Sequence
  Synthetic
uggauuuaaaaaaauuuccacca

SEQ ID NO: 30398 - RNA, 21 nt, Artificial Sequence
  Synthetic
aaacgugguauacaugcacca

SEQ ID NO: 30399 - RNA, 22 nt, Artificial Sequence
  Synthetic
uaaacgugguauacaugcacca

SEQ ID NO: 30400 - RNA, 23 nt, Artificial Sequence
  Synthetic
auaaacgugguauacaugcacca

SEQ ID NO: 30401 - RNA, 24 nt, Artificial Sequence
  Synthetic
aauaaacgugguauacaugcacca

SEQ ID NO: 30402 - RNA, 18 nt, Artificial Sequence
  Synthetic
acucacugaagaucacca

SEQ ID NO: 30403 - RNA, 19 nt, Artificial Sequence
  Synthetic
aacucacugaagaucacca

SEQ ID NO: 30404 - RNA, 20 nt, Artificial Sequence
  Synthetic
uaacucacugaagaucacca

SEQ ID NO: 30405 - RNA, 21 nt, Artificial Sequence
  Synthetic
uuaacucacugaagaucacca

SEQ ID NO: 30406 - RNA, 22 nt, Artificial Sequence
  Synthetic
auuaacucacugaagaucacca

SEQ ID NO: 30407 - RNA, 23 nt, Artificial Sequence
  Synthetic
aauuaacucacugaagaucacca

SEQ ID NO: 30408 - RNA, 24 nt, Artificial Sequence
  Synthetic
aaauuaacucacugaagaucacca

SEQ ID NO: 30409 - RNA, 18 nt, Artificial Sequence
  Synthetic
uucuuuacuuacucacca

SEQ ID NO: 30410 - RNA, 19 nt, Artificial Sequence
  Synthetic
auucuuuacuuacucacca

SEQ ID NO: 30411 - RNA, 20 nt, Artificial Sequence
  Synthetic
cauucuuuacuuacucacca

SEQ ID NO: 30412 - RNA, 24 nt, Artificial Sequence
  Synthetic
ugggcauucuuuacuuacucacca

SEQ ID NO: 30413 - RNA, 18 nt, Artificial Sequence
  Synthetic
aauggacgguggucacca

SEQ ID NO: 30414 - RNA, 19 nt, Artificial Sequence
  Synthetic
aaauggacgguggucacca

SEQ ID NO: 30415 - RNA, 20 nt, Artificial Sequence
  Synthetic
uaaauggacgguggucacca

SEQ ID NO: 30416 - RNA, 22 nt, Artificial Sequence
  Synthetic
aguaaauggacgguggucacca

SEQ ID NO: 30417 - RNA, 23 nt, Artificial Sequence
  Synthetic
caguaaauggacgguggucacca

SEQ ID NO: 30418 - RNA, 19 nt, Artificial Sequence
  Synthetic
agcaggguaccauucacca

SEQ ID NO: 30419 - RNA, 20 nt, Artificial Sequence
  Synthetic
aagcaggguaccauucacca

SEQ ID NO: 30420 - RNA, 21 nt, Artificial Sequence
  Synthetic
aaagcaggguaccauucacca

SEQ ID NO: 30421 - RNA, 22 nt, Artificial Sequence
  Synthetic
aaaagcaggguaccauucacca

SEQ ID NO: 30422 - RNA, 20 nt, Artificial Sequence
  Synthetic
uggaacuauuccaaagacca

SEQ ID NO: 30423 - RNA, 21 nt, Artificial Sequence
  Synthetic
uuggaacuauuccaaagacca

SEQ ID NO: 30424 - RNA, 22 nt, Artificial Sequence
  Synthetic
uuuggaacuauuccaaagacca

SEQ ID NO: 30425 - RNA, 23 nt, Artificial Sequence
  Synthetic
uuuuggaacuauuccaaagacca

SEQ ID NO: 30426 - RNA, 24 nt, Artificial Sequence
  Synthetic
auuuuggaacuauuccaaagacca

SEQ ID NO: 30427 - RNA, 18 nt, Artificial Sequence
  Synthetic
uacaguauccagagacca

SEQ ID NO: 30428 - RNA, 19 nt, Artificial Sequence
  Synthetic
cuacaguauccagagacca

SEQ ID NO: 30429 - RNA, 20 nt, Artificial Sequence
  Synthetic
acuacaguauccagagacca

SEQ ID NO: 30430 - RNA, 21 nt, Artificial Sequence
  Synthetic
aacuacaguauccagagacca

SEQ ID NO: 30431 - RNA, 24 nt, Artificial Sequence
  Synthetic
uggaacuacaguauccagagacca

SEQ ID NO: 30432 - RNA, 21 nt, Artificial Sequence
  Synthetic
caaacacaaaagaauagacca

SEQ ID NO: 30433 - RNA, 22 nt, Artificial Sequence
  Synthetic
acaaacacaaaagaauagacca

SEQ ID NO: 30434 - RNA, 24 nt, Artificial Sequence
  Synthetic
agacaaacacaaaagaauagacca

SEQ ID NO: 30435 - RNA, 18 nt, Artificial Sequence
  Synthetic
cuaagugccagccgacca

SEQ ID NO: 30436 - RNA, 19 nt, Artificial Sequence
  Synthetic
ccuaagugccagccgacca

SEQ ID NO: 30437 - RNA, 20 nt, Artificial Sequence
  Synthetic
uccuaagugccagccgacca

SEQ ID NO: 30438 - RNA, 21 nt, Artificial Sequence
  Synthetic
auccuaagugccagccgacca

SEQ ID NO: 30439 - RNA, 22 nt, Artificial Sequence
  Synthetic
cauccuaagugccagccgacca

SEQ ID NO: 30440 - RNA, 23 nt, Artificial Sequence
  Synthetic
ccauccuaagugccagccgacca

SEQ ID NO: 30441 - RNA, 24 nt, Artificial Sequence
  Synthetic
accauccuaagugccagccgacca

SEQ ID NO: 30442 - RNA, 18 nt, Artificial Sequence
  Synthetic
aguuuggaauaaugacca

SEQ ID NO: 30443 - RNA, 19 nt, Artificial Sequence
  Synthetic
caguuuggaauaaugacca

SEQ ID NO: 30444 - RNA, 21 nt, Artificial Sequence
  Synthetic
cgcaguuuggaauaaugacca

SEQ ID NO: 30445 - RNA, 22 nt, Artificial Sequence
  Synthetic
ucgcaguuuggaauaaugacca

SEQ ID NO: 30446 - RNA, 23 nt, Artificial Sequence
  Synthetic
cucgcaguuuggaauaaugacca

SEQ ID NO: 30447 - RNA, 24 nt, Artificial Sequence
  Synthetic
ccucgcaguuuggaauaaugacca

SEQ ID NO: 30448 - RNA, 18 nt, Artificial Sequence
  Synthetic
aagcuggagcagugacca

SEQ ID NO: 30449 - RNA, 19 nt, Artificial Sequence
  Synthetic
caagcuggagcagugacca

SEQ ID NO: 30450 - RNA, 20 nt, Artificial Sequence
  Synthetic
ccaagcuggagcagugacca

SEQ ID NO: 30451 - RNA, 21 nt, Artificial Sequence
  Synthetic
cccaagcuggagcagugacca

SEQ ID NO: 30452 - RNA, 23 nt, Artificial Sequence
  Synthetic
agcccaagcuggagcagugacca

SEQ ID NO: 30453 - RNA, 18 nt, Artificial Sequence
  Synthetic
cacugaaaagggugacca

SEQ ID NO: 30454 - RNA, 20 nt, Artificial Sequence
  Synthetic
ugcacugaaaagggugacca

SEQ ID NO: 30455 - RNA, 22 nt, Artificial Sequence
  Synthetic
ugugcacugaaaagggugacca

SEQ ID NO: 30456 - RNA, 23 nt, Artificial Sequence
  Synthetic
cugugcacugaaaagggugacca

SEQ ID NO: 30457 - RNA, 24 nt, Artificial Sequence
  Synthetic
acugugcacugaaaagggugacca

SEQ ID NO: 30458 - RNA, 19 nt, Artificial Sequence
  Synthetic
uguuuguauguguugacca

SEQ ID NO: 30459 - RNA, 20 nt, Artificial Sequence
  Synthetic
auguuuguauguguugacca

SEQ ID NO: 30460 - RNA, 21 nt, Artificial Sequence
  Synthetic
aauguuuguauguguugacca

SEQ ID NO: 30461 - RNA, 23 nt, Artificial Sequence
  Synthetic
ugaauguuuguauguguugacca

SEQ ID NO: 30462 - RNA, 24 nt, Artificial Sequence
  Synthetic
augaauguuuguauguguugacca

SEQ ID NO: 30463 - RNA, 18 nt, Artificial Sequence
  Synthetic
uuaaguauucuuugacca

SEQ ID NO: 30464 - RNA, 19 nt, Artificial Sequence
  Synthetic
auuaaguauucuuugacca

SEQ ID NO: 30465 - RNA, 20 nt, Artificial Sequence
  Synthetic
uauuaaguauucuuugacca

SEQ ID NO: 30466 - RNA, 21 nt, Artificial Sequence
  Synthetic
uuauuaaguauucuuugacca

SEQ ID NO: 30467 - RNA, 22 nt, Artificial Sequence
  Synthetic
auuauuaaguauucuuugacca

SEQ ID NO: 30468 - RNA, 23 nt, Artificial Sequence
  Synthetic
uauuauuaaguauucuuugacca

SEQ ID NO: 30469 - RNA, 24 nt, Artificial Sequence
  Synthetic
auauuauuaaguauucuuugacca

SEQ ID NO: 30470 - RNA, 21 nt, Artificial Sequence
  Synthetic
cuauuuaaaauagaaauacca

SEQ ID NO: 30471 - RNA, 22 nt, Artificial Sequence
  Synthetic
acuauuuaaaauagaaauacca

SEQ ID NO: 30472 - RNA, 23 nt, Artificial Sequence
  Synthetic
cacuauuuaaaauagaaauacca

SEQ ID NO: 30473 - RNA, 18 nt, Artificial Sequence
  Synthetic
cagcaauaagccauacca

SEQ ID NO: 30474 - RNA, 19 nt, Artificial Sequence
  Synthetic
ucagcaauaagccauacca

SEQ ID NO: 30475 - RNA, 22 nt, Artificial Sequence
  Synthetic
aggucagcaauaagccauacca

SEQ ID NO: 30476 - RNA, 24 nt, Artificial Sequence
  Synthetic
ugaggucagcaauaagccauacca

SEQ ID NO: 30477 - RNA, 18 nt, Artificial Sequence
  Synthetic
agauagcauaggguacca

SEQ ID NO: 30478 - RNA, 19 nt, Artificial Sequence
  Synthetic
aagauagcauaggguacca

SEQ ID NO: 30479 - RNA, 20 nt, Artificial Sequence
  Synthetic
uaagauagcauaggguacca

SEQ ID NO: 30480 - RNA, 21 nt, Artificial Sequence
  Synthetic
auaagauagcauaggguacca

SEQ ID NO: 30481 - RNA, 22 nt, Artificial Sequence
  Synthetic
aauaagauagcauaggguacca

SEQ ID NO: 30482 - RNA, 24 nt, Artificial Sequence
  Synthetic
agaauaagauagcauaggguacca

SEQ ID NO: 30483 - RNA, 18 nt, Artificial Sequence
  Synthetic
aaggagucagacuuacca

SEQ ID NO: 30484 - RNA, 19 nt, Artificial Sequence
  Synthetic
uaaggagucagacuuacca

SEQ ID NO: 30485 - RNA, 23 nt, Artificial Sequence
  Synthetic
uggguaaggagucagacuuacca

SEQ ID NO: 30486 - RNA, 18 nt, Artificial Sequence
  Synthetic
auugauuuauacuuacca

SEQ ID NO: 30487 - RNA, 20 nt, Artificial Sequence
  Synthetic
agauugauuuauacuuacca

SEQ ID NO: 30488 - RNA, 21 nt, Artificial Sequence
  Synthetic
uagauugauuuauacuuacca

SEQ ID NO: 30489 - RNA, 22 nt, Artificial Sequence
  Synthetic
auagauugauuuauacuuacca

SEQ ID NO: 30490 - RNA, 23 nt, Artificial Sequence
  Synthetic
uauagauugauuuauacuuacca

SEQ ID NO: 30491 - RNA, 24 nt, Artificial Sequence
  Synthetic
uuauagauugauuuauacuuacca

SEQ ID NO: 30492 - RNA, 18 nt, Artificial Sequence
  Synthetic
uacuguucauucuuacca

SEQ ID NO: 30493 - RNA, 19 nt, Artificial Sequence
  Synthetic
auacuguucauucuuacca

SEQ ID NO: 30494 - RNA, 20 nt, Artificial Sequence
  Synthetic
uauacuguucauucuuacca

SEQ ID NO: 30495 - RNA, 21 nt, Artificial Sequence
  Synthetic
auauacuguucauucuuacca

SEQ ID NO: 30496 - RNA, 22 nt, Artificial Sequence
  Synthetic
cauauacuguucauucuuacca

SEQ ID NO: 30497 - RNA, 23 nt, Artificial Sequence
  Synthetic
ccauauacuguucauucuuacca

SEQ ID NO: 30498 - RNA, 24 nt, Artificial Sequence
  Synthetic
uccauauacuguucauucuuacca

SEQ ID NO: 30499 - RNA, 18 nt, Artificial Sequence
  Synthetic
aagacccaaauaaaccca

SEQ ID NO: 30500 - RNA, 19 nt, Artificial Sequence
  Synthetic
uaagacccaaauaaaccca

SEQ ID NO: 30501 - RNA, 20 nt, Artificial Sequence
  Synthetic
uuaagacccaaauaaaccca

SEQ ID NO: 30502 - RNA, 21 nt, Artificial Sequence
  Synthetic
auuaagacccaaauaaaccca

SEQ ID NO: 30503 - RNA, 22 nt, Artificial Sequence
  Synthetic
uauuaagacccaaauaaaccca

SEQ ID NO: 30504 - RNA, 23 nt, Artificial Sequence
  Synthetic
uuauuaagacccaaauaaaccca

SEQ ID NO: 30505 - RNA, 24 nt, Artificial Sequence
  Synthetic
auuauuaagacccaaauaaaccca

SEQ ID NO: 30506 - RNA, 18 nt, Artificial Sequence
  Synthetic
cagagcagaggcaaccca

SEQ ID NO: 30507 - RNA, 19 nt, Artificial Sequence
  Synthetic
ucagagcagaggcaaccca

SEQ ID NO: 30508 - RNA, 21 nt, Artificial Sequence
  Synthetic
agucagagcagaggcaaccca

SEQ ID NO: 30509 - RNA, 23 nt, Artificial Sequence
  Synthetic
ugagucagagcagaggcaaccca

SEQ ID NO: 30510 - RNA, 24 nt, Artificial Sequence
  Synthetic
augagucagagcagaggcaaccca

SEQ ID NO: 30511 - RNA, 18 nt, Artificial Sequence
  Synthetic
aucuucuuccugaaccca

SEQ ID NO: 30512 - RNA, 19 nt, Artificial Sequence
  Synthetic
caucuucuuccugaaccca

SEQ ID NO: 30513 - RNA, 20 nt, Artificial Sequence
  Synthetic
ucaucuucuuccugaaccca

SEQ ID NO: 30514 - RNA, 21 nt, Artificial Sequence
  Synthetic
cucaucuucuuccugaaccca

SEQ ID NO: 30515 - RNA, 22 nt, Artificial Sequence
  Synthetic
acucaucuucuuccugaaccca

SEQ ID NO: 30516 - RNA, 23 nt, Artificial Sequence
  Synthetic
uacucaucuucuuccugaaccca

SEQ ID NO: 30517 - RNA, 24 nt, Artificial Sequence
  Synthetic
auacucaucuucuuccugaaccca

SEQ ID NO: 30518 - RNA, 18 nt, Artificial Sequence
  Synthetic
uuaagaucaaauaaccca

SEQ ID NO: 30519 - RNA, 19 nt, Artificial Sequence
  Synthetic
uuuaagaucaaauaaccca

SEQ ID NO: 30520 - RNA, 20 nt, Artificial Sequence
  Synthetic
cuuuaagaucaaauaaccca

SEQ ID NO: 30521 - RNA, 22 nt, Artificial Sequence
  Synthetic
ugcuuuaagaucaaauaaccca

SEQ ID NO: 30522 - RNA, 23 nt, Artificial Sequence
  Synthetic
augcuuuaagaucaaauaaccca

SEQ ID NO: 30523 - RNA, 24 nt, Artificial Sequence
  Synthetic
aaugcuuuaagaucaaauaaccca

SEQ ID NO: 30524 - RNA, 18 nt, Artificial Sequence
  Synthetic
caugauuuguuuaaccca

SEQ ID NO: 30525 - RNA, 19 nt, Artificial Sequence
  Synthetic
ucaugauuuguuuaaccca

SEQ ID NO: 30526 - RNA, 20 nt, Artificial Sequence
  Synthetic
aucaugauuuguuuaaccca

SEQ ID NO: 30527 - RNA, 21 nt, Artificial Sequence
  Synthetic
aaucaugauuuguuuaaccca

SEQ ID NO: 30528 - RNA, 22 nt, Artificial Sequence
  Synthetic
aaaucaugauuuguuuaaccca

SEQ ID NO: 30529 - RNA, 23 nt, Artificial Sequence
  Synthetic
aaaaucaugauuuguuuaaccca

SEQ ID NO: 30530 - RNA, 24 nt, Artificial Sequence
  Synthetic
uaaaaucaugauuuguuuaaccca

SEQ ID NO: 30531 - RNA, 18 nt, Artificial Sequence
  Synthetic
aagcaagguaaacaccca

SEQ ID NO: 30532 - RNA, 19 nt, Artificial Sequence
  Synthetic
uaagcaagguaaacaccca

SEQ ID NO: 30533 - RNA, 20 nt, Artificial Sequence
  Synthetic
uuaagcaagguaaacaccca

SEQ ID NO: 30534 - RNA, 21 nt, Artificial Sequence
  Synthetic
cuuaagcaagguaaacaccca

SEQ ID NO: 30535 - RNA, 22 nt, Artificial Sequence
  Synthetic
acuuaagcaagguaaacaccca

SEQ ID NO: 30536 - RNA, 24 nt, Artificial Sequence
  Synthetic
ugacuuaagcaagguaaacaccca

SEQ ID NO: 30537 - RNA, 19 nt, Artificial Sequence
  Synthetic
agaacucuguuugcaccca

SEQ ID NO: 30538 - RNA, 20 nt, Artificial Sequence
  Synthetic
uagaacucuguuugcaccca

SEQ ID NO: 30539 - RNA, 21 nt, Artificial Sequence
  Synthetic
uuagaacucuguuugcaccca

SEQ ID NO: 30540 - RNA, 22 nt, Artificial Sequence
  Synthetic
cuuagaacucuguuugcaccca

SEQ ID NO: 30541 - RNA, 20 nt, Artificial Sequence
  Synthetic
aggccccuauccuagaccca

SEQ ID NO: 30542 - RNA, 22 nt, Artificial Sequence
  Synthetic
ugaggccccuauccuagaccca

SEQ ID NO: 30543 - RNA, 23 nt, Artificial Sequence
  Synthetic
cugaggccccuauccuagaccca

SEQ ID NO: 30544 - RNA, 24 nt, Artificial Sequence
  Synthetic
ucugaggccccuauccuagaccca

SEQ ID NO: 30545 - RNA, 18 nt, Artificial Sequence
  Synthetic
ccucaaaaucuagaccca

SEQ ID NO: 30546 - RNA, 19 nt, Artificial Sequence
  Synthetic
cccucaaaaucuagaccca

SEQ ID NO: 30547 - RNA, 20 nt, Artificial Sequence
  Synthetic
acccucaaaaucuagaccca

SEQ ID NO: 30548 - RNA, 22 nt, Artificial Sequence
  Synthetic
agacccucaaaaucuagaccca

SEQ ID NO: 30549 - RNA, 23 nt, Artificial Sequence
  Synthetic
uagacccucaaaaucuagaccca

SEQ ID NO: 30550 - RNA, 24 nt, Artificial Sequence
  Synthetic
auagacccucaaaaucuagaccca

SEQ ID NO: 30551 - RNA, 22 nt, Artificial Sequence
  Synthetic
aggagccuucagaaaugaccca

SEQ ID NO: 30552 - RNA, 23 nt, Artificial Sequence
  Synthetic
caggagccuucagaaaugaccca

SEQ ID NO: 30553 - RNA, 24 nt, Artificial Sequence
  Synthetic
acaggagccuucagaaaugaccca

SEQ ID NO: 30554 - RNA, 18 nt, Artificial Sequence
  Synthetic
auccaaauccuugaccca

SEQ ID NO: 30555 - RNA, 19 nt, Artificial Sequence
  Synthetic
uauccaaauccuugaccca

SEQ ID NO: 30556 - RNA, 20 nt, Artificial Sequence
  Synthetic
cuauccaaauccuugaccca

SEQ ID NO: 30557 - RNA, 19 nt, Artificial Sequence
  Synthetic
ugaaacucaaauauaccca

SEQ ID NO: 30558 - RNA, 20 nt, Artificial Sequence
  Synthetic
uugaaacucaaauauaccca

SEQ ID NO: 30559 - RNA, 21 nt, Artificial Sequence
  Synthetic
auugaaacucaaauauaccca

SEQ ID NO: 30560 - RNA, 22 nt, Artificial Sequence
  Synthetic
cauugaaacucaaauauaccca

SEQ ID NO: 30561 - RNA, 23 nt, Artificial Sequence
  Synthetic
acauugaaacucaaauauaccca

SEQ ID NO: 30562 - RNA, 24 nt, Artificial Sequence
  Synthetic
uacauugaaacucaaauauaccca

SEQ ID NO: 30563 - RNA, 18 nt, Artificial Sequence
  Synthetic
uuaugauacaacuaccca

SEQ ID NO: 30564 - RNA, 19 nt, Artificial Sequence
  Synthetic
cuuaugauacaacuaccca

SEQ ID NO: 30565 - RNA, 20 nt, Artificial Sequence
  Synthetic
acuuaugauacaacuaccca

SEQ ID NO: 30566 - RNA, 21 nt, Artificial Sequence
  Synthetic
aacuuaugauacaacuaccca

SEQ ID NO: 30567 - RNA, 22 nt, Artificial Sequence
  Synthetic
aaacuuaugauacaacuaccca

SEQ ID NO: 30568 - RNA, 23 nt, Artificial Sequence
  Synthetic
aaaacuuaugauacaacuaccca

SEQ ID NO: 30569 - RNA, 24 nt, Artificial Sequence
  Synthetic
aaaaacuuaugauacaacuaccca

SEQ ID NO: 30570 - RNA, 18 nt, Artificial Sequence
  Synthetic
cuugccggauuuuaccca

SEQ ID NO: 30571 - RNA, 20 nt, Artificial Sequence
  Synthetic
agcuugccggauuuuaccca

SEQ ID NO: 30572 - RNA, 21 nt, Artificial Sequence
  Synthetic
cagcuugccggauuuuaccca

SEQ ID NO: 30573 - RNA, 22 nt, Artificial Sequence
  Synthetic
acagcuugccggauuuuaccca

SEQ ID NO: 30574 - RNA, 23 nt, Artificial Sequence
  Synthetic
cacagcuugccggauuuuaccca

SEQ ID NO: 30575 - RNA, 24 nt, Artificial Sequence
  Synthetic
acacagcuugccggauuuuaccca

SEQ ID NO: 30576 - RNA, 18 nt, Artificial Sequence
  Synthetic
ugaauuccagacacccca

SEQ ID NO: 30577 - RNA, 20 nt, Artificial Sequence
  Synthetic
ugugaauuccagacacccca

SEQ ID NO: 30578 - RNA, 21 nt, Artificial Sequence
  Synthetic
cugugaauuccagacacccca

SEQ ID NO: 30579 - RNA, 23 nt, Artificial Sequence
  Synthetic
agcugugaauuccagacacccca

SEQ ID NO: 30580 - RNA, 24 nt, Artificial Sequence
  Synthetic
aagcugugaauuccagacacccca

SEQ ID NO: 30581 - RNA, 22 nt, Artificial Sequence
  Synthetic
uggcagcucagaugagccccca

SEQ ID NO: 30582 - RNA, 23 nt, Artificial Sequence
  Synthetic
uuggcagcucagaugagccccca

SEQ ID NO: 30583 - RNA, 24 nt, Artificial Sequence
  Synthetic
uuuggcagcucagaugagccccca

SEQ ID NO: 30584 - RNA, 18 nt, Artificial Sequence
  Synthetic
aucucuuaauauccccca

SEQ ID NO: 30585 - RNA, 20 nt, Artificial Sequence
  Synthetic
agaucucuuaauauccccca

SEQ ID NO: 30586 - RNA, 21 nt, Artificial Sequence
  Synthetic
aagaucucuuaauauccccca

SEQ ID NO: 30587 - RNA, 22 nt, Artificial Sequence
  Synthetic
caagaucucuuaauauccccca

SEQ ID NO: 30588 - RNA, 23 nt, Artificial Sequence
  Synthetic
ucaagaucucuuaauauccccca

SEQ ID NO: 30589 - RNA, 24 nt, Artificial Sequence
  Synthetic
cucaagaucucuuaauauccccca

SEQ ID NO: 30590 - RNA, 18 nt, Artificial Sequence
  Synthetic
auuguaagacaaucccca

SEQ ID NO: 30591 - RNA, 19 nt, Artificial Sequence
  Synthetic
cauuguaagacaaucccca

SEQ ID NO: 30592 - RNA, 20 nt, Artificial Sequence
  Synthetic
ccauuguaagacaaucccca

SEQ ID NO: 30593 - RNA, 22 nt, Artificial Sequence
  Synthetic
cgccauuguaagacaaucccca

SEQ ID NO: 30594 - RNA, 23 nt, Artificial Sequence
  Synthetic
ccgccauuguaagacaaucccca

SEQ ID NO: 30595 - RNA, 24 nt, Artificial Sequence
  Synthetic
uccgccauuguaagacaaucccca

SEQ ID NO: 30596 - RNA, 18 nt, Artificial Sequence
  Synthetic
ugucuaaaauccucccca

SEQ ID NO: 30597 - RNA, 19 nt, Artificial Sequence
  Synthetic
augucuaaaauccucccca

SEQ ID NO: 30598 - RNA, 20 nt, Artificial Sequence
  Synthetic
uaugucuaaaauccucccca

SEQ ID NO: 30599 - RNA, 22 nt, Artificial Sequence
  Synthetic
aguaugucuaaaauccucccca

SEQ ID NO: 30600 - RNA, 23 nt, Artificial Sequence
  Synthetic
aaguaugucuaaaauccucccca

SEQ ID NO: 30601 - RNA, 24 nt, Artificial Sequence
  Synthetic
caaguaugucuaaaauccucccca

SEQ ID NO: 30602 - RNA, 19 nt, Artificial Sequence
  Synthetic
uguguagguugucucccca

SEQ ID NO: 30603 - RNA, 21 nt, Artificial Sequence
  Synthetic
cguguguagguugucucccca

SEQ ID NO: 30604 - RNA, 22 nt, Artificial Sequence
  Synthetic
ucguguguagguugucucccca

SEQ ID NO: 30605 - RNA, 23 nt, Artificial Sequence
  Synthetic
uucguguguagguugucucccca

SEQ ID NO: 30606 - RNA, 24 nt, Artificial Sequence
  Synthetic
cuucguguguagguugucucccca

SEQ ID NO: 30607 - RNA, 18 nt, Artificial Sequence
  Synthetic
uauuuuucaacuucccca

SEQ ID NO: 30608 - RNA, 19 nt, Artificial Sequence
  Synthetic
auauuuuucaacuucccca

SEQ ID NO: 30609 - RNA, 20 nt, Artificial Sequence
  Synthetic
cauauuuuucaacuucccca

SEQ ID NO: 30610 - RNA, 21 nt, Artificial Sequence
  Synthetic
ucauauuuuucaacuucccca

SEQ ID NO: 30611 - RNA, 22 nt, Artificial Sequence
  Synthetic
aucauauuuuucaacuucccca

SEQ ID NO: 30612 - RNA, 23 nt, Artificial Sequence
  Synthetic
aaucauauuuuucaacuucccca

SEQ ID NO: 30613 - RNA, 24 nt, Artificial Sequence
  Synthetic
aaaucauauuuuucaacuucccca

SEQ ID NO: 30614 - RNA, 18 nt, Artificial Sequence
  Synthetic
agaccagccacuucccca

SEQ ID NO: 30615 - RNA, 20 nt, Artificial Sequence
  Synthetic
cgagaccagccacuucccca

SEQ ID NO: 30616 - RNA, 21 nt, Artificial Sequence
  Synthetic
ucgagaccagccacuucccca

SEQ ID NO: 30617 - RNA, 22 nt, Artificial Sequence
  Synthetic
aucgagaccagccacuucccca

SEQ ID NO: 30618 - RNA, 23 nt, Artificial Sequence
  Synthetic
aaucgagaccagccacuucccca

SEQ ID NO: 30619 - RNA, 24 nt, Artificial Sequence
  Synthetic
caaucgagaccagccacuucccca

SEQ ID NO: 30620 - RNA, 18 nt, Artificial Sequence
  Synthetic
uauacagaguagagccca

SEQ ID NO: 30621 - RNA, 20 nt, Artificial Sequence
  Synthetic
aguauacagaguagagccca

SEQ ID NO: 30622 - RNA, 21 nt, Artificial Sequence
  Synthetic
caguauacagaguagagccca

SEQ ID NO: 30623 - RNA, 23 nt, Artificial Sequence
  Synthetic
agcaguauacagaguagagccca

SEQ ID NO: 30624 - RNA, 24 nt, Artificial Sequence
  Synthetic
aagcaguauacagaguagagccca

SEQ ID NO: 30625 - RNA, 21 nt, Artificial Sequence
  Synthetic
aggcagcucugcugacgccca

SEQ ID NO: 30626 - RNA, 22 nt, Artificial Sequence
  Synthetic
aaggcagcucugcugacgccca

SEQ ID NO: 30627 - RNA, 23 nt, Artificial Sequence
  Synthetic
caaggcagcucugcugacgccca

SEQ ID NO: 30628 - RNA, 24 nt, Artificial Sequence
  Synthetic
ucaaggcagcucugcugacgccca

SEQ ID NO: 30629 - RNA, 18 nt, Artificial Sequence
  Synthetic
ugccacagcaaaggccca

SEQ ID NO: 30630 - RNA, 19 nt, Artificial Sequence
  Synthetic
augccacagcaaaggccca

SEQ ID NO: 30631 - RNA, 20 nt, Artificial Sequence
  Synthetic
uaugccacagcaaaggccca

SEQ ID NO: 30632 - RNA, 21 nt, Artificial Sequence
  Synthetic
cuaugccacagcaaaggccca

SEQ ID NO: 30633 - RNA, 22 nt, Artificial Sequence
  Synthetic
acuaugccacagcaaaggccca

SEQ ID NO: 30634 - RNA, 24 nt, Artificial Sequence
  Synthetic
agacuaugccacagcaaaggccca

SEQ ID NO: 30635 - RNA, 18 nt, Artificial Sequence
  Synthetic
ugauuuggucgaggccca

SEQ ID NO: 30636 - RNA, 19 nt, Artificial Sequence
  Synthetic
uugauuuggucgaggccca

SEQ ID NO: 30637 - RNA, 20 nt, Artificial Sequence
  Synthetic
cuugauuuggucgaggccca

SEQ ID NO: 30638 - RNA, 21 nt, Artificial Sequence
  Synthetic
acuugauuuggucgaggccca

SEQ ID NO: 30639 - RNA, 22 nt, Artificial Sequence
  Synthetic
uacuugauuuggucgaggccca

SEQ ID NO: 30640 - RNA, 24 nt, Artificial Sequence
  Synthetic
cguacuugauuuggucgaggccca

SEQ ID NO: 30641 - RNA, 18 nt, Artificial Sequence
  Synthetic
aaggaguuugugggccca

SEQ ID NO: 30642 - RNA, 19 nt, Artificial Sequence
  Synthetic
aaaggaguuugugggccca

SEQ ID NO: 30643 - RNA, 20 nt, Artificial Sequence
  Synthetic
caaaggaguuugugggccca

SEQ ID NO: 30644 - RNA, 22 nt, Artificial Sequence
  Synthetic
ugcaaaggaguuugugggccca

SEQ ID NO: 30645 - RNA, 23 nt, Artificial Sequence
  Synthetic
uugcaaaggaguuugugggccca

SEQ ID NO: 30646 - RNA, 18 nt, Artificial Sequence
  Synthetic
uacuaacuauaaugccca

SEQ ID NO: 30647 - RNA, 19 nt, Artificial Sequence
  Synthetic
uuacuaacuauaaugccca

SEQ ID NO: 30648 - RNA, 20 nt, Artificial Sequence
  Synthetic
uuuacuaacuauaaugccca

SEQ ID NO: 30649 - RNA, 23 nt, Artificial Sequence
  Synthetic
ugguuuacuaacuauaaugccca

SEQ ID NO: 30650 - RNA, 24 nt, Artificial Sequence
  Synthetic
cugguuuacuaacuauaaugccca

SEQ ID NO: 30651 - RNA, 22 nt, Artificial Sequence
  Synthetic
ugaaauguuauauucuugccca

SEQ ID NO: 30652 - RNA, 23 nt, Artificial Sequence
  Synthetic
cugaaauguuauauucuugccca

SEQ ID NO: 30653 - RNA, 24 nt, Artificial Sequence
  Synthetic
acugaaauguuauauucuugccca

SEQ ID NO: 30654 - RNA, 18 nt, Artificial Sequence
  Synthetic
aucuuauuaaguugccca

SEQ ID NO: 30655 - RNA, 20 nt, Artificial Sequence
  Synthetic
ugaucuuauuaaguugccca

SEQ ID NO: 30656 - RNA, 21 nt, Artificial Sequence
  Synthetic
cugaucuuauuaaguugccca

SEQ ID NO: 30657 - RNA, 22 nt, Artificial Sequence
  Synthetic
ccugaucuuauuaaguugccca

SEQ ID NO: 30658 - RNA, 23 nt, Artificial Sequence
  Synthetic
cccugaucuuauuaaguugccca

SEQ ID NO: 30659 - RNA, 24 nt, Artificial Sequence
  Synthetic
acccugaucuuauuaaguugccca

SEQ ID NO: 30660 - RNA, 18 nt, Artificial Sequence
  Synthetic
cuuugaaacauuugccca

SEQ ID NO: 30661 - RNA, 19 nt, Artificial Sequence
  Synthetic
acuuugaaacauuugccca

SEQ ID NO: 30662 - RNA, 21 nt, Artificial Sequence
  Synthetic
ugacuuugaaacauuugccca

SEQ ID NO: 30663 - RNA, 22 nt, Artificial Sequence
  Synthetic
cugacuuugaaacauuugccca

SEQ ID NO: 30664 - RNA, 23 nt, Artificial Sequence
  Synthetic
acugacuuugaaacauuugccca

SEQ ID NO: 30665 - RNA, 24 nt, Artificial Sequence
  Synthetic
aacugacuuugaaacauuugccca

SEQ ID NO: 30666 - RNA, 18 nt, Artificial Sequence
  Synthetic
ccagguuccuccauccca

SEQ ID NO: 30667 - RNA, 19 nt, Artificial Sequence
  Synthetic
uccagguuccuccauccca

SEQ ID NO: 30668 - RNA, 20 nt, Artificial Sequence
  Synthetic
auccagguuccuccauccca

SEQ ID NO: 30669 - RNA, 21 nt, Artificial Sequence
  Synthetic
cauccagguuccuccauccca

SEQ ID NO: 30670 - RNA, 22 nt, Artificial Sequence
  Synthetic
acauccagguuccuccauccca

SEQ ID NO: 30671 - RNA, 23 nt, Artificial Sequence
  Synthetic
cacauccagguuccuccauccca

SEQ ID NO: 30672 - RNA, 24 nt, Artificial Sequence
  Synthetic
acacauccagguuccuccauccca

SEQ ID NO: 30673 - RNA, 21 nt, Artificial Sequence
  Synthetic
aaaaaaagaaaugauauccca

SEQ ID NO: 30674 - RNA, 22 nt, Artificial Sequence
  Synthetic
caaaaaaagaaaugauauccca

SEQ ID NO: 30675 - RNA, 23 nt, Artificial Sequence
  Synthetic
ucaaaaaaagaaaugauauccca

SEQ ID NO: 30676 - RNA, 24 nt, Artificial Sequence
  Synthetic
uucaaaaaaagaaaugauauccca

SEQ ID NO: 30677 - RNA, 19 nt, Artificial Sequence
  Synthetic
uguuccucacaaccuccca

SEQ ID NO: 30678 - RNA, 21 nt, Artificial Sequence
  Synthetic
uguguuccucacaaccuccca

SEQ ID NO: 30679 - RNA, 23 nt, Artificial Sequence
  Synthetic
uguguguuccucacaaccuccca

SEQ ID NO: 30680 - RNA, 19 nt, Artificial Sequence
  Synthetic
aggaagcucaaggcuccca

SEQ ID NO: 30681 - RNA, 20 nt, Artificial Sequence
  Synthetic
aaggaagcucaaggcuccca

SEQ ID NO: 30682 - RNA, 21 nt, Artificial Sequence
  Synthetic
aaaggaagcucaaggcuccca

SEQ ID NO: 30683 - RNA, 24 nt, Artificial Sequence
  Synthetic
aggaaaggaagcucaaggcuccca

SEQ ID NO: 30684 - RNA, 21 nt, Artificial Sequence
  Synthetic
aagcuguuuuuuuuucuccca

SEQ ID NO: 30685 - RNA, 23 nt, Artificial Sequence
  Synthetic
ugaagcuguuuuuuuuucuccca

SEQ ID NO: 30686 - RNA, 24 nt, Artificial Sequence
  Synthetic
augaagcuguuuuuuuuucuccca

SEQ ID NO: 30687 - RNA, 18 nt, Artificial Sequence
  Synthetic
auuauuuauaguguccca

SEQ ID NO: 30688 - RNA, 19 nt, Artificial Sequence
  Synthetic
aauuauuuauaguguccca

SEQ ID NO: 30689 - RNA, 20 nt, Artificial Sequence
  Synthetic
uaauuauuuauaguguccca

SEQ ID NO: 30690 - RNA, 21 nt, Artificial Sequence
  Synthetic
uuaauuauuuauaguguccca

SEQ ID NO: 30691 - RNA, 22 nt, Artificial Sequence
  Synthetic
cuuaauuauuuauaguguccca

SEQ ID NO: 30692 - RNA, 23 nt, Artificial Sequence
  Synthetic
acuuaauuauuuauaguguccca

SEQ ID NO: 30693 - RNA, 24 nt, Artificial Sequence
  Synthetic
uacuuaauuauuuauaguguccca

SEQ ID NO: 30694 - RNA, 19 nt, Artificial Sequence
  Synthetic
aguuuucuuuuguguccca

SEQ ID NO: 30695 - RNA, 20 nt, Artificial Sequence
  Synthetic
caguuuucuuuuguguccca

SEQ ID NO: 30696 - RNA, 21 nt, Artificial Sequence
  Synthetic
acaguuuucuuuuguguccca

SEQ ID NO: 30697 - RNA, 22 nt, Artificial Sequence
  Synthetic
cacaguuuucuuuuguguccca

SEQ ID NO: 30698 - RNA, 23 nt, Artificial Sequence
  Synthetic
ucacaguuuucuuuuguguccca

SEQ ID NO: 30699 - RNA, 24 nt, Artificial Sequence
  Synthetic
uucacaguuuucuuuuguguccca

SEQ ID NO: 30700 - RNA, 18 nt, Artificial Sequence
  Synthetic
cuauggggucuguuccca

SEQ ID NO: 30701 - RNA, 20 nt, Artificial Sequence
  Synthetic
agcuauggggucuguuccca

SEQ ID NO: 30702 - RNA, 21 nt, Artificial Sequence
  Synthetic
uagcuauggggucuguuccca

SEQ ID NO: 30703 - RNA, 22 nt, Artificial Sequence
  Synthetic
uuagcuauggggucuguuccca

SEQ ID NO: 30704 - RNA, 23 nt, Artificial Sequence
  Synthetic
uuuagcuauggggucuguuccca

SEQ ID NO: 30705 - RNA, 24 nt, Artificial Sequence
  Synthetic
cuuuagcuauggggucuguuccca

SEQ ID NO: 30706 - RNA, 18 nt, Artificial Sequence
  Synthetic
uagccucaaacaaagcca

SEQ ID NO: 30707 - RNA, 19 nt, Artificial Sequence
  Synthetic
uuagccucaaacaaagcca

SEQ ID NO: 30708 - RNA, 20 nt, Artificial Sequence
  Synthetic
auuagccucaaacaaagcca

SEQ ID NO: 30709 - RNA, 21 nt, Artificial Sequence
  Synthetic
cauuagccucaaacaaagcca

SEQ ID NO: 30710 - RNA, 22 nt, Artificial Sequence
  Synthetic
ccauuagccucaaacaaagcca

SEQ ID NO: 30711 - RNA, 24 nt, Artificial Sequence
  Synthetic
agccauuagccucaaacaaagcca

SEQ ID NO: 30712 - RNA, 18 nt, Artificial Sequence
  Synthetic
uccauguggccaaagcca

SEQ ID NO: 30713 - RNA, 19 nt, Artificial Sequence
  Synthetic
uuccauguggccaaagcca

SEQ ID NO: 30714 - RNA, 20 nt, Artificial Sequence
  Synthetic
auuccauguggccaaagcca

SEQ ID NO: 30715 - RNA, 21 nt, Artificial Sequence
  Synthetic
aauuccauguggccaaagcca

SEQ ID NO: 30716 - RNA, 18 nt, Artificial Sequence
  Synthetic
aaaugcugggcccagcca

SEQ ID NO: 30717 - RNA, 19 nt, Artificial Sequence
  Synthetic
uaaaugcugggcccagcca

SEQ ID NO: 30718 - RNA, 20 nt, Artificial Sequence
  Synthetic
cuaaaugcugggcccagcca

SEQ ID NO: 30719 - RNA, 21 nt, Artificial Sequence
  Synthetic
ucuaaaugcugggcccagcca

SEQ ID NO: 30720 - RNA, 22 nt, Artificial Sequence
  Synthetic
aucuaaaugcugggcccagcca

SEQ ID NO: 30721 - RNA, 23 nt, Artificial Sequence
  Synthetic
aaucuaaaugcugggcccagcca

SEQ ID NO: 30722 - RNA, 24 nt, Artificial Sequence
  Synthetic
caaucuaaaugcugggcccagcca

SEQ ID NO: 30723 - RNA, 18 nt, Artificial Sequence
  Synthetic
ugguauauugagcagcca

SEQ ID NO: 30724 - RNA, 22 nt, Artificial Sequence
  Synthetic
cgggugguauauugagcagcca

SEQ ID NO: 30725 - RNA, 23 nt, Artificial Sequence
  Synthetic
acgggugguauauugagcagcca

SEQ ID NO: 30726 - RNA, 24 nt, Artificial Sequence
  Synthetic
cacgggugguauauugagcagcca

SEQ ID NO: 30727 - RNA, 18 nt, Artificial Sequence
  Synthetic
agguaagggagucagcca

SEQ ID NO: 30728 - RNA, 19 nt, Artificial Sequence
  Synthetic
aagguaagggagucagcca

SEQ ID NO: 30729 - RNA, 21 nt, Artificial Sequence
  Synthetic
agaagguaagggagucagcca

SEQ ID NO: 30730 - RNA, 22 nt, Artificial Sequence
  Synthetic
aagaagguaagggagucagcca

SEQ ID NO: 30731 - RNA, 18 nt, Artificial Sequence
  Synthetic
cucacgcucauagagcca

SEQ ID NO: 30732 - RNA, 19 nt, Artificial Sequence
  Synthetic
acucacgcucauagagcca

SEQ ID NO: 30733 - RNA, 20 nt, Artificial Sequence
  Synthetic
uacucacgcucauagagcca

SEQ ID NO: 30734 - RNA, 21 nt, Artificial Sequence
  Synthetic
uuacucacgcucauagagcca

SEQ ID NO: 30735 - RNA, 22 nt, Artificial Sequence
  Synthetic
cuuacucacgcucauagagcca

SEQ ID NO: 30736 - RNA, 23 nt, Artificial Sequence
  Synthetic
acuuacucacgcucauagagcca

SEQ ID NO: 30737 - RNA, 24 nt, Artificial Sequence
  Synthetic
aacuuacucacgcucauagagcca

SEQ ID NO: 30738 - RNA, 18 nt, Artificial Sequence
  Synthetic
agaaaaauaguagagcca

SEQ ID NO: 30739 - RNA, 19 nt, Artificial Sequence
  Synthetic
cagaaaaauaguagagcca

SEQ ID NO: 30740 - RNA, 20 nt, Artificial Sequence
  Synthetic
ucagaaaaauaguagagcca

SEQ ID NO: 30741 - RNA, 21 nt, Artificial Sequence
  Synthetic
uucagaaaaauaguagagcca

SEQ ID NO: 30742 - RNA, 22 nt, Artificial Sequence
  Synthetic
cuucagaaaaauaguagagcca

SEQ ID NO: 30743 - RNA, 23 nt, Artificial Sequence
  Synthetic
ucuucagaaaaauaguagagcca

SEQ ID NO: 30744 - RNA, 24 nt, Artificial Sequence
  Synthetic
uucuucagaaaaauaguagagcca

SEQ ID NO: 30745 - RNA, 18 nt, Artificial Sequence
  Synthetic
aacuggagaaaggagcca

SEQ ID NO: 30746 - RNA, 19 nt, Artificial Sequence
  Synthetic
aaacuggagaaaggagcca

SEQ ID NO: 30747 - RNA, 20 nt, Artificial Sequence
  Synthetic
aaaacuggagaaaggagcca

SEQ ID NO: 30748 - RNA, 21 nt, Artificial Sequence
  Synthetic
aaaaacuggagaaaggagcca

SEQ ID NO: 30749 - RNA, 22 nt, Artificial Sequence
  Synthetic
aaaaaacuggagaaaggagcca

SEQ ID NO: 30750 - RNA, 23 nt, Artificial Sequence
  Synthetic
aaaaaaacuggagaaaggagcca

SEQ ID NO: 30751 - RNA, 24 nt, Artificial Sequence
  Synthetic
aaaaaaaacuggagaaaggagcca

SEQ ID NO: 30752 - RNA, 19 nt, Artificial Sequence
  Synthetic
agaugaauuguucuagcca

SEQ ID NO: 30753 - RNA, 22 nt, Artificial Sequence
  Synthetic
aggagaugaauuguucuagcca

SEQ ID NO: 30754 - RNA, 23 nt, Artificial Sequence
  Synthetic
aaggagaugaauuguucuagcca

SEQ ID NO: 30755 - RNA, 24 nt, Artificial Sequence
  Synthetic
aaaggagaugaauuguucuagcca

SEQ ID NO: 30756 - RNA, 18 nt, Artificial Sequence
  Synthetic
agaguugccccugcgcca

SEQ ID NO: 30757 - RNA, 19 nt, Artificial Sequence
  Synthetic
aagaguugccccugcgcca

SEQ ID NO: 30758 - RNA, 18 nt, Artificial Sequence
  Synthetic
aagaaaagucacaggcca

SEQ ID NO: 30759 - RNA, 19 nt, Artificial Sequence
  Synthetic
uaagaaaagucacaggcca

SEQ ID NO: 30760 - RNA, 20 nt, Artificial Sequence
  Synthetic
auaagaaaagucacaggcca

SEQ ID NO: 30761 - RNA, 21 nt, Artificial Sequence
  Synthetic
uauaagaaaagucacaggcca

SEQ ID NO: 30762 - RNA, 22 nt, Artificial Sequence
  Synthetic
cuauaagaaaagucacaggcca

SEQ ID NO: 30763 - RNA, 23 nt, Artificial Sequence
  Synthetic
ucuauaagaaaagucacaggcca

SEQ ID NO: 30764 - RNA, 24 nt, Artificial Sequence
  Synthetic
aucuauaagaaaagucacaggcca

SEQ ID NO: 30765 - RNA, 18 nt, Artificial Sequence
  Synthetic
uuguuucaaacacggcca

SEQ ID NO: 30766 - RNA, 19 nt, Artificial Sequence
  Synthetic
cuuguuucaaacacggcca

SEQ ID NO: 30767 - RNA, 20 nt, Artificial Sequence
  Synthetic
ucuuguuucaaacacggcca

SEQ ID NO: 30768 - RNA, 22 nt, Artificial Sequence
  Synthetic
ugucuuguuucaaacacggcca

SEQ ID NO: 30769 - RNA, 23 nt, Artificial Sequence
  Synthetic
cugucuuguuucaaacacggcca

SEQ ID NO: 30770 - RNA, 24 nt, Artificial Sequence
  Synthetic
ucugucuuguuucaaacacggcca

SEQ ID NO: 30771 - RNA, 18 nt, Artificial Sequence
  Synthetic
uguaaacguaaagggcca

SEQ ID NO: 30772 - RNA, 19 nt, Artificial Sequence
  Synthetic
auguaaacguaaagggcca

SEQ ID NO: 30773 - RNA, 20 nt, Artificial Sequence
  Synthetic
aauguaaacguaaagggcca

SEQ ID NO: 30774 - RNA, 21 nt, Artificial Sequence
  Synthetic
uaauguaaacguaaagggcca

SEQ ID NO: 30775 - RNA, 23 nt, Artificial Sequence
  Synthetic
uguaauguaaacguaaagggcca

SEQ ID NO: 30776 - RNA, 24 nt, Artificial Sequence
  Synthetic
cuguaauguaaacguaaagggcca

SEQ ID NO: 30777 - RNA, 18 nt, Artificial Sequence
  Synthetic
ucuuggggcuccgggcca

SEQ ID NO: 30778 - RNA, 19 nt, Artificial Sequence
  Synthetic
aucuuggggcuccgggcca

SEQ ID NO: 30779 - RNA, 20 nt, Artificial Sequence
  Synthetic
aaucuuggggcuccgggcca

SEQ ID NO: 30780 - RNA, 21 nt, Artificial Sequence
  Synthetic
aaaucuuggggcuccgggcca

SEQ ID NO: 30781 - RNA, 23 nt, Artificial Sequence
  Synthetic
ugaaaucuuggggcuccgggcca

SEQ ID NO: 30782 - RNA, 18 nt, Artificial Sequence
  Synthetic
uaaugaggaagggggcca

SEQ ID NO: 30783 - RNA, 20 nt, Artificial Sequence
  Synthetic
uguaaugaggaagggggcca

SEQ ID NO: 30784 - RNA, 22 nt, Artificial Sequence
  Synthetic
uguguaaugaggaagggggcca

SEQ ID NO: 30785 - RNA, 24 nt, Artificial Sequence
  Synthetic
uguguguaaugaggaagggggcca

SEQ ID NO: 30786 - RNA, 21 nt, Artificial Sequence
  Synthetic
ugggugaucuuuauggggcca

SEQ ID NO: 30787 - RNA, 22 nt, Artificial Sequence
  Synthetic
augggugaucuuuauggggcca

SEQ ID NO: 30788 - RNA, 23 nt, Artificial Sequence
  Synthetic
uaugggugaucuuuauggggcca

SEQ ID NO: 30789 - RNA, 24 nt, Artificial Sequence
  Synthetic
auaugggugaucuuuauggggcca

SEQ ID NO: 30790 - RNA, 21 nt, Artificial Sequence
  Synthetic
agagaaagaagcauuuggcca

SEQ ID NO: 30791 - RNA, 22 nt, Artificial Sequence
  Synthetic
uagagaaagaagcauuuggcca

SEQ ID NO: 30792 - RNA, 23 nt, Artificial Sequence
  Synthetic
uuagagaaagaagcauuuggcca

SEQ ID NO: 30793 - RNA, 24 nt, Artificial Sequence
  Synthetic
auuagagaaagaagcauuuggcca

SEQ ID NO: 30794 - RNA, 18 nt, Artificial Sequence
  Synthetic
aaaggguagauuuggcca

SEQ ID NO: 30795 - RNA, 19 nt, Artificial Sequence
  Synthetic
uaaaggguagauuuggcca

SEQ ID NO: 30796 - RNA, 20 nt, Artificial Sequence
  Synthetic
cuaaaggguagauuuggcca

SEQ ID NO: 30797 - RNA, 21 nt, Artificial Sequence
  Synthetic
ucuaaaggguagauuuggcca

SEQ ID NO: 30798 - RNA, 22 nt, Artificial Sequence
  Synthetic
uucuaaaggguagauuuggcca

SEQ ID NO: 30799 - RNA, 23 nt, Artificial Sequence
  Synthetic
uuucuaaaggguagauuuggcca

SEQ ID NO: 30800 - RNA, 24 nt, Artificial Sequence
  Synthetic
uuuucuaaaggguagauuuggcca

SEQ ID NO: 30801 - RNA, 18 nt, Artificial Sequence
  Synthetic
cuuugccauuaaaugcca

SEQ ID NO: 30802 - RNA, 19 nt, Artificial Sequence
  Synthetic
ucuuugccauuaaaugcca

SEQ ID NO: 30803 - RNA, 21 nt, Artificial Sequence
  Synthetic
ugucuuugccauuaaaugcca

SEQ ID NO: 30804 - RNA, 22 nt, Artificial Sequence
  Synthetic
augucuuugccauuaaaugcca

SEQ ID NO: 30805 - RNA, 23 nt, Artificial Sequence
  Synthetic
aaugucuuugccauuaaaugcca

SEQ ID NO: 30806 - RNA, 24 nt, Artificial Sequence
  Synthetic
caaugucuuugccauuaaaugcca

SEQ ID NO: 30807 - RNA, 19 nt, Artificial Sequence
  Synthetic
agcuaccgacauaaugcca

SEQ ID NO: 30808 - RNA, 20 nt, Artificial Sequence
  Synthetic
cagcuaccgacauaaugcca

SEQ ID NO: 30809 - RNA, 21 nt, Artificial Sequence
  Synthetic
ccagcuaccgacauaaugcca

SEQ ID NO: 30810 - RNA, 22 nt, Artificial Sequence
  Synthetic
uccagcuaccgacauaaugcca

SEQ ID NO: 30811 - RNA, 23 nt, Artificial Sequence
  Synthetic
cuccagcuaccgacauaaugcca

SEQ ID NO: 30812 - RNA, 24 nt, Artificial Sequence
  Synthetic
ucuccagcuaccgacauaaugcca

SEQ ID NO: 30813 - RNA, 18 nt, Artificial Sequence
  Synthetic
aaccaagcagucaugcca

SEQ ID NO: 30814 - RNA, 19 nt, Artificial Sequence
  Synthetic
aaaccaagcagucaugcca

SEQ ID NO: 30815 - RNA, 20 nt, Artificial Sequence
  Synthetic
caaaccaagcagucaugcca

SEQ ID NO: 30816 - RNA, 21 nt, Artificial Sequence
  Synthetic
acaaaccaagcagucaugcca

SEQ ID NO: 30817 - RNA, 24 nt, Artificial Sequence
  Synthetic
aggacaaaccaagcagucaugcca

SEQ ID NO: 30818 - RNA, 21 nt, Artificial Sequence
  Synthetic
aggggcacaggacagaugcca

SEQ ID NO: 30819 - RNA, 22 nt, Artificial Sequence
  Synthetic
aaggggcacaggacagaugcca

SEQ ID NO: 30820 - RNA, 23 nt, Artificial Sequence
  Synthetic
aaaggggcacaggacagaugcca

SEQ ID NO: 30821 - RNA, 18 nt, Artificial Sequence
  Synthetic
auggaauuauuuaugcca

SEQ ID NO: 30822 - RNA, 19 nt, Artificial Sequence
  Synthetic
uauggaauuauuuaugcca

SEQ ID NO: 30823 - RNA, 20 nt, Artificial Sequence
  Synthetic
auauggaauuauuuaugcca

SEQ ID NO: 30824 - RNA, 23 nt, Artificial Sequence
  Synthetic
aggauauggaauuauuuaugcca

SEQ ID NO: 30825 - RNA, 24 nt, Artificial Sequence
  Synthetic
uaggauauggaauuauuuaugcca

SEQ ID NO: 30826 - RNA, 18 nt, Artificial Sequence
  Synthetic
uuuuuuuaaguacugcca

SEQ ID NO: 30827 - RNA, 20 nt, Artificial Sequence
  Synthetic
aguuuuuuuaaguacugcca

SEQ ID NO: 30828 - RNA, 21 nt, Artificial Sequence
  Synthetic
caguuuuuuuaaguacugcca

SEQ ID NO: 30829 - RNA, 22 nt, Artificial Sequence
  Synthetic
ccaguuuuuuuaaguacugcca

SEQ ID NO: 30830 - RNA, 23 nt, Artificial Sequence
  Synthetic
cccaguuuuuuuaaguacugcca

SEQ ID NO: 30831 - RNA, 24 nt, Artificial Sequence
  Synthetic
ucccaguuuuuuuaaguacugcca

SEQ ID NO: 30832 - RNA, 18 nt, Artificial Sequence
  Synthetic
uugauuugcauucugcca

SEQ ID NO: 30833 - RNA, 19 nt, Artificial Sequence
  Synthetic
uuugauuugcauucugcca

SEQ ID NO: 30834 - RNA, 21 nt, Artificial Sequence
  Synthetic
uguuugauuugcauucugcca

SEQ ID NO: 30835 - RNA, 22 nt, Artificial Sequence
  Synthetic
auguuugauuugcauucugcca

SEQ ID NO: 30836 - RNA, 24 nt, Artificial Sequence
  Synthetic
agauguuugauuugcauucugcca

SEQ ID NO: 30837 - RNA, 18 nt, Artificial Sequence
  Synthetic
cacaacaagagagugcca

SEQ ID NO: 30838 - RNA, 19 nt, Artificial Sequence
  Synthetic
ucacaacaagagagugcca

SEQ ID NO: 30839 - RNA, 20 nt, Artificial Sequence
  Synthetic
cucacaacaagagagugcca

SEQ ID NO: 30840 - RNA, 21 nt, Artificial Sequence
  Synthetic
ccucacaacaagagagugcca

SEQ ID NO: 30841 - RNA, 22 nt, Artificial Sequence
  Synthetic
uccucacaacaagagagugcca

SEQ ID NO: 30842 - RNA, 23 nt, Artificial Sequence
  Synthetic
auccucacaacaagagagugcca

SEQ ID NO: 30843 - RNA, 24 nt, Artificial Sequence
  Synthetic
cauccucacaacaagagagugcca

SEQ ID NO: 30844 - RNA, 18 nt, Artificial Sequence
  Synthetic
ugugcauacuaauugcca

SEQ ID NO: 30845 - RNA, 19 nt, Artificial Sequence
  Synthetic
uugugcauacuaauugcca

SEQ ID NO: 30846 - RNA, 24 nt, Artificial Sequence
  Synthetic
ugggguugugcauacuaauugcca

SEQ ID NO: 30847 - RNA, 18 nt, Artificial Sequence
  Synthetic
uuucugcuguuauugcca

SEQ ID NO: 30848 - RNA, 19 nt, Artificial Sequence
  Synthetic
uuuucugcuguuauugcca

SEQ ID NO: 30849 - RNA, 20 nt, Artificial Sequence
  Synthetic
auuuucugcuguuauugcca

SEQ ID NO: 30850 - RNA, 22 nt, Artificial Sequence
  Synthetic
agauuuucugcuguuauugcca

SEQ ID NO: 30851 - RNA, 18 nt, Artificial Sequence
  Synthetic
auauuggaauccuugcca

SEQ ID NO: 30852 - RNA, 19 nt, Artificial Sequence
  Synthetic
uauauuggaauccuugcca

SEQ ID NO: 30853 - RNA, 20 nt, Artificial Sequence
  Synthetic
uuauauuggaauccuugcca

SEQ ID NO: 30854 - RNA, 21 nt, Artificial Sequence
  Synthetic
uuuauauuggaauccuugcca

SEQ ID NO: 30855 - RNA, 22 nt, Artificial Sequence
  Synthetic
uuuuauauuggaauccuugcca

SEQ ID NO: 30856 - RNA, 23 nt, Artificial Sequence
  Synthetic
auuuuauauuggaauccuugcca

SEQ ID NO: 30857 - RNA, 24 nt, Artificial Sequence
  Synthetic
aauuuuauauuggaauccuugcca

SEQ ID NO: 30858 - RNA, 18 nt, Artificial Sequence
  Synthetic
ccuagagaaugaaaucca

SEQ ID NO: 30859 - RNA, 20 nt, Artificial Sequence
  Synthetic
ugccuagagaaugaaaucca

SEQ ID NO: 30860 - RNA, 21 nt, Artificial Sequence
  Synthetic
uugccuagagaaugaaaucca

SEQ ID NO: 30861 - RNA, 22 nt, Artificial Sequence
  Synthetic
cuugccuagagaaugaaaucca

SEQ ID NO: 30862 - RNA, 23 nt, Artificial Sequence
  Synthetic
acuugccuagagaaugaaaucca

SEQ ID NO: 30863 - RNA, 24 nt, Artificial Sequence
  Synthetic
uacuugccuagagaaugaaaucca

SEQ ID NO: 30864 - RNA, 18 nt, Artificial Sequence
  Synthetic
uaggauacuugaaaucca

SEQ ID NO: 30865 - RNA, 19 nt, Artificial Sequence
  Synthetic
uuaggauacuugaaaucca

SEQ ID NO: 30866 - RNA, 21 nt, Artificial Sequence
  Synthetic
uguuaggauacuugaaaucca

SEQ ID NO: 30867 - RNA, 22 nt, Artificial Sequence
  Synthetic
cuguuaggauacuugaaaucca

SEQ ID NO: 30868 - RNA, 23 nt, Artificial Sequence
  Synthetic
acuguuaggauacuugaaaucca

SEQ ID NO: 30869 - RNA, 24 nt, Artificial Sequence
  Synthetic
aacuguuaggauacuugaaaucca

SEQ ID NO: 30870 - RNA, 18 nt, Artificial Sequence
  Synthetic
cauauaaaaggcaaucca

SEQ ID NO: 30871 - RNA, 20 nt, Artificial Sequence
  Synthetic
agcauauaaaaggcaaucca

SEQ ID NO: 30872 - RNA, 21 nt, Artificial Sequence
  Synthetic
aagcauauaaaaggcaaucca

SEQ ID NO: 30873 - RNA, 22 nt, Artificial Sequence
  Synthetic
aaagcauauaaaaggcaaucca

SEQ ID NO: 30874 - RNA, 24 nt, Artificial Sequence
  Synthetic
ugaaagcauauaaaaggcaaucca

SEQ ID NO: 30875 - RNA, 18 nt, Artificial Sequence
  Synthetic
uugacucccccccaucca

SEQ ID NO: 30876 - RNA, 19 nt, Artificial Sequence
  Synthetic
uuugacucccccccaucca

SEQ ID NO: 30877 - RNA, 20 nt, Artificial Sequence
  Synthetic
uuuugacucccccccaucca

SEQ ID NO: 30878 - RNA, 21 nt, Artificial Sequence
  Synthetic
uuuuugacucccccccaucca

SEQ ID NO: 30879 - RNA, 22 nt, Artificial Sequence
  Synthetic
cuuuuugacucccccccaucca

SEQ ID NO: 30880 - RNA, 23 nt, Artificial Sequence
  Synthetic
ucuuuuugacucccccccaucca

SEQ ID NO: 30881 - RNA, 24 nt, Artificial Sequence
  Synthetic
uucuuuuugacucccccccaucca

SEQ ID NO: 30882 - RNA, 18 nt, Artificial Sequence
  Synthetic
uuguaauuggaauaucca

SEQ ID NO: 30883 - RNA, 19 nt, Artificial Sequence
  Synthetic
uuuguaauuggaauaucca

SEQ ID NO: 30884 - RNA, 23 nt, Artificial Sequence
  Synthetic
aggguuuguaauuggaauaucca

SEQ ID NO: 30885 - RNA, 24 nt, Artificial Sequence
  Synthetic
aaggguuuguaauuggaauaucca

SEQ ID NO: 30886 - RNA, 18 nt, Artificial Sequence
  Synthetic
ucaauaccaagauaucca

SEQ ID NO: 30887 - RNA, 19 nt, Artificial Sequence
  Synthetic
aucaauaccaagauaucca

SEQ ID NO: 30888 - RNA, 20 nt, Artificial Sequence
  Synthetic
aaucaauaccaagauaucca

SEQ ID NO: 30889 - RNA, 21 nt, Artificial Sequence
  Synthetic
aaaucaauaccaagauaucca

SEQ ID NO: 30890 - RNA, 23 nt, Artificial Sequence
  Synthetic
ugaaaucaauaccaagauaucca

SEQ ID NO: 30891 - RNA, 24 nt, Artificial Sequence
  Synthetic
augaaaucaauaccaagauaucca

SEQ ID NO: 30892 - RNA, 18 nt, Artificial Sequence
  Synthetic
cuauuaucuagauaucca

SEQ ID NO: 30893 - RNA, 20 nt, Artificial Sequence
  Synthetic
agcuauuaucuagauaucca

SEQ ID NO: 30894 - RNA, 23 nt, Artificial Sequence
  Synthetic
aggagcuauuaucuagauaucca

SEQ ID NO: 30895 - RNA, 24 nt, Artificial Sequence
  Synthetic
aaggagcuauuaucuagauaucca

SEQ ID NO: 30896 - RNA, 21 nt, Artificial Sequence
  Synthetic
uaaaggccugcaugauaucca

SEQ ID NO: 30897 - RNA, 22 nt, Artificial Sequence
  Synthetic
cuaaaggccugcaugauaucca

SEQ ID NO: 30898 - RNA, 23 nt, Artificial Sequence
  Synthetic
ccuaaaggccugcaugauaucca

SEQ ID NO: 30899 - RNA, 24 nt, Artificial Sequence
  Synthetic
cccuaaaggccugcaugauaucca

SEQ ID NO: 30900 - RNA, 18 nt, Artificial Sequence
  Synthetic
aggcaauugaucacucca

SEQ ID NO: 30901 - RNA, 19 nt, Artificial Sequence
  Synthetic
uaggcaauugaucacucca

SEQ ID NO: 30902 - RNA, 20 nt, Artificial Sequence
  Synthetic
auaggcaauugaucacucca

SEQ ID NO: 30903 - RNA, 21 nt, Artificial Sequence
  Synthetic
cauaggcaauugaucacucca

SEQ ID NO: 30904 - RNA, 22 nt, Artificial Sequence
  Synthetic
ucauaggcaauugaucacucca

SEQ ID NO: 30905 - RNA, 23 nt, Artificial Sequence
  Synthetic
cucauaggcaauugaucacucca

SEQ ID NO: 30906 - RNA, 24 nt, Artificial Sequence
  Synthetic
acucauaggcaauugaucacucca

SEQ ID NO: 30907 - RNA, 18 nt, Artificial Sequence
  Synthetic
agaaaauaaauuccucca

SEQ ID NO: 30908 - RNA, 19 nt, Artificial Sequence
  Synthetic
aagaaaauaaauuccucca

SEQ ID NO: 30909 - RNA, 20 nt, Artificial Sequence
  Synthetic
uaagaaaauaaauuccucca

SEQ ID NO: 30910 - RNA, 21 nt, Artificial Sequence
  Synthetic
uuaagaaaauaaauuccucca

SEQ ID NO: 30911 - RNA, 22 nt, Artificial Sequence
  Synthetic
cuuaagaaaauaaauuccucca

SEQ ID NO: 30912 - RNA, 23 nt, Artificial Sequence
  Synthetic
acuuaagaaaauaaauuccucca

SEQ ID NO: 30913 - RNA, 24 nt, Artificial Sequence
  Synthetic
uacuuaagaaaauaaauuccucca

SEQ ID NO: 30914 - RNA, 18 nt, Artificial Sequence
  Synthetic
ccacacuaaaaaucucca

SEQ ID NO: 30915 - RNA, 19 nt, Artificial Sequence
  Synthetic
uccacacuaaaaaucucca

SEQ ID NO: 30916 - RNA, 20 nt, Artificial Sequence
  Synthetic
uuccacacuaaaaaucucca

SEQ ID NO: 30917 - RNA, 22 nt, Artificial Sequence
  Synthetic
uguuccacacuaaaaaucucca

SEQ ID NO: 30918 - RNA, 23 nt, Artificial Sequence
  Synthetic
auguuccacacuaaaaaucucca

SEQ ID NO: 30919 - RNA, 24 nt, Artificial Sequence
  Synthetic
cauguuccacacuaaaaaucucca

SEQ ID NO: 30920 - RNA, 18 nt, Artificial Sequence
  Synthetic
caagcagacaaaucucca

SEQ ID NO: 30921 - RNA, 19 nt, Artificial Sequence
  Synthetic
ucaagcagacaaaucucca

SEQ ID NO: 30922 - RNA, 20 nt, Artificial Sequence
  Synthetic
cucaagcagacaaaucucca

SEQ ID NO: 30923 - RNA, 22 nt, Artificial Sequence
  Synthetic
agcucaagcagacaaaucucca

SEQ ID NO: 30924 - RNA, 23 nt, Artificial Sequence
  Synthetic
aagcucaagcagacaaaucucca

SEQ ID NO: 30925 - RNA, 24 nt, Artificial Sequence
  Synthetic
uaagcucaagcagacaaaucucca

SEQ ID NO: 30926 - RNA, 18 nt, Artificial Sequence
  Synthetic
cuuuuagaucaaucucca

SEQ ID NO: 30927 - RNA, 19 nt, Artificial Sequence
  Synthetic
acuuuuagaucaaucucca

SEQ ID NO: 30928 - RNA, 20 nt, Artificial Sequence
  Synthetic
aacuuuuagaucaaucucca

SEQ ID NO: 30929 - RNA, 21 nt, Artificial Sequence
  Synthetic
caacuuuuagaucaaucucca

SEQ ID NO: 30930 - RNA, 22 nt, Artificial Sequence
  Synthetic
acaacuuuuagaucaaucucca

SEQ ID NO: 30931 - RNA, 23 nt, Artificial Sequence
  Synthetic
aacaacuuuuagaucaaucucca

SEQ ID NO: 30932 - RNA, 24 nt, Artificial Sequence
  Synthetic
caacaacuuuuagaucaaucucca

SEQ ID NO: 30933 - RNA, 19 nt, Artificial Sequence
  Synthetic
ugaugaauucucaucucca

SEQ ID NO: 30934 - RNA, 20 nt, Artificial Sequence
  Synthetic
augaugaauucucaucucca

SEQ ID NO: 30935 - RNA, 21 nt, Artificial Sequence
  Synthetic
caugaugaauucucaucucca

SEQ ID NO: 30936 - RNA, 22 nt, Artificial Sequence
  Synthetic
ccaugaugaauucucaucucca

SEQ ID NO: 30937 - RNA, 23 nt, Artificial Sequence
  Synthetic
uccaugaugaauucucaucucca

SEQ ID NO: 30938 - RNA, 24 nt, Artificial Sequence
  Synthetic
auccaugaugaauucucaucucca

SEQ ID NO: 30939 - RNA, 18 nt, Artificial Sequence
  Synthetic
caauuggcuguaucucca

SEQ ID NO: 30940 - RNA, 19 nt, Artificial Sequence
  Synthetic
ucaauuggcuguaucucca

SEQ ID NO: 30941 - RNA, 20 nt, Artificial Sequence
  Synthetic
aucaauuggcuguaucucca

SEQ ID NO: 30942 - RNA, 21 nt, Artificial Sequence
  Synthetic
caucaauuggcuguaucucca

SEQ ID NO: 30943 - RNA, 23 nt, Artificial Sequence
  Synthetic
agcaucaauuggcuguaucucca

SEQ ID NO: 30944 - RNA, 24 nt, Artificial Sequence
  Synthetic
aagcaucaauuggcuguaucucca

SEQ ID NO: 30945 - RNA, 21 nt, Artificial Sequence
  Synthetic
accaucuucauucccucucca

SEQ ID NO: 30946 - RNA, 22 nt, Artificial Sequence
  Synthetic
uaccaucuucauucccucucca

SEQ ID NO: 30947 - RNA, 23 nt, Artificial Sequence
  Synthetic
cuaccaucuucauucccucucca

SEQ ID NO: 30948 - RNA, 24 nt, Artificial Sequence
  Synthetic
ucuaccaucuucauucccucucca

SEQ ID NO: 30949 - RNA, 19 nt, Artificial Sequence
  Synthetic
uguugugaccagcucucca

SEQ ID NO: 30950 - RNA, 20 nt, Artificial Sequence
  Synthetic
uuguugugaccagcucucca

SEQ ID NO: 30951 - RNA, 21 nt, Artificial Sequence
  Synthetic
uuuguugugaccagcucucca

SEQ ID NO: 30952 - RNA, 22 nt, Artificial Sequence
  Synthetic
cuuuguugugaccagcucucca

SEQ ID NO: 30953 - RNA, 23 nt, Artificial Sequence
  Synthetic
ucuuuguugugaccagcucucca

SEQ ID NO: 30954 - RNA, 18 nt, Artificial Sequence
  Synthetic
aucaacauuaguucucca

SEQ ID NO: 30955 - RNA, 19 nt, Artificial Sequence
  Synthetic
uaucaacauuaguucucca

SEQ ID NO: 30956 - RNA, 20 nt, Artificial Sequence
  Synthetic
auaucaacauuaguucucca

SEQ ID NO: 30957 - RNA, 21 nt, Artificial Sequence
  Synthetic
aauaucaacauuaguucucca

SEQ ID NO: 30958 - RNA, 23 nt, Artificial Sequence
  Synthetic
ugaauaucaacauuaguucucca

SEQ ID NO: 30959 - RNA, 24 nt, Artificial Sequence
  Synthetic
augaauaucaacauuaguucucca

SEQ ID NO: 30960 - RNA, 18 nt, Artificial Sequence
  Synthetic
auugagacuauuucucca

SEQ ID NO: 30961 - RNA, 19 nt, Artificial Sequence
  Synthetic
aauugagacuauuucucca

SEQ ID NO: 30962 - RNA, 20 nt, Artificial Sequence
  Synthetic
uaauugagacuauuucucca

SEQ ID NO: 30963 - RNA, 22 nt, Artificial Sequence
  Synthetic
uguaauugagacuauuucucca

SEQ ID NO: 30964 - RNA, 23 nt, Artificial Sequence
  Synthetic
uuguaauugagacuauuucucca

SEQ ID NO: 30965 - RNA, 19 nt, Artificial Sequence
  Synthetic
aggcaccaccgcaggucca

SEQ ID NO: 30966 - RNA, 20 nt, Artificial Sequence
  Synthetic
caggcaccaccgcaggucca

SEQ ID NO: 30967 - RNA, 21 nt, Artificial Sequence
  Synthetic
ucaggcaccaccgcaggucca

SEQ ID NO: 30968 - RNA, 22 nt, Artificial Sequence
  Synthetic
cucaggcaccaccgcaggucca

SEQ ID NO: 30969 - RNA, 23 nt, Artificial Sequence
  Synthetic
ucucaggcaccaccgcaggucca

SEQ ID NO: 30970 - RNA, 24 nt, Artificial Sequence
  Synthetic
cucucaggcaccaccgcaggucca

SEQ ID NO: 30971 - RNA, 19 nt, Artificial Sequence
  Synthetic
ugaguggguggauugucca

SEQ ID NO: 30972 - RNA, 22 nt, Artificial Sequence
  Synthetic
aggugaguggguggauugucca

SEQ ID NO: 30973 - RNA, 24 nt, Artificial Sequence
  Synthetic
agaggugaguggguggauugucca

SEQ ID NO: 30974 - RNA, 18 nt, Artificial Sequence
  Synthetic
cauuuuucaaaaauucca

SEQ ID NO: 30975 - RNA, 19 nt, Artificial Sequence
  Synthetic
ucauuuuucaaaaauucca

SEQ ID NO: 30976 - RNA, 20 nt, Artificial Sequence
  Synthetic
aucauuuuucaaaaauucca

SEQ ID NO: 30977 - RNA, 21 nt, Artificial Sequence
  Synthetic
uaucauuuuucaaaaauucca

SEQ ID NO: 30978 - RNA, 22 nt, Artificial Sequence
  Synthetic
cuaucauuuuucaaaaauucca

SEQ ID NO: 30979 - RNA, 24 nt, Artificial Sequence
  Synthetic
ugcuaucauuuuucaaaaauucca

SEQ ID NO: 30980 - RNA, 18 nt, Artificial Sequence
  Synthetic
agauaaagacaaauucca

SEQ ID NO: 30981 - RNA, 19 nt, Artificial Sequence
  Synthetic
cagauaaagacaaauucca

SEQ ID NO: 30982 - RNA, 20 nt, Artificial Sequence
  Synthetic
ucagauaaagacaaauucca

SEQ ID NO: 30983 - RNA, 22 nt, Artificial Sequence
  Synthetic
ugucagauaaagacaaauucca

SEQ ID NO: 30984 - RNA, 23 nt, Artificial Sequence
  Synthetic
cugucagauaaagacaaauucca

SEQ ID NO: 30985 - RNA, 24 nt, Artificial Sequence
  Synthetic
ucugucagauaaagacaaauucca

SEQ ID NO: 30986 - RNA, 21 nt, Artificial Sequence
  Synthetic
uuuauuuaaauucaaauucca

SEQ ID NO: 30987 - RNA, 22 nt, Artificial Sequence
  Synthetic
cuuuauuuaaauucaaauucca

SEQ ID NO: 30988 - RNA, 23 nt, Artificial Sequence
  Synthetic
ucuuuauuuaaauucaaauucca

SEQ ID NO: 30989 - RNA, 24 nt, Artificial Sequence
  Synthetic
cucuuuauuuaaauucaaauucca

SEQ ID NO: 30990 - RNA, 18 nt, Artificial Sequence
  Synthetic
uaaaugaauguaauucca

SEQ ID NO: 30991 - RNA, 19 nt, Artificial Sequence
  Synthetic
auaaaugaauguaauucca

SEQ ID NO: 30992 - RNA, 20 nt, Artificial Sequence
  Synthetic
aauaaaugaauguaauucca

SEQ ID NO: 30993 - RNA, 21 nt, Artificial Sequence
  Synthetic
uaauaaaugaauguaauucca

SEQ ID NO: 30994 - RNA, 22 nt, Artificial Sequence
  Synthetic
uuaauaaaugaauguaauucca

SEQ ID NO: 30995 - RNA, 23 nt, Artificial Sequence
  Synthetic
uuuaauaaaugaauguaauucca

SEQ ID NO: 30996 - RNA, 24 nt, Artificial Sequence
  Synthetic
uuuuaauaaaugaauguaauucca

SEQ ID NO: 30997 - RNA, 18 nt, Artificial Sequence
  Synthetic
aucuugggcaccauucca

SEQ ID NO: 30998 - RNA, 19 nt, Artificial Sequence
  Synthetic
aaucuugggcaccauucca

SEQ ID NO: 30999 - RNA, 20 nt, Artificial Sequence
  Synthetic
aaaucuugggcaccauucca

SEQ ID NO: 31000 - RNA, 21 nt, Artificial Sequence
  Synthetic
uaaaucuugggcaccauucca

SEQ ID NO: 31001 - RNA, 22 nt, Artificial Sequence
  Synthetic
uuaaaucuugggcaccauucca

SEQ ID NO: 31002 - RNA, 23 nt, Artificial Sequence
  Synthetic
auuaaaucuugggcaccauucca

SEQ ID NO: 31003 - RNA, 24 nt, Artificial Sequence
  Synthetic
cauuaaaucuugggcaccauucca

SEQ ID NO: 31004 - RNA, 18 nt, Artificial Sequence
  Synthetic
caaugcuacagcauucca

SEQ ID NO: 31005 - RNA, 20 nt, Artificial Sequence
  Synthetic
agcaaugcuacagcauucca

SEQ ID NO: 31006 - RNA, 22 nt, Artificial Sequence
  Synthetic
ugagcaaugcuacagcauucca

SEQ ID NO: 31007 - RNA, 23 nt, Artificial Sequence
  Synthetic
cugagcaaugcuacagcauucca

SEQ ID NO: 31008 - RNA, 19 nt, Artificial Sequence
  Synthetic
aguacaugaaggcauucca

SEQ ID NO: 31009 - RNA, 23 nt, Artificial Sequence
  Synthetic
ugggaguacaugaaggcauucca

SEQ ID NO: 31010 - RNA, 24 nt, Artificial Sequence
  Synthetic
cugggaguacaugaaggcauucca

SEQ ID NO: 31011 - RNA, 18 nt, Artificial Sequence
  Synthetic
acagguuuggugauucca

SEQ ID NO: 31012 - RNA, 19 nt, Artificial Sequence
  Synthetic
uacagguuuggugauucca

SEQ ID NO: 31013 - RNA, 22 nt, Artificial Sequence
  Synthetic
agguacagguuuggugauucca

SEQ ID NO: 31014 - RNA, 23 nt, Artificial Sequence
  Synthetic
uagguacagguuuggugauucca

SEQ ID NO: 31015 - RNA, 24 nt, Artificial Sequence
  Synthetic
uuagguacagguuuggugauucca

SEQ ID NO: 31016 - RNA, 18 nt, Artificial Sequence
  Synthetic
aacuauuuccuucuucca

SEQ ID NO: 31017 - RNA, 19 nt, Artificial Sequence
  Synthetic
aaacuauuuccuucuucca

SEQ ID NO: 31018 - RNA, 21 nt, Artificial Sequence
  Synthetic
ugaaacuauuuccuucuucca

SEQ ID NO: 31019 - RNA, 22 nt, Artificial Sequence
  Synthetic
augaaacuauuuccuucuucca

SEQ ID NO: 31020 - RNA, 23 nt, Artificial Sequence
  Synthetic
aaugaaacuauuuccuucuucca

SEQ ID NO: 31021 - RNA, 24 nt, Artificial Sequence
  Synthetic
uaaugaaacuauuuccuucuucca

SEQ ID NO: 31022 - RNA, 18 nt, Artificial Sequence
  Synthetic
cacaagguuuacuuucca

SEQ ID NO: 31023 - RNA, 19 nt, Artificial Sequence
  Synthetic
ucacaagguuuacuuucca

SEQ ID NO: 31024 - RNA, 20 nt, Artificial Sequence
  Synthetic
aucacaagguuuacuuucca

SEQ ID NO: 31025 - RNA, 21 nt, Artificial Sequence
  Synthetic
uaucacaagguuuacuuucca

SEQ ID NO: 31026 - RNA, 22 nt, Artificial Sequence
  Synthetic
cuaucacaagguuuacuuucca

SEQ ID NO: 31027 - RNA, 23 nt, Artificial Sequence
  Synthetic
ucuaucacaagguuuacuuucca

SEQ ID NO: 31028 - RNA, 24 nt, Artificial Sequence
  Synthetic
uucuaucacaagguuuacuuucca

SEQ ID NO: 31029 - RNA, 18 nt, Artificial Sequence
  Synthetic
uauguguaucucuuucca

SEQ ID NO: 31030 - RNA, 19 nt, Artificial Sequence
  Synthetic
uuauguguaucucuuucca

SEQ ID NO: 31031 - RNA, 20 nt, Artificial Sequence
  Synthetic
auuauguguaucucuuucca

SEQ ID NO: 31032 - RNA, 21 nt, Artificial Sequence
  Synthetic
aauuauguguaucucuuucca

SEQ ID NO: 31033 - RNA, 22 nt, Artificial Sequence
  Synthetic
caauuauguguaucucuuucca

SEQ ID NO: 31034 - RNA, 23 nt, Artificial Sequence
  Synthetic
ccaauuauguguaucucuuucca

SEQ ID NO: 31035 - RNA, 18 nt, Artificial Sequence
  Synthetic
ugugucagugaguuucca

SEQ ID NO: 31036 - RNA, 19 nt, Artificial Sequence
  Synthetic
uugugucagugaguuucca

SEQ ID NO: 31037 - RNA, 21 nt, Artificial Sequence
  Synthetic
uguugugucagugaguuucca

SEQ ID NO: 31038 - RNA, 23 nt, Artificial Sequence
  Synthetic
uguguugugucagugaguuucca

SEQ ID NO: 31039 - RNA, 18 nt, Artificial Sequence
  Synthetic
agcacuaaauauuuucca

SEQ ID NO: 31040 - RNA, 19 nt, Artificial Sequence
  Synthetic
aagcacuaaauauuuucca

SEQ ID NO: 31041 - RNA, 20 nt, Artificial Sequence
  Synthetic
caagcacuaaauauuuucca

SEQ ID NO: 31042 - RNA, 21 nt, Artificial Sequence
  Synthetic
acaagcacuaaauauuuucca

SEQ ID NO: 31043 - RNA, 22 nt, Artificial Sequence
  Synthetic
uacaagcacuaaauauuuucca

SEQ ID NO: 31044 - RNA, 23 nt, Artificial Sequence
  Synthetic
uuacaagcacuaaauauuuucca

SEQ ID NO: 31045 - RNA, 24 nt, Artificial Sequence
  Synthetic
auuacaagcacuaaauauuuucca

SEQ ID NO: 31046 - RNA, 21 nt, Artificial Sequence
  Synthetic
agauucugaauuuauuuucca

SEQ ID NO: 31047 - RNA, 22 nt, Artificial Sequence
  Synthetic
cagauucugaauuuauuuucca

SEQ ID NO: 31048 - RNA, 23 nt, Artificial Sequence
  Synthetic
ucagauucugaauuuauuuucca

SEQ ID NO: 31049 - RNA, 24 nt, Artificial Sequence
  Synthetic
uucagauucugaauuuauuuucca

SEQ ID NO: 31050 - RNA, 19 nt, Artificial Sequence
  Synthetic
ugagacuuccauuuuucca

SEQ ID NO: 31051 - RNA, 20 nt, Artificial Sequence
  Synthetic
uugagacuuccauuuuucca

SEQ ID NO: 31052 - RNA, 22 nt, Artificial Sequence
  Synthetic
uguugagacuuccauuuuucca

SEQ ID NO: 31053 - RNA, 24 nt, Artificial Sequence
  Synthetic
uguguugagacuuccauuuuucca

SEQ ID NO: 31054 - RNA, 18 nt, Artificial Sequence
  Synthetic
agauaaguacuuuuucca

SEQ ID NO: 31055 - RNA, 19 nt, Artificial Sequence
  Synthetic
cagauaaguacuuuuucca

SEQ ID NO: 31056 - RNA, 20 nt, Artificial Sequence
  Synthetic
ucagauaaguacuuuuucca

SEQ ID NO: 31057 - RNA, 22 nt, Artificial Sequence
  Synthetic
ugucagauaaguacuuuuucca

SEQ ID NO: 31058 - RNA, 23 nt, Artificial Sequence
  Synthetic
cugucagauaaguacuuuuucca

SEQ ID NO: 31059 - RNA, 24 nt, Artificial Sequence
  Synthetic
ccugucagauaaguacuuuuucca

SEQ ID NO: 31060 - RNA, 18 nt, Artificial Sequence
  Synthetic
uuugccaucaaaaaagca

SEQ ID NO: 31061 - RNA, 19 nt, Artificial Sequence
  Synthetic
auuugccaucaaaaaagca

SEQ ID NO: 31062 - RNA, 20 nt, Artificial Sequence
  Synthetic
uauuugccaucaaaaaagca

SEQ ID NO: 31063 - RNA, 21 nt, Artificial Sequence
  Synthetic
auauuugccaucaaaaaagca

SEQ ID NO: 31064 - RNA, 22 nt, Artificial Sequence
  Synthetic
aauauuugccaucaaaaaagca

SEQ ID NO: 31065 - RNA, 23 nt, Artificial Sequence
  Synthetic
uaauauuugccaucaaaaaagca

SEQ ID NO: 31066 - RNA, 24 nt, Artificial Sequence
  Synthetic
cuaauauuugccaucaaaaaagca

SEQ ID NO: 31067 - RNA, 18 nt, Artificial Sequence
  Synthetic
cuuugugaaccaaaagca

SEQ ID NO: 31068 - RNA, 19 nt, Artificial Sequence
  Synthetic
ccuuugugaaccaaaagca

SEQ ID NO: 31069 - RNA, 20 nt, Artificial Sequence
  Synthetic
uccuuugugaaccaaaagca

SEQ ID NO: 31070 - RNA, 21 nt, Artificial Sequence
  Synthetic
uuccuuugugaaccaaaagca

SEQ ID NO: 31071 - RNA, 22 nt, Artificial Sequence
  Synthetic
auuccuuugugaaccaaaagca

SEQ ID NO: 31072 - RNA, 23 nt, Artificial Sequence
  Synthetic
cauuccuuugugaaccaaaagca

SEQ ID NO: 31073 - RNA, 19 nt, Artificial Sequence
  Synthetic
agucccauagcagaaagca

SEQ ID NO: 31074 - RNA, 20 nt, Artificial Sequence
  Synthetic
cagucccauagcagaaagca

SEQ ID NO: 31075 - RNA, 21 nt, Artificial Sequence
  Synthetic
acagucccauagcagaaagca

SEQ ID NO: 31076 - RNA, 22 nt, Artificial Sequence
  Synthetic
aacagucccauagcagaaagca

SEQ ID NO: 31077 - RNA, 23 nt, Artificial Sequence
  Synthetic
caacagucccauagcagaaagca

SEQ ID NO: 31078 - RNA, 18 nt, Artificial Sequence
  Synthetic
agucuaguggugaaagca

SEQ ID NO: 31079 - RNA, 19 nt, Artificial Sequence
  Synthetic
cagucuaguggugaaagca

SEQ ID NO: 31080 - RNA, 20 nt, Artificial Sequence
  Synthetic
ucagucuaguggugaaagca

SEQ ID NO: 31081 - RNA, 21 nt, Artificial Sequence
  Synthetic
uucagucuaguggugaaagca

SEQ ID NO: 31082 - RNA, 22 nt, Artificial Sequence
  Synthetic
uuucagucuaguggugaaagca

SEQ ID NO: 31083 - RNA, 23 nt, Artificial Sequence
  Synthetic
uuuucagucuaguggugaaagca

SEQ ID NO: 31084 - RNA, 24 nt, Artificial Sequence
  Synthetic
uuuuucagucuaguggugaaagca

SEQ ID NO: 31085 - RNA, 18 nt, Artificial Sequence
  Synthetic
uuacagaaauguaaagca

SEQ ID NO: 31086 - RNA, 19 nt, Artificial Sequence
  Synthetic
uuuacagaaauguaaagca

SEQ ID NO: 31087 - RNA, 20 nt, Artificial Sequence
  Synthetic
auuuacagaaauguaaagca

SEQ ID NO: 31088 - RNA, 21 nt, Artificial Sequence
  Synthetic
uauuuacagaaauguaaagca

SEQ ID NO: 31089 - RNA, 22 nt, Artificial Sequence
  Synthetic
auauuuacagaaauguaaagca

SEQ ID NO: 31090 - RNA, 23 nt, Artificial Sequence
  Synthetic
uauauuuacagaaauguaaagca

SEQ ID NO: 31091 - RNA, 24 nt, Artificial Sequence
  Synthetic
auauauuuacagaaauguaaagca

SEQ ID NO: 31092 - RNA, 22 nt, Artificial Sequence
  Synthetic
agguauuaguuucuuuaaagca

SEQ ID NO: 31093 - RNA, 23 nt, Artificial Sequence
  Synthetic
aagguauuaguuucuuuaaagca

SEQ ID NO: 31094 - RNA, 24 nt, Artificial Sequence
  Synthetic
aaagguauuaguuucuuuaaagca

SEQ ID NO: 31095 - RNA, 18 nt, Artificial Sequence
  Synthetic
cauugucugcuccaagca

SEQ ID NO: 31096 - RNA, 19 nt, Artificial Sequence
  Synthetic
ucauugucugcuccaagca

SEQ ID NO: 31097 - RNA, 20 nt, Artificial Sequence
  Synthetic
uucauugucugcuccaagca

SEQ ID NO: 31098 - RNA, 21 nt, Artificial Sequence
  Synthetic
uuucauugucugcuccaagca

SEQ ID NO: 31099 - RNA, 22 nt, Artificial Sequence
  Synthetic
cuuucauugucugcuccaagca

SEQ ID NO: 31100 - RNA, 23 nt, Artificial Sequence
  Synthetic
ucuuucauugucugcuccaagca

SEQ ID NO: 31101 - RNA, 24 nt, Artificial Sequence
  Synthetic
aucuuucauugucugcuccaagca

SEQ ID NO: 31102 - RNA, 18 nt, Artificial Sequence
  Synthetic
aggaaaucaugucaagca

SEQ ID NO: 31103 - RNA, 19 nt, Artificial Sequence
  Synthetic
caggaaaucaugucaagca

SEQ ID NO: 31104 - RNA, 20 nt, Artificial Sequence
  Synthetic
ucaggaaaucaugucaagca

SEQ ID NO: 31105 - RNA, 21 nt, Artificial Sequence
  Synthetic
uucaggaaaucaugucaagca

SEQ ID NO: 31106 - RNA, 22 nt, Artificial Sequence
  Synthetic
auucaggaaaucaugucaagca

SEQ ID NO: 31107 - RNA, 23 nt, Artificial Sequence
  Synthetic
cauucaggaaaucaugucaagca

SEQ ID NO: 31108 - RNA, 24 nt, Artificial Sequence
  Synthetic
acauucaggaaaucaugucaagca

SEQ ID NO: 31109 - RNA, 22 nt, Artificial Sequence
  Synthetic
uggggagccaggccuucaagca

SEQ ID NO: 31110 - RNA, 23 nt, Artificial Sequence
  Synthetic
cuggggagccaggccuucaagca

SEQ ID NO: 31111 - RNA, 24 nt, Artificial Sequence
  Synthetic
ucuggggagccaggccuucaagca

SEQ ID NO: 31112 - RNA, 18 nt, Artificial Sequence
  Synthetic
caucuuaaacaagaagca

SEQ ID NO: 31113 - RNA, 19 nt, Artificial Sequence
  Synthetic
ccaucuuaaacaagaagca

SEQ ID NO: 31114 - RNA, 20 nt, Artificial Sequence
  Synthetic
uccaucuuaaacaagaagca

SEQ ID NO: 31115 - RNA, 21 nt, Artificial Sequence
  Synthetic
auccaucuuaaacaagaagca

SEQ ID NO: 31116 - RNA, 22 nt, Artificial Sequence
  Synthetic
cauccaucuuaaacaagaagca

SEQ ID NO: 31117 - RNA, 23 nt, Artificial Sequence
  Synthetic
ucauccaucuuaaacaagaagca

SEQ ID NO: 31118 - RNA, 24 nt, Artificial Sequence
  Synthetic
cucauccaucuuaaacaagaagca

SEQ ID NO: 31119 - RNA, 21 nt, Artificial Sequence
  Synthetic
uguggaguuugagaggaagca

SEQ ID NO: 31120 - RNA, 22 nt, Artificial Sequence
  Synthetic
auguggaguuugagaggaagca

SEQ ID NO: 31121 - RNA, 23 nt, Artificial Sequence
  Synthetic
aauguggaguuugagaggaagca

SEQ ID NO: 31122 - RNA, 18 nt, Artificial Sequence
  Synthetic
uuacuuucucuggaagca

SEQ ID NO: 31123 - RNA, 20 nt, Artificial Sequence
  Synthetic
aguuacuuucucuggaagca

SEQ ID NO: 31124 - RNA, 21 nt, Artificial Sequence
  Synthetic
uaguuacuuucucuggaagca

SEQ ID NO: 31125 - RNA, 22 nt, Artificial Sequence
  Synthetic
cuaguuacuuucucuggaagca

SEQ ID NO: 31126 - RNA, 23 nt, Artificial Sequence
  Synthetic
acuaguuacuuucucuggaagca

SEQ ID NO: 31127 - RNA, 24 nt, Artificial Sequence
  Synthetic
uacuaguuacuuucucuggaagca

SEQ ID NO: 31128 - RNA, 18 nt, Artificial Sequence
  Synthetic
aucaguauggcugaagca

SEQ ID NO: 31129 - RNA, 19 nt, Artificial Sequence
  Synthetic
uaucaguauggcugaagca

SEQ ID NO: 31130 - RNA, 20 nt, Artificial Sequence
  Synthetic
auaucaguauggcugaagca

SEQ ID NO: 31131 - RNA, 21 nt, Artificial Sequence
  Synthetic
aauaucaguauggcugaagca

SEQ ID NO: 31132 - RNA, 22 nt, Artificial Sequence
  Synthetic
aaauaucaguauggcugaagca

SEQ ID NO: 31133 - RNA, 23 nt, Artificial Sequence
  Synthetic
aaaauaucaguauggcugaagca

SEQ ID NO: 31134 - RNA, 24 nt, Artificial Sequence
  Synthetic
aaaaauaucaguauggcugaagca

SEQ ID NO: 31135 - RNA, 22 nt, Artificial Sequence
  Synthetic
agagacacgcugaauugaagca

SEQ ID NO: 31136 - RNA, 23 nt, Artificial Sequence
  Synthetic
uagagacacgcugaauugaagca

SEQ ID NO: 31137 - RNA, 24 nt, Artificial Sequence
  Synthetic
uuagagacacgcugaauugaagca

SEQ ID NO: 31138 - RNA, 18 nt, Artificial Sequence
  Synthetic
auauugaaacucuaagca

SEQ ID NO: 31139 - RNA, 19 nt, Artificial Sequence
  Synthetic
aauauugaaacucuaagca

SEQ ID NO: 31140 - RNA, 20 nt, Artificial Sequence
  Synthetic
aaauauugaaacucuaagca

SEQ ID NO: 31141 - RNA, 21 nt, Artificial Sequence
  Synthetic
aaaauauugaaacucuaagca

SEQ ID NO: 31142 - RNA, 22 nt, Artificial Sequence
  Synthetic
aaaaauauugaaacucuaagca

SEQ ID NO: 31143 - RNA, 24 nt, Artificial Sequence
  Synthetic
ugaaaaauauugaaacucuaagca

SEQ ID NO: 31144 - RNA, 18 nt, Artificial Sequence
  Synthetic
agugaaacauaguaagca

SEQ ID NO: 31145 - RNA, 19 nt, Artificial Sequence
  Synthetic
cagugaaacauaguaagca

SEQ ID NO: 31146 - RNA, 20 nt, Artificial Sequence
  Synthetic
ccagugaaacauaguaagca

SEQ ID NO: 31147 - RNA, 21 nt, Artificial Sequence
  Synthetic
cccagugaaacauaguaagca

SEQ ID NO: 31148 - RNA, 22 nt, Artificial Sequence
  Synthetic
ccccagugaaacauaguaagca

SEQ ID NO: 31149 - RNA, 23 nt, Artificial Sequence
  Synthetic
accccagugaaacauaguaagca

SEQ ID NO: 31150 - RNA, 24 nt, Artificial Sequence
  Synthetic
uaccccagugaaacauaguaagca

SEQ ID NO: 31151 - RNA, 18 nt, Artificial Sequence
  Synthetic
ucacuuuagaauuaagca

SEQ ID NO: 31152 - RNA, 19 nt, Artificial Sequence
  Synthetic
uucacuuuagaauuaagca

SEQ ID NO: 31153 - RNA, 20 nt, Artificial Sequence
  Synthetic
cuucacuuuagaauuaagca

SEQ ID NO: 31154 - RNA, 21 nt, Artificial Sequence
  Synthetic
ccuucacuuuagaauuaagca

SEQ ID NO: 31155 - RNA, 23 nt, Artificial Sequence
  Synthetic
ugccuucacuuuagaauuaagca

SEQ ID NO: 31156 - RNA, 24 nt, Artificial Sequence
  Synthetic
uugccuucacuuuagaauuaagca

SEQ ID NO: 31157 - RNA, 21 nt, Artificial Sequence
  Synthetic
aagcuguugcugcuuuaagca

SEQ ID NO: 31158 - RNA, 22 nt, Artificial Sequence
  Synthetic
uaagcuguugcugcuuuaagca

SEQ ID NO: 31159 - RNA, 23 nt, Artificial Sequence
  Synthetic
uuaagcuguugcugcuuuaagca

SEQ ID NO: 31160 - RNA, 24 nt, Artificial Sequence
  Synthetic
uuuaagcuguugcugcuuuaagca

SEQ ID NO: 31161 - RNA, 21 nt, Artificial Sequence
  Synthetic
uugacaaaggagaaaacagca

SEQ ID NO: 31162 - RNA, 22 nt, Artificial Sequence
  Synthetic
auugacaaaggagaaaacagca

SEQ ID NO: 31163 - RNA, 18 nt, Artificial Sequence
  Synthetic
aauauaguaguaacagca

SEQ ID NO: 31164 - RNA, 19 nt, Artificial Sequence
  Synthetic
uaauauaguaguaacagca

SEQ ID NO: 31165 - RNA, 21 nt, Artificial Sequence
  Synthetic
aguaauauaguaguaacagca

SEQ ID NO: 31166 - RNA, 22 nt, Artificial Sequence
  Synthetic
uaguaauauaguaguaacagca

SEQ ID NO: 31167 - RNA, 23 nt, Artificial Sequence
  Synthetic
uuaguaauauaguaguaacagca

SEQ ID NO: 31168 - RNA, 24 nt, Artificial Sequence
  Synthetic
uuuaguaauauaguaguaacagca

SEQ ID NO: 31169 - RNA, 19 nt, Artificial Sequence
  Synthetic
aggauagcugcucacagca

SEQ ID NO: 31170 - RNA, 21 nt, Artificial Sequence
  Synthetic
agaggauagcugcucacagca

SEQ ID NO: 31171 - RNA, 22 nt, Artificial Sequence
  Synthetic
cagaggauagcugcucacagca

SEQ ID NO: 31172 - RNA, 24 nt, Artificial Sequence
  Synthetic
ugcagaggauagcugcucacagca

SEQ ID NO: 31173 - RNA, 19 nt, Artificial Sequence
  Synthetic
uggugcugcgaguacagca

SEQ ID NO: 31174 - RNA, 20 nt, Artificial Sequence
  Synthetic
cuggugcugcgaguacagca

SEQ ID NO: 31175 - RNA, 21 nt, Artificial Sequence
  Synthetic
acuggugcugcgaguacagca

SEQ ID NO: 31176 - RNA, 22 nt, Artificial Sequence
  Synthetic
uacuggugcugcgaguacagca

SEQ ID NO: 31177 - RNA, 23 nt, Artificial Sequence
  Synthetic
auacuggugcugcgaguacagca

SEQ ID NO: 31178 - RNA, 24 nt, Artificial Sequence
  Synthetic
cauacuggugcugcgaguacagca

SEQ ID NO: 31179 - RNA, 18 nt, Artificial Sequence
  Synthetic
ccuucaauauguacagca

SEQ ID NO: 31180 - RNA, 19 nt, Artificial Sequence
  Synthetic
uccuucaauauguacagca

SEQ ID NO: 31181 - RNA, 20 nt, Artificial Sequence
  Synthetic
auccuucaauauguacagca

SEQ ID NO: 31182 - RNA, 21 nt, Artificial Sequence
  Synthetic
aauccuucaauauguacagca

SEQ ID NO: 31183 - RNA, 22 nt, Artificial Sequence
  Synthetic
aaauccuucaauauguacagca

SEQ ID NO: 31184 - RNA, 23 nt, Artificial Sequence
  Synthetic
uaaauccuucaauauguacagca

SEQ ID NO: 31185 - RNA, 24 nt, Artificial Sequence
  Synthetic
auaaauccuucaauauguacagca

SEQ ID NO: 31186 - RNA, 18 nt, Artificial Sequence
  Synthetic
uccauucauccuccagca

SEQ ID NO: 31187 - RNA, 19 nt, Artificial Sequence
  Synthetic
auccauucauccuccagca

SEQ ID NO: 31188 - RNA, 20 nt, Artificial Sequence
  Synthetic
aauccauucauccuccagca

SEQ ID NO: 31189 - RNA, 21 nt, Artificial Sequence
  Synthetic
caauccauucauccuccagca

SEQ ID NO: 31190 - RNA, 22 nt, Artificial Sequence
  Synthetic
ccaauccauucauccuccagca

SEQ ID NO: 31191 - RNA, 23 nt, Artificial Sequence
  Synthetic
uccaauccauucauccuccagca

SEQ ID NO: 31192 - RNA, 24 nt, Artificial Sequence
  Synthetic
cuccaauccauucauccuccagca

SEQ ID NO: 31193 - RNA, 18 nt, Artificial Sequence
  Synthetic
uauuagauauuuccagca

SEQ ID NO: 31194 - RNA, 19 nt, Artificial Sequence
  Synthetic
auauuagauauuuccagca

SEQ ID NO: 31195 - RNA, 20 nt, Artificial Sequence
  Synthetic
uauauuagauauuuccagca

SEQ ID NO: 31196 - RNA, 21 nt, Artificial Sequence
  Synthetic
uuauauuagauauuuccagca

SEQ ID NO: 31197 - RNA, 22 nt, Artificial Sequence
  Synthetic
auuauauuagauauuuccagca

SEQ ID NO: 31198 - RNA, 23 nt, Artificial Sequence
  Synthetic
cauuauauuagauauuuccagca

SEQ ID NO: 31199 - RNA, 24 nt, Artificial Sequence
  Synthetic
ucauuauauuagauauuuccagca

SEQ ID NO: 31200 - RNA, 18 nt, Artificial Sequence
  Synthetic
uguugggccccagcagca

SEQ ID NO: 31201 - RNA, 19 nt, Artificial Sequence
  Synthetic
cuguugggccccagcagca

SEQ ID NO: 31202 - RNA, 20 nt, Artificial Sequence
  Synthetic
ucuguugggccccagcagca

SEQ ID NO: 31203 - RNA, 21 nt, Artificial Sequence
  Synthetic
cucuguugggccccagcagca

SEQ ID NO: 31204 - RNA, 22 nt, Artificial Sequence
  Synthetic
ucucuguugggccccagcagca

SEQ ID NO: 31205 - RNA, 23 nt, Artificial Sequence
  Synthetic
uucucuguugggccccagcagca

SEQ ID NO: 31206 - RNA, 24 nt, Artificial Sequence
  Synthetic
cuucucuguugggccccagcagca

SEQ ID NO: 31207 - RNA, 19 nt, Artificial Sequence
  Synthetic
agauugaugcccagcagca

SEQ ID NO: 31208 - RNA, 20 nt, Artificial Sequence
  Synthetic
uagauugaugcccagcagca

SEQ ID NO: 31209 - RNA, 21 nt, Artificial Sequence
  Synthetic
uuagauugaugcccagcagca

SEQ ID NO: 31210 - RNA, 22 nt, Artificial Sequence
  Synthetic
uuuagauugaugcccagcagca

SEQ ID NO: 31211 - RNA, 23 nt, Artificial Sequence
  Synthetic
auuuagauugaugcccagcagca

SEQ ID NO: 31212 - RNA, 24 nt, Artificial Sequence
  Synthetic
uauuuagauugaugcccagcagca

SEQ ID NO: 31213 - RNA, 19 nt, Artificial Sequence
  Synthetic
agaaguuuguuuagcagca

SEQ ID NO: 31214 - RNA, 20 nt, Artificial Sequence
  Synthetic
cagaaguuuguuuagcagca

SEQ ID NO: 31215 - RNA, 21 nt, Artificial Sequence
  Synthetic
acagaaguuuguuuagcagca

SEQ ID NO: 31216 - RNA, 22 nt, Artificial Sequence
  Synthetic
aacagaaguuuguuuagcagca

SEQ ID NO: 31217 - RNA, 23 nt, Artificial Sequence
  Synthetic
aaacagaaguuuguuuagcagca

SEQ ID NO: 31218 - RNA, 24 nt, Artificial Sequence
  Synthetic
aaaacagaaguuuguuuagcagca

SEQ ID NO: 31219 - RNA, 18 nt, Artificial Sequence
  Synthetic
agcuaugucaaggcagca

SEQ ID NO: 31220 - RNA, 20 nt, Artificial Sequence
  Synthetic
agagcuaugucaaggcagca

SEQ ID NO: 31221 - RNA, 21 nt, Artificial Sequence
  Synthetic
aagagcuaugucaaggcagca

SEQ ID NO: 31222 - RNA, 23 nt, Artificial Sequence
  Synthetic
ugaagagcuaugucaaggcagca

SEQ ID NO: 31223 - RNA, 24 nt, Artificial Sequence
  Synthetic
uugaagagcuaugucaaggcagca

SEQ ID NO: 31224 - RNA, 21 nt, Artificial Sequence
  Synthetic
ucccuucugcugugugcagca

SEQ ID NO: 31225 - RNA, 22 nt, Artificial Sequence
  Synthetic
aucccuucugcugugugcagca

SEQ ID NO: 31226 - RNA, 23 nt, Artificial Sequence
  Synthetic
caucccuucugcugugugcagca

SEQ ID NO: 31227 - RNA, 24 nt, Artificial Sequence
  Synthetic
ucaucccuucugcugugugcagca

SEQ ID NO: 31228 - RNA, 21 nt, Artificial Sequence
  Synthetic
agaguuguaaaaauaucagca

SEQ ID NO: 31229 - RNA, 22 nt, Artificial Sequence
  Synthetic
cagaguuguaaaaauaucagca

SEQ ID NO: 31230 - RNA, 23 nt, Artificial Sequence
  Synthetic
ccagaguuguaaaaauaucagca

SEQ ID NO: 31231 - RNA, 24 nt, Artificial Sequence
  Synthetic
uccagaguuguaaaaauaucagca

SEQ ID NO: 31232 - RNA, 18 nt, Artificial Sequence
  Synthetic
agggucugucccucagca

SEQ ID NO: 31233 - RNA, 19 nt, Artificial Sequence
  Synthetic
cagggucugucccucagca

SEQ ID NO: 31234 - RNA, 20 nt, Artificial Sequence
  Synthetic
ccagggucugucccucagca

SEQ ID NO: 31235 - RNA, 21 nt, Artificial Sequence
  Synthetic
accagggucugucccucagca

SEQ ID NO: 31236 - RNA, 22 nt, Artificial Sequence
  Synthetic
aaccagggucugucccucagca

SEQ ID NO: 31237 - RNA, 23 nt, Artificial Sequence
  Synthetic
uaaccagggucugucccucagca

SEQ ID NO: 31238 - RNA, 24 nt, Artificial Sequence
  Synthetic
uuaaccagggucugucccucagca

SEQ ID NO: 31239 - RNA, 19 nt, Artificial Sequence
  Synthetic
agaaugucauuggagagca

SEQ ID NO: 31240 - RNA, 20 nt, Artificial Sequence
  Synthetic
aagaaugucauuggagagca

SEQ ID NO: 31241 - RNA, 21 nt, Artificial Sequence
  Synthetic
uaagaaugucauuggagagca

SEQ ID NO: 31242 - RNA, 22 nt, Artificial Sequence
  Synthetic
auaagaaugucauuggagagca

SEQ ID NO: 31243 - RNA, 24 nt, Artificial Sequence
  Synthetic
ugauaagaaugucauuggagagca

SEQ ID NO: 31244 - RNA, 18 nt, Artificial Sequence
  Synthetic
aucagaagcaauggagca

SEQ ID NO: 31245 - RNA, 20 nt, Artificial Sequence
  Synthetic
ugaucagaagcaauggagca

SEQ ID NO: 31246 - RNA, 21 nt, Artificial Sequence
  Synthetic
augaucagaagcaauggagca

SEQ ID NO: 31247 - RNA, 22 nt, Artificial Sequence
  Synthetic
caugaucagaagcaauggagca

SEQ ID NO: 31248 - RNA, 23 nt, Artificial Sequence
  Synthetic
ucaugaucagaagcaauggagca

SEQ ID NO: 31249 - RNA, 24 nt, Artificial Sequence
  Synthetic
uucaugaucagaagcaauggagca

SEQ ID NO: 31250 - RNA, 18 nt, Artificial Sequence
  Synthetic
aaauggaggacaugagca

SEQ ID NO: 31251 - RNA, 19 nt, Artificial Sequence
  Synthetic
caaauggaggacaugagca

SEQ ID NO: 31252 - RNA, 20 nt, Artificial Sequence
  Synthetic
ucaaauggaggacaugagca

SEQ ID NO: 31253 - RNA, 22 nt, Artificial Sequence
  Synthetic
ugucaaauggaggacaugagca

SEQ ID NO: 31254 - RNA, 23 nt, Artificial Sequence
  Synthetic
cugucaaauggaggacaugagca

SEQ ID NO: 31255 - RNA, 18 nt, Artificial Sequence
  Synthetic
aaggcagucauaugagca

SEQ ID NO: 31256 - RNA, 19 nt, Artificial Sequence
  Synthetic
caaggcagucauaugagca

SEQ ID NO: 31257 - RNA, 20 nt, Artificial Sequence
  Synthetic
ccaaggcagucauaugagca

SEQ ID NO: 31258 - RNA, 21 nt, Artificial Sequence
  Synthetic
uccaaggcagucauaugagca

SEQ ID NO: 31259 - RNA, 22 nt, Artificial Sequence
  Synthetic
cuccaaggcagucauaugagca

SEQ ID NO: 31260 - RNA, 23 nt, Artificial Sequence
  Synthetic
ccuccaaggcagucauaugagca

SEQ ID NO: 31261 - RNA, 24 nt, Artificial Sequence
  Synthetic
uccuccaaggcagucauaugagca

SEQ ID NO: 31262 - RNA, 18 nt, Artificial Sequence
  Synthetic
ugcaggagcgugugagca

SEQ ID NO: 31263 - RNA, 19 nt, Artificial Sequence
  Synthetic
augcaggagcgugugagca

SEQ ID NO: 31264 - RNA, 21 nt, Artificial Sequence
  Synthetic
ugaugcaggagcgugugagca

SEQ ID NO: 31265 - RNA, 22 nt, Artificial Sequence
  Synthetic
cugaugcaggagcgugugagca

SEQ ID NO: 31266 - RNA, 23 nt, Artificial Sequence
  Synthetic
ucugaugcaggagcgugugagca

SEQ ID NO: 31267 - RNA, 24 nt, Artificial Sequence
  Synthetic
uucugaugcaggagcgugugagca

SEQ ID NO: 31268 - RNA, 18 nt, Artificial Sequence
  Synthetic
aguauaaauuuuugagca

SEQ ID NO: 31269 - RNA, 19 nt, Artificial Sequence
  Synthetic
caguauaaauuuuugagca

SEQ ID NO: 31270 - RNA, 20 nt, Artificial Sequence
  Synthetic
ucaguauaaauuuuugagca

SEQ ID NO: 31271 - RNA, 21 nt, Artificial Sequence
  Synthetic
uucaguauaaauuuuugagca

SEQ ID NO: 31272 - RNA, 22 nt, Artificial Sequence
  Synthetic
auucaguauaaauuuuugagca

SEQ ID NO: 31273 - RNA, 23 nt, Artificial Sequence
  Synthetic
uauucaguauaaauuuuugagca

SEQ ID NO: 31274 - RNA, 18 nt, Artificial Sequence
  Synthetic
aauugugaaucaauagca

SEQ ID NO: 31275 - RNA, 20 nt, Artificial Sequence
  Synthetic
agaauugugaaucaauagca

SEQ ID NO: 31276 - RNA, 21 nt, Artificial Sequence
  Synthetic
uagaauugugaaucaauagca

SEQ ID NO: 31277 - RNA, 22 nt, Artificial Sequence
  Synthetic
cuagaauugugaaucaauagca

SEQ ID NO: 31278 - RNA, 23 nt, Artificial Sequence
  Synthetic
ucuagaauugugaaucaauagca

SEQ ID NO: 31279 - RNA, 24 nt, Artificial Sequence
  Synthetic
uucuagaauugugaaucaauagca

SEQ ID NO: 31280 - RNA, 18 nt, Artificial Sequence
  Synthetic
uagaggggauauauagca

SEQ ID NO: 31281 - RNA, 19 nt, Artificial Sequence
  Synthetic
cuagaggggauauauagca

SEQ ID NO: 31282 - RNA, 21 nt, Artificial Sequence
  Synthetic
agcuagaggggauauauagca

SEQ ID NO: 31283 - RNA, 22 nt, Artificial Sequence
  Synthetic
cagcuagaggggauauauagca

SEQ ID NO: 31284 - RNA, 23 nt, Artificial Sequence
  Synthetic
ccagcuagaggggauauauagca

SEQ ID NO: 31285 - RNA, 18 nt, Artificial Sequence
  Synthetic
cuuugcaaggucguagca

SEQ ID NO: 31286 - RNA, 20 nt, Artificial Sequence
  Synthetic
agcuuugcaaggucguagca

SEQ ID NO: 31287 - RNA, 21 nt, Artificial Sequence
  Synthetic
aagcuuugcaaggucguagca

SEQ ID NO: 31288 - RNA, 22 nt, Artificial Sequence
  Synthetic
uaagcuuugcaaggucguagca

SEQ ID NO: 31289 - RNA, 19 nt, Artificial Sequence
  Synthetic
agaaacucacaagguagca

SEQ ID NO: 31290 - RNA, 21 nt, Artificial Sequence
  Synthetic
ugagaaacucacaagguagca

SEQ ID NO: 31291 - RNA, 22 nt, Artificial Sequence
  Synthetic
uugagaaacucacaagguagca

SEQ ID NO: 31292 - RNA, 23 nt, Artificial Sequence
  Synthetic
cuugagaaacucacaagguagca

SEQ ID NO: 31293 - RNA, 24 nt, Artificial Sequence
  Synthetic
acuugagaaacucacaagguagca

SEQ ID NO: 31294 - RNA, 18 nt, Artificial Sequence
  Synthetic
cuuagcaggaagguagca

SEQ ID NO: 31295 - RNA, 20 nt, Artificial Sequence
  Synthetic
agcuuagcaggaagguagca

SEQ ID NO: 31296 - RNA, 21 nt, Artificial Sequence
  Synthetic
uagcuuagcaggaagguagca

SEQ ID NO: 31297 - RNA, 22 nt, Artificial Sequence
  Synthetic
auagcuuagcaggaagguagca

SEQ ID NO: 31298 - RNA, 23 nt, Artificial Sequence
  Synthetic
uauagcuuagcaggaagguagca

SEQ ID NO: 31299 - RNA, 24 nt, Artificial Sequence
  Synthetic
auauagcuuagcaggaagguagca

SEQ ID NO: 31300 - RNA, 18 nt, Artificial Sequence
  Synthetic
cucuguccgcagguagca

SEQ ID NO: 31301 - RNA, 20 nt, Artificial Sequence
  Synthetic
agcucuguccgcagguagca

SEQ ID NO: 31302 - RNA, 21 nt, Artificial Sequence
  Synthetic
uagcucuguccgcagguagca

SEQ ID NO: 31303 - RNA, 22 nt, Artificial Sequence
  Synthetic
cuagcucuguccgcagguagca

SEQ ID NO: 31304 - RNA, 23 nt, Artificial Sequence
  Synthetic
ucuagcucuguccgcagguagca

SEQ ID NO: 31305 - RNA, 24 nt, Artificial Sequence
  Synthetic
uucuagcucuguccgcagguagca

SEQ ID NO: 31306 - RNA, 18 nt, Artificial Sequence
  Synthetic
auuuauggcuaauuagca

SEQ ID NO: 31307 - RNA, 19 nt, Artificial Sequence
  Synthetic
aauuuauggcuaauuagca

SEQ ID NO: 31308 - RNA, 20 nt, Artificial Sequence
  Synthetic
aaauuuauggcuaauuagca

SEQ ID NO: 31309 - RNA, 21 nt, Artificial Sequence
  Synthetic
uaaauuuauggcuaauuagca

SEQ ID NO: 31310 - RNA, 22 nt, Artificial Sequence
  Synthetic
auaaauuuauggcuaauuagca

SEQ ID NO: 31311 - RNA, 23 nt, Artificial Sequence
  Synthetic
aauaaauuuauggcuaauuagca

SEQ ID NO: 31312 - RNA, 18 nt, Artificial Sequence
  Synthetic
aauaccacuuacuuagca

SEQ ID NO: 31313 - RNA, 20 nt, Artificial Sequence
  Synthetic
agaauaccacuuacuuagca

SEQ ID NO: 31314 - RNA, 21 nt, Artificial Sequence
  Synthetic
aagaauaccacuuacuuagca

SEQ ID NO: 31315 - RNA, 22 nt, Artificial Sequence
  Synthetic
aaagaauaccacuuacuuagca

SEQ ID NO: 31316 - RNA, 23 nt, Artificial Sequence
  Synthetic
caaagaauaccacuuacuuagca

SEQ ID NO: 31317 - RNA, 24 nt, Artificial Sequence
  Synthetic
acaaagaauaccacuuacuuagca

SEQ ID NO: 31318 - RNA, 18 nt, Artificial Sequence
  Synthetic
acuucaugauuuuacgca

SEQ ID NO: 31319 - RNA, 19 nt, Artificial Sequence
  Synthetic
cacuucaugauuuuacgca

SEQ ID NO: 31320 - RNA, 20 nt, Artificial Sequence
  Synthetic
ccacuucaugauuuuacgca

SEQ ID NO: 31321 - RNA, 22 nt, Artificial Sequence
  Synthetic
agccacuucaugauuuuacgca

SEQ ID NO: 31322 - RNA, 23 nt, Artificial Sequence
  Synthetic
aagccacuucaugauuuuacgca

SEQ ID NO: 31323 - RNA, 18 nt, Artificial Sequence
  Synthetic
cccguguguagcagcgca

SEQ ID NO: 31324 - RNA, 19 nt, Artificial Sequence
  Synthetic
ccccguguguagcagcgca

SEQ ID NO: 31325 - RNA, 20 nt, Artificial Sequence
  Synthetic
cccccguguguagcagcgca

SEQ ID NO: 31326 - RNA, 21 nt, Artificial Sequence
  Synthetic
ucccccguguguagcagcgca

SEQ ID NO: 31327 - RNA, 22 nt, Artificial Sequence
  Synthetic
aucccccguguguagcagcgca

SEQ ID NO: 31328 - RNA, 23 nt, Artificial Sequence
  Synthetic
uaucccccguguguagcagcgca

SEQ ID NO: 31329 - RNA, 24 nt, Artificial Sequence
  Synthetic
auaucccccguguguagcagcgca

SEQ ID NO: 31330 - RNA, 18 nt, Artificial Sequence
  Synthetic
agaauuauucugggcgca

SEQ ID NO: 31331 - RNA, 19 nt, Artificial Sequence
  Synthetic
cagaauuauucugggcgca

SEQ ID NO: 31332 - RNA, 20 nt, Artificial Sequence
  Synthetic
acagaauuauucugggcgca

SEQ ID NO: 31333 - RNA, 21 nt, Artificial Sequence
  Synthetic
cacagaauuauucugggcgca

SEQ ID NO: 31334 - RNA, 22 nt, Artificial Sequence
  Synthetic
ucacagaauuauucugggcgca

SEQ ID NO: 31335 - RNA, 23 nt, Artificial Sequence
  Synthetic
aucacagaauuauucugggcgca

SEQ ID NO: 31336 - RNA, 24 nt, Artificial Sequence
  Synthetic
uaucacagaauuauucugggcgca

SEQ ID NO: 31337 - RNA, 18 nt, Artificial Sequence
  Synthetic
uuaauuuuaggaugcgca

SEQ ID NO: 31338 - RNA, 19 nt, Artificial Sequence
  Synthetic
uuuaauuuuaggaugcgca

SEQ ID NO: 31339 - RNA, 20 nt, Artificial Sequence
  Synthetic
uuuuaauuuuaggaugcgca

SEQ ID NO: 31340 - RNA, 23 nt, Artificial Sequence
  Synthetic
ugguuuuaauuuuaggaugcgca

SEQ ID NO: 31341 - RNA, 24 nt, Artificial Sequence
  Synthetic
uugguuuuaauuuuaggaugcgca

SEQ ID NO: 31342 - RNA, 18 nt, Artificial Sequence
  Synthetic
cuaauugugaaaaaggca

SEQ ID NO: 31343 - RNA, 19 nt, Artificial Sequence
  Synthetic
acuaauugugaaaaaggca

SEQ ID NO: 31344 - RNA, 20 nt, Artificial Sequence
  Synthetic
aacuaauugugaaaaaggca

SEQ ID NO: 31345 - RNA, 21 nt, Artificial Sequence
  Synthetic
aaacuaauugugaaaaaggca

SEQ ID NO: 31346 - RNA, 22 nt, Artificial Sequence
  Synthetic
uaaacuaauugugaaaaaggca

SEQ ID NO: 31347 - RNA, 23 nt, Artificial Sequence
  Synthetic
auaaacuaauugugaaaaaggca

SEQ ID NO: 31348 - RNA, 24 nt, Artificial Sequence
  Synthetic
aauaaacuaauugugaaaaaggca

SEQ ID NO: 31349 - RNA, 21 nt, Artificial Sequence
  Synthetic
aucuucuggcgugaaaaggca

SEQ ID NO: 31350 - RNA, 22 nt, Artificial Sequence
  Synthetic
aaucuucuggcgugaaaaggca

SEQ ID NO: 31351 - RNA, 23 nt, Artificial Sequence
  Synthetic
uaaucuucuggcgugaaaaggca

SEQ ID NO: 31352 - RNA, 24 nt, Artificial Sequence
  Synthetic
auaaucuucuggcgugaaaaggca

SEQ ID NO: 31353 - RNA, 18 nt, Artificial Sequence
  Synthetic
uugcccuuuuaaaaggca

SEQ ID NO: 31354 - RNA, 19 nt, Artificial Sequence
  Synthetic
cuugcccuuuuaaaaggca

SEQ ID NO: 31355 - RNA, 20 nt, Artificial Sequence
  Synthetic
ccuugcccuuuuaaaaggca

SEQ ID NO: 31356 - RNA, 18 nt, Artificial Sequence
  Synthetic
ucgaggaaaggaaaggca

SEQ ID NO: 31357 - RNA, 21 nt, Artificial Sequence
  Synthetic
uggucgaggaaaggaaaggca

SEQ ID NO: 31358 - RNA, 22 nt, Artificial Sequence
  Synthetic
cuggucgaggaaaggaaaggca

SEQ ID NO: 31359 - RNA, 23 nt, Artificial Sequence
  Synthetic
acuggucgaggaaaggaaaggca

SEQ ID NO: 31360 - RNA, 24 nt, Artificial Sequence
  Synthetic
aacuggucgaggaaaggaaaggca

SEQ ID NO: 31361 - RNA, 18 nt, Artificial Sequence
  Synthetic
uaagugauacuaaaggca

SEQ ID NO: 31362 - RNA, 19 nt, Artificial Sequence
  Synthetic
auaagugauacuaaaggca

SEQ ID NO: 31363 - RNA, 20 nt, Artificial Sequence
  Synthetic
cauaagugauacuaaaggca

SEQ ID NO: 31364 - RNA, 22 nt, Artificial Sequence
  Synthetic
agcauaagugauacuaaaggca

SEQ ID NO: 31365 - RNA, 23 nt, Artificial Sequence
  Synthetic
aagcauaagugauacuaaaggca

SEQ ID NO: 31366 - RNA, 18 nt, Artificial Sequence
  Synthetic
ucuuacccucucaaggca

SEQ ID NO: 31367 - RNA, 19 nt, Artificial Sequence
  Synthetic
aucuuacccucucaaggca

SEQ ID NO: 31368 - RNA, 20 nt, Artificial Sequence
  Synthetic
aaucuuacccucucaaggca

SEQ ID NO: 31369 - RNA, 21 nt, Artificial Sequence
  Synthetic
uaaucuuacccucucaaggca

SEQ ID NO: 31370 - RNA, 22 nt, Artificial Sequence
  Synthetic
uuaaucuuacccucucaaggca

SEQ ID NO: 31371 - RNA, 23 nt, Artificial Sequence
  Synthetic
uuuaaucuuacccucucaaggca

SEQ ID NO: 31372 - RNA, 20 nt, Artificial Sequence
  Synthetic
ugggcuucaacaggcaggca

SEQ ID NO: 31373 - RNA, 21 nt, Artificial Sequence
  Synthetic
uugggcuucaacaggcaggca

SEQ ID NO: 31374 - RNA, 22 nt, Artificial Sequence
  Synthetic
uuugggcuucaacaggcaggca

SEQ ID NO: 31375 - RNA, 23 nt, Artificial Sequence
  Synthetic
auuugggcuucaacaggcaggca

SEQ ID NO: 31376 - RNA, 24 nt, Artificial Sequence
  Synthetic
uauuugggcuucaacaggcaggca

SEQ ID NO: 31377 - RNA, 18 nt, Artificial Sequence
  Synthetic
uauuuauuuugggaggca

SEQ ID NO: 31378 - RNA, 20 nt, Artificial Sequence
  Synthetic
uguauuuauuuugggaggca

SEQ ID NO: 31379 - RNA, 21 nt, Artificial Sequence
  Synthetic
auguauuuauuuugggaggca

SEQ ID NO: 31380 - RNA, 22 nt, Artificial Sequence
  Synthetic
uauguauuuauuuugggaggca

SEQ ID NO: 31381 - RNA, 23 nt, Artificial Sequence
  Synthetic
uuauguauuuauuuugggaggca

SEQ ID NO: 31382 - RNA, 24 nt, Artificial Sequence
  Synthetic
auuauguauuuauuuugggaggca

SEQ ID NO: 31383 - RNA, 18 nt, Artificial Sequence
  Synthetic
acaaaaucuauggaggca

SEQ ID NO: 31384 - RNA, 19 nt, Artificial Sequence
  Synthetic
aacaaaaucuauggaggca

SEQ ID NO: 31385 - RNA, 21 nt, Artificial Sequence
  Synthetic
agaacaaaaucuauggaggca

SEQ ID NO: 31386 - RNA, 22 nt, Artificial Sequence
  Synthetic
aagaacaaaaucuauggaggca

SEQ ID NO: 31387 - RNA, 23 nt, Artificial Sequence
  Synthetic
aaagaacaaaaucuauggaggca

SEQ ID NO: 31388 - RNA, 18 nt, Artificial Sequence
  Synthetic
aucucaaagaaugaggca

SEQ ID NO: 31389 - RNA, 20 nt, Artificial Sequence
  Synthetic
agaucucaaagaaugaggca

SEQ ID NO: 31390 - RNA, 21 nt, Artificial Sequence
  Synthetic
aagaucucaaagaaugaggca

SEQ ID NO: 31391 - RNA, 22 nt, Artificial Sequence
  Synthetic
aaagaucucaaagaaugaggca

SEQ ID NO: 31392 - RNA, 23 nt, Artificial Sequence
  Synthetic
caaagaucucaaagaaugaggca

SEQ ID NO: 31393 - RNA, 18 nt, Artificial Sequence
  Synthetic
uuuauggcuaaauaggca

SEQ ID NO: 31394 - RNA, 19 nt, Artificial Sequence
  Synthetic
cuuuauggcuaaauaggca

SEQ ID NO: 31395 - RNA, 21 nt, Artificial Sequence
  Synthetic
ugcuuuauggcuaaauaggca

SEQ ID NO: 31396 - RNA, 22 nt, Artificial Sequence
  Synthetic
augcuuuauggcuaaauaggca

SEQ ID NO: 31397 - RNA, 23 nt, Artificial Sequence
  Synthetic
aaugcuuuauggcuaaauaggca

SEQ ID NO: 31398 - RNA, 24 nt, Artificial Sequence
  Synthetic
uaaugcuuuauggcuaaauaggca

SEQ ID NO: 31399 - RNA, 19 nt, Artificial Sequence
  Synthetic
ugcauucuuuggauaggca

SEQ ID NO: 31400 - RNA, 20 nt, Artificial Sequence
  Synthetic
cugcauucuuuggauaggca

SEQ ID NO: 31401 - RNA, 21 nt, Artificial Sequence
  Synthetic
ucugcauucuuuggauaggca

SEQ ID NO: 31402 - RNA, 22 nt, Artificial Sequence
  Synthetic
cucugcauucuuuggauaggca

SEQ ID NO: 31403 - RNA, 23 nt, Artificial Sequence
  Synthetic
acucugcauucuuuggauaggca

SEQ ID NO: 31404 - RNA, 24 nt, Artificial Sequence
  Synthetic
cacucugcauucuuuggauaggca

SEQ ID NO: 31405 - RNA, 18 nt, Artificial Sequence
  Synthetic
cucacaauagguuaggca

SEQ ID NO: 31406 - RNA, 19 nt, Artificial Sequence
  Synthetic
ccucacaauagguuaggca

SEQ ID NO: 31407 - RNA, 20 nt, Artificial Sequence
  Synthetic
accucacaauagguuaggca

SEQ ID NO: 31408 - RNA, 21 nt, Artificial Sequence
  Synthetic
aaccucacaauagguuaggca

SEQ ID NO: 31409 - RNA, 22 nt, Artificial Sequence
  Synthetic
aaaccucacaauagguuaggca

SEQ ID NO: 31410 - RNA, 24 nt, Artificial Sequence
  Synthetic
ugaaaccucacaauagguuaggca

SEQ ID NO: 31411 - RNA, 18 nt, Artificial Sequence
  Synthetic
aaagguagcuacccggca

SEQ ID NO: 31412 - RNA, 19 nt, Artificial Sequence
  Synthetic
aaaagguagcuacccggca

SEQ ID NO: 31413 - RNA, 20 nt, Artificial Sequence
  Synthetic
aaaaagguagcuacccggca

SEQ ID NO: 31414 - RNA, 21 nt, Artificial Sequence
  Synthetic
caaaaagguagcuacccggca

SEQ ID NO: 31415 - RNA, 22 nt, Artificial Sequence
  Synthetic
ccaaaaagguagcuacccggca

SEQ ID NO: 31416 - RNA, 23 nt, Artificial Sequence
  Synthetic
uccaaaaagguagcuacccggca

SEQ ID NO: 31417 - RNA, 24 nt, Artificial Sequence
  Synthetic
cuccaaaaagguagcuacccggca

SEQ ID NO: 31418 - RNA, 18 nt, Artificial Sequence
  Synthetic
auggaauuuuacucggca

SEQ ID NO: 31419 - RNA, 19 nt, Artificial Sequence
  Synthetic
aauggaauuuuacucggca

SEQ ID NO: 31420 - RNA, 21 nt, Artificial Sequence
  Synthetic
ugaauggaauuuuacucggca

SEQ ID NO: 31421 - RNA, 22 nt, Artificial Sequence
  Synthetic
augaauggaauuuuacucggca

SEQ ID NO: 31422 - RNA, 23 nt, Artificial Sequence
  Synthetic
caugaauggaauuuuacucggca

SEQ ID NO: 31423 - RNA, 24 nt, Artificial Sequence
  Synthetic
ccaugaauggaauuuuacucggca

SEQ ID NO: 31424 - RNA, 20 nt, Artificial Sequence
  Synthetic
aggaaacaagggcaagggca

SEQ ID NO: 31425 - RNA, 18 nt, Artificial Sequence
  Synthetic
uauggggguaauagggca

SEQ ID NO: 31426 - RNA, 20 nt, Artificial Sequence
  Synthetic
uguauggggguaauagggca

SEQ ID NO: 31427 - RNA, 21 nt, Artificial Sequence
  Synthetic
uuguauggggguaauagggca

SEQ ID NO: 31428 - RNA, 22 nt, Artificial Sequence
  Synthetic
cuuguauggggguaauagggca

SEQ ID NO: 31429 - RNA, 18 nt, Artificial Sequence
  Synthetic
uacuaauugagaugggca

SEQ ID NO: 31430 - RNA, 20 nt, Artificial Sequence
  Synthetic
aguacuaauugagaugggca

SEQ ID NO: 31431 - RNA, 21 nt, Artificial Sequence
  Synthetic
uaguacuaauugagaugggca

SEQ ID NO: 31432 - RNA, 22 nt, Artificial Sequence
  Synthetic
cuaguacuaauugagaugggca

SEQ ID NO: 31433 - RNA, 18 nt, Artificial Sequence
  Synthetic
uucaucagauguugggca

SEQ ID NO: 31434 - RNA, 19 nt, Artificial Sequence
  Synthetic
auucaucagauguugggca

SEQ ID NO: 31435 - RNA, 20 nt, Artificial Sequence
  Synthetic
aauucaucagauguugggca

SEQ ID NO: 31436 - RNA, 21 nt, Artificial Sequence
  Synthetic
caauucaucagauguugggca

SEQ ID NO: 31437 - RNA, 22 nt, Artificial Sequence
  Synthetic
acaauucaucagauguugggca

SEQ ID NO: 31438 - RNA, 23 nt, Artificial Sequence
  Synthetic
aacaauucaucagauguugggca

SEQ ID NO: 31439 - RNA, 24 nt, Artificial Sequence
  Synthetic
aaacaauucaucagauguugggca

SEQ ID NO: 31440 - RNA, 18 nt, Artificial Sequence
  Synthetic
aaaacacaauuuugggca

SEQ ID NO: 31441 - RNA, 19 nt, Artificial Sequence
  Synthetic
caaaacacaauuuugggca

SEQ ID NO: 31442 - RNA, 21 nt, Artificial Sequence
  Synthetic
agcaaaacacaauuuugggca

SEQ ID NO: 31443 - RNA, 22 nt, Artificial Sequence
  Synthetic
aagcaaaacacaauuuugggca

SEQ ID NO: 31444 - RNA, 23 nt, Artificial Sequence
  Synthetic
aaagcaaaacacaauuuugggca

SEQ ID NO: 31445 - RNA, 24 nt, Artificial Sequence
  Synthetic
caaagcaaaacacaauuuugggca

SEQ ID NO: 31446 - RNA, 18 nt, Artificial Sequence
  Synthetic
uuccaacucauaauggca

SEQ ID NO: 31447 - RNA, 19 nt, Artificial Sequence
  Synthetic
uuuccaacucauaauggca

SEQ ID NO: 31448 - RNA, 20 nt, Artificial Sequence
  Synthetic
cuuuccaacucauaauggca

SEQ ID NO: 31449 - RNA, 21 nt, Artificial Sequence
  Synthetic
acuuuccaacucauaauggca

SEQ ID NO: 31450 - RNA, 22 nt, Artificial Sequence
  Synthetic
uacuuuccaacucauaauggca

SEQ ID NO: 31451 - RNA, 23 nt, Artificial Sequence
  Synthetic
uuacuuuccaacucauaauggca

SEQ ID NO: 31452 - RNA, 24 nt, Artificial Sequence
  Synthetic
auuacuuuccaacucauaauggca

SEQ ID NO: 31453 - RNA, 18 nt, Artificial Sequence
  Synthetic
cuaaguuaaguaauggca

SEQ ID NO: 31454 - RNA, 19 nt, Artificial Sequence
  Synthetic
acuaaguuaaguaauggca

SEQ ID NO: 31455 - RNA, 20 nt, Artificial Sequence
  Synthetic
aacuaaguuaaguaauggca

SEQ ID NO: 31456 - RNA, 21 nt, Artificial Sequence
  Synthetic
aaaaacagaaugcagauggca

SEQ ID NO: 31457 - RNA, 22 nt, Artificial Sequence
  Synthetic
aaaaaacagaaugcagauggca

SEQ ID NO: 31458 - RNA, 24 nt, Artificial Sequence
  Synthetic
ugaaaaaacagaaugcagauggca

SEQ ID NO: 31459 - RNA, 19 nt, Artificial Sequence
  Synthetic
agagaagggguagauggca

SEQ ID NO: 31460 - RNA, 20 nt, Artificial Sequence
  Synthetic
uagagaagggguagauggca

SEQ ID NO: 31461 - RNA, 21 nt, Artificial Sequence
  Synthetic
cuagagaagggguagauggca

SEQ ID NO: 31462 - RNA, 22 nt, Artificial Sequence
  Synthetic
ucuagagaagggguagauggca

SEQ ID NO: 31463 - RNA, 23 nt, Artificial Sequence
  Synthetic
cucuagagaagggguagauggca

SEQ ID NO: 31464 - RNA, 24 nt, Artificial Sequence
  Synthetic
acucuagagaagggguagauggca

SEQ ID NO: 31465 - RNA, 18 nt, Artificial Sequence
  Synthetic
uaaaguauggguauggca

SEQ ID NO: 31466 - RNA, 21 nt, Artificial Sequence
  Synthetic
agguaaaguauggguauggca

SEQ ID NO: 31467 - RNA, 22 nt, Artificial Sequence
  Synthetic
aagguaaaguauggguauggca

SEQ ID NO: 31468 - RNA, 24 nt, Artificial Sequence
  Synthetic
agaagguaaaguauggguauggca

SEQ ID NO: 31469 - RNA, 18 nt, Artificial Sequence
  Synthetic
cuccuccuguuacuggca

SEQ ID NO: 31470 - RNA, 19 nt, Artificial Sequence
  Synthetic
ucuccuccuguuacuggca

SEQ ID NO: 31471 - RNA, 20 nt, Artificial Sequence
  Synthetic
cucuccuccuguuacuggca

SEQ ID NO: 31472 - RNA, 21 nt, Artificial Sequence
  Synthetic
ucucuccuccuguuacuggca

SEQ ID NO: 31473 - RNA, 22 nt, Artificial Sequence
  Synthetic
cucucuccuccuguuacuggca

SEQ ID NO: 31474 - RNA, 23 nt, Artificial Sequence
  Synthetic
ucucucuccuccuguuacuggca

SEQ ID NO: 31475 - RNA, 24 nt, Artificial Sequence
  Synthetic
cucucucuccuccuguuacuggca

SEQ ID NO: 31476 - RNA, 19 nt, Artificial Sequence
  Synthetic
agcaguuuauucccuggca

SEQ ID NO: 31477 - RNA, 20 nt, Artificial Sequence
  Synthetic
aagcaguuuauucccuggca

SEQ ID NO: 31478 - RNA, 21 nt, Artificial Sequence
  Synthetic
caagcaguuuauucccuggca

SEQ ID NO: 31479 - RNA, 23 nt, Artificial Sequence
  Synthetic
ugcaagcaguuuauucccuggca

SEQ ID NO: 31480 - RNA, 18 nt, Artificial Sequence
  Synthetic
cuagcauagcuccuggca

SEQ ID NO: 31481 - RNA, 19 nt, Artificial Sequence
  Synthetic
ccuagcauagcuccuggca

SEQ ID NO: 31482 - RNA, 20 nt, Artificial Sequence
  Synthetic
accuagcauagcuccuggca

SEQ ID NO: 31483 - RNA, 24 nt, Artificial Sequence
  Synthetic
cgggaccuagcauagcuccuggca

SEQ ID NO: 31484 - RNA, 18 nt, Artificial Sequence
  Synthetic
cuggcacaaagucuggca

SEQ ID NO: 31485 - RNA, 19 nt, Artificial Sequence
  Synthetic
acuggcacaaagucuggca

SEQ ID NO: 31486 - RNA, 20 nt, Artificial Sequence
  Synthetic
aacuggcacaaagucuggca

SEQ ID NO: 31487 - RNA, 21 nt, Artificial Sequence
  Synthetic
uaacuggcacaaagucuggca

SEQ ID NO: 31488 - RNA, 23 nt, Artificial Sequence
  Synthetic
aguaacuggcacaaagucuggca

SEQ ID NO: 31489 - RNA, 24 nt, Artificial Sequence
  Synthetic
uaguaacuggcacaaagucuggca

SEQ ID NO: 31490 - RNA, 18 nt, Artificial Sequence
  Synthetic
cuguaaucucuucuggca

SEQ ID NO: 31491 - RNA, 19 nt, Artificial Sequence
  Synthetic
ucuguaaucucuucuggca

SEQ ID NO: 31492 - RNA, 20 nt, Artificial Sequence
  Synthetic
uucuguaaucucuucuggca

SEQ ID NO: 31493 - RNA, 21 nt, Artificial Sequence
  Synthetic
uuucuguaaucucuucuggca

SEQ ID NO: 31494 - RNA, 23 nt, Artificial Sequence
  Synthetic
aguuucuguaaucucuucuggca

SEQ ID NO: 31495 - RNA, 24 nt, Artificial Sequence
  Synthetic
caguuucuguaaucucuucuggca

SEQ ID NO: 31496 - RNA, 18 nt, Artificial Sequence
  Synthetic
cccacaggucauguggca

SEQ ID NO: 31497 - RNA, 19 nt, Artificial Sequence
  Synthetic
ucccacaggucauguggca

SEQ ID NO: 31498 - RNA, 20 nt, Artificial Sequence
  Synthetic
uucccacaggucauguggca

SEQ ID NO: 31499 - RNA, 21 nt, Artificial Sequence
  Synthetic
uuucccacaggucauguggca

SEQ ID NO: 31500 - RNA, 22 nt, Artificial Sequence
  Synthetic
auuucccacaggucauguggca

SEQ ID NO: 31501 - RNA, 23 nt, Artificial Sequence
  Synthetic
aauuucccacaggucauguggca

SEQ ID NO: 31502 - RNA, 24 nt, Artificial Sequence
  Synthetic
caauuucccacaggucauguggca

SEQ ID NO: 31503 - RNA, 18 nt, Artificial Sequence
  Synthetic
aguguaaagccauuggca

SEQ ID NO: 31504 - RNA, 20 nt, Artificial Sequence
  Synthetic
cgaguguaaagccauuggca

SEQ ID NO: 31505 - RNA, 21 nt, Artificial Sequence
  Synthetic
ucgaguguaaagccauuggca

SEQ ID NO: 31506 - RNA, 22 nt, Artificial Sequence
  Synthetic
aucgaguguaaagccauuggca

SEQ ID NO: 31507 - RNA, 23 nt, Artificial Sequence
  Synthetic
uaucgaguguaaagccauuggca

SEQ ID NO: 31508 - RNA, 18 nt, Artificial Sequence
  Synthetic
auugguccaaacuuggca

SEQ ID NO: 31509 - RNA, 20 nt, Artificial Sequence
  Synthetic
agauugguccaaacuuggca

SEQ ID NO: 31510 - RNA, 21 nt, Artificial Sequence
  Synthetic
aagauugguccaaacuuggca

SEQ ID NO: 31511 - RNA, 22 nt, Artificial Sequence
  Synthetic
uaagauugguccaaacuuggca

SEQ ID NO: 31512 - RNA, 23 nt, Artificial Sequence
  Synthetic
uuaagauugguccaaacuuggca

SEQ ID NO: 31513 - RNA, 24 nt, Artificial Sequence
  Synthetic
uuuaagauugguccaaacuuggca

SEQ ID NO: 31514 - RNA, 20 nt, Artificial Sequence
  Synthetic
uggagucauaacaguuggca

SEQ ID NO: 31515 - RNA, 21 nt, Artificial Sequence
  Synthetic
auggagucauaacaguuggca

SEQ ID NO: 31516 - RNA, 22 nt, Artificial Sequence
  Synthetic
cauggagucauaacaguuggca

SEQ ID NO: 31517 - RNA, 23 nt, Artificial Sequence
  Synthetic
ccauggagucauaacaguuggca

SEQ ID NO: 31518 - RNA, 24 nt, Artificial Sequence
  Synthetic
uccauggagucauaacaguuggca

SEQ ID NO: 31519 - RNA, 18 nt, Artificial Sequence
  Synthetic
acacaguauuuuuuggca

SEQ ID NO: 31520 - RNA, 19 nt, Artificial Sequence
  Synthetic
cacacaguauuuuuuggca

SEQ ID NO: 31521 - RNA, 21 nt, Artificial Sequence
  Synthetic
agcacacaguauuuuuuggca

SEQ ID NO: 31522 - RNA, 22 nt, Artificial Sequence
  Synthetic
uagcacacaguauuuuuuggca

SEQ ID NO: 31523 - RNA, 23 nt, Artificial Sequence
  Synthetic
auagcacacaguauuuuuuggca

SEQ ID NO: 31524 - RNA, 24 nt, Artificial Sequence
  Synthetic
aauagcacacaguauuuuuuggca

SEQ ID NO: 31525 - RNA, 18 nt, Artificial Sequence
  Synthetic
cagagagaggcaaaugca

SEQ ID NO: 31526 - RNA, 19 nt, Artificial Sequence
  Synthetic
ucagagagaggcaaaugca

SEQ ID NO: 31527 - RNA, 20 nt, Artificial Sequence
  Synthetic
cucagagagaggcaaaugca

SEQ ID NO: 31528 - RNA, 21 nt, Artificial Sequence
  Synthetic
ucucagagagaggcaaaugca

SEQ ID NO: 31529 - RNA, 22 nt, Artificial Sequence
  Synthetic
aucucagagagaggcaaaugca

SEQ ID NO: 31530 - RNA, 24 nt, Artificial Sequence
  Synthetic
agaucucagagagaggcaaaugca

SEQ ID NO: 31531 - RNA, 18 nt, Artificial Sequence
  Synthetic
aaucaagucucaaaugca

SEQ ID NO: 31532 - RNA, 19 nt, Artificial Sequence
  Synthetic
aaaucaagucucaaaugca

SEQ ID NO: 31533 - RNA, 20 nt, Artificial Sequence
  Synthetic
aaaaucaagucucaaaugca

SEQ ID NO: 31534 - RNA, 21 nt, Artificial Sequence
  Synthetic
uaaaaucaagucucaaaugca

SEQ ID NO: 31535 - RNA, 22 nt, Artificial Sequence
  Synthetic
auaaaaucaagucucaaaugca

SEQ ID NO: 31536 - RNA, 24 nt, Artificial Sequence
  Synthetic
agauaaaaucaagucucaaaugca

SEQ ID NO: 31537 - RNA, 18 nt, Artificial Sequence
  Synthetic
cauuucuauugaaaugca

SEQ ID NO: 31538 - RNA, 19 nt, Artificial Sequence
  Synthetic
ccauuucuauugaaaugca

SEQ ID NO: 31539 - RNA, 20 nt, Artificial Sequence
  Synthetic
accauuucuauugaaaugca

SEQ ID NO: 31540 - RNA, 21 nt, Artificial Sequence
  Synthetic
uaccauuucuauugaaaugca

SEQ ID NO: 31541 - RNA, 22 nt, Artificial Sequence
  Synthetic
cuaccauuucuauugaaaugca

SEQ ID NO: 31542 - RNA, 23 nt, Artificial Sequence
  Synthetic
ccuaccauuucuauugaaaugca

SEQ ID NO: 31543 - RNA, 24 nt, Artificial Sequence
  Synthetic
uccuaccauuucuauugaaaugca

SEQ ID NO: 31544 - RNA, 21 nt, Artificial Sequence
  Synthetic
acagcaaauaauuauaaugca

SEQ ID NO: 31545 - RNA, 22 nt, Artificial Sequence
  Synthetic
cacagcaaauaauuauaaugca

SEQ ID NO: 31546 - RNA, 18 nt, Artificial Sequence
  Synthetic
ucugauucagaucaugca

SEQ ID NO: 31547 - RNA, 20 nt, Artificial Sequence
  Synthetic
agucugauucagaucaugca

SEQ ID NO: 31548 - RNA, 21 nt, Artificial Sequence
  Synthetic
aagucugauucagaucaugca

SEQ ID NO: 31549 - RNA, 22 nt, Artificial Sequence
  Synthetic
caagucugauucagaucaugca

SEQ ID NO: 31550 - RNA, 24 nt, Artificial Sequence
  Synthetic
agcaagucugauucagaucaugca

SEQ ID NO: 31551 - RNA, 18 nt, Artificial Sequence
  Synthetic
cccgugucaagucaugca

SEQ ID NO: 31552 - RNA, 19 nt, Artificial Sequence
  Synthetic
ccccgugucaagucaugca

SEQ ID NO: 31553 - RNA, 20 nt, Artificial Sequence
  Synthetic
accccgugucaagucaugca

SEQ ID NO: 31554 - RNA, 21 nt, Artificial Sequence
  Synthetic
aaccccgugucaagucaugca

SEQ ID NO: 31555 - RNA, 22 nt, Artificial Sequence
  Synthetic
uaaccccgugucaagucaugca

SEQ ID NO: 31556 - RNA, 23 nt, Artificial Sequence
  Synthetic
auaaccccgugucaagucaugca

SEQ ID NO: 31557 - RNA, 24 nt, Artificial Sequence
  Synthetic
uauaaccccgugucaagucaugca

SEQ ID NO: 31558 - RNA, 18 nt, Artificial Sequence
  Synthetic
uugagcuuucuucaugca

SEQ ID NO: 31559 - RNA, 19 nt, Artificial Sequence
  Synthetic
uuugagcuuucuucaugca

SEQ ID NO: 31560 - RNA, 20 nt, Artificial Sequence
  Synthetic
auuugagcuuucuucaugca

SEQ ID NO: 31561 - RNA, 21 nt, Artificial Sequence
  Synthetic
cauuugagcuuucuucaugca

SEQ ID NO: 31562 - RNA, 22 nt, Artificial Sequence
  Synthetic
ucauuugagcuuucuucaugca

SEQ ID NO: 31563 - RNA, 23 nt, Artificial Sequence
  Synthetic
uucauuugagcuuucuucaugca

SEQ ID NO: 31564 - RNA, 24 nt, Artificial Sequence
  Synthetic
auucauuugagcuuucuucaugca

SEQ ID NO: 31565 - RNA, 18 nt, Artificial Sequence
  Synthetic
aagccuuugacggaugca

SEQ ID NO: 31566 - RNA, 19 nt, Artificial Sequence
  Synthetic
uaagccuuugacggaugca

SEQ ID NO: 31567 - RNA, 20 nt, Artificial Sequence
  Synthetic
cuaagccuuugacggaugca

SEQ ID NO: 31568 - RNA, 22 nt, Artificial Sequence
  Synthetic
agcuaagccuuugacggaugca

SEQ ID NO: 31569 - RNA, 23 nt, Artificial Sequence
  Synthetic
aagcuaagccuuugacggaugca

SEQ ID NO: 31570 - RNA, 24 nt, Artificial Sequence
  Synthetic
aaagcuaagccuuugacggaugca

SEQ ID NO: 31571 - RNA, 18 nt, Artificial Sequence
  Synthetic
aauugucaaauggaugca

SEQ ID NO: 31572 - RNA, 19 nt, Artificial Sequence
  Synthetic
aaauugucaaauggaugca

SEQ ID NO: 31573 - RNA, 20 nt, Artificial Sequence
  Synthetic
uaaauugucaaauggaugca

SEQ ID NO: 31574 - RNA, 21 nt, Artificial Sequence
  Synthetic
auaaauugucaaauggaugca

SEQ ID NO: 31575 - RNA, 23 nt, Artificial Sequence
  Synthetic
cgauaaauugucaaauggaugca

SEQ ID NO: 31576 - RNA, 24 nt, Artificial Sequence
  Synthetic
ucgauaaauugucaaauggaugca

SEQ ID NO: 31577 - RNA, 19 nt, Artificial Sequence
  Synthetic
ugcucuaggagaauaugca

SEQ ID NO: 31578 - RNA, 20 nt, Artificial Sequence
  Synthetic
augcucuaggagaauaugca

SEQ ID NO: 31579 - RNA, 21 nt, Artificial Sequence
  Synthetic
aaugcucuaggagaauaugca

SEQ ID NO: 31580 - RNA, 22 nt, Artificial Sequence
  Synthetic
uaaugcucuaggagaauaugca

SEQ ID NO: 31581 - RNA, 23 nt, Artificial Sequence
  Synthetic
auaaugcucuaggagaauaugca

SEQ ID NO: 31582 - RNA, 24 nt, Artificial Sequence
  Synthetic
cauaaugcucuaggagaauaugca

SEQ ID NO: 31583 - RNA, 18 nt, Artificial Sequence
  Synthetic
aaaauuuaggaauaugca

SEQ ID NO: 31584 - RNA, 19 nt, Artificial Sequence
  Synthetic
aaaaauuuaggaauaugca

SEQ ID NO: 31585 - RNA, 20 nt, Artificial Sequence
  Synthetic
aaaaaauuuaggaauaugca

SEQ ID NO: 31586 - RNA, 21 nt, Artificial Sequence
  Synthetic
uaaaaaauuuaggaauaugca

SEQ ID NO: 31587 - RNA, 22 nt, Artificial Sequence
  Synthetic
auaaaaaauuuaggaauaugca

SEQ ID NO: 31588 - RNA, 24 nt, Artificial Sequence
  Synthetic
agauaaaaaauuuaggaauaugca

SEQ ID NO: 31589 - RNA, 19 nt, Artificial Sequence
  Synthetic
agcuuggcuuagauaugca

SEQ ID NO: 31590 - RNA, 20 nt, Artificial Sequence
  Synthetic
cagcuuggcuuagauaugca

SEQ ID NO: 31591 - RNA, 21 nt, Artificial Sequence
  Synthetic
acagcuuggcuuagauaugca

SEQ ID NO: 31592 - RNA, 23 nt, Artificial Sequence
  Synthetic
ugacagcuuggcuuagauaugca

SEQ ID NO: 31593 - RNA, 18 nt, Artificial Sequence
  Synthetic
uguucuaaugucuaugca

SEQ ID NO: 31594 - RNA, 19 nt, Artificial Sequence
  Synthetic
cuguucuaaugucuaugca

SEQ ID NO: 31595 - RNA, 20 nt, Artificial Sequence
  Synthetic
acuguucuaaugucuaugca

SEQ ID NO: 31596 - RNA, 21 nt, Artificial Sequence
  Synthetic
aacuguucuaaugucuaugca

SEQ ID NO: 31597 - RNA, 22 nt, Artificial Sequence
  Synthetic
uaacuguucuaaugucuaugca

SEQ ID NO: 31598 - RNA, 18 nt, Artificial Sequence
  Synthetic
agugggaaauauuaugca

SEQ ID NO: 31599 - RNA, 19 nt, Artificial Sequence
  Synthetic
aagugggaaauauuaugca

SEQ ID NO: 31600 - RNA, 20 nt, Artificial Sequence
  Synthetic
aaagugggaaauauuaugca

SEQ ID NO: 31601 - RNA, 22 nt, Artificial Sequence
  Synthetic
agaaagugggaaauauuaugca

SEQ ID NO: 31602 - RNA, 23 nt, Artificial Sequence
  Synthetic
uagaaagugggaaauauuaugca

SEQ ID NO: 31603 - RNA, 24 nt, Artificial Sequence
  Synthetic
uuagaaagugggaaauauuaugca

SEQ ID NO: 31604 - RNA, 18 nt, Artificial Sequence
  Synthetic
aaugagcuuccaacugca

SEQ ID NO: 31605 - RNA, 19 nt, Artificial Sequence
  Synthetic
uaaugagcuuccaacugca

SEQ ID NO: 31606 - RNA, 20 nt, Artificial Sequence
  Synthetic
auaaugagcuuccaacugca

SEQ ID NO: 31607 - RNA, 21 nt, Artificial Sequence
  Synthetic
aauaaugagcuuccaacugca

SEQ ID NO: 31608 - RNA, 22 nt, Artificial Sequence
  Synthetic
uaauaaugagcuuccaacugca

SEQ ID NO: 31609 - RNA, 23 nt, Artificial Sequence
  Synthetic
uuaauaaugagcuuccaacugca

SEQ ID NO: 31610 - RNA, 24 nt, Artificial Sequence
  Synthetic
auuaauaaugagcuuccaacugca

SEQ ID NO: 31611 - RNA, 18 nt, Artificial Sequence
  Synthetic
auguaaauaauaacugca

SEQ ID NO: 31612 - RNA, 19 nt, Artificial Sequence
  Synthetic
uauguaaauaauaacugca

SEQ ID NO: 31613 - RNA, 20 nt, Artificial Sequence
  Synthetic
cuauguaaauaauaacugca

SEQ ID NO: 31614 - RNA, 21 nt, Artificial Sequence
  Synthetic
ccuauguaaauaauaacugca

SEQ ID NO: 31615 - RNA, 22 nt, Artificial Sequence
  Synthetic
cccuauguaaauaauaacugca

SEQ ID NO: 31616 - RNA, 24 nt, Artificial Sequence
  Synthetic
ugcccuauguaaauaauaacugca

SEQ ID NO: 31617 - RNA, 18 nt, Artificial Sequence
  Synthetic
uuauuacuugcuacugca

SEQ ID NO: 31618 - RNA, 20 nt, Artificial Sequence
  Synthetic
uguuauuacuugcuacugca

SEQ ID NO: 31619 - RNA, 22 nt, Artificial Sequence
  Synthetic
uguguuauuacuugcuacugca

SEQ ID NO: 31620 - RNA, 23 nt, Artificial Sequence
  Synthetic
uuguguuauuacuugcuacugca

SEQ ID NO: 31621 - RNA, 24 nt, Artificial Sequence
  Synthetic
cuuguguuauuacuugcuacugca

SEQ ID NO: 31622 - RNA, 18 nt, Artificial Sequence
  Synthetic
auaagcauggaugcugca

SEQ ID NO: 31623 - RNA, 19 nt, Artificial Sequence
  Synthetic
aauaagcauggaugcugca

SEQ ID NO: 31624 - RNA, 20 nt, Artificial Sequence
  Synthetic
aaauaagcauggaugcugca

SEQ ID NO: 31625 - RNA, 21 nt, Artificial Sequence
  Synthetic
aaaauaagcauggaugcugca

SEQ ID NO: 31626 - RNA, 22 nt, Artificial Sequence
  Synthetic
uaaaauaagcauggaugcugca

SEQ ID NO: 31627 - RNA, 23 nt, Artificial Sequence
  Synthetic
uuaaaauaagcauggaugcugca

SEQ ID NO: 31628 - RNA, 24 nt, Artificial Sequence
  Synthetic
cuuaaaauaagcauggaugcugca

SEQ ID NO: 31629 - RNA, 18 nt, Artificial Sequence
  Synthetic
auccuccccauaucugca

SEQ ID NO: 31630 - RNA, 19 nt, Artificial Sequence
  Synthetic
uauccuccccauaucugca

SEQ ID NO: 31631 - RNA, 20 nt, Artificial Sequence
  Synthetic
auauccuccccauaucugca

SEQ ID NO: 31632 - RNA, 21 nt, Artificial Sequence
  Synthetic
aauauccuccccauaucugca

SEQ ID NO: 31633 - RNA, 22 nt, Artificial Sequence
  Synthetic
uaauauccuccccauaucugca

SEQ ID NO: 31634 - RNA, 23 nt, Artificial Sequence
  Synthetic
ugguucuuauaucuguuucugca

SEQ ID NO: 31635 - RNA, 24 nt, Artificial Sequence
  Synthetic
cugguucuuauaucuguuucugca

SEQ ID NO: 31636 - RNA, 19 nt, Artificial Sequence
  Synthetic
ugcaguuuuaaaaagugca

SEQ ID NO: 31637 - RNA, 20 nt, Artificial Sequence
  Synthetic
augcaguuuuaaaaagugca

SEQ ID NO: 31638 - RNA, 21 nt, Artificial Sequence
  Synthetic
aaugcaguuuuaaaaagugca

SEQ ID NO: 31639 - RNA, 22 nt, Artificial Sequence
  Synthetic
caaugcaguuuuaaaaagugca

SEQ ID NO: 31640 - RNA, 24 nt, Artificial Sequence
  Synthetic
ugcaaugcaguuuuaaaaagugca

SEQ ID NO: 31641 - RNA, 18 nt, Artificial Sequence
  Synthetic
aaaauuauauucagugca

SEQ ID NO: 31642 - RNA, 20 nt, Artificial Sequence
  Synthetic
agaaaauuauauucagugca

SEQ ID NO: 31643 - RNA, 21 nt, Artificial Sequence
  Synthetic
cagaaaauuauauucagugca

SEQ ID NO: 31644 - RNA, 23 nt, Artificial Sequence
  Synthetic
agcagaaaauuauauucagugca

SEQ ID NO: 31645 - RNA, 24 nt, Artificial Sequence
  Synthetic
aagcagaaaauuauauucagugca

SEQ ID NO: 31646 - RNA, 18 nt, Artificial Sequence
  Synthetic
uuacaauauuguauugca

SEQ ID NO: 31647 - RNA, 22 nt, Artificial Sequence
  Synthetic
aggguuacaauauuguauugca

SEQ ID NO: 31648 - RNA, 24 nt, Artificial Sequence
  Synthetic
agaggguuacaauauuguauugca

SEQ ID NO: 31649 - RNA, 18 nt, Artificial Sequence
  Synthetic
aucauauugaaccuugca

SEQ ID NO: 31650 - RNA, 19 nt, Artificial Sequence
  Synthetic
caucauauugaaccuugca

SEQ ID NO: 31651 - RNA, 20 nt, Artificial Sequence
  Synthetic
ucaucauauugaaccuugca

SEQ ID NO: 31652 - RNA, 22 nt, Artificial Sequence
  Synthetic
ugucaucauauugaaccuugca

SEQ ID NO: 31653 - RNA, 23 nt, Artificial Sequence
  Synthetic
augucaucauauugaaccuugca

SEQ ID NO: 31654 - RNA, 24 nt, Artificial Sequence
  Synthetic
uaugucaucauauugaaccuugca

SEQ ID NO: 31655 - RNA, 18 nt, Artificial Sequence
  Synthetic
aauccucauaaucuugca

SEQ ID NO: 31656 - RNA, 19 nt, Artificial Sequence
  Synthetic
aaauccucauaaucuugca

SEQ ID NO: 31657 - RNA, 20 nt, Artificial Sequence
  Synthetic
caaauccucauaaucuugca

SEQ ID NO: 31658 - RNA, 21 nt, Artificial Sequence
  Synthetic
ucaaauccucauaaucuugca

SEQ ID NO: 31659 - RNA, 23 nt, Artificial Sequence
  Synthetic
agucaaauccucauaaucuugca

SEQ ID NO: 31660 - RNA, 18 nt, Artificial Sequence
  Synthetic
auuucuuggcauguugca

SEQ ID NO: 31661 - RNA, 19 nt, Artificial Sequence
  Synthetic
uauuucuuggcauguugca

SEQ ID NO: 31662 - RNA, 20 nt, Artificial Sequence
  Synthetic
uuauuucuuggcauguugca

SEQ ID NO: 31663 - RNA, 21 nt, Artificial Sequence
  Synthetic
auuauuucuuggcauguugca

SEQ ID NO: 31664 - RNA, 22 nt, Artificial Sequence
  Synthetic
aauuauuucuuggcauguugca

SEQ ID NO: 31665 - RNA, 23 nt, Artificial Sequence
  Synthetic
uaauuauuucuuggcauguugca

SEQ ID NO: 31666 - RNA, 24 nt, Artificial Sequence
  Synthetic
cuaauuauuucuuggcauguugca

SEQ ID NO: 31667 - RNA, 18 nt, Artificial Sequence
  Synthetic
cuuugcugcucuguugca

SEQ ID NO: 31668 - RNA, 19 nt, Artificial Sequence
  Synthetic
acuuugcugcucuguugca

SEQ ID NO: 31669 - RNA, 20 nt, Artificial Sequence
  Synthetic
uacuuugcugcucuguugca

SEQ ID NO: 31670 - RNA, 21 nt, Artificial Sequence
  Synthetic
cuacuuugcugcucuguugca

SEQ ID NO: 31671 - RNA, 22 nt, Artificial Sequence
  Synthetic
ucuacuuugcugcucuguugca

SEQ ID NO: 31672 - RNA, 23 nt, Artificial Sequence
  Synthetic
aucuacuuugcugcucuguugca

SEQ ID NO: 31673 - RNA, 19 nt, Artificial Sequence
  Synthetic
ugagagugauguauuugca

SEQ ID NO: 31674 - RNA, 21 nt, Artificial Sequence
  Synthetic
agugagagugauguauuugca

SEQ ID NO: 31675 - RNA, 22 nt, Artificial Sequence
  Synthetic
uagugagagugauguauuugca

SEQ ID NO: 31676 - RNA, 18 nt, Artificial Sequence
  Synthetic
acagacccagacuuugca

SEQ ID NO: 31677 - RNA, 19 nt, Artificial Sequence
  Synthetic
aacagacccagacuuugca

SEQ ID NO: 31678 - RNA, 20 nt, Artificial Sequence
  Synthetic
aaacagacccagacuuugca

SEQ ID NO: 31679 - RNA, 21 nt, Artificial Sequence
  Synthetic
caaacagacccagacuuugca

SEQ ID NO: 31680 - RNA, 23 nt, Artificial Sequence
  Synthetic
agcaaacagacccagacuuugca

SEQ ID NO: 31681 - RNA, 24 nt, Artificial Sequence
  Synthetic
aagcaaacagacccagacuuugca

SEQ ID NO: 31682 - RNA, 18 nt, Artificial Sequence
  Synthetic
ucuucagacaucuuugca

SEQ ID NO: 31683 - RNA, 19 nt, Artificial Sequence
  Synthetic
cucuucagacaucuuugca

SEQ ID NO: 31684 - RNA, 20 nt, Artificial Sequence
  Synthetic
ucucuucagacaucuuugca

SEQ ID NO: 31685 - RNA, 22 nt, Artificial Sequence
  Synthetic
ugucucuucagacaucuuugca

SEQ ID NO: 31686 - RNA, 23 nt, Artificial Sequence
  Synthetic
augucucuucagacaucuuugca

SEQ ID NO: 31687 - RNA, 24 nt, Artificial Sequence
  Synthetic
aaugucucuucagacaucuuugca

SEQ ID NO: 31688 - RNA, 18 nt, Artificial Sequence
  Synthetic
aauaguauuguguuugca

SEQ ID NO: 31689 - RNA, 19 nt, Artificial Sequence
  Synthetic
uaauaguauuguguuugca

SEQ ID NO: 31690 - RNA, 20 nt, Artificial Sequence
  Synthetic
uuaauaguauuguguuugca

SEQ ID NO: 31691 - RNA, 21 nt, Artificial Sequence
  Synthetic
auuaauaguauuguguuugca

SEQ ID NO: 31692 - RNA, 22 nt, Artificial Sequence
  Synthetic
aauuaauaguauuguguuugca

SEQ ID NO: 31693 - RNA, 23 nt, Artificial Sequence
  Synthetic
aaauuaauaguauuguguuugca

SEQ ID NO: 31694 - RNA, 24 nt, Artificial Sequence
  Synthetic
aaaauuaauaguauuguguuugca

SEQ ID NO: 31695 - RNA, 19 nt, Artificial Sequence
  Synthetic
cguucuuaacguuuuugca

SEQ ID NO: 31696 - RNA, 20 nt, Artificial Sequence
  Synthetic
ucguucuuaacguuuuugca

SEQ ID NO: 31697 - RNA, 21 nt, Artificial Sequence
  Synthetic
uucguucuuaacguuuuugca

SEQ ID NO: 31698 - RNA, 23 nt, Artificial Sequence
  Synthetic
aguucguucuuaacguuuuugca

SEQ ID NO: 31699 - RNA, 24 nt, Artificial Sequence
  Synthetic
aaguucguucuuaacguuuuugca

SEQ ID NO: 31700 - RNA, 18 nt, Artificial Sequence
  Synthetic
uuuggcuaacuaaaauca

SEQ ID NO: 31701 - RNA, 19 nt, Artificial Sequence
  Synthetic
auuuggcuaacuaaaauca

SEQ ID NO: 31702 - RNA, 20 nt, Artificial Sequence
  Synthetic
uauuuggcuaacuaaaauca

SEQ ID NO: 31703 - RNA, 21 nt, Artificial Sequence
  Synthetic
uuauuuggcuaacuaaaauca

SEQ ID NO: 31704 - RNA, 23 nt, Artificial Sequence
  Synthetic
uguuauuuggcuaacuaaaauca

SEQ ID NO: 31705 - RNA, 24 nt, Artificial Sequence
  Synthetic
uuguuauuuggcuaacuaaaauca

SEQ ID NO: 31706 - RNA, 18 nt, Artificial Sequence
  Synthetic
acgccuuuuuuaaaauca

SEQ ID NO: 31707 - RNA, 19 nt, Artificial Sequence
  Synthetic
aacgccuuuuuuaaaauca

SEQ ID NO: 31708 - RNA, 20 nt, Artificial Sequence
  Synthetic
caacgccuuuuuuaaaauca

SEQ ID NO: 31709 - RNA, 21 nt, Artificial Sequence
  Synthetic
acaacgccuuuuuuaaaauca

SEQ ID NO: 31710 - RNA, 22 nt, Artificial Sequence
  Synthetic
aacaacgccuuuuuuaaaauca

SEQ ID NO: 31711 - RNA, 23 nt, Artificial Sequence
  Synthetic
aaacaacgccuuuuuuaaaauca

SEQ ID NO: 31712 - RNA, 24 nt, Artificial Sequence
  Synthetic
uaaacaacgccuuuuuuaaaauca

SEQ ID NO: 31713 - RNA, 21 nt, Artificial Sequence
  Synthetic
aaaacaaaaucuuggaaauca

SEQ ID NO: 31714 - RNA, 23 nt, Artificial Sequence
  Synthetic
ugaaaacaaaaucuuggaaauca

SEQ ID NO: 31715 - RNA, 24 nt, Artificial Sequence
  Synthetic
uugaaaacaaaaucuuggaaauca

SEQ ID NO: 31716 - RNA, 18 nt, Artificial Sequence
  Synthetic
ucccaccacacccaauca

SEQ ID NO: 31717 - RNA, 19 nt, Artificial Sequence
  Synthetic
uucccaccacacccaauca

SEQ ID NO: 31718 - RNA, 20 nt, Artificial Sequence
  Synthetic
auucccaccacacccaauca

SEQ ID NO: 31719 - RNA, 21 nt, Artificial Sequence
  Synthetic
uauucccaccacacccaauca

SEQ ID NO: 31720 - RNA, 23 nt, Artificial Sequence
  Synthetic
aguauucccaccacacccaauca

SEQ ID NO: 31721 - RNA, 24 nt, Artificial Sequence
  Synthetic
uaguauucccaccacacccaauca

SEQ ID NO: 31722 - RNA, 18 nt, Artificial Sequence
  Synthetic
uucaugaugaugcaauca

SEQ ID NO: 31723 - RNA, 21 nt, Artificial Sequence
  Synthetic
agguucaugaugaugcaauca

SEQ ID NO: 31724 - RNA, 23 nt, Artificial Sequence
  Synthetic
agagguucaugaugaugcaauca

SEQ ID NO: 31725 - RNA, 24 nt, Artificial Sequence
  Synthetic
aagagguucaugaugaugcaauca

SEQ ID NO: 31726 - RNA, 18 nt, Artificial Sequence
  Synthetic
ccuagcacauaagaauca

SEQ ID NO: 31727 - RNA, 20 nt, Artificial Sequence
  Synthetic
ugccuagcacauaagaauca

SEQ ID NO: 31728 - RNA, 21 nt, Artificial Sequence
  Synthetic
uugccuagcacauaagaauca

SEQ ID NO: 31729 - RNA, 22 nt, Artificial Sequence
  Synthetic
cuugccuagcacauaagaauca

SEQ ID NO: 31730 - RNA, 23 nt, Artificial Sequence
  Synthetic
ccuugccuagcacauaagaauca

SEQ ID NO: 31731 - RNA, 24 nt, Artificial Sequence
  Synthetic
accuugccuagcacauaagaauca

SEQ ID NO: 31732 - RNA, 21 nt, Artificial Sequence
  Synthetic
caauuuuaagcaagagaauca

SEQ ID NO: 31733 - RNA, 22 nt, Artificial Sequence
  Synthetic
acaauuuuaagcaagagaauca

SEQ ID NO: 31734 - RNA, 23 nt, Artificial Sequence
  Synthetic
cacaauuuuaagcaagagaauca

SEQ ID NO: 31735 - RNA, 24 nt, Artificial Sequence
  Synthetic
acacaauuuuaagcaagagaauca

SEQ ID NO: 31736 - RNA, 18 nt, Artificial Sequence
  Synthetic
ccagagaccauagaauca

SEQ ID NO: 31737 - RNA, 19 nt, Artificial Sequence
  Synthetic
uccagagaccauagaauca

SEQ ID NO: 31738 - RNA, 20 nt, Artificial Sequence
  Synthetic
auccagagaccauagaauca

SEQ ID NO: 31739 - RNA, 21 nt, Artificial Sequence
  Synthetic
uauccagagaccauagaauca

SEQ ID NO: 31740 - RNA, 23 nt, Artificial Sequence
  Synthetic
aguauccagagaccauagaauca

SEQ ID NO: 31741 - RNA, 24 nt, Artificial Sequence
  Synthetic
caguauccagagaccauagaauca

SEQ ID NO: 31742 - RNA, 18 nt, Artificial Sequence
  Synthetic
auuaaaauacuugaauca

SEQ ID NO: 31743 - RNA, 19 nt, Artificial Sequence
  Synthetic
aauuaaaauacuugaauca

SEQ ID NO: 31744 - RNA, 20 nt, Artificial Sequence
  Synthetic
aaauuaaaauacuugaauca

SEQ ID NO: 31745 - RNA, 21 nt, Artificial Sequence
  Synthetic
caaauuaaaauacuugaauca

SEQ ID NO: 31746 - RNA, 22 nt, Artificial Sequence
  Synthetic
ccaaauuaaaauacuugaauca

SEQ ID NO: 31747 - RNA, 23 nt, Artificial Sequence
  Synthetic
accaaauuaaaauacuugaauca

SEQ ID NO: 31748 - RNA, 18 nt, Artificial Sequence
  Synthetic
uuuguuguuguauaauca

SEQ ID NO: 31749 - RNA, 19 nt, Artificial Sequence
  Synthetic
uuuuguuguuguauaauca

SEQ ID NO: 31750 - RNA, 20 nt, Artificial Sequence
  Synthetic
auuuuguuguuguauaauca

SEQ ID NO: 31751 - RNA, 18 nt, Artificial Sequence
  Synthetic
uauuugagugucuaauca

SEQ ID NO: 31752 - RNA, 20 nt, Artificial Sequence
  Synthetic
uguauuugagugucuaauca

SEQ ID NO: 31753 - RNA, 22 nt, Artificial Sequence
  Synthetic
uguguauuugagugucuaauca

SEQ ID NO: 31754 - RNA, 23 nt, Artificial Sequence
  Synthetic
cuguguauuugagugucuaauca

SEQ ID NO: 31755 - RNA, 24 nt, Artificial Sequence
  Synthetic
ucuguguauuugagugucuaauca

SEQ ID NO: 31756 - RNA, 18 nt, Artificial Sequence
  Synthetic
cuuaaaagaugaacauca

SEQ ID NO: 31757 - RNA, 19 nt, Artificial Sequence
  Synthetic
ucuuaaaagaugaacauca

SEQ ID NO: 31758 - RNA, 20 nt, Artificial Sequence
  Synthetic
aucuuaaaagaugaacauca

SEQ ID NO: 31759 - RNA, 21 nt, Artificial Sequence
  Synthetic
aaucuuaaaagaugaacauca

SEQ ID NO: 31760 - RNA, 23 nt, Artificial Sequence
  Synthetic
agaaucuuaaaagaugaacauca

SEQ ID NO: 31761 - RNA, 18 nt, Artificial Sequence
  Synthetic
uccacuaccaagacauca

SEQ ID NO: 31762 - RNA, 19 nt, Artificial Sequence
  Synthetic
uuccacuaccaagacauca

SEQ ID NO: 31763 - RNA, 20 nt, Artificial Sequence
  Synthetic
cuuccacuaccaagacauca

SEQ ID NO: 31764 - RNA, 21 nt, Artificial Sequence
  Synthetic
ccuuccacuaccaagacauca

SEQ ID NO: 31765 - RNA, 23 nt, Artificial Sequence
  Synthetic
agccuuccacuaccaagacauca

SEQ ID NO: 31766 - RNA, 24 nt, Artificial Sequence
  Synthetic
cagccuuccacuaccaagacauca

SEQ ID NO: 31767 - RNA, 18 nt, Artificial Sequence
  Synthetic
auguacguuucuacauca

SEQ ID NO: 31768 - RNA, 19 nt, Artificial Sequence
  Synthetic
cauguacguuucuacauca

SEQ ID NO: 31769 - RNA, 20 nt, Artificial Sequence
  Synthetic
acauguacguuucuacauca

SEQ ID NO: 31770 - RNA, 21 nt, Artificial Sequence
  Synthetic
uacauguacguuucuacauca

SEQ ID NO: 31771 - RNA, 22 nt, Artificial Sequence
  Synthetic
uuacauguacguuucuacauca

SEQ ID NO: 31772 - RNA, 23 nt, Artificial Sequence
  Synthetic
auuacauguacguuucuacauca

SEQ ID NO: 31773 - RNA, 24 nt, Artificial Sequence
  Synthetic
aauuacauguacguuucuacauca

SEQ ID NO: 31774 - RNA, 18 nt, Artificial Sequence
  Synthetic
uauacaaugaguacauca

SEQ ID NO: 31775 - RNA, 19 nt, Artificial Sequence
  Synthetic
cuauacaaugaguacauca

SEQ ID NO: 31776 - RNA, 20 nt, Artificial Sequence
  Synthetic
ucuauacaaugaguacauca

SEQ ID NO: 31777 - RNA, 21 nt, Artificial Sequence
  Synthetic
uucuauacaaugaguacauca

SEQ ID NO: 31778 - RNA, 22 nt, Artificial Sequence
  Synthetic
cuucuauacaaugaguacauca

SEQ ID NO: 31779 - RNA, 23 nt, Artificial Sequence
  Synthetic
ucuucuauacaaugaguacauca

SEQ ID NO: 31780 - RNA, 24 nt, Artificial Sequence
  Synthetic
cucuucuauacaaugaguacauca

SEQ ID NO: 31781 - RNA, 18 nt, Artificial Sequence
  Synthetic
uauuauugacuuacauca

SEQ ID NO: 31782 - RNA, 19 nt, Artificial Sequence
  Synthetic
uuauuauugacuuacauca

SEQ ID NO: 31783 - RNA, 20 nt, Artificial Sequence
  Synthetic
auuauuauugacuuacauca

SEQ ID NO: 31784 - RNA, 21 nt, Artificial Sequence
  Synthetic
aauuauuauugacuuacauca

SEQ ID NO: 31785 - RNA, 24 nt, Artificial Sequence
  Synthetic
aggaauuauuauugacuuacauca

SEQ ID NO: 31786 - RNA, 20 nt, Artificial Sequence
  Synthetic
aggagaugguccuugcauca

SEQ ID NO: 31787 - RNA, 22 nt, Artificial Sequence
  Synthetic
agaggagaugguccuugcauca

SEQ ID NO: 31788 - RNA, 23 nt, Artificial Sequence
  Synthetic
cagaggagaugguccuugcauca

SEQ ID NO: 31789 - RNA, 18 nt, Artificial Sequence
  Synthetic
ugccaacagugaucauca

SEQ ID NO: 31790 - RNA, 19 nt, Artificial Sequence
  Synthetic
cugccaacagugaucauca

SEQ ID NO: 31791 - RNA, 20 nt, Artificial Sequence
  Synthetic
acugccaacagugaucauca

SEQ ID NO: 31792 - RNA, 21 nt, Artificial Sequence
  Synthetic
aacugccaacagugaucauca

SEQ ID NO: 31793 - RNA, 22 nt, Artificial Sequence
  Synthetic
aaacugccaacagugaucauca

SEQ ID NO: 31794 - RNA, 23 nt, Artificial Sequence
  Synthetic
aaaacugccaacagugaucauca

SEQ ID NO: 31795 - RNA, 24 nt, Artificial Sequence
  Synthetic
uaaaacugccaacagugaucauca

SEQ ID NO: 31796 - RNA, 18 nt, Artificial Sequence
  Synthetic
acuguuaaaaagucauca

SEQ ID NO: 31797 - RNA, 19 nt, Artificial Sequence
  Synthetic
aacuguuaaaaagucauca

SEQ ID NO: 31798 - RNA, 20 nt, Artificial Sequence
  Synthetic
uaacuguuaaaaagucauca

SEQ ID NO: 31799 - RNA, 21 nt, Artificial Sequence
  Synthetic
uuaacuguuaaaaagucauca

SEQ ID NO: 31800 - RNA, 23 nt, Artificial Sequence
  Synthetic
aguuaacuguuaaaaagucauca

SEQ ID NO: 31801 - RNA, 24 nt, Artificial Sequence
  Synthetic
aaguuaacuguuaaaaagucauca

SEQ ID NO: 31802 - RNA, 19 nt, Artificial Sequence
  Synthetic
aggcacuguuaaaagauca

SEQ ID NO: 31803 - RNA, 20 nt, Artificial Sequence
  Synthetic
caggcacuguuaaaagauca

SEQ ID NO: 31804 - RNA, 21 nt, Artificial Sequence
  Synthetic
ccaggcacuguuaaaagauca

SEQ ID NO: 31805 - RNA, 22 nt, Artificial Sequence
  Synthetic
accaggcacuguuaaaagauca

SEQ ID NO: 31806 - RNA, 23 nt, Artificial Sequence
  Synthetic
aaccaggcacuguuaaaagauca

SEQ ID NO: 31807 - RNA, 24 nt, Artificial Sequence
  Synthetic
aaaccaggcacuguuaaaagauca

SEQ ID NO: 31808 - RNA, 20 nt, Artificial Sequence
  Synthetic
ugggaggcaucagcagauca

SEQ ID NO: 31809 - RNA, 21 nt, Artificial Sequence
  Synthetic
uugggaggcaucagcagauca

SEQ ID NO: 31810 - RNA, 23 nt, Artificial Sequence
  Synthetic
uguugggaggcaucagcagauca

SEQ ID NO: 31811 - RNA, 21 nt, Artificial Sequence
  Synthetic
aauacuaggagacagagauca

SEQ ID NO: 31812 - RNA, 22 nt, Artificial Sequence
  Synthetic
aaauacuaggagacagagauca

SEQ ID NO: 31813 - RNA, 23 nt, Artificial Sequence
  Synthetic
caaauacuaggagacagagauca

SEQ ID NO: 31814 - RNA, 24 nt, Artificial Sequence
  Synthetic
ucaaauacuaggagacagagauca

SEQ ID NO: 31815 - RNA, 18 nt, Artificial Sequence
  Synthetic
cccucacuucugagauca

SEQ ID NO: 31816 - RNA, 19 nt, Artificial Sequence
  Synthetic
acccucacuucugagauca

SEQ ID NO: 31817 - RNA, 20 nt, Artificial Sequence
  Synthetic
uacccucacuucugagauca

SEQ ID NO: 31818 - RNA, 21 nt, Artificial Sequence
  Synthetic
auacccucacuucugagauca

SEQ ID NO: 31819 - RNA, 22 nt, Artificial Sequence
  Synthetic
aauacccucacuucugagauca

SEQ ID NO: 31820 - RNA, 23 nt, Artificial Sequence
  Synthetic
uaauacccucacuucugagauca

SEQ ID NO: 31821 - RNA, 24 nt, Artificial Sequence
  Synthetic
uuaauacccucacuucugagauca

SEQ ID NO: 31822 - RNA, 18 nt, Artificial Sequence
  Synthetic
cuaagaaauuugggauca

SEQ ID NO: 31823 - RNA, 19 nt, Artificial Sequence
  Synthetic
ucuaagaaauuugggauca

SEQ ID NO: 31824 - RNA, 20 nt, Artificial Sequence
  Synthetic
cucuaagaaauuugggauca

SEQ ID NO: 31825 - RNA, 21 nt, Artificial Sequence
  Synthetic
acucuaagaaauuugggauca

SEQ ID NO: 31826 - RNA, 23 nt, Artificial Sequence
  Synthetic
ugacucuaagaaauuugggauca

SEQ ID NO: 31827 - RNA, 24 nt, Artificial Sequence
  Synthetic
cugacucuaagaaauuugggauca

SEQ ID NO: 31828 - RNA, 21 nt, Artificial Sequence
  Synthetic
uuaagaaaaauggcaauauca

SEQ ID NO: 31829 - RNA, 22 nt, Artificial Sequence
  Synthetic
uuuaagaaaaauggcaauauca

SEQ ID NO: 31830 - RNA, 23 nt, Artificial Sequence
  Synthetic
uuuuaagaaaaauggcaauauca

SEQ ID NO: 31831 - RNA, 24 nt, Artificial Sequence
  Synthetic
uuuuuaagaaaaauggcaauauca

SEQ ID NO: 31832 - RNA, 18 nt, Artificial Sequence
  Synthetic
aaagagaaauacauauca

SEQ ID NO: 31833 - RNA, 19 nt, Artificial Sequence
  Synthetic
uaaagagaaauacauauca

SEQ ID NO: 31834 - RNA, 20 nt, Artificial Sequence
  Synthetic
auaaagagaaauacauauca

SEQ ID NO: 31835 - RNA, 22 nt, Artificial Sequence
  Synthetic
agauaaagagaaauacauauca

SEQ ID NO: 31836 - RNA, 23 nt, Artificial Sequence
  Synthetic
uagauaaagagaaauacauauca

SEQ ID NO: 31837 - RNA, 24 nt, Artificial Sequence
  Synthetic
uuagauaaagagaaauacauauca

SEQ ID NO: 31838 - RNA, 18 nt, Artificial Sequence
  Synthetic
uagcauuaguccauauca

SEQ ID NO: 31839 - RNA, 19 nt, Artificial Sequence
  Synthetic
cuagcauuaguccauauca

SEQ ID NO: 31840 - RNA, 20 nt, Artificial Sequence
  Synthetic
ucuagcauuaguccauauca

SEQ ID NO: 31841 - RNA, 21 nt, Artificial Sequence
  Synthetic
uucuagcauuaguccauauca

SEQ ID NO: 31842 - RNA, 22 nt, Artificial Sequence
  Synthetic
cuucuagcauuaguccauauca

SEQ ID NO: 31843 - RNA, 24 nt, Artificial Sequence
  Synthetic
ugcuucuagcauuaguccauauca

SEQ ID NO: 31844 - RNA, 18 nt, Artificial Sequence
  Synthetic
uucucucuuggcauauca

SEQ ID NO: 31845 - RNA, 19 nt, Artificial Sequence
  Synthetic
uuucucucuuggcauauca

SEQ ID NO: 31846 - RNA, 20 nt, Artificial Sequence
  Synthetic
auuucucucuuggcauauca

SEQ ID NO: 31847 - RNA, 21 nt, Artificial Sequence
  Synthetic
aauuucucucuuggcauauca

SEQ ID NO: 31848 - RNA, 22 nt, Artificial Sequence
  Synthetic
aaauuucucucuuggcauauca

SEQ ID NO: 31849 - RNA, 23 nt, Artificial Sequence
  Synthetic
uaaauuucucucuuggcauauca

SEQ ID NO: 31850 - RNA, 24 nt, Artificial Sequence
  Synthetic
auaaauuucucucuuggcauauca

SEQ ID NO: 31851 - RNA, 18 nt, Artificial Sequence
  Synthetic
ugaauucaaaucauauca

SEQ ID NO: 31852 - RNA, 21 nt, Artificial Sequence
  Synthetic
aggugaauucaaaucauauca

SEQ ID NO: 31853 - RNA, 22 nt, Artificial Sequence
  Synthetic
aaggugaauucaaaucauauca

SEQ ID NO: 31854 - RNA, 23 nt, Artificial Sequence
  Synthetic
uaaggugaauucaaaucauauca

SEQ ID NO: 31855 - RNA, 24 nt, Artificial Sequence
  Synthetic
auaaggugaauucaaaucauauca

SEQ ID NO: 31856 - RNA, 18 nt, Artificial Sequence
  Synthetic
uaaaaacgcuaccuauca

SEQ ID NO: 31857 - RNA, 19 nt, Artificial Sequence
  Synthetic
auaaaaacgcuaccuauca

SEQ ID NO: 31858 - RNA, 20 nt, Artificial Sequence
  Synthetic
cauaaaaacgcuaccuauca

SEQ ID NO: 31859 - RNA, 21 nt, Artificial Sequence
  Synthetic
ucauaaaaacgcuaccuauca

SEQ ID NO: 31860 - RNA, 22 nt, Artificial Sequence
  Synthetic
aucauaaaaacgcuaccuauca

SEQ ID NO: 31861 - RNA, 23 nt, Artificial Sequence
  Synthetic
uaucauaaaaacgcuaccuauca

SEQ ID NO: 31862 - RNA, 24 nt, Artificial Sequence
  Synthetic
auaucauaaaaacgcuaccuauca

SEQ ID NO: 31863 - RNA, 18 nt, Artificial Sequence
  Synthetic
cacguauaaugaguauca

SEQ ID NO: 31864 - RNA, 21 nt, Artificial Sequence
  Synthetic
uggcacguauaaugaguauca

SEQ ID NO: 31865 - RNA, 22 nt, Artificial Sequence
  Synthetic
auggcacguauaaugaguauca

SEQ ID NO: 31866 - RNA, 23 nt, Artificial Sequence
  Synthetic
cauggcacguauaaugaguauca

SEQ ID NO: 31867 - RNA, 18 nt, Artificial Sequence
  Synthetic
caucuacagguaguauca

SEQ ID NO: 31868 - RNA, 19 nt, Artificial Sequence
  Synthetic
ccaucuacagguaguauca

SEQ ID NO: 31869 - RNA, 20 nt, Artificial Sequence
  Synthetic
cccaucuacagguaguauca

SEQ ID NO: 31870 - RNA, 21 nt, Artificial Sequence
  Synthetic
ucccaucuacagguaguauca

SEQ ID NO: 31871 - RNA, 22 nt, Artificial Sequence
  Synthetic
uucccaucuacagguaguauca

SEQ ID NO: 31872 - RNA, 23 nt, Artificial Sequence
  Synthetic
cuucccaucuacagguaguauca

SEQ ID NO: 31873 - RNA, 24 nt, Artificial Sequence
  Synthetic
acuucccaucuacagguaguauca

SEQ ID NO: 31874 - RNA, 21 nt, Artificial Sequence
  Synthetic
acauggaaucaauugguauca

SEQ ID NO: 31875 - RNA, 22 nt, Artificial Sequence
  Synthetic
cacauggaaucaauugguauca

SEQ ID NO: 31876 - RNA, 23 nt, Artificial Sequence
  Synthetic
ucacauggaaucaauugguauca

SEQ ID NO: 31877 - RNA, 24 nt, Artificial Sequence
  Synthetic
uucacauggaaucaauugguauca

SEQ ID NO: 31878 - RNA, 18 nt, Artificial Sequence
  Synthetic
acaacaaaccaauuauca

SEQ ID NO: 31879 - RNA, 19 nt, Artificial Sequence
  Synthetic
uacaacaaaccaauuauca

SEQ ID NO: 31880 - RNA, 20 nt, Artificial Sequence
  Synthetic
uuacaacaaaccaauuauca

SEQ ID NO: 31881 - RNA, 21 nt, Artificial Sequence
  Synthetic
cuuacaacaaaccaauuauca

SEQ ID NO: 31882 - RNA, 22 nt, Artificial Sequence
  Synthetic
ccuuacaacaaaccaauuauca

SEQ ID NO: 31883 - RNA, 23 nt, Artificial Sequence
  Synthetic
uccuuacaacaaaccaauuauca

SEQ ID NO: 31884 - RNA, 24 nt, Artificial Sequence
  Synthetic
cuccuuacaacaaaccaauuauca

SEQ ID NO: 31885 - RNA, 18 nt, Artificial Sequence
  Synthetic
uaugcagaauacuuauca

SEQ ID NO: 31886 - RNA, 19 nt, Artificial Sequence
  Synthetic
auaugcagaauacuuauca

SEQ ID NO: 31887 - RNA, 20 nt, Artificial Sequence
  Synthetic
aauaugcagaauacuuauca

SEQ ID NO: 31888 - RNA, 21 nt, Artificial Sequence
  Synthetic
uaauaugcagaauacuuauca

SEQ ID NO: 31889 - RNA, 22 nt, Artificial Sequence
  Synthetic
uuaauaugcagaauacuuauca

SEQ ID NO: 31890 - RNA, 23 nt, Artificial Sequence
  Synthetic
uuuaauaugcagaauacuuauca

SEQ ID NO: 31891 - RNA, 18 nt, Artificial Sequence
  Synthetic
uucuaaguauuguuauca

SEQ ID NO: 31892 - RNA, 19 nt, Artificial Sequence
  Synthetic
uuucuaaguauuguuauca

SEQ ID NO: 31893 - RNA, 20 nt, Artificial Sequence
  Synthetic
cuuucuaaguauuguuauca

SEQ ID NO: 31894 - RNA, 21 nt, Artificial Sequence
  Synthetic
acuuucuaaguauuguuauca

SEQ ID NO: 31895 - RNA, 22 nt, Artificial Sequence
  Synthetic
aacuuucuaaguauuguuauca

SEQ ID NO: 31896 - RNA, 23 nt, Artificial Sequence
  Synthetic
aaacuuucuaaguauuguuauca

SEQ ID NO: 31897 - RNA, 24 nt, Artificial Sequence
  Synthetic
caaacuuucuaaguauuguuauca

SEQ ID NO: 31898 - RNA, 18 nt, Artificial Sequence
  Synthetic
cugggguacacuuuauca

SEQ ID NO: 31899 - RNA, 19 nt, Artificial Sequence
  Synthetic
acugggguacacuuuauca

SEQ ID NO: 31900 - RNA, 20 nt, Artificial Sequence
  Synthetic
cacugggguacacuuuauca

SEQ ID NO: 31901 - RNA, 23 nt, Artificial Sequence
  Synthetic
uggcacugggguacacuuuauca

SEQ ID NO: 31902 - RNA, 24 nt, Artificial Sequence
  Synthetic
uuggcacugggguacacuuuauca

SEQ ID NO: 31903 - RNA, 18 nt, Artificial Sequence
  Synthetic
uuaauaaaugcuuuauca

SEQ ID NO: 31904 - RNA, 19 nt, Artificial Sequence
  Synthetic
uuuaauaaaugcuuuauca

SEQ ID NO: 31905 - RNA, 20 nt, Artificial Sequence
  Synthetic
cuuuaauaaaugcuuuauca

SEQ ID NO: 31906 - RNA, 22 nt, Artificial Sequence
  Synthetic
ugcuuuaauaaaugcuuuauca

SEQ ID NO: 31907 - RNA, 23 nt, Artificial Sequence
  Synthetic
augcuuuaauaaaugcuuuauca

SEQ ID NO: 31908 - RNA, 24 nt, Artificial Sequence
  Synthetic
aaugcuuuaauaaaugcuuuauca

SEQ ID NO: 31909 - RNA, 18 nt, Artificial Sequence
  Synthetic
auauuguauccuaacuca

SEQ ID NO: 31910 - RNA, 19 nt, Artificial Sequence
  Synthetic
uauauuguauccuaacuca

SEQ ID NO: 31911 - RNA, 20 nt, Artificial Sequence
  Synthetic
uuauauuguauccuaacuca

SEQ ID NO: 31912 - RNA, 21 nt, Artificial Sequence
  Synthetic
uuuauauuguauccuaacuca

SEQ ID NO: 31913 - RNA, 22 nt, Artificial Sequence
  Synthetic
uuuuauauuguauccuaacuca

SEQ ID NO: 31914 - RNA, 23 nt, Artificial Sequence
  Synthetic
uuuuuauauuguauccuaacuca

SEQ ID NO: 31915 - RNA, 24 nt, Artificial Sequence
  Synthetic
cuuuuuauauuguauccuaacuca

SEQ ID NO: 31916 - RNA, 18 nt, Artificial Sequence
  Synthetic
aaaaagcuugaacacuca

SEQ ID NO: 31917 - RNA, 19 nt, Artificial Sequence
  Synthetic
aaaaaagcuugaacacuca

SEQ ID NO: 31918 - RNA, 20 nt, Artificial Sequence
  Synthetic
aaaaaaagcuugaacacuca

SEQ ID NO: 31919 - RNA, 18 nt, Artificial Sequence
  Synthetic
ccaagggaugcacacuca

SEQ ID NO: 31920 - RNA, 19 nt, Artificial Sequence
  Synthetic
accaagggaugcacacuca

SEQ ID NO: 31921 - RNA, 20 nt, Artificial Sequence
  Synthetic
uaccaagggaugcacacuca

SEQ ID NO: 31922 - RNA, 21 nt, Artificial Sequence
  Synthetic
auaccaagggaugcacacuca

SEQ ID NO: 31923 - RNA, 22 nt, Artificial Sequence
  Synthetic
cauaccaagggaugcacacuca

SEQ ID NO: 31924 - RNA, 23 nt, Artificial Sequence
  Synthetic
ccauaccaagggaugcacacuca

SEQ ID NO: 31925 - RNA, 18 nt, Artificial Sequence
  Synthetic
uacuugaaacugcacuca

SEQ ID NO: 31926 - RNA, 20 nt, Artificial Sequence
  Synthetic
uguacuugaaacugcacuca

SEQ ID NO: 31927 - RNA, 21 nt, Artificial Sequence
  Synthetic
cuguacuugaaacugcacuca

SEQ ID NO: 31928 - RNA, 22 nt, Artificial Sequence
  Synthetic
ucuguacuugaaacugcacuca

SEQ ID NO: 31929 - RNA, 23 nt, Artificial Sequence
  Synthetic
aucuguacuugaaacugcacuca

SEQ ID NO: 31930 - RNA, 24 nt, Artificial Sequence
  Synthetic
aaucuguacuugaaacugcacuca

SEQ ID NO: 31931 - RNA, 19 nt, Artificial Sequence
  Synthetic
aguauguaguagucacuca

SEQ ID NO: 31932 - RNA, 20 nt, Artificial Sequence
  Synthetic
aaguauguaguagucacuca

SEQ ID NO: 31933 - RNA, 21 nt, Artificial Sequence
  Synthetic
aaaguauguaguagucacuca

SEQ ID NO: 31934 - RNA, 22 nt, Artificial Sequence
  Synthetic
uaaaguauguaguagucacuca

SEQ ID NO: 31935 - RNA, 23 nt, Artificial Sequence
  Synthetic
uuaaaguauguaguagucacuca

SEQ ID NO: 31936 - RNA, 24 nt, Artificial Sequence
  Synthetic
uuuaaaguauguaguagucacuca

SEQ ID NO: 31937 - RNA, 18 nt, Artificial Sequence
  Synthetic
ucccacaugcuagacuca

SEQ ID NO: 31938 - RNA, 19 nt, Artificial Sequence
  Synthetic
uucccacaugcuagacuca

SEQ ID NO: 31939 - RNA, 20 nt, Artificial Sequence
  Synthetic
cuucccacaugcuagacuca

SEQ ID NO: 31940 - RNA, 21 nt, Artificial Sequence
  Synthetic
acuucccacaugcuagacuca

SEQ ID NO: 31941 - RNA, 22 nt, Artificial Sequence
  Synthetic
uacuucccacaugcuagacuca

SEQ ID NO: 31942 - RNA, 23 nt, Artificial Sequence
  Synthetic
uuacuucccacaugcuagacuca

SEQ ID NO: 31943 - RNA, 24 nt, Artificial Sequence
  Synthetic
uuuacuucccacaugcuagacuca

SEQ ID NO: 31944 - RNA, 18 nt, Artificial Sequence
  Synthetic
uugagugcauaugacuca

SEQ ID NO: 31945 - RNA, 19 nt, Artificial Sequence
  Synthetic
cuugagugcauaugacuca

SEQ ID NO: 31946 - RNA, 21 nt, Artificial Sequence
  Synthetic
agcuugagugcauaugacuca

SEQ ID NO: 31947 - RNA, 22 nt, Artificial Sequence
  Synthetic
cagcuugagugcauaugacuca

SEQ ID NO: 31948 - RNA, 23 nt, Artificial Sequence
  Synthetic
acagcuugagugcauaugacuca

SEQ ID NO: 31949 - RNA, 24 nt, Artificial Sequence
  Synthetic
uacagcuugagugcauaugacuca

SEQ ID NO: 31950 - RNA, 18 nt, Artificial Sequence
  Synthetic
aauuauuaaacauacuca

SEQ ID NO: 31951 - RNA, 19 nt, Artificial Sequence
  Synthetic
uaauuauuaaacauacuca

SEQ ID NO: 31952 - RNA, 20 nt, Artificial Sequence
  Synthetic
auaauuauuaaacauacuca

SEQ ID NO: 31953 - RNA, 21 nt, Artificial Sequence
  Synthetic
aauaauuauuaaacauacuca

SEQ ID NO: 31954 - RNA, 22 nt, Artificial Sequence
  Synthetic
aaauaauuauuaaacauacuca

SEQ ID NO: 31955 - RNA, 23 nt, Artificial Sequence
  Synthetic
uaaauaauuauuaaacauacuca

SEQ ID NO: 31956 - RNA, 24 nt, Artificial Sequence
  Synthetic
auaaauaauuauuaaacauacuca

SEQ ID NO: 31957 - RNA, 23 nt, Artificial Sequence
  Synthetic
agguuucaaacauugacuacuca

SEQ ID NO: 31958 - RNA, 18 nt, Artificial Sequence
  Synthetic
uauugcuuguacuacuca

SEQ ID NO: 31959 - RNA, 20 nt, Artificial Sequence
  Synthetic
uguauugcuuguacuacuca

SEQ ID NO: 31960 - RNA, 22 nt, Artificial Sequence
  Synthetic
cguguauugcuuguacuacuca

SEQ ID NO: 31961 - RNA, 23 nt, Artificial Sequence
  Synthetic
acguguauugcuuguacuacuca

SEQ ID NO: 31962 - RNA, 24 nt, Artificial Sequence
  Synthetic
uacguguauugcuuguacuacuca

SEQ ID NO: 31963 - RNA, 18 nt, Artificial Sequence
  Synthetic
uugaggcccugcuacuca

SEQ ID NO: 31964 - RNA, 19 nt, Artificial Sequence
  Synthetic
cuugaggcccugcuacuca

SEQ ID NO: 31965 - RNA, 20 nt, Artificial Sequence
  Synthetic
acuugaggcccugcuacuca

SEQ ID NO: 31966 - RNA, 21 nt, Artificial Sequence
  Synthetic
cacuugaggcccugcuacuca

SEQ ID NO: 31967 - RNA, 22 nt, Artificial Sequence
  Synthetic
acacuugaggcccugcuacuca

SEQ ID NO: 31968 - RNA, 23 nt, Artificial Sequence
  Synthetic
aacacuugaggcccugcuacuca

SEQ ID NO: 31969 - RNA, 24 nt, Artificial Sequence
  Synthetic
uaacacuugaggcccugcuacuca

SEQ ID NO: 31970 - RNA, 18 nt, Artificial Sequence
  Synthetic
cucucagacagcaccuca

SEQ ID NO: 31971 - RNA, 19 nt, Artificial Sequence
  Synthetic
ccucucagacagcaccuca

SEQ ID NO: 31972 - RNA, 22 nt, Artificial Sequence
  Synthetic
uggccucucagacagcaccuca

SEQ ID NO: 31973 - RNA, 23 nt, Artificial Sequence
  Synthetic
cuggccucucagacagcaccuca

SEQ ID NO: 31974 - RNA, 24 nt, Artificial Sequence
  Synthetic
acuggccucucagacagcaccuca

SEQ ID NO: 31975 - RNA, 18 nt, Artificial Sequence
  Synthetic
ugaagauuaaugaccuca

SEQ ID NO: 31976 - RNA, 20 nt, Artificial Sequence
  Synthetic
agugaagauuaaugaccuca

SEQ ID NO: 31977 - RNA, 21 nt, Artificial Sequence
  Synthetic
cagugaagauuaaugaccuca

SEQ ID NO: 31978 - RNA, 23 nt, Artificial Sequence
  Synthetic
cgcagugaagauuaaugaccuca

SEQ ID NO: 31979 - RNA, 24 nt, Artificial Sequence
  Synthetic
ccgcagugaagauuaaugaccuca

SEQ ID NO: 31980 - RNA, 18 nt, Artificial Sequence
  Synthetic
ccugauuuauugaccuca

SEQ ID NO: 31981 - RNA, 20 nt, Artificial Sequence
  Synthetic
ugccugauuuauugaccuca

SEQ ID NO: 31982 - RNA, 21 nt, Artificial Sequence
  Synthetic
cugccugauuuauugaccuca

SEQ ID NO: 31983 - RNA, 24 nt, Artificial Sequence
  Synthetic
uggcugccugauuuauugaccuca

SEQ ID NO: 31984 - RNA, 18 nt, Artificial Sequence
  Synthetic
aggauaucagauaccuca

SEQ ID NO: 31985 - RNA, 19 nt, Artificial Sequence
  Synthetic
aaggauaucagauaccuca

SEQ ID NO: 31986 - RNA, 21 nt, Artificial Sequence
  Synthetic
agaaggauaucagauaccuca

SEQ ID NO: 31987 - RNA, 22 nt, Artificial Sequence
  Synthetic
uagaaggauaucagauaccuca

SEQ ID NO: 31988 - RNA, 23 nt, Artificial Sequence
  Synthetic
cuagaaggauaucagauaccuca

SEQ ID NO: 31989 - RNA, 24 nt, Artificial Sequence
  Synthetic
acuagaaggauaucagauaccuca

SEQ ID NO: 31990 - RNA, 18 nt, Artificial Sequence
  Synthetic
uuaacugcuauuaccuca

SEQ ID NO: 31991 - RNA, 19 nt, Artificial Sequence
  Synthetic
cuuaacugcuauuaccuca

SEQ ID NO: 31992 - RNA, 20 nt, Artificial Sequence
  Synthetic
ucuuaacugcuauuaccuca

SEQ ID NO: 31993 - RNA, 21 nt, Artificial Sequence
  Synthetic
aucuuaacugcuauuaccuca

SEQ ID NO: 31994 - RNA, 22 nt, Artificial Sequence
  Synthetic
caucuuaacugcuauuaccuca

SEQ ID NO: 31995 - RNA, 23 nt, Artificial Sequence
  Synthetic
ucaucuuaacugcuauuaccuca

SEQ ID NO: 31996 - RNA, 24 nt, Artificial Sequence
  Synthetic
cucaucuuaacugcuauuaccuca

SEQ ID NO: 31997 - RNA, 18 nt, Artificial Sequence
  Synthetic
cagcaauuuaagcccuca

SEQ ID NO: 31998 - RNA, 19 nt, Artificial Sequence
  Synthetic
ucagcaauuuaagcccuca

SEQ ID NO: 31999 - RNA, 20 nt, Artificial Sequence
  Synthetic
cucagcaauuuaagcccuca

SEQ ID NO: 32000 - RNA, 21 nt, Artificial Sequence
  Synthetic
acucagcaauuuaagcccuca

SEQ ID NO: 32001 - RNA, 22 nt, Artificial Sequence
  Synthetic
cacucagcaauuuaagcccuca

SEQ ID NO: 32002 - RNA, 23 nt, Artificial Sequence
  Synthetic
ccacucagcaauuuaagcccuca

SEQ ID NO: 32003 - RNA, 24 nt, Artificial Sequence
  Synthetic
uccacucagcaauuuaagcccuca

SEQ ID NO: 32004 - RNA, 20 nt, Artificial Sequence
  Synthetic
uggguaucauaccucccuca

SEQ ID NO: 32005 - RNA, 21 nt, Artificial Sequence
  Synthetic
uuggguaucauaccucccuca

SEQ ID NO: 32006 - RNA, 22 nt, Artificial Sequence
  Synthetic
cuuggguaucauaccucccuca

SEQ ID NO: 32007 - RNA, 23 nt, Artificial Sequence
  Synthetic
ucuuggguaucauaccucccuca

SEQ ID NO: 32008 - RNA, 18 nt, Artificial Sequence
  Synthetic
aaacuuuaccaggccuca

SEQ ID NO: 32009 - RNA, 19 nt, Artificial Sequence
  Synthetic
aaaacuuuaccaggccuca

SEQ ID NO: 32010 - RNA, 21 nt, Artificial Sequence
  Synthetic
ugaaaacuuuaccaggccuca

SEQ ID NO: 32011 - RNA, 22 nt, Artificial Sequence
  Synthetic
augaaaacuuuaccaggccuca

SEQ ID NO: 32012 - RNA, 23 nt, Artificial Sequence
  Synthetic
caugaaaacuuuaccaggccuca

SEQ ID NO: 32013 - RNA, 24 nt, Artificial Sequence
  Synthetic
ccaugaaaacuuuaccaggccuca

SEQ ID NO: 32014 - RNA, 21 nt, Artificial Sequence
  Synthetic
auucuccaacuacuggccuca

SEQ ID NO: 32015 - RNA, 22 nt, Artificial Sequence
  Synthetic
aauucuccaacuacuggccuca

SEQ ID NO: 32016 - RNA, 24 nt, Artificial Sequence
  Synthetic
agaauucuccaacuacuggccuca

SEQ ID NO: 32017 - RNA, 20 nt, Artificial Sequence
  Synthetic
agguucaugaugaugccuca

SEQ ID NO: 32018 - RNA, 22 nt, Artificial Sequence
  Synthetic
agagguucaugaugaugccuca

SEQ ID NO: 32019 - RNA, 23 nt, Artificial Sequence
  Synthetic
aagagguucaugaugaugccuca

SEQ ID NO: 32020 - RNA, 24 nt, Artificial Sequence
  Synthetic
uaagagguucaugaugaugccuca

SEQ ID NO: 32021 - RNA, 18 nt, Artificial Sequence
  Synthetic
caguaaaaaccugccuca

SEQ ID NO: 32022 - RNA, 19 nt, Artificial Sequence
  Synthetic
acaguaaaaaccugccuca

SEQ ID NO: 32023 - RNA, 20 nt, Artificial Sequence
  Synthetic
cacaguaaaaaccugccuca

SEQ ID NO: 32024 - RNA, 21 nt, Artificial Sequence
  Synthetic
acacaguaaaaaccugccuca

SEQ ID NO: 32025 - RNA, 22 nt, Artificial Sequence
  Synthetic
cacacaguaaaaaccugccuca

SEQ ID NO: 32026 - RNA, 24 nt, Artificial Sequence
  Synthetic
cgcacacaguaaaaaccugccuca

SEQ ID NO: 32027 - RNA, 19 nt, Artificial Sequence
  Synthetic
ugaauauaucaaauccuca

SEQ ID NO: 32028 - RNA, 20 nt, Artificial Sequence
  Synthetic
uugaauauaucaaauccuca

SEQ ID NO: 32029 - RNA, 21 nt, Artificial Sequence
  Synthetic
cuugaauauaucaaauccuca

SEQ ID NO: 32030 - RNA, 22 nt, Artificial Sequence
  Synthetic
ccuugaauauaucaaauccuca

SEQ ID NO: 32031 - RNA, 23 nt, Artificial Sequence
  Synthetic
cccuugaauauaucaaauccuca

SEQ ID NO: 32032 - RNA, 24 nt, Artificial Sequence
  Synthetic
acccuugaauauaucaaauccuca

SEQ ID NO: 32033 - RNA, 18 nt, Artificial Sequence
  Synthetic
ugcaagcucaaauccuca

SEQ ID NO: 32034 - RNA, 19 nt, Artificial Sequence
  Synthetic
uugcaagcucaaauccuca

SEQ ID NO: 32035 - RNA, 20 nt, Artificial Sequence
  Synthetic
uuugcaagcucaaauccuca

SEQ ID NO: 32036 - RNA, 21 nt, Artificial Sequence
  Synthetic
cuuugcaagcucaaauccuca

SEQ ID NO: 32037 - RNA, 23 nt, Artificial Sequence
  Synthetic
agcuuugcaagcucaaauccuca

SEQ ID NO: 32038 - RNA, 24 nt, Artificial Sequence
  Synthetic
aagcuuugcaagcucaaauccuca

SEQ ID NO: 32039 - RNA, 21 nt, Artificial Sequence
  Synthetic
cuacccaacuucccauccuca

SEQ ID NO: 32040 - RNA, 22 nt, Artificial Sequence
  Synthetic
ucuacccaacuucccauccuca

SEQ ID NO: 32041 - RNA, 23 nt, Artificial Sequence
  Synthetic
uucuacccaacuucccauccuca

SEQ ID NO: 32042 - RNA, 24 nt, Artificial Sequence
  Synthetic
cuucuacccaacuucccauccuca

SEQ ID NO: 32043 - RNA, 18 nt, Artificial Sequence
  Synthetic
aacacugugauuuccuca

SEQ ID NO: 32044 - RNA, 19 nt, Artificial Sequence
  Synthetic
aaacacugugauuuccuca

SEQ ID NO: 32045 - RNA, 21 nt, Artificial Sequence
  Synthetic
agaaacacugugauuuccuca

SEQ ID NO: 32046 - RNA, 22 nt, Artificial Sequence
  Synthetic
cagaaacacugugauuuccuca

SEQ ID NO: 32047 - RNA, 23 nt, Artificial Sequence
  Synthetic
acagaaacacugugauuuccuca

SEQ ID NO: 32048 - RNA, 24 nt, Artificial Sequence
  Synthetic
aacagaaacacugugauuuccuca

SEQ ID NO: 32049 - RNA, 18 nt, Artificial Sequence
  Synthetic
uuacaucuuguuuccuca

SEQ ID NO: 32050 - RNA, 19 nt, Artificial Sequence
  Synthetic
cuuacaucuuguuuccuca

SEQ ID NO: 32051 - RNA, 21 nt, Artificial Sequence
  Synthetic
ugcuuacaucuuguuuccuca

SEQ ID NO: 32052 - RNA, 22 nt, Artificial Sequence
  Synthetic
augcuuacaucuuguuuccuca

SEQ ID NO: 32053 - RNA, 23 nt, Artificial Sequence
  Synthetic
uaugcuuacaucuuguuuccuca

SEQ ID NO: 32054 - RNA, 24 nt, Artificial Sequence
  Synthetic
auaugcuuacaucuuguuuccuca

SEQ ID NO: 32055 - RNA, 18 nt, Artificial Sequence
  Synthetic
cuauuggagacaagcuca

SEQ ID NO: 32056 - RNA, 19 nt, Artificial Sequence
  Synthetic
ucuauuggagacaagcuca

SEQ ID NO: 32057 - RNA, 20 nt, Artificial Sequence
  Synthetic
uucuauuggagacaagcuca

SEQ ID NO: 32058 - RNA, 21 nt, Artificial Sequence
  Synthetic
cuucuauuggagacaagcuca

SEQ ID NO: 32059 - RNA, 22 nt, Artificial Sequence
  Synthetic
ucuucuauuggagacaagcuca

SEQ ID NO: 32060 - RNA, 23 nt, Artificial Sequence
  Synthetic
aucuucuauuggagacaagcuca

SEQ ID NO: 32061 - RNA, 24 nt, Artificial Sequence
  Synthetic
aaucuucuauuggagacaagcuca

SEQ ID NO: 32062 - RNA, 19 nt, Artificial Sequence
  Synthetic
agcugacuaucacagcuca

SEQ ID NO: 32063 - RNA, 20 nt, Artificial Sequence
  Synthetic
aagcugacuaucacagcuca

SEQ ID NO: 32064 - RNA, 21 nt, Artificial Sequence
  Synthetic
uaagcugacuaucacagcuca

SEQ ID NO: 32065 - RNA, 22 nt, Artificial Sequence
  Synthetic
auaagcugacuaucacagcuca

SEQ ID NO: 32066 - RNA, 23 nt, Artificial Sequence
  Synthetic
cauaagcugacuaucacagcuca

SEQ ID NO: 32067 - RNA, 24 nt, Artificial Sequence
  Synthetic
ccauaagcugacuaucacagcuca

SEQ ID NO: 32068 - RNA, 19 nt, Artificial Sequence
  Synthetic
agccccugcaccuagcuca

SEQ ID NO: 32069 - RNA, 20 nt, Artificial Sequence
  Synthetic
cagccccugcaccuagcuca

SEQ ID NO: 32070 - RNA, 21 nt, Artificial Sequence
  Synthetic
acagccccugcaccuagcuca

SEQ ID NO: 32071 - RNA, 22 nt, Artificial Sequence
  Synthetic
uacagccccugcaccuagcuca

SEQ ID NO: 32072 - RNA, 23 nt, Artificial Sequence
  Synthetic
cuacagccccugcaccuagcuca

SEQ ID NO: 32073 - RNA, 18 nt, Artificial Sequence
  Synthetic
uccuacccauaaggcuca

SEQ ID NO: 32074 - RNA, 19 nt, Artificial Sequence
  Synthetic
uuccuacccauaaggcuca

SEQ ID NO: 32075 - RNA, 20 nt, Artificial Sequence
  Synthetic
cuuccuacccauaaggcuca

SEQ ID NO: 32076 - RNA, 21 nt, Artificial Sequence
  Synthetic
ccuuccuacccauaaggcuca

SEQ ID NO: 32077 - RNA, 22 nt, Artificial Sequence
  Synthetic
cccuuccuacccauaaggcuca

SEQ ID NO: 32078 - RNA, 23 nt, Artificial Sequence
  Synthetic
ucccuuccuacccauaaggcuca

SEQ ID NO: 32079 - RNA, 24 nt, Artificial Sequence
  Synthetic
aucccuuccuacccauaaggcuca

SEQ ID NO: 32080 - RNA, 20 nt, Artificial Sequence
  Synthetic
uggagcuuaaccauggcuca

SEQ ID NO: 32081 - RNA, 21 nt, Artificial Sequence
  Synthetic
cuggagcuuaaccauggcuca

SEQ ID NO: 32082 - RNA, 23 nt, Artificial Sequence
  Synthetic
ugcuggagcuuaaccauggcuca

SEQ ID NO: 32083 - RNA, 24 nt, Artificial Sequence
  Synthetic
uugcuggagcuuaaccauggcuca

SEQ ID NO: 32084 - RNA, 18 nt, Artificial Sequence
  Synthetic
ucuaccacaauaugcuca

SEQ ID NO: 32085 - RNA, 20 nt, Artificial Sequence
  Synthetic
agucuaccacaauaugcuca

SEQ ID NO: 32086 - RNA, 21 nt, Artificial Sequence
  Synthetic
cagucuaccacaauaugcuca

SEQ ID NO: 32087 - RNA, 23 nt, Artificial Sequence
  Synthetic
ugcagucuaccacaauaugcuca

SEQ ID NO: 32088 - RNA, 24 nt, Artificial Sequence
  Synthetic
augcagucuaccacaauaugcuca

SEQ ID NO: 32089 - RNA, 18 nt, Artificial Sequence
  Synthetic
auaggguucuucugcuca

SEQ ID NO: 32090 - RNA, 19 nt, Artificial Sequence
  Synthetic
cauaggguucuucugcuca

SEQ ID NO: 32091 - RNA, 21 nt, Artificial Sequence
  Synthetic
ugcauaggguucuucugcuca

SEQ ID NO: 32092 - RNA, 22 nt, Artificial Sequence
  Synthetic
cugcauaggguucuucugcuca

SEQ ID NO: 32093 - RNA, 23 nt, Artificial Sequence
  Synthetic
ucugcauaggguucuucugcuca

SEQ ID NO: 32094 - RNA, 24 nt, Artificial Sequence
  Synthetic
aucugcauaggguucuucugcuca

SEQ ID NO: 32095 - RNA, 18 nt, Artificial Sequence
  Synthetic
uguucacuuccgugcuca

SEQ ID NO: 32096 - RNA, 20 nt, Artificial Sequence
  Synthetic
aguguucacuuccgugcuca

SEQ ID NO: 32097 - RNA, 21 nt, Artificial Sequence
  Synthetic
uaguguucacuuccgugcuca

SEQ ID NO: 32098 - RNA, 22 nt, Artificial Sequence
  Synthetic
uuaguguucacuuccgugcuca

SEQ ID NO: 32099 - RNA, 24 nt, Artificial Sequence
  Synthetic
uguuaguguucacuuccgugcuca

SEQ ID NO: 32100 - RNA, 18 nt, Artificial Sequence
  Synthetic
caauagccccauugcuca

SEQ ID NO: 32101 - RNA, 21 nt, Artificial Sequence
  Synthetic
aggcaauagccccauugcuca

SEQ ID NO: 32102 - RNA, 22 nt, Artificial Sequence
  Synthetic
caggcaauagccccauugcuca

SEQ ID NO: 32103 - RNA, 23 nt, Artificial Sequence
  Synthetic
ccaggcaauagccccauugcuca

SEQ ID NO: 32104 - RNA, 24 nt, Artificial Sequence
  Synthetic
cccaggcaauagccccauugcuca

SEQ ID NO: 32105 - RNA, 18 nt, Artificial Sequence
  Synthetic
agggcgaguuguugcuca

SEQ ID NO: 32106 - RNA, 19 nt, Artificial Sequence
  Synthetic
aagggcgaguuguugcuca

SEQ ID NO: 32107 - RNA, 20 nt, Artificial Sequence
  Synthetic
uaagggcgaguuguugcuca

SEQ ID NO: 32108 - RNA, 22 nt, Artificial Sequence
  Synthetic
uguaagggcgaguuguugcuca

SEQ ID NO: 32109 - RNA, 23 nt, Artificial Sequence
  Synthetic
uuguaagggcgaguuguugcuca

SEQ ID NO: 32110 - RNA, 24 nt, Artificial Sequence
  Synthetic
auuguaagggcgaguuguugcuca

SEQ ID NO: 32111 - RNA, 19 nt, Artificial Sequence
  Synthetic
uggaagauuugaaaucuca

SEQ ID NO: 32112 - RNA, 20 nt, Artificial Sequence
  Synthetic
auggaagauuugaaaucuca

SEQ ID NO: 32113 - RNA, 21 nt, Artificial Sequence
  Synthetic
cauggaagauuugaaaucuca

SEQ ID NO: 32114 - RNA, 22 nt, Artificial Sequence
  Synthetic
ucauggaagauuugaaaucuca

SEQ ID NO: 32115 - RNA, 18 nt, Artificial Sequence
  Synthetic
ugauuuaucuaaaucuca

SEQ ID NO: 32116 - RNA, 19 nt, Artificial Sequence
  Synthetic
augauuuaucuaaaucuca

SEQ ID NO: 32117 - RNA, 20 nt, Artificial Sequence
  Synthetic
aaugauuuaucuaaaucuca

SEQ ID NO: 32118 - RNA, 21 nt, Artificial Sequence
  Synthetic
aaaugauuuaucuaaaucuca

SEQ ID NO: 32119 - RNA, 22 nt, Artificial Sequence
  Synthetic
aaaaugauuuaucuaaaucuca

SEQ ID NO: 32120 - RNA, 23 nt, Artificial Sequence
  Synthetic
aaaaaugauuuaucuaaaucuca

SEQ ID NO: 32121 - RNA, 24 nt, Artificial Sequence
  Synthetic
aaaaaaugauuuaucuaaaucuca

SEQ ID NO: 32122 - RNA, 18 nt, Artificial Sequence
  Synthetic
ugguuagggaacaucuca

SEQ ID NO: 32123 - RNA, 20 nt, Artificial Sequence
  Synthetic
agugguuagggaacaucuca

SEQ ID NO: 32124 - RNA, 21 nt, Artificial Sequence
  Synthetic
cagugguuagggaacaucuca

SEQ ID NO: 32125 - RNA, 22 nt, Artificial Sequence
  Synthetic
ccagugguuagggaacaucuca

SEQ ID NO: 32126 - RNA, 23 nt, Artificial Sequence
  Synthetic
cccagugguuagggaacaucuca

SEQ ID NO: 32127 - RNA, 24 nt, Artificial Sequence
  Synthetic
ucccagugguuagggaacaucuca

SEQ ID NO: 32128 - RNA, 18 nt, Artificial Sequence
  Synthetic
caugaaacuaucaucuca

SEQ ID NO: 32129 - RNA, 19 nt, Artificial Sequence
  Synthetic
ucaugaaacuaucaucuca

SEQ ID NO: 32130 - RNA, 20 nt, Artificial Sequence
  Synthetic
uucaugaaacuaucaucuca

SEQ ID NO: 32131 - RNA, 21 nt, Artificial Sequence
  Synthetic
auucaugaaacuaucaucuca

SEQ ID NO: 32132 - RNA, 22 nt, Artificial Sequence
  Synthetic
cauucaugaaacuaucaucuca

SEQ ID NO: 32133 - RNA, 23 nt, Artificial Sequence
  Synthetic
acauucaugaaacuaucaucuca

SEQ ID NO: 32134 - RNA, 24 nt, Artificial Sequence
  Synthetic
aacauucaugaaacuaucaucuca

SEQ ID NO: 32135 - RNA, 18 nt, Artificial Sequence
  Synthetic
cccgugcccuugaucuca

SEQ ID NO: 32136 - RNA, 20 nt, Artificial Sequence
  Synthetic
agcccgugcccuugaucuca

SEQ ID NO: 32137 - RNA, 21 nt, Artificial Sequence
  Synthetic
uagcccgugcccuugaucuca

SEQ ID NO: 32138 - RNA, 22 nt, Artificial Sequence
  Synthetic
cuagcccgugcccuugaucuca

SEQ ID NO: 32139 - RNA, 23 nt, Artificial Sequence
  Synthetic
ucuagcccgugcccuugaucuca

SEQ ID NO: 32140 - RNA, 24 nt, Artificial Sequence
  Synthetic
uucuagcccgugcccuugaucuca

SEQ ID NO: 32141 - RNA, 18 nt, Artificial Sequence
  Synthetic
aaaaccaugucuaucuca

SEQ ID NO: 32142 - RNA, 24 nt, Artificial Sequence
  Synthetic
ugggggaaaaccaugucuaucuca

SEQ ID NO: 32143 - RNA, 21 nt, Artificial Sequence
  Synthetic
acaauaaugcuacuuaucuca

SEQ ID NO: 32144 - RNA, 22 nt, Artificial Sequence
  Synthetic
cacaauaaugcuacuuaucuca

SEQ ID NO: 32145 - RNA, 24 nt, Artificial Sequence
  Synthetic
agcacaauaaugcuacuuaucuca

SEQ ID NO: 32146 - RNA, 18 nt, Artificial Sequence
  Synthetic
acaauaagauuuaucuca

SEQ ID NO: 32147 - RNA, 19 nt, Artificial Sequence
  Synthetic
uacaauaagauuuaucuca

SEQ ID NO: 32148 - RNA, 20 nt, Artificial Sequence
  Synthetic
uuacaauaagauuuaucuca

SEQ ID NO: 32149 - RNA, 21 nt, Artificial Sequence
  Synthetic
uuuacaauaagauuuaucuca

SEQ ID NO: 32150 - RNA, 22 nt, Artificial Sequence
  Synthetic
auuuacaauaagauuuaucuca

SEQ ID NO: 32151 - RNA, 23 nt, Artificial Sequence
  Synthetic
cauuuacaauaagauuuaucuca

SEQ ID NO: 32152 - RNA, 24 nt, Artificial Sequence
  Synthetic
ucauuuacaauaagauuuaucuca

SEQ ID NO: 32153 - RNA, 18 nt, Artificial Sequence
  Synthetic
aauauguccuuccucuca

SEQ ID NO: 32154 - RNA, 19 nt, Artificial Sequence
  Synthetic
aaauauguccuuccucuca

SEQ ID NO: 32155 - RNA, 20 nt, Artificial Sequence
  Synthetic
caaauauguccuuccucuca

SEQ ID NO: 32156 - RNA, 21 nt, Artificial Sequence
  Synthetic
ucaaauauguccuuccucuca

SEQ ID NO: 32157 - RNA, 22 nt, Artificial Sequence
  Synthetic
uucaaauauguccuuccucuca

SEQ ID NO: 32158 - RNA, 23 nt, Artificial Sequence
  Synthetic
auucaaauauguccuuccucuca

SEQ ID NO: 32159 - RNA, 24 nt, Artificial Sequence
  Synthetic
uauucaaauauguccuuccucuca

SEQ ID NO: 32160 - RNA, 18 nt, Artificial Sequence
  Synthetic
uuuuuagauauucucuca

SEQ ID NO: 32161 - RNA, 19 nt, Artificial Sequence
  Synthetic
cuuuuuagauauucucuca

SEQ ID NO: 32162 - RNA, 20 nt, Artificial Sequence
  Synthetic
acuuuuuagauauucucuca

SEQ ID NO: 32163 - RNA, 21 nt, Artificial Sequence
  Synthetic
cacuuuuuagauauucucuca

SEQ ID NO: 32164 - RNA, 23 nt, Artificial Sequence
  Synthetic
agcacuuuuuagauauucucuca

SEQ ID NO: 32165 - RNA, 24 nt, Artificial Sequence
  Synthetic
cagcacuuuuuagauauucucuca

SEQ ID NO: 32166 - RNA, 18 nt, Artificial Sequence
  Synthetic
ugaguuuuuguucucuca

SEQ ID NO: 32167 - RNA, 19 nt, Artificial Sequence
  Synthetic
cugaguuuuuguucucuca

SEQ ID NO: 32168 - RNA, 20 nt, Artificial Sequence
  Synthetic
ucugaguuuuuguucucuca

SEQ ID NO: 32169 - RNA, 21 nt, Artificial Sequence
  Synthetic
uucugaguuuuuguucucuca

SEQ ID NO: 32170 - RNA, 22 nt, Artificial Sequence
  Synthetic
cuucugaguuuuuguucucuca

SEQ ID NO: 32171 - RNA, 24 nt, Artificial Sequence
  Synthetic
agcuucugaguuuuuguucucuca

SEQ ID NO: 32172 - RNA, 18 nt, Artificial Sequence
  Synthetic
ccagguauucccuucuca

SEQ ID NO: 32173 - RNA, 19 nt, Artificial Sequence
  Synthetic
uccagguauucccuucuca

SEQ ID NO: 32174 - RNA, 20 nt, Artificial Sequence
  Synthetic
auccagguauucccuucuca

SEQ ID NO: 32175 - RNA, 22 nt, Artificial Sequence
  Synthetic
ugauccagguauucccuucuca

SEQ ID NO: 32176 - RNA, 23 nt, Artificial Sequence
  Synthetic
augauccagguauucccuucuca

SEQ ID NO: 32177 - RNA, 24 nt, Artificial Sequence
  Synthetic
aaugauccagguauucccuucuca

SEQ ID NO: 32178 - RNA, 18 nt, Artificial Sequence
  Synthetic
aaauaauaaauguucuca

SEQ ID NO: 32179 - RNA, 19 nt, Artificial Sequence
  Synthetic
uaaauaauaaauguucuca

SEQ ID NO: 32180 - RNA, 20 nt, Artificial Sequence
  Synthetic
cuaaauaauaaauguucuca

SEQ ID NO: 32181 - RNA, 23 nt, Artificial Sequence
  Synthetic
uggcuaaauaauaaauguucuca

SEQ ID NO: 32182 - RNA, 24 nt, Artificial Sequence
  Synthetic
cuggcuaaauaauaaauguucuca

SEQ ID NO: 32183 - RNA, 18 nt, Artificial Sequence
  Synthetic
aaaccucucuuuuucuca

SEQ ID NO: 32184 - RNA, 19 nt, Artificial Sequence
  Synthetic
aaaaccucucuuuuucuca

SEQ ID NO: 32185 - RNA, 20 nt, Artificial Sequence
  Synthetic
caaaaccucucuuuuucuca

SEQ ID NO: 32186 - RNA, 21 nt, Artificial Sequence
  Synthetic
ucaaaaccucucuuuuucuca

SEQ ID NO: 32187 - RNA, 23 nt, Artificial Sequence
  Synthetic
ugucaaaaccucucuuuuucuca

SEQ ID NO: 32188 - RNA, 24 nt, Artificial Sequence
  Synthetic
uugucaaaaccucucuuuuucuca

SEQ ID NO: 32189 - RNA, 19 nt, Artificial Sequence
  Synthetic
aggaugcucuuaaaaguca

SEQ ID NO: 32190 - RNA, 20 nt, Artificial Sequence
  Synthetic
uaggaugcucuuaaaaguca

SEQ ID NO: 32191 - RNA, 21 nt, Artificial Sequence
  Synthetic
auaggaugcucuuaaaaguca

SEQ ID NO: 32192 - RNA, 22 nt, Artificial Sequence
  Synthetic
aauaggaugcucuuaaaaguca

SEQ ID NO: 32193 - RNA, 23 nt, Artificial Sequence
  Synthetic
uaauaggaugcucuuaaaaguca

SEQ ID NO: 32194 - RNA, 24 nt, Artificial Sequence
  Synthetic
cuaauaggaugcucuuaaaaguca

SEQ ID NO: 32195 - RNA, 19 nt, Artificial Sequence
  Synthetic
agagaccuaaaucaaguca

SEQ ID NO: 32196 - RNA, 20 nt, Artificial Sequence
  Synthetic
cagagaccuaaaucaaguca

SEQ ID NO: 32197 - RNA, 22 nt, Artificial Sequence
  Synthetic
agcagagaccuaaaucaaguca

SEQ ID NO: 32198 - RNA, 24 nt, Artificial Sequence
  Synthetic
ugagcagagaccuaaaucaaguca

SEQ ID NO: 32199 - RNA, 18 nt, Artificial Sequence
  Synthetic
ugguauauucauaaguca

SEQ ID NO: 32200 - RNA, 20 nt, Artificial Sequence
  Synthetic
agugguauauucauaaguca

SEQ ID NO: 32201 - RNA, 21 nt, Artificial Sequence
  Synthetic
aagugguauauucauaaguca

SEQ ID NO: 32202 - RNA, 22 nt, Artificial Sequence
  Synthetic
uaagugguauauucauaaguca

SEQ ID NO: 32203 - RNA, 24 nt, Artificial Sequence
  Synthetic
aguaagugguauauucauaaguca

SEQ ID NO: 32204 - RNA, 18 nt, Artificial Sequence
  Synthetic
ucucucaugccuaaguca

SEQ ID NO: 32205 - RNA, 19 nt, Artificial Sequence
  Synthetic
uucucucaugccuaaguca

SEQ ID NO: 32206 - RNA, 20 nt, Artificial Sequence
  Synthetic
uuucucucaugccuaaguca

SEQ ID NO: 32207 - RNA, 21 nt, Artificial Sequence
  Synthetic
uuuucucucaugccuaaguca

SEQ ID NO: 32208 - RNA, 22 nt, Artificial Sequence
  Synthetic
auuuucucucaugccuaaguca

SEQ ID NO: 32209 - RNA, 23 nt, Artificial Sequence
  Synthetic
uauuuucucucaugccuaaguca

SEQ ID NO: 32210 - RNA, 24 nt, Artificial Sequence
  Synthetic
uuauuuucucucaugccuaaguca

SEQ ID NO: 32211 - RNA, 20 nt, Artificial Sequence
  Synthetic
uggcaguuuucuuuaaguca

SEQ ID NO: 32212 - RNA, 21 nt, Artificial Sequence
  Synthetic
uuggcaguuuucuuuaaguca

SEQ ID NO: 32213 - RNA, 22 nt, Artificial Sequence
  Synthetic
uuuggcaguuuucuuuaaguca

SEQ ID NO: 32214 - RNA, 23 nt, Artificial Sequence
  Synthetic
auuuggcaguuuucuuuaaguca

SEQ ID NO: 32215 - RNA, 24 nt, Artificial Sequence
  Synthetic
aauuuggcaguuuucuuuaaguca

SEQ ID NO: 32216 - RNA, 19 nt, Artificial Sequence
  Synthetic
ugugaguguuuuuaaguca

SEQ ID NO: 32217 - RNA, 20 nt, Artificial Sequence
  Synthetic
uugugaguguuuuuaaguca

SEQ ID NO: 32218 - RNA, 21 nt, Artificial Sequence
  Synthetic
cuugugaguguuuuuaaguca

SEQ ID NO: 32219 - RNA, 22 nt, Artificial Sequence
  Synthetic
acuugugaguguuuuuaaguca

SEQ ID NO: 32220 - RNA, 23 nt, Artificial Sequence
  Synthetic
uacuugugaguguuuuuaaguca

SEQ ID NO: 32221 - RNA, 24 nt, Artificial Sequence
  Synthetic
uuacuugugaguguuuuuaaguca

SEQ ID NO: 32222 - RNA, 18 nt, Artificial Sequence
  Synthetic
ucacccaacacacaguca

SEQ ID NO: 32223 - RNA, 19 nt, Artificial Sequence
  Synthetic
uucacccaacacacaguca

SEQ ID NO: 32224 - RNA, 20 nt, Artificial Sequence
  Synthetic
cuucacccaacacacaguca

SEQ ID NO: 32225 - RNA, 21 nt, Artificial Sequence
  Synthetic
ucuucacccaacacacaguca

SEQ ID NO: 32226 - RNA, 22 nt, Artificial Sequence
  Synthetic
uucuucacccaacacacaguca

SEQ ID NO: 32227 - RNA, 23 nt, Artificial Sequence
  Synthetic
cuucuucacccaacacacaguca

SEQ ID NO: 32228 - RNA, 24 nt, Artificial Sequence
  Synthetic
ucuucuucacccaacacacaguca

SEQ ID NO: 32229 - RNA, 21 nt, Artificial Sequence
  Synthetic
uacuccugcauuaaucaguca

SEQ ID NO: 32230 - RNA, 22 nt, Artificial Sequence
  Synthetic
cuacuccugcauuaaucaguca

SEQ ID NO: 32231 - RNA, 23 nt, Artificial Sequence
  Synthetic
acuacuccugcauuaaucaguca

SEQ ID NO: 32232 - RNA, 24 nt, Artificial Sequence
  Synthetic
uacuacuccugcauuaaucaguca

SEQ ID NO: 32233 - RNA, 18 nt, Artificial Sequence
  Synthetic
uuucaccuucaucaguca

SEQ ID NO: 32234 - RNA, 19 nt, Artificial Sequence
  Synthetic
cuuucaccuucaucaguca

SEQ ID NO: 32235 - RNA, 20 nt, Artificial Sequence
  Synthetic
acuuucaccuucaucaguca

SEQ ID NO: 32236 - RNA, 21 nt, Artificial Sequence
  Synthetic
uacuuucaccuucaucaguca

SEQ ID NO: 32237 - RNA, 22 nt, Artificial Sequence
  Synthetic
auacuuucaccuucaucaguca

SEQ ID NO: 32238 - RNA, 23 nt, Artificial Sequence
  Synthetic
uauacuuucaccuucaucaguca

SEQ ID NO: 32239 - RNA, 24 nt, Artificial Sequence
  Synthetic
cuauacuuucaccuucaucaguca

SEQ ID NO: 32240 - RNA, 20 nt, Artificial Sequence
  Synthetic
cgguaccaucuuuucaguca

SEQ ID NO: 32241 - RNA, 21 nt, Artificial Sequence
  Synthetic
ccgguaccaucuuuucaguca

SEQ ID NO: 32242 - RNA, 22 nt, Artificial Sequence
  Synthetic
cccgguaccaucuuuucaguca

SEQ ID NO: 32243 - RNA, 23 nt, Artificial Sequence
  Synthetic
ucccgguaccaucuuuucaguca

SEQ ID NO: 32244 - RNA, 24 nt, Artificial Sequence
  Synthetic
aucccgguaccaucuuuucaguca

SEQ ID NO: 32245 - RNA, 18 nt, Artificial Sequence
  Synthetic
aucuuaagaauggaguca

SEQ ID NO: 32246 - RNA, 19 nt, Artificial Sequence
  Synthetic
aaucuuaagaauggaguca

SEQ ID NO: 32247 - RNA, 20 nt, Artificial Sequence
  Synthetic
uaaucuuaagaauggaguca

SEQ ID NO: 32248 - RNA, 23 nt, Artificial Sequence
  Synthetic
agguaaucuuaagaauggaguca

SEQ ID NO: 32249 - RNA, 24 nt, Artificial Sequence
  Synthetic
aagguaaucuuaagaauggaguca

SEQ ID NO: 32250 - RNA, 18 nt, Artificial Sequence
  Synthetic
augaccuaucaauaguca

SEQ ID NO: 32251 - RNA, 19 nt, Artificial Sequence
  Synthetic
uaugaccuaucaauaguca

SEQ ID NO: 32252 - RNA, 21 nt, Artificial Sequence
  Synthetic
aguaugaccuaucaauaguca

SEQ ID NO: 32253 - RNA, 23 nt, Artificial Sequence
  Synthetic
ugaguaugaccuaucaauaguca

SEQ ID NO: 32254 - RNA, 24 nt, Artificial Sequence
  Synthetic
uugaguaugaccuaucaauaguca

SEQ ID NO: 32255 - RNA, 18 nt, Artificial Sequence
  Synthetic
agaagcaucugauaguca

SEQ ID NO: 32256 - RNA, 19 nt, Artificial Sequence
  Synthetic
cagaagcaucugauaguca

SEQ ID NO: 32257 - RNA, 22 nt, Artificial Sequence
  Synthetic
uggcagaagcaucugauaguca

SEQ ID NO: 32258 - RNA, 23 nt, Artificial Sequence
  Synthetic
cuggcagaagcaucugauaguca

SEQ ID NO: 32259 - RNA, 24 nt, Artificial Sequence
  Synthetic
ucuggcagaagcaucugauaguca

SEQ ID NO: 32260 - RNA, 18 nt, Artificial Sequence
  Synthetic
agcugcuuagucuaguca

SEQ ID NO: 32261 - RNA, 21 nt, Artificial Sequence
  Synthetic
uggagcugcuuagucuaguca

SEQ ID NO: 32262 - RNA, 22 nt, Artificial Sequence
  Synthetic
auggagcugcuuagucuaguca

SEQ ID NO: 32263 - RNA, 23 nt, Artificial Sequence
  Synthetic
aauggagcugcuuagucuaguca

SEQ ID NO: 32264 - RNA, 24 nt, Artificial Sequence
  Synthetic
caauggagcugcuuagucuaguca

SEQ ID NO: 32265 - RNA, 18 nt, Artificial Sequence
  Synthetic
aguacagaagaguaguca

SEQ ID NO: 32266 - RNA, 19 nt, Artificial Sequence
  Synthetic
aaguacagaagaguaguca

SEQ ID NO: 32267 - RNA, 20 nt, Artificial Sequence
  Synthetic
aaaguacagaagaguaguca

SEQ ID NO: 32268 - RNA, 21 nt, Artificial Sequence
  Synthetic
aaaaguacagaagaguaguca

SEQ ID NO: 32269 - RNA, 22 nt, Artificial Sequence
  Synthetic
aaaaaguacagaagaguaguca

SEQ ID NO: 32270 - RNA, 23 nt, Artificial Sequence
  Synthetic
uaaaaaguacagaagaguaguca

SEQ ID NO: 32271 - RNA, 24 nt, Artificial Sequence
  Synthetic
auaaaaaguacagaagaguaguca

SEQ ID NO: 32272 - RNA, 18 nt, Artificial Sequence
  Synthetic
cguagcauuucaccguca

SEQ ID NO: 32273 - RNA, 19 nt, Artificial Sequence
  Synthetic
acguagcauuucaccguca

SEQ ID NO: 32274 - RNA, 20 nt, Artificial Sequence
  Synthetic
aacguagcauuucaccguca

SEQ ID NO: 32275 - RNA, 22 nt, Artificial Sequence
  Synthetic
ugaacguagcauuucaccguca

SEQ ID NO: 32276 - RNA, 23 nt, Artificial Sequence
  Synthetic
uugaacguagcauuucaccguca

SEQ ID NO: 32277 - RNA, 24 nt, Artificial Sequence
  Synthetic
auugaacguagcauuucaccguca

SEQ ID NO: 32278 - RNA, 18 nt, Artificial Sequence
  Synthetic
ccuuaaauaaaaagguca

SEQ ID NO: 32279 - RNA, 19 nt, Artificial Sequence
  Synthetic
cccuuaaauaaaaagguca

SEQ ID NO: 32280 - RNA, 20 nt, Artificial Sequence
  Synthetic
ccccuuaaauaaaaagguca

SEQ ID NO: 32281 - RNA, 22 nt, Artificial Sequence
  Synthetic
cgccccuuaaauaaaaagguca

SEQ ID NO: 32282 - RNA, 23 nt, Artificial Sequence
  Synthetic
ccgccccuuaaauaaaaagguca

SEQ ID NO: 32283 - RNA, 24 nt, Artificial Sequence
  Synthetic
accgccccuuaaauaaaaagguca

SEQ ID NO: 32284 - RNA, 18 nt, Artificial Sequence
  Synthetic
ucaagaaugcgaagguca

SEQ ID NO: 32285 - RNA, 22 nt, Artificial Sequence
  Synthetic
ugggucaagaaugcgaagguca

SEQ ID NO: 32286 - RNA, 23 nt, Artificial Sequence
  Synthetic
augggucaagaaugcgaagguca

SEQ ID NO: 32287 - RNA, 24 nt, Artificial Sequence
  Synthetic
uaugggucaagaaugcgaagguca

SEQ ID NO: 32288 - RNA, 18 nt, Artificial Sequence
  Synthetic
ucacaaacgugaagguca

SEQ ID NO: 32289 - RNA, 22 nt, Artificial Sequence
  Synthetic
ugggucacaaacgugaagguca

SEQ ID NO: 32290 - RNA, 23 nt, Artificial Sequence
  Synthetic
augggucacaaacgugaagguca

SEQ ID NO: 32291 - RNA, 24 nt, Artificial Sequence
  Synthetic
uaugggucacaaacgugaagguca

SEQ ID NO: 32292 - RNA, 18 nt, Artificial Sequence
  Synthetic
aguaguauugucagguca

SEQ ID NO: 32293 - RNA, 19 nt, Artificial Sequence
  Synthetic
uaguaguauugucagguca

SEQ ID NO: 32294 - RNA, 20 nt, Artificial Sequence
  Synthetic
cuaguaguauugucagguca

SEQ ID NO: 32295 - RNA, 22 nt, Artificial Sequence
  Synthetic
cgcuaguaguauugucagguca

SEQ ID NO: 32296 - RNA, 23 nt, Artificial Sequence
  Synthetic
ucgcuaguaguauugucagguca

SEQ ID NO: 32297 - RNA, 24 nt, Artificial Sequence
  Synthetic
uucgcuaguaguauugucagguca

SEQ ID NO: 32298 - RNA, 18 nt, Artificial Sequence
  Synthetic
aggccagaagaaggguca

SEQ ID NO: 32299 - RNA, 19 nt, Artificial Sequence
  Synthetic
aaggccagaagaaggguca

SEQ ID NO: 32300 - RNA, 21 nt, Artificial Sequence
  Synthetic
agaaggccagaagaaggguca

SEQ ID NO: 32301 - RNA, 22 nt, Artificial Sequence
  Synthetic
aagaaggccagaagaaggguca

SEQ ID NO: 32302 - RNA, 23 nt, Artificial Sequence
  Synthetic
uaagaaggccagaagaaggguca

SEQ ID NO: 32303 - RNA, 18 nt, Artificial Sequence
  Synthetic
cuugagacuuuuggguca

SEQ ID NO: 32304 - RNA, 19 nt, Artificial Sequence
  Synthetic
ucuugagacuuuuggguca

SEQ ID NO: 32305 - RNA, 22 nt, Artificial Sequence
  Synthetic
uggucuugagacuuuuggguca

SEQ ID NO: 32306 - RNA, 23 nt, Artificial Sequence
  Synthetic
auggucuugagacuuuuggguca

SEQ ID NO: 32307 - RNA, 24 nt, Artificial Sequence
  Synthetic
aauggucuugagacuuuuggguca

SEQ ID NO: 32308 - RNA, 18 nt, Artificial Sequence
  Synthetic
cagcuacucuucugguca

SEQ ID NO: 32309 - RNA, 19 nt, Artificial Sequence
  Synthetic
acagcuacucuucugguca

SEQ ID NO: 32310 - RNA, 20 nt, Artificial Sequence
  Synthetic
uacagcuacucuucugguca

SEQ ID NO: 32311 - RNA, 22 nt, Artificial Sequence
  Synthetic
uguacagcuacucuucugguca

SEQ ID NO: 32312 - RNA, 23 nt, Artificial Sequence
  Synthetic
uuguacagcuacucuucugguca

SEQ ID NO: 32313 - RNA, 18 nt, Artificial Sequence
  Synthetic
auacaagcauauugguca

SEQ ID NO: 32314 - RNA, 19 nt, Artificial Sequence
  Synthetic
uauacaagcauauugguca

SEQ ID NO: 32315 - RNA, 20 nt, Artificial Sequence
  Synthetic
uuauacaagcauauugguca

SEQ ID NO: 32316 - RNA, 21 nt, Artificial Sequence
  Synthetic
cuuauacaagcauauugguca

SEQ ID NO: 32317 - RNA, 23 nt, Artificial Sequence
  Synthetic
agcuuauacaagcauauugguca

SEQ ID NO: 32318 - RNA, 24 nt, Artificial Sequence
  Synthetic
aagcuuauacaagcauauugguca

SEQ ID NO: 32319 - RNA, 18 nt, Artificial Sequence
  Synthetic
aaagggcuguguugguca

SEQ ID NO: 32320 - RNA, 19 nt, Artificial Sequence
  Synthetic
aaaagggcuguguugguca

SEQ ID NO: 32321 - RNA, 20 nt, Artificial Sequence
  Synthetic
caaaagggcuguguugguca

SEQ ID NO: 32322 - RNA, 21 nt, Artificial Sequence
  Synthetic
acaaaagggcuguguugguca

SEQ ID NO: 32323 - RNA, 22 nt, Artificial Sequence
  Synthetic
uacaaaagggcuguguugguca

SEQ ID NO: 32324 - RNA, 23 nt, Artificial Sequence
  Synthetic
auacaaaagggcuguguugguca

SEQ ID NO: 32325 - RNA, 21 nt, Artificial Sequence
  Synthetic
aggguuacuuuucuuugguca

SEQ ID NO: 32326 - RNA, 22 nt, Artificial Sequence
  Synthetic
uaggguuacuuuucuuugguca

SEQ ID NO: 32327 - RNA, 23 nt, Artificial Sequence
  Synthetic
uuaggguuacuuuucuuugguca

SEQ ID NO: 32328 - RNA, 24 nt, Artificial Sequence
  Synthetic
auuaggguuacuuuucuuugguca

SEQ ID NO: 32329 - RNA, 19 nt, Artificial Sequence
  Synthetic
ugaccacagaaaaauguca

SEQ ID NO: 32330 - RNA, 20 nt, Artificial Sequence
  Synthetic
uugaccacagaaaaauguca

SEQ ID NO: 32331 - RNA, 18 nt, Artificial Sequence
  Synthetic
acagugccuagaauguca

SEQ ID NO: 32332 - RNA, 19 nt, Artificial Sequence
  Synthetic
aacagugccuagaauguca

SEQ ID NO: 32333 - RNA, 20 nt, Artificial Sequence
  Synthetic
caacagugccuagaauguca

SEQ ID NO: 32334 - RNA, 21 nt, Artificial Sequence
  Synthetic
ccaacagugccuagaauguca

SEQ ID NO: 32335 - RNA, 22 nt, Artificial Sequence
  Synthetic
accaacagugccuagaauguca

SEQ ID NO: 32336 - RNA, 23 nt, Artificial Sequence
  Synthetic
caccaacagugccuagaauguca

SEQ ID NO: 32337 - RNA, 24 nt, Artificial Sequence
  Synthetic
acaccaacagugccuagaauguca

SEQ ID NO: 32338 - RNA, 19 nt, Artificial Sequence
  Synthetic
agauaugcauugaauguca

SEQ ID NO: 32339 - RNA, 20 nt, Artificial Sequence
  Synthetic
uagauaugcauugaauguca

SEQ ID NO: 32340 - RNA, 21 nt, Artificial Sequence
  Synthetic
uuagauaugcauugaauguca

SEQ ID NO: 32341 - RNA, 22 nt, Artificial Sequence
  Synthetic
cuuagauaugcauugaauguca

SEQ ID NO: 32342 - RNA, 18 nt, Artificial Sequence
  Synthetic
uagguucgugugauguca

SEQ ID NO: 32343 - RNA, 19 nt, Artificial Sequence
  Synthetic
cuagguucgugugauguca

SEQ ID NO: 32344 - RNA, 20 nt, Artificial Sequence
  Synthetic
acuagguucgugugauguca

SEQ ID NO: 32345 - RNA, 22 nt, Artificial Sequence
  Synthetic
agacuagguucgugugauguca

SEQ ID NO: 32346 - RNA, 23 nt, Artificial Sequence
  Synthetic
cagacuagguucgugugauguca

SEQ ID NO: 32347 - RNA, 24 nt, Artificial Sequence
  Synthetic
acagacuagguucgugugauguca

SEQ ID NO: 32348 - RNA, 19 nt, Artificial Sequence
  Synthetic
agucuacagauugauguca

SEQ ID NO: 32349 - RNA, 20 nt, Artificial Sequence
  Synthetic
uagucuacagauugauguca

SEQ ID NO: 32350 - RNA, 22 nt, Artificial Sequence
  Synthetic
uguagucuacagauugauguca

SEQ ID NO: 32351 - RNA, 24 nt, Artificial Sequence
  Synthetic
aguguagucuacagauugauguca

SEQ ID NO: 32352 - RNA, 21 nt, Artificial Sequence
  Synthetic
auaagaauagugucuauguca

SEQ ID NO: 32353 - RNA, 24 nt, Artificial Sequence
  Synthetic
aggauaagaauagugucuauguca

SEQ ID NO: 32354 - RNA, 18 nt, Artificial Sequence
  Synthetic
agcuaaaugucccuguca

SEQ ID NO: 32355 - RNA, 19 nt, Artificial Sequence
  Synthetic
cagcuaaaugucccuguca

SEQ ID NO: 32356 - RNA, 20 nt, Artificial Sequence
  Synthetic
acagcuaaaugucccuguca

SEQ ID NO: 32357 - RNA, 21 nt, Artificial Sequence
  Synthetic
uacagcuaaaugucccuguca

SEQ ID NO: 32358 - RNA, 22 nt, Artificial Sequence
  Synthetic
uuacagcuaaaugucccuguca

SEQ ID NO: 32359 - RNA, 24 nt, Artificial Sequence
  Synthetic
aguuacagcuaaaugucccuguca

SEQ ID NO: 32360 - RNA, 19 nt, Artificial Sequence
  Synthetic
agaaaagucccagcuguca

SEQ ID NO: 32361 - RNA, 20 nt, Artificial Sequence
  Synthetic
aagaaaagucccagcuguca

SEQ ID NO: 32362 - RNA, 21 nt, Artificial Sequence
  Synthetic
caagaaaagucccagcuguca

SEQ ID NO: 32363 - RNA, 22 nt, Artificial Sequence
  Synthetic
acaagaaaagucccagcuguca

SEQ ID NO: 32364 - RNA, 23 nt, Artificial Sequence
  Synthetic
cacaagaaaagucccagcuguca

SEQ ID NO: 32365 - RNA, 24 nt, Artificial Sequence
  Synthetic
ucacaagaaaagucccagcuguca

SEQ ID NO: 32366 - RNA, 21 nt, Artificial Sequence
  Synthetic
uuuuuauuuuauccaguguca

SEQ ID NO: 32367 - RNA, 22 nt, Artificial Sequence
  Synthetic
auuuuuauuuuauccaguguca

SEQ ID NO: 32368 - RNA, 23 nt, Artificial Sequence
  Synthetic
aauuuuuauuuuauccaguguca

SEQ ID NO: 32369 - RNA, 24 nt, Artificial Sequence
  Synthetic
uaauuuuuauuuuauccaguguca

SEQ ID NO: 32370 - RNA, 18 nt, Artificial Sequence
  Synthetic
cagcuugcuauuguguca

SEQ ID NO: 32371 - RNA, 19 nt, Artificial Sequence
  Synthetic
ucagcuugcuauuguguca

SEQ ID NO: 32372 - RNA, 21 nt, Artificial Sequence
  Synthetic
ugucagcuugcuauuguguca

SEQ ID NO: 32373 - RNA, 22 nt, Artificial Sequence
  Synthetic
cugucagcuugcuauuguguca

SEQ ID NO: 32374 - RNA, 23 nt, Artificial Sequence
  Synthetic
acugucagcuugcuauuguguca

SEQ ID NO: 32375 - RNA, 24 nt, Artificial Sequence
  Synthetic
uacugucagcuugcuauuguguca

SEQ ID NO: 32376 - RNA, 18 nt, Artificial Sequence
  Synthetic
ugauuguguguuguguca

SEQ ID NO: 32377 - RNA, 20 nt, Artificial Sequence
  Synthetic
agugauuguguguuguguca

SEQ ID NO: 32378 - RNA, 21 nt, Artificial Sequence
  Synthetic
cagugauuguguguuguguca

SEQ ID NO: 32379 - RNA, 23 nt, Artificial Sequence
  Synthetic
cgcagugauuguguguuguguca

SEQ ID NO: 32380 - RNA, 24 nt, Artificial Sequence
  Synthetic
ucgcagugauuguguguuguguca

SEQ ID NO: 32381 - RNA, 21 nt, Artificial Sequence
  Synthetic
aucaugucaggucacuuguca

SEQ ID NO: 32382 - RNA, 22 nt, Artificial Sequence
  Synthetic
caucaugucaggucacuuguca

SEQ ID NO: 32383 - RNA, 23 nt, Artificial Sequence
  Synthetic
ucaucaugucaggucacuuguca

SEQ ID NO: 32384 - RNA, 24 nt, Artificial Sequence
  Synthetic
uucaucaugucaggucacuuguca

SEQ ID NO: 32385 - RNA, 18 nt, Artificial Sequence
  Synthetic
caggguauccuguuguca

SEQ ID NO: 32386 - RNA, 19 nt, Artificial Sequence
  Synthetic
acaggguauccuguuguca

SEQ ID NO: 32387 - RNA, 21 nt, Artificial Sequence
  Synthetic
ugacaggguauccuguuguca

SEQ ID NO: 32388 - RNA, 18 nt, Artificial Sequence
  Synthetic
acacaaauuaauuuguca

SEQ ID NO: 32389 - RNA, 19 nt, Artificial Sequence
  Synthetic
uacacaaauuaauuuguca

SEQ ID NO: 32390 - RNA, 20 nt, Artificial Sequence
  Synthetic
auacacaaauuaauuuguca

SEQ ID NO: 32391 - RNA, 21 nt, Artificial Sequence
  Synthetic
cauacacaaauuaauuuguca

SEQ ID NO: 32392 - RNA, 22 nt, Artificial Sequence
  Synthetic
acauacacaaauuaauuuguca

SEQ ID NO: 32393 - RNA, 23 nt, Artificial Sequence
  Synthetic
aacauacacaaauuaauuuguca

SEQ ID NO: 32394 - RNA, 19 nt, Artificial Sequence
  Synthetic
cguacuauuccguuuguca

SEQ ID NO: 32395 - RNA, 20 nt, Artificial Sequence
  Synthetic
acguacuauuccguuuguca

SEQ ID NO: 32396 - RNA, 21 nt, Artificial Sequence
  Synthetic
cacguacuauuccguuuguca

SEQ ID NO: 32397 - RNA, 23 nt, Artificial Sequence
  Synthetic
ugcacguacuauuccguuuguca

SEQ ID NO: 32398 - RNA, 24 nt, Artificial Sequence
  Synthetic
uugcacguacuauuccguuuguca

SEQ ID NO: 32399 - RNA, 18 nt, Artificial Sequence
  Synthetic
uauuuuacccuuuuguca

SEQ ID NO: 32400 - RNA, 19 nt, Artificial Sequence
  Synthetic
uuauuuuacccuuuuguca

SEQ ID NO: 32401 - RNA, 20 nt, Artificial Sequence
  Synthetic
cuuauuuuacccuuuuguca

SEQ ID NO: 32402 - RNA, 21 nt, Artificial Sequence
  Synthetic
ucuuauuuuacccuuuuguca

SEQ ID NO: 32403 - RNA, 22 nt, Artificial Sequence
  Synthetic
uucuuauuuuacccuuuuguca

SEQ ID NO: 32404 - RNA, 23 nt, Artificial Sequence
  Synthetic
cuucuuauuuuacccuuuuguca

SEQ ID NO: 32405 - RNA, 18 nt, Artificial Sequence
  Synthetic
aaugauuaagcaaauuca

SEQ ID NO: 32406 - RNA, 19 nt, Artificial Sequence
  Synthetic
aaaugauuaagcaaauuca

SEQ ID NO: 32407 - RNA, 20 nt, Artificial Sequence
  Synthetic
caaaugauuaagcaaauuca

SEQ ID NO: 32408 - RNA, 22 nt, Artificial Sequence
  Synthetic
agcaaaugauuaagcaaauuca

SEQ ID NO: 32409 - RNA, 23 nt, Artificial Sequence
  Synthetic
uagcaaaugauuaagcaaauuca

SEQ ID NO: 32410 - RNA, 19 nt, Artificial Sequence
  Synthetic
agaguuaauguuaaauuca

SEQ ID NO: 32411 - RNA, 20 nt, Artificial Sequence
  Synthetic
aagaguuaauguuaaauuca

SEQ ID NO: 32412 - RNA, 21 nt, Artificial Sequence
  Synthetic
uaagaguuaauguuaaauuca

SEQ ID NO: 32413 - RNA, 22 nt, Artificial Sequence
  Synthetic
uuaagaguuaauguuaaauuca

SEQ ID NO: 32414 - RNA, 23 nt, Artificial Sequence
  Synthetic
auuaagaguuaauguuaaauuca

SEQ ID NO: 32415 - RNA, 24 nt, Artificial Sequence
  Synthetic
cauuaagaguuaauguuaaauuca

SEQ ID NO: 32416 - RNA, 21 nt, Artificial Sequence
  Synthetic
aaaaauauauuuuccaauuca

SEQ ID NO: 32417 - RNA, 22 nt, Artificial Sequence
  Synthetic
caaaaauauauuuuccaauuca

SEQ ID NO: 32418 - RNA, 23 nt, Artificial Sequence
  Synthetic
ucaaaaauauauuuuccaauuca

SEQ ID NO: 32419 - RNA, 24 nt, Artificial Sequence
  Synthetic
aucaaaaauauauuuuccaauuca

SEQ ID NO: 32420 - RNA, 21 nt, Artificial Sequence
  Synthetic
caaauguguuauuuuaauuca

SEQ ID NO: 32421 - RNA, 24 nt, Artificial Sequence
  Synthetic
uggcaaauguguuauuuuaauuca

SEQ ID NO: 32422 - RNA, 18 nt, Artificial Sequence
  Synthetic
caagcauucauccauuca

SEQ ID NO: 32423 - RNA, 20 nt, Artificial Sequence
  Synthetic
agcaagcauucauccauuca

SEQ ID NO: 32424 - RNA, 23 nt, Artificial Sequence
  Synthetic
aggagcaagcauucauccauuca

SEQ ID NO: 32425 - RNA, 24 nt, Artificial Sequence
  Synthetic
caggagcaagcauucauccauuca

SEQ ID NO: 32426 - RNA, 18 nt, Artificial Sequence
  Synthetic
ucuaaaaccaagcauuca

SEQ ID NO: 32427 - RNA, 19 nt, Artificial Sequence
  Synthetic
aucuaaaaccaagcauuca

SEQ ID NO: 32428 - RNA, 20 nt, Artificial Sequence
  Synthetic
uaucuaaaaccaagcauuca

SEQ ID NO: 32429 - RNA, 21 nt, Artificial Sequence
  Synthetic
auaucuaaaaccaagcauuca

SEQ ID NO: 32430 - RNA, 22 nt, Artificial Sequence
  Synthetic
aauaucuaaaaccaagcauuca

SEQ ID NO: 32431 - RNA, 24 nt, Artificial Sequence
  Synthetic
agaauaucuaaaaccaagcauuca

SEQ ID NO: 32432 - RNA, 19 nt, Artificial Sequence
  Synthetic
uguuuggcucccucauuca

SEQ ID NO: 32433 - RNA, 20 nt, Artificial Sequence
  Synthetic
cuguuuggcucccucauuca

SEQ ID NO: 32434 - RNA, 21 nt, Artificial Sequence
  Synthetic
acuguuuggcucccucauuca

SEQ ID NO: 32435 - RNA, 22 nt, Artificial Sequence
  Synthetic
cacuguuuggcucccucauuca

SEQ ID NO: 32436 - RNA, 23 nt, Artificial Sequence
  Synthetic
ucacuguuuggcucccucauuca

SEQ ID NO: 32437 - RNA, 24 nt, Artificial Sequence
  Synthetic
aucacuguuuggcucccucauuca

SEQ ID NO: 32438 - RNA, 18 nt, Artificial Sequence
  Synthetic
cugcugcucccucauuca

SEQ ID NO: 32439 - RNA, 19 nt, Artificial Sequence
  Synthetic
ucugcugcucccucauuca

SEQ ID NO: 32440 - RNA, 20 nt, Artificial Sequence
  Synthetic
uucugcugcucccucauuca

SEQ ID NO: 32441 - RNA, 21 nt, Artificial Sequence
  Synthetic
auucugcugcucccucauuca

SEQ ID NO: 32442 - RNA, 23 nt, Artificial Sequence
  Synthetic
ugauucugcugcucccucauuca

SEQ ID NO: 32443 - RNA, 18 nt, Artificial Sequence
  Synthetic
caaacugaaagucauuca

SEQ ID NO: 32444 - RNA, 19 nt, Artificial Sequence
  Synthetic
ccaaacugaaagucauuca

SEQ ID NO: 32445 - RNA, 20 nt, Artificial Sequence
  Synthetic
accaaacugaaagucauuca

SEQ ID NO: 32446 - RNA, 21 nt, Artificial Sequence
  Synthetic
aaccaaacugaaagucauuca

SEQ ID NO: 32447 - RNA, 22 nt, Artificial Sequence
  Synthetic
aaaccaaacugaaagucauuca

SEQ ID NO: 32448 - RNA, 23 nt, Artificial Sequence
  Synthetic
uaaaccaaacugaaagucauuca

SEQ ID NO: 32449 - RNA, 24 nt, Artificial Sequence
  Synthetic
uuaaaccaaacugaaagucauuca

SEQ ID NO: 32450 - RNA, 18 nt, Artificial Sequence
  Synthetic
ugaucaguauuucauuca

SEQ ID NO: 32451 - RNA, 19 nt, Artificial Sequence
  Synthetic
augaucaguauuucauuca

SEQ ID NO: 32452 - RNA, 20 nt, Artificial Sequence
  Synthetic
caugaucaguauuucauuca

SEQ ID NO: 32453 - RNA, 22 nt, Artificial Sequence
  Synthetic
ugcaugaucaguauuucauuca

SEQ ID NO: 32454 - RNA, 23 nt, Artificial Sequence
  Synthetic
uugcaugaucaguauuucauuca

SEQ ID NO: 32455 - RNA, 24 nt, Artificial Sequence
  Synthetic
uuugcaugaucaguauuucauuca

SEQ ID NO: 32456 - RNA, 18 nt, Artificial Sequence
  Synthetic
uacuuuucucuagauuca

SEQ ID NO: 32457 - RNA, 19 nt, Artificial Sequence
  Synthetic
auacuuuucucuagauuca

SEQ ID NO: 32458 - RNA, 21 nt, Artificial Sequence
  Synthetic
agauacuuuucucuagauuca

SEQ ID NO: 32459 - RNA, 22 nt, Artificial Sequence
  Synthetic
cagauacuuuucucuagauuca

SEQ ID NO: 32460 - RNA, 24 nt, Artificial Sequence
  Synthetic
agcagauacuuuucucuagauuca

SEQ ID NO: 32461 - RNA, 18 nt, Artificial Sequence
  Synthetic
uugaccaauccauauuca

SEQ ID NO: 32462 - RNA, 19 nt, Artificial Sequence
  Synthetic
cuugaccaauccauauuca

SEQ ID NO: 32463 - RNA, 20 nt, Artificial Sequence
  Synthetic
acuugaccaauccauauuca

SEQ ID NO: 32464 - RNA, 22 nt, Artificial Sequence
  Synthetic
ugacuugaccaauccauauuca

SEQ ID NO: 32465 - RNA, 24 nt, Artificial Sequence
  Synthetic
agugacuugaccaauccauauuca

SEQ ID NO: 32466 - RNA, 18 nt, Artificial Sequence
  Synthetic
ccacaaaaauacuauuca

SEQ ID NO: 32467 - RNA, 19 nt, Artificial Sequence
  Synthetic
uccacaaaaauacuauuca

SEQ ID NO: 32468 - RNA, 20 nt, Artificial Sequence
  Synthetic
uuccacaaaaauacuauuca

SEQ ID NO: 32469 - RNA, 21 nt, Artificial Sequence
  Synthetic
cuuccacaaaaauacuauuca

SEQ ID NO: 32470 - RNA, 22 nt, Artificial Sequence
  Synthetic
acuuccacaaaaauacuauuca

SEQ ID NO: 32471 - RNA, 23 nt, Artificial Sequence
  Synthetic
uacuuccacaaaaauacuauuca

SEQ ID NO: 32472 - RNA, 24 nt, Artificial Sequence
  Synthetic
cuacuuccacaaaaauacuauuca

SEQ ID NO: 32473 - RNA, 18 nt, Artificial Sequence
  Synthetic
uaacucuaaggguauuca

SEQ ID NO: 32474 - RNA, 19 nt, Artificial Sequence
  Synthetic
auaacucuaaggguauuca

SEQ ID NO: 32475 - RNA, 20 nt, Artificial Sequence
  Synthetic
aauaacucuaaggguauuca

SEQ ID NO: 32476 - RNA, 21 nt, Artificial Sequence
  Synthetic
uaauaacucuaaggguauuca

SEQ ID NO: 32477 - RNA, 22 nt, Artificial Sequence
  Synthetic
uuaauaacucuaaggguauuca

SEQ ID NO: 32478 - RNA, 24 nt, Artificial Sequence
  Synthetic
uguuaauaacucuaaggguauuca

SEQ ID NO: 32479 - RNA, 21 nt, Artificial Sequence
  Synthetic
uuauuuaaaaauaauuauuca

SEQ ID NO: 32480 - RNA, 22 nt, Artificial Sequence
  Synthetic
cuuauuuaaaaauaauuauuca

SEQ ID NO: 32481 - RNA, 23 nt, Artificial Sequence
  Synthetic
ccuuauuuaaaaauaauuauuca

SEQ ID NO: 32482 - RNA, 24 nt, Artificial Sequence
  Synthetic
cccuuauuuaaaaauaauuauuca

SEQ ID NO: 32483 - RNA, 18 nt, Artificial Sequence
  Synthetic
uuauaaaguauuuauuca

SEQ ID NO: 32484 - RNA, 19 nt, Artificial Sequence
  Synthetic
cuuauaaaguauuuauuca

SEQ ID NO: 32485 - RNA, 20 nt, Artificial Sequence
  Synthetic
ucuuauaaaguauuuauuca

SEQ ID NO: 32486 - RNA, 21 nt, Artificial Sequence
  Synthetic
aucuuauaaaguauuuauuca

SEQ ID NO: 32487 - RNA, 22 nt, Artificial Sequence
  Synthetic
caucuuauaaaguauuuauuca

SEQ ID NO: 32488 - RNA, 24 nt, Artificial Sequence
  Synthetic
ugcaucuuauaaaguauuuauuca

SEQ ID NO: 32489 - RNA, 21 nt, Artificial Sequence
  Synthetic
cuaauauuuccuaaaacuuca

SEQ ID NO: 32490 - RNA, 22 nt, Artificial Sequence
  Synthetic
ccuaauauuuccuaaaacuuca

SEQ ID NO: 32491 - RNA, 23 nt, Artificial Sequence
  Synthetic
uccuaauauuuccuaaaacuuca

SEQ ID NO: 32492 - RNA, 24 nt, Artificial Sequence
  Synthetic
uuccuaauauuuccuaaaacuuca

SEQ ID NO: 32493 - RNA, 21 nt, Artificial Sequence
  Synthetic
cuuucauauuuguaaacuuca

SEQ ID NO: 32494 - RNA, 22 nt, Artificial Sequence
  Synthetic
ccuuucauauuuguaaacuuca

SEQ ID NO: 32495 - RNA, 24 nt, Artificial Sequence
  Synthetic
ugccuuucauauuuguaaacuuca

SEQ ID NO: 32496 - RNA, 18 nt, Artificial Sequence
  Synthetic
aagcauccucucacuuca

SEQ ID NO: 32497 - RNA, 19 nt, Artificial Sequence
  Synthetic
aaagcauccucucacuuca

SEQ ID NO: 32498 - RNA, 20 nt, Artificial Sequence
  Synthetic
aaaagcauccucucacuuca

SEQ ID NO: 32499 - RNA, 21 nt, Artificial Sequence
  Synthetic
aaaaagcauccucucacuuca

SEQ ID NO: 32500 - RNA, 24 nt, Artificial Sequence
  Synthetic
aggaaaaagcauccucucacuuca

SEQ ID NO: 32501 - RNA, 21 nt, Artificial Sequence
  Synthetic
uagaaaauguuauguacuuca

SEQ ID NO: 32502 - RNA, 22 nt, Artificial Sequence
  Synthetic
uuagaaaauguuauguacuuca

SEQ ID NO: 32503 - RNA, 23 nt, Artificial Sequence
  Synthetic
uuuagaaaauguuauguacuuca

SEQ ID NO: 32504 - RNA, 24 nt, Artificial Sequence
  Synthetic
uuuuagaaaauguuauguacuuca

SEQ ID NO: 32505 - RNA, 18 nt, Artificial Sequence
  Synthetic
aagcacguauggccuuca

SEQ ID NO: 32506 - RNA, 20 nt, Artificial Sequence
  Synthetic
ugaagcacguauggccuuca

SEQ ID NO: 32507 - RNA, 21 nt, Artificial Sequence
  Synthetic
augaagcacguauggccuuca

SEQ ID NO: 32508 - RNA, 22 nt, Artificial Sequence
  Synthetic
caugaagcacguauggccuuca

SEQ ID NO: 32509 - RNA, 23 nt, Artificial Sequence
  Synthetic
ucaugaagcacguauggccuuca

SEQ ID NO: 32510 - RNA, 24 nt, Artificial Sequence
  Synthetic
uucaugaagcacguauggccuuca

SEQ ID NO: 32511 - RNA, 18 nt, Artificial Sequence
  Synthetic
ucugaucauaauccuuca

SEQ ID NO: 32512 - RNA, 19 nt, Artificial Sequence
  Synthetic
aucugaucauaauccuuca

SEQ ID NO: 32513 - RNA, 20 nt, Artificial Sequence
  Synthetic
aaucugaucauaauccuuca

SEQ ID NO: 32514 - RNA, 21 nt, Artificial Sequence
  Synthetic
aaaucugaucauaauccuuca

SEQ ID NO: 32515 - RNA, 22 nt, Artificial Sequence
  Synthetic
uaaaucugaucauaauccuuca

SEQ ID NO: 32516 - RNA, 23 nt, Artificial Sequence
  Synthetic
uuaaaucugaucauaauccuuca

SEQ ID NO: 32517 - RNA, 24 nt, Artificial Sequence
  Synthetic
uuuaaaucugaucauaauccuuca

SEQ ID NO: 32518 - RNA, 18 nt, Artificial Sequence
  Synthetic
aaccagugcuauccuuca

SEQ ID NO: 32519 - RNA, 19 nt, Artificial Sequence
  Synthetic
uaaccagugcuauccuuca

SEQ ID NO: 32520 - RNA, 20 nt, Artificial Sequence
  Synthetic
auaaccagugcuauccuuca

SEQ ID NO: 32521 - RNA, 21 nt, Artificial Sequence
  Synthetic
cauaaccagugcuauccuuca

SEQ ID NO: 32522 - RNA, 22 nt, Artificial Sequence
  Synthetic
ucauaaccagugcuauccuuca

SEQ ID NO: 32523 - RNA, 23 nt, Artificial Sequence
  Synthetic
cucauaaccagugcuauccuuca

SEQ ID NO: 32524 - RNA, 24 nt, Artificial Sequence
  Synthetic
ucucauaaccagugcuauccuuca

SEQ ID NO: 32525 - RNA, 18 nt, Artificial Sequence
  Synthetic
agacugaggauuccuuca

SEQ ID NO: 32526 - RNA, 19 nt, Artificial Sequence
  Synthetic
cagacugaggauuccuuca

SEQ ID NO: 32527 - RNA, 20 nt, Artificial Sequence
  Synthetic
acagacugaggauuccuuca

SEQ ID NO: 32528 - RNA, 21 nt, Artificial Sequence
  Synthetic
uacagacugaggauuccuuca

SEQ ID NO: 32529 - RNA, 22 nt, Artificial Sequence
  Synthetic
auacagacugaggauuccuuca

SEQ ID NO: 32530 - RNA, 23 nt, Artificial Sequence
  Synthetic
uauacagacugaggauuccuuca

SEQ ID NO: 32531 - RNA, 18 nt, Artificial Sequence
  Synthetic
uuuaaggaggcugcuuca

SEQ ID NO: 32532 - RNA, 19 nt, Artificial Sequence
  Synthetic
uuuuaaggaggcugcuuca

SEQ ID NO: 32533 - RNA, 20 nt, Artificial Sequence
  Synthetic
uuuuuaaggaggcugcuuca

SEQ ID NO: 32534 - RNA, 21 nt, Artificial Sequence
  Synthetic
auuuuuaaggaggcugcuuca

SEQ ID NO: 32535 - RNA, 23 nt, Artificial Sequence
  Synthetic
agauuuuuaaggaggcugcuuca

SEQ ID NO: 32536 - RNA, 24 nt, Artificial Sequence
  Synthetic
uagauuuuuaaggaggcugcuuca

SEQ ID NO: 32537 - RNA, 18 nt, Artificial Sequence
  Synthetic
acagauuagacaucuuca

SEQ ID NO: 32538 - RNA, 19 nt, Artificial Sequence
  Synthetic
aacagauuagacaucuuca

SEQ ID NO: 32539 - RNA, 20 nt, Artificial Sequence
  Synthetic
aaacagauuagacaucuuca

SEQ ID NO: 32540 - RNA, 21 nt, Artificial Sequence
  Synthetic
uaaacagauuagacaucuuca

SEQ ID NO: 32541 - RNA, 22 nt, Artificial Sequence
  Synthetic
uuaaacagauuagacaucuuca

SEQ ID NO: 32542 - RNA, 23 nt, Artificial Sequence
  Synthetic
cuuaaacagauuagacaucuuca

SEQ ID NO: 32543 - RNA, 24 nt, Artificial Sequence
  Synthetic
ucuuaaacagauuagacaucuuca

SEQ ID NO: 32544 - RNA, 18 nt, Artificial Sequence
  Synthetic
uuaucuuuaguaucuuca

SEQ ID NO: 32545 - RNA, 19 nt, Artificial Sequence
  Synthetic
auuaucuuuaguaucuuca

SEQ ID NO: 32546 - RNA, 20 nt, Artificial Sequence
  Synthetic
uauuaucuuuaguaucuuca

SEQ ID NO: 32547 - RNA, 21 nt, Artificial Sequence
  Synthetic
uuauuaucuuuaguaucuuca

SEQ ID NO: 32548 - RNA, 22 nt, Artificial Sequence
  Synthetic
uuuauuaucuuuaguaucuuca

SEQ ID NO: 32549 - RNA, 23 nt, Artificial Sequence
  Synthetic
uuuuauuaucuuuaguaucuuca

SEQ ID NO: 32550 - RNA, 24 nt, Artificial Sequence
  Synthetic
auuuuauuaucuuuaguaucuuca

SEQ ID NO: 32551 - RNA, 18 nt, Artificial Sequence
  Synthetic
uuuuguguauggucuuca

SEQ ID NO: 32552 - RNA, 19 nt, Artificial Sequence
  Synthetic
auuuuguguauggucuuca

SEQ ID NO: 32553 - RNA, 20 nt, Artificial Sequence
  Synthetic
cauuuuguguauggucuuca

SEQ ID NO: 32554 - RNA, 21 nt, Artificial Sequence
  Synthetic
ucauuuuguguauggucuuca

SEQ ID NO: 32555 - RNA, 22 nt, Artificial Sequence
  Synthetic
aucauuuuguguauggucuuca

SEQ ID NO: 32556 - RNA, 23 nt, Artificial Sequence
  Synthetic
aaucauuuuguguauggucuuca

SEQ ID NO: 32557 - RNA, 24 nt, Artificial Sequence
  Synthetic
aaaucauuuuguguauggucuuca

SEQ ID NO: 32558 - RNA, 18 nt, Artificial Sequence
  Synthetic
aacucaucagcuucuuca

SEQ ID NO: 32559 - RNA, 20 nt, Artificial Sequence
  Synthetic
ugaacucaucagcuucuuca

SEQ ID NO: 32560 - RNA, 21 nt, Artificial Sequence
  Synthetic
augaacucaucagcuucuuca

SEQ ID NO: 32561 - RNA, 22 nt, Artificial Sequence
  Synthetic
caugaacucaucagcuucuuca

SEQ ID NO: 32562 - RNA, 23 nt, Artificial Sequence
  Synthetic
ucaugaacucaucagcuucuuca

SEQ ID NO: 32563 - RNA, 24 nt, Artificial Sequence
  Synthetic
uucaugaacucaucagcuucuuca

SEQ ID NO: 32564 - RNA, 18 nt, Artificial Sequence
  Synthetic
ccugaucugcuuucuuca

SEQ ID NO: 32565 - RNA, 19 nt, Artificial Sequence
  Synthetic
accugaucugcuuucuuca

SEQ ID NO: 32566 - RNA, 20 nt, Artificial Sequence
  Synthetic
uaccugaucugcuuucuuca

SEQ ID NO: 32567 - RNA, 21 nt, Artificial Sequence
  Synthetic
auaccugaucugcuuucuuca

SEQ ID NO: 32568 - RNA, 23 nt, Artificial Sequence
  Synthetic
agauaccugaucugcuuucuuca

SEQ ID NO: 32569 - RNA, 18 nt, Artificial Sequence
  Synthetic
auuucucaagaaaguuca

SEQ ID NO: 32570 - RNA, 19 nt, Artificial Sequence
  Synthetic
uauuucucaagaaaguuca

SEQ ID NO: 32571 - RNA, 20 nt, Artificial Sequence
  Synthetic
cuauuucucaagaaaguuca

SEQ ID NO: 32572 - RNA, 21 nt, Artificial Sequence
  Synthetic
ucuauuucucaagaaaguuca

SEQ ID NO: 32573 - RNA, 22 nt, Artificial Sequence
  Synthetic
uucuauuucucaagaaaguuca

SEQ ID NO: 32574 - RNA, 23 nt, Artificial Sequence
  Synthetic
uuucuauuucucaagaaaguuca

SEQ ID NO: 32575 - RNA, 24 nt, Artificial Sequence
  Synthetic
auuucuauuucucaagaaaguuca

SEQ ID NO: 32576 - RNA, 18 nt, Artificial Sequence
  Synthetic
aaaaggcggacaaguuca

SEQ ID NO: 32577 - RNA, 19 nt, Artificial Sequence
  Synthetic
caaaaggcggacaaguuca

SEQ ID NO: 32578 - RNA, 20 nt, Artificial Sequence
  Synthetic
ccaaaaggcggacaaguuca

SEQ ID NO: 32579 - RNA, 21 nt, Artificial Sequence
  Synthetic
uccaaaaggcggacaaguuca

SEQ ID NO: 32580 - RNA, 22 nt, Artificial Sequence
  Synthetic
auccaaaaggcggacaaguuca

SEQ ID NO: 32581 - RNA, 23 nt, Artificial Sequence
  Synthetic
uauccaaaaggcggacaaguuca

SEQ ID NO: 32582 - RNA, 24 nt, Artificial Sequence
  Synthetic
auauccaaaaggcggacaaguuca

SEQ ID NO: 32583 - RNA, 18 nt, Artificial Sequence
  Synthetic
uuccaggacucuaguuca

SEQ ID NO: 32584 - RNA, 19 nt, Artificial Sequence
  Synthetic
uuuccaggacucuaguuca

SEQ ID NO: 32585 - RNA, 22 nt, Artificial Sequence
  Synthetic
agguuuccaggacucuaguuca

SEQ ID NO: 32586 - RNA, 23 nt, Artificial Sequence
  Synthetic
aagguuuccaggacucuaguuca

SEQ ID NO: 32587 - RNA, 24 nt, Artificial Sequence
  Synthetic
aaagguuuccaggacucuaguuca

SEQ ID NO: 32588 - RNA, 21 nt, Artificial Sequence
  Synthetic
agggccucagcugaccguuca

SEQ ID NO: 32589 - RNA, 22 nt, Artificial Sequence
  Synthetic
aagggccucagcugaccguuca

SEQ ID NO: 32590 - RNA, 23 nt, Artificial Sequence
  Synthetic
uaagggccucagcugaccguuca

SEQ ID NO: 32591 - RNA, 18 nt, Artificial Sequence
  Synthetic
cccagucagauucguuca

SEQ ID NO: 32592 - RNA, 19 nt, Artificial Sequence
  Synthetic
ccccagucagauucguuca

SEQ ID NO: 32593 - RNA, 21 nt, Artificial Sequence
  Synthetic
ugccccagucagauucguuca

SEQ ID NO: 32594 - RNA, 24 nt, Artificial Sequence
  Synthetic
uggugccccagucagauucguuca

SEQ ID NO: 32595 - RNA, 18 nt, Artificial Sequence
  Synthetic
aggaguuauuuagguuca

SEQ ID NO: 32596 - RNA, 19 nt, Artificial Sequence
  Synthetic
uaggaguuauuuagguuca

SEQ ID NO: 32597 - RNA, 20 nt, Artificial Sequence
  Synthetic
uuaggaguuauuuagguuca

SEQ ID NO: 32598 - RNA, 22 nt, Artificial Sequence
  Synthetic
uguuaggaguuauuuagguuca

SEQ ID NO: 32599 - RNA, 23 nt, Artificial Sequence
  Synthetic
uuguuaggaguuauuuagguuca

SEQ ID NO: 32600 - RNA, 24 nt, Artificial Sequence
  Synthetic
auuguuaggaguuauuuagguuca

SEQ ID NO: 32601 - RNA, 18 nt, Artificial Sequence
  Synthetic
uuucaagguuuugguuca

SEQ ID NO: 32602 - RNA, 19 nt, Artificial Sequence
  Synthetic
uuuucaagguuuugguuca

SEQ ID NO: 32603 - RNA, 21 nt, Artificial Sequence
  Synthetic
uguuuucaagguuuugguuca

SEQ ID NO: 32604 - RNA, 22 nt, Artificial Sequence
  Synthetic
cuguuuucaagguuuugguuca

SEQ ID NO: 32605 - RNA, 24 nt, Artificial Sequence
  Synthetic
ugcuguuuucaagguuuugguuca

SEQ ID NO: 32606 - RNA, 21 nt, Artificial Sequence
  Synthetic
uuggaaugcaauaaauguuca

SEQ ID NO: 32607 - RNA, 23 nt, Artificial Sequence
  Synthetic
aguuggaaugcaauaaauguuca

SEQ ID NO: 32608 - RNA, 24 nt, Artificial Sequence
  Synthetic
aaguuggaaugcaauaaauguuca

SEQ ID NO: 32609 - RNA, 18 nt, Artificial Sequence
  Synthetic
uaaguagaggcauguuca

SEQ ID NO: 32610 - RNA, 19 nt, Artificial Sequence
  Synthetic
uuaaguagaggcauguuca

SEQ ID NO: 32611 - RNA, 22 nt, Artificial Sequence
  Synthetic
ugguuaaguagaggcauguuca

SEQ ID NO: 32612 - RNA, 23 nt, Artificial Sequence
  Synthetic
augguuaaguagaggcauguuca

SEQ ID NO: 32613 - RNA, 24 nt, Artificial Sequence
  Synthetic
aaugguuaaguagaggcauguuca

SEQ ID NO: 32614 - RNA, 18 nt, Artificial Sequence
  Synthetic
ugagugucauuauguuca

SEQ ID NO: 32615 - RNA, 19 nt, Artificial Sequence
  Synthetic
uugagugucauuauguuca

SEQ ID NO: 32616 - RNA, 20 nt, Artificial Sequence
  Synthetic
cuugagugucauuauguuca

SEQ ID NO: 32617 - RNA, 21 nt, Artificial Sequence
  Synthetic
ccuugagugucauuauguuca

SEQ ID NO: 32618 - RNA, 24 nt, Artificial Sequence
  Synthetic
uggccuugagugucauuauguuca

SEQ ID NO: 32619 - RNA, 19 nt, Artificial Sequence
  Synthetic
agauaauuuuaucuguuca

SEQ ID NO: 32620 - RNA, 20 nt, Artificial Sequence
  Synthetic
aagauaauuuuaucuguuca

SEQ ID NO: 32621 - RNA, 21 nt, Artificial Sequence
  Synthetic
aaagauaauuuuaucuguuca

SEQ ID NO: 32622 - RNA, 22 nt, Artificial Sequence
  Synthetic
caaagauaauuuuaucuguuca

SEQ ID NO: 32623 - RNA, 23 nt, Artificial Sequence
  Synthetic
acaaagauaauuuuaucuguuca

SEQ ID NO: 32624 - RNA, 24 nt, Artificial Sequence
  Synthetic
aacaaagauaauuuuaucuguuca

SEQ ID NO: 32625 - RNA, 18 nt, Artificial Sequence
  Synthetic
auauauaugacguguuca

SEQ ID NO: 32626 - RNA, 19 nt, Artificial Sequence
  Synthetic
aauauauaugacguguuca

SEQ ID NO: 32627 - RNA, 20 nt, Artificial Sequence
  Synthetic
uaauauauaugacguguuca

SEQ ID NO: 32628 - RNA, 21 nt, Artificial Sequence
  Synthetic
auaauauauaugacguguuca

SEQ ID NO: 32629 - RNA, 22 nt, Artificial Sequence
  Synthetic
aauaauauauaugacguguuca

SEQ ID NO: 32630 - RNA, 23 nt, Artificial Sequence
  Synthetic
caauaauauauaugacguguuca

SEQ ID NO: 32631 - RNA, 24 nt, Artificial Sequence
  Synthetic
ucaauaauauauaugacguguuca

SEQ ID NO: 32632 - RNA, 18 nt, Artificial Sequence
  Synthetic
aacucuucaugaauuuca

SEQ ID NO: 32633 - RNA, 19 nt, Artificial Sequence
  Synthetic
aaacucuucaugaauuuca

SEQ ID NO: 32634 - RNA, 20 nt, Artificial Sequence
  Synthetic
aaaacucuucaugaauuuca

SEQ ID NO: 32635 - RNA, 21 nt, Artificial Sequence
  Synthetic
caaaacucuucaugaauuuca

SEQ ID NO: 32636 - RNA, 22 nt, Artificial Sequence
  Synthetic
ccaaaacucuucaugaauuuca

SEQ ID NO: 32637 - RNA, 23 nt, Artificial Sequence
  Synthetic
uccaaaacucuucaugaauuuca

SEQ ID NO: 32638 - RNA, 24 nt, Artificial Sequence
  Synthetic
auccaaaacucuucaugaauuuca

SEQ ID NO: 32639 - RNA, 18 nt, Artificial Sequence
  Synthetic
uauagagaaauaauuuca

SEQ ID NO: 32640 - RNA, 20 nt, Artificial Sequence
  Synthetic
aguauagagaaauaauuuca

SEQ ID NO: 32641 - RNA, 21 nt, Artificial Sequence
  Synthetic
uaguauagagaaauaauuuca

SEQ ID NO: 32642 - RNA, 23 nt, Artificial Sequence
  Synthetic
uguaguauagagaaauaauuuca

SEQ ID NO: 32643 - RNA, 24 nt, Artificial Sequence
  Synthetic
uuguaguauagagaaauaauuuca

SEQ ID NO: 32644 - RNA, 18 nt, Artificial Sequence
  Synthetic
aaagccaauuuaauuuca

SEQ ID NO: 32645 - RNA, 19 nt, Artificial Sequence
  Synthetic
uaaagccaauuuaauuuca

SEQ ID NO: 32646 - RNA, 20 nt, Artificial Sequence
  Synthetic
uuaaagccaauuuaauuuca

SEQ ID NO: 32647 - RNA, 21 nt, Artificial Sequence
  Synthetic
cuuaaagccaauuuaauuuca

SEQ ID NO: 32648 - RNA, 22 nt, Artificial Sequence
  Synthetic
acuuaaagccaauuuaauuuca

SEQ ID NO: 32649 - RNA, 23 nt, Artificial Sequence
  Synthetic
aacuuaaagccaauuuaauuuca

SEQ ID NO: 32650 - RNA, 24 nt, Artificial Sequence
  Synthetic
caacuuaaagccaauuuaauuuca

SEQ ID NO: 32651 - RNA, 18 nt, Artificial Sequence
  Synthetic
uuccgagaccccauuuca

SEQ ID NO: 32652 - RNA, 19 nt, Artificial Sequence
  Synthetic
cuuccgagaccccauuuca

SEQ ID NO: 32653 - RNA, 20 nt, Artificial Sequence
  Synthetic
ccuuccgagaccccauuuca

SEQ ID NO: 32654 - RNA, 22 nt, Artificial Sequence
  Synthetic
cgccuuccgagaccccauuuca

SEQ ID NO: 32655 - RNA, 23 nt, Artificial Sequence
  Synthetic
ccgccuuccgagaccccauuuca

SEQ ID NO: 32656 - RNA, 24 nt, Artificial Sequence
  Synthetic
cccgccuuccgagaccccauuuca

SEQ ID NO: 32657 - RNA, 19 nt, Artificial Sequence
  Synthetic
aggcuauauuaagauuuca

SEQ ID NO: 32658 - RNA, 20 nt, Artificial Sequence
  Synthetic
uaggcuauauuaagauuuca

SEQ ID NO: 32659 - RNA, 22 nt, Artificial Sequence
  Synthetic
cguaggcuauauuaagauuuca

SEQ ID NO: 32660 - RNA, 23 nt, Artificial Sequence
  Synthetic
acguaggcuauauuaagauuuca

SEQ ID NO: 32661 - RNA, 24 nt, Artificial Sequence
  Synthetic
cacguaggcuauauuaagauuuca

SEQ ID NO: 32662 - RNA, 18 nt, Artificial Sequence
  Synthetic
aguaaccugaugauuuca

SEQ ID NO: 32663 - RNA, 19 nt, Artificial Sequence
  Synthetic
aaguaaccugaugauuuca

SEQ ID NO: 32664 - RNA, 20 nt, Artificial Sequence
  Synthetic
caaguaaccugaugauuuca

SEQ ID NO: 32665 - RNA, 21 nt, Artificial Sequence
  Synthetic
acaaguaaccugaugauuuca

SEQ ID NO: 32666 - RNA, 23 nt, Artificial Sequence
  Synthetic
ugacaaguaaccugaugauuuca

SEQ ID NO: 32667 - RNA, 24 nt, Artificial Sequence
  Synthetic
cugacaaguaaccugaugauuuca

SEQ ID NO: 32668 - RNA, 19 nt, Artificial Sequence
  Synthetic
ugauaagcuagauauuuca

SEQ ID NO: 32669 - RNA, 20 nt, Artificial Sequence
  Synthetic
cugauaagcuagauauuuca

SEQ ID NO: 32670 - RNA, 21 nt, Artificial Sequence
  Synthetic
acugauaagcuagauauuuca

SEQ ID NO: 32671 - RNA, 23 nt, Artificial Sequence
  Synthetic
agacugauaagcuagauauuuca

SEQ ID NO: 32672 - RNA, 24 nt, Artificial Sequence
  Synthetic
cagacugauaagcuagauauuuca

SEQ ID NO: 32673 - RNA, 18 nt, Artificial Sequence
  Synthetic
uaaagaaggccuauuuca

SEQ ID NO: 32674 - RNA, 19 nt, Artificial Sequence
  Synthetic
auaaagaaggccuauuuca

SEQ ID NO: 32675 - RNA, 24 nt, Artificial Sequence
  Synthetic
aggggauaaagaaggccuauuuca

SEQ ID NO: 32676 - RNA, 19 nt, Artificial Sequence
  Synthetic
uguuuaacuuccuauuuca

SEQ ID NO: 32677 - RNA, 20 nt, Artificial Sequence
  Synthetic
cuguuuaacuuccuauuuca

SEQ ID NO: 32678 - RNA, 21 nt, Artificial Sequence
  Synthetic
acuguuuaacuuccuauuuca

SEQ ID NO: 32679 - RNA, 22 nt, Artificial Sequence
  Synthetic
cacuguuuaacuuccuauuuca

SEQ ID NO: 32680 - RNA, 23 nt, Artificial Sequence
  Synthetic
ucacuguuuaacuuccuauuuca

SEQ ID NO: 32681 - RNA, 24 nt, Artificial Sequence
  Synthetic
uucacuguuuaacuuccuauuuca

SEQ ID NO: 32682 - RNA, 21 nt, Artificial Sequence
  Synthetic
uauuuauuuaaaucuauuuca

SEQ ID NO: 32683 - RNA, 22 nt, Artificial Sequence
  Synthetic
uuauuuauuuaaaucuauuuca

SEQ ID NO: 32684 - RNA, 24 nt, Artificial Sequence
  Synthetic
uguuauuuauuuaaaucuauuuca

SEQ ID NO: 32685 - RNA, 18 nt, Artificial Sequence
  Synthetic
acauuuauauaacuuuca

SEQ ID NO: 32686 - RNA, 19 nt, Artificial Sequence
  Synthetic
cacauuuauauaacuuuca

SEQ ID NO: 32687 - RNA, 20 nt, Artificial Sequence
  Synthetic
ucacauuuauauaacuuuca

SEQ ID NO: 32688 - RNA, 21 nt, Artificial Sequence
  Synthetic
aucacauuuauauaacuuuca

SEQ ID NO: 32689 - RNA, 22 nt, Artificial Sequence
  Synthetic
uaucacauuuauauaacuuuca

SEQ ID NO: 32690 - RNA, 23 nt, Artificial Sequence
  Synthetic
uuaucacauuuauauaacuuuca

SEQ ID NO: 32691 - RNA, 24 nt, Artificial Sequence
  Synthetic
uuuaucacauuuauauaacuuuca

SEQ ID NO: 32692 - RNA, 18 nt, Artificial Sequence
  Synthetic
ccugcuuuaaaccuuuca

SEQ ID NO: 32693 - RNA, 19 nt, Artificial Sequence
  Synthetic
cccugcuuuaaaccuuuca

SEQ ID NO: 32694 - RNA, 20 nt, Artificial Sequence
  Synthetic
ucccugcuuuaaaccuuuca

SEQ ID NO: 32695 - RNA, 21 nt, Artificial Sequence
  Synthetic
uucccugcuuuaaaccuuuca

SEQ ID NO: 32696 - RNA, 22 nt, Artificial Sequence
  Synthetic
cuucccugcuuuaaaccuuuca

SEQ ID NO: 32697 - RNA, 23 nt, Artificial Sequence
  Synthetic
acuucccugcuuuaaaccuuuca

SEQ ID NO: 32698 - RNA, 24 nt, Artificial Sequence
  Synthetic
cacuucccugcuuuaaaccuuuca

SEQ ID NO: 32699 - RNA, 18 nt, Artificial Sequence
  Synthetic
cuucuuuucucccuuuca

SEQ ID NO: 32700 - RNA, 19 nt, Artificial Sequence
  Synthetic
ucuucuuuucucccuuuca

SEQ ID NO: 32701 - RNA, 20 nt, Artificial Sequence
  Synthetic
aucuucuuuucucccuuuca

SEQ ID NO: 32702 - RNA, 22 nt, Artificial Sequence
  Synthetic
ugaucuucuuuucucccuuuca

SEQ ID NO: 32703 - RNA, 23 nt, Artificial Sequence
  Synthetic
uugaucuucuuuucucccuuuca

SEQ ID NO: 32704 - RNA, 24 nt, Artificial Sequence
  Synthetic
auugaucuucuuuucucccuuuca

SEQ ID NO: 32705 - RNA, 18 nt, Artificial Sequence
  Synthetic
cguauauuguggcuuuca

SEQ ID NO: 32706 - RNA, 19 nt, Artificial Sequence
  Synthetic
ccguauauuguggcuuuca

SEQ ID NO: 32707 - RNA, 20 nt, Artificial Sequence
  Synthetic
cccguauauuguggcuuuca

SEQ ID NO: 32708 - RNA, 22 nt, Artificial Sequence
  Synthetic
ugcccguauauuguggcuuuca

SEQ ID NO: 32709 - RNA, 23 nt, Artificial Sequence
  Synthetic
cugcccguauauuguggcuuuca

SEQ ID NO: 32710 - RNA, 24 nt, Artificial Sequence
  Synthetic
ucugcccguauauuguggcuuuca

SEQ ID NO: 32711 - RNA, 21 nt, Artificial Sequence
  Synthetic
ucuuuuaaguuuuuucuuuca

SEQ ID NO: 32712 - RNA, 22 nt, Artificial Sequence
  Synthetic
uucuuuuaaguuuuuucuuuca

SEQ ID NO: 32713 - RNA, 23 nt, Artificial Sequence
  Synthetic
uuucuuuuaaguuuuuucuuuca

SEQ ID NO: 32714 - RNA, 24 nt, Artificial Sequence
  Synthetic
uuuucuuuuaaguuuuuucuuuca

SEQ ID NO: 32715 - RNA, 18 nt, Artificial Sequence
  Synthetic
uuuguuagccauguuuca

SEQ ID NO: 32716 - RNA, 19 nt, Artificial Sequence
  Synthetic
cuuuguuagccauguuuca

SEQ ID NO: 32717 - RNA, 20 nt, Artificial Sequence
  Synthetic
ucuuuguuagccauguuuca

SEQ ID NO: 32718 - RNA, 21 nt, Artificial Sequence
  Synthetic
uucuuuguuagccauguuuca

SEQ ID NO: 32719 - RNA, 22 nt, Artificial Sequence
  Synthetic
cuucuuuguuagccauguuuca

SEQ ID NO: 32720 - RNA, 23 nt, Artificial Sequence
  Synthetic
ucuucuuuguuagccauguuuca

SEQ ID NO: 32721 - RNA, 24 nt, Artificial Sequence
  Synthetic
uucuucuuuguuagccauguuuca

SEQ ID NO: 32722 - RNA, 21 nt, Artificial Sequence
  Synthetic
auugguagauugcauguuuca

SEQ ID NO: 32723 - RNA, 22 nt, Artificial Sequence
  Synthetic
uauugguagauugcauguuuca

SEQ ID NO: 32724 - RNA, 23 nt, Artificial Sequence
  Synthetic
auauugguagauugcauguuuca

SEQ ID NO: 32725 - RNA, 24 nt, Artificial Sequence
  Synthetic
aauauugguagauugcauguuuca

SEQ ID NO: 32726 - RNA, 18 nt, Artificial Sequence
  Synthetic
uaggaaaaauauguuuca

SEQ ID NO: 32727 - RNA, 19 nt, Artificial Sequence
  Synthetic
uuaggaaaaauauguuuca

SEQ ID NO: 32728 - RNA, 20 nt, Artificial Sequence
  Synthetic
auuaggaaaaauauguuuca

SEQ ID NO: 32729 - RNA, 21 nt, Artificial Sequence
  Synthetic
aauuaggaaaaauauguuuca

SEQ ID NO: 32730 - RNA, 23 nt, Artificial Sequence
  Synthetic
agaauuaggaaaaauauguuuca

SEQ ID NO: 32731 - RNA, 24 nt, Artificial Sequence
  Synthetic
aagaauuaggaaaaauauguuuca

SEQ ID NO: 32732 - RNA, 18 nt, Artificial Sequence
  Synthetic
uaaggaaauacuguuuca

SEQ ID NO: 32733 - RNA, 19 nt, Artificial Sequence
  Synthetic
uuaaggaaauacuguuuca

SEQ ID NO: 32734 - RNA, 20 nt, Artificial Sequence
  Synthetic
uuuaaggaaauacuguuuca

SEQ ID NO: 32735 - RNA, 21 nt, Artificial Sequence
  Synthetic
auuuaaggaaauacuguuuca

SEQ ID NO: 32736 - RNA, 22 nt, Artificial Sequence
  Synthetic
cauuuaaggaaauacuguuuca

SEQ ID NO: 32737 - RNA, 23 nt, Artificial Sequence
  Synthetic
acauuuaaggaaauacuguuuca

SEQ ID NO: 32738 - RNA, 24 nt, Artificial Sequence
  Synthetic
cacauuuaaggaaauacuguuuca

SEQ ID NO: 32739 - RNA, 18 nt, Artificial Sequence
  Synthetic
auauuggugucuguuuca

SEQ ID NO: 32740 - RNA, 19 nt, Artificial Sequence
  Synthetic
aauauuggugucuguuuca

SEQ ID NO: 32741 - RNA, 20 nt, Artificial Sequence
  Synthetic
uaauauuggugucuguuuca

SEQ ID NO: 32742 - RNA, 21 nt, Artificial Sequence
  Synthetic
uuaauauuggugucuguuuca

SEQ ID NO: 32743 - RNA, 22 nt, Artificial Sequence
  Synthetic
cuuaauauuggugucuguuuca

SEQ ID NO: 32744 - RNA, 23 nt, Artificial Sequence
  Synthetic
ccuuaauauuggugucuguuuca

SEQ ID NO: 32745 - RNA, 19 nt, Artificial Sequence
  Synthetic
agugcucaugauuguuuca

SEQ ID NO: 32746 - RNA, 20 nt, Artificial Sequence
  Synthetic
aagugcucaugauuguuuca

SEQ ID NO: 32747 - RNA, 21 nt, Artificial Sequence
  Synthetic
aaagugcucaugauuguuuca

SEQ ID NO: 32748 - RNA, 22 nt, Artificial Sequence
  Synthetic
uaaagugcucaugauuguuuca

SEQ ID NO: 32749 - RNA, 24 nt, Artificial Sequence
  Synthetic
uguaaagugcucaugauuguuuca

SEQ ID NO: 32750 - RNA, 18 nt, Artificial Sequence
  Synthetic
aaagguacagaauuuuca

SEQ ID NO: 32751 - RNA, 19 nt, Artificial Sequence
  Synthetic
uaaagguacagaauuuuca

SEQ ID NO: 32752 - RNA, 20 nt, Artificial Sequence
  Synthetic
cuaaagguacagaauuuuca

SEQ ID NO: 32753 - RNA, 21 nt, Artificial Sequence
  Synthetic
ucuaaagguacagaauuuuca

SEQ ID NO: 32754 - RNA, 22 nt, Artificial Sequence
  Synthetic
uucuaaagguacagaauuuuca

SEQ ID NO: 32755 - RNA, 23 nt, Artificial Sequence
  Synthetic
uuucuaaagguacagaauuuuca

SEQ ID NO: 32756 - RNA, 24 nt, Artificial Sequence
  Synthetic
uuuucuaaagguacagaauuuuca

SEQ ID NO: 32757 - RNA, 18 nt, Artificial Sequence
  Synthetic
auaaugaaguaauuuuca

SEQ ID NO: 32758 - RNA, 19 nt, Artificial Sequence
  Synthetic
aauaaugaaguaauuuuca

SEQ ID NO: 32759 - RNA, 21 nt, Artificial Sequence
  Synthetic
agaauaaugaaguaauuuuca

SEQ ID NO: 32760 - RNA, 23 nt, Artificial Sequence
  Synthetic
agagaauaaugaaguaauuuuca

SEQ ID NO: 32761 - RNA, 24 nt, Artificial Sequence
  Synthetic
uagagaauaaugaaguaauuuuca

SEQ ID NO: 32762 - RNA, 18 nt, Artificial Sequence
  Synthetic
cccucuugucgauuuuca

SEQ ID NO: 32763 - RNA, 19 nt, Artificial Sequence
  Synthetic
ccccucuugucgauuuuca

SEQ ID NO: 32764 - RNA, 20 nt, Artificial Sequence
  Synthetic
uccccucuugucgauuuuca

SEQ ID NO: 32765 - RNA, 21 nt, Artificial Sequence
  Synthetic
auccccucuugucgauuuuca

SEQ ID NO: 32766 - RNA, 22 nt, Artificial Sequence
  Synthetic
cauccccucuugucgauuuuca

SEQ ID NO: 32767 - RNA, 23 nt, Artificial Sequence
  Synthetic
acauccccucuugucgauuuuca

SEQ ID NO: 32768 - RNA, 24 nt, Artificial Sequence
  Synthetic
aacauccccucuugucgauuuuca

SEQ ID NO: 32769 - RNA, 18 nt, Artificial Sequence
  Synthetic
uugagcucagucuuuuca

SEQ ID NO: 32770 - RNA, 19 nt, Artificial Sequence
  Synthetic
uuugagcucagucuuuuca

SEQ ID NO: 32771 - RNA, 20 nt, Artificial Sequence
  Synthetic
uuuugagcucagucuuuuca

SEQ ID NO: 32772 - RNA, 22 nt, Artificial Sequence
  Synthetic
aguuuugagcucagucuuuuca

SEQ ID NO: 32773 - RNA, 23 nt, Artificial Sequence
  Synthetic
uaguuuugagcucagucuuuuca

SEQ ID NO: 32774 - RNA, 24 nt, Artificial Sequence
  Synthetic
auaguuuugagcucagucuuuuca

SEQ ID NO: 32775 - RNA, 18 nt, Artificial Sequence
  Synthetic
uaagguugcuucuuuuca

SEQ ID NO: 32776 - RNA, 20 nt, Artificial Sequence
  Synthetic
cguaagguugcuucuuuuca

SEQ ID NO: 32777 - RNA, 21 nt, Artificial Sequence
  Synthetic
acguaagguugcuucuuuuca

SEQ ID NO: 32778 - RNA, 22 nt, Artificial Sequence
  Synthetic
uacguaagguugcuucuuuuca

SEQ ID NO: 32779 - RNA, 23 nt, Artificial Sequence
  Synthetic
auacguaagguugcuucuuuuca

SEQ ID NO: 32780 - RNA, 24 nt, Artificial Sequence
  Synthetic
cauacguaagguugcuucuuuuca

SEQ ID NO: 32781 - RNA, 19 nt, Artificial Sequence
  Synthetic
aggugaccucaauuuuuca

SEQ ID NO: 32782 - RNA, 20 nt, Artificial Sequence
  Synthetic
aaggugaccucaauuuuuca

SEQ ID NO: 32783 - RNA, 21 nt, Artificial Sequence
  Synthetic
aaaggugaccucaauuuuuca

SEQ ID NO: 32784 - RNA, 22 nt, Artificial Sequence
  Synthetic
aaaaggugaccucaauuuuuca

SEQ ID NO: 32785 - RNA, 23 nt, Artificial Sequence
  Synthetic
uaaaaggugaccucaauuuuuca

SEQ ID NO: 32786 - RNA, 24 nt, Artificial Sequence
  Synthetic
auaaaaggugaccucaauuuuuca

SEQ ID NO: 32787 - RNA, 18 nt, Artificial Sequence
  Synthetic
ccacuaaugguuuuuuca

SEQ ID NO: 32788 - RNA, 19 nt, Artificial Sequence
  Synthetic
accacuaaugguuuuuuca

SEQ ID NO: 32789 - RNA, 20 nt, Artificial Sequence
  Synthetic
uaccacuaaugguuuuuuca

SEQ ID NO: 32790 - RNA, 21 nt, Artificial Sequence
  Synthetic
uuaccacuaaugguuuuuuca

SEQ ID NO: 32791 - RNA, 23 nt, Artificial Sequence
  Synthetic
uguuaccacuaaugguuuuuuca

SEQ ID NO: 32792 - RNA, 24 nt, Artificial Sequence
  Synthetic
auguuaccacuaaugguuuuuuca

SEQ ID NO: 32793 - RNA, 18 nt, Artificial Sequence
  Synthetic
ucaaaaguguuuuuuuca

SEQ ID NO: 32794 - RNA, 19 nt, Artificial Sequence
  Synthetic
cucaaaaguguuuuuuuca

SEQ ID NO: 32795 - RNA, 20 nt, Artificial Sequence
  Synthetic
acucaaaaguguuuuuuuca

SEQ ID NO: 32796 - RNA, 21 nt, Artificial Sequence
  Synthetic
uacucaaaaguguuuuuuuca

SEQ ID NO: 32797 - RNA, 22 nt, Artificial Sequence
  Synthetic
uuacucaaaaguguuuuuuuca

SEQ ID NO: 32798 - RNA, 23 nt, Artificial Sequence
  Synthetic
uuuacucaaaaguguuuuuuuca

SEQ ID NO: 32799 - RNA, 24 nt, Artificial Sequence
  Synthetic
cuuuacucaaaaguguuuuuuuca

SEQ ID NO: 32800 - RNA, 18 nt, Artificial Sequence
  Synthetic
auaugauaaccaaaaaga

SEQ ID NO: 32801 - RNA, 20 nt, Artificial Sequence
  Synthetic
ugauaugauaaccaaaaaga

SEQ ID NO: 32802 - RNA, 21 nt, Artificial Sequence
  Synthetic
uugauaugauaaccaaaaaga

SEQ ID NO: 32803 - RNA, 22 nt, Artificial Sequence
  Synthetic
cuugauaugauaaccaaaaaga

SEQ ID NO: 32804 - RNA, 23 nt, Artificial Sequence
  Synthetic
acuugauaugauaaccaaaaaga

SEQ ID NO: 32805 - RNA, 21 nt, Artificial Sequence
  Synthetic
uuaggaaaacauuuaaaaaga

SEQ ID NO: 32806 - RNA, 22 nt, Artificial Sequence
  Synthetic
uuuaggaaaacauuuaaaaaga

SEQ ID NO: 32807 - RNA, 24 nt, Artificial Sequence
  Synthetic
uguuuaggaaaacauuuaaaaaga

SEQ ID NO: 32808 - RNA, 18 nt, Artificial Sequence
  Synthetic
acacacugacccaaaaga

SEQ ID NO: 32809 - RNA, 19 nt, Artificial Sequence
  Synthetic
aacacacugacccaaaaga

SEQ ID NO: 32810 - RNA, 20 nt, Artificial Sequence
  Synthetic
caacacacugacccaaaaga

SEQ ID NO: 32811 - RNA, 22 nt, Artificial Sequence
  Synthetic
ugcaacacacugacccaaaaga

SEQ ID NO: 32812 - RNA, 23 nt, Artificial Sequence
  Synthetic
uugcaacacacugacccaaaaga

SEQ ID NO: 32813 - RNA, 19 nt, Artificial Sequence
  Synthetic
agauucaagcugcaaaaga

SEQ ID NO: 32814 - RNA, 20 nt, Artificial Sequence
  Synthetic
cagauucaagcugcaaaaga

SEQ ID NO: 32815 - RNA, 21 nt, Artificial Sequence
  Synthetic
ucagauucaagcugcaaaaga

SEQ ID NO: 32816 - RNA, 23 nt, Artificial Sequence
  Synthetic
cgucagauucaagcugcaaaaga

SEQ ID NO: 32817 - RNA, 24 nt, Artificial Sequence
  Synthetic
acgucagauucaagcugcaaaaga

SEQ ID NO: 32818 - RNA, 18 nt, Artificial Sequence
  Synthetic
uauucauuuuucaaaaga

SEQ ID NO: 32819 - RNA, 19 nt, Artificial Sequence
  Synthetic
uuauucauuuuucaaaaga

SEQ ID NO: 32820 - RNA, 20 nt, Artificial Sequence
  Synthetic
cuuauucauuuuucaaaaga

SEQ ID NO: 32821 - RNA, 21 nt, Artificial Sequence
  Synthetic
ccuuauucauuuuucaaaaga

SEQ ID NO: 32822 - RNA, 22 nt, Artificial Sequence
  Synthetic
accuuauucauuuuucaaaaga

SEQ ID NO: 32823 - RNA, 23 nt, Artificial Sequence
  Synthetic
uaccuuauucauuuuucaaaaga

SEQ ID NO: 32824 - RNA, 18 nt, Artificial Sequence
  Synthetic
ccuagaagguagaaaaga

SEQ ID NO: 32825 - RNA, 20 nt, Artificial Sequence
  Synthetic
agccuagaagguagaaaaga

SEQ ID NO: 32826 - RNA, 21 nt, Artificial Sequence
  Synthetic
aagccuagaagguagaaaaga

SEQ ID NO: 32827 - RNA, 22 nt, Artificial Sequence
  Synthetic
aaagccuagaagguagaaaaga

SEQ ID NO: 32828 - RNA, 23 nt, Artificial Sequence
  Synthetic
caaagccuagaagguagaaaaga

SEQ ID NO: 32829 - RNA, 24 nt, Artificial Sequence
  Synthetic
ucaaagccuagaagguagaaaaga

SEQ ID NO: 32830 - RNA, 23 nt, Artificial Sequence
  Synthetic
aggagaagguugcuuggaaaaga

SEQ ID NO: 32831 - RNA, 24 nt, Artificial Sequence
  Synthetic
caggagaagguugcuuggaaaaga

SEQ ID NO: 32832 - RNA, 19 nt, Artificial Sequence
  Synthetic
aggcaacauugcuaaaaga

SEQ ID NO: 32833 - RNA, 20 nt, Artificial Sequence
  Synthetic
caggcaacauugcuaaaaga

SEQ ID NO: 32834 - RNA, 22 nt, Artificial Sequence
  Synthetic
agcaggcaacauugcuaaaaga

SEQ ID NO: 32835 - RNA, 23 nt, Artificial Sequence
  Synthetic
cagcaggcaacauugcuaaaaga

SEQ ID NO: 32836 - RNA, 24 nt, Artificial Sequence
  Synthetic
ucagcaggcaacauugcuaaaaga

SEQ ID NO: 32837 - RNA, 18 nt, Artificial Sequence
  Synthetic
cauaggagggguaaaaga

SEQ ID NO: 32838 - RNA, 19 nt, Artificial Sequence
  Synthetic
acauaggagggguaaaaga

SEQ ID NO: 32839 - RNA, 21 nt, Artificial Sequence
  Synthetic
agacauaggagggguaaaaga

SEQ ID NO: 32840 - RNA, 22 nt, Artificial Sequence
  Synthetic
aagacauaggagggguaaaaga

SEQ ID NO: 32841 - RNA, 24 nt, Artificial Sequence
  Synthetic
ugaagacauaggagggguaaaaga

SEQ ID NO: 32842 - RNA, 21 nt, Artificial Sequence
  Synthetic
auauuucaaaagguuaaaaga

SEQ ID NO: 32843 - RNA, 22 nt, Artificial Sequence
  Synthetic
aauauuucaaaagguuaaaaga

SEQ ID NO: 32844 - RNA, 23 nt, Artificial Sequence
  Synthetic
uaauauuucaaaagguuaaaaga

SEQ ID NO: 32845 - RNA, 24 nt, Artificial Sequence
  Synthetic
uuaauauuucaaaagguuaaaaga

SEQ ID NO: 32846 - RNA, 22 nt, Artificial Sequence
  Synthetic
uggggguaguaguuuacaaaga

SEQ ID NO: 32847 - RNA, 23 nt, Artificial Sequence
  Synthetic
uuggggguaguaguuuacaaaga

SEQ ID NO: 32848 - RNA, 24 nt, Artificial Sequence
  Synthetic
uuuggggguaguaguuuacaaaga

SEQ ID NO: 32849 - RNA, 22 nt, Artificial Sequence
  Synthetic
ugaaagauacaaauuccaaaga

SEQ ID NO: 32850 - RNA, 23 nt, Artificial Sequence
  Synthetic
augaaagauacaaauuccaaaga

SEQ ID NO: 32851 - RNA, 18 nt, Artificial Sequence
  Synthetic
uacacaagguuccaaaga

SEQ ID NO: 32852 - RNA, 19 nt, Artificial Sequence
  Synthetic
cuacacaagguuccaaaga

SEQ ID NO: 32853 - RNA, 20 nt, Artificial Sequence
  Synthetic
acuacacaagguuccaaaga

SEQ ID NO: 32854 - RNA, 21 nt, Artificial Sequence
  Synthetic
cacuacacaagguuccaaaga

SEQ ID NO: 32855 - RNA, 22 nt, Artificial Sequence
  Synthetic
ucacuacacaagguuccaaaga

SEQ ID NO: 32856 - RNA, 23 nt, Artificial Sequence
  Synthetic
uucacuacacaagguuccaaaga

SEQ ID NO: 32857 - RNA, 24 nt, Artificial Sequence
  Synthetic
auucacuacacaagguuccaaaga

SEQ ID NO: 32858 - RNA, 18 nt, Artificial Sequence
  Synthetic
cuccugcaggaagaaaga

SEQ ID NO: 32859 - RNA, 19 nt, Artificial Sequence
  Synthetic
ucuccugcaggaagaaaga

SEQ ID NO: 32860 - RNA, 20 nt, Artificial Sequence
  Synthetic
aucuccugcaggaagaaaga

SEQ ID NO: 32861 - RNA, 21 nt, Artificial Sequence
  Synthetic
uaucuccugcaggaagaaaga

SEQ ID NO: 32862 - RNA, 22 nt, Artificial Sequence
  Synthetic
uuaucuccugcaggaagaaaga

SEQ ID NO: 32863 - RNA, 23 nt, Artificial Sequence
  Synthetic
uuuaucuccugcaggaagaaaga

SEQ ID NO: 32864 - RNA, 24 nt, Artificial Sequence
  Synthetic
uuuuaucuccugcaggaagaaaga

SEQ ID NO: 32865 - RNA, 18 nt, Artificial Sequence
  Synthetic
augcuggacucagaaaga

SEQ ID NO: 32866 - RNA, 19 nt, Artificial Sequence
  Synthetic
aaugcuggacucagaaaga

SEQ ID NO: 32867 - RNA, 20 nt, Artificial Sequence
  Synthetic
aaaugcuggacucagaaaga

SEQ ID NO: 32868 - RNA, 21 nt, Artificial Sequence
  Synthetic
uaaaugcuggacucagaaaga

SEQ ID NO: 32869 - RNA, 22 nt, Artificial Sequence
  Synthetic
uuaaaugcuggacucagaaaga

SEQ ID NO: 32870 - RNA, 18 nt, Artificial Sequence
  Synthetic
auuacauggguagaaaga

SEQ ID NO: 32871 - RNA, 19 nt, Artificial Sequence
  Synthetic
aauuacauggguagaaaga

SEQ ID NO: 32872 - RNA, 20 nt, Artificial Sequence
  Synthetic
aaauuacauggguagaaaga

SEQ ID NO: 32873 - RNA, 21 nt, Artificial Sequence
  Synthetic
aaaauuacauggguagaaaga

SEQ ID NO: 32874 - RNA, 22 nt, Artificial Sequence
  Synthetic
uaaaauuacauggguagaaaga

SEQ ID NO: 32875 - RNA, 23 nt, Artificial Sequence
  Synthetic
cuaaaauuacauggguagaaaga

SEQ ID NO: 32876 - RNA, 21 nt, Artificial Sequence
  Synthetic
uuuuuagcuaagaaggaaaga

SEQ ID NO: 32877 - RNA, 22 nt, Artificial Sequence
  Synthetic
uuuuuuagcuaagaaggaaaga

SEQ ID NO: 32878 - RNA, 23 nt, Artificial Sequence
  Synthetic
uuuuuuuagcuaagaaggaaaga

SEQ ID NO: 32879 - RNA, 24 nt, Artificial Sequence
  Synthetic
auuuuuuuagcuaagaaggaaaga

SEQ ID NO: 32880 - RNA, 19 nt, Artificial Sequence
  Synthetic
agccugagcaacggaaaga

SEQ ID NO: 32881 - RNA, 20 nt, Artificial Sequence
  Synthetic
uagccugagcaacggaaaga

SEQ ID NO: 32882 - RNA, 18 nt, Artificial Sequence
  Synthetic
accaagagcagggaaaga

SEQ ID NO: 32883 - RNA, 20 nt, Artificial Sequence
  Synthetic
agaccaagagcagggaaaga

SEQ ID NO: 32884 - RNA, 22 nt, Artificial Sequence
  Synthetic
ugagaccaagagcagggaaaga

SEQ ID NO: 32885 - RNA, 23 nt, Artificial Sequence
  Synthetic
uugagaccaagagcagggaaaga

SEQ ID NO: 32886 - RNA, 24 nt, Artificial Sequence
  Synthetic
auugagaccaagagcagggaaaga

SEQ ID NO: 32887 - RNA, 18 nt, Artificial Sequence
  Synthetic
cucucuucauccuaaaga

SEQ ID NO: 32888 - RNA, 19 nt, Artificial Sequence
  Synthetic
ucucucuucauccuaaaga

SEQ ID NO: 32889 - RNA, 20 nt, Artificial Sequence
  Synthetic
cucucucuucauccuaaaga

SEQ ID NO: 32890 - RNA, 22 nt, Artificial Sequence
  Synthetic
ugcucucucuucauccuaaaga

SEQ ID NO: 32891 - RNA, 23 nt, Artificial Sequence
  Synthetic
augcucucucuucauccuaaaga

SEQ ID NO: 32892 - RNA, 24 nt, Artificial Sequence
  Synthetic
aaugcucucucuucauccuaaaga

SEQ ID NO: 32893 - RNA, 18 nt, Artificial Sequence
  Synthetic
uauucugaaguguaaaga

SEQ ID NO: 32894 - RNA, 19 nt, Artificial Sequence
  Synthetic
uuauucugaaguguaaaga

SEQ ID NO: 32895 - RNA, 20 nt, Artificial Sequence
  Synthetic
cuuauucugaaguguaaaga

SEQ ID NO: 32896 - RNA, 21 nt, Artificial Sequence
  Synthetic
ucuuauucugaaguguaaaga

SEQ ID NO: 32897 - RNA, 22 nt, Artificial Sequence
  Synthetic
cucuuauucugaaguguaaaga

SEQ ID NO: 32898 - RNA, 23 nt, Artificial Sequence
  Synthetic
ucucuuauucugaaguguaaaga

SEQ ID NO: 32899 - RNA, 24 nt, Artificial Sequence
  Synthetic
aucucuuauucugaaguguaaaga

SEQ ID NO: 32900 - RNA, 18 nt, Artificial Sequence
  Synthetic
uaagccaggcauuaaaga

SEQ ID NO: 32901 - RNA, 19 nt, Artificial Sequence
  Synthetic
uuaagccaggcauuaaaga

SEQ ID NO: 32902 - RNA, 20 nt, Artificial Sequence
  Synthetic
cuuaagccaggcauuaaaga

SEQ ID NO: 32903 - RNA, 21 nt, Artificial Sequence
  Synthetic
acuuaagccaggcauuaaaga

SEQ ID NO: 32904 - RNA, 22 nt, Artificial Sequence
  Synthetic
aacuuaagccaggcauuaaaga

SEQ ID NO: 32905 - RNA, 23 nt, Artificial Sequence
  Synthetic
aaacuuaagccaggcauuaaaga

SEQ ID NO: 32906 - RNA, 24 nt, Artificial Sequence
  Synthetic
aaaacuuaagccaggcauuaaaga

SEQ ID NO: 32907 - RNA, 19 nt, Artificial Sequence
  Synthetic
uggcuuuuggauuuaaaga

SEQ ID NO: 32908 - RNA, 21 nt, Artificial Sequence
  Synthetic
uguggcuuuuggauuuaaaga

SEQ ID NO: 32909 - RNA, 22 nt, Artificial Sequence
  Synthetic
auguggcuuuuggauuuaaaga

SEQ ID NO: 32910 - RNA, 23 nt, Artificial Sequence
  Synthetic
aauguggcuuuuggauuuaaaga

SEQ ID NO: 32911 - RNA, 24 nt, Artificial Sequence
  Synthetic
aaauguggcuuuuggauuuaaaga

SEQ ID NO: 32912 - RNA, 19 nt, Artificial Sequence
  Synthetic
agaaaguuggaacacaaga

SEQ ID NO: 32913 - RNA, 20 nt, Artificial Sequence
  Synthetic
cagaaaguuggaacacaaga

SEQ ID NO: 32914 - RNA, 22 nt, Artificial Sequence
  Synthetic
agcagaaaguuggaacacaaga

SEQ ID NO: 32915 - RNA, 23 nt, Artificial Sequence
  Synthetic
aagcagaaaguuggaacacaaga

SEQ ID NO: 32916 - RNA, 24 nt, Artificial Sequence
  Synthetic
caagcagaaaguuggaacacaaga

SEQ ID NO: 32917 - RNA, 18 nt, Artificial Sequence
  Synthetic
ucagaccuuccaccaaga

SEQ ID NO: 32918 - RNA, 19 nt, Artificial Sequence
  Synthetic
aucagaccuuccaccaaga

SEQ ID NO: 32919 - RNA, 20 nt, Artificial Sequence
  Synthetic
uaucagaccuuccaccaaga

SEQ ID NO: 32920 - RNA, 21 nt, Artificial Sequence
  Synthetic
uuaucagaccuuccaccaaga

SEQ ID NO: 32921 - RNA, 24 nt, Artificial Sequence
  Synthetic
agguuaucagaccuuccaccaaga

SEQ ID NO: 32922 - RNA, 18 nt, Artificial Sequence
  Synthetic
aacacauccaucccaaga

SEQ ID NO: 32923 - RNA, 19 nt, Artificial Sequence
  Synthetic
uaacacauccaucccaaga

SEQ ID NO: 32924 - RNA, 20 nt, Artificial Sequence
  Synthetic
auaacacauccaucccaaga

SEQ ID NO: 32925 - RNA, 21 nt, Artificial Sequence
  Synthetic
aauaacacauccaucccaaga

SEQ ID NO: 32926 - RNA, 22 nt, Artificial Sequence
  Synthetic
uaauaacacauccaucccaaga

SEQ ID NO: 32927 - RNA, 23 nt, Artificial Sequence
  Synthetic
cuaauaacacauccaucccaaga

SEQ ID NO: 32928 - RNA, 24 nt, Artificial Sequence
  Synthetic
ccuaauaacacauccaucccaaga

SEQ ID NO: 32929 - RNA, 21 nt, Artificial Sequence
  Synthetic
uaggcagaauaaaauccaaga

SEQ ID NO: 32930 - RNA, 22 nt, Artificial Sequence
  Synthetic
auaggcagaauaaaauccaaga

SEQ ID NO: 32931 - RNA, 23 nt, Artificial Sequence
  Synthetic
aauaggcagaauaaaauccaaga

SEQ ID NO: 32932 - RNA, 24 nt, Artificial Sequence
  Synthetic
aaauaggcagaauaaaauccaaga

SEQ ID NO: 32933 - RNA, 18 nt, Artificial Sequence
  Synthetic
auauuuuuaauagcaaga

SEQ ID NO: 32934 - RNA, 19 nt, Artificial Sequence
  Synthetic
uauauuuuuaauagcaaga

SEQ ID NO: 32935 - RNA, 20 nt, Artificial Sequence
  Synthetic
uuauauuuuuaauagcaaga

SEQ ID NO: 32936 - RNA, 21 nt, Artificial Sequence
  Synthetic
auuauauuuuuaauagcaaga

SEQ ID NO: 32937 - RNA, 24 nt, Artificial Sequence
  Synthetic
uggauuauauuuuuaauagcaaga

SEQ ID NO: 32938 - RNA, 18 nt, Artificial Sequence
  Synthetic
acuggacuauuagcaaga

SEQ ID NO: 32939 - RNA, 19 nt, Artificial Sequence
  Synthetic
aacuggacuauuagcaaga

SEQ ID NO: 32940 - RNA, 20 nt, Artificial Sequence
  Synthetic
aaacuggacuauuagcaaga

SEQ ID NO: 32941 - RNA, 21 nt, Artificial Sequence
  Synthetic
aaaacuggacuauuagcaaga

SEQ ID NO: 32942 - RNA, 23 nt, Artificial Sequence
  Synthetic
ugaaaacuggacuauuagcaaga

SEQ ID NO: 32943 - RNA, 24 nt, Artificial Sequence
  Synthetic
augaaaacuggacuauuagcaaga

SEQ ID NO: 32944 - RNA, 18 nt, Artificial Sequence
  Synthetic
ugaucacaaggggcaaga

SEQ ID NO: 32945 - RNA, 19 nt, Artificial Sequence
  Synthetic
augaucacaaggggcaaga

SEQ ID NO: 32946 - RNA, 20 nt, Artificial Sequence
  Synthetic
caugaucacaaggggcaaga

SEQ ID NO: 32947 - RNA, 21 nt, Artificial Sequence
  Synthetic
acaugaucacaaggggcaaga

SEQ ID NO: 32948 - RNA, 22 nt, Artificial Sequence
  Synthetic
uacaugaucacaaggggcaaga

SEQ ID NO: 32949 - RNA, 23 nt, Artificial Sequence
  Synthetic
auacaugaucacaaggggcaaga

SEQ ID NO: 32950 - RNA, 24 nt, Artificial Sequence
  Synthetic
cauacaugaucacaaggggcaaga

SEQ ID NO: 32951 - RNA, 19 nt, Artificial Sequence
  Synthetic
ugaagauuuuuaugcaaga

SEQ ID NO: 32952 - RNA, 20 nt, Artificial Sequence
  Synthetic
uugaagauuuuuaugcaaga

SEQ ID NO: 32953 - RNA, 21 nt, Artificial Sequence
  Synthetic
uuugaagauuuuuaugcaaga

SEQ ID NO: 32954 - RNA, 22 nt, Artificial Sequence
  Synthetic
auuugaagauuuuuaugcaaga

SEQ ID NO: 32955 - RNA, 23 nt, Artificial Sequence
  Synthetic
uauuugaagauuuuuaugcaaga

SEQ ID NO: 32956 - RNA, 24 nt, Artificial Sequence
  Synthetic
auauuugaagauuuuuaugcaaga

SEQ ID NO: 32957 - RNA, 21 nt, Artificial Sequence
  Synthetic
aaaaaaaaugauucugcaaga

SEQ ID NO: 32958 - RNA, 22 nt, Artificial Sequence
  Synthetic
aaaaaaaaaugauucugcaaga

SEQ ID NO: 32959 - RNA, 23 nt, Artificial Sequence
  Synthetic
aaaaaaaaaaugauucugcaaga

SEQ ID NO: 32960 - RNA, 24 nt, Artificial Sequence
  Synthetic
aaaaaaaaaaaugauucugcaaga

SEQ ID NO: 32961 - RNA, 18 nt, Artificial Sequence
  Synthetic
aaccccagguuugcaaga

SEQ ID NO: 32962 - RNA, 21 nt, Artificial Sequence
  Synthetic
uggaaccccagguuugcaaga

SEQ ID NO: 32963 - RNA, 22 nt, Artificial Sequence
  Synthetic
auggaaccccagguuugcaaga

SEQ ID NO: 32964 - RNA, 23 nt, Artificial Sequence
  Synthetic
cauggaaccccagguuugcaaga

SEQ ID NO: 32965 - RNA, 24 nt, Artificial Sequence
  Synthetic
ccauggaaccccagguuugcaaga

SEQ ID NO: 32966 - RNA, 18 nt, Artificial Sequence
  Synthetic
auaaguaauaacucaaga

SEQ ID NO: 32967 - RNA, 19 nt, Artificial Sequence
  Synthetic
aauaaguaauaacucaaga

SEQ ID NO: 32968 - RNA, 20 nt, Artificial Sequence
  Synthetic
uaauaaguaauaacucaaga

SEQ ID NO: 32969 - RNA, 21 nt, Artificial Sequence
  Synthetic
uuaauaaguaauaacucaaga

SEQ ID NO: 32970 - RNA, 22 nt, Artificial Sequence
  Synthetic
cuuaauaaguaauaacucaaga

SEQ ID NO: 32971 - RNA, 23 nt, Artificial Sequence
  Synthetic
ucuuaauaaguaauaacucaaga

SEQ ID NO: 32972 - RNA, 24 nt, Artificial Sequence
  Synthetic
aucuuaauaaguaauaacucaaga

SEQ ID NO: 32973 - RNA, 21 nt, Artificial Sequence
  Synthetic
aaagaagguaauuucucaaga

SEQ ID NO: 32974 - RNA, 22 nt, Artificial Sequence
  Synthetic
uaaagaagguaauuucucaaga

SEQ ID NO: 32975 - RNA, 23 nt, Artificial Sequence
  Synthetic
uuaaagaagguaauuucucaaga

SEQ ID NO: 32976 - RNA, 24 nt, Artificial Sequence
  Synthetic
auuaaagaagguaauuucucaaga

SEQ ID NO: 32977 - RNA, 18 nt, Artificial Sequence
  Synthetic
aaauugauuuauucaaga

SEQ ID NO: 32978 - RNA, 19 nt, Artificial Sequence
  Synthetic
caaauugauuuauucaaga

SEQ ID NO: 32979 - RNA, 23 nt, Artificial Sequence
  Synthetic
agggcaaauugauuuauucaaga

SEQ ID NO: 32980 - RNA, 18 nt, Artificial Sequence
  Synthetic
cuauacucaacuucaaga

SEQ ID NO: 32981 - RNA, 20 nt, Artificial Sequence
  Synthetic
ugcuauacucaacuucaaga

SEQ ID NO: 32982 - RNA, 21 nt, Artificial Sequence
  Synthetic
augcuauacucaacuucaaga

SEQ ID NO: 32983 - RNA, 22 nt, Artificial Sequence
  Synthetic
uaugcuauacucaacuucaaga

SEQ ID NO: 32984 - RNA, 23 nt, Artificial Sequence
  Synthetic
uuaugcuauacucaacuucaaga

SEQ ID NO: 32985 - RNA, 18 nt, Artificial Sequence
  Synthetic
uuucacaggccuucaaga

SEQ ID NO: 32986 - RNA, 19 nt, Artificial Sequence
  Synthetic
auuucacaggccuucaaga

SEQ ID NO: 32987 - RNA, 20 nt, Artificial Sequence
  Synthetic
cauuucacaggccuucaaga

SEQ ID NO: 32988 - RNA, 21 nt, Artificial Sequence
  Synthetic
ucauuucacaggccuucaaga

SEQ ID NO: 32989 - RNA, 22 nt, Artificial Sequence
  Synthetic
cucauuucacaggccuucaaga

SEQ ID NO: 32990 - RNA, 23 nt, Artificial Sequence
  Synthetic
ucucauuucacaggccuucaaga

SEQ ID NO: 32991 - RNA, 24 nt, Artificial Sequence
  Synthetic
aucucauuucacaggccuucaaga

SEQ ID NO: 32992 - RNA, 21 nt, Artificial Sequence
  Synthetic
auuaauucugaagaaagaaga

SEQ ID NO: 32993 - RNA, 24 nt, Artificial Sequence
  Synthetic
cggauuaauucugaagaaagaaga

SEQ ID NO: 32994 - RNA, 19 nt, Artificial Sequence
  Synthetic
agucacacucuccagaaga

SEQ ID NO: 32995 - RNA, 20 nt, Artificial Sequence
  Synthetic
aagucacacucuccagaaga

SEQ ID NO: 32996 - RNA, 21 nt, Artificial Sequence
  Synthetic
aaagucacacucuccagaaga

SEQ ID NO: 32997 - RNA, 22 nt, Artificial Sequence
  Synthetic
aaaagucacacucuccagaaga

SEQ ID NO: 32998 - RNA, 23 nt, Artificial Sequence
  Synthetic
caaaagucacacucuccagaaga

SEQ ID NO: 32999 - RNA, 24 nt, Artificial Sequence
  Synthetic
acaaaagucacacucuccagaaga

SEQ ID NO: 33000 - RNA, 19 nt, Artificial Sequence
  Synthetic
agagguacagagcagaaga

SEQ ID NO: 33001 - RNA, 21 nt, Artificial Sequence
  Synthetic
agagagguacagagcagaaga

SEQ ID NO: 33002 - RNA, 22 nt, Artificial Sequence
  Synthetic
aagagagguacagagcagaaga

SEQ ID NO: 33003 - RNA, 23 nt, Artificial Sequence
  Synthetic
caagagagguacagagcagaaga

SEQ ID NO: 33004 - RNA, 24 nt, Artificial Sequence
  Synthetic
acaagagagguacagagcagaaga

SEQ ID NO: 33005 - RNA, 19 nt, Artificial Sequence
  Synthetic
aguguuauuuagcagaaga

SEQ ID NO: 33006 - RNA, 20 nt, Artificial Sequence
  Synthetic
aaguguuauuuagcagaaga

SEQ ID NO: 33007 - RNA, 21 nt, Artificial Sequence
  Synthetic
aaaguguuauuuagcagaaga

SEQ ID NO: 33008 - RNA, 23 nt, Artificial Sequence
  Synthetic
ugaaaguguuauuuagcagaaga

SEQ ID NO: 33009 - RNA, 19 nt, Artificial Sequence
  Synthetic
aggaagaguauucagaaga

SEQ ID NO: 33010 - RNA, 20 nt, Artificial Sequence
  Synthetic
uaggaagaguauucagaaga

SEQ ID NO: 33011 - RNA, 21 nt, Artificial Sequence
  Synthetic
uuaggaagaguauucagaaga

SEQ ID NO: 33012 - RNA, 22 nt, Artificial Sequence
  Synthetic
uuuaggaagaguauucagaaga

SEQ ID NO: 33013 - RNA, 24 nt, Artificial Sequence
  Synthetic
uguuuaggaagaguauucagaaga

SEQ ID NO: 33014 - RNA, 21 nt, Artificial Sequence
  Synthetic
cuaugaaauuauuuuagaaga

SEQ ID NO: 33015 - RNA, 22 nt, Artificial Sequence
  Synthetic
acuaugaaauuauuuuagaaga

SEQ ID NO: 33016 - RNA, 23 nt, Artificial Sequence
  Synthetic
uacuaugaaauuauuuuagaaga

SEQ ID NO: 33017 - RNA, 24 nt, Artificial Sequence
  Synthetic
uuacuaugaaauuauuuuagaaga

SEQ ID NO: 33018 - RNA, 21 nt, Artificial Sequence
  Synthetic
uuaaaauucauaaaacgaaga

SEQ ID NO: 33019 - RNA, 22 nt, Artificial Sequence
  Synthetic
auuaaaauucauaaaacgaaga

SEQ ID NO: 33020 - RNA, 24 nt, Artificial Sequence
  Synthetic
ugauuaaaauucauaaaacgaaga

SEQ ID NO: 33021 - RNA, 18 nt, Artificial Sequence
  Synthetic
cacugcagaaaaggaaga

SEQ ID NO: 33022 - RNA, 19 nt, Artificial Sequence
  Synthetic
ccacugcagaaaaggaaga

SEQ ID NO: 33023 - RNA, 21 nt, Artificial Sequence
  Synthetic
agccacugcagaaaaggaaga

SEQ ID NO: 33024 - RNA, 22 nt, Artificial Sequence
  Synthetic
aagccacugcagaaaaggaaga

SEQ ID NO: 33025 - RNA, 23 nt, Artificial Sequence
  Synthetic
aaagccacugcagaaaaggaaga

SEQ ID NO: 33026 - RNA, 24 nt, Artificial Sequence
  Synthetic
aaaagccacugcagaaaaggaaga

SEQ ID NO: 33027 - RNA, 18 nt, Artificial Sequence
  Synthetic
ugagggcuuucaggaaga

SEQ ID NO: 33028 - RNA, 20 nt, Artificial Sequence
  Synthetic
cgugagggcuuucaggaaga

SEQ ID NO: 33029 - RNA, 22 nt, Artificial Sequence
  Synthetic
agcgugagggcuuucaggaaga

SEQ ID NO: 33030 - RNA, 23 nt, Artificial Sequence
  Synthetic
cagcgugagggcuuucaggaaga

SEQ ID NO: 33031 - RNA, 18 nt, Artificial Sequence
  Synthetic
uuacagugaagcggaaga

SEQ ID NO: 33032 - RNA, 19 nt, Artificial Sequence
  Synthetic
auuacagugaagcggaaga

SEQ ID NO: 33033 - RNA, 20 nt, Artificial Sequence
  Synthetic
aauuacagugaagcggaaga

SEQ ID NO: 33034 - RNA, 21 nt, Artificial Sequence
  Synthetic
aaauuacagugaagcggaaga

SEQ ID NO: 33035 - RNA, 23 nt, Artificial Sequence
  Synthetic
agaaauuacagugaagcggaaga

SEQ ID NO: 33036 - RNA, 24 nt, Artificial Sequence
  Synthetic
uagaaauuacagugaagcggaaga

SEQ ID NO: 33037 - RNA, 19 nt, Artificial Sequence
  Synthetic
aggcugauguuagggaaga

SEQ ID NO: 33038 - RNA, 20 nt, Artificial Sequence
  Synthetic
caggcugauguuagggaaga

SEQ ID NO: 33039 - RNA, 21 nt, Artificial Sequence
  Synthetic
ucaggcugauguuagggaaga

SEQ ID NO: 33040 - RNA, 22 nt, Artificial Sequence
  Synthetic
aucaggcugauguuagggaaga

SEQ ID NO: 33041 - RNA, 18 nt, Artificial Sequence
  Synthetic
aaacacuggucuggaaga

SEQ ID NO: 33042 - RNA, 22 nt, Artificial Sequence
  Synthetic
ugggaaacacuggucuggaaga

SEQ ID NO: 33043 - RNA, 23 nt, Artificial Sequence
  Synthetic
uugggaaacacuggucuggaaga

SEQ ID NO: 33044 - RNA, 18 nt, Artificial Sequence
  Synthetic
uauauagcuguuggaaga

SEQ ID NO: 33045 - RNA, 19 nt, Artificial Sequence
  Synthetic
auauauagcuguuggaaga

SEQ ID NO: 33046 - RNA, 21 nt, Artificial Sequence
  Synthetic
agauauauagcuguuggaaga

SEQ ID NO: 33047 - RNA, 22 nt, Artificial Sequence
  Synthetic
uagauauauagcuguuggaaga

SEQ ID NO: 33048 - RNA, 23 nt, Artificial Sequence
  Synthetic
cuagauauauagcuguuggaaga

SEQ ID NO: 33049 - RNA, 24 nt, Artificial Sequence
  Synthetic
ucuagauauauagcuguuggaaga

SEQ ID NO: 33050 - RNA, 19 nt, Artificial Sequence
  Synthetic
uguccuguguuaaugaaga

SEQ ID NO: 33051 - RNA, 20 nt, Artificial Sequence
  Synthetic
auguccuguguuaaugaaga

SEQ ID NO: 33052 - RNA, 21 nt, Artificial Sequence
  Synthetic
aauguccuguguuaaugaaga

SEQ ID NO: 33053 - RNA, 22 nt, Artificial Sequence
  Synthetic
uaauguccuguguuaaugaaga

SEQ ID NO: 33054 - RNA, 23 nt, Artificial Sequence
  Synthetic
auaauguccuguguuaaugaaga

SEQ ID NO: 33055 - RNA, 24 nt, Artificial Sequence
  Synthetic
uauaauguccuguguuaaugaaga

SEQ ID NO: 33056 - RNA, 18 nt, Artificial Sequence
  Synthetic
caucccucaccaugaaga

SEQ ID NO: 33057 - RNA, 19 nt, Artificial Sequence
  Synthetic
ucaucccucaccaugaaga

SEQ ID NO: 33058 - RNA, 20 nt, Artificial Sequence
  Synthetic
aucaucccucaccaugaaga

SEQ ID NO: 33059 - RNA, 21 nt, Artificial Sequence
  Synthetic
aaucaucccucaccaugaaga

SEQ ID NO: 33060 - RNA, 22 nt, Artificial Sequence
  Synthetic
uaaucaucccucaccaugaaga

SEQ ID NO: 33061 - RNA, 23 nt, Artificial Sequence
  Synthetic
auaaucaucccucaccaugaaga

SEQ ID NO: 33062 - RNA, 24 nt, Artificial Sequence
  Synthetic
aauaaucaucccucaccaugaaga

SEQ ID NO: 33063 - RNA, 18 nt, Artificial Sequence
  Synthetic
uuaaugggcagaugaaga

SEQ ID NO: 33064 - RNA, 19 nt, Artificial Sequence
  Synthetic
uuuaaugggcagaugaaga

SEQ ID NO: 33065 - RNA, 20 nt, Artificial Sequence
  Synthetic
auuuaaugggcagaugaaga

SEQ ID NO: 33066 - RNA, 21 nt, Artificial Sequence
  Synthetic
cauuuaaugggcagaugaaga

SEQ ID NO: 33067 - RNA, 23 nt, Artificial Sequence
  Synthetic
ugcauuuaaugggcagaugaaga

SEQ ID NO: 33068 - RNA, 24 nt, Artificial Sequence
  Synthetic
augcauuuaaugggcagaugaaga

SEQ ID NO: 33069 - RNA, 18 nt, Artificial Sequence
  Synthetic
ccaaggucauuaugaaga

SEQ ID NO: 33070 - RNA, 19 nt, Artificial Sequence
  Synthetic
uccaaggucauuaugaaga

SEQ ID NO: 33071 - RNA, 20 nt, Artificial Sequence
  Synthetic
uuccaaggucauuaugaaga

SEQ ID NO: 33072 - RNA, 21 nt, Artificial Sequence
  Synthetic
uuuccaaggucauuaugaaga

SEQ ID NO: 33073 - RNA, 22 nt, Artificial Sequence
  Synthetic
auuuccaaggucauuaugaaga

SEQ ID NO: 33074 - RNA, 23 nt, Artificial Sequence
  Synthetic
cauuuccaaggucauuaugaaga

SEQ ID NO: 33075 - RNA, 24 nt, Artificial Sequence
  Synthetic
acauuuccaaggucauuaugaaga

SEQ ID NO: 33076 - RNA, 21 nt, Artificial Sequence
  Synthetic
caggaaaacauccaaauaaga

SEQ ID NO: 33077 - RNA, 22 nt, Artificial Sequence
  Synthetic
ccaggaaaacauccaaauaaga

SEQ ID NO: 33078 - RNA, 23 nt, Artificial Sequence
  Synthetic
uccaggaaaacauccaaauaaga

SEQ ID NO: 33079 - RNA, 18 nt, Artificial Sequence
  Synthetic
accuguguuuuaauaaga

SEQ ID NO: 33080 - RNA, 19 nt, Artificial Sequence
  Synthetic
caccuguguuuuaauaaga

SEQ ID NO: 33081 - RNA, 21 nt, Artificial Sequence
  Synthetic
ugcaccuguguuuuaauaaga

SEQ ID NO: 33082 - RNA, 23 nt, Artificial Sequence
  Synthetic
cgugcaccuguguuuuaauaaga

SEQ ID NO: 33083 - RNA, 24 nt, Artificial Sequence
  Synthetic
ucgugcaccuguguuuuaauaaga

SEQ ID NO: 33084 - RNA, 18 nt, Artificial Sequence
  Synthetic
agccugcugcagauaaga

SEQ ID NO: 33085 - RNA, 19 nt, Artificial Sequence
  Synthetic
cagccugcugcagauaaga

SEQ ID NO: 33086 - RNA, 21 nt, Artificial Sequence
  Synthetic
agcagccugcugcagauaaga

SEQ ID NO: 33087 - RNA, 22 nt, Artificial Sequence
  Synthetic
cagcagccugcugcagauaaga

SEQ ID NO: 33088 - RNA, 23 nt, Artificial Sequence
  Synthetic
ucagcagccugcugcagauaaga

SEQ ID NO: 33089 - RNA, 24 nt, Artificial Sequence
  Synthetic
cucagcagccugcugcagauaaga

SEQ ID NO: 33090 - RNA, 18 nt, Artificial Sequence
  Synthetic
uugaaggguuuuauaaga

SEQ ID NO: 33091 - RNA, 19 nt, Artificial Sequence
  Synthetic
auugaaggguuuuauaaga

SEQ ID NO: 33092 - RNA, 20 nt, Artificial Sequence
  Synthetic
cauugaaggguuuuauaaga

SEQ ID NO: 33093 - RNA, 21 nt, Artificial Sequence
  Synthetic
acauugaaggguuuuauaaga

SEQ ID NO: 33094 - RNA, 22 nt, Artificial Sequence
  Synthetic
aacauugaaggguuuuauaaga

SEQ ID NO: 33095 - RNA, 23 nt, Artificial Sequence
  Synthetic
aaacauugaaggguuuuauaaga

SEQ ID NO: 33096 - RNA, 18 nt, Artificial Sequence
  Synthetic
cugcaugacaaaguaaga

SEQ ID NO: 33097 - RNA, 20 nt, Artificial Sequence
  Synthetic
agcugcaugacaaaguaaga

SEQ ID NO: 33098 - RNA, 21 nt, Artificial Sequence
  Synthetic
cagcugcaugacaaaguaaga

SEQ ID NO: 33099 - RNA, 23 nt, Artificial Sequence
  Synthetic
agcagcugcaugacaaaguaaga

SEQ ID NO: 33100 - RNA, 24 nt, Artificial Sequence
  Synthetic
aagcagcugcaugacaaaguaaga

SEQ ID NO: 33101 - RNA, 18 nt, Artificial Sequence
  Synthetic
cacaugucugguguaaga

SEQ ID NO: 33102 - RNA, 19 nt, Artificial Sequence
  Synthetic
acacaugucugguguaaga

SEQ ID NO: 33103 - RNA, 20 nt, Artificial Sequence
  Synthetic
cacacaugucugguguaaga

SEQ ID NO: 33104 - RNA, 23 nt, Artificial Sequence
  Synthetic
aggcacacaugucugguguaaga

SEQ ID NO: 33105 - RNA, 24 nt, Artificial Sequence
  Synthetic
caggcacacaugucugguguaaga

SEQ ID NO: 33106 - RNA, 21 nt, Artificial Sequence
  Synthetic
aggggcaugucaaaauuaaga

SEQ ID NO: 33107 - RNA, 22 nt, Artificial Sequence
  Synthetic
uaggggcaugucaaaauuaaga

SEQ ID NO: 33108 - RNA, 23 nt, Artificial Sequence
  Synthetic
auaggggcaugucaaaauuaaga

SEQ ID NO: 33109 - RNA, 24 nt, Artificial Sequence
  Synthetic
cauaggggcaugucaaaauuaaga

SEQ ID NO: 33110 - RNA, 18 nt, Artificial Sequence
  Synthetic
augcacuucuuauuaaga

SEQ ID NO: 33111 - RNA, 19 nt, Artificial Sequence
  Synthetic
uaugcacuucuuauuaaga

SEQ ID NO: 33112 - RNA, 20 nt, Artificial Sequence
  Synthetic
auaugcacuucuuauuaaga

SEQ ID NO: 33113 - RNA, 22 nt, Artificial Sequence
  Synthetic
agauaugcacuucuuauuaaga

SEQ ID NO: 33114 - RNA, 23 nt, Artificial Sequence
  Synthetic
uagauaugcacuucuuauuaaga

SEQ ID NO: 33115 - RNA, 24 nt, Artificial Sequence
  Synthetic
uuagauaugcacuucuuauuaaga

SEQ ID NO: 33116 - RNA, 18 nt, Artificial Sequence
  Synthetic
uuuacuaaaaucuuaaga

SEQ ID NO: 33117 - RNA, 19 nt, Artificial Sequence
  Synthetic
cuuuacuaaaaucuuaaga

SEQ ID NO: 33118 - RNA, 20 nt, Artificial Sequence
  Synthetic
ccuuuacuaaaaucuuaaga

SEQ ID NO: 33119 - RNA, 21 nt, Artificial Sequence
  Synthetic
accuuuacuaaaaucuuaaga

SEQ ID NO: 33120 - RNA, 22 nt, Artificial Sequence
  Synthetic
caccuuuacuaaaaucuuaaga

SEQ ID NO: 33121 - RNA, 23 nt, Artificial Sequence
  Synthetic
acaccuuuacuaaaaucuuaaga

SEQ ID NO: 33122 - RNA, 24 nt, Artificial Sequence
  Synthetic
aacaccuuuacuaaaaucuuaaga

SEQ ID NO: 33123 - RNA, 21 nt, Artificial Sequence
  Synthetic
auuuucuuccauucuuuaaga

SEQ ID NO: 33124 - RNA, 22 nt, Artificial Sequence
  Synthetic
aauuuucuuccauucuuuaaga

SEQ ID NO: 33125 - RNA, 24 nt, Artificial Sequence
  Synthetic
ugaauuuucuuccauucuuuaaga

SEQ ID NO: 33126 - RNA, 18 nt, Artificial Sequence
  Synthetic
uaagacaacuguuuaaga

SEQ ID NO: 33127 - RNA, 21 nt, Artificial Sequence
  Synthetic
agguaagacaacuguuuaaga

SEQ ID NO: 33128 - RNA, 22 nt, Artificial Sequence
  Synthetic
uagguaagacaacuguuuaaga

SEQ ID NO: 33129 - RNA, 24 nt, Artificial Sequence
  Synthetic
uguagguaagacaacuguuuaaga

SEQ ID NO: 33130 - RNA, 18 nt, Artificial Sequence
  Synthetic
cuaagcaacauuuuaaga

SEQ ID NO: 33131 - RNA, 19 nt, Artificial Sequence
  Synthetic
ccuaagcaacauuuuaaga

SEQ ID NO: 33132 - RNA, 21 nt, Artificial Sequence
  Synthetic
ugccuaagcaacauuuuaaga

SEQ ID NO: 33133 - RNA, 22 nt, Artificial Sequence
  Synthetic
augccuaagcaacauuuuaaga

SEQ ID NO: 33134 - RNA, 23 nt, Artificial Sequence
  Synthetic
aaugccuaagcaacauuuuaaga

SEQ ID NO: 33135 - RNA, 19 nt, Artificial Sequence
  Synthetic
agaauuccaaguuuuaaga

SEQ ID NO: 33136 - RNA, 20 nt, Artificial Sequence
  Synthetic
cagaauuccaaguuuuaaga

SEQ ID NO: 33137 - RNA, 21 nt, Artificial Sequence
  Synthetic
acagaauuccaaguuuuaaga

SEQ ID NO: 33138 - RNA, 22 nt, Artificial Sequence
  Synthetic
aacagaauuccaaguuuuaaga

SEQ ID NO: 33139 - RNA, 23 nt, Artificial Sequence
  Synthetic
aaacagaauuccaaguuuuaaga

SEQ ID NO: 33140 - RNA, 19 nt, Artificial Sequence
  Synthetic
aguuguaauuggaaacaga

SEQ ID NO: 33141 - RNA, 20 nt, Artificial Sequence
  Synthetic
aaguuguaauuggaaacaga

SEQ ID NO: 33142 - RNA, 21 nt, Artificial Sequence
  Synthetic
uaaguuguaauuggaaacaga

SEQ ID NO: 33143 - RNA, 23 nt, Artificial Sequence
  Synthetic
aguaaguuguaauuggaaacaga

SEQ ID NO: 33144 - RNA, 24 nt, Artificial Sequence
  Synthetic
aaguaaguuguaauuggaaacaga

SEQ ID NO: 33145 - RNA, 18 nt, Artificial Sequence
  Synthetic
cuaugugcuaagaacaga

SEQ ID NO: 33146 - RNA, 19 nt, Artificial Sequence
  Synthetic
ucuaugugcuaagaacaga

SEQ ID NO: 33147 - RNA, 21 nt, Artificial Sequence
  Synthetic
agucuaugugcuaagaacaga

SEQ ID NO: 33148 - RNA, 22 nt, Artificial Sequence
  Synthetic
uagucuaugugcuaagaacaga

SEQ ID NO: 33149 - RNA, 23 nt, Artificial Sequence
  Synthetic
auagucuaugugcuaagaacaga

SEQ ID NO: 33150 - RNA, 24 nt, Artificial Sequence
  Synthetic
aauagucuaugugcuaagaacaga

SEQ ID NO: 33151 - RNA, 18 nt, Artificial Sequence
  Synthetic
cagagauaaaggaacaga

SEQ ID NO: 33152 - RNA, 19 nt, Artificial Sequence
  Synthetic
ucagagauaaaggaacaga

SEQ ID NO: 33153 - RNA, 21 nt, Artificial Sequence
  Synthetic
ugucagagauaaaggaacaga

SEQ ID NO: 33154 - RNA, 23 nt, Artificial Sequence
  Synthetic
agugucagagauaaaggaacaga

SEQ ID NO: 33155 - RNA, 18 nt, Artificial Sequence
  Synthetic
ugccuaucaaugaacaga

SEQ ID NO: 33156 - RNA, 19 nt, Artificial Sequence
  Synthetic
augccuaucaaugaacaga

SEQ ID NO: 33157 - RNA, 20 nt, Artificial Sequence
  Synthetic
aaugccuaucaaugaacaga

SEQ ID NO: 33158 - RNA, 21 nt, Artificial Sequence
  Synthetic
aaaugccuaucaaugaacaga

SEQ ID NO: 33159 - RNA, 22 nt, Artificial Sequence
  Synthetic
uaaaugccuaucaaugaacaga

SEQ ID NO: 33160 - RNA, 23 nt, Artificial Sequence
  Synthetic
uuaaaugccuaucaaugaacaga

SEQ ID NO: 33161 - RNA, 24 nt, Artificial Sequence
  Synthetic
cuuaaaugccuaucaaugaacaga

SEQ ID NO: 33162 - RNA, 21 nt, Artificial Sequence
  Synthetic
aagcacacagauacacacaga

SEQ ID NO: 33163 - RNA, 22 nt, Artificial Sequence
  Synthetic
caagcacacagauacacacaga

SEQ ID NO: 33164 - RNA, 23 nt, Artificial Sequence
  Synthetic
ucaagcacacagauacacacaga

SEQ ID NO: 33165 - RNA, 24 nt, Artificial Sequence
  Synthetic
cucaagcacacagauacacacaga

SEQ ID NO: 33166 - RNA, 21 nt, Artificial Sequence
  Synthetic
uuauauaucuauacacacaga

SEQ ID NO: 33167 - RNA, 23 nt, Artificial Sequence
  Synthetic
aguuauauaucuauacacacaga

SEQ ID NO: 33168 - RNA, 24 nt, Artificial Sequence
  Synthetic
caguuauauaucuauacacacaga

SEQ ID NO: 33169 - RNA, 18 nt, Artificial Sequence
  Synthetic
aauuuucuucaccacaga

SEQ ID NO: 33170 - RNA, 19 nt, Artificial Sequence
  Synthetic
uaauuuucuucaccacaga

SEQ ID NO: 33171 - RNA, 20 nt, Artificial Sequence
  Synthetic
cuaauuuucuucaccacaga

SEQ ID NO: 33172 - RNA, 21 nt, Artificial Sequence
  Synthetic
acuaauuuucuucaccacaga

SEQ ID NO: 33173 - RNA, 22 nt, Artificial Sequence
  Synthetic
uacuaauuuucuucaccacaga

SEQ ID NO: 33174 - RNA, 24 nt, Artificial Sequence
  Synthetic
aguacuaauuuucuucaccacaga

SEQ ID NO: 33175 - RNA, 18 nt, Artificial Sequence
  Synthetic
ugaaauauuugccacaga

SEQ ID NO: 33176 - RNA, 19 nt, Artificial Sequence
  Synthetic
uugaaauauuugccacaga

SEQ ID NO: 33177 - RNA, 20 nt, Artificial Sequence
  Synthetic
auugaaauauuugccacaga

SEQ ID NO: 33178 - RNA, 21 nt, Artificial Sequence
  Synthetic
aauugaaauauuugccacaga

SEQ ID NO: 33179 - RNA, 22 nt, Artificial Sequence
  Synthetic
uaauugaaauauuugccacaga

SEQ ID NO: 33180 - RNA, 24 nt, Artificial Sequence
  Synthetic
aguaauugaaauauuugccacaga

SEQ ID NO: 33181 - RNA, 18 nt, Artificial Sequence
  Synthetic
cuaacgccauuccacaga

SEQ ID NO: 33182 - RNA, 19 nt, Artificial Sequence
  Synthetic
acuaacgccauuccacaga

SEQ ID NO: 33183 - RNA, 20 nt, Artificial Sequence
  Synthetic
cacuaacgccauuccacaga

SEQ ID NO: 33184 - RNA, 21 nt, Artificial Sequence
  Synthetic
acacuaacgccauuccacaga

SEQ ID NO: 33185 - RNA, 22 nt, Artificial Sequence
  Synthetic
aacacuaacgccauuccacaga

SEQ ID NO: 33186 - RNA, 23 nt, Artificial Sequence
  Synthetic
aaacacuaacgccauuccacaga

SEQ ID NO: 33187 - RNA, 18 nt, Artificial Sequence
  Synthetic
augaaaugcuuccacaga

SEQ ID NO: 33188 - RNA, 19 nt, Artificial Sequence
  Synthetic
aaugaaaugcuuccacaga

SEQ ID NO: 33189 - RNA, 20 nt, Artificial Sequence
  Synthetic
uaaugaaaugcuuccacaga

SEQ ID NO: 33190 - RNA, 22 nt, Artificial Sequence
  Synthetic
aguaaugaaaugcuuccacaga

SEQ ID NO: 33191 - RNA, 23 nt, Artificial Sequence
  Synthetic
aaguaaugaaaugcuuccacaga

SEQ ID NO: 33192 - RNA, 24 nt, Artificial Sequence
  Synthetic
aaaguaaugaaaugcuuccacaga

SEQ ID NO: 33193 - RNA, 18 nt, Artificial Sequence
  Synthetic
cucaaaaaauuucacaga

SEQ ID NO: 33194 - RNA, 19 nt, Artificial Sequence
  Synthetic
ucucaaaaaauuucacaga

SEQ ID NO: 33195 - RNA, 20 nt, Artificial Sequence
  Synthetic
aucucaaaaaauuucacaga

SEQ ID NO: 33196 - RNA, 22 nt, Artificial Sequence
  Synthetic
ugaucucaaaaaauuucacaga

SEQ ID NO: 33197 - RNA, 23 nt, Artificial Sequence
  Synthetic
augaucucaaaaaauuucacaga

SEQ ID NO: 33198 - RNA, 18 nt, Artificial Sequence
  Synthetic
aagucaaaaugggacaga

SEQ ID NO: 33199 - RNA, 20 nt, Artificial Sequence
  Synthetic
ugaagucaaaaugggacaga

SEQ ID NO: 33200 - RNA, 21 nt, Artificial Sequence
  Synthetic
uugaagucaaaaugggacaga

SEQ ID NO: 33201 - RNA, 22 nt, Artificial Sequence
  Synthetic
uuugaagucaaaaugggacaga

SEQ ID NO: 33202 - RNA, 23 nt, Artificial Sequence
  Synthetic
cuuugaagucaaaaugggacaga

SEQ ID NO: 33203 - RNA, 21 nt, Artificial Sequence
  Synthetic
acagagcuagucagugacaga

SEQ ID NO: 33204 - RNA, 22 nt, Artificial Sequence
  Synthetic
uacagagcuagucagugacaga

SEQ ID NO: 33205 - RNA, 23 nt, Artificial Sequence
  Synthetic
uuacagagcuagucagugacaga

SEQ ID NO: 33206 - RNA, 20 nt, Artificial Sequence
  Synthetic
aggacuuguagaaauacaga

SEQ ID NO: 33207 - RNA, 22 nt, Artificial Sequence
  Synthetic
agaggacuuguagaaauacaga

SEQ ID NO: 33208 - RNA, 23 nt, Artificial Sequence
  Synthetic
uagaggacuuguagaaauacaga

SEQ ID NO: 33209 - RNA, 24 nt, Artificial Sequence
  Synthetic
cuagaggacuuguagaaauacaga

SEQ ID NO: 33210 - RNA, 18 nt, Artificial Sequence
  Synthetic
aauuuauauuaauacaga

SEQ ID NO: 33211 - RNA, 20 nt, Artificial Sequence
  Synthetic
ugaauuuauauuaauacaga

SEQ ID NO: 33212 - RNA, 22 nt, Artificial Sequence
  Synthetic
agugaauuuauauuaauacaga

SEQ ID NO: 33213 - RNA, 23 nt, Artificial Sequence
  Synthetic
aagugaauuuauauuaauacaga

SEQ ID NO: 33214 - RNA, 24 nt, Artificial Sequence
  Synthetic
uaagugaauuuauauuaauacaga

SEQ ID NO: 33215 - RNA, 18 nt, Artificial Sequence
  Synthetic
uuuacauucaguuacaga

SEQ ID NO: 33216 - RNA, 19 nt, Artificial Sequence
  Synthetic
uuuuacauucaguuacaga

SEQ ID NO: 33217 - RNA, 21 nt, Artificial Sequence
  Synthetic
aguuuuacauucaguuacaga

SEQ ID NO: 33218 - RNA, 23 nt, Artificial Sequence
  Synthetic
agaguuuuacauucaguuacaga

SEQ ID NO: 33219 - RNA, 24 nt, Artificial Sequence
  Synthetic
uagaguuuuacauucaguuacaga

SEQ ID NO: 33220 - RNA, 18 nt, Artificial Sequence
  Synthetic
auacaugaacucaccaga

SEQ ID NO: 33221 - RNA, 19 nt, Artificial Sequence
  Synthetic
cauacaugaacucaccaga

SEQ ID NO: 33222 - RNA, 20 nt, Artificial Sequence
  Synthetic
acauacaugaacucaccaga

SEQ ID NO: 33223 - RNA, 21 nt, Artificial Sequence
  Synthetic
uacauacaugaacucaccaga

SEQ ID NO: 33224 - RNA, 22 nt, Artificial Sequence
  Synthetic
auacauacaugaacucaccaga

SEQ ID NO: 33225 - RNA, 23 nt, Artificial Sequence
  Synthetic
uauacauacaugaacucaccaga

SEQ ID NO: 33226 - RNA, 24 nt, Artificial Sequence
  Synthetic
auauacauacaugaacucaccaga

SEQ ID NO: 33227 - RNA, 18 nt, Artificial Sequence
  Synthetic
aaagauaaugucaccaga

SEQ ID NO: 33228 - RNA, 19 nt, Artificial Sequence
  Synthetic
caaagauaaugucaccaga

SEQ ID NO: 33229 - RNA, 21 nt, Artificial Sequence
  Synthetic
agcaaagauaaugucaccaga

SEQ ID NO: 33230 - RNA, 23 nt, Artificial Sequence
  Synthetic
agagcaaagauaaugucaccaga

SEQ ID NO: 33231 - RNA, 18 nt, Artificial Sequence
  Synthetic
cuguaugggaaacccaga

SEQ ID NO: 33232 - RNA, 20 nt, Artificial Sequence
  Synthetic
ugcuguaugggaaacccaga

SEQ ID NO: 33233 - RNA, 21 nt, Artificial Sequence
  Synthetic
cugcuguaugggaaacccaga

SEQ ID NO: 33234 - RNA, 22 nt, Artificial Sequence
  Synthetic
ucugcuguaugggaaacccaga

SEQ ID NO: 33235 - RNA, 24 nt, Artificial Sequence
  Synthetic
agucugcuguaugggaaacccaga

SEQ ID NO: 33236 - RNA, 18 nt, Artificial Sequence
  Synthetic
agguuauauguacccaga

SEQ ID NO: 33237 - RNA, 20 nt, Artificial Sequence
  Synthetic
ugagguuauauguacccaga

SEQ ID NO: 33238 - RNA, 21 nt, Artificial Sequence
  Synthetic
cugagguuauauguacccaga

SEQ ID NO: 33239 - RNA, 22 nt, Artificial Sequence
  Synthetic
ccugagguuauauguacccaga

SEQ ID NO: 33240 - RNA, 18 nt, Artificial Sequence
  Synthetic
uuauuugggcaucccaga

SEQ ID NO: 33241 - RNA, 19 nt, Artificial Sequence
  Synthetic
auuauuugggcaucccaga

SEQ ID NO: 33242 - RNA, 20 nt, Artificial Sequence
  Synthetic
aauuauuugggcaucccaga

SEQ ID NO: 33243 - RNA, 23 nt, Artificial Sequence
  Synthetic
uggaauuauuugggcaucccaga

SEQ ID NO: 33244 - RNA, 24 nt, Artificial Sequence
  Synthetic
auggaauuauuugggcaucccaga

SEQ ID NO: 33245 - RNA, 21 nt, Artificial Sequence
  Synthetic
uaauaauuaaaacaagccaga

SEQ ID NO: 33246 - RNA, 22 nt, Artificial Sequence
  Synthetic
cuaauaauuaaaacaagccaga

SEQ ID NO: 33247 - RNA, 23 nt, Artificial Sequence
  Synthetic
ccuaauaauuaaaacaagccaga

SEQ ID NO: 33248 - RNA, 24 nt, Artificial Sequence
  Synthetic
cccuaauaauuaaaacaagccaga

SEQ ID NO: 33249 - RNA, 21 nt, Artificial Sequence
  Synthetic
cucaaaugugaaauguccaga

SEQ ID NO: 33250 - RNA, 22 nt, Artificial Sequence
  Synthetic
ucucaaaugugaaauguccaga

SEQ ID NO: 33251 - RNA, 23 nt, Artificial Sequence
  Synthetic
uucucaaaugugaaauguccaga

SEQ ID NO: 33252 - RNA, 24 nt, Artificial Sequence
  Synthetic
uuucucaaaugugaaauguccaga

SEQ ID NO: 33253 - RNA, 18 nt, Artificial Sequence
  Synthetic
aagccuucagauuccaga

SEQ ID NO: 33254 - RNA, 19 nt, Artificial Sequence
  Synthetic
aaagccuucagauuccaga

SEQ ID NO: 33255 - RNA, 20 nt, Artificial Sequence
  Synthetic
aaaagccuucagauuccaga

SEQ ID NO: 33256 - RNA, 21 nt, Artificial Sequence
  Synthetic
uaaaagccuucagauuccaga

SEQ ID NO: 33257 - RNA, 22 nt, Artificial Sequence
  Synthetic
auaaaagccuucagauuccaga

SEQ ID NO: 33258 - RNA, 23 nt, Artificial Sequence
  Synthetic
uauaaaagccuucagauuccaga

SEQ ID NO: 33259 - RNA, 24 nt, Artificial Sequence
  Synthetic
uuauaaaagccuucagauuccaga

SEQ ID NO: 33260 - RNA, 19 nt, Artificial Sequence
  Synthetic
agggaauuaauauuccaga

SEQ ID NO: 33261 - RNA, 20 nt, Artificial Sequence
  Synthetic
uagggaauuaauauuccaga

SEQ ID NO: 33262 - RNA, 22 nt, Artificial Sequence
  Synthetic
aguagggaauuaauauuccaga

SEQ ID NO: 33263 - RNA, 23 nt, Artificial Sequence
  Synthetic
caguagggaauuaauauuccaga

SEQ ID NO: 33264 - RNA, 18 nt, Artificial Sequence
  Synthetic
aguaccuauugaagcaga

SEQ ID NO: 33265 - RNA, 20 nt, Artificial Sequence
  Synthetic
agaguaccuauugaagcaga

SEQ ID NO: 33266 - RNA, 21 nt, Artificial Sequence
  Synthetic
aagaguaccuauugaagcaga

SEQ ID NO: 33267 - RNA, 22 nt, Artificial Sequence
  Synthetic
uaagaguaccuauugaagcaga

SEQ ID NO: 33268 - RNA, 24 nt, Artificial Sequence
  Synthetic
aguaagaguaccuauugaagcaga

SEQ ID NO: 33269 - RNA, 18 nt, Artificial Sequence
  Synthetic
agguggagucccagcaga

SEQ ID NO: 33270 - RNA, 21 nt, Artificial Sequence
  Synthetic
aggagguggagucccagcaga

SEQ ID NO: 33271 - RNA, 24 nt, Artificial Sequence
  Synthetic
uggaggagguggagucccagcaga

SEQ ID NO: 33272 - RNA, 18 nt, Artificial Sequence
  Synthetic
auugguuucagcagcaga

SEQ ID NO: 33273 - RNA, 21 nt, Artificial Sequence
  Synthetic
aggauugguuucagcagcaga

SEQ ID NO: 33274 - RNA, 23 nt, Artificial Sequence
  Synthetic
ugaggauugguuucagcagcaga

SEQ ID NO: 33275 - RNA, 21 nt, Artificial Sequence
  Synthetic
ucuuaaaaagugaagagcaga

SEQ ID NO: 33276 - RNA, 22 nt, Artificial Sequence
  Synthetic
uucuuaaaaagugaagagcaga

SEQ ID NO: 33277 - RNA, 23 nt, Artificial Sequence
  Synthetic
cuucuuaaaaagugaagagcaga

SEQ ID NO: 33278 - RNA, 24 nt, Artificial Sequence
  Synthetic
ucuucuuaaaaagugaagagcaga

SEQ ID NO: 33279 - RNA, 18 nt, Artificial Sequence
  Synthetic
aaaauacauugacgcaga

SEQ ID NO: 33280 - RNA, 19 nt, Artificial Sequence
  Synthetic
caaaauacauugacgcaga

SEQ ID NO: 33281 - RNA, 21 nt, Artificial Sequence
  Synthetic
ugcaaaauacauugacgcaga

SEQ ID NO: 33282 - RNA, 22 nt, Artificial Sequence
  Synthetic
augcaaaauacauugacgcaga

SEQ ID NO: 33283 - RNA, 23 nt, Artificial Sequence
  Synthetic
aaugcaaaauacauugacgcaga

SEQ ID NO: 33284 - RNA, 24 nt, Artificial Sequence
  Synthetic
uaaugcaaaauacauugacgcaga

SEQ ID NO: 33285 - RNA, 18 nt, Artificial Sequence
  Synthetic
aacaagaagugaggcaga

SEQ ID NO: 33286 - RNA, 19 nt, Artificial Sequence
  Synthetic
aaacaagaagugaggcaga

SEQ ID NO: 33287 - RNA, 20 nt, Artificial Sequence
  Synthetic
aaaacaagaagugaggcaga

SEQ ID NO: 33288 - RNA, 21 nt, Artificial Sequence
  Synthetic
aaaaacaagaagugaggcaga

SEQ ID NO: 33289 - RNA, 22 nt, Artificial Sequence
  Synthetic
aaaaaacaagaagugaggcaga

SEQ ID NO: 33290 - RNA, 24 nt, Artificial Sequence
  Synthetic
ugaaaaaacaagaagugaggcaga

SEQ ID NO: 33291 - RNA, 18 nt, Artificial Sequence
  Synthetic
agauucagugugggcaga

SEQ ID NO: 33292 - RNA, 19 nt, Artificial Sequence
  Synthetic
aagauucagugugggcaga

SEQ ID NO: 33293 - RNA, 20 nt, Artificial Sequence
  Synthetic
aaagauucagugugggcaga

SEQ ID NO: 33294 - RNA, 21 nt, Artificial Sequence
  Synthetic
uaaagauucagugugggcaga

SEQ ID NO: 33295 - RNA, 22 nt, Artificial Sequence
  Synthetic
uuaaagauucagugugggcaga

SEQ ID NO: 33296 - RNA, 23 nt, Artificial Sequence
  Synthetic
uuuaaagauucagugugggcaga

SEQ ID NO: 33297 - RNA, 24 nt, Artificial Sequence
  Synthetic
uuuuaaagauucagugugggcaga

SEQ ID NO: 33298 - RNA, 18 nt, Artificial Sequence
  Synthetic
uguuuuuaggauggcaga

SEQ ID NO: 33299 - RNA, 19 nt, Artificial Sequence
  Synthetic
cuguuuuuaggauggcaga

SEQ ID NO: 33300 - RNA, 20 nt, Artificial Sequence
  Synthetic
ucuguuuuuaggauggcaga

SEQ ID NO: 33301 - RNA, 21 nt, Artificial Sequence
  Synthetic
uucuguuuuuaggauggcaga

SEQ ID NO: 33302 - RNA, 22 nt, Artificial Sequence
  Synthetic
cuucuguuuuuaggauggcaga

SEQ ID NO: 33303 - RNA, 23 nt, Artificial Sequence
  Synthetic
ccuucuguuuuuaggauggcaga

SEQ ID NO: 33304 - RNA, 24 nt, Artificial Sequence
  Synthetic
uccuucuguuuuuaggauggcaga

SEQ ID NO: 33305 - RNA, 21 nt, Artificial Sequence
  Synthetic
uuaaaacauaaaauuggcaga

SEQ ID NO: 33306 - RNA, 22 nt, Artificial Sequence
  Synthetic
cuuaaaacauaaaauuggcaga

SEQ ID NO: 33307 - RNA, 23 nt, Artificial Sequence
  Synthetic
acuuaaaacauaaaauuggcaga

SEQ ID NO: 33308 - RNA, 21 nt, Artificial Sequence
  Synthetic
uuuagaauuuccuuuugcaga

SEQ ID NO: 33309 - RNA, 22 nt, Artificial Sequence
  Synthetic
auuuagaauuuccuuuugcaga

SEQ ID NO: 33310 - RNA, 23 nt, Artificial Sequence
  Synthetic
uauuuagaauuuccuuuugcaga

SEQ ID NO: 33311 - RNA, 24 nt, Artificial Sequence
  Synthetic
auauuuagaauuuccuuuugcaga

SEQ ID NO: 33312 - RNA, 19 nt, Artificial Sequence
  Synthetic
ugcauauuaagacaucaga

SEQ ID NO: 33313 - RNA, 20 nt, Artificial Sequence
  Synthetic
augcauauuaagacaucaga

SEQ ID NO: 33314 - RNA, 21 nt, Artificial Sequence
  Synthetic
caugcauauuaagacaucaga

SEQ ID NO: 33315 - RNA, 22 nt, Artificial Sequence
  Synthetic
acaugcauauuaagacaucaga

SEQ ID NO: 33316 - RNA, 24 nt, Artificial Sequence
  Synthetic
agacaugcauauuaagacaucaga

SEQ ID NO: 33317 - RNA, 18 nt, Artificial Sequence
  Synthetic
uaaaacauuaccaucaga

SEQ ID NO: 33318 - RNA, 19 nt, Artificial Sequence
  Synthetic
cuaaaacauuaccaucaga

SEQ ID NO: 33319 - RNA, 21 nt, Artificial Sequence
  Synthetic
agcuaaaacauuaccaucaga

SEQ ID NO: 33320 - RNA, 22 nt, Artificial Sequence
  Synthetic
cagcuaaaacauuaccaucaga

SEQ ID NO: 33321 - RNA, 24 nt, Artificial Sequence
  Synthetic
agcagcuaaaacauuaccaucaga

SEQ ID NO: 33322 - RNA, 18 nt, Artificial Sequence
  Synthetic
uuucucagaaucaucaga

SEQ ID NO: 33323 - RNA, 19 nt, Artificial Sequence
  Synthetic
uuuucucagaaucaucaga

SEQ ID NO: 33324 - RNA, 20 nt, Artificial Sequence
  Synthetic
uuuuucucagaaucaucaga

SEQ ID NO: 33325 - RNA, 21 nt, Artificial Sequence
  Synthetic
auuuuucucagaaucaucaga

SEQ ID NO: 33326 - RNA, 23 nt, Artificial Sequence
  Synthetic
ugauuuuucucagaaucaucaga

SEQ ID NO: 33327 - RNA, 24 nt, Artificial Sequence
  Synthetic
uugauuuuucucagaaucaucaga

SEQ ID NO: 33328 - RNA, 18 nt, Artificial Sequence
  Synthetic
aauugaaaugucaucaga

SEQ ID NO: 33329 - RNA, 19 nt, Artificial Sequence
  Synthetic
uaauugaaaugucaucaga

SEQ ID NO: 33330 - RNA, 20 nt, Artificial Sequence
  Synthetic
auaauugaaaugucaucaga

SEQ ID NO: 33331 - RNA, 21 nt, Artificial Sequence
  Synthetic
uauaauugaaaugucaucaga

SEQ ID NO: 33332 - RNA, 22 nt, Artificial Sequence
  Synthetic
uuauaauugaaaugucaucaga

SEQ ID NO: 33333 - RNA, 23 nt, Artificial Sequence
  Synthetic
cuuauaauugaaaugucaucaga

SEQ ID NO: 33334 - RNA, 18 nt, Artificial Sequence
  Synthetic
auuuuuagauugaucaga

SEQ ID NO: 33335 - RNA, 19 nt, Artificial Sequence
  Synthetic
uauuuuuagauugaucaga

SEQ ID NO: 33336 - RNA, 20 nt, Artificial Sequence
  Synthetic
cuauuuuuagauugaucaga

SEQ ID NO: 33337 - RNA, 22 nt, Artificial Sequence
  Synthetic
agcuauuuuuagauugaucaga

SEQ ID NO: 33338 - RNA, 24 nt, Artificial Sequence
  Synthetic
agagcuauuuuuagauugaucaga

SEQ ID NO: 33339 - RNA, 18 nt, Artificial Sequence
  Synthetic
cacucugggcuccucaga

SEQ ID NO: 33340 - RNA, 19 nt, Artificial Sequence
  Synthetic
ucacucugggcuccucaga

SEQ ID NO: 33341 - RNA, 20 nt, Artificial Sequence
  Synthetic
aucacucugggcuccucaga

SEQ ID NO: 33342 - RNA, 21 nt, Artificial Sequence
  Synthetic
aaucacucugggcuccucaga

SEQ ID NO: 33343 - RNA, 22 nt, Artificial Sequence
  Synthetic
aaaucacucugggcuccucaga

SEQ ID NO: 33344 - RNA, 23 nt, Artificial Sequence
  Synthetic
aaaaucacucugggcuccucaga

SEQ ID NO: 33345 - RNA, 24 nt, Artificial Sequence
  Synthetic
uaaaaucacucugggcuccucaga

SEQ ID NO: 33346 - RNA, 18 nt, Artificial Sequence
  Synthetic
uggucucuuaaucucaga

SEQ ID NO: 33347 - RNA, 19 nt, Artificial Sequence
  Synthetic
uuggucucuuaaucucaga

SEQ ID NO: 33348 - RNA, 20 nt, Artificial Sequence
  Synthetic
auuggucucuuaaucucaga

SEQ ID NO: 33349 - RNA, 21 nt, Artificial Sequence
  Synthetic
cauuggucucuuaaucucaga

SEQ ID NO: 33350 - RNA, 22 nt, Artificial Sequence
  Synthetic
ccauuggucucuuaaucucaga

SEQ ID NO: 33351 - RNA, 23 nt, Artificial Sequence
  Synthetic
accauuggucucuuaaucucaga

SEQ ID NO: 33352 - RNA, 24 nt, Artificial Sequence
  Synthetic
caccauuggucucuuaaucucaga

SEQ ID NO: 33353 - RNA, 18 nt, Artificial Sequence
  Synthetic
aucucaauugcucucaga

SEQ ID NO: 33354 - RNA, 21 nt, Artificial Sequence
  Synthetic
aggaucucaauugcucucaga

SEQ ID NO: 33355 - RNA, 23 nt, Artificial Sequence
  Synthetic
agaggaucucaauugcucucaga

SEQ ID NO: 33356 - RNA, 24 nt, Artificial Sequence
  Synthetic
cagaggaucucaauugcucucaga

SEQ ID NO: 33357 - RNA, 18 nt, Artificial Sequence
  Synthetic
uuccacuuuuacgucaga

SEQ ID NO: 33358 - RNA, 19 nt, Artificial Sequence
  Synthetic
auuccacuuuuacgucaga

SEQ ID NO: 33359 - RNA, 20 nt, Artificial Sequence
  Synthetic
aauuccacuuuuacgucaga

SEQ ID NO: 33360 - RNA, 21 nt, Artificial Sequence
  Synthetic
caauuccacuuuuacgucaga

SEQ ID NO: 33361 - RNA, 22 nt, Artificial Sequence
  Synthetic
ucaauuccacuuuuacgucaga

SEQ ID NO: 33362 - RNA, 23 nt, Artificial Sequence
  Synthetic
uucaauuccacuuuuacgucaga

SEQ ID NO: 33363 - RNA, 24 nt, Artificial Sequence
  Synthetic
cuucaauuccacuuuuacgucaga

SEQ ID NO: 33364 - RNA, 19 nt, Artificial Sequence
  Synthetic
ugcaaauuguauggucaga

SEQ ID NO: 33365 - RNA, 20 nt, Artificial Sequence
  Synthetic
uugcaaauuguauggucaga

SEQ ID NO: 33366 - RNA, 21 nt, Artificial Sequence
  Synthetic
uuugcaaauuguauggucaga

SEQ ID NO: 33367 - RNA, 22 nt, Artificial Sequence
  Synthetic
cuuugcaaauuguauggucaga

SEQ ID NO: 33368 - RNA, 24 nt, Artificial Sequence
  Synthetic
ugcuuugcaaauuguauggucaga

SEQ ID NO: 33369 - RNA, 19 nt, Artificial Sequence
  Synthetic
ugucauccuauaugucaga

SEQ ID NO: 33370 - RNA, 20 nt, Artificial Sequence
  Synthetic
uugucauccuauaugucaga

SEQ ID NO: 33371 - RNA, 21 nt, Artificial Sequence
  Synthetic
uuugucauccuauaugucaga

SEQ ID NO: 33372 - RNA, 22 nt, Artificial Sequence
  Synthetic
cuuugucauccuauaugucaga

SEQ ID NO: 33373 - RNA, 23 nt, Artificial Sequence
  Synthetic
ucuuugucauccuauaugucaga

SEQ ID NO: 33374 - RNA, 24 nt, Artificial Sequence
  Synthetic
uucuuugucauccuauaugucaga

SEQ ID NO: 33375 - RNA, 18 nt, Artificial Sequence
  Synthetic
acugaaacaagugucaga

SEQ ID NO: 33376 - RNA, 19 nt, Artificial Sequence
  Synthetic
aacugaaacaagugucaga

SEQ ID NO: 33377 - RNA, 20 nt, Artificial Sequence
  Synthetic
aaacugaaacaagugucaga

SEQ ID NO: 33378 - RNA, 21 nt, Artificial Sequence
  Synthetic
uaaacugaaacaagugucaga

SEQ ID NO: 33379 - RNA, 22 nt, Artificial Sequence
  Synthetic
uuaaacugaaacaagugucaga

SEQ ID NO: 33380 - RNA, 23 nt, Artificial Sequence
  Synthetic
cuuaaacugaaacaagugucaga

SEQ ID NO: 33381 - RNA, 24 nt, Artificial Sequence
  Synthetic
ucuuaaacugaaacaagugucaga

SEQ ID NO: 33382 - RNA, 21 nt, Artificial Sequence
  Synthetic
caugcacauacuuuugucaga

SEQ ID NO: 33383 - RNA, 22 nt, Artificial Sequence
  Synthetic
acaugcacauacuuuugucaga

SEQ ID NO: 33384 - RNA, 23 nt, Artificial Sequence
  Synthetic
aacaugcacauacuuuugucaga

SEQ ID NO: 33385 - RNA, 24 nt, Artificial Sequence
  Synthetic
aaacaugcacauacuuuugucaga

SEQ ID NO: 33386 - RNA, 18 nt, Artificial Sequence
  Synthetic
auuguuuggagcuucaga

SEQ ID NO: 33387 - RNA, 19 nt, Artificial Sequence
  Synthetic
aauuguuuggagcuucaga

SEQ ID NO: 33388 - RNA, 20 nt, Artificial Sequence
  Synthetic
caauuguuuggagcuucaga

SEQ ID NO: 33389 - RNA, 21 nt, Artificial Sequence
  Synthetic
ccaauuguuuggagcuucaga

SEQ ID NO: 33390 - RNA, 22 nt, Artificial Sequence
  Synthetic
uccaauuguuuggagcuucaga

SEQ ID NO: 33391 - RNA, 23 nt, Artificial Sequence
  Synthetic
auccaauuguuuggagcuucaga

SEQ ID NO: 33392 - RNA, 24 nt, Artificial Sequence
  Synthetic
aauccaauuguuuggagcuucaga

SEQ ID NO: 33393 - RNA, 18 nt, Artificial Sequence
  Synthetic
ccucuaagcuucuucaga

SEQ ID NO: 33394 - RNA, 19 nt, Artificial Sequence
  Synthetic
uccucuaagcuucuucaga

SEQ ID NO: 33395 - RNA, 21 nt, Artificial Sequence
  Synthetic
uguccucuaagcuucuucaga

SEQ ID NO: 33396 - RNA, 22 nt, Artificial Sequence
  Synthetic
uuguccucuaagcuucuucaga

SEQ ID NO: 33397 - RNA, 23 nt, Artificial Sequence
  Synthetic
auuguccucuaagcuucuucaga

SEQ ID NO: 33398 - RNA, 21 nt, Artificial Sequence
  Synthetic
ccuagaaagcagaauuucaga

SEQ ID NO: 33399 - RNA, 22 nt, Artificial Sequence
  Synthetic
uccuagaaagcagaauuucaga

SEQ ID NO: 33400 - RNA, 23 nt, Artificial Sequence
  Synthetic
cuccuagaaagcagaauuucaga

SEQ ID NO: 33401 - RNA, 24 nt, Artificial Sequence
  Synthetic
ucuccuagaaagcagaauuucaga

SEQ ID NO: 33402 - RNA, 18 nt, Artificial Sequence
  Synthetic
auaggcagagauuucaga

SEQ ID NO: 33403 - RNA, 19 nt, Artificial Sequence
  Synthetic
uauaggcagagauuucaga

SEQ ID NO: 33404 - RNA, 20 nt, Artificial Sequence
  Synthetic
uuauaggcagagauuucaga

SEQ ID NO: 33405 - RNA, 21 nt, Artificial Sequence
  Synthetic
auuauaggcagagauuucaga

SEQ ID NO: 33406 - RNA, 22 nt, Artificial Sequence
  Synthetic
aauuauaggcagagauuucaga

SEQ ID NO: 33407 - RNA, 23 nt, Artificial Sequence
  Synthetic
caauuauaggcagagauuucaga

SEQ ID NO: 33408 - RNA, 24 nt, Artificial Sequence
  Synthetic
ccaauuauaggcagagauuucaga

SEQ ID NO: 33409 - RNA, 19 nt, Artificial Sequence
  Synthetic
agguaguuuaucuuucaga

SEQ ID NO: 33410 - RNA, 21 nt, Artificial Sequence
  Synthetic
ugagguaguuuaucuuucaga

SEQ ID NO: 33411 - RNA, 22 nt, Artificial Sequence
  Synthetic
uugagguaguuuaucuuucaga

SEQ ID NO: 33412 - RNA, 23 nt, Artificial Sequence
  Synthetic
uuugagguaguuuaucuuucaga

SEQ ID NO: 33413 - RNA, 24 nt, Artificial Sequence
  Synthetic
uuuugagguaguuuaucuuucaga

SEQ ID NO: 33414 - RNA, 18 nt, Artificial Sequence
  Synthetic
aacagaaaucucaagaga

SEQ ID NO: 33415 - RNA, 20 nt, Artificial Sequence
  Synthetic
ugaacagaaaucucaagaga

SEQ ID NO: 33416 - RNA, 21 nt, Artificial Sequence
  Synthetic
uugaacagaaaucucaagaga

SEQ ID NO: 33417 - RNA, 22 nt, Artificial Sequence
  Synthetic
uuugaacagaaaucucaagaga

SEQ ID NO: 33418 - RNA, 23 nt, Artificial Sequence
  Synthetic
auuugaacagaaaucucaagaga

SEQ ID NO: 33419 - RNA, 24 nt, Artificial Sequence
  Synthetic
uauuugaacagaaaucucaagaga

SEQ ID NO: 33420 - RNA, 18 nt, Artificial Sequence
  Synthetic
auuucaacagcgaagaga

SEQ ID NO: 33421 - RNA, 19 nt, Artificial Sequence
  Synthetic
aauuucaacagcgaagaga

SEQ ID NO: 33422 - RNA, 21 nt, Artificial Sequence
  Synthetic
agaauuucaacagcgaagaga

SEQ ID NO: 33423 - RNA, 22 nt, Artificial Sequence
  Synthetic
uagaauuucaacagcgaagaga

SEQ ID NO: 33424 - RNA, 24 nt, Artificial Sequence
  Synthetic
uguagaauuucaacagcgaagaga

SEQ ID NO: 33425 - RNA, 18 nt, Artificial Sequence
  Synthetic
ugcuagugaaugaagaga

SEQ ID NO: 33426 - RNA, 19 nt, Artificial Sequence
  Synthetic
augcuagugaaugaagaga

SEQ ID NO: 33427 - RNA, 20 nt, Artificial Sequence
  Synthetic
aaugcuagugaaugaagaga

SEQ ID NO: 33428 - RNA, 21 nt, Artificial Sequence
  Synthetic
aaaugcuagugaaugaagaga

SEQ ID NO: 33429 - RNA, 22 nt, Artificial Sequence
  Synthetic
caaaugcuagugaaugaagaga

SEQ ID NO: 33430 - RNA, 23 nt, Artificial Sequence
  Synthetic
acaaaugcuagugaaugaagaga

SEQ ID NO: 33431 - RNA, 24 nt, Artificial Sequence
  Synthetic
uacaaaugcuagugaaugaagaga

SEQ ID NO: 33432 - RNA, 21 nt, Artificial Sequence
  Synthetic
uaaacaauuauuuugaagaga

SEQ ID NO: 33433 - RNA, 22 nt, Artificial Sequence
  Synthetic
uuaaacaauuauuuugaagaga

SEQ ID NO: 33434 - RNA, 23 nt, Artificial Sequence
  Synthetic
uuuaaacaauuauuuugaagaga

SEQ ID NO: 33435 - RNA, 24 nt, Artificial Sequence
  Synthetic
cuuuaaacaauuauuuugaagaga

SEQ ID NO: 33436 - RNA, 21 nt, Artificial Sequence
  Synthetic
ugacuaauaaugaauaagaga

SEQ ID NO: 33437 - RNA, 22 nt, Artificial Sequence
  Synthetic
uugacuaauaaugaauaagaga

SEQ ID NO: 33438 - RNA, 23 nt, Artificial Sequence
  Synthetic
auugacuaauaaugaauaagaga

SEQ ID NO: 33439 - RNA, 18 nt, Artificial Sequence
  Synthetic
ucugagcuugcacagaga

SEQ ID NO: 33440 - RNA, 20 nt, Artificial Sequence
  Synthetic
ugucugagcuugcacagaga

SEQ ID NO: 33441 - RNA, 21 nt, Artificial Sequence
  Synthetic
augucugagcuugcacagaga

SEQ ID NO: 33442 - RNA, 22 nt, Artificial Sequence
  Synthetic
aaugucugagcuugcacagaga

SEQ ID NO: 33443 - RNA, 18 nt, Artificial Sequence
  Synthetic
cagcccuuuggacagaga

SEQ ID NO: 33444 - RNA, 19 nt, Artificial Sequence
  Synthetic
acagcccuuuggacagaga

SEQ ID NO: 33445 - RNA, 21 nt, Artificial Sequence
  Synthetic
agacagcccuuuggacagaga

SEQ ID NO: 33446 - RNA, 22 nt, Artificial Sequence
  Synthetic
uagacagcccuuuggacagaga

SEQ ID NO: 33447 - RNA, 23 nt, Artificial Sequence
  Synthetic
cuagacagcccuuuggacagaga

SEQ ID NO: 33448 - RNA, 24 nt, Artificial Sequence
  Synthetic
acuagacagcccuuuggacagaga

SEQ ID NO: 33449 - RNA, 22 nt, Artificial Sequence
  Synthetic
uguuucuguuguuugacagaga

SEQ ID NO: 33450 - RNA, 23 nt, Artificial Sequence
  Synthetic
uuguuucuguuguuugacagaga

SEQ ID NO: 33451 - RNA, 24 nt, Artificial Sequence
  Synthetic
uuuguuucuguuguuugacagaga

SEQ ID NO: 33452 - RNA, 18 nt, Artificial Sequence
  Synthetic
caguaucugcuacagaga

SEQ ID NO: 33453 - RNA, 19 nt, Artificial Sequence
  Synthetic
acaguaucugcuacagaga

SEQ ID NO: 33454 - RNA, 21 nt, Artificial Sequence
  Synthetic
ugacaguaucugcuacagaga

SEQ ID NO: 33455 - RNA, 22 nt, Artificial Sequence
  Synthetic
cugacaguaucugcuacagaga

SEQ ID NO: 33456 - RNA, 23 nt, Artificial Sequence
  Synthetic
acugacaguaucugcuacagaga

SEQ ID NO: 33457 - RNA, 24 nt, Artificial Sequence
  Synthetic
cacugacaguaucugcuacagaga

SEQ ID NO: 33458 - RNA, 18 nt, Artificial Sequence
  Synthetic
uguaugcaaauccagaga

SEQ ID NO: 33459 - RNA, 20 nt, Artificial Sequence
  Synthetic
aguguaugcaaauccagaga

SEQ ID NO: 33460 - RNA, 21 nt, Artificial Sequence
  Synthetic
caguguaugcaaauccagaga

SEQ ID NO: 33461 - RNA, 22 nt, Artificial Sequence
  Synthetic
acaguguaugcaaauccagaga

SEQ ID NO: 33462 - RNA, 23 nt, Artificial Sequence
  Synthetic
aacaguguaugcaaauccagaga

SEQ ID NO: 33463 - RNA, 24 nt, Artificial Sequence
  Synthetic
aaacaguguaugcaaauccagaga

SEQ ID NO: 33464 - RNA, 18 nt, Artificial Sequence
  Synthetic
aucagauugauccagaga

SEQ ID NO: 33465 - RNA, 19 nt, Artificial Sequence
  Synthetic
uaucagauugauccagaga

SEQ ID NO: 33466 - RNA, 20 nt, Artificial Sequence
  Synthetic
auaucagauugauccagaga

SEQ ID NO: 33467 - RNA, 21 nt, Artificial Sequence
  Synthetic
cauaucagauugauccagaga

SEQ ID NO: 33468 - RNA, 22 nt, Artificial Sequence
  Synthetic
acauaucagauugauccagaga

SEQ ID NO: 33469 - RNA, 23 nt, Artificial Sequence
  Synthetic
aacauaucagauugauccagaga

SEQ ID NO: 33470 - RNA, 24 nt, Artificial Sequence
  Synthetic
caacauaucagauugauccagaga

SEQ ID NO: 33471 - RNA, 18 nt, Artificial Sequence
  Synthetic
agcucuagggaucagaga

SEQ ID NO: 33472 - RNA, 21 nt, Artificial Sequence
  Synthetic
uggagcucuagggaucagaga

SEQ ID NO: 33473 - RNA, 22 nt, Artificial Sequence
  Synthetic
auggagcucuagggaucagaga

SEQ ID NO: 33474 - RNA, 23 nt, Artificial Sequence
  Synthetic
uauggagcucuagggaucagaga

SEQ ID NO: 33475 - RNA, 24 nt, Artificial Sequence
  Synthetic
cuauggagcucuagggaucagaga

SEQ ID NO: 33476 - RNA, 19 nt, Artificial Sequence
  Synthetic
agcagaacauggucagaga

SEQ ID NO: 33477 - RNA, 20 nt, Artificial Sequence
  Synthetic
uagcagaacauggucagaga

SEQ ID NO: 33478 - RNA, 21 nt, Artificial Sequence
  Synthetic
cuagcagaacauggucagaga

SEQ ID NO: 33479 - RNA, 24 nt, Artificial Sequence
  Synthetic
aggcuagcagaacauggucagaga

SEQ ID NO: 33480 - RNA, 19 nt, Artificial Sequence
  Synthetic
uggaacacacaaagagaga

SEQ ID NO: 33481 - RNA, 20 nt, Artificial Sequence
  Synthetic
uuggaacacacaaagagaga

SEQ ID NO: 33482 - RNA, 22 nt, Artificial Sequence
  Synthetic
aguuggaacacacaaagagaga

SEQ ID NO: 33483 - RNA, 23 nt, Artificial Sequence
  Synthetic
aaguuggaacacacaaagagaga

SEQ ID NO: 33484 - RNA, 18 nt, Artificial Sequence
  Synthetic
accagaccucaagagaga

SEQ ID NO: 33485 - RNA, 19 nt, Artificial Sequence
  Synthetic
uaccagaccucaagagaga

SEQ ID NO: 33486 - RNA, 21 nt, Artificial Sequence
  Synthetic
aguaccagaccucaagagaga

SEQ ID NO: 33487 - RNA, 22 nt, Artificial Sequence
  Synthetic
uaguaccagaccucaagagaga

SEQ ID NO: 33488 - RNA, 23 nt, Artificial Sequence
  Synthetic
uuaguaccagaccucaagagaga

SEQ ID NO: 33489 - RNA, 24 nt, Artificial Sequence
  Synthetic
uuuaguaccagaccucaagagaga

SEQ ID NO: 33490 - RNA, 18 nt, Artificial Sequence
  Synthetic
acuaagccaggagagaga

SEQ ID NO: 33491 - RNA, 19 nt, Artificial Sequence
  Synthetic
aacuaagccaggagagaga

SEQ ID NO: 33492 - RNA, 20 nt, Artificial Sequence
  Synthetic
aaacuaagccaggagagaga

SEQ ID NO: 33493 - RNA, 21 nt, Artificial Sequence
  Synthetic
aaaacuaagccaggagagaga

SEQ ID NO: 33494 - RNA, 21 nt, Artificial Sequence
  Synthetic
caggauggauaaggggagaga

SEQ ID NO: 33495 - RNA, 22 nt, Artificial Sequence
  Synthetic
acaggauggauaaggggagaga

SEQ ID NO: 33496 - RNA, 23 nt, Artificial Sequence
  Synthetic
cacaggauggauaaggggagaga

SEQ ID NO: 33497 - RNA, 24 nt, Artificial Sequence
  Synthetic
acacaggauggauaaggggagaga

SEQ ID NO: 33498 - RNA, 18 nt, Artificial Sequence
  Synthetic
aaauuuaggugugagaga

SEQ ID NO: 33499 - RNA, 19 nt, Artificial Sequence
  Synthetic
uaaauuuaggugugagaga

SEQ ID NO: 33500 - RNA, 20 nt, Artificial Sequence
  Synthetic
auaaauuuaggugugagaga

SEQ ID NO: 33501 - RNA, 18 nt, Artificial Sequence
  Synthetic
acccuuuucuaauagaga

SEQ ID NO: 33502 - RNA, 20 nt, Artificial Sequence
  Synthetic
ugacccuuuucuaauagaga

SEQ ID NO: 33503 - RNA, 21 nt, Artificial Sequence
  Synthetic
uugacccuuuucuaauagaga

SEQ ID NO: 33504 - RNA, 22 nt, Artificial Sequence
  Synthetic
auugacccuuuucuaauagaga

SEQ ID NO: 33505 - RNA, 24 nt, Artificial Sequence
  Synthetic
agauugacccuuuucuaauagaga

SEQ ID NO: 33506 - RNA, 18 nt, Artificial Sequence
  Synthetic
uuuagacuaugauagaga

SEQ ID NO: 33507 - RNA, 19 nt, Artificial Sequence
  Synthetic
uuuuagacuaugauagaga

SEQ ID NO: 33508 - RNA, 20 nt, Artificial Sequence
  Synthetic
uuuuuagacuaugauagaga

SEQ ID NO: 33509 - RNA, 21 nt, Artificial Sequence
  Synthetic
uuuuuuagacuaugauagaga

SEQ ID NO: 33510 - RNA, 22 nt, Artificial Sequence
  Synthetic
auuuuuuagacuaugauagaga

SEQ ID NO: 33511 - RNA, 23 nt, Artificial Sequence
  Synthetic
uauuuuuuagacuaugauagaga

SEQ ID NO: 33512 - RNA, 24 nt, Artificial Sequence
  Synthetic
uuauuuuuuagacuaugauagaga

SEQ ID NO: 33513 - RNA, 18 nt, Artificial Sequence
  Synthetic
ccauggcaacucuagaga

SEQ ID NO: 33514 - RNA, 19 nt, Artificial Sequence
  Synthetic
uccauggcaacucuagaga

SEQ ID NO: 33515 - RNA, 20 nt, Artificial Sequence
  Synthetic
uuccauggcaacucuagaga

SEQ ID NO: 33516 - RNA, 21 nt, Artificial Sequence
  Synthetic
cuuccauggcaacucuagaga

SEQ ID NO: 33517 - RNA, 22 nt, Artificial Sequence
  Synthetic
ucuuccauggcaacucuagaga

SEQ ID NO: 33518 - RNA, 23 nt, Artificial Sequence
  Synthetic
cucuuccauggcaacucuagaga

SEQ ID NO: 33519 - RNA, 24 nt, Artificial Sequence
  Synthetic
ucucuuccauggcaacucuagaga

SEQ ID NO: 33520 - RNA, 19 nt, Artificial Sequence
  Synthetic
aguaggaaauggguagaga

SEQ ID NO: 33521 - RNA, 22 nt, Artificial Sequence
  Synthetic
uggaguaggaaauggguagaga

SEQ ID NO: 33522 - RNA, 24 nt, Artificial Sequence
  Synthetic
aguggaguaggaaauggguagaga

SEQ ID NO: 33523 - RNA, 18 nt, Artificial Sequence
  Synthetic
ucucucacacauuagaga

SEQ ID NO: 33524 - RNA, 19 nt, Artificial Sequence
  Synthetic
cucucucacacauuagaga

SEQ ID NO: 33525 - RNA, 20 nt, Artificial Sequence
  Synthetic
ccucucucacacauuagaga

SEQ ID NO: 33526 - RNA, 21 nt, Artificial Sequence
  Synthetic
cccucucucacacauuagaga

SEQ ID NO: 33527 - RNA, 22 nt, Artificial Sequence
  Synthetic
ccccucucucacacauuagaga

SEQ ID NO: 33528 - RNA, 23 nt, Artificial Sequence
  Synthetic
uccccucucucacacauuagaga

SEQ ID NO: 33529 - RNA, 24 nt, Artificial Sequence
  Synthetic
cuccccucucucacacauuagaga

SEQ ID NO: 33530 - RNA, 21 nt, Artificial Sequence
  Synthetic
aaugauuuucuuauuuagaga

SEQ ID NO: 33531 - RNA, 22 nt, Artificial Sequence
  Synthetic
aaaugauuuucuuauuuagaga

SEQ ID NO: 33532 - RNA, 23 nt, Artificial Sequence
  Synthetic
uaaaugauuuucuuauuuagaga

SEQ ID NO: 33533 - RNA, 24 nt, Artificial Sequence
  Synthetic
auaaaugauuuucuuauuuagaga

SEQ ID NO: 33534 - RNA, 18 nt, Artificial Sequence
  Synthetic
aaauauagauaaucgaga

SEQ ID NO: 33535 - RNA, 19 nt, Artificial Sequence
  Synthetic
uaaauauagauaaucgaga

SEQ ID NO: 33536 - RNA, 20 nt, Artificial Sequence
  Synthetic
auaaauauagauaaucgaga

SEQ ID NO: 33537 - RNA, 19 nt, Artificial Sequence
  Synthetic
agggacucaacuuucgaga

SEQ ID NO: 33538 - RNA, 21 nt, Artificial Sequence
  Synthetic
ugagggacucaacuuucgaga

SEQ ID NO: 33539 - RNA, 22 nt, Artificial Sequence
  Synthetic
augagggacucaacuuucgaga

SEQ ID NO: 33540 - RNA, 23 nt, Artificial Sequence
  Synthetic
aaugagggacucaacuuucgaga

SEQ ID NO: 33541 - RNA, 24 nt, Artificial Sequence
  Synthetic
aaaugagggacucaacuuucgaga

SEQ ID NO: 33542 - RNA, 21 nt, Artificial Sequence
  Synthetic
agggaaaacuaagccaggaga

SEQ ID NO: 33543 - RNA, 22 nt, Artificial Sequence
  Synthetic
cagggaaaacuaagccaggaga

SEQ ID NO: 33544 - RNA, 23 nt, Artificial Sequence
  Synthetic
ucagggaaaacuaagccaggaga

SEQ ID NO: 33545 - RNA, 24 nt, Artificial Sequence
  Synthetic
uucagggaaaacuaagccaggaga

SEQ ID NO: 33546 - RNA, 18 nt, Artificial Sequence
  Synthetic
ucaauggaugagaggaga

SEQ ID NO: 33547 - RNA, 19 nt, Artificial Sequence
  Synthetic
aucaauggaugagaggaga

SEQ ID NO: 33548 - RNA, 21 nt, Artificial Sequence
  Synthetic
agaucaauggaugagaggaga

SEQ ID NO: 33549 - RNA, 22 nt, Artificial Sequence
  Synthetic
cagaucaauggaugagaggaga

SEQ ID NO: 33550 - RNA, 24 nt, Artificial Sequence
  Synthetic
agcagaucaauggaugagaggaga

SEQ ID NO: 33551 - RNA, 18 nt, Artificial Sequence
  Synthetic
cugguagugguuaggaga

SEQ ID NO: 33552 - RNA, 19 nt, Artificial Sequence
  Synthetic
ucugguagugguuaggaga

SEQ ID NO: 33553 - RNA, 20 nt, Artificial Sequence
  Synthetic
uucugguagugguuaggaga

SEQ ID NO: 33554 - RNA, 21 nt, Artificial Sequence
  Synthetic
auucugguagugguuaggaga

SEQ ID NO: 33555 - RNA, 22 nt, Artificial Sequence
  Synthetic
cauucugguagugguuaggaga

SEQ ID NO: 33556 - RNA, 23 nt, Artificial Sequence
  Synthetic
ucauucugguagugguuaggaga

SEQ ID NO: 33557 - RNA, 24 nt, Artificial Sequence
  Synthetic
aucauucugguagugguuaggaga

SEQ ID NO: 33558 - RNA, 18 nt, Artificial Sequence
  Synthetic
aacaacuaagcagggaga

SEQ ID NO: 33559 - RNA, 20 nt, Artificial Sequence
  Synthetic
agaacaacuaagcagggaga

SEQ ID NO: 33560 - RNA, 22 nt, Artificial Sequence
  Synthetic
agagaacaacuaagcagggaga

SEQ ID NO: 33561 - RNA, 23 nt, Artificial Sequence
  Synthetic
cagagaacaacuaagcagggaga

SEQ ID NO: 33562 - RNA, 24 nt, Artificial Sequence
  Synthetic
acagagaacaacuaagcagggaga

SEQ ID NO: 33563 - RNA, 20 nt, Artificial Sequence
  Synthetic
agguuuuaccuucagggaga

SEQ ID NO: 33564 - RNA, 21 nt, Artificial Sequence
  Synthetic
aagguuuuaccuucagggaga

SEQ ID NO: 33565 - RNA, 22 nt, Artificial Sequence
  Synthetic
caagguuuuaccuucagggaga

SEQ ID NO: 33566 - RNA, 24 nt, Artificial Sequence
  Synthetic
ugcaagguuuuaccuucagggaga

SEQ ID NO: 33567 - RNA, 21 nt, Artificial Sequence
  Synthetic
uuaaggcaagaaggagggaga

SEQ ID NO: 33568 - RNA, 22 nt, Artificial Sequence
  Synthetic
uuuaaggcaagaaggagggaga

SEQ ID NO: 33569 - RNA, 23 nt, Artificial Sequence
  Synthetic
uuuuaaggcaagaaggagggaga

SEQ ID NO: 33570 - RNA, 18 nt, Artificial Sequence
  Synthetic
aggcucuuggcggggaga

SEQ ID NO: 33571 - RNA, 20 nt, Artificial Sequence
  Synthetic
agaggcucuuggcggggaga

SEQ ID NO: 33572 - RNA, 21 nt, Artificial Sequence
  Synthetic
aagaggcucuuggcggggaga

SEQ ID NO: 33573 - RNA, 22 nt, Artificial Sequence
  Synthetic
caagaggcucuuggcggggaga

SEQ ID NO: 33574 - RNA, 23 nt, Artificial Sequence
  Synthetic
acaagaggcucuuggcggggaga

SEQ ID NO: 33575 - RNA, 24 nt, Artificial Sequence
  Synthetic
aacaagaggcucuuggcggggaga

SEQ ID NO: 33576 - RNA, 18 nt, Artificial Sequence
  Synthetic
aauaacuaaagugggaga

SEQ ID NO: 33577 - RNA, 20 nt, Artificial Sequence
  Synthetic
agaauaacuaaagugggaga

SEQ ID NO: 33578 - RNA, 18 nt, Artificial Sequence
  Synthetic
uauuauaacauugggaga

SEQ ID NO: 33579 - RNA, 19 nt, Artificial Sequence
  Synthetic
uuauuauaacauugggaga

SEQ ID NO: 33580 - RNA, 20 nt, Artificial Sequence
  Synthetic
uuuauuauaacauugggaga

SEQ ID NO: 33581 - RNA, 21 nt, Artificial Sequence
  Synthetic
uuuuauuauaacauugggaga

SEQ ID NO: 33582 - RNA, 22 nt, Artificial Sequence
  Synthetic
cuuuuauuauaacauugggaga

SEQ ID NO: 33583 - RNA, 24 nt, Artificial Sequence
  Synthetic
agcuuuuauuauaacauugggaga

SEQ ID NO: 33584 - RNA, 18 nt, Artificial Sequence
  Synthetic
caaauuuugcacuggaga

SEQ ID NO: 33585 - RNA, 19 nt, Artificial Sequence
  Synthetic
ccaaauuuugcacuggaga

SEQ ID NO: 33586 - RNA, 20 nt, Artificial Sequence
  Synthetic
uccaaauuuugcacuggaga

SEQ ID NO: 33587 - RNA, 21 nt, Artificial Sequence
  Synthetic
uuccaaauuuugcacuggaga

SEQ ID NO: 33588 - RNA, 23 nt, Artificial Sequence
  Synthetic
uguuccaaauuuugcacuggaga

SEQ ID NO: 33589 - RNA, 24 nt, Artificial Sequence
  Synthetic
cuguuccaaauuuugcacuggaga

SEQ ID NO: 33590 - RNA, 18 nt, Artificial Sequence
  Synthetic
uaaaauuaugccuggaga

SEQ ID NO: 33591 - RNA, 19 nt, Artificial Sequence
  Synthetic
auaaaauuaugccuggaga

SEQ ID NO: 33592 - RNA, 20 nt, Artificial Sequence
  Synthetic
aauaaaauuaugccuggaga

SEQ ID NO: 33593 - RNA, 21 nt, Artificial Sequence
  Synthetic
aaauaaaauuaugccuggaga

SEQ ID NO: 33594 - RNA, 22 nt, Artificial Sequence
  Synthetic
uaaauaaaauuaugccuggaga

SEQ ID NO: 33595 - RNA, 23 nt, Artificial Sequence
  Synthetic
uuaaauaaaauuaugccuggaga

SEQ ID NO: 33596 - RNA, 24 nt, Artificial Sequence
  Synthetic
uuuaaauaaaauuaugccuggaga

SEQ ID NO: 33597 - RNA, 21 nt, Artificial Sequence
  Synthetic
aggguuugcuugugguggaga

SEQ ID NO: 33598 - RNA, 22 nt, Artificial Sequence
  Synthetic
uaggguuugcuugugguggaga

SEQ ID NO: 33599 - RNA, 23 nt, Artificial Sequence
  Synthetic
uuaggguuugcuugugguggaga

SEQ ID NO: 33600 - RNA, 24 nt, Artificial Sequence
  Synthetic
cuuaggguuugcuugugguggaga

SEQ ID NO: 33601 - RNA, 19 nt, Artificial Sequence
  Synthetic
ugccucuaagaguuggaga

SEQ ID NO: 33602 - RNA, 20 nt, Artificial Sequence
  Synthetic
cugccucuaagaguuggaga

SEQ ID NO: 33603 - RNA, 21 nt, Artificial Sequence
  Synthetic
ccugccucuaagaguuggaga

SEQ ID NO: 33604 - RNA, 24 nt, Artificial Sequence
  Synthetic
aggccugccucuaagaguuggaga

SEQ ID NO: 33605 - RNA, 22 nt, Artificial Sequence
  Synthetic
agcuuccccuuuuuuuuggaga

SEQ ID NO: 33606 - RNA, 23 nt, Artificial Sequence
  Synthetic
cagcuuccccuuuuuuuuggaga

SEQ ID NO: 33607 - RNA, 24 nt, Artificial Sequence
  Synthetic
ucagcuuccccuuuuuuuuggaga

SEQ ID NO: 33608 - RNA, 18 nt, Artificial Sequence
  Synthetic
cgauauagugaaaugaga

SEQ ID NO: 33609 - RNA, 20 nt, Artificial Sequence
  Synthetic
ugcgauauagugaaaugaga

SEQ ID NO: 33610 - RNA, 21 nt, Artificial Sequence
  Synthetic
augcgauauagugaaaugaga

SEQ ID NO: 33611 - RNA, 22 nt, Artificial Sequence
  Synthetic
uaugcgauauagugaaaugaga

SEQ ID NO: 33612 - RNA, 23 nt, Artificial Sequence
  Synthetic
uuaugcgauauagugaaaugaga

SEQ ID NO: 33613 - RNA, 24 nt, Artificial Sequence
  Synthetic
auuaugcgauauagugaaaugaga

SEQ ID NO: 33614 - RNA, 18 nt, Artificial Sequence
  Synthetic
ucccauuguggaaugaga

SEQ ID NO: 33615 - RNA, 20 nt, Artificial Sequence
  Synthetic
agucccauuguggaaugaga

SEQ ID NO: 33616 - RNA, 21 nt, Artificial Sequence
  Synthetic
aagucccauuguggaaugaga

SEQ ID NO: 33617 - RNA, 22 nt, Artificial Sequence
  Synthetic
uaagucccauuguggaaugaga

SEQ ID NO: 33618 - RNA, 23 nt, Artificial Sequence
  Synthetic
uuaagucccauuguggaaugaga

SEQ ID NO: 33619 - RNA, 24 nt, Artificial Sequence
  Synthetic
auuaagucccauuguggaaugaga

SEQ ID NO: 33620 - RNA, 21 nt, Artificial Sequence
  Synthetic
ucugaggaaaaaauaaugaga

SEQ ID NO: 33621 - RNA, 23 nt, Artificial Sequence
  Synthetic
agucugaggaaaaaauaaugaga

SEQ ID NO: 33622 - RNA, 18 nt, Artificial Sequence
  Synthetic
aaauuaaauauaaugaga

SEQ ID NO: 33623 - RNA, 21 nt, Artificial Sequence
  Synthetic
aggaaauuaaauauaaugaga

SEQ ID NO: 33624 - RNA, 23 nt, Artificial Sequence
  Synthetic
agaggaaauuaaauauaaugaga

SEQ ID NO: 33625 - RNA, 24 nt, Artificial Sequence
  Synthetic
aagaggaaauuaaauauaaugaga

SEQ ID NO: 33626 - RNA, 19 nt, Artificial Sequence
  Synthetic
aggggauaaaggcaugaga

SEQ ID NO: 33627 - RNA, 21 nt, Artificial Sequence
  Synthetic
agaggggauaaaggcaugaga

SEQ ID NO: 33628 - RNA, 23 nt, Artificial Sequence
  Synthetic
agagaggggauaaaggcaugaga

SEQ ID NO: 33629 - RNA, 24 nt, Artificial Sequence
  Synthetic
aagagaggggauaaaggcaugaga

SEQ ID NO: 33630 - RNA, 19 nt, Artificial Sequence
  Synthetic
ugauuuacucaauaugaga

SEQ ID NO: 33631 - RNA, 21 nt, Artificial Sequence
  Synthetic
agugauuuacucaauaugaga

SEQ ID NO: 33632 - RNA, 23 nt, Artificial Sequence
  Synthetic
ugagugauuuacucaauaugaga

SEQ ID NO: 33633 - RNA, 18 nt, Artificial Sequence
  Synthetic
aaugugaaguguaugaga

SEQ ID NO: 33634 - RNA, 19 nt, Artificial Sequence
  Synthetic
aaaugugaaguguaugaga

SEQ ID NO: 33635 - RNA, 20 nt, Artificial Sequence
  Synthetic
aaaaugugaaguguaugaga

SEQ ID NO: 33636 - RNA, 23 nt, Artificial Sequence
  Synthetic
uggaaaaugugaaguguaugaga

SEQ ID NO: 33637 - RNA, 24 nt, Artificial Sequence
  Synthetic
cuggaaaaugugaaguguaugaga

SEQ ID NO: 33638 - RNA, 18 nt, Artificial Sequence
  Synthetic
uuacgccugguuaugaga

SEQ ID NO: 33639 - RNA, 19 nt, Artificial Sequence
  Synthetic
auuacgccugguuaugaga

SEQ ID NO: 33640 - RNA, 20 nt, Artificial Sequence
  Synthetic
cauuacgccugguuaugaga

SEQ ID NO: 33641 - RNA, 21 nt, Artificial Sequence
  Synthetic
ucauuacgccugguuaugaga

SEQ ID NO: 33642 - RNA, 23 nt, Artificial Sequence
  Synthetic
agucauuacgccugguuaugaga

SEQ ID NO: 33643 - RNA, 24 nt, Artificial Sequence
  Synthetic
aagucauuacgccugguuaugaga

SEQ ID NO: 33644 - RNA, 21 nt, Artificial Sequence
  Synthetic
aaaaaaucugguuaugugaga

SEQ ID NO: 33645 - RNA, 22 nt, Artificial Sequence
  Synthetic
aaaaaaaucugguuaugugaga

SEQ ID NO: 33646 - RNA, 23 nt, Artificial Sequence
  Synthetic
aaaaaaaaucugguuaugugaga

SEQ ID NO: 33647 - RNA, 24 nt, Artificial Sequence
  Synthetic
caaaaaaaaucugguuaugugaga

SEQ ID NO: 33648 - RNA, 19 nt, Artificial Sequence
  Synthetic
aguuaggaauugugugaga

SEQ ID NO: 33649 - RNA, 20 nt, Artificial Sequence
  Synthetic
uaguuaggaauugugugaga

SEQ ID NO: 33650 - RNA, 21 nt, Artificial Sequence
  Synthetic
uuaguuaggaauugugugaga

SEQ ID NO: 33651 - RNA, 22 nt, Artificial Sequence
  Synthetic
uuuaguuaggaauugugugaga

SEQ ID NO: 33652 - RNA, 23 nt, Artificial Sequence
  Synthetic
auuuaguuaggaauugugugaga

SEQ ID NO: 33653 - RNA, 24 nt, Artificial Sequence
  Synthetic
uauuuaguuaggaauugugugaga

SEQ ID NO: 33654 - RNA, 19 nt, Artificial Sequence
  Synthetic
ugaauaauguuacuugaga

SEQ ID NO: 33655 - RNA, 20 nt, Artificial Sequence
  Synthetic
cugaauaauguuacuugaga

SEQ ID NO: 33656 - RNA, 22 nt, Artificial Sequence
  Synthetic
agcugaauaauguuacuugaga

SEQ ID NO: 33657 - RNA, 22 nt, Artificial Sequence
  Synthetic
aguuuuauuuugucucuugaga

SEQ ID NO: 33658 - RNA, 23 nt, Artificial Sequence
  Synthetic
uaguuuuauuuugucucuugaga

SEQ ID NO: 33659 - RNA, 18 nt, Artificial Sequence
  Synthetic
ugaagacagacaaauaga

SEQ ID NO: 33660 - RNA, 19 nt, Artificial Sequence
  Synthetic
cugaagacagacaaauaga

SEQ ID NO: 33661 - RNA, 20 nt, Artificial Sequence
  Synthetic
ucugaagacagacaaauaga

SEQ ID NO: 33662 - RNA, 21 nt, Artificial Sequence
  Synthetic
aucugaagacagacaaauaga

SEQ ID NO: 33663 - RNA, 22 nt, Artificial Sequence
  Synthetic
uaucugaagacagacaaauaga

SEQ ID NO: 33664 - RNA, 23 nt, Artificial Sequence
  Synthetic
uuaucugaagacagacaaauaga

SEQ ID NO: 33665 - RNA, 18 nt, Artificial Sequence
  Synthetic
agaugagaucacaauaga

SEQ ID NO: 33666 - RNA, 20 nt, Artificial Sequence
  Synthetic
agagaugagaucacaauaga

SEQ ID NO: 33667 - RNA, 21 nt, Artificial Sequence
  Synthetic
uagagaugagaucacaauaga

SEQ ID NO: 33668 - RNA, 22 nt, Artificial Sequence
  Synthetic
uuagagaugagaucacaauaga

SEQ ID NO: 33669 - RNA, 23 nt, Artificial Sequence
  Synthetic
cuuagagaugagaucacaauaga

SEQ ID NO: 33670 - RNA, 24 nt, Artificial Sequence
  Synthetic
ccuuagagaugagaucacaauaga

SEQ ID NO: 33671 - RNA, 21 nt, Artificial Sequence
  Synthetic
acaaaauaauaaaggaauaga

SEQ ID NO: 33672 - RNA, 22 nt, Artificial Sequence
  Synthetic
uacaaaauaauaaaggaauaga

SEQ ID NO: 33673 - RNA, 23 nt, Artificial Sequence
  Synthetic
cuacaaaauaauaaaggaauaga

SEQ ID NO: 33674 - RNA, 24 nt, Artificial Sequence
  Synthetic
acuacaaaauaauaaaggaauaga

SEQ ID NO: 33675 - RNA, 18 nt, Artificial Sequence
  Synthetic
uaugaugucaauaauaga

SEQ ID NO: 33676 - RNA, 19 nt, Artificial Sequence
  Synthetic
uuaugaugucaauaauaga

SEQ ID NO: 33677 - RNA, 21 nt, Artificial Sequence
  Synthetic
uguuaugaugucaauaauaga

SEQ ID NO: 33678 - RNA, 22 nt, Artificial Sequence
  Synthetic
auguuaugaugucaauaauaga

SEQ ID NO: 33679 - RNA, 23 nt, Artificial Sequence
  Synthetic
aauguuaugaugucaauaauaga

SEQ ID NO: 33680 - RNA, 24 nt, Artificial Sequence
  Synthetic
caauguuaugaugucaauaauaga

SEQ ID NO: 33681 - RNA, 19 nt, Artificial Sequence
  Synthetic
ugauagaacuuaagauaga

SEQ ID NO: 33682 - RNA, 20 nt, Artificial Sequence
  Synthetic
uugauagaacuuaagauaga

SEQ ID NO: 33683 - RNA, 21 nt, Artificial Sequence
  Synthetic
auugauagaacuuaagauaga

SEQ ID NO: 33684 - RNA, 22 nt, Artificial Sequence
  Synthetic
aauugauagaacuuaagauaga

SEQ ID NO: 33685 - RNA, 24 nt, Artificial Sequence
  Synthetic
agaauugauagaacuuaagauaga

SEQ ID NO: 33686 - RNA, 18 nt, Artificial Sequence
  Synthetic
ugauucuucucagauaga

SEQ ID NO: 33687 - RNA, 19 nt, Artificial Sequence
  Synthetic
uugauucuucucagauaga

SEQ ID NO: 33688 - RNA, 21 nt, Artificial Sequence
  Synthetic
uguugauucuucucagauaga

SEQ ID NO: 33689 - RNA, 22 nt, Artificial Sequence
  Synthetic
cuguugauucuucucagauaga

SEQ ID NO: 33690 - RNA, 24 nt, Artificial Sequence
  Synthetic
agcuguugauucuucucagauaga

SEQ ID NO: 33691 - RNA, 18 nt, Artificial Sequence
  Synthetic
uucaaguaaaaugauaga

SEQ ID NO: 33692 - RNA, 19 nt, Artificial Sequence
  Synthetic
auucaaguaaaaugauaga

SEQ ID NO: 33693 - RNA, 20 nt, Artificial Sequence
  Synthetic
uauucaaguaaaaugauaga

SEQ ID NO: 33694 - RNA, 21 nt, Artificial Sequence
  Synthetic
auauucaaguaaaaugauaga

SEQ ID NO: 33695 - RNA, 23 nt, Artificial Sequence
  Synthetic
ugauauucaaguaaaaugauaga

SEQ ID NO: 33696 - RNA, 24 nt, Artificial Sequence
  Synthetic
augauauucaaguaaaaugauaga

SEQ ID NO: 33697 - RNA, 21 nt, Artificial Sequence
  Synthetic
uuagaagauaaaauauauaga

SEQ ID NO: 33698 - RNA, 22 nt, Artificial Sequence
  Synthetic
uuuagaagauaaaauauauaga

SEQ ID NO: 33699 - RNA, 23 nt, Artificial Sequence
  Synthetic
cuuuagaagauaaaauauauaga

SEQ ID NO: 33700 - RNA, 24 nt, Artificial Sequence
  Synthetic
acuuuagaagauaaaauauauaga

SEQ ID NO: 33701 - RNA, 21 nt, Artificial Sequence
  Synthetic
ugaaauaauaaagacuauaga

SEQ ID NO: 33702 - RNA, 22 nt, Artificial Sequence
  Synthetic
cugaaauaauaaagacuauaga

SEQ ID NO: 33703 - RNA, 23 nt, Artificial Sequence
  Synthetic
acugaaauaauaaagacuauaga

SEQ ID NO: 33704 - RNA, 24 nt, Artificial Sequence
  Synthetic
aacugaaauaauaaagacuauaga

SEQ ID NO: 33705 - RNA, 18 nt, Artificial Sequence
  Synthetic
uuguaaacagccuauaga

SEQ ID NO: 33706 - RNA, 19 nt, Artificial Sequence
  Synthetic
cuuguaaacagccuauaga

SEQ ID NO: 33707 - RNA, 20 nt, Artificial Sequence
  Synthetic
ucuuguaaacagccuauaga

SEQ ID NO: 33708 - RNA, 19 nt, Artificial Sequence
  Synthetic
uguaagcagaguuuauaga

SEQ ID NO: 33709 - RNA, 20 nt, Artificial Sequence
  Synthetic
uuguaagcagaguuuauaga

SEQ ID NO: 33710 - RNA, 23 nt, Artificial Sequence
  Synthetic
agguuguaagcagaguuuauaga

SEQ ID NO: 33711 - RNA, 24 nt, Artificial Sequence
  Synthetic
uagguuguaagcagaguuuauaga

SEQ ID NO: 33712 - RNA, 18 nt, Artificial Sequence
  Synthetic
auggccacgggaacuaga

SEQ ID NO: 33713 - RNA, 19 nt, Artificial Sequence
  Synthetic
aauggccacgggaacuaga

SEQ ID NO: 33714 - RNA, 20 nt, Artificial Sequence
  Synthetic
aaauggccacgggaacuaga

SEQ ID NO: 33715 - RNA, 21 nt, Artificial Sequence
  Synthetic
uaaauggccacgggaacuaga

SEQ ID NO: 33716 - RNA, 22 nt, Artificial Sequence
  Synthetic
cuaaauggccacgggaacuaga

SEQ ID NO: 33717 - RNA, 23 nt, Artificial Sequence
  Synthetic
ccuaaauggccacgggaacuaga

SEQ ID NO: 33718 - RNA, 24 nt, Artificial Sequence
  Synthetic
cccuaaauggccacgggaacuaga

SEQ ID NO: 33719 - RNA, 18 nt, Artificial Sequence
  Synthetic
uuauuaggaagcacuaga

SEQ ID NO: 33720 - RNA, 19 nt, Artificial Sequence
  Synthetic
cuuauuaggaagcacuaga

SEQ ID NO: 33721 - RNA, 20 nt, Artificial Sequence
  Synthetic
ucuuauuaggaagcacuaga

SEQ ID NO: 33722 - RNA, 21 nt, Artificial Sequence
  Synthetic
cucuuauuaggaagcacuaga

SEQ ID NO: 33723 - RNA, 22 nt, Artificial Sequence
  Synthetic
ccucuuauuaggaagcacuaga

SEQ ID NO: 33724 - RNA, 23 nt, Artificial Sequence
  Synthetic
uccucuuauuaggaagcacuaga

SEQ ID NO: 33725 - RNA, 24 nt, Artificial Sequence
  Synthetic
cuccucuuauuaggaagcacuaga

SEQ ID NO: 33726 - RNA, 18 nt, Artificial Sequence
  Synthetic
accaacccugagacuaga

SEQ ID NO: 33727 - RNA, 19 nt, Artificial Sequence
  Synthetic
caccaacccugagacuaga

SEQ ID NO: 33728 - RNA, 21 nt, Artificial Sequence
  Synthetic
agcaccaacccugagacuaga

SEQ ID NO: 33729 - RNA, 22 nt, Artificial Sequence
  Synthetic
uagcaccaacccugagacuaga

SEQ ID NO: 33730 - RNA, 23 nt, Artificial Sequence
  Synthetic
auagcaccaacccugagacuaga

SEQ ID NO: 33731 - RNA, 24 nt, Artificial Sequence
  Synthetic
cauagcaccaacccugagacuaga

SEQ ID NO: 33732 - RNA, 18 nt, Artificial Sequence
  Synthetic
uucugugauuaaccuaga

SEQ ID NO: 33733 - RNA, 19 nt, Artificial Sequence
  Synthetic
cuucugugauuaaccuaga

SEQ ID NO: 33734 - RNA, 20 nt, Artificial Sequence
  Synthetic
acuucugugauuaaccuaga

SEQ ID NO: 33735 - RNA, 21 nt, Artificial Sequence
  Synthetic
uacuucugugauuaaccuaga

SEQ ID NO: 33736 - RNA, 22 nt, Artificial Sequence
  Synthetic
cuacuucugugauuaaccuaga

SEQ ID NO: 33737 - RNA, 23 nt, Artificial Sequence
  Synthetic
ucuacuucugugauuaaccuaga

SEQ ID NO: 33738 - RNA, 18 nt, Artificial Sequence
  Synthetic
uggguuggcucaccuaga

SEQ ID NO: 33739 - RNA, 19 nt, Artificial Sequence
  Synthetic
uuggguuggcucaccuaga

SEQ ID NO: 33740 - RNA, 20 nt, Artificial Sequence
  Synthetic
auuggguuggcucaccuaga

SEQ ID NO: 33741 - RNA, 21 nt, Artificial Sequence
  Synthetic
cauuggguuggcucaccuaga

SEQ ID NO: 33742 - RNA, 23 nt, Artificial Sequence
  Synthetic
agcauuggguuggcucaccuaga

SEQ ID NO: 33743 - RNA, 24 nt, Artificial Sequence
  Synthetic
cagcauuggguuggcucaccuaga

SEQ ID NO: 33744 - RNA, 18 nt, Artificial Sequence
  Synthetic
uccaaaucauacccuaga

SEQ ID NO: 33745 - RNA, 20 nt, Artificial Sequence
  Synthetic
aguccaaaucauacccuaga

SEQ ID NO: 33746 - RNA, 21 nt, Artificial Sequence
  Synthetic
uaguccaaaucauacccuaga

SEQ ID NO: 33747 - RNA, 22 nt, Artificial Sequence
  Synthetic
auaguccaaaucauacccuaga

SEQ ID NO: 33748 - RNA, 23 nt, Artificial Sequence
  Synthetic
uauaguccaaaucauacccuaga

SEQ ID NO: 33749 - RNA, 24 nt, Artificial Sequence
  Synthetic
cuauaguccaaaucauacccuaga

SEQ ID NO: 33750 - RNA, 22 nt, Artificial Sequence
  Synthetic
ugagaggaaaugaaagccuaga

SEQ ID NO: 33751 - RNA, 23 nt, Artificial Sequence
  Synthetic
augagaggaaaugaaagccuaga

SEQ ID NO: 33752 - RNA, 24 nt, Artificial Sequence
  Synthetic
caugagaggaaaugaaagccuaga

SEQ ID NO: 33753 - RNA, 19 nt, Artificial Sequence
  Synthetic
uguguuuuuaaaagcuaga

SEQ ID NO: 33754 - RNA, 20 nt, Artificial Sequence
  Synthetic
uuguguuuuuaaaagcuaga

SEQ ID NO: 33755 - RNA, 21 nt, Artificial Sequence
  Synthetic
auuguguuuuuaaaagcuaga

SEQ ID NO: 33756 - RNA, 22 nt, Artificial Sequence
  Synthetic
cauuguguuuuuaaaagcuaga

SEQ ID NO: 33757 - RNA, 23 nt, Artificial Sequence
  Synthetic
ucauuguguuuuuaaaagcuaga

SEQ ID NO: 33758 - RNA, 24 nt, Artificial Sequence
  Synthetic
cucauuguguuuuuaaaagcuaga

SEQ ID NO: 33759 - RNA, 18 nt, Artificial Sequence
  Synthetic
caccuaaggccagcuaga

SEQ ID NO: 33760 - RNA, 19 nt, Artificial Sequence
  Synthetic
ucaccuaaggccagcuaga

SEQ ID NO: 33761 - RNA, 21 nt, Artificial Sequence
  Synthetic
agucaccuaaggccagcuaga

SEQ ID NO: 33762 - RNA, 22 nt, Artificial Sequence
  Synthetic
aagucaccuaaggccagcuaga

SEQ ID NO: 33763 - RNA, 24 nt, Artificial Sequence
  Synthetic
agaagucaccuaaggccagcuaga

SEQ ID NO: 33764 - RNA, 19 nt, Artificial Sequence
  Synthetic
agagaaugaaauaucuaga

SEQ ID NO: 33765 - RNA, 21 nt, Artificial Sequence
  Synthetic
agagagaaugaaauaucuaga

SEQ ID NO: 33766 - RNA, 22 nt, Artificial Sequence
  Synthetic
aagagagaaugaaauaucuaga

SEQ ID NO: 33767 - RNA, 23 nt, Artificial Sequence
  Synthetic
aaagagagaaugaaauaucuaga

SEQ ID NO: 33768 - RNA, 22 nt, Artificial Sequence
  Synthetic
aguauuuuuaaaauucucuaga

SEQ ID NO: 33769 - RNA, 23 nt, Artificial Sequence
  Synthetic
aaguauuuuuaaaauucucuaga

SEQ ID NO: 33770 - RNA, 24 nt, Artificial Sequence
  Synthetic
uaaguauuuuuaaaauucucuaga

SEQ ID NO: 33771 - RNA, 18 nt, Artificial Sequence
  Synthetic
aagcuguaauauucuaga

SEQ ID NO: 33772 - RNA, 19 nt, Artificial Sequence
  Synthetic
aaagcuguaauauucuaga

SEQ ID NO: 33773 - RNA, 20 nt, Artificial Sequence
  Synthetic
aaaagcuguaauauucuaga

SEQ ID NO: 33774 - RNA, 21 nt, Artificial Sequence
  Synthetic
caaaagcuguaauauucuaga

SEQ ID NO: 33775 - RNA, 22 nt, Artificial Sequence
  Synthetic
ucaaaagcuguaauauucuaga

SEQ ID NO: 33776 - RNA, 23 nt, Artificial Sequence
  Synthetic
cucaaaagcuguaauauucuaga

SEQ ID NO: 33777 - RNA, 24 nt, Artificial Sequence
  Synthetic
acucaaaagcuguaauauucuaga

SEQ ID NO: 33778 - RNA, 18 nt, Artificial Sequence
  Synthetic
uaaugaauguuuucuaga

SEQ ID NO: 33779 - RNA, 19 nt, Artificial Sequence
  Synthetic
uuaaugaauguuuucuaga

SEQ ID NO: 33780 - RNA, 21 nt, Artificial Sequence
  Synthetic
aguuaaugaauguuuucuaga

SEQ ID NO: 33781 - RNA, 22 nt, Artificial Sequence
  Synthetic
caguuaaugaauguuuucuaga

SEQ ID NO: 33782 - RNA, 23 nt, Artificial Sequence
  Synthetic
acaguuaaugaauguuuucuaga

SEQ ID NO: 33783 - RNA, 24 nt, Artificial Sequence
  Synthetic
aacaguuaaugaauguuuucuaga

SEQ ID NO: 33784 - RNA, 18 nt, Artificial Sequence
  Synthetic
auuuagucguuaaguaga

SEQ ID NO: 33785 - RNA, 19 nt, Artificial Sequence
  Synthetic
aauuuagucguuaaguaga

SEQ ID NO: 33786 - RNA, 20 nt, Artificial Sequence
  Synthetic
caauuuagucguuaaguaga

SEQ ID NO: 33787 - RNA, 21 nt, Artificial Sequence
  Synthetic
acaauuuagucguuaaguaga

SEQ ID NO: 33788 - RNA, 22 nt, Artificial Sequence
  Synthetic
aacaauuuagucguuaaguaga

SEQ ID NO: 33789 - RNA, 18 nt, Artificial Sequence
  Synthetic
aauguaauauucaguaga

SEQ ID NO: 33790 - RNA, 19 nt, Artificial Sequence
  Synthetic
aaauguaauauucaguaga

SEQ ID NO: 33791 - RNA, 20 nt, Artificial Sequence
  Synthetic
aaaauguaauauucaguaga

SEQ ID NO: 33792 - RNA, 22 nt, Artificial Sequence
  Synthetic
ugaaaauguaauauucaguaga

SEQ ID NO: 33793 - RNA, 23 nt, Artificial Sequence
  Synthetic
uugaaaauguaauauucaguaga

SEQ ID NO: 33794 - RNA, 24 nt, Artificial Sequence
  Synthetic
auugaaaauguaauauucaguaga

SEQ ID NO: 33795 - RNA, 21 nt, Artificial Sequence
  Synthetic
uuucagaaagaaaauaguaga

SEQ ID NO: 33796 - RNA, 22 nt, Artificial Sequence
  Synthetic
auuucagaaagaaaauaguaga

SEQ ID NO: 33797 - RNA, 23 nt, Artificial Sequence
  Synthetic
cauuucagaaagaaaauaguaga

SEQ ID NO: 33798 - RNA, 24 nt, Artificial Sequence
  Synthetic
acauuucagaaagaaaauaguaga

SEQ ID NO: 33799 - RNA, 19 nt, Artificial Sequence
  Synthetic
ugauaaacagacagguaga

SEQ ID NO: 33800 - RNA, 20 nt, Artificial Sequence
  Synthetic
cugauaaacagacagguaga

SEQ ID NO: 33801 - RNA, 21 nt, Artificial Sequence
  Synthetic
acugauaaacagacagguaga

SEQ ID NO: 33802 - RNA, 23 nt, Artificial Sequence
  Synthetic
ugacugauaaacagacagguaga

SEQ ID NO: 33803 - RNA, 24 nt, Artificial Sequence
  Synthetic
uugacugauaaacagacagguaga

SEQ ID NO: 33804 - RNA, 18 nt, Artificial Sequence
  Synthetic
aauaucagagaugguaga

SEQ ID NO: 33805 - RNA, 19 nt, Artificial Sequence
  Synthetic
uaauaucagagaugguaga

SEQ ID NO: 33806 - RNA, 20 nt, Artificial Sequence
  Synthetic
cuaauaucagagaugguaga

SEQ ID NO: 33807 - RNA, 21 nt, Artificial Sequence
  Synthetic
ucuaauaucagagaugguaga

SEQ ID NO: 33808 - RNA, 22 nt, Artificial Sequence
  Synthetic
aucuaauaucagagaugguaga

SEQ ID NO: 33809 - RNA, 23 nt, Artificial Sequence
  Synthetic
uaucuaauaucagagaugguaga

SEQ ID NO: 33810 - RNA, 24 nt, Artificial Sequence
  Synthetic
cuaucuaauaucagagaugguaga

SEQ ID NO: 33811 - RNA, 18 nt, Artificial Sequence
  Synthetic
ugcuaguaaucauguaga

SEQ ID NO: 33812 - RNA, 19 nt, Artificial Sequence
  Synthetic
augcuaguaaucauguaga

SEQ ID NO: 33813 - RNA, 20 nt, Artificial Sequence
  Synthetic
caugcuaguaaucauguaga

SEQ ID NO: 33814 - RNA, 23 nt, Artificial Sequence
  Synthetic
aggcaugcuaguaaucauguaga

SEQ ID NO: 33815 - RNA, 21 nt, Artificial Sequence
  Synthetic
uaguaaagugucugguguaga

SEQ ID NO: 33816 - RNA, 22 nt, Artificial Sequence
  Synthetic
cuaguaaagugucugguguaga

SEQ ID NO: 33817 - RNA, 23 nt, Artificial Sequence
  Synthetic
ucuaguaaagugucugguguaga

SEQ ID NO: 33818 - RNA, 21 nt, Artificial Sequence
  Synthetic
caaaggaaauuaaauuguaga

SEQ ID NO: 33819 - RNA, 22 nt, Artificial Sequence
  Synthetic
acaaaggaaauuaaauuguaga

SEQ ID NO: 33820 - RNA, 23 nt, Artificial Sequence
  Synthetic
cacaaaggaaauuaaauuguaga

SEQ ID NO: 33821 - RNA, 24 nt, Artificial Sequence
  Synthetic
ucacaaaggaaauuaaauuguaga

SEQ ID NO: 33822 - RNA, 18 nt, Artificial Sequence
  Synthetic
uauucaucuucuuguaga

SEQ ID NO: 33823 - RNA, 19 nt, Artificial Sequence
  Synthetic
auauucaucuucuuguaga

SEQ ID NO: 33824 - RNA, 20 nt, Artificial Sequence
  Synthetic
uauauucaucuucuuguaga

SEQ ID NO: 33825 - RNA, 21 nt, Artificial Sequence
  Synthetic
auauauucaucuucuuguaga

SEQ ID NO: 33826 - RNA, 22 nt, Artificial Sequence
  Synthetic
aauauauucaucuucuuguaga

SEQ ID NO: 33827 - RNA, 23 nt, Artificial Sequence
  Synthetic
aaauauauucaucuucuuguaga

SEQ ID NO: 33828 - RNA, 18 nt, Artificial Sequence
  Synthetic
ucccucaguauuuguaga

SEQ ID NO: 33829 - RNA, 19 nt, Artificial Sequence
  Synthetic
cucccucaguauuuguaga

SEQ ID NO: 33830 - RNA, 20 nt, Artificial Sequence
  Synthetic
ucucccucaguauuuguaga

SEQ ID NO: 33831 - RNA, 21 nt, Artificial Sequence
  Synthetic
aucucccucaguauuuguaga

SEQ ID NO: 33832 - RNA, 22 nt, Artificial Sequence
  Synthetic
caucucccucaguauuuguaga

SEQ ID NO: 33833 - RNA, 24 nt, Artificial Sequence
  Synthetic
ugcaucucccucaguauuuguaga

SEQ ID NO: 33834 - RNA, 18 nt, Artificial Sequence
  Synthetic
aauuaguauaauauuaga

SEQ ID NO: 33835 - RNA, 19 nt, Artificial Sequence
  Synthetic
aaauuaguauaauauuaga

SEQ ID NO: 33836 - RNA, 20 nt, Artificial Sequence
  Synthetic
aaaauuaguauaauauuaga

SEQ ID NO: 33837 - RNA, 21 nt, Artificial Sequence
  Synthetic
uaaaauuaguauaauauuaga

SEQ ID NO: 33838 - RNA, 23 nt, Artificial Sequence
  Synthetic
aguaaaauuaguauaauauuaga

SEQ ID NO: 33839 - RNA, 24 nt, Artificial Sequence
  Synthetic
aaguaaaauuaguauaauauuaga

SEQ ID NO: 33840 - RNA, 18 nt, Artificial Sequence
  Synthetic
aaucauauauguauuaga

SEQ ID NO: 33841 - RNA, 19 nt, Artificial Sequence
  Synthetic
caaucauauauguauuaga

SEQ ID NO: 33842 - RNA, 20 nt, Artificial Sequence
  Synthetic
ucaaucauauauguauuaga

SEQ ID NO: 33843 - RNA, 21 nt, Artificial Sequence
  Synthetic
uucaaucauauauguauuaga

SEQ ID NO: 33844 - RNA, 22 nt, Artificial Sequence
  Synthetic
uuucaaucauauauguauuaga

SEQ ID NO: 33845 - RNA, 18 nt, Artificial Sequence
  Synthetic
cuucuaaaaauuauuaga

SEQ ID NO: 33846 - RNA, 19 nt, Artificial Sequence
  Synthetic
ucuucuaaaaauuauuaga

SEQ ID NO: 33847 - RNA, 20 nt, Artificial Sequence
  Synthetic
cucuucuaaaaauuauuaga

SEQ ID NO: 33848 - RNA, 21 nt, Artificial Sequence
  Synthetic
ucucuucuaaaaauuauuaga

SEQ ID NO: 33849 - RNA, 22 nt, Artificial Sequence
  Synthetic
cucucuucuaaaaauuauuaga

SEQ ID NO: 33850 - RNA, 23 nt, Artificial Sequence
  Synthetic
acucucuucuaaaaauuauuaga

SEQ ID NO: 33851 - RNA, 24 nt, Artificial Sequence
  Synthetic
aacucucuucuaaaaauuauuaga

SEQ ID NO: 33852 - RNA, 18 nt, Artificial Sequence
  Synthetic
ugcuuaaaaauuauuaga

SEQ ID NO: 33853 - RNA, 21 nt, Artificial Sequence
  Synthetic
aggugcuuaaaaauuauuaga

SEQ ID NO: 33854 - RNA, 23 nt, Artificial Sequence
  Synthetic
agaggugcuuaaaaauuauuaga

SEQ ID NO: 33855 - RNA, 24 nt, Artificial Sequence
  Synthetic
aagaggugcuuaaaaauuauuaga

SEQ ID NO: 33856 - RNA, 18 nt, Artificial Sequence
  Synthetic
augcuagaguuuauuaga

SEQ ID NO: 33857 - RNA, 19 nt, Artificial Sequence
  Synthetic
aaugcuagaguuuauuaga

SEQ ID NO: 33858 - RNA, 20 nt, Artificial Sequence
  Synthetic
uaaugcuagaguuuauuaga

SEQ ID NO: 33859 - RNA, 21 nt, Artificial Sequence
  Synthetic
uuaaugcuagaguuuauuaga

SEQ ID NO: 33860 - RNA, 22 nt, Artificial Sequence
  Synthetic
auuaaugcuagaguuuauuaga

SEQ ID NO: 33861 - RNA, 23 nt, Artificial Sequence
  Synthetic
aauuaaugcuagaguuuauuaga

SEQ ID NO: 33862 - RNA, 24 nt, Artificial Sequence
  Synthetic
uaauuaaugcuagaguuuauuaga

SEQ ID NO: 33863 - RNA, 19 nt, Artificial Sequence
  Synthetic
aguuaugguagcacuuaga

SEQ ID NO: 33864 - RNA, 20 nt, Artificial Sequence
  Synthetic
uaguuaugguagcacuuaga

SEQ ID NO: 33865 - RNA, 21 nt, Artificial Sequence
  Synthetic
uuaguuaugguagcacuuaga

SEQ ID NO: 33866 - RNA, 22 nt, Artificial Sequence
  Synthetic
auuaguuaugguagcacuuaga

SEQ ID NO: 33867 - RNA, 23 nt, Artificial Sequence
  Synthetic
uauuaguuaugguagcacuuaga

SEQ ID NO: 33868 - RNA, 24 nt, Artificial Sequence
  Synthetic
uuauuaguuaugguagcacuuaga

SEQ ID NO: 33869 - RNA, 18 nt, Artificial Sequence
  Synthetic
uccccuacaucccuuaga

SEQ ID NO: 33870 - RNA, 19 nt, Artificial Sequence
  Synthetic
cuccccuacaucccuuaga

SEQ ID NO: 33871 - RNA, 20 nt, Artificial Sequence
  Synthetic
ccuccccuacaucccuuaga

SEQ ID NO: 33872 - RNA, 21 nt, Artificial Sequence
  Synthetic
uccuccccuacaucccuuaga

SEQ ID NO: 33873 - RNA, 22 nt, Artificial Sequence
  Synthetic
auccuccccuacaucccuuaga

SEQ ID NO: 33874 - RNA, 23 nt, Artificial Sequence
  Synthetic
aauccuccccuacaucccuuaga

SEQ ID NO: 33875 - RNA, 18 nt, Artificial Sequence
  Synthetic
uuagguuguuaucuuaga

SEQ ID NO: 33876 - RNA, 19 nt, Artificial Sequence
  Synthetic
auuagguuguuaucuuaga

SEQ ID NO: 33877 - RNA, 20 nt, Artificial Sequence
  Synthetic
uauuagguuguuaucuuaga

SEQ ID NO: 33878 - RNA, 21 nt, Artificial Sequence
  Synthetic
auauuagguuguuaucuuaga

SEQ ID NO: 33879 - RNA, 22 nt, Artificial Sequence
  Synthetic
cauauuagguuguuaucuuaga

SEQ ID NO: 33880 - RNA, 23 nt, Artificial Sequence
  Synthetic
acauauuagguuguuaucuuaga

SEQ ID NO: 33881 - RNA, 24 nt, Artificial Sequence
  Synthetic
aacauauuagguuguuaucuuaga

SEQ ID NO: 33882 - RNA, 19 nt, Artificial Sequence
  Synthetic
ugauuuucaaaagguuaga

SEQ ID NO: 33883 - RNA, 20 nt, Artificial Sequence
  Synthetic
uugauuuucaaaagguuaga

SEQ ID NO: 33884 - RNA, 22 nt, Artificial Sequence
  Synthetic
aguugauuuucaaaagguuaga

SEQ ID NO: 33885 - RNA, 23 nt, Artificial Sequence
  Synthetic
aaguugauuuucaaaagguuaga

SEQ ID NO: 33886 - RNA, 24 nt, Artificial Sequence
  Synthetic
caaguugauuuucaaaagguuaga

SEQ ID NO: 33887 - RNA, 18 nt, Artificial Sequence
  Synthetic
cuucauccaaagguuaga

SEQ ID NO: 33888 - RNA, 19 nt, Artificial Sequence
  Synthetic
ccuucauccaaagguuaga

SEQ ID NO: 33889 - RNA, 20 nt, Artificial Sequence
  Synthetic
cccuucauccaaagguuaga

SEQ ID NO: 33890 - RNA, 21 nt, Artificial Sequence
  Synthetic
acccuucauccaaagguuaga

SEQ ID NO: 33891 - RNA, 22 nt, Artificial Sequence
  Synthetic
uacccuucauccaaagguuaga

SEQ ID NO: 33892 - RNA, 23 nt, Artificial Sequence
  Synthetic
cuacccuucauccaaagguuaga

SEQ ID NO: 33893 - RNA, 24 nt, Artificial Sequence
  Synthetic
ccuacccuucauccaaagguuaga

SEQ ID NO: 33894 - RNA, 18 nt, Artificial Sequence
  Synthetic
acaaauaagagauuuaga

SEQ ID NO: 33895 - RNA, 19 nt, Artificial Sequence
  Synthetic
aacaaauaagagauuuaga

SEQ ID NO: 33896 - RNA, 20 nt, Artificial Sequence
  Synthetic
aaacaaauaagagauuuaga

SEQ ID NO: 33897 - RNA, 21 nt, Artificial Sequence
  Synthetic
caaacaaauaagagauuuaga

SEQ ID NO: 33898 - RNA, 22 nt, Artificial Sequence
  Synthetic
ccaaacaaauaagagauuuaga

SEQ ID NO: 33899 - RNA, 23 nt, Artificial Sequence
  Synthetic
cccaaacaaauaagagauuuaga

SEQ ID NO: 33900 - RNA, 24 nt, Artificial Sequence
  Synthetic
ucccaaacaaauaagagauuuaga

SEQ ID NO: 33901 - RNA, 18 nt, Artificial Sequence
  Synthetic
cauuaaauucacuuuaga

SEQ ID NO: 33902 - RNA, 19 nt, Artificial Sequence
  Synthetic
ucauuaaauucacuuuaga

SEQ ID NO: 33903 - RNA, 21 nt, Artificial Sequence
  Synthetic
ugucauuaaauucacuuuaga

SEQ ID NO: 33904 - RNA, 22 nt, Artificial Sequence
  Synthetic
augucauuaaauucacuuuaga

SEQ ID NO: 33905 - RNA, 23 nt, Artificial Sequence
  Synthetic
aaugucauuaaauucacuuuaga

SEQ ID NO: 33906 - RNA, 24 nt, Artificial Sequence
  Synthetic
uaaugucauuaaauucacuuuaga

SEQ ID NO: 33907 - RNA, 18 nt, Artificial Sequence
  Synthetic
aagguggacuuguuuaga

SEQ ID NO: 33908 - RNA, 20 nt, Artificial Sequence
  Synthetic
ugaagguggacuuguuuaga

SEQ ID NO: 33909 - RNA, 21 nt, Artificial Sequence
  Synthetic
uugaagguggacuuguuuaga

SEQ ID NO: 33910 - RNA, 22 nt, Artificial Sequence
  Synthetic
auugaagguggacuuguuuaga

SEQ ID NO: 33911 - RNA, 23 nt, Artificial Sequence
  Synthetic
uauugaagguggacuuguuuaga

SEQ ID NO: 33912 - RNA, 24 nt, Artificial Sequence
  Synthetic
auauugaagguggacuuguuuaga

SEQ ID NO: 33913 - RNA, 20 nt, Artificial Sequence
  Synthetic
uggaauagugacauuuuaga

SEQ ID NO: 33914 - RNA, 21 nt, Artificial Sequence
  Synthetic
auggaauagugacauuuuaga

SEQ ID NO: 33915 - RNA, 22 nt, Artificial Sequence
  Synthetic
uauggaauagugacauuuuaga

SEQ ID NO: 33916 - RNA, 23 nt, Artificial Sequence
  Synthetic
uuauggaauagugacauuuuaga

SEQ ID NO: 33917 - RNA, 24 nt, Artificial Sequence
  Synthetic
cuuauggaauagugacauuuuaga

SEQ ID NO: 33918 - RNA, 20 nt, Artificial Sequence
  Synthetic
cggacagugugcauuuuaga

SEQ ID NO: 33919 - RNA, 21 nt, Artificial Sequence
  Synthetic
acggacagugugcauuuuaga

SEQ ID NO: 33920 - RNA, 22 nt, Artificial Sequence
  Synthetic
cacggacagugugcauuuuaga

SEQ ID NO: 33921 - RNA, 23 nt, Artificial Sequence
  Synthetic
ucacggacagugugcauuuuaga

SEQ ID NO: 33922 - RNA, 24 nt, Artificial Sequence
  Synthetic
uucacggacagugugcauuuuaga

SEQ ID NO: 33923 - RNA, 18 nt, Artificial Sequence
  Synthetic
ucuauuucuaguuuuaga

SEQ ID NO: 33924 - RNA, 20 nt, Artificial Sequence
  Synthetic
agucuauuucuaguuuuaga

SEQ ID NO: 33925 - RNA, 21 nt, Artificial Sequence
  Synthetic
cagucuauuucuaguuuuaga

SEQ ID NO: 33926 - RNA, 22 nt, Artificial Sequence
  Synthetic
acagucuauuucuaguuuuaga

SEQ ID NO: 33927 - RNA, 23 nt, Artificial Sequence
  Synthetic
aacagucuauuucuaguuuuaga

SEQ ID NO: 33928 - RNA, 24 nt, Artificial Sequence
  Synthetic
aaacagucuauuucuaguuuuaga

SEQ ID NO: 33929 - RNA, 18 nt, Artificial Sequence
  Synthetic
uacaucuguuagaaacga

SEQ ID NO: 33930 - RNA, 19 nt, Artificial Sequence
  Synthetic
uuacaucuguuagaaacga

SEQ ID NO: 33931 - RNA, 20 nt, Artificial Sequence
  Synthetic
uuuacaucuguuagaaacga

SEQ ID NO: 33932 - RNA, 21 nt, Artificial Sequence
  Synthetic
uuuuacaucuguuagaaacga

SEQ ID NO: 33933 - RNA, 22 nt, Artificial Sequence
  Synthetic
uuuuuacaucuguuagaaacga

SEQ ID NO: 33934 - RNA, 24 nt, Artificial Sequence
  Synthetic
uguuuuuacaucuguuagaaacga

SEQ ID NO: 33935 - RNA, 20 nt, Artificial Sequence
  Synthetic
uggaggaaaagcaauaacga

SEQ ID NO: 33936 - RNA, 21 nt, Artificial Sequence
  Synthetic
cuggaggaaaagcaauaacga

SEQ ID NO: 33937 - RNA, 24 nt, Artificial Sequence
  Synthetic
aggcuggaggaaaagcaauaacga

SEQ ID NO: 33938 - RNA, 18 nt, Artificial Sequence
  Synthetic
aggaagagugacagacga

SEQ ID NO: 33939 - RNA, 19 nt, Artificial Sequence
  Synthetic
caggaagagugacagacga

SEQ ID NO: 33940 - RNA, 20 nt, Artificial Sequence
  Synthetic
ucaggaagagugacagacga

SEQ ID NO: 33941 - RNA, 18 nt, Artificial Sequence
  Synthetic
ugagagguguucagacga

SEQ ID NO: 33942 - RNA, 19 nt, Artificial Sequence
  Synthetic
uugagagguguucagacga

SEQ ID NO: 33943 - RNA, 21 nt, Artificial Sequence
  Synthetic
uguugagagguguucagacga

SEQ ID NO: 33944 - RNA, 22 nt, Artificial Sequence
  Synthetic
cuguugagagguguucagacga

SEQ ID NO: 33945 - RNA, 23 nt, Artificial Sequence
  Synthetic
ucuguugagagguguucagacga

SEQ ID NO: 33946 - RNA, 24 nt, Artificial Sequence
  Synthetic
uucuguugagagguguucagacga

SEQ ID NO: 33947 - RNA, 18 nt, Artificial Sequence
  Synthetic
agcagcuaauagugacga

SEQ ID NO: 33948 - RNA, 19 nt, Artificial Sequence
  Synthetic
aagcagcuaauagugacga

SEQ ID NO: 33949 - RNA, 20 nt, Artificial Sequence
  Synthetic
aaagcagcuaauagugacga

SEQ ID NO: 33950 - RNA, 21 nt, Artificial Sequence
  Synthetic
caaagcagcuaauagugacga

SEQ ID NO: 33951 - RNA, 22 nt, Artificial Sequence
  Synthetic
acaaagcagcuaauagugacga

SEQ ID NO: 33952 - RNA, 23 nt, Artificial Sequence
  Synthetic
aacaaagcagcuaauagugacga

SEQ ID NO: 33953 - RNA, 18 nt, Artificial Sequence
  Synthetic
ugaagaaaauauguacga

SEQ ID NO: 33954 - RNA, 19 nt, Artificial Sequence
  Synthetic
cugaagaaaauauguacga

SEQ ID NO: 33955 - RNA, 20 nt, Artificial Sequence
  Synthetic
acugaagaaaauauguacga

SEQ ID NO: 33956 - RNA, 21 nt, Artificial Sequence
  Synthetic
cacugaagaaaauauguacga

SEQ ID NO: 33957 - RNA, 22 nt, Artificial Sequence
  Synthetic
ucacugaagaaaauauguacga

SEQ ID NO: 33958 - RNA, 23 nt, Artificial Sequence
  Synthetic
cucacugaagaaaauauguacga

SEQ ID NO: 33959 - RNA, 24 nt, Artificial Sequence
  Synthetic
acucacugaagaaaauauguacga

SEQ ID NO: 33960 - RNA, 18 nt, Artificial Sequence
  Synthetic
aaaacuggagcuaaccga

SEQ ID NO: 33961 - RNA, 19 nt, Artificial Sequence
  Synthetic
aaaaacuggagcuaaccga

SEQ ID NO: 33962 - RNA, 20 nt, Artificial Sequence
  Synthetic
uaaaaacuggagcuaaccga

SEQ ID NO: 33963 - RNA, 21 nt, Artificial Sequence
  Synthetic
auaaaaacuggagcuaaccga

SEQ ID NO: 33964 - RNA, 22 nt, Artificial Sequence
  Synthetic
aauaaaaacuggagcuaaccga

SEQ ID NO: 33965 - RNA, 23 nt, Artificial Sequence
  Synthetic
aaauaaaaacuggagcuaaccga

SEQ ID NO: 33966 - RNA, 24 nt, Artificial Sequence
  Synthetic
aaaauaaaaacuggagcuaaccga

SEQ ID NO: 33967 - RNA, 20 nt, Artificial Sequence
  Synthetic
uggaacauugaguacagcga

SEQ ID NO: 33968 - RNA, 21 nt, Artificial Sequence
  Synthetic
cuggaacauugaguacagcga

SEQ ID NO: 33969 - RNA, 22 nt, Artificial Sequence
  Synthetic
acuggaacauugaguacagcga

SEQ ID NO: 33970 - RNA, 24 nt, Artificial Sequence
  Synthetic
agacuggaacauugaguacagcga

SEQ ID NO: 33971 - RNA, 18 nt, Artificial Sequence
  Synthetic
uacgacugugcccugcga

SEQ ID NO: 33972 - RNA, 19 nt, Artificial Sequence
  Synthetic
cuacgacugugcccugcga

SEQ ID NO: 33973 - RNA, 20 nt, Artificial Sequence
  Synthetic
ucuacgacugugcccugcga

SEQ ID NO: 33974 - RNA, 22 nt, Artificial Sequence
  Synthetic
ugucuacgacugugcccugcga

SEQ ID NO: 33975 - RNA, 24 nt, Artificial Sequence
  Synthetic
ugugucuacgacugugcccugcga

SEQ ID NO: 33976 - RNA, 18 nt, Artificial Sequence
  Synthetic
aacaaccaaaaguugcga

SEQ ID NO: 33977 - RNA, 19 nt, Artificial Sequence
  Synthetic
aaacaaccaaaaguugcga

SEQ ID NO: 33978 - RNA, 20 nt, Artificial Sequence
  Synthetic
aaaacaaccaaaaguugcga

SEQ ID NO: 33979 - RNA, 21 nt, Artificial Sequence
  Synthetic
aaaaacaaccaaaaguugcga

SEQ ID NO: 33980 - RNA, 23 nt, Artificial Sequence
  Synthetic
ugaaaaacaaccaaaaguugcga

SEQ ID NO: 33981 - RNA, 24 nt, Artificial Sequence
  Synthetic
cugaaaaacaaccaaaaguugcga

SEQ ID NO: 33982 - RNA, 18 nt, Artificial Sequence
  Synthetic
ucguugagaauaaaucga

SEQ ID NO: 33983 - RNA, 19 nt, Artificial Sequence
  Synthetic
uucguugagaauaaaucga

SEQ ID NO: 33984 - RNA, 20 nt, Artificial Sequence
  Synthetic
auucguugagaauaaaucga

SEQ ID NO: 33985 - RNA, 21 nt, Artificial Sequence
  Synthetic
cauucguugagaauaaaucga

SEQ ID NO: 33986 - RNA, 22 nt, Artificial Sequence
  Synthetic
ucauucguugagaauaaaucga

SEQ ID NO: 33987 - RNA, 23 nt, Artificial Sequence
  Synthetic
uucauucguugagaauaaaucga

SEQ ID NO: 33988 - RNA, 24 nt, Artificial Sequence
  Synthetic
auucauucguugagaauaaaucga

SEQ ID NO: 33989 - RNA, 18 nt, Artificial Sequence
  Synthetic
caucuguggguggcucga

SEQ ID NO: 33990 - RNA, 19 nt, Artificial Sequence
  Synthetic
ucaucuguggguggcucga

SEQ ID NO: 33991 - RNA, 20 nt, Artificial Sequence
  Synthetic
cucaucuguggguggcucga

SEQ ID NO: 33992 - RNA, 21 nt, Artificial Sequence
  Synthetic
ucucaucuguggguggcucga

SEQ ID NO: 33993 - RNA, 22 nt, Artificial Sequence
  Synthetic
uucucaucuguggguggcucga

SEQ ID NO: 33994 - RNA, 23 nt, Artificial Sequence
  Synthetic
uuucucaucuguggguggcucga

SEQ ID NO: 33995 - RNA, 24 nt, Artificial Sequence
  Synthetic
uuuucucaucuguggguggcucga

SEQ ID NO: 33996 - RNA, 18 nt, Artificial Sequence
  Synthetic
ccauaaaugccaucucga

SEQ ID NO: 33997 - RNA, 19 nt, Artificial Sequence
  Synthetic
uccauaaaugccaucucga

SEQ ID NO: 33998 - RNA, 20 nt, Artificial Sequence
  Synthetic
auccauaaaugccaucucga

SEQ ID NO: 33999 - RNA, 22 nt, Artificial Sequence
  Synthetic
agauccauaaaugccaucucga

SEQ ID NO: 34000 - RNA, 23 nt, Artificial Sequence
  Synthetic
aagauccauaaaugccaucucga

SEQ ID NO: 34001 - RNA, 24 nt, Artificial Sequence
  Synthetic
aaagauccauaaaugccaucucga

SEQ ID NO: 34002 - RNA, 18 nt, Artificial Sequence
  Synthetic
cacagaacuuguucucga

SEQ ID NO: 34003 - RNA, 19 nt, Artificial Sequence
  Synthetic
acacagaacuuguucucga

SEQ ID NO: 34004 - RNA, 20 nt, Artificial Sequence
  Synthetic
cacacagaacuuguucucga

SEQ ID NO: 34005 - RNA, 21 nt, Artificial Sequence
  Synthetic
ucacacagaacuuguucucga

SEQ ID NO: 34006 - RNA, 22 nt, Artificial Sequence
  Synthetic
aucacacagaacuuguucucga

SEQ ID NO: 34007 - RNA, 23 nt, Artificial Sequence
  Synthetic
caucacacagaacuuguucucga

SEQ ID NO: 34008 - RNA, 24 nt, Artificial Sequence
  Synthetic
ccaucacacagaacuuguucucga

SEQ ID NO: 34009 - RNA, 18 nt, Artificial Sequence
  Synthetic
cuauucucuuagugucga

SEQ ID NO: 34010 - RNA, 19 nt, Artificial Sequence
  Synthetic
ucuauucucuuagugucga

SEQ ID NO: 34011 - RNA, 20 nt, Artificial Sequence
  Synthetic
uucuauucucuuagugucga

SEQ ID NO: 34012 - RNA, 21 nt, Artificial Sequence
  Synthetic
cuucuauucucuuagugucga

SEQ ID NO: 34013 - RNA, 22 nt, Artificial Sequence
  Synthetic
acuucuauucucuuagugucga

SEQ ID NO: 34014 - RNA, 23 nt, Artificial Sequence
  Synthetic
aacuucuauucucuuagugucga

SEQ ID NO: 34015 - RNA, 24 nt, Artificial Sequence
  Synthetic
caacuucuauucucuuagugucga

SEQ ID NO: 34016 - RNA, 18 nt, Artificial Sequence
  Synthetic
cagaaguagagacuucga

SEQ ID NO: 34017 - RNA, 19 nt, Artificial Sequence
  Synthetic
ucagaaguagagacuucga

SEQ ID NO: 34018 - RNA, 21 nt, Artificial Sequence
  Synthetic
agucagaaguagagacuucga

SEQ ID NO: 34019 - RNA, 23 nt, Artificial Sequence
  Synthetic
ugagucagaaguagagacuucga

SEQ ID NO: 34020 - RNA, 24 nt, Artificial Sequence
  Synthetic
cugagucagaaguagagacuucga

SEQ ID NO: 34021 - RNA, 18 nt, Artificial Sequence
  Synthetic
agcuucuguugaguucga

SEQ ID NO: 34022 - RNA, 19 nt, Artificial Sequence
  Synthetic
cagcuucuguugaguucga

SEQ ID NO: 34023 - RNA, 20 nt, Artificial Sequence
  Synthetic
acagcuucuguugaguucga

SEQ ID NO: 34024 - RNA, 21 nt, Artificial Sequence
  Synthetic
uacagcuucuguugaguucga

SEQ ID NO: 34025 - RNA, 22 nt, Artificial Sequence
  Synthetic
cuacagcuucuguugaguucga

SEQ ID NO: 34026 - RNA, 23 nt, Artificial Sequence
  Synthetic
ucuacagcuucuguugaguucga

SEQ ID NO: 34027 - RNA, 18 nt, Artificial Sequence
  Synthetic
acugaaguaugguuucga

SEQ ID NO: 34028 - RNA, 19 nt, Artificial Sequence
  Synthetic
uacugaaguaugguuucga

SEQ ID NO: 34029 - RNA, 20 nt, Artificial Sequence
  Synthetic
auacugaaguaugguuucga

SEQ ID NO: 34030 - RNA, 18 nt, Artificial Sequence
  Synthetic
aacuuuacuucaaaagga

SEQ ID NO: 34031 - RNA, 20 nt, Artificial Sequence
  Synthetic
agaacuuuacuucaaaagga

SEQ ID NO: 34032 - RNA, 21 nt, Artificial Sequence
  Synthetic
cagaacuuuacuucaaaagga

SEQ ID NO: 34033 - RNA, 22 nt, Artificial Sequence
  Synthetic
acagaacuuuacuucaaaagga

SEQ ID NO: 34034 - RNA, 23 nt, Artificial Sequence
  Synthetic
cacagaacuuuacuucaaaagga

SEQ ID NO: 34035 - RNA, 24 nt, Artificial Sequence
  Synthetic
ucacagaacuuuacuucaaaagga

SEQ ID NO: 34036 - RNA, 18 nt, Artificial Sequence
  Synthetic
uucucuguaguaaaagga

SEQ ID NO: 34037 - RNA, 19 nt, Artificial Sequence
  Synthetic
auucucuguaguaaaagga

SEQ ID NO: 34038 - RNA, 20 nt, Artificial Sequence
  Synthetic
cauucucuguaguaaaagga

SEQ ID NO: 34039 - RNA, 21 nt, Artificial Sequence
  Synthetic
ucauucucuguaguaaaagga

SEQ ID NO: 34040 - RNA, 23 nt, Artificial Sequence
  Synthetic
ugucauucucuguaguaaaagga

SEQ ID NO: 34041 - RNA, 22 nt, Artificial Sequence
  Synthetic
aguuuuauauguuuuaaaagga

SEQ ID NO: 34042 - RNA, 23 nt, Artificial Sequence
  Synthetic
uaguuuuauauguuuuaaaagga

SEQ ID NO: 34043 - RNA, 24 nt, Artificial Sequence
  Synthetic
uuaguuuuauauguuuuaaaagga

SEQ ID NO: 34044 - RNA, 18 nt, Artificial Sequence
  Synthetic
ucugguuuugacaaagga

SEQ ID NO: 34045 - RNA, 19 nt, Artificial Sequence
  Synthetic
uucugguuuugacaaagga

SEQ ID NO: 34046 - RNA, 20 nt, Artificial Sequence
  Synthetic
uuucugguuuugacaaagga

SEQ ID NO: 34047 - RNA, 21 nt, Artificial Sequence
  Synthetic
uuuucugguuuugacaaagga

SEQ ID NO: 34048 - RNA, 22 nt, Artificial Sequence
  Synthetic
cuuuucugguuuugacaaagga

SEQ ID NO: 34049 - RNA, 23 nt, Artificial Sequence
  Synthetic
acuuuucugguuuugacaaagga

SEQ ID NO: 34050 - RNA, 21 nt, Artificial Sequence
  Synthetic
cuuucuuuuuaaggcaaagga

SEQ ID NO: 34051 - RNA, 22 nt, Artificial Sequence
  Synthetic
acuuucuuuuuaaggcaaagga

SEQ ID NO: 34052 - RNA, 23 nt, Artificial Sequence
  Synthetic
uacuuucuuuuuaaggcaaagga

SEQ ID NO: 34053 - RNA, 24 nt, Artificial Sequence
  Synthetic
auacuuucuuuuuaaggcaaagga

SEQ ID NO: 34054 - RNA, 18 nt, Artificial Sequence
  Synthetic
ugugaaaucgagaaagga

SEQ ID NO: 34055 - RNA, 19 nt, Artificial Sequence
  Synthetic
uugugaaaucgagaaagga

SEQ ID NO: 34056 - RNA, 20 nt, Artificial Sequence
  Synthetic
cuugugaaaucgagaaagga

SEQ ID NO: 34057 - RNA, 22 nt, Artificial Sequence
  Synthetic
ugcuugugaaaucgagaaagga

SEQ ID NO: 34058 - RNA, 23 nt, Artificial Sequence
  Synthetic
uugcuugugaaaucgagaaagga

SEQ ID NO: 34059 - RNA, 21 nt, Artificial Sequence
  Synthetic
cauuucugcauuucuaaagga

SEQ ID NO: 34060 - RNA, 22 nt, Artificial Sequence
  Synthetic
ccauuucugcauuucuaaagga

SEQ ID NO: 34061 - RNA, 24 nt, Artificial Sequence
  Synthetic
agccauuucugcauuucuaaagga

SEQ ID NO: 34062 - RNA, 18 nt, Artificial Sequence
  Synthetic
uuaccucuauuacaagga

SEQ ID NO: 34063 - RNA, 19 nt, Artificial Sequence
  Synthetic
uuuaccucuauuacaagga

SEQ ID NO: 34064 - RNA, 20 nt, Artificial Sequence
  Synthetic
uuuuaccucuauuacaagga

SEQ ID NO: 34065 - RNA, 22 nt, Artificial Sequence
  Synthetic
uguuuuaccucuauuacaagga

SEQ ID NO: 34066 - RNA, 23 nt, Artificial Sequence
  Synthetic
uuguuuuaccucuauuacaagga

SEQ ID NO: 34067 - RNA, 24 nt, Artificial Sequence
  Synthetic
auuguuuuaccucuauuacaagga

SEQ ID NO: 34068 - RNA, 21 nt, Artificial Sequence
  Synthetic
aaagguaggacaagagaagga

SEQ ID NO: 34069 - RNA, 22 nt, Artificial Sequence
  Synthetic
caaagguaggacaagagaagga

SEQ ID NO: 34070 - RNA, 23 nt, Artificial Sequence
  Synthetic
ccaaagguaggacaagagaagga

SEQ ID NO: 34071 - RNA, 24 nt, Artificial Sequence
  Synthetic
uccaaagguaggacaagagaagga

SEQ ID NO: 34072 - RNA, 21 nt, Artificial Sequence
  Synthetic
uugggagggaagagggaagga

SEQ ID NO: 34073 - RNA, 22 nt, Artificial Sequence
  Synthetic
uuugggagggaagagggaagga

SEQ ID NO: 34074 - RNA, 23 nt, Artificial Sequence
  Synthetic
uuuugggagggaagagggaagga

SEQ ID NO: 34075 - RNA, 18 nt, Artificial Sequence
  Synthetic
cauauauauccugaagga

SEQ ID NO: 34076 - RNA, 21 nt, Artificial Sequence
  Synthetic
uggcauauauauccugaagga

SEQ ID NO: 34077 - RNA, 22 nt, Artificial Sequence
  Synthetic
uuggcauauauauccugaagga

SEQ ID NO: 34078 - RNA, 23 nt, Artificial Sequence
  Synthetic
cuuggcauauauauccugaagga

SEQ ID NO: 34079 - RNA, 18 nt, Artificial Sequence
  Synthetic
cguugucacaaauaagga

SEQ ID NO: 34080 - RNA, 19 nt, Artificial Sequence
  Synthetic
ucguugucacaaauaagga

SEQ ID NO: 34081 - RNA, 20 nt, Artificial Sequence
  Synthetic
uucguugucacaaauaagga

SEQ ID NO: 34082 - RNA, 21 nt, Artificial Sequence
  Synthetic
uuucguugucacaaauaagga

SEQ ID NO: 34083 - RNA, 22 nt, Artificial Sequence
  Synthetic
uuuucguugucacaaauaagga

SEQ ID NO: 34084 - RNA, 23 nt, Artificial Sequence
  Synthetic
uuuuucguugucacaaauaagga

SEQ ID NO: 34085 - RNA, 24 nt, Artificial Sequence
  Synthetic
cuuuuucguugucacaaauaagga

SEQ ID NO: 34086 - RNA, 18 nt, Artificial Sequence
  Synthetic
acauuacccauauaagga

SEQ ID NO: 34087 - RNA, 19 nt, Artificial Sequence
  Synthetic
cacauuacccauauaagga

SEQ ID NO: 34088 - RNA, 20 nt, Artificial Sequence
  Synthetic
ucacauuacccauauaagga

SEQ ID NO: 34089 - RNA, 21 nt, Artificial Sequence
  Synthetic
cucacauuacccauauaagga

SEQ ID NO: 34090 - RNA, 22 nt, Artificial Sequence
  Synthetic
ccucacauuacccauauaagga

SEQ ID NO: 34091 - RNA, 23 nt, Artificial Sequence
  Synthetic
accucacauuacccauauaagga

SEQ ID NO: 34092 - RNA, 24 nt, Artificial Sequence
  Synthetic
aaccucacauuacccauauaagga

SEQ ID NO: 34093 - RNA, 18 nt, Artificial Sequence
  Synthetic
uaaaauuaaaacuaagga

SEQ ID NO: 34094 - RNA, 19 nt, Artificial Sequence
  Synthetic
cuaaaauuaaaacuaagga

SEQ ID NO: 34095 - RNA, 20 nt, Artificial Sequence
  Synthetic
acuaaaauuaaaacuaagga

SEQ ID NO: 34096 - RNA, 22 nt, Artificial Sequence
  Synthetic
ugacuaaaauuaaaacuaagga

SEQ ID NO: 34097 - RNA, 23 nt, Artificial Sequence
  Synthetic
uugacuaaaauuaaaacuaagga

SEQ ID NO: 34098 - RNA, 24 nt, Artificial Sequence
  Synthetic
auugacuaaaauuaaaacuaagga

SEQ ID NO: 34099 - RNA, 19 nt, Artificial Sequence
  Synthetic
aguggcuuucucuuaagga

SEQ ID NO: 34100 - RNA, 20 nt, Artificial Sequence
  Synthetic
caguggcuuucucuuaagga

SEQ ID NO: 34101 - RNA, 22 nt, Artificial Sequence
  Synthetic
agcaguggcuuucucuuaagga

SEQ ID NO: 34102 - RNA, 18 nt, Artificial Sequence
  Synthetic
aacuuccccuuuuaagga

SEQ ID NO: 34103 - RNA, 19 nt, Artificial Sequence
  Synthetic
caacuuccccuuuuaagga

SEQ ID NO: 34104 - RNA, 20 nt, Artificial Sequence
  Synthetic
ccaacuuccccuuuuaagga

SEQ ID NO: 34105 - RNA, 21 nt, Artificial Sequence
  Synthetic
uccaacuuccccuuuuaagga

SEQ ID NO: 34106 - RNA, 22 nt, Artificial Sequence
  Synthetic
cuccaacuuccccuuuuaagga

SEQ ID NO: 34107 - RNA, 23 nt, Artificial Sequence
  Synthetic
ucuccaacuuccccuuuuaagga

SEQ ID NO: 34108 - RNA, 21 nt, Artificial Sequence
  Synthetic
acuagaacaaaugaaacagga

SEQ ID NO: 34109 - RNA, 22 nt, Artificial Sequence
  Synthetic
cacuagaacaaaugaaacagga

SEQ ID NO: 34110 - RNA, 23 nt, Artificial Sequence
  Synthetic
ucacuagaacaaaugaaacagga

SEQ ID NO: 34111 - RNA, 24 nt, Artificial Sequence
  Synthetic
cucacuagaacaaaugaaacagga

SEQ ID NO: 34112 - RNA, 18 nt, Artificial Sequence
  Synthetic
aggugcugaauuacagga

SEQ ID NO: 34113 - RNA, 19 nt, Artificial Sequence
  Synthetic
uaggugcugaauuacagga

SEQ ID NO: 34114 - RNA, 20 nt, Artificial Sequence
  Synthetic
cuaggugcugaauuacagga

SEQ ID NO: 34115 - RNA, 21 nt, Artificial Sequence
  Synthetic
ucuaggugcugaauuacagga

SEQ ID NO: 34116 - RNA, 22 nt, Artificial Sequence
  Synthetic
uucuaggugcugaauuacagga

SEQ ID NO: 34117 - RNA, 23 nt, Artificial Sequence
  Synthetic
uuucuaggugcugaauuacagga

SEQ ID NO: 34118 - RNA, 24 nt, Artificial Sequence
  Synthetic
uuuucuaggugcugaauuacagga

SEQ ID NO: 34119 - RNA, 18 nt, Artificial Sequence
  Synthetic
auaagaggagaaucagga

SEQ ID NO: 34120 - RNA, 19 nt, Artificial Sequence
  Synthetic
aauaagaggagaaucagga

SEQ ID NO: 34121 - RNA, 21 nt, Artificial Sequence
  Synthetic
ugaauaagaggagaaucagga

SEQ ID NO: 34122 - RNA, 22 nt, Artificial Sequence
  Synthetic
cugaauaagaggagaaucagga

SEQ ID NO: 34123 - RNA, 23 nt, Artificial Sequence
  Synthetic
acugaauaagaggagaaucagga

SEQ ID NO: 34124 - RNA, 24 nt, Artificial Sequence
  Synthetic
aacugaauaagaggagaaucagga

SEQ ID NO: 34125 - RNA, 18 nt, Artificial Sequence
  Synthetic
uaagcacauaacucagga

SEQ ID NO: 34126 - RNA, 19 nt, Artificial Sequence
  Synthetic
auaagcacauaacucagga

SEQ ID NO: 34127 - RNA, 20 nt, Artificial Sequence
  Synthetic
aauaagcacauaacucagga

SEQ ID NO: 34128 - RNA, 21 nt, Artificial Sequence
  Synthetic
aaauaagcacauaacucagga

SEQ ID NO: 34129 - RNA, 22 nt, Artificial Sequence
  Synthetic
caaauaagcacauaacucagga

SEQ ID NO: 34130 - RNA, 23 nt, Artificial Sequence
  Synthetic
acaaauaagcacauaacucagga

SEQ ID NO: 34131 - RNA, 24 nt, Artificial Sequence
  Synthetic
aacaaauaagcacauaacucagga

SEQ ID NO: 34132 - RNA, 19 nt, Artificial Sequence
  Synthetic
ugucacgugguugucagga

SEQ ID NO: 34133 - RNA, 20 nt, Artificial Sequence
  Synthetic
uugucacgugguugucagga

SEQ ID NO: 34134 - RNA, 21 nt, Artificial Sequence
  Synthetic
uuugucacgugguugucagga

SEQ ID NO: 34135 - RNA, 22 nt, Artificial Sequence
  Synthetic
cuuugucacgugguugucagga

SEQ ID NO: 34136 - RNA, 19 nt, Artificial Sequence
  Synthetic
uguucuacuuuugucagga

SEQ ID NO: 34137 - RNA, 20 nt, Artificial Sequence
  Synthetic
uuguucuacuuuugucagga

SEQ ID NO: 34138 - RNA, 21 nt, Artificial Sequence
  Synthetic
cuuguucuacuuuugucagga

SEQ ID NO: 34139 - RNA, 23 nt, Artificial Sequence
  Synthetic
agcuuguucuacuuuugucagga

SEQ ID NO: 34140 - RNA, 18 nt, Artificial Sequence
  Synthetic
ucuuucggcucuucagga

SEQ ID NO: 34141 - RNA, 20 nt, Artificial Sequence
  Synthetic
ugucuuucggcucuucagga

SEQ ID NO: 34142 - RNA, 22 nt, Artificial Sequence
  Synthetic
ugugucuuucggcucuucagga

SEQ ID NO: 34143 - RNA, 23 nt, Artificial Sequence
  Synthetic
augugucuuucggcucuucagga

SEQ ID NO: 34144 - RNA, 24 nt, Artificial Sequence
  Synthetic
aaugugucuuucggcucuucagga

SEQ ID NO: 34145 - RNA, 18 nt, Artificial Sequence
  Synthetic
uacuucucccuuucagga

SEQ ID NO: 34146 - RNA, 19 nt, Artificial Sequence
  Synthetic
uuacuucucccuuucagga

SEQ ID NO: 34147 - RNA, 20 nt, Artificial Sequence
  Synthetic
uuuacuucucccuuucagga

SEQ ID NO: 34148 - RNA, 21 nt, Artificial Sequence
  Synthetic
uuuuacuucucccuuucagga

SEQ ID NO: 34149 - RNA, 22 nt, Artificial Sequence
  Synthetic
uuuuuacuucucccuuucagga

SEQ ID NO: 34150 - RNA, 23 nt, Artificial Sequence
  Synthetic
cuuuuuacuucucccuuucagga

SEQ ID NO: 34151 - RNA, 24 nt, Artificial Sequence
  Synthetic
ccuuuuuacuucucccuuucagga

SEQ ID NO: 34152 - RNA, 18 nt, Artificial Sequence
  Synthetic
aguaagaagcagagagga

SEQ ID NO: 34153 - RNA, 19 nt, Artificial Sequence
  Synthetic
aaguaagaagcagagagga

SEQ ID NO: 34154 - RNA, 20 nt, Artificial Sequence
  Synthetic
uaaguaagaagcagagagga

SEQ ID NO: 34155 - RNA, 21 nt, Artificial Sequence
  Synthetic
uuaaguaagaagcagagagga

SEQ ID NO: 34156 - RNA, 22 nt, Artificial Sequence
  Synthetic
auuaaguaagaagcagagagga

SEQ ID NO: 34157 - RNA, 23 nt, Artificial Sequence
  Synthetic
uauuaaguaagaagcagagagga

SEQ ID NO: 34158 - RNA, 24 nt, Artificial Sequence
  Synthetic
uuauuaaguaagaagcagagagga

SEQ ID NO: 34159 - RNA, 18 nt, Artificial Sequence
  Synthetic
uuaagaaaguggagagga

SEQ ID NO: 34160 - RNA, 19 nt, Artificial Sequence
  Synthetic
cuuaagaaaguggagagga

SEQ ID NO: 34161 - RNA, 20 nt, Artificial Sequence
  Synthetic
acuuaagaaaguggagagga

SEQ ID NO: 34162 - RNA, 21 nt, Artificial Sequence
  Synthetic
uacuuaagaaaguggagagga

SEQ ID NO: 34163 - RNA, 22 nt, Artificial Sequence
  Synthetic
auacuuaagaaaguggagagga

SEQ ID NO: 34164 - RNA, 23 nt, Artificial Sequence
  Synthetic
uauacuuaagaaaguggagagga

SEQ ID NO: 34165 - RNA, 24 nt, Artificial Sequence
  Synthetic
cuauacuuaagaaaguggagagga

SEQ ID NO: 34166 - RNA, 18 nt, Artificial Sequence
  Synthetic
aucagugagacuagagga

SEQ ID NO: 34167 - RNA, 20 nt, Artificial Sequence
  Synthetic
agaucagugagacuagagga

SEQ ID NO: 34168 - RNA, 23 nt, Artificial Sequence
  Synthetic
aggagaucagugagacuagagga

SEQ ID NO: 34169 - RNA, 24 nt, Artificial Sequence
  Synthetic
aaggagaucagugagacuagagga

SEQ ID NO: 34170 - RNA, 21 nt, Artificial Sequence
  Synthetic
uggggauuauuggaacgagga

SEQ ID NO: 34171 - RNA, 22 nt, Artificial Sequence
  Synthetic
auggggauuauuggaacgagga

SEQ ID NO: 34172 - RNA, 23 nt, Artificial Sequence
  Synthetic
aauggggauuauuggaacgagga

SEQ ID NO: 34173 - RNA, 21 nt, Artificial Sequence
  Synthetic
uauggcaccaggcaaggagga

SEQ ID NO: 34174 - RNA, 22 nt, Artificial Sequence
  Synthetic
cuauggcaccaggcaaggagga

SEQ ID NO: 34175 - RNA, 23 nt, Artificial Sequence
  Synthetic
acuauggcaccaggcaaggagga

SEQ ID NO: 34176 - RNA, 24 nt, Artificial Sequence
  Synthetic
aacuauggcaccaggcaaggagga

SEQ ID NO: 34177 - RNA, 21 nt, Artificial Sequence
  Synthetic
aauauaaugaauggaggagga

SEQ ID NO: 34178 - RNA, 22 nt, Artificial Sequence
  Synthetic
aaauauaaugaauggaggagga

SEQ ID NO: 34179 - RNA, 23 nt, Artificial Sequence
  Synthetic
uaaauauaaugaauggaggagga

SEQ ID NO: 34180 - RNA, 24 nt, Artificial Sequence
  Synthetic
cuaaauauaaugaauggaggagga

SEQ ID NO: 34181 - RNA, 18 nt, Artificial Sequence
  Synthetic
cuaaggaucuugggagga

SEQ ID NO: 34182 - RNA, 19 nt, Artificial Sequence
  Synthetic
ucuaaggaucuugggagga

SEQ ID NO: 34183 - RNA, 20 nt, Artificial Sequence
  Synthetic
uucuaaggaucuugggagga

SEQ ID NO: 34184 - RNA, 21 nt, Artificial Sequence
  Synthetic
cuucuaaggaucuugggagga

SEQ ID NO: 34185 - RNA, 22 nt, Artificial Sequence
  Synthetic
acuucuaaggaucuugggagga

SEQ ID NO: 34186 - RNA, 23 nt, Artificial Sequence
  Synthetic
aacuucuaaggaucuugggagga

SEQ ID NO: 34187 - RNA, 24 nt, Artificial Sequence
  Synthetic
uaacuucuaaggaucuugggagga

SEQ ID NO: 34188 - RNA, 18 nt, Artificial Sequence
  Synthetic
uugucauuuaguggagga

SEQ ID NO: 34189 - RNA, 19 nt, Artificial Sequence
  Synthetic
auugucauuuaguggagga

SEQ ID NO: 34190 - RNA, 20 nt, Artificial Sequence
  Synthetic
cauugucauuuaguggagga

SEQ ID NO: 34191 - RNA, 21 nt, Artificial Sequence
  Synthetic
acauugucauuuaguggagga

SEQ ID NO: 34192 - RNA, 22 nt, Artificial Sequence
  Synthetic
uacauugucauuuaguggagga

SEQ ID NO: 34193 - RNA, 23 nt, Artificial Sequence
  Synthetic
uuacauugucauuuaguggagga

SEQ ID NO: 34194 - RNA, 18 nt, Artificial Sequence
  Synthetic
aauguuaaggaaugagga

SEQ ID NO: 34195 - RNA, 19 nt, Artificial Sequence
  Synthetic
uaauguuaaggaaugagga

SEQ ID NO: 34196 - RNA, 20 nt, Artificial Sequence
  Synthetic
auaauguuaaggaaugagga

SEQ ID NO: 34197 - RNA, 21 nt, Artificial Sequence
  Synthetic
uauaauguuaaggaaugagga

SEQ ID NO: 34198 - RNA, 24 nt, Artificial Sequence
  Synthetic
ugguauaauguuaaggaaugagga

SEQ ID NO: 34199 - RNA, 18 nt, Artificial Sequence
  Synthetic
uaugcuaaguacugagga

SEQ ID NO: 34200 - RNA, 19 nt, Artificial Sequence
  Synthetic
auaugcuaaguacugagga

SEQ ID NO: 34201 - RNA, 20 nt, Artificial Sequence
  Synthetic
uauaugcuaaguacugagga

SEQ ID NO: 34202 - RNA, 21 nt, Artificial Sequence
  Synthetic
cuauaugcuaaguacugagga

SEQ ID NO: 34203 - RNA, 22 nt, Artificial Sequence
  Synthetic
acuauaugcuaaguacugagga

SEQ ID NO: 34204 - RNA, 23 nt, Artificial Sequence
  Synthetic
uacuauaugcuaaguacugagga

SEQ ID NO: 34205 - RNA, 24 nt, Artificial Sequence
  Synthetic
auacuauaugcuaaguacugagga

SEQ ID NO: 34206 - RNA, 21 nt, Artificial Sequence
  Synthetic
aaaggaaaugagaaaauagga

SEQ ID NO: 34207 - RNA, 22 nt, Artificial Sequence
  Synthetic
uaaaggaaaugagaaaauagga

SEQ ID NO: 34208 - RNA, 23 nt, Artificial Sequence
  Synthetic
uuaaaggaaaugagaaaauagga

SEQ ID NO: 34209 - RNA, 18 nt, Artificial Sequence
  Synthetic
aacaaccgucagauagga

SEQ ID NO: 34210 - RNA, 21 nt, Artificial Sequence
  Synthetic
aggaacaaccgucagauagga

SEQ ID NO: 34211 - RNA, 22 nt, Artificial Sequence
  Synthetic
uaggaacaaccgucagauagga

SEQ ID NO: 34212 - RNA, 23 nt, Artificial Sequence
  Synthetic
uuaggaacaaccgucagauagga

SEQ ID NO: 34213 - RNA, 24 nt, Artificial Sequence
  Synthetic
cuuaggaacaaccgucagauagga

SEQ ID NO: 34214 - RNA, 18 nt, Artificial Sequence
  Synthetic
auaaaaagaaguauagga

SEQ ID NO: 34215 - RNA, 20 nt, Artificial Sequence
  Synthetic
ugauaaaaagaaguauagga

SEQ ID NO: 34216 - RNA, 21 nt, Artificial Sequence
  Synthetic
augauaaaaagaaguauagga

SEQ ID NO: 34217 - RNA, 22 nt, Artificial Sequence
  Synthetic
aaugauaaaaagaaguauagga

SEQ ID NO: 34218 - RNA, 23 nt, Artificial Sequence
  Synthetic
aaaugauaaaaagaaguauagga

SEQ ID NO: 34219 - RNA, 24 nt, Artificial Sequence
  Synthetic
caaaugauaaaaagaaguauagga

SEQ ID NO: 34220 - RNA, 18 nt, Artificial Sequence
  Synthetic
ucuugcuuuugucuagga

SEQ ID NO: 34221 - RNA, 19 nt, Artificial Sequence
  Synthetic
uucuugcuuuugucuagga

SEQ ID NO: 34222 - RNA, 20 nt, Artificial Sequence
  Synthetic
uuucuugcuuuugucuagga

SEQ ID NO: 34223 - RNA, 21 nt, Artificial Sequence
  Synthetic
auuucuugcuuuugucuagga

SEQ ID NO: 34224 - RNA, 22 nt, Artificial Sequence
  Synthetic
uauuucuugcuuuugucuagga

SEQ ID NO: 34225 - RNA, 23 nt, Artificial Sequence
  Synthetic
auauuucuugcuuuugucuagga

SEQ ID NO: 34226 - RNA, 24 nt, Artificial Sequence
  Synthetic
uauauuucuugcuuuugucuagga

SEQ ID NO: 34227 - RNA, 18 nt, Artificial Sequence
  Synthetic
aaaaagacucagguagga

SEQ ID NO: 34228 - RNA, 19 nt, Artificial Sequence
  Synthetic
uaaaaagacucagguagga

SEQ ID NO: 34229 - RNA, 20 nt, Artificial Sequence
  Synthetic
uuaaaaagacucagguagga

SEQ ID NO: 34230 - RNA, 21 nt, Artificial Sequence
  Synthetic
auuaaaaagacucagguagga

SEQ ID NO: 34231 - RNA, 23 nt, Artificial Sequence
  Synthetic
agauuaaaaagacucagguagga

SEQ ID NO: 34232 - RNA, 24 nt, Artificial Sequence
  Synthetic
aagauuaaaaagacucagguagga

SEQ ID NO: 34233 - RNA, 19 nt, Artificial Sequence
  Synthetic
ugugggggcacaauuagga

SEQ ID NO: 34234 - RNA, 20 nt, Artificial Sequence
  Synthetic
cugugggggcacaauuagga

SEQ ID NO: 34235 - RNA, 21 nt, Artificial Sequence
  Synthetic
acugugggggcacaauuagga

SEQ ID NO: 34236 - RNA, 22 nt, Artificial Sequence
  Synthetic
cacugugggggcacaauuagga

SEQ ID NO: 34237 - RNA, 23 nt, Artificial Sequence
  Synthetic
ucacugugggggcacaauuagga

SEQ ID NO: 34238 - RNA, 24 nt, Artificial Sequence
  Synthetic
uucacugugggggcacaauuagga

SEQ ID NO: 34239 - RNA, 18 nt, Artificial Sequence
  Synthetic
aaccaagggguauuagga

SEQ ID NO: 34240 - RNA, 19 nt, Artificial Sequence
  Synthetic
aaaccaagggguauuagga

SEQ ID NO: 34241 - RNA, 20 nt, Artificial Sequence
  Synthetic
caaaccaagggguauuagga

SEQ ID NO: 34242 - RNA, 21 nt, Artificial Sequence
  Synthetic
acaaaccaagggguauuagga

SEQ ID NO: 34243 - RNA, 22 nt, Artificial Sequence
  Synthetic
uacaaaccaagggguauuagga

SEQ ID NO: 34244 - RNA, 23 nt, Artificial Sequence
  Synthetic
cuacaaaccaagggguauuagga

SEQ ID NO: 34245 - RNA, 24 nt, Artificial Sequence
  Synthetic
acuacaaaccaagggguauuagga

SEQ ID NO: 34246 - RNA, 19 nt, Artificial Sequence
  Synthetic
uguugggugacgcuuagga

SEQ ID NO: 34247 - RNA, 22 nt, Artificial Sequence
  Synthetic
agguguugggugacgcuuagga

SEQ ID NO: 34248 - RNA, 24 nt, Artificial Sequence
  Synthetic
ugagguguugggugacgcuuagga

SEQ ID NO: 34249 - RNA, 21 nt, Artificial Sequence
  Synthetic
auuuauugguacuuguuagga

SEQ ID NO: 34250 - RNA, 22 nt, Artificial Sequence
  Synthetic
uauuuauugguacuuguuagga

SEQ ID NO: 34251 - RNA, 23 nt, Artificial Sequence
  Synthetic
cuauuuauugguacuuguuagga

SEQ ID NO: 34252 - RNA, 18 nt, Artificial Sequence
  Synthetic
agugagagagguuuagga

SEQ ID NO: 34253 - RNA, 19 nt, Artificial Sequence
  Synthetic
aagugagagagguuuagga

SEQ ID NO: 34254 - RNA, 20 nt, Artificial Sequence
  Synthetic
uaagugagagagguuuagga

SEQ ID NO: 34255 - RNA, 22 nt, Artificial Sequence
  Synthetic
aguaagugagagagguuuagga

SEQ ID NO: 34256 - RNA, 23 nt, Artificial Sequence
  Synthetic
aaguaagugagagagguuuagga

SEQ ID NO: 34257 - RNA, 18 nt, Artificial Sequence
  Synthetic
agcuuuugucuuuuagga

SEQ ID NO: 34258 - RNA, 19 nt, Artificial Sequence
  Synthetic
aagcuuuugucuuuuagga

SEQ ID NO: 34259 - RNA, 20 nt, Artificial Sequence
  Synthetic
uaagcuuuugucuuuuagga

SEQ ID NO: 34260 - RNA, 21 nt, Artificial Sequence
  Synthetic
cuaagcuuuugucuuuuagga

SEQ ID NO: 34261 - RNA, 22 nt, Artificial Sequence
  Synthetic
ucuaagcuuuugucuuuuagga

SEQ ID NO: 34262 - RNA, 23 nt, Artificial Sequence
  Synthetic
uucuaagcuuuugucuuuuagga

SEQ ID NO: 34263 - RNA, 24 nt, Artificial Sequence
  Synthetic
uuucuaagcuuuugucuuuuagga

SEQ ID NO: 34264 - RNA, 20 nt, Artificial Sequence
  Synthetic
ugguacacaauagguacgga

SEQ ID NO: 34265 - RNA, 21 nt, Artificial Sequence
  Synthetic
cugguacacaauagguacgga

SEQ ID NO: 34266 - RNA, 22 nt, Artificial Sequence
  Synthetic
ccugguacacaauagguacgga

SEQ ID NO: 34267 - RNA, 23 nt, Artificial Sequence
  Synthetic
uccugguacacaauagguacgga

SEQ ID NO: 34268 - RNA, 24 nt, Artificial Sequence
  Synthetic
auccugguacacaauagguacgga

SEQ ID NO: 34269 - RNA, 18 nt, Artificial Sequence
  Synthetic
uugugauggugagccgga

SEQ ID NO: 34270 - RNA, 19 nt, Artificial Sequence
  Synthetic
auugugauggugagccgga

SEQ ID NO: 34271 - RNA, 20 nt, Artificial Sequence
  Synthetic
uauugugauggugagccgga

SEQ ID NO: 34272 - RNA, 21 nt, Artificial Sequence
  Synthetic
auauugugauggugagccgga

SEQ ID NO: 34273 - RNA, 22 nt, Artificial Sequence
  Synthetic
cauauugugauggugagccgga

SEQ ID NO: 34274 - RNA, 23 nt, Artificial Sequence
  Synthetic
ucauauugugauggugagccgga

SEQ ID NO: 34275 - RNA, 24 nt, Artificial Sequence
  Synthetic
cucauauugugauggugagccgga

SEQ ID NO: 34276 - RNA, 21 nt, Artificial Sequence
  Synthetic
agggcuaacccugucuucgga

SEQ ID NO: 34277 - RNA, 22 nt, Artificial Sequence
  Synthetic
aagggcuaacccugucuucgga

SEQ ID NO: 34278 - RNA, 23 nt, Artificial Sequence
  Synthetic
uaagggcuaacccugucuucgga

SEQ ID NO: 34279 - RNA, 24 nt, Artificial Sequence
  Synthetic
cuaagggcuaacccugucuucgga

SEQ ID NO: 34280 - RNA, 18 nt, Artificial Sequence
  Synthetic
aggguugguagaaaggga

SEQ ID NO: 34281 - RNA, 20 nt, Artificial Sequence
  Synthetic
ugaggguugguagaaaggga

SEQ ID NO: 34282 - RNA, 21 nt, Artificial Sequence
  Synthetic
augaggguugguagaaaggga

SEQ ID NO: 34283 - RNA, 22 nt, Artificial Sequence
  Synthetic
aaugaggguugguagaaaggga

SEQ ID NO: 34284 - RNA, 23 nt, Artificial Sequence
  Synthetic
aaaugaggguugguagaaaggga

SEQ ID NO: 34285 - RNA, 24 nt, Artificial Sequence
  Synthetic
uaaaugaggguugguagaaaggga

SEQ ID NO: 34286 - RNA, 18 nt, Artificial Sequence
  Synthetic
ccaaauaguaccaaggga

SEQ ID NO: 34287 - RNA, 19 nt, Artificial Sequence
  Synthetic
uccaaauaguaccaaggga

SEQ ID NO: 34288 - RNA, 20 nt, Artificial Sequence
  Synthetic
cuccaaauaguaccaaggga

SEQ ID NO: 34289 - RNA, 21 nt, Artificial Sequence
  Synthetic
ccuccaaauaguaccaaggga

SEQ ID NO: 34290 - RNA, 22 nt, Artificial Sequence
  Synthetic
uccuccaaauaguaccaaggga

SEQ ID NO: 34291 - RNA, 23 nt, Artificial Sequence
  Synthetic
cuccuccaaauaguaccaaggga

SEQ ID NO: 34292 - RNA, 24 nt, Artificial Sequence
  Synthetic
acuccuccaaauaguaccaaggga

SEQ ID NO: 34293 - RNA, 18 nt, Artificial Sequence
  Synthetic
uggggcuaaagcaaggga

SEQ ID NO: 34294 - RNA, 19 nt, Artificial Sequence
  Synthetic
auggggcuaaagcaaggga

SEQ ID NO: 34295 - RNA, 23 nt, Artificial Sequence
  Synthetic
agggauggggcuaaagcaaggga

SEQ ID NO: 34296 - RNA, 24 nt, Artificial Sequence
  Synthetic
cagggauggggcuaaagcaaggga

SEQ ID NO: 34297 - RNA, 21 nt, Artificial Sequence
  Synthetic
cagggauaauaaaagaaggga

SEQ ID NO: 34298 - RNA, 23 nt, Artificial Sequence
  Synthetic
agcagggauaauaaaagaaggga

SEQ ID NO: 34299 - RNA, 24 nt, Artificial Sequence
  Synthetic
aagcagggauaauaaaagaaggga

SEQ ID NO: 34300 - RNA, 18 nt, Artificial Sequence
  Synthetic
auuuuuugugagaaggga

SEQ ID NO: 34301 - RNA, 19 nt, Artificial Sequence
  Synthetic
cauuuuuugugagaaggga

SEQ ID NO: 34302 - RNA, 20 nt, Artificial Sequence
  Synthetic
ucauuuuuugugagaaggga

SEQ ID NO: 34303 - RNA, 21 nt, Artificial Sequence
  Synthetic
uucauuuuuugugagaaggga

SEQ ID NO: 34304 - RNA, 22 nt, Artificial Sequence
  Synthetic
uuucauuuuuugugagaaggga

SEQ ID NO: 34305 - RNA, 23 nt, Artificial Sequence
  Synthetic
auuucauuuuuugugagaaggga

SEQ ID NO: 34306 - RNA, 24 nt, Artificial Sequence
  Synthetic
uauuucauuuuuugugagaaggga

SEQ ID NO: 34307 - RNA, 18 nt, Artificial Sequence
  Synthetic
auuuuggaguugaaggga

SEQ ID NO: 34308 - RNA, 19 nt, Artificial Sequence
  Synthetic
cauuuuggaguugaaggga

SEQ ID NO: 34309 - RNA, 21 nt, Artificial Sequence
  Synthetic
agcauuuuggaguugaaggga

SEQ ID NO: 34310 - RNA, 22 nt, Artificial Sequence
  Synthetic
uagcauuuuggaguugaaggga

SEQ ID NO: 34311 - RNA, 24 nt, Artificial Sequence
  Synthetic
aguagcauuuuggaguugaaggga

SEQ ID NO: 34312 - RNA, 18 nt, Artificial Sequence
  Synthetic
aaaagaguguugaaggga

SEQ ID NO: 34313 - RNA, 19 nt, Artificial Sequence
  Synthetic
aaaaagaguguugaaggga

SEQ ID NO: 34314 - RNA, 20 nt, Artificial Sequence
  Synthetic
caaaaagaguguugaaggga

SEQ ID NO: 34315 - RNA, 21 nt, Artificial Sequence
  Synthetic
acaaaaagaguguugaaggga

SEQ ID NO: 34316 - RNA, 22 nt, Artificial Sequence
  Synthetic
uacaaaaagaguguugaaggga

SEQ ID NO: 34317 - RNA, 23 nt, Artificial Sequence
  Synthetic
auacaaaaagaguguugaaggga

SEQ ID NO: 34318 - RNA, 18 nt, Artificial Sequence
  Synthetic
cgauaugaaaauaaggga

SEQ ID NO: 34319 - RNA, 20 nt, Artificial Sequence
  Synthetic
agcgauaugaaaauaaggga

SEQ ID NO: 34320 - RNA, 22 nt, Artificial Sequence
  Synthetic
agagcgauaugaaaauaaggga

SEQ ID NO: 34321 - RNA, 24 nt, Artificial Sequence
  Synthetic
agagagcgauaugaaaauaaggga

SEQ ID NO: 34322 - RNA, 18 nt, Artificial Sequence
  Synthetic
ucaucuuaaucacaggga

SEQ ID NO: 34323 - RNA, 19 nt, Artificial Sequence
  Synthetic
uucaucuuaaucacaggga

SEQ ID NO: 34324 - RNA, 20 nt, Artificial Sequence
  Synthetic
uuucaucuuaaucacaggga

SEQ ID NO: 34325 - RNA, 21 nt, Artificial Sequence
  Synthetic
cuuucaucuuaaucacaggga

SEQ ID NO: 34326 - RNA, 22 nt, Artificial Sequence
  Synthetic
acuuucaucuuaaucacaggga

SEQ ID NO: 34327 - RNA, 23 nt, Artificial Sequence
  Synthetic
uacuuucaucuuaaucacaggga

SEQ ID NO: 34328 - RNA, 24 nt, Artificial Sequence
  Synthetic
auacuuucaucuuaaucacaggga

SEQ ID NO: 34329 - RNA, 18 nt, Artificial Sequence
  Synthetic
cauggcugcaaccaggga

SEQ ID NO: 34330 - RNA, 19 nt, Artificial Sequence
  Synthetic
acauggcugcaaccaggga

SEQ ID NO: 34331 - RNA, 20 nt, Artificial Sequence
  Synthetic
aacauggcugcaaccaggga

SEQ ID NO: 34332 - RNA, 21 nt, Artificial Sequence
  Synthetic
aaacauggcugcaaccaggga

SEQ ID NO: 34333 - RNA, 22 nt, Artificial Sequence
  Synthetic
aaaacauggcugcaaccaggga

SEQ ID NO: 34334 - RNA, 23 nt, Artificial Sequence
  Synthetic
caaaacauggcugcaaccaggga

SEQ ID NO: 34335 - RNA, 24 nt, Artificial Sequence
  Synthetic
ucaaaacauggcugcaaccaggga

SEQ ID NO: 34336 - RNA, 18 nt, Artificial Sequence
  Synthetic
uauuuguucuuccaggga

SEQ ID NO: 34337 - RNA, 19 nt, Artificial Sequence
  Synthetic
uuauuuguucuuccaggga

SEQ ID NO: 34338 - RNA, 20 nt, Artificial Sequence
  Synthetic
cuuauuuguucuuccaggga

SEQ ID NO: 34339 - RNA, 21 nt, Artificial Sequence
  Synthetic
ucuuauuuguucuuccaggga

SEQ ID NO: 34340 - RNA, 22 nt, Artificial Sequence
  Synthetic
uucuuauuuguucuuccaggga

SEQ ID NO: 34341 - RNA, 23 nt, Artificial Sequence
  Synthetic
auucuuauuuguucuuccaggga

SEQ ID NO: 34342 - RNA, 24 nt, Artificial Sequence
  Synthetic
aauucuuauuuguucuuccaggga

SEQ ID NO: 34343 - RNA, 18 nt, Artificial Sequence
  Synthetic
aauuuuaguaagcaggga

SEQ ID NO: 34344 - RNA, 19 nt, Artificial Sequence
  Synthetic
uaauuuuaguaagcaggga

SEQ ID NO: 34345 - RNA, 21 nt, Artificial Sequence
  Synthetic
uguaauuuuaguaagcaggga

SEQ ID NO: 34346 - RNA, 22 nt, Artificial Sequence
  Synthetic
cuguaauuuuaguaagcaggga

SEQ ID NO: 34347 - RNA, 23 nt, Artificial Sequence
  Synthetic
acuguaauuuuaguaagcaggga

SEQ ID NO: 34348 - RNA, 24 nt, Artificial Sequence
  Synthetic
aacuguaauuuuaguaagcaggga

SEQ ID NO: 34349 - RNA, 21 nt, Artificial Sequence
  Synthetic
agggagagaugggaagaggga

SEQ ID NO: 34350 - RNA, 22 nt, Artificial Sequence
  Synthetic
aagggagagaugggaagaggga

SEQ ID NO: 34351 - RNA, 23 nt, Artificial Sequence
  Synthetic
aaagggagagaugggaagaggga

SEQ ID NO: 34352 - RNA, 24 nt, Artificial Sequence
  Synthetic
caaagggagagaugggaagaggga

SEQ ID NO: 34353 - RNA, 19 nt, Artificial Sequence
  Synthetic
ugugagcugcucagaggga

SEQ ID NO: 34354 - RNA, 20 nt, Artificial Sequence
  Synthetic
cugugagcugcucagaggga

SEQ ID NO: 34355 - RNA, 23 nt, Artificial Sequence
  Synthetic
uggcugugagcugcucagaggga

SEQ ID NO: 34356 - RNA, 24 nt, Artificial Sequence
  Synthetic
cuggcugugagcugcucagaggga

SEQ ID NO: 34357 - RNA, 18 nt, Artificial Sequence
  Synthetic
uagaaugaauucgaggga

SEQ ID NO: 34358 - RNA, 19 nt, Artificial Sequence
  Synthetic
uuagaaugaauucgaggga

SEQ ID NO: 34359 - RNA, 20 nt, Artificial Sequence
  Synthetic
auuagaaugaauucgaggga

SEQ ID NO: 34360 - RNA, 21 nt, Artificial Sequence
  Synthetic
uauuagaaugaauucgaggga

SEQ ID NO: 34361 - RNA, 22 nt, Artificial Sequence
  Synthetic
uuauuagaaugaauucgaggga

SEQ ID NO: 34362 - RNA, 23 nt, Artificial Sequence
  Synthetic
auuauuagaaugaauucgaggga

SEQ ID NO: 34363 - RNA, 24 nt, Artificial Sequence
  Synthetic
aauuauuagaaugaauucgaggga

SEQ ID NO: 34364 - RNA, 18 nt, Artificial Sequence
  Synthetic
aagauuggguaugaggga

SEQ ID NO: 34365 - RNA, 19 nt, Artificial Sequence
  Synthetic
uaagauuggguaugaggga

SEQ ID NO: 34366 - RNA, 20 nt, Artificial Sequence
  Synthetic
uuaagauuggguaugaggga

SEQ ID NO: 34367 - RNA, 21 nt, Artificial Sequence
  Synthetic
uuuaagauuggguaugaggga

SEQ ID NO: 34368 - RNA, 23 nt, Artificial Sequence
  Synthetic
uguuuaagauuggguaugaggga

SEQ ID NO: 34369 - RNA, 24 nt, Artificial Sequence
  Synthetic
cuguuuaagauuggguaugaggga

SEQ ID NO: 34370 - RNA, 19 nt, Artificial Sequence
  Synthetic
agagcaacugucugaggga

SEQ ID NO: 34371 - RNA, 20 nt, Artificial Sequence
  Synthetic
uagagcaacugucugaggga

SEQ ID NO: 34372 - RNA, 21 nt, Artificial Sequence
  Synthetic
cuagagcaacugucugaggga

SEQ ID NO: 34373 - RNA, 22 nt, Artificial Sequence
  Synthetic
ucuagagcaacugucugaggga

SEQ ID NO: 34374 - RNA, 23 nt, Artificial Sequence
  Synthetic
cucuagagcaacugucugaggga

SEQ ID NO: 34375 - RNA, 24 nt, Artificial Sequence
  Synthetic
ucucuagagcaacugucugaggga

SEQ ID NO: 34376 - RNA, 18 nt, Artificial Sequence
  Synthetic
uuuggggcacccuaggga

SEQ ID NO: 34377 - RNA, 19 nt, Artificial Sequence
  Synthetic
auuuggggcacccuaggga

SEQ ID NO: 34378 - RNA, 20 nt, Artificial Sequence
  Synthetic
uauuuggggcacccuaggga

SEQ ID NO: 34379 - RNA, 21 nt, Artificial Sequence
  Synthetic
uuauuuggggcacccuaggga

SEQ ID NO: 34380 - RNA, 22 nt, Artificial Sequence
  Synthetic
uuuauuuggggcacccuaggga

SEQ ID NO: 34381 - RNA, 23 nt, Artificial Sequence
  Synthetic
uuuuauuuggggcacccuaggga

SEQ ID NO: 34382 - RNA, 24 nt, Artificial Sequence
  Synthetic
uuuuuauuuggggcacccuaggga

SEQ ID NO: 34383 - RNA, 18 nt, Artificial Sequence
  Synthetic
uuacauacaggcuaggga

SEQ ID NO: 34384 - RNA, 20 nt, Artificial Sequence
  Synthetic
aguuacauacaggcuaggga

SEQ ID NO: 34385 - RNA, 21 nt, Artificial Sequence
  Synthetic
caguuacauacaggcuaggga

SEQ ID NO: 34386 - RNA, 22 nt, Artificial Sequence
  Synthetic
acaguuacauacaggcuaggga

SEQ ID NO: 34387 - RNA, 23 nt, Artificial Sequence
  Synthetic
cacaguuacauacaggcuaggga

SEQ ID NO: 34388 - RNA, 24 nt, Artificial Sequence
  Synthetic
ccacaguuacauacaggcuaggga

SEQ ID NO: 34389 - RNA, 19 nt, Artificial Sequence
  Synthetic
ugaagcaggcuucuaggga

SEQ ID NO: 34390 - RNA, 20 nt, Artificial Sequence
  Synthetic
cugaagcaggcuucuaggga

SEQ ID NO: 34391 - RNA, 24 nt, Artificial Sequence
  Synthetic
agggcugaagcaggcuucuaggga

SEQ ID NO: 34392 - RNA, 18 nt, Artificial Sequence
  Synthetic
acagacaaaaauuaggga

SEQ ID NO: 34393 - RNA, 19 nt, Artificial Sequence
  Synthetic
uacagacaaaaauuaggga

SEQ ID NO: 34394 - RNA, 20 nt, Artificial Sequence
  Synthetic
auacagacaaaaauuaggga

SEQ ID NO: 34395 - RNA, 21 nt, Artificial Sequence
  Synthetic
uauacagacaaaaauuaggga

SEQ ID NO: 34396 - RNA, 22 nt, Artificial Sequence
  Synthetic
cuauacagacaaaaauuaggga

SEQ ID NO: 34397 - RNA, 23 nt, Artificial Sequence
  Synthetic
ucuauacagacaaaaauuaggga

SEQ ID NO: 34398 - RNA, 24 nt, Artificial Sequence
  Synthetic
aucuauacagacaaaaauuaggga

SEQ ID NO: 34399 - RNA, 19 nt, Artificial Sequence
  Synthetic
aguagcauuuucuuaggga

SEQ ID NO: 34400 - RNA, 20 nt, Artificial Sequence
  Synthetic
aaguagcauuuucuuaggga

SEQ ID NO: 34401 - RNA, 18 nt, Artificial Sequence
  Synthetic
uaaauaggguacacggga

SEQ ID NO: 34402 - RNA, 19 nt, Artificial Sequence
  Synthetic
uuaaauaggguacacggga

SEQ ID NO: 34403 - RNA, 20 nt, Artificial Sequence
  Synthetic
auuaaauaggguacacggga

SEQ ID NO: 34404 - RNA, 22 nt, Artificial Sequence
  Synthetic
agauuaaauaggguacacggga

SEQ ID NO: 34405 - RNA, 23 nt, Artificial Sequence
  Synthetic
aagauuaaauaggguacacggga

SEQ ID NO: 34406 - RNA, 24 nt, Artificial Sequence
  Synthetic
uaagauuaaauaggguacacggga

SEQ ID NO: 34407 - RNA, 21 nt, Artificial Sequence
  Synthetic
cuaggaaacgaagaaagggga

SEQ ID NO: 34408 - RNA, 23 nt, Artificial Sequence
  Synthetic
ugcuaggaaacgaagaaagggga

SEQ ID NO: 34409 - RNA, 18 nt, Artificial Sequence
  Synthetic
uccuauaaaauuagggga

SEQ ID NO: 34410 - RNA, 19 nt, Artificial Sequence
  Synthetic
auccuauaaaauuagggga

SEQ ID NO: 34411 - RNA, 21 nt, Artificial Sequence
  Synthetic
agauccuauaaaauuagggga

SEQ ID NO: 34412 - RNA, 22 nt, Artificial Sequence
  Synthetic
aagauccuauaaaauuagggga

SEQ ID NO: 34413 - RNA, 23 nt, Artificial Sequence
  Synthetic
uaagauccuauaaaauuagggga

SEQ ID NO: 34414 - RNA, 24 nt, Artificial Sequence
  Synthetic
cuaagauccuauaaaauuagggga

SEQ ID NO: 34415 - RNA, 20 nt, Artificial Sequence
  Synthetic
agguaugaaauacaggggga

SEQ ID NO: 34416 - RNA, 21 nt, Artificial Sequence
  Synthetic
cagguaugaaauacaggggga

SEQ ID NO: 34417 - RNA, 22 nt, Artificial Sequence
  Synthetic
ucagguaugaaauacaggggga

SEQ ID NO: 34418 - RNA, 23 nt, Artificial Sequence
  Synthetic
aucagguaugaaauacaggggga

SEQ ID NO: 34419 - RNA, 24 nt, Artificial Sequence
  Synthetic
uaucagguaugaaauacaggggga

SEQ ID NO: 34420 - RNA, 18 nt, Artificial Sequence
  Synthetic
uaugaaaguaugggggga

SEQ ID NO: 34421 - RNA, 19 nt, Artificial Sequence
  Synthetic
uuaugaaaguaugggggga

SEQ ID NO: 34422 - RNA, 20 nt, Artificial Sequence
  Synthetic
uuuaugaaaguaugggggga

SEQ ID NO: 34423 - RNA, 21 nt, Artificial Sequence
  Synthetic
auuuaugaaaguaugggggga

SEQ ID NO: 34424 - RNA, 22 nt, Artificial Sequence
  Synthetic
uauuuaugaaaguaugggggga

SEQ ID NO: 34425 - RNA, 24 nt, Artificial Sequence
  Synthetic
uguauuuaugaaaguaugggggga

SEQ ID NO: 34426 - RNA, 18 nt, Artificial Sequence
  Synthetic
aggggguaaaguggggga

SEQ ID NO: 34427 - RNA, 19 nt, Artificial Sequence
  Synthetic
uaggggguaaaguggggga

SEQ ID NO: 34428 - RNA, 20 nt, Artificial Sequence
  Synthetic
uuaggggguaaaguggggga

SEQ ID NO: 34429 - RNA, 21 nt, Artificial Sequence
  Synthetic
uuuaggggguaaaguggggga

SEQ ID NO: 34430 - RNA, 22 nt, Artificial Sequence
  Synthetic
uuuuaggggguaaaguggggga

SEQ ID NO: 34431 - RNA, 23 nt, Artificial Sequence
  Synthetic
uuuuuaggggguaaaguggggga

SEQ ID NO: 34432 - RNA, 22 nt, Artificial Sequence
  Synthetic
aggggaaaagcgagaaugggga

SEQ ID NO: 34433 - RNA, 23 nt, Artificial Sequence
  Synthetic
uaggggaaaagcgagaaugggga

SEQ ID NO: 34434 - RNA, 18 nt, Artificial Sequence
  Synthetic
auguacugauaaugggga

SEQ ID NO: 34435 - RNA, 19 nt, Artificial Sequence
  Synthetic
aauguacugauaaugggga

SEQ ID NO: 34436 - RNA, 20 nt, Artificial Sequence
  Synthetic
caauguacugauaaugggga

SEQ ID NO: 34437 - RNA, 21 nt, Artificial Sequence
  Synthetic
acaauguacugauaaugggga

SEQ ID NO: 34438 - RNA, 22 nt, Artificial Sequence
  Synthetic
uacaauguacugauaaugggga

SEQ ID NO: 34439 - RNA, 24 nt, Artificial Sequence
  Synthetic
uguacaauguacugauaaugggga

SEQ ID NO: 34440 - RNA, 22 nt, Artificial Sequence
  Synthetic
agggagauagcaggaaauggga

SEQ ID NO: 34441 - RNA, 23 nt, Artificial Sequence
  Synthetic
cagggagauagcaggaaauggga

SEQ ID NO: 34442 - RNA, 24 nt, Artificial Sequence
  Synthetic
ucagggagauagcaggaaauggga

SEQ ID NO: 34443 - RNA, 18 nt, Artificial Sequence
  Synthetic
uuggccucccuaauggga

SEQ ID NO: 34444 - RNA, 19 nt, Artificial Sequence
  Synthetic
auuggccucccuaauggga

SEQ ID NO: 34445 - RNA, 20 nt, Artificial Sequence
  Synthetic
uauuggccucccuaauggga

SEQ ID NO: 34446 - RNA, 21 nt, Artificial Sequence
  Synthetic
auauuggccucccuaauggga

SEQ ID NO: 34447 - RNA, 22 nt, Artificial Sequence
  Synthetic
uauauuggccucccuaauggga

SEQ ID NO: 34448 - RNA, 23 nt, Artificial Sequence
  Synthetic
auauauuggccucccuaauggga

SEQ ID NO: 34449 - RNA, 24 nt, Artificial Sequence
  Synthetic
cauauauuggccucccuaauggga

SEQ ID NO: 34450 - RNA, 18 nt, Artificial Sequence
  Synthetic
uuaugguagagcauggga

SEQ ID NO: 34451 - RNA, 19 nt, Artificial Sequence
  Synthetic
cuuaugguagagcauggga

SEQ ID NO: 34452 - RNA, 20 nt, Artificial Sequence
  Synthetic
ucuuaugguagagcauggga

SEQ ID NO: 34453 - RNA, 21 nt, Artificial Sequence
  Synthetic
uucuuaugguagagcauggga

SEQ ID NO: 34454 - RNA, 22 nt, Artificial Sequence
  Synthetic
auucuuaugguagagcauggga

SEQ ID NO: 34455 - RNA, 23 nt, Artificial Sequence
  Synthetic
aauucuuaugguagagcauggga

SEQ ID NO: 34456 - RNA, 24 nt, Artificial Sequence
  Synthetic
uaauucuuaugguagagcauggga

SEQ ID NO: 34457 - RNA, 20 nt, Artificial Sequence
  Synthetic
uggggugacaaaagauggga

SEQ ID NO: 34458 - RNA, 21 nt, Artificial Sequence
  Synthetic
cuggggugacaaaagauggga

SEQ ID NO: 34459 - RNA, 22 nt, Artificial Sequence
  Synthetic
ucuggggugacaaaagauggga

SEQ ID NO: 34460 - RNA, 24 nt, Artificial Sequence
  Synthetic
ugucuggggugacaaaagauggga

SEQ ID NO: 34461 - RNA, 18 nt, Artificial Sequence
  Synthetic
aauaacuuuuagauggga

SEQ ID NO: 34462 - RNA, 19 nt, Artificial Sequence
  Synthetic
uaauaacuuuuagauggga

SEQ ID NO: 34463 - RNA, 20 nt, Artificial Sequence
  Synthetic
uuaauaacuuuuagauggga

SEQ ID NO: 34464 - RNA, 21 nt, Artificial Sequence
  Synthetic
cuuaauaacuuuuagauggga

SEQ ID NO: 34465 - RNA, 22 nt, Artificial Sequence
  Synthetic
ccuuaauaacuuuuagauggga

SEQ ID NO: 34466 - RNA, 23 nt, Artificial Sequence
  Synthetic
uccuuaauaacuuuuagauggga

SEQ ID NO: 34467 - RNA, 24 nt, Artificial Sequence
  Synthetic
uuccuuaauaacuuuuagauggga

SEQ ID NO: 34468 - RNA, 18 nt, Artificial Sequence
  Synthetic
aauccccauuaccuggga

SEQ ID NO: 34469 - RNA, 20 nt, Artificial Sequence
  Synthetic
ugaauccccauuaccuggga

SEQ ID NO: 34470 - RNA, 21 nt, Artificial Sequence
  Synthetic
uugaauccccauuaccuggga

SEQ ID NO: 34471 - RNA, 22 nt, Artificial Sequence
  Synthetic
auugaauccccauuaccuggga

SEQ ID NO: 34472 - RNA, 23 nt, Artificial Sequence
  Synthetic
cauugaauccccauuaccuggga

SEQ ID NO: 34473 - RNA, 24 nt, Artificial Sequence
  Synthetic
ucauugaauccccauuaccuggga

SEQ ID NO: 34474 - RNA, 18 nt, Artificial Sequence
  Synthetic
uaagaaaaaugccuggga

SEQ ID NO: 34475 - RNA, 19 nt, Artificial Sequence
  Synthetic
uuaagaaaaaugccuggga

SEQ ID NO: 34476 - RNA, 20 nt, Artificial Sequence
  Synthetic
uuuaagaaaaaugccuggga

SEQ ID NO: 34477 - RNA, 21 nt, Artificial Sequence
  Synthetic
uuuuaagaaaaaugccuggga

SEQ ID NO: 34478 - RNA, 22 nt, Artificial Sequence
  Synthetic
cuuuuaagaaaaaugccuggga

SEQ ID NO: 34479 - RNA, 24 nt, Artificial Sequence
  Synthetic
ugcuuuuaagaaaaaugccuggga

SEQ ID NO: 34480 - RNA, 20 nt, Artificial Sequence
  Synthetic
ugguugguuugggaguggga

SEQ ID NO: 34481 - RNA, 22 nt, Artificial Sequence
  Synthetic
ugugguugguuugggaguggga

SEQ ID NO: 34482 - RNA, 23 nt, Artificial Sequence
  Synthetic
uugugguugguuugggaguggga

SEQ ID NO: 34483 - RNA, 24 nt, Artificial Sequence
  Synthetic
uuugugguugguuugggaguggga

SEQ ID NO: 34484 - RNA, 18 nt, Artificial Sequence
  Synthetic
aagaugaaauauguggga

SEQ ID NO: 34485 - RNA, 19 nt, Artificial Sequence
  Synthetic
aaagaugaaauauguggga

SEQ ID NO: 34486 - RNA, 20 nt, Artificial Sequence
  Synthetic
caaagaugaaauauguggga

SEQ ID NO: 34487 - RNA, 21 nt, Artificial Sequence
  Synthetic
ucaaagaugaaauauguggga

SEQ ID NO: 34488 - RNA, 22 nt, Artificial Sequence
  Synthetic
aucaaagaugaaauauguggga

SEQ ID NO: 34489 - RNA, 23 nt, Artificial Sequence
  Synthetic
aaucaaagaugaaauauguggga

SEQ ID NO: 34490 - RNA, 24 nt, Artificial Sequence
  Synthetic
uaaucaaagaugaaauauguggga

SEQ ID NO: 34491 - RNA, 18 nt, Artificial Sequence
  Synthetic
acugaguugggguuggga

SEQ ID NO: 34492 - RNA, 19 nt, Artificial Sequence
  Synthetic
cacugaguugggguuggga

SEQ ID NO: 34493 - RNA, 21 nt, Artificial Sequence
  Synthetic
agcacugaguugggguuggga

SEQ ID NO: 34494 - RNA, 22 nt, Artificial Sequence
  Synthetic
aagcacugaguugggguuggga

SEQ ID NO: 34495 - RNA, 24 nt, Artificial Sequence
  Synthetic
ugaagcacugaguugggguuggga

SEQ ID NO: 34496 - RNA, 18 nt, Artificial Sequence
  Synthetic
ugcaaaaucaguuuggga

SEQ ID NO: 34497 - RNA, 19 nt, Artificial Sequence
  Synthetic
cugcaaaaucaguuuggga

SEQ ID NO: 34498 - RNA, 20 nt, Artificial Sequence
  Synthetic
acugcaaaaucaguuuggga

SEQ ID NO: 34499 - RNA, 21 nt, Artificial Sequence
  Synthetic
uacugcaaaaucaguuuggga

SEQ ID NO: 34500 - RNA, 22 nt, Artificial Sequence
  Synthetic
auacugcaaaaucaguuuggga

SEQ ID NO: 34501 - RNA, 24 nt, Artificial Sequence
  Synthetic
agauacugcaaaaucaguuuggga

SEQ ID NO: 34502 - RNA, 18 nt, Artificial Sequence
  Synthetic
uagucuuaaaaaaaugga

SEQ ID NO: 34503 - RNA, 19 nt, Artificial Sequence
  Synthetic
cuagucuuaaaaaaaugga

SEQ ID NO: 34504 - RNA, 20 nt, Artificial Sequence
  Synthetic
ucuagucuuaaaaaaaugga

SEQ ID NO: 34505 - RNA, 21 nt, Artificial Sequence
  Synthetic
uucuagucuuaaaaaaaugga

SEQ ID NO: 34506 - RNA, 22 nt, Artificial Sequence
  Synthetic
cuucuagucuuaaaaaaaugga

SEQ ID NO: 34507 - RNA, 23 nt, Artificial Sequence
  Synthetic
ccuucuagucuuaaaaaaaugga

SEQ ID NO: 34508 - RNA, 24 nt, Artificial Sequence
  Synthetic
cccuucuagucuuaaaaaaaugga

SEQ ID NO: 34509 - RNA, 18 nt, Artificial Sequence
  Synthetic
aagauggacugaaaugga

SEQ ID NO: 34510 - RNA, 19 nt, Artificial Sequence
  Synthetic
aaagauggacugaaaugga

SEQ ID NO: 34511 - RNA, 20 nt, Artificial Sequence
  Synthetic
aaaagauggacugaaaugga

SEQ ID NO: 34512 - RNA, 22 nt, Artificial Sequence
  Synthetic
agaaaagauggacugaaaugga

SEQ ID NO: 34513 - RNA, 23 nt, Artificial Sequence
  Synthetic
aagaaaagauggacugaaaugga

SEQ ID NO: 34514 - RNA, 24 nt, Artificial Sequence
  Synthetic
uaagaaaagauggacugaaaugga

SEQ ID NO: 34515 - RNA, 21 nt, Artificial Sequence
  Synthetic
augaauaaguaagugaaugga

SEQ ID NO: 34516 - RNA, 22 nt, Artificial Sequence
  Synthetic
aaugaauaaguaagugaaugga

SEQ ID NO: 34517 - RNA, 23 nt, Artificial Sequence
  Synthetic
uaaugaauaaguaagugaaugga

SEQ ID NO: 34518 - RNA, 24 nt, Artificial Sequence
  Synthetic
uuaaugaauaaguaagugaaugga

SEQ ID NO: 34519 - RNA, 18 nt, Artificial Sequence
  Synthetic
uauaaagccacucaugga

SEQ ID NO: 34520 - RNA, 19 nt, Artificial Sequence
  Synthetic
uuauaaagccacucaugga

SEQ ID NO: 34521 - RNA, 20 nt, Artificial Sequence
  Synthetic
uuuauaaagccacucaugga

SEQ ID NO: 34522 - RNA, 21 nt, Artificial Sequence
  Synthetic
auuuauaaagccacucaugga

SEQ ID NO: 34523 - RNA, 22 nt, Artificial Sequence
  Synthetic
cauuuauaaagccacucaugga

SEQ ID NO: 34524 - RNA, 23 nt, Artificial Sequence
  Synthetic
acauuuauaaagccacucaugga

SEQ ID NO: 34525 - RNA, 18 nt, Artificial Sequence
  Synthetic
uccaccucuuuugaugga

SEQ ID NO: 34526 - RNA, 19 nt, Artificial Sequence
  Synthetic
cuccaccucuuuugaugga

SEQ ID NO: 34527 - RNA, 20 nt, Artificial Sequence
  Synthetic
ucuccaccucuuuugaugga

SEQ ID NO: 34528 - RNA, 21 nt, Artificial Sequence
  Synthetic
aucuccaccucuuuugaugga

SEQ ID NO: 34529 - RNA, 23 nt, Artificial Sequence
  Synthetic
ugaucuccaccucuuuugaugga

SEQ ID NO: 34530 - RNA, 24 nt, Artificial Sequence
  Synthetic
augaucuccaccucuuuugaugga

SEQ ID NO: 34531 - RNA, 21 nt, Artificial Sequence
  Synthetic
ugggugauugaagaauaugga

SEQ ID NO: 34532 - RNA, 22 nt, Artificial Sequence
  Synthetic
augggugauugaagaauaugga

SEQ ID NO: 34533 - RNA, 23 nt, Artificial Sequence
  Synthetic
uaugggugauugaagaauaugga

SEQ ID NO: 34534 - RNA, 24 nt, Artificial Sequence
  Synthetic
uuaugggugauugaagaauaugga

SEQ ID NO: 34535 - RNA, 18 nt, Artificial Sequence
  Synthetic
uuauacuucauauaugga

SEQ ID NO: 34536 - RNA, 19 nt, Artificial Sequence
  Synthetic
cuuauacuucauauaugga

SEQ ID NO: 34537 - RNA, 20 nt, Artificial Sequence
  Synthetic
ucuuauacuucauauaugga

SEQ ID NO: 34538 - RNA, 21 nt, Artificial Sequence
  Synthetic
aucuuauacuucauauaugga

SEQ ID NO: 34539 - RNA, 22 nt, Artificial Sequence
  Synthetic
uaucuuauacuucauauaugga

SEQ ID NO: 34540 - RNA, 23 nt, Artificial Sequence
  Synthetic
uuaucuuauacuucauauaugga

SEQ ID NO: 34541 - RNA, 24 nt, Artificial Sequence
  Synthetic
auuaucuuauacuucauauaugga

SEQ ID NO: 34542 - RNA, 18 nt, Artificial Sequence
  Synthetic
cuugguaauaacuaugga

SEQ ID NO: 34543 - RNA, 19 nt, Artificial Sequence
  Synthetic
ucuugguaauaacuaugga

SEQ ID NO: 34544 - RNA, 20 nt, Artificial Sequence
  Synthetic
cucuugguaauaacuaugga

SEQ ID NO: 34545 - RNA, 21 nt, Artificial Sequence
  Synthetic
ucucuugguaauaacuaugga

SEQ ID NO: 34546 - RNA, 23 nt, Artificial Sequence
  Synthetic
ugucucuugguaauaacuaugga

SEQ ID NO: 34547 - RNA, 24 nt, Artificial Sequence
  Synthetic
augucucuugguaauaacuaugga

SEQ ID NO: 34548 - RNA, 18 nt, Artificial Sequence
  Synthetic
uuggcaucacccuaugga

SEQ ID NO: 34549 - RNA, 19 nt, Artificial Sequence
  Synthetic
uuuggcaucacccuaugga

SEQ ID NO: 34550 - RNA, 20 nt, Artificial Sequence
  Synthetic
cuuuggcaucacccuaugga

SEQ ID NO: 34551 - RNA, 21 nt, Artificial Sequence
  Synthetic
ucuuuggcaucacccuaugga

SEQ ID NO: 34552 - RNA, 22 nt, Artificial Sequence
  Synthetic
uucuuuggcaucacccuaugga

SEQ ID NO: 34553 - RNA, 23 nt, Artificial Sequence
  Synthetic
cuucuuuggcaucacccuaugga

SEQ ID NO: 34554 - RNA, 24 nt, Artificial Sequence
  Synthetic
ccuucuuuggcaucacccuaugga

SEQ ID NO: 34555 - RNA, 18 nt, Artificial Sequence
  Synthetic
uuguaaacaagcuaugga

SEQ ID NO: 34556 - RNA, 19 nt, Artificial Sequence
  Synthetic
auuguaaacaagcuaugga

SEQ ID NO: 34557 - RNA, 20 nt, Artificial Sequence
  Synthetic
cauuguaaacaagcuaugga

SEQ ID NO: 34558 - RNA, 21 nt, Artificial Sequence
  Synthetic
ccauuguaaacaagcuaugga

SEQ ID NO: 34559 - RNA, 23 nt, Artificial Sequence
  Synthetic
ugccauuguaaacaagcuaugga

SEQ ID NO: 34560 - RNA, 24 nt, Artificial Sequence
  Synthetic
augccauuguaaacaagcuaugga

SEQ ID NO: 34561 - RNA, 18 nt, Artificial Sequence
  Synthetic
uugcucugauuaacugga

SEQ ID NO: 34562 - RNA, 19 nt, Artificial Sequence
  Synthetic
uuugcucugauuaacugga

SEQ ID NO: 34563 - RNA, 20 nt, Artificial Sequence
  Synthetic
uuuugcucugauuaacugga

SEQ ID NO: 34564 - RNA, 21 nt, Artificial Sequence
  Synthetic
uuuuugcucugauuaacugga

SEQ ID NO: 34565 - RNA, 23 nt, Artificial Sequence
  Synthetic
cguuuuugcucugauuaacugga

SEQ ID NO: 34566 - RNA, 24 nt, Artificial Sequence
  Synthetic
acguuuuugcucugauuaacugga

SEQ ID NO: 34567 - RNA, 18 nt, Artificial Sequence
  Synthetic
aaugucauugcuacugga

SEQ ID NO: 34568 - RNA, 20 nt, Artificial Sequence
  Synthetic
agaaugucauugcuacugga

SEQ ID NO: 34569 - RNA, 20 nt, Artificial Sequence
  Synthetic
uggguguggaggagccugga

SEQ ID NO: 34570 - RNA, 21 nt, Artificial Sequence
  Synthetic
auggguguggaggagccugga

SEQ ID NO: 34571 - RNA, 22 nt, Artificial Sequence
  Synthetic
cauggguguggaggagccugga

SEQ ID NO: 34572 - RNA, 23 nt, Artificial Sequence
  Synthetic
acauggguguggaggagccugga

SEQ ID NO: 34573 - RNA, 18 nt, Artificial Sequence
  Synthetic
uuacaguagagagcugga

SEQ ID NO: 34574 - RNA, 19 nt, Artificial Sequence
  Synthetic
auuacaguagagagcugga

SEQ ID NO: 34575 - RNA, 20 nt, Artificial Sequence
  Synthetic
aauuacaguagagagcugga

SEQ ID NO: 34576 - RNA, 22 nt, Artificial Sequence
  Synthetic
agaauuacaguagagagcugga

SEQ ID NO: 34577 - RNA, 24 nt, Artificial Sequence
  Synthetic
ugagaauuacaguagagagcugga

SEQ ID NO: 34578 - RNA, 18 nt, Artificial Sequence
  Synthetic
uagugccugguagcugga

SEQ ID NO: 34579 - RNA, 20 nt, Artificial Sequence
  Synthetic
uguagugccugguagcugga

SEQ ID NO: 34580 - RNA, 21 nt, Artificial Sequence
  Synthetic
auguagugccugguagcugga

SEQ ID NO: 34581 - RNA, 22 nt, Artificial Sequence
  Synthetic
aauguagugccugguagcugga

SEQ ID NO: 34582 - RNA, 23 nt, Artificial Sequence
  Synthetic
uaauguagugccugguagcugga

SEQ ID NO: 34583 - RNA, 24 nt, Artificial Sequence
  Synthetic
uuaauguagugccugguagcugga

SEQ ID NO: 34584 - RNA, 21 nt, Artificial Sequence
  Synthetic
uauuagaagaaaaaugcugga

SEQ ID NO: 34585 - RNA, 22 nt, Artificial Sequence
  Synthetic
auauuagaagaaaaaugcugga

SEQ ID NO: 34586 - RNA, 23 nt, Artificial Sequence
  Synthetic
aauauuagaagaaaaaugcugga

SEQ ID NO: 34587 - RNA, 24 nt, Artificial Sequence
  Synthetic
aaauauuagaagaaaaaugcugga

SEQ ID NO: 34588 - RNA, 18 nt, Artificial Sequence
  Synthetic
uaccagcucuacucugga

SEQ ID NO: 34589 - RNA, 19 nt, Artificial Sequence
  Synthetic
uuaccagcucuacucugga

SEQ ID NO: 34590 - RNA, 20 nt, Artificial Sequence
  Synthetic
uuuaccagcucuacucugga

SEQ ID NO: 34591 - RNA, 21 nt, Artificial Sequence
  Synthetic
cuuuaccagcucuacucugga

SEQ ID NO: 34592 - RNA, 24 nt, Artificial Sequence
  Synthetic
cggcuuuaccagcucuacucugga

SEQ ID NO: 34593 - RNA, 18 nt, Artificial Sequence
  Synthetic
ucaaaaucuuccucugga

SEQ ID NO: 34594 - RNA, 19 nt, Artificial Sequence
  Synthetic
uucaaaaucuuccucugga

SEQ ID NO: 34595 - RNA, 20 nt, Artificial Sequence
  Synthetic
uuucaaaaucuuccucugga

SEQ ID NO: 34596 - RNA, 21 nt, Artificial Sequence
  Synthetic
uuuucaaaaucuuccucugga

SEQ ID NO: 34597 - RNA, 22 nt, Artificial Sequence
  Synthetic
uuuuucaaaaucuuccucugga

SEQ ID NO: 34598 - RNA, 23 nt, Artificial Sequence
  Synthetic
uuuuuucaaaaucuuccucugga

SEQ ID NO: 34599 - RNA, 24 nt, Artificial Sequence
  Synthetic
uuuuuuucaaaaucuuccucugga

SEQ ID NO: 34600 - RNA, 18 nt, Artificial Sequence
  Synthetic
caaaagguuuucucugga

SEQ ID NO: 34601 - RNA, 19 nt, Artificial Sequence
  Synthetic
ccaaaagguuuucucugga

SEQ ID NO: 34602 - RNA, 20 nt, Artificial Sequence
  Synthetic
accaaaagguuuucucugga

SEQ ID NO: 34603 - RNA, 21 nt, Artificial Sequence
  Synthetic
uaccaaaagguuuucucugga

SEQ ID NO: 34604 - RNA, 22 nt, Artificial Sequence
  Synthetic
uuaccaaaagguuuucucugga

SEQ ID NO: 34605 - RNA, 23 nt, Artificial Sequence
  Synthetic
auuaccaaaagguuuucucugga

SEQ ID NO: 34606 - RNA, 24 nt, Artificial Sequence
  Synthetic
aauuaccaaaagguuuucucugga

SEQ ID NO: 34607 - RNA, 19 nt, Artificial Sequence
  Synthetic
agccaaaugggugucugga

SEQ ID NO: 34608 - RNA, 20 nt, Artificial Sequence
  Synthetic
aagccaaaugggugucugga

SEQ ID NO: 34609 - RNA, 22 nt, Artificial Sequence
  Synthetic
agaagccaaaugggugucugga

SEQ ID NO: 34610 - RNA, 23 nt, Artificial Sequence
  Synthetic
cagaagccaaaugggugucugga

SEQ ID NO: 34611 - RNA, 24 nt, Artificial Sequence
  Synthetic
acagaagccaaaugggugucugga

SEQ ID NO: 34612 - RNA, 19 nt, Artificial Sequence
  Synthetic
ugcaguaggagauucugga

SEQ ID NO: 34613 - RNA, 20 nt, Artificial Sequence
  Synthetic
augcaguaggagauucugga

SEQ ID NO: 34614 - RNA, 21 nt, Artificial Sequence
  Synthetic
aaugcaguaggagauucugga

SEQ ID NO: 34615 - RNA, 22 nt, Artificial Sequence
  Synthetic
aaaugcaguaggagauucugga

SEQ ID NO: 34616 - RNA, 23 nt, Artificial Sequence
  Synthetic
caaaugcaguaggagauucugga

SEQ ID NO: 34617 - RNA, 24 nt, Artificial Sequence
  Synthetic
ccaaaugcaguaggagauucugga

SEQ ID NO: 34618 - RNA, 18 nt, Artificial Sequence
  Synthetic
acuuguaaauuuucugga

SEQ ID NO: 34619 - RNA, 19 nt, Artificial Sequence
  Synthetic
aacuuguaaauuuucugga

SEQ ID NO: 34620 - RNA, 20 nt, Artificial Sequence
  Synthetic
aaacuuguaaauuuucugga

SEQ ID NO: 34621 - RNA, 21 nt, Artificial Sequence
  Synthetic
aaaacuuguaaauuuucugga

SEQ ID NO: 34622 - RNA, 22 nt, Artificial Sequence
  Synthetic
uaaaacuuguaaauuuucugga

SEQ ID NO: 34623 - RNA, 23 nt, Artificial Sequence
  Synthetic
uuaaaacuuguaaauuuucugga

SEQ ID NO: 34624 - RNA, 18 nt, Artificial Sequence
  Synthetic
uauuugauugauagugga

SEQ ID NO: 34625 - RNA, 19 nt, Artificial Sequence
  Synthetic
cuauuugauugauagugga

SEQ ID NO: 34626 - RNA, 20 nt, Artificial Sequence
  Synthetic
ucuauuugauugauagugga

SEQ ID NO: 34627 - RNA, 21 nt, Artificial Sequence
  Synthetic
aucuauuugauugauagugga

SEQ ID NO: 34628 - RNA, 23 nt, Artificial Sequence
  Synthetic
agaucuauuugauugauagugga

SEQ ID NO: 34629 - RNA, 24 nt, Artificial Sequence
  Synthetic
aagaucuauuugauugauagugga

SEQ ID NO: 34630 - RNA, 18 nt, Artificial Sequence
  Synthetic
uaauuguaguauagugga

SEQ ID NO: 34631 - RNA, 23 nt, Artificial Sequence
  Synthetic
agggguaauuguaguauagugga

SEQ ID NO: 34632 - RNA, 24 nt, Artificial Sequence
  Synthetic
uagggguaauuguaguauagugga

SEQ ID NO: 34633 - RNA, 18 nt, Artificial Sequence
  Synthetic
cauucaaaauguagugga

SEQ ID NO: 34634 - RNA, 22 nt, Artificial Sequence
  Synthetic
ugggcauucaaaauguagugga

SEQ ID NO: 34635 - RNA, 23 nt, Artificial Sequence
  Synthetic
augggcauucaaaauguagugga

SEQ ID NO: 34636 - RNA, 24 nt, Artificial Sequence
  Synthetic
aaugggcauucaaaauguagugga

SEQ ID NO: 34637 - RNA, 18 nt, Artificial Sequence
  Synthetic
aaugcuauguuuagugga

SEQ ID NO: 34638 - RNA, 19 nt, Artificial Sequence
  Synthetic
uaaugcuauguuuagugga

SEQ ID NO: 34639 - RNA, 20 nt, Artificial Sequence
  Synthetic
auaaugcuauguuuagugga

SEQ ID NO: 34640 - RNA, 21 nt, Artificial Sequence
  Synthetic
uauaaugcuauguuuagugga

SEQ ID NO: 34641 - RNA, 22 nt, Artificial Sequence
  Synthetic
auauaaugcuauguuuagugga

SEQ ID NO: 34642 - RNA, 23 nt, Artificial Sequence
  Synthetic
cauauaaugcuauguuuagugga

SEQ ID NO: 34643 - RNA, 24 nt, Artificial Sequence
  Synthetic
acauauaaugcuauguuuagugga

SEQ ID NO: 34644 - RNA, 18 nt, Artificial Sequence
  Synthetic
auuuuuucugggggugga

SEQ ID NO: 34645 - RNA, 19 nt, Artificial Sequence
  Synthetic
cauuuuuucugggggugga

SEQ ID NO: 34646 - RNA, 20 nt, Artificial Sequence
  Synthetic
acauuuuuucugggggugga

SEQ ID NO: 34647 - RNA, 22 nt, Artificial Sequence
  Synthetic
ugacauuuuuucugggggugga

SEQ ID NO: 34648 - RNA, 23 nt, Artificial Sequence
  Synthetic
augacauuuuuucugggggugga

SEQ ID NO: 34649 - RNA, 18 nt, Artificial Sequence
  Synthetic
cuuuaagggaguggugga

SEQ ID NO: 34650 - RNA, 19 nt, Artificial Sequence
  Synthetic
ucuuuaagggaguggugga

SEQ ID NO: 34651 - RNA, 20 nt, Artificial Sequence
  Synthetic
uucuuuaagggaguggugga

SEQ ID NO: 34652 - RNA, 21 nt, Artificial Sequence
  Synthetic
uuucuuuaagggaguggugga

SEQ ID NO: 34653 - RNA, 22 nt, Artificial Sequence
  Synthetic
auuucuuuaagggaguggugga

SEQ ID NO: 34654 - RNA, 23 nt, Artificial Sequence
  Synthetic
uauuucuuuaagggaguggugga

SEQ ID NO: 34655 - RNA, 24 nt, Artificial Sequence
  Synthetic
cuauuucuuuaagggaguggugga

SEQ ID NO: 34656 - RNA, 19 nt, Artificial Sequence
  Synthetic
uguuagugcaaaaugugga

SEQ ID NO: 34657 - RNA, 21 nt, Artificial Sequence
  Synthetic
uguguuagugcaaaaugugga

SEQ ID NO: 34658 - RNA, 22 nt, Artificial Sequence
  Synthetic
cuguguuagugcaaaaugugga

SEQ ID NO: 34659 - RNA, 23 nt, Artificial Sequence
  Synthetic
ccuguguuagugcaaaaugugga

SEQ ID NO: 34660 - RNA, 24 nt, Artificial Sequence
  Synthetic
uccuguguuagugcaaaaugugga

SEQ ID NO: 34661 - RNA, 21 nt, Artificial Sequence
  Synthetic
aauuuauuauuuccuugugga

SEQ ID NO: 34662 - RNA, 23 nt, Artificial Sequence
  Synthetic
agaauuuauuauuuccuugugga

SEQ ID NO: 34663 - RNA, 24 nt, Artificial Sequence
  Synthetic
cagaauuuauuauuuccuugugga

SEQ ID NO: 34664 - RNA, 18 nt, Artificial Sequence
  Synthetic
uuuauggagucuugugga

SEQ ID NO: 34665 - RNA, 20 nt, Artificial Sequence
  Synthetic
aguuuauggagucuugugga

SEQ ID NO: 34666 - RNA, 21 nt, Artificial Sequence
  Synthetic
uaguuuauggagucuugugga

SEQ ID NO: 34667 - RNA, 22 nt, Artificial Sequence
  Synthetic
uuaguuuauggagucuugugga

SEQ ID NO: 34668 - RNA, 23 nt, Artificial Sequence
  Synthetic
uuuaguuuauggagucuugugga

SEQ ID NO: 34669 - RNA, 24 nt, Artificial Sequence
  Synthetic
cuuuaguuuauggagucuugugga

SEQ ID NO: 34670 - RNA, 18 nt, Artificial Sequence
  Synthetic
aauacauacaugauugga

SEQ ID NO: 34671 - RNA, 19 nt, Artificial Sequence
  Synthetic
uaauacauacaugauugga

SEQ ID NO: 34672 - RNA, 20 nt, Artificial Sequence
  Synthetic
uuaauacauacaugauugga

SEQ ID NO: 34673 - RNA, 21 nt, Artificial Sequence
  Synthetic
uuuaauacauacaugauugga

SEQ ID NO: 34674 - RNA, 22 nt, Artificial Sequence
  Synthetic
cuuuaauacauacaugauugga

SEQ ID NO: 34675 - RNA, 23 nt, Artificial Sequence
  Synthetic
acuuuaauacauacaugauugga

SEQ ID NO: 34676 - RNA, 24 nt, Artificial Sequence
  Synthetic
aacuuuaauacauacaugauugga

SEQ ID NO: 34677 - RNA, 19 nt, Artificial Sequence
  Synthetic
agaccuuuuguuacuugga

SEQ ID NO: 34678 - RNA, 20 nt, Artificial Sequence
  Synthetic
cagaccuuuuguuacuugga

SEQ ID NO: 34679 - RNA, 21 nt, Artificial Sequence
  Synthetic
acagaccuuuuguuacuugga

SEQ ID NO: 34680 - RNA, 22 nt, Artificial Sequence
  Synthetic
cacagaccuuuuguuacuugga

SEQ ID NO: 34681 - RNA, 23 nt, Artificial Sequence
  Synthetic
ucacagaccuuuuguuacuugga

SEQ ID NO: 34682 - RNA, 18 nt, Artificial Sequence
  Synthetic
aauucaaguccccuugga

SEQ ID NO: 34683 - RNA, 19 nt, Artificial Sequence
  Synthetic
aaauucaaguccccuugga

SEQ ID NO: 34684 - RNA, 20 nt, Artificial Sequence
  Synthetic
caaauucaaguccccuugga

SEQ ID NO: 34685 - RNA, 21 nt, Artificial Sequence
  Synthetic
ucaaauucaaguccccuugga

SEQ ID NO: 34686 - RNA, 22 nt, Artificial Sequence
  Synthetic
uucaaauucaaguccccuugga

SEQ ID NO: 34687 - RNA, 23 nt, Artificial Sequence
  Synthetic
auucaaauucaaguccccuugga

SEQ ID NO: 34688 - RNA, 24 nt, Artificial Sequence
  Synthetic
uauucaaauucaaguccccuugga

SEQ ID NO: 34689 - RNA, 21 nt, Artificial Sequence
  Synthetic
cauauuauuuaaaaucuugga

SEQ ID NO: 34690 - RNA, 22 nt, Artificial Sequence
  Synthetic
acauauuauuuaaaaucuugga

SEQ ID NO: 34691 - RNA, 21 nt, Artificial Sequence
  Synthetic
uaaauuauguuuguucuugga

SEQ ID NO: 34692 - RNA, 22 nt, Artificial Sequence
  Synthetic
uuaaauuauguuuguucuugga

SEQ ID NO: 34693 - RNA, 24 nt, Artificial Sequence
  Synthetic
aguuaaauuauguuuguucuugga

SEQ ID NO: 34694 - RNA, 18 nt, Artificial Sequence
  Synthetic
acuaaguaacuaguugga

SEQ ID NO: 34695 - RNA, 19 nt, Artificial Sequence
  Synthetic
uacuaaguaacuaguugga

SEQ ID NO: 34696 - RNA, 20 nt, Artificial Sequence
  Synthetic
uuacuaaguaacuaguugga

SEQ ID NO: 34697 - RNA, 21 nt, Artificial Sequence
  Synthetic
uuuacuaaguaacuaguugga

SEQ ID NO: 34698 - RNA, 22 nt, Artificial Sequence
  Synthetic
auuuacuaaguaacuaguugga

SEQ ID NO: 34699 - RNA, 24 nt, Artificial Sequence
  Synthetic
ugauuuacuaaguaacuaguugga

SEQ ID NO: 34700 - RNA, 18 nt, Artificial Sequence
  Synthetic
caaagaucaguaguugga

SEQ ID NO: 34701 - RNA, 24 nt, Artificial Sequence
  Synthetic
ugggggcaaagaucaguaguugga

SEQ ID NO: 34702 - RNA, 21 nt, Artificial Sequence
  Synthetic
uagguguccgucaacguugga

SEQ ID NO: 34703 - RNA, 22 nt, Artificial Sequence
  Synthetic
auagguguccgucaacguugga

SEQ ID NO: 34704 - RNA, 23 nt, Artificial Sequence
  Synthetic
cauagguguccgucaacguugga

SEQ ID NO: 34705 - RNA, 24 nt, Artificial Sequence
  Synthetic
acauagguguccgucaacguugga

SEQ ID NO: 34706 - RNA, 18 nt, Artificial Sequence
  Synthetic
cagcucgaagagguugga

SEQ ID NO: 34707 - RNA, 19 nt, Artificial Sequence
  Synthetic
ucagcucgaagagguugga

SEQ ID NO: 34708 - RNA, 21 nt, Artificial Sequence
  Synthetic
ugucagcucgaagagguugga

SEQ ID NO: 34709 - RNA, 22 nt, Artificial Sequence
  Synthetic
augucagcucgaagagguugga

SEQ ID NO: 34710 - RNA, 23 nt, Artificial Sequence
  Synthetic
aaugucagcucgaagagguugga

SEQ ID NO: 34711 - RNA, 24 nt, Artificial Sequence
  Synthetic
uaaugucagcucgaagagguugga

SEQ ID NO: 34712 - RNA, 18 nt, Artificial Sequence
  Synthetic
auuuggagaaaauuugga

SEQ ID NO: 34713 - RNA, 19 nt, Artificial Sequence
  Synthetic
aauuuggagaaaauuugga

SEQ ID NO: 34714 - RNA, 20 nt, Artificial Sequence
  Synthetic
aaauuuggagaaaauuugga

SEQ ID NO: 34715 - RNA, 21 nt, Artificial Sequence
  Synthetic
uaaauuuggagaaaauuugga

SEQ ID NO: 34716 - RNA, 22 nt, Artificial Sequence
  Synthetic
uuaaauuuggagaaaauuugga

SEQ ID NO: 34717 - RNA, 23 nt, Artificial Sequence
  Synthetic
uuuaaauuuggagaaaauuugga

SEQ ID NO: 34718 - RNA, 24 nt, Artificial Sequence
  Synthetic
auuuaaauuuggagaaaauuugga

SEQ ID NO: 34719 - RNA, 23 nt, Artificial Sequence
  Synthetic
uggagaggagagaguaauuugga

SEQ ID NO: 34720 - RNA, 19 nt, Artificial Sequence
  Synthetic
agaaaauacgaaguuugga

SEQ ID NO: 34721 - RNA, 20 nt, Artificial Sequence
  Synthetic
cagaaaauacgaaguuugga

SEQ ID NO: 34722 - RNA, 22 nt, Artificial Sequence
  Synthetic
agcagaaaauacgaaguuugga

SEQ ID NO: 34723 - RNA, 23 nt, Artificial Sequence
  Synthetic
aagcagaaaauacgaaguuugga

SEQ ID NO: 34724 - RNA, 24 nt, Artificial Sequence
  Synthetic
uaagcagaaaauacgaaguuugga

SEQ ID NO: 34725 - RNA, 18 nt, Artificial Sequence
  Synthetic
acagaugccuuguuugga

SEQ ID NO: 34726 - RNA, 19 nt, Artificial Sequence
  Synthetic
uacagaugccuuguuugga

SEQ ID NO: 34727 - RNA, 21 nt, Artificial Sequence
  Synthetic
aguacagaugccuuguuugga

SEQ ID NO: 34728 - RNA, 22 nt, Artificial Sequence
  Synthetic
uaguacagaugccuuguuugga

SEQ ID NO: 34729 - RNA, 23 nt, Artificial Sequence
  Synthetic
auaguacagaugccuuguuugga

SEQ ID NO: 34730 - RNA, 24 nt, Artificial Sequence
  Synthetic
uauaguacagaugccuuguuugga

SEQ ID NO: 34731 - RNA, 18 nt, Artificial Sequence
  Synthetic
uaccucugaaauuuugga

SEQ ID NO: 34732 - RNA, 21 nt, Artificial Sequence
  Synthetic
agguaccucugaaauuuugga

SEQ ID NO: 34733 - RNA, 23 nt, Artificial Sequence
  Synthetic
ugagguaccucugaaauuuugga

SEQ ID NO: 34734 - RNA, 24 nt, Artificial Sequence
  Synthetic
uugagguaccucugaaauuuugga

SEQ ID NO: 34735 - RNA, 18 nt, Artificial Sequence
  Synthetic
uucuggaucucaaaauga

SEQ ID NO: 34736 - RNA, 19 nt, Artificial Sequence
  Synthetic
cuucuggaucucaaaauga

SEQ ID NO: 34737 - RNA, 20 nt, Artificial Sequence
  Synthetic
ccuucuggaucucaaaauga

SEQ ID NO: 34738 - RNA, 21 nt, Artificial Sequence
  Synthetic
uccuucuggaucucaaaauga

SEQ ID NO: 34739 - RNA, 23 nt, Artificial Sequence
  Synthetic
uguccuucuggaucucaaaauga

SEQ ID NO: 34740 - RNA, 24 nt, Artificial Sequence
  Synthetic
uuguccuucuggaucucaaaauga

SEQ ID NO: 34741 - RNA, 21 nt, Artificial Sequence
  Synthetic
cugugaaaggaaagaaaauga

SEQ ID NO: 34742 - RNA, 22 nt, Artificial Sequence
  Synthetic
acugugaaaggaaagaaaauga

SEQ ID NO: 34743 - RNA, 24 nt, Artificial Sequence
  Synthetic
ugacugugaaaggaaagaaaauga

SEQ ID NO: 34744 - RNA, 19 nt, Artificial Sequence
  Synthetic
ugauauucaaguaaaauga

SEQ ID NO: 34745 - RNA, 20 nt, Artificial Sequence
  Synthetic
augauauucaaguaaaauga

SEQ ID NO: 34746 - RNA, 21 nt, Artificial Sequence
  Synthetic
uaugauauucaaguaaaauga

SEQ ID NO: 34747 - RNA, 22 nt, Artificial Sequence
  Synthetic
uuaugauauucaaguaaaauga

SEQ ID NO: 34748 - RNA, 23 nt, Artificial Sequence
  Synthetic
uuuaugauauucaaguaaaauga

SEQ ID NO: 34749 - RNA, 24 nt, Artificial Sequence
  Synthetic
uuuuaugauauucaaguaaaauga

SEQ ID NO: 34750 - RNA, 22 nt, Artificial Sequence
  Synthetic
ugaaaaauauuuauuaaaauga

SEQ ID NO: 34751 - RNA, 23 nt, Artificial Sequence
  Synthetic
cugaaaaauauuuauuaaaauga

SEQ ID NO: 34752 - RNA, 21 nt, Artificial Sequence
  Synthetic
uuguucuuuuuuaacaaauga

SEQ ID NO: 34753 - RNA, 24 nt, Artificial Sequence
  Synthetic
ugguuguucuuuuuuaacaaauga

SEQ ID NO: 34754 - RNA, 18 nt, Artificial Sequence
  Synthetic
uaguaauaacacaaauga

SEQ ID NO: 34755 - RNA, 19 nt, Artificial Sequence
  Synthetic
uuaguaauaacacaaauga

SEQ ID NO: 34756 - RNA, 20 nt, Artificial Sequence
  Synthetic
uuuaguaauaacacaaauga

SEQ ID NO: 34757 - RNA, 21 nt, Artificial Sequence
  Synthetic
uuuuaguaauaacacaaauga

SEQ ID NO: 34758 - RNA, 22 nt, Artificial Sequence
  Synthetic
uuuuuaguaauaacacaaauga

SEQ ID NO: 34759 - RNA, 23 nt, Artificial Sequence
  Synthetic
auuuuuaguaauaacacaaauga

SEQ ID NO: 34760 - RNA, 24 nt, Artificial Sequence
  Synthetic
uauuuuuaguaauaacacaaauga

SEQ ID NO: 34761 - RNA, 21 nt, Artificial Sequence
  Synthetic
uaaagaaauaaagacaaauga

SEQ ID NO: 34762 - RNA, 22 nt, Artificial Sequence
  Synthetic
uuaaagaaauaaagacaaauga

SEQ ID NO: 34763 - RNA, 23 nt, Artificial Sequence
  Synthetic
cuuaaagaaauaaagacaaauga

SEQ ID NO: 34764 - RNA, 24 nt, Artificial Sequence
  Synthetic
acuuaaagaaauaaagacaaauga

SEQ ID NO: 34765 - RNA, 21 nt, Artificial Sequence
  Synthetic
cauccuuauuauuccaaauga

SEQ ID NO: 34766 - RNA, 22 nt, Artificial Sequence
  Synthetic
ucauccuuauuauuccaaauga

SEQ ID NO: 34767 - RNA, 23 nt, Artificial Sequence
  Synthetic
cucauccuuauuauuccaaauga

SEQ ID NO: 34768 - RNA, 18 nt, Artificial Sequence
  Synthetic
uuugcuuuacagaaauga

SEQ ID NO: 34769 - RNA, 19 nt, Artificial Sequence
  Synthetic
auuugcuuuacagaaauga

SEQ ID NO: 34770 - RNA, 23 nt, Artificial Sequence
  Synthetic
agggauuugcuuuacagaaauga

SEQ ID NO: 34771 - RNA, 24 nt, Artificial Sequence
  Synthetic
cagggauuugcuuuacagaaauga

SEQ ID NO: 34772 - RNA, 21 nt, Artificial Sequence
  Synthetic
aauugccauuuacugaaauga

SEQ ID NO: 34773 - RNA, 22 nt, Artificial Sequence
  Synthetic
uaauugccauuuacugaaauga

SEQ ID NO: 34774 - RNA, 24 nt, Artificial Sequence
  Synthetic
aguaauugccauuuacugaaauga

SEQ ID NO: 34775 - RNA, 21 nt, Artificial Sequence
  Synthetic
agggagcaauagaaacaauga

SEQ ID NO: 34776 - RNA, 22 nt, Artificial Sequence
  Synthetic
cagggagcaauagaaacaauga

SEQ ID NO: 34777 - RNA, 23 nt, Artificial Sequence
  Synthetic
acagggagcaauagaaacaauga

SEQ ID NO: 34778 - RNA, 24 nt, Artificial Sequence
  Synthetic
aacagggagcaauagaaacaauga

SEQ ID NO: 34779 - RNA, 19 nt, Artificial Sequence
  Synthetic
ugacuaucugaaacaauga

SEQ ID NO: 34780 - RNA, 20 nt, Artificial Sequence
  Synthetic
uugacuaucugaaacaauga

SEQ ID NO: 34781 - RNA, 22 nt, Artificial Sequence
  Synthetic
uguugacuaucugaaacaauga

SEQ ID NO: 34782 - RNA, 23 nt, Artificial Sequence
  Synthetic
uuguugacuaucugaaacaauga

SEQ ID NO: 34783 - RNA, 19 nt, Artificial Sequence
  Synthetic
agugccagccgaccaauga

SEQ ID NO: 34784 - RNA, 20 nt, Artificial Sequence
  Synthetic
aagugccagccgaccaauga

SEQ ID NO: 34785 - RNA, 21 nt, Artificial Sequence
  Synthetic
uaagugccagccgaccaauga

SEQ ID NO: 34786 - RNA, 22 nt, Artificial Sequence
  Synthetic
cuaagugccagccgaccaauga

SEQ ID NO: 34787 - RNA, 23 nt, Artificial Sequence
  Synthetic
ccuaagugccagccgaccaauga

SEQ ID NO: 34788 - RNA, 24 nt, Artificial Sequence
  Synthetic
uccuaagugccagccgaccaauga

SEQ ID NO: 34789 - RNA, 18 nt, Artificial Sequence
  Synthetic
uuuaaaggaagucaauga

SEQ ID NO: 34790 - RNA, 20 nt, Artificial Sequence
  Synthetic
aguuuaaaggaagucaauga

SEQ ID NO: 34791 - RNA, 21 nt, Artificial Sequence
  Synthetic
uaguuuaaaggaagucaauga

SEQ ID NO: 34792 - RNA, 22 nt, Artificial Sequence
  Synthetic
uuaguuuaaaggaagucaauga

SEQ ID NO: 34793 - RNA, 23 nt, Artificial Sequence
  Synthetic
uuuaguuuaaaggaagucaauga

SEQ ID NO: 34794 - RNA, 24 nt, Artificial Sequence
  Synthetic
uuuuaguuuaaaggaagucaauga

SEQ ID NO: 34795 - RNA, 18 nt, Artificial Sequence
  Synthetic
aucuuagagguucaauga

SEQ ID NO: 34796 - RNA, 19 nt, Artificial Sequence
  Synthetic
aaucuuagagguucaauga

SEQ ID NO: 34797 - RNA, 20 nt, Artificial Sequence
  Synthetic
aaaucuuagagguucaauga

SEQ ID NO: 34798 - RNA, 21 nt, Artificial Sequence
  Synthetic
caaaucuuagagguucaauga

SEQ ID NO: 34799 - RNA, 22 nt, Artificial Sequence
  Synthetic
acaaaucuuagagguucaauga

SEQ ID NO: 34800 - RNA, 23 nt, Artificial Sequence
  Synthetic
aacaaaucuuagagguucaauga

SEQ ID NO: 34801 - RNA, 24 nt, Artificial Sequence
  Synthetic
uaacaaaucuuagagguucaauga

SEQ ID NO: 34802 - RNA, 21 nt, Artificial Sequence
  Synthetic
auucauuuuucaaaagaauga

SEQ ID NO: 34803 - RNA, 22 nt, Artificial Sequence
  Synthetic
uauucauuuuucaaaagaauga

SEQ ID NO: 34804 - RNA, 23 nt, Artificial Sequence
  Synthetic
uuauucauuuuucaaaagaauga

SEQ ID NO: 34805 - RNA, 24 nt, Artificial Sequence
  Synthetic
cuuauucauuuuucaaaagaauga

SEQ ID NO: 34806 - RNA, 18 nt, Artificial Sequence
  Synthetic
aaugccuuuacagaauga

SEQ ID NO: 34807 - RNA, 19 nt, Artificial Sequence
  Synthetic
aaaugccuuuacagaauga

SEQ ID NO: 34808 - RNA, 20 nt, Artificial Sequence
  Synthetic
caaaugccuuuacagaauga

SEQ ID NO: 34809 - RNA, 21 nt, Artificial Sequence
  Synthetic
ucaaaugccuuuacagaauga

SEQ ID NO: 34810 - RNA, 22 nt, Artificial Sequence
  Synthetic
uucaaaugccuuuacagaauga

SEQ ID NO: 34811 - RNA, 23 nt, Artificial Sequence
  Synthetic
auucaaaugccuuuacagaauga

SEQ ID NO: 34812 - RNA, 24 nt, Artificial Sequence
  Synthetic
aauucaaaugccuuuacagaauga

SEQ ID NO: 34813 - RNA, 18 nt, Artificial Sequence
  Synthetic
uuguuuccucuagaauga

SEQ ID NO: 34814 - RNA, 19 nt, Artificial Sequence
  Synthetic
uuuguuuccucuagaauga

SEQ ID NO: 34815 - RNA, 20 nt, Artificial Sequence
  Synthetic
uuuuguuuccucuagaauga

SEQ ID NO: 34816 - RNA, 22 nt, Artificial Sequence
  Synthetic
uguuuuguuuccucuagaauga

SEQ ID NO: 34817 - RNA, 24 nt, Artificial Sequence
  Synthetic
uguguuuuguuuccucuagaauga

SEQ ID NO: 34818 - RNA, 19 nt, Artificial Sequence
  Synthetic
aggauagaacccggaauga

SEQ ID NO: 34819 - RNA, 20 nt, Artificial Sequence
  Synthetic
uaggauagaacccggaauga

SEQ ID NO: 34820 - RNA, 21 nt, Artificial Sequence
  Synthetic
auaggauagaacccggaauga

SEQ ID NO: 34821 - RNA, 18 nt, Artificial Sequence
  Synthetic
ucaaaguagugggaauga

SEQ ID NO: 34822 - RNA, 19 nt, Artificial Sequence
  Synthetic
cucaaaguagugggaauga

SEQ ID NO: 34823 - RNA, 20 nt, Artificial Sequence
  Synthetic
ucucaaaguagugggaauga

SEQ ID NO: 34824 - RNA, 21 nt, Artificial Sequence
  Synthetic
aucucaaaguagugggaauga

SEQ ID NO: 34825 - RNA, 23 nt, Artificial Sequence
  Synthetic
agaucucaaaguagugggaauga

SEQ ID NO: 34826 - RNA, 24 nt, Artificial Sequence
  Synthetic
aagaucucaaaguagugggaauga

SEQ ID NO: 34827 - RNA, 18 nt, Artificial Sequence
  Synthetic
ucuagucaacuggaauga

SEQ ID NO: 34828 - RNA, 21 nt, Artificial Sequence
  Synthetic
uggucuagucaacuggaauga

SEQ ID NO: 34829 - RNA, 22 nt, Artificial Sequence
  Synthetic
auggucuagucaacuggaauga

SEQ ID NO: 34830 - RNA, 23 nt, Artificial Sequence
  Synthetic
cauggucuagucaacuggaauga

SEQ ID NO: 34831 - RNA, 24 nt, Artificial Sequence
  Synthetic
ucauggucuagucaacuggaauga

SEQ ID NO: 34832 - RNA, 21 nt, Artificial Sequence
  Synthetic
cguggcuuggaaaaugaauga

SEQ ID NO: 34833 - RNA, 22 nt, Artificial Sequence
  Synthetic
acguggcuuggaaaaugaauga

SEQ ID NO: 34834 - RNA, 23 nt, Artificial Sequence
  Synthetic
uacguggcuuggaaaaugaauga

SEQ ID NO: 34835 - RNA, 24 nt, Artificial Sequence
  Synthetic
auacguggcuuggaaaaugaauga

SEQ ID NO: 34836 - RNA, 19 nt, Artificial Sequence
  Synthetic
aguggauugagaugaauga

SEQ ID NO: 34837 - RNA, 20 nt, Artificial Sequence
  Synthetic
aaguggauugagaugaauga

SEQ ID NO: 34838 - RNA, 21 nt, Artificial Sequence
  Synthetic
caaguggauugagaugaauga

SEQ ID NO: 34839 - RNA, 23 nt, Artificial Sequence
  Synthetic
ugcaaguggauugagaugaauga

SEQ ID NO: 34840 - RNA, 24 nt, Artificial Sequence
  Synthetic
augcaaguggauugagaugaauga

SEQ ID NO: 34841 - RNA, 18 nt, Artificial Sequence
  Synthetic
aagcaaccauaugaauga

SEQ ID NO: 34842 - RNA, 19 nt, Artificial Sequence
  Synthetic
aaagcaaccauaugaauga

SEQ ID NO: 34843 - RNA, 20 nt, Artificial Sequence
  Synthetic
aaaagcaaccauaugaauga

SEQ ID NO: 34844 - RNA, 21 nt, Artificial Sequence
  Synthetic
uaaaagcaaccauaugaauga

SEQ ID NO: 34845 - RNA, 24 nt, Artificial Sequence
  Synthetic
ugguaaaagcaaccauaugaauga

SEQ ID NO: 34846 - RNA, 18 nt, Artificial Sequence
  Synthetic
cauucacauacugaauga

SEQ ID NO: 34847 - RNA, 20 nt, Artificial Sequence
  Synthetic
ugcauucacauacugaauga

SEQ ID NO: 34848 - RNA, 21 nt, Artificial Sequence
  Synthetic
augcauucacauacugaauga

SEQ ID NO: 34849 - RNA, 22 nt, Artificial Sequence
  Synthetic
caugcauucacauacugaauga

SEQ ID NO: 34850 - RNA, 23 nt, Artificial Sequence
  Synthetic
ucaugcauucacauacugaauga

SEQ ID NO: 34851 - RNA, 24 nt, Artificial Sequence
  Synthetic
cucaugcauucacauacugaauga

SEQ ID NO: 34852 - RNA, 18 nt, Artificial Sequence
  Synthetic
aagacccugaaauaauga

SEQ ID NO: 34853 - RNA, 19 nt, Artificial Sequence
  Synthetic
aaagacccugaaauaauga

SEQ ID NO: 34854 - RNA, 20 nt, Artificial Sequence
  Synthetic
aaaagacccugaaauaauga

SEQ ID NO: 34855 - RNA, 22 nt, Artificial Sequence
  Synthetic
agaaaagacccugaaauaauga

SEQ ID NO: 34856 - RNA, 24 nt, Artificial Sequence
  Synthetic
ugagaaaagacccugaaauaauga

SEQ ID NO: 34857 - RNA, 18 nt, Artificial Sequence
  Synthetic
ucauagaugagauaauga

SEQ ID NO: 34858 - RNA, 19 nt, Artificial Sequence
  Synthetic
uucauagaugagauaauga

SEQ ID NO: 34859 - RNA, 20 nt, Artificial Sequence
  Synthetic
uuucauagaugagauaauga

SEQ ID NO: 34860 - RNA, 21 nt, Artificial Sequence
  Synthetic
cuuucauagaugagauaauga

SEQ ID NO: 34861 - RNA, 22 nt, Artificial Sequence
  Synthetic
acuuucauagaugagauaauga

SEQ ID NO: 34862 - RNA, 23 nt, Artificial Sequence
  Synthetic
uacuuucauagaugagauaauga

SEQ ID NO: 34863 - RNA, 24 nt, Artificial Sequence
  Synthetic
uuacuuucauagaugagauaauga

SEQ ID NO: 34864 - RNA, 19 nt, Artificial Sequence
  Synthetic
agucaaguugagauaauga

SEQ ID NO: 34865 - RNA, 20 nt, Artificial Sequence
  Synthetic
uagucaaguugagauaauga

SEQ ID NO: 34866 - RNA, 22 nt, Artificial Sequence
  Synthetic
uguagucaaguugagauaauga

SEQ ID NO: 34867 - RNA, 23 nt, Artificial Sequence
  Synthetic
auguagucaaguugagauaauga

SEQ ID NO: 34868 - RNA, 24 nt, Artificial Sequence
  Synthetic
aauguagucaaguugagauaauga

SEQ ID NO: 34869 - RNA, 18 nt, Artificial Sequence
  Synthetic
caaaugcuucuauaauga

SEQ ID NO: 34870 - RNA, 19 nt, Artificial Sequence
  Synthetic
acaaaugcuucuauaauga

SEQ ID NO: 34871 - RNA, 20 nt, Artificial Sequence
  Synthetic
aacaaaugcuucuauaauga

SEQ ID NO: 34872 - RNA, 21 nt, Artificial Sequence
  Synthetic
aaacaaaugcuucuauaauga

SEQ ID NO: 34873 - RNA, 23 nt, Artificial Sequence
  Synthetic
agaaacaaaugcuucuauaauga

SEQ ID NO: 34874 - RNA, 24 nt, Artificial Sequence
  Synthetic
aagaaacaaaugcuucuauaauga

SEQ ID NO: 34875 - RNA, 21 nt, Artificial Sequence
  Synthetic
uuagugaaaccaaaguaauga

SEQ ID NO: 34876 - RNA, 22 nt, Artificial Sequence
  Synthetic
uuuagugaaaccaaaguaauga

SEQ ID NO: 34877 - RNA, 24 nt, Artificial Sequence
  Synthetic
uguuuagugaaaccaaaguaauga

SEQ ID NO: 34878 - RNA, 18 nt, Artificial Sequence
  Synthetic
uuauuccauugaacauga

SEQ ID NO: 34879 - RNA, 19 nt, Artificial Sequence
  Synthetic
auuauuccauugaacauga

SEQ ID NO: 34880 - RNA, 20 nt, Artificial Sequence
  Synthetic
cauuauuccauugaacauga

SEQ ID NO: 34881 - RNA, 21 nt, Artificial Sequence
  Synthetic
acauuauuccauugaacauga

SEQ ID NO: 34882 - RNA, 22 nt, Artificial Sequence
  Synthetic
uacauuauuccauugaacauga

SEQ ID NO: 34883 - RNA, 23 nt, Artificial Sequence
  Synthetic
auacauuauuccauugaacauga

SEQ ID NO: 34884 - RNA, 24 nt, Artificial Sequence
  Synthetic
uauacauuauuccauugaacauga

SEQ ID NO: 34885 - RNA, 18 nt, Artificial Sequence
  Synthetic
auagcuuuaauaacauga

SEQ ID NO: 34886 - RNA, 19 nt, Artificial Sequence
  Synthetic
uauagcuuuaauaacauga

SEQ ID NO: 34887 - RNA, 21 nt, Artificial Sequence
  Synthetic
uguauagcuuuaauaacauga

SEQ ID NO: 34888 - RNA, 22 nt, Artificial Sequence
  Synthetic
cuguauagcuuuaauaacauga

SEQ ID NO: 34889 - RNA, 24 nt, Artificial Sequence
  Synthetic
agcuguauagcuuuaauaacauga

SEQ ID NO: 34890 - RNA, 18 nt, Artificial Sequence
  Synthetic
uaaauuaauuuaacauga

SEQ ID NO: 34891 - RNA, 20 nt, Artificial Sequence
  Synthetic
uguaaauuaauuuaacauga

SEQ ID NO: 34892 - RNA, 21 nt, Artificial Sequence
  Synthetic
uuguaaauuaauuuaacauga

SEQ ID NO: 34893 - RNA, 22 nt, Artificial Sequence
  Synthetic
auuguaaauuaauuuaacauga

SEQ ID NO: 34894 - RNA, 23 nt, Artificial Sequence
  Synthetic
cauuguaaauuaauuuaacauga

SEQ ID NO: 34895 - RNA, 19 nt, Artificial Sequence
  Synthetic
agcaucuguaucuacauga

SEQ ID NO: 34896 - RNA, 21 nt, Artificial Sequence
  Synthetic
ugagcaucuguaucuacauga

SEQ ID NO: 34897 - RNA, 23 nt, Artificial Sequence
  Synthetic
ugugagcaucuguaucuacauga

SEQ ID NO: 34898 - RNA, 24 nt, Artificial Sequence
  Synthetic
uugugagcaucuguaucuacauga

SEQ ID NO: 34899 - RNA, 18 nt, Artificial Sequence
  Synthetic
cacacaauugguacauga

SEQ ID NO: 34900 - RNA, 19 nt, Artificial Sequence
  Synthetic
ucacacaauugguacauga

SEQ ID NO: 34901 - RNA, 20 nt, Artificial Sequence
  Synthetic
aucacacaauugguacauga

SEQ ID NO: 34902 - RNA, 21 nt, Artificial Sequence
  Synthetic
aaucacacaauugguacauga

SEQ ID NO: 34903 - RNA, 22 nt, Artificial Sequence
  Synthetic
aaaucacacaauugguacauga

SEQ ID NO: 34904 - RNA, 23 nt, Artificial Sequence
  Synthetic
aaaaucacacaauugguacauga

SEQ ID NO: 34905 - RNA, 24 nt, Artificial Sequence
  Synthetic
uaaaaucacacaauugguacauga

SEQ ID NO: 34906 - RNA, 21 nt, Artificial Sequence
  Synthetic
uagauaaauuuauuuacauga

SEQ ID NO: 34907 - RNA, 22 nt, Artificial Sequence
  Synthetic
uuagauaaauuuauuuacauga

SEQ ID NO: 34908 - RNA, 23 nt, Artificial Sequence
  Synthetic
cuuagauaaauuuauuuacauga

SEQ ID NO: 34909 - RNA, 24 nt, Artificial Sequence
  Synthetic
acuuagauaaauuuauuuacauga

SEQ ID NO: 34910 - RNA, 18 nt, Artificial Sequence
  Synthetic
aggcuaccaugcccauga

SEQ ID NO: 34911 - RNA, 19 nt, Artificial Sequence
  Synthetic
caggcuaccaugcccauga

SEQ ID NO: 34912 - RNA, 20 nt, Artificial Sequence
  Synthetic
ucaggcuaccaugcccauga

SEQ ID NO: 34913 - RNA, 21 nt, Artificial Sequence
  Synthetic
uucaggcuaccaugcccauga

SEQ ID NO: 34914 - RNA, 22 nt, Artificial Sequence
  Synthetic
uuucaggcuaccaugcccauga

SEQ ID NO: 34915 - RNA, 23 nt, Artificial Sequence
  Synthetic
auuucaggcuaccaugcccauga

SEQ ID NO: 34916 - RNA, 24 nt, Artificial Sequence
  Synthetic
uauuucaggcuaccaugcccauga

SEQ ID NO: 34917 - RNA, 18 nt, Artificial Sequence
  Synthetic
aacugacauguagcauga

SEQ ID NO: 34918 - RNA, 19 nt, Artificial Sequence
  Synthetic
uaacugacauguagcauga

SEQ ID NO: 34919 - RNA, 20 nt, Artificial Sequence
  Synthetic
uuaacugacauguagcauga

SEQ ID NO: 34920 - RNA, 21 nt, Artificial Sequence
  Synthetic
uuuaacugacauguagcauga

SEQ ID NO: 34921 - RNA, 22 nt, Artificial Sequence
  Synthetic
cuuuaacugacauguagcauga

SEQ ID NO: 34922 - RNA, 23 nt, Artificial Sequence
  Synthetic
ccuuuaacugacauguagcauga

SEQ ID NO: 34923 - RNA, 24 nt, Artificial Sequence
  Synthetic
uccuuuaacugacauguagcauga

SEQ ID NO: 34924 - RNA, 18 nt, Artificial Sequence
  Synthetic
agaaagugauuagcauga

SEQ ID NO: 34925 - RNA, 20 nt, Artificial Sequence
  Synthetic
ugagaaagugauuagcauga

SEQ ID NO: 34926 - RNA, 21 nt, Artificial Sequence
  Synthetic
cugagaaagugauuagcauga

SEQ ID NO: 34927 - RNA, 22 nt, Artificial Sequence
  Synthetic
ucugagaaagugauuagcauga

SEQ ID NO: 34928 - RNA, 23 nt, Artificial Sequence
  Synthetic
uucugagaaagugauuagcauga

SEQ ID NO: 34929 - RNA, 24 nt, Artificial Sequence
  Synthetic
auucugagaaagugauuagcauga

SEQ ID NO: 34930 - RNA, 18 nt, Artificial Sequence
  Synthetic
uugaaaauagaugcauga

SEQ ID NO: 34931 - RNA, 19 nt, Artificial Sequence
  Synthetic
uuugaaaauagaugcauga

SEQ ID NO: 34932 - RNA, 20 nt, Artificial Sequence
  Synthetic
uuuugaaaauagaugcauga

SEQ ID NO: 34933 - RNA, 21 nt, Artificial Sequence
  Synthetic
uuuuugaaaauagaugcauga

SEQ ID NO: 34934 - RNA, 22 nt, Artificial Sequence
  Synthetic
auuuuugaaaauagaugcauga

SEQ ID NO: 34935 - RNA, 23 nt, Artificial Sequence
  Synthetic
cauuuuugaaaauagaugcauga

SEQ ID NO: 34936 - RNA, 24 nt, Artificial Sequence
  Synthetic
ucauuuuugaaaauagaugcauga

SEQ ID NO: 34937 - RNA, 21 nt, Artificial Sequence
  Synthetic
cugaauauuuuuccaucauga

SEQ ID NO: 34938 - RNA, 22 nt, Artificial Sequence
  Synthetic
ccugaauauuuuuccaucauga

SEQ ID NO: 34939 - RNA, 23 nt, Artificial Sequence
  Synthetic
cccugaauauuuuuccaucauga

SEQ ID NO: 34940 - RNA, 24 nt, Artificial Sequence
  Synthetic
acccugaauauuuuuccaucauga

SEQ ID NO: 34941 - RNA, 18 nt, Artificial Sequence
  Synthetic
acaauggaaagcucauga

SEQ ID NO: 34942 - RNA, 19 nt, Artificial Sequence
  Synthetic
cacaauggaaagcucauga

SEQ ID NO: 34943 - RNA, 20 nt, Artificial Sequence
  Synthetic
ucacaauggaaagcucauga

SEQ ID NO: 34944 - RNA, 21 nt, Artificial Sequence
  Synthetic
aucacaauggaaagcucauga

SEQ ID NO: 34945 - RNA, 22 nt, Artificial Sequence
  Synthetic
uaucacaauggaaagcucauga

SEQ ID NO: 34946 - RNA, 23 nt, Artificial Sequence
  Synthetic
auaucacaauggaaagcucauga

SEQ ID NO: 34947 - RNA, 24 nt, Artificial Sequence
  Synthetic
cauaucacaauggaaagcucauga

SEQ ID NO: 34948 - RNA, 18 nt, Artificial Sequence
  Synthetic
aauggccugugcucauga

SEQ ID NO: 34949 - RNA, 19 nt, Artificial Sequence
  Synthetic
aaauggccugugcucauga

SEQ ID NO: 34950 - RNA, 21 nt, Artificial Sequence
  Synthetic
ugaaauggccugugcucauga

SEQ ID NO: 34951 - RNA, 22 nt, Artificial Sequence
  Synthetic
uugaaauggccugugcucauga

SEQ ID NO: 34952 - RNA, 23 nt, Artificial Sequence
  Synthetic
uuugaaauggccugugcucauga

SEQ ID NO: 34953 - RNA, 19 nt, Artificial Sequence
  Synthetic
ugccuguugacucucauga

SEQ ID NO: 34954 - RNA, 20 nt, Artificial Sequence
  Synthetic
uugccuguugacucucauga

SEQ ID NO: 34955 - RNA, 18 nt, Artificial Sequence
  Synthetic
cgaaaaaaguucucauga

SEQ ID NO: 34956 - RNA, 19 nt, Artificial Sequence
  Synthetic
ccgaaaaaaguucucauga

SEQ ID NO: 34957 - RNA, 20 nt, Artificial Sequence
  Synthetic
uccgaaaaaaguucucauga

SEQ ID NO: 34958 - RNA, 21 nt, Artificial Sequence
  Synthetic
uuccgaaaaaaguucucauga

SEQ ID NO: 34959 - RNA, 22 nt, Artificial Sequence
  Synthetic
uuuccgaaaaaaguucucauga

SEQ ID NO: 34960 - RNA, 23 nt, Artificial Sequence
  Synthetic
cuuuccgaaaaaaguucucauga

SEQ ID NO: 34961 - RNA, 24 nt, Artificial Sequence
  Synthetic
acuuuccgaaaaaaguucucauga

SEQ ID NO: 34962 - RNA, 19 nt, Artificial Sequence
  Synthetic
uguccugaaguucucauga

SEQ ID NO: 34963 - RNA, 20 nt, Artificial Sequence
  Synthetic
uuguccugaaguucucauga

SEQ ID NO: 34964 - RNA, 21 nt, Artificial Sequence
  Synthetic
uuuguccugaaguucucauga

SEQ ID NO: 34965 - RNA, 22 nt, Artificial Sequence
  Synthetic
auuuguccugaaguucucauga

SEQ ID NO: 34966 - RNA, 23 nt, Artificial Sequence
  Synthetic
uauuuguccugaaguucucauga

SEQ ID NO: 34967 - RNA, 24 nt, Artificial Sequence
  Synthetic
cuauuuguccugaaguucucauga

SEQ ID NO: 34968 - RNA, 21 nt, Artificial Sequence
  Synthetic
uuuuuagaguuuuugucauga

SEQ ID NO: 34969 - RNA, 22 nt, Artificial Sequence
  Synthetic
auuuuuagaguuuuugucauga

SEQ ID NO: 34970 - RNA, 23 nt, Artificial Sequence
  Synthetic
cauuuuuagaguuuuugucauga

SEQ ID NO: 34971 - RNA, 24 nt, Artificial Sequence
  Synthetic
acauuuuuagaguuuuugucauga

SEQ ID NO: 34972 - RNA, 18 nt, Artificial Sequence
  Synthetic
ucacuuugggauucauga

SEQ ID NO: 34973 - RNA, 20 nt, Artificial Sequence
  Synthetic
agucacuuugggauucauga

SEQ ID NO: 34974 - RNA, 21 nt, Artificial Sequence
  Synthetic
aagucacuuugggauucauga

SEQ ID NO: 34975 - RNA, 22 nt, Artificial Sequence
  Synthetic
uaagucacuuugggauucauga

SEQ ID NO: 34976 - RNA, 23 nt, Artificial Sequence
  Synthetic
auaagucacuuugggauucauga

SEQ ID NO: 34977 - RNA, 24 nt, Artificial Sequence
  Synthetic
aauaagucacuuugggauucauga

SEQ ID NO: 34978 - RNA, 19 nt, Artificial Sequence
  Synthetic
ugaagaaaguccuucauga

SEQ ID NO: 34979 - RNA, 20 nt, Artificial Sequence
  Synthetic
augaagaaaguccuucauga

SEQ ID NO: 34980 - RNA, 24 nt, Artificial Sequence
  Synthetic
ugggaugaagaaaguccuucauga

SEQ ID NO: 34981 - RNA, 18 nt, Artificial Sequence
  Synthetic
ugcagcacauuuucauga

SEQ ID NO: 34982 - RNA, 19 nt, Artificial Sequence
  Synthetic
cugcagcacauuuucauga

SEQ ID NO: 34983 - RNA, 20 nt, Artificial Sequence
  Synthetic
ccugcagcacauuuucauga

SEQ ID NO: 34984 - RNA, 22 nt, Artificial Sequence
  Synthetic
agccugcagcacauuuucauga

SEQ ID NO: 34985 - RNA, 23 nt, Artificial Sequence
  Synthetic
uagccugcagcacauuuucauga

SEQ ID NO: 34986 - RNA, 19 nt, Artificial Sequence
  Synthetic
ugaaguaggaacaagauga

SEQ ID NO: 34987 - RNA, 20 nt, Artificial Sequence
  Synthetic
cugaaguaggaacaagauga

SEQ ID NO: 34988 - RNA, 21 nt, Artificial Sequence
  Synthetic
acugaaguaggaacaagauga

SEQ ID NO: 34989 - RNA, 22 nt, Artificial Sequence
  Synthetic
uacugaaguaggaacaagauga

SEQ ID NO: 34990 - RNA, 23 nt, Artificial Sequence
  Synthetic
auacugaaguaggaacaagauga

SEQ ID NO: 34991 - RNA, 19 nt, Artificial Sequence
  Synthetic
ugcaaguggauugagauga

SEQ ID NO: 34992 - RNA, 20 nt, Artificial Sequence
  Synthetic
augcaaguggauugagauga

SEQ ID NO: 34993 - RNA, 23 nt, Artificial Sequence
  Synthetic
uggaugcaaguggauugagauga

SEQ ID NO: 34994 - RNA, 24 nt, Artificial Sequence
  Synthetic
auggaugcaaguggauugagauga

SEQ ID NO: 34995 - RNA, 18 nt, Artificial Sequence
  Synthetic
cuguuuccauguagauga

SEQ ID NO: 34996 - RNA, 20 nt, Artificial Sequence
  Synthetic
cgcuguuuccauguagauga

SEQ ID NO: 34997 - RNA, 21 nt, Artificial Sequence
  Synthetic
ccgcuguuuccauguagauga

SEQ ID NO: 34998 - RNA, 22 nt, Artificial Sequence
  Synthetic
uccgcuguuuccauguagauga

SEQ ID NO: 34999 - RNA, 23 nt, Artificial Sequence
  Synthetic
uuccgcuguuuccauguagauga

SEQ ID NO: 35000 - RNA, 24 nt, Artificial Sequence
  Synthetic
cuuccgcuguuuccauguagauga

SEQ ID NO: 35001 - RNA, 19 nt, Artificial Sequence
  Synthetic
aggaucucucugacgauga

SEQ ID NO: 35002 - RNA, 20 nt, Artificial Sequence
  Synthetic
caggaucucucugacgauga

SEQ ID NO: 35003 - RNA, 22 nt, Artificial Sequence
  Synthetic
agcaggaucucucugacgauga

SEQ ID NO: 35004 - RNA, 23 nt, Artificial Sequence
  Synthetic
aagcaggaucucucugacgauga

SEQ ID NO: 35005 - RNA, 24 nt, Artificial Sequence
  Synthetic
aaagcaggaucucucugacgauga

SEQ ID NO: 35006 - RNA, 18 nt, Artificial Sequence
  Synthetic
cugaaguggcaaggauga

SEQ ID NO: 35007 - RNA, 20 nt, Artificial Sequence
  Synthetic
ugcugaaguggcaaggauga

SEQ ID NO: 35008 - RNA, 24 nt, Artificial Sequence
  Synthetic
ugggugcugaaguggcaaggauga

SEQ ID NO: 35009 - RNA, 18 nt, Artificial Sequence
  Synthetic
cuuuuugugucaggauga

SEQ ID NO: 35010 - RNA, 19 nt, Artificial Sequence
  Synthetic
acuuuuugugucaggauga

SEQ ID NO: 35011 - RNA, 22 nt, Artificial Sequence
  Synthetic
uggacuuuuugugucaggauga

SEQ ID NO: 35012 - RNA, 23 nt, Artificial Sequence
  Synthetic
auggacuuuuugugucaggauga

SEQ ID NO: 35013 - RNA, 24 nt, Artificial Sequence
  Synthetic
uauggacuuuuugugucaggauga

SEQ ID NO: 35014 - RNA, 18 nt, Artificial Sequence
  Synthetic
cuaagacauugaggauga

SEQ ID NO: 35015 - RNA, 21 nt, Artificial Sequence
  Synthetic
uggcuaagacauugaggauga

SEQ ID NO: 35016 - RNA, 22 nt, Artificial Sequence
  Synthetic
auggcuaagacauugaggauga

SEQ ID NO: 35017 - RNA, 23 nt, Artificial Sequence
  Synthetic
uauggcuaagacauugaggauga

SEQ ID NO: 35018 - RNA, 24 nt, Artificial Sequence
  Synthetic
auauggcuaagacauugaggauga

SEQ ID NO: 35019 - RNA, 18 nt, Artificial Sequence
  Synthetic
cauaagaucucuggauga

SEQ ID NO: 35020 - RNA, 19 nt, Artificial Sequence
  Synthetic
acauaagaucucuggauga

SEQ ID NO: 35021 - RNA, 20 nt, Artificial Sequence
  Synthetic
aacauaagaucucuggauga

SEQ ID NO: 35022 - RNA, 19 nt, Artificial Sequence
  Synthetic
agcuuaauuggaaugauga

SEQ ID NO: 35023 - RNA, 20 nt, Artificial Sequence
  Synthetic
cagcuuaauuggaaugauga

SEQ ID NO: 35024 - RNA, 21 nt, Artificial Sequence
  Synthetic
acagcuuaauuggaaugauga

SEQ ID NO: 35025 - RNA, 22 nt, Artificial Sequence
  Synthetic
uacagcuuaauuggaaugauga

SEQ ID NO: 35026 - RNA, 23 nt, Artificial Sequence
  Synthetic
uuacagcuuaauuggaaugauga

SEQ ID NO: 35027 - RNA, 24 nt, Artificial Sequence
  Synthetic
uuuacagcuuaauuggaaugauga

SEQ ID NO: 35028 - RNA, 18 nt, Artificial Sequence
  Synthetic
uagaucauuaacugauga

SEQ ID NO: 35029 - RNA, 19 nt, Artificial Sequence
  Synthetic
uuagaucauuaacugauga

SEQ ID NO: 35030 - RNA, 20 nt, Artificial Sequence
  Synthetic
auuagaucauuaacugauga

SEQ ID NO: 35031 - RNA, 21 nt, Artificial Sequence
  Synthetic
uauuagaucauuaacugauga

SEQ ID NO: 35032 - RNA, 22 nt, Artificial Sequence
  Synthetic
uuauuagaucauuaacugauga

SEQ ID NO: 35033 - RNA, 23 nt, Artificial Sequence
  Synthetic
uuuauuagaucauuaacugauga

SEQ ID NO: 35034 - RNA, 24 nt, Artificial Sequence
  Synthetic
uuuuauuagaucauuaacugauga

SEQ ID NO: 35035 - RNA, 19 nt, Artificial Sequence
  Synthetic
ugcaacuaugaagugauga

SEQ ID NO: 35036 - RNA, 21 nt, Artificial Sequence
  Synthetic
agugcaacuaugaagugauga

SEQ ID NO: 35037 - RNA, 22 nt, Artificial Sequence
  Synthetic
aagugcaacuaugaagugauga

SEQ ID NO: 35038 - RNA, 23 nt, Artificial Sequence
  Synthetic
aaagugcaacuaugaagugauga

SEQ ID NO: 35039 - RNA, 24 nt, Artificial Sequence
  Synthetic
aaaagugcaacuaugaagugauga

SEQ ID NO: 35040 - RNA, 18 nt, Artificial Sequence
  Synthetic
uaucuuaugaagugauga

SEQ ID NO: 35041 - RNA, 19 nt, Artificial Sequence
  Synthetic
auaucuuaugaagugauga

SEQ ID NO: 35042 - RNA, 20 nt, Artificial Sequence
  Synthetic
aauaucuuaugaagugauga

SEQ ID NO: 35043 - RNA, 21 nt, Artificial Sequence
  Synthetic
aaauaucuuaugaagugauga

SEQ ID NO: 35044 - RNA, 22 nt, Artificial Sequence
  Synthetic
aaaauaucuuaugaagugauga

SEQ ID NO: 35045 - RNA, 19 nt, Artificial Sequence
  Synthetic
ugcaaauuuacagugauga

SEQ ID NO: 35046 - RNA, 21 nt, Artificial Sequence
  Synthetic
ugugcaaauuuacagugauga

SEQ ID NO: 35047 - RNA, 22 nt, Artificial Sequence
  Synthetic
augugcaaauuuacagugauga

SEQ ID NO: 35048 - RNA, 24 nt, Artificial Sequence
  Synthetic
ugaugugcaaauuuacagugauga

SEQ ID NO: 35049 - RNA, 21 nt, Artificial Sequence
  Synthetic
cgucuaagauuaaggugauga

SEQ ID NO: 35050 - RNA, 22 nt, Artificial Sequence
  Synthetic
acgucuaagauuaaggugauga

SEQ ID NO: 35051 - RNA, 23 nt, Artificial Sequence
  Synthetic
aacgucuaagauuaaggugauga

SEQ ID NO: 35052 - RNA, 18 nt, Artificial Sequence
  Synthetic
ugcaugcacaggugauga

SEQ ID NO: 35053 - RNA, 20 nt, Artificial Sequence
  Synthetic
cgugcaugcacaggugauga

SEQ ID NO: 35054 - RNA, 21 nt, Artificial Sequence
  Synthetic
acgugcaugcacaggugauga

SEQ ID NO: 35055 - RNA, 22 nt, Artificial Sequence
  Synthetic
cacgugcaugcacaggugauga

SEQ ID NO: 35056 - RNA, 23 nt, Artificial Sequence
  Synthetic
acacgugcaugcacaggugauga

SEQ ID NO: 35057 - RNA, 24 nt, Artificial Sequence
  Synthetic
cacacgugcaugcacaggugauga

SEQ ID NO: 35058 - RNA, 18 nt, Artificial Sequence
  Synthetic
uguucucuugcuugauga

SEQ ID NO: 35059 - RNA, 19 nt, Artificial Sequence
  Synthetic
cuguucucuugcuugauga

SEQ ID NO: 35060 - RNA, 20 nt, Artificial Sequence
  Synthetic
ucuguucucuugcuugauga

SEQ ID NO: 35061 - RNA, 21 nt, Artificial Sequence
  Synthetic
aucuguucucuugcuugauga

SEQ ID NO: 35062 - RNA, 22 nt, Artificial Sequence
  Synthetic
caucuguucucuugcuugauga

SEQ ID NO: 35063 - RNA, 24 nt, Artificial Sequence
  Synthetic
ugcaucuguucucuugcuugauga

SEQ ID NO: 35064 - RNA, 18 nt, Artificial Sequence
  Synthetic
ugaaaugaguuuugauga

SEQ ID NO: 35065 - RNA, 19 nt, Artificial Sequence
  Synthetic
augaaaugaguuuugauga

SEQ ID NO: 35066 - RNA, 20 nt, Artificial Sequence
  Synthetic
uaugaaaugaguuuugauga

SEQ ID NO: 35067 - RNA, 21 nt, Artificial Sequence
  Synthetic
uuaugaaaugaguuuugauga

SEQ ID NO: 35068 - RNA, 22 nt, Artificial Sequence
  Synthetic
auuaugaaaugaguuuugauga

SEQ ID NO: 35069 - RNA, 23 nt, Artificial Sequence
  Synthetic
uauuaugaaaugaguuuugauga

SEQ ID NO: 35070 - RNA, 18 nt, Artificial Sequence
  Synthetic
cuauguacaaaaauauga

SEQ ID NO: 35071 - RNA, 20 nt, Artificial Sequence
  Synthetic
agcuauguacaaaaauauga

SEQ ID NO: 35072 - RNA, 21 nt, Artificial Sequence
  Synthetic
aagcuauguacaaaaauauga

SEQ ID NO: 35073 - RNA, 22 nt, Artificial Sequence
  Synthetic
aaagcuauguacaaaaauauga

SEQ ID NO: 35074 - RNA, 23 nt, Artificial Sequence
  Synthetic
caaagcuauguacaaaaauauga

SEQ ID NO: 35075 - RNA, 24 nt, Artificial Sequence
  Synthetic
ucaaagcuauguacaaaaauauga

SEQ ID NO: 35076 - RNA, 20 nt, Artificial Sequence
  Synthetic
ugguaaaagcaaccauauga

SEQ ID NO: 35077 - RNA, 21 nt, Artificial Sequence
  Synthetic
augguaaaagcaaccauauga

SEQ ID NO: 35078 - RNA, 22 nt, Artificial Sequence
  Synthetic
aaugguaaaagcaaccauauga

SEQ ID NO: 35079 - RNA, 23 nt, Artificial Sequence
  Synthetic
caaugguaaaagcaaccauauga

SEQ ID NO: 35080 - RNA, 24 nt, Artificial Sequence
  Synthetic
ccaaugguaaaagcaaccauauga

SEQ ID NO: 35081 - RNA, 21 nt, Artificial Sequence
  Synthetic
cuguuuuuguguauuauauga

SEQ ID NO: 35082 - RNA, 22 nt, Artificial Sequence
  Synthetic
ccuguuuuuguguauuauauga

SEQ ID NO: 35083 - RNA, 23 nt, Artificial Sequence
  Synthetic
uccuguuuuuguguauuauauga

SEQ ID NO: 35084 - RNA, 24 nt, Artificial Sequence
  Synthetic
uuccuguuuuuguguauuauauga

SEQ ID NO: 35085 - RNA, 18 nt, Artificial Sequence
  Synthetic
caaaaacuacaacuauga

SEQ ID NO: 35086 - RNA, 19 nt, Artificial Sequence
  Synthetic
ucaaaaacuacaacuauga

SEQ ID NO: 35087 - RNA, 20 nt, Artificial Sequence
  Synthetic
cucaaaaacuacaacuauga

SEQ ID NO: 35088 - RNA, 21 nt, Artificial Sequence
  Synthetic
ucucaaaaacuacaacuauga

SEQ ID NO: 35089 - RNA, 24 nt, Artificial Sequence
  Synthetic
uggucucaaaaacuacaacuauga

SEQ ID NO: 35090 - RNA, 20 nt, Artificial Sequence
  Synthetic
aggaucauugcucacuauga

SEQ ID NO: 35091 - RNA, 21 nt, Artificial Sequence
  Synthetic
uaggaucauugcucacuauga

SEQ ID NO: 35092 - RNA, 22 nt, Artificial Sequence
  Synthetic
auaggaucauugcucacuauga

SEQ ID NO: 35093 - RNA, 23 nt, Artificial Sequence
  Synthetic
aauaggaucauugcucacuauga

SEQ ID NO: 35094 - RNA, 18 nt, Artificial Sequence
  Synthetic
uugagaaucagacuauga

SEQ ID NO: 35095 - RNA, 19 nt, Artificial Sequence
  Synthetic
uuugagaaucagacuauga

SEQ ID NO: 35096 - RNA, 20 nt, Artificial Sequence
  Synthetic
uuuugagaaucagacuauga

SEQ ID NO: 35097 - RNA, 21 nt, Artificial Sequence
  Synthetic
cuuuugagaaucagacuauga

SEQ ID NO: 35098 - RNA, 23 nt, Artificial Sequence
  Synthetic
ugcuuuugagaaucagacuauga

SEQ ID NO: 35099 - RNA, 24 nt, Artificial Sequence
  Synthetic
uugcuuuugagaaucagacuauga

SEQ ID NO: 35100 - RNA, 18 nt, Artificial Sequence
  Synthetic
uuugccaauaggcuauga

SEQ ID NO: 35101 - RNA, 19 nt, Artificial Sequence
  Synthetic
cuuugccaauaggcuauga

SEQ ID NO: 35102 - RNA, 20 nt, Artificial Sequence
  Synthetic
ucuuugccaauaggcuauga

SEQ ID NO: 35103 - RNA, 18 nt, Artificial Sequence
  Synthetic
uuaaaacaugggcuauga

SEQ ID NO: 35104 - RNA, 19 nt, Artificial Sequence
  Synthetic
uuuaaaacaugggcuauga

SEQ ID NO: 35105 - RNA, 20 nt, Artificial Sequence
  Synthetic
uuuuaaaacaugggcuauga

SEQ ID NO: 35106 - RNA, 22 nt, Artificial Sequence
  Synthetic
aguuuuaaaacaugggcuauga

SEQ ID NO: 35107 - RNA, 23 nt, Artificial Sequence
  Synthetic
aaguuuuaaaacaugggcuauga

SEQ ID NO: 35108 - RNA, 24 nt, Artificial Sequence
  Synthetic
uaaguuuuaaaacaugggcuauga

SEQ ID NO: 35109 - RNA, 21 nt, Artificial Sequence
  Synthetic
ugggauuaugacuuucuauga

SEQ ID NO: 35110 - RNA, 22 nt, Artificial Sequence
  Synthetic
augggauuaugacuuucuauga

SEQ ID NO: 35111 - RNA, 23 nt, Artificial Sequence
  Synthetic
aaugggauuaugacuuucuauga

SEQ ID NO: 35112 - RNA, 24 nt, Artificial Sequence
  Synthetic
uaaugggauuaugacuuucuauga

SEQ ID NO: 35113 - RNA, 18 nt, Artificial Sequence
  Synthetic
ccagggaauagaguauga

SEQ ID NO: 35114 - RNA, 19 nt, Artificial Sequence
  Synthetic
uccagggaauagaguauga

SEQ ID NO: 35115 - RNA, 20 nt, Artificial Sequence
  Synthetic
uuccagggaauagaguauga

SEQ ID NO: 35116 - RNA, 21 nt, Artificial Sequence
  Synthetic
auuccagggaauagaguauga

SEQ ID NO: 35117 - RNA, 23 nt, Artificial Sequence
  Synthetic
ugauuccagggaauagaguauga

SEQ ID NO: 35118 - RNA, 18 nt, Artificial Sequence
  Synthetic
cagcuacucgggguauga

SEQ ID NO: 35119 - RNA, 19 nt, Artificial Sequence
  Synthetic
ucagcuacucgggguauga

SEQ ID NO: 35120 - RNA, 20 nt, Artificial Sequence
  Synthetic
aucagcuacucgggguauga

SEQ ID NO: 35121 - RNA, 21 nt, Artificial Sequence
  Synthetic
caucagcuacucgggguauga

SEQ ID NO: 35122 - RNA, 22 nt, Artificial Sequence
  Synthetic
acaucagcuacucgggguauga

SEQ ID NO: 35123 - RNA, 21 nt, Artificial Sequence
  Synthetic
aaggguaauaaagcauuauga

SEQ ID NO: 35124 - RNA, 23 nt, Artificial Sequence
  Synthetic
agaaggguaauaaagcauuauga

SEQ ID NO: 35125 - RNA, 18 nt, Artificial Sequence
  Synthetic
uuacauguuucauuauga

SEQ ID NO: 35126 - RNA, 19 nt, Artificial Sequence
  Synthetic
cuuacauguuucauuauga

SEQ ID NO: 35127 - RNA, 20 nt, Artificial Sequence
  Synthetic
acuuacauguuucauuauga

SEQ ID NO: 35128 - RNA, 21 nt, Artificial Sequence
  Synthetic
aacuuacauguuucauuauga

SEQ ID NO: 35129 - RNA, 22 nt, Artificial Sequence
  Synthetic
caacuuacauguuucauuauga

SEQ ID NO: 35130 - RNA, 23 nt, Artificial Sequence
  Synthetic
acaacuuacauguuucauuauga

SEQ ID NO: 35131 - RNA, 24 nt, Artificial Sequence
  Synthetic
aacaacuuacauguuucauuauga

SEQ ID NO: 35132 - RNA, 18 nt, Artificial Sequence
  Synthetic
aaggcuuaauguuuauga

SEQ ID NO: 35133 - RNA, 20 nt, Artificial Sequence
  Synthetic
agaaggcuuaauguuuauga

SEQ ID NO: 35134 - RNA, 21 nt, Artificial Sequence
  Synthetic
aagaaggcuuaauguuuauga

SEQ ID NO: 35135 - RNA, 19 nt, Artificial Sequence
  Synthetic
ugcaugcaauauuuuauga

SEQ ID NO: 35136 - RNA, 20 nt, Artificial Sequence
  Synthetic
augcaugcaauauuuuauga

SEQ ID NO: 35137 - RNA, 21 nt, Artificial Sequence
  Synthetic
uaugcaugcaauauuuuauga

SEQ ID NO: 35138 - RNA, 23 nt, Artificial Sequence
  Synthetic
aguaugcaugcaauauuuuauga

SEQ ID NO: 35139 - RNA, 24 nt, Artificial Sequence
  Synthetic
aaguaugcaugcaauauuuuauga

SEQ ID NO: 35140 - RNA, 18 nt, Artificial Sequence
  Synthetic
aucauauaggaaaacuga

SEQ ID NO: 35141 - RNA, 19 nt, Artificial Sequence
  Synthetic
uaucauauaggaaaacuga

SEQ ID NO: 35142 - RNA, 20 nt, Artificial Sequence
  Synthetic
uuaucauauaggaaaacuga

SEQ ID NO: 35143 - RNA, 21 nt, Artificial Sequence
  Synthetic
cuuaucauauaggaaaacuga

SEQ ID NO: 35144 - RNA, 22 nt, Artificial Sequence
  Synthetic
ucuuaucauauaggaaaacuga

SEQ ID NO: 35145 - RNA, 23 nt, Artificial Sequence
  Synthetic
cucuuaucauauaggaaaacuga

SEQ ID NO: 35146 - RNA, 18 nt, Artificial Sequence
  Synthetic
aauagaccucuaaacuga

SEQ ID NO: 35147 - RNA, 19 nt, Artificial Sequence
  Synthetic
uaauagaccucuaaacuga

SEQ ID NO: 35148 - RNA, 20 nt, Artificial Sequence
  Synthetic
uuaauagaccucuaaacuga

SEQ ID NO: 35149 - RNA, 21 nt, Artificial Sequence
  Synthetic
uuuaauagaccucuaaacuga

SEQ ID NO: 35150 - RNA, 22 nt, Artificial Sequence
  Synthetic
auuuaauagaccucuaaacuga

SEQ ID NO: 35151 - RNA, 23 nt, Artificial Sequence
  Synthetic
cauuuaauagaccucuaaacuga

SEQ ID NO: 35152 - RNA, 24 nt, Artificial Sequence
  Synthetic
ucauuuaauagaccucuaaacuga

SEQ ID NO: 35153 - RNA, 19 nt, Artificial Sequence
  Synthetic
ugacgcccuagugaacuga

SEQ ID NO: 35154 - RNA, 20 nt, Artificial Sequence
  Synthetic
augacgcccuagugaacuga

SEQ ID NO: 35155 - RNA, 21 nt, Artificial Sequence
  Synthetic
aaugacgcccuagugaacuga

SEQ ID NO: 35156 - RNA, 22 nt, Artificial Sequence
  Synthetic
aaaugacgcccuagugaacuga

SEQ ID NO: 35157 - RNA, 23 nt, Artificial Sequence
  Synthetic
caaaugacgcccuagugaacuga

SEQ ID NO: 35158 - RNA, 24 nt, Artificial Sequence
  Synthetic
ccaaaugacgcccuagugaacuga

SEQ ID NO: 35159 - RNA, 18 nt, Artificial Sequence
  Synthetic
aguauauuuaguaacuga

SEQ ID NO: 35160 - RNA, 19 nt, Artificial Sequence
  Synthetic
caguauauuuaguaacuga

SEQ ID NO: 35161 - RNA, 20 nt, Artificial Sequence
  Synthetic
ccaguauauuuaguaacuga

SEQ ID NO: 35162 - RNA, 21 nt, Artificial Sequence
  Synthetic
accaguauauuuaguaacuga

SEQ ID NO: 35163 - RNA, 22 nt, Artificial Sequence
  Synthetic
caccaguauauuuaguaacuga

SEQ ID NO: 35164 - RNA, 23 nt, Artificial Sequence
  Synthetic
acaccaguauauuuaguaacuga

SEQ ID NO: 35165 - RNA, 24 nt, Artificial Sequence
  Synthetic
cacaccaguauauuuaguaacuga

SEQ ID NO: 35166 - RNA, 18 nt, Artificial Sequence
  Synthetic
ugaagaauagguaacuga

SEQ ID NO: 35167 - RNA, 19 nt, Artificial Sequence
  Synthetic
cugaagaauagguaacuga

SEQ ID NO: 35168 - RNA, 22 nt, Artificial Sequence
  Synthetic
uggcugaagaauagguaacuga

SEQ ID NO: 35169 - RNA, 23 nt, Artificial Sequence
  Synthetic
cuggcugaagaauagguaacuga

SEQ ID NO: 35170 - RNA, 24 nt, Artificial Sequence
  Synthetic
ucuggcugaagaauagguaacuga

SEQ ID NO: 35171 - RNA, 18 nt, Artificial Sequence
  Synthetic
uggaaaagugguaacuga

SEQ ID NO: 35172 - RNA, 19 nt, Artificial Sequence
  Synthetic
auggaaaagugguaacuga

SEQ ID NO: 35173 - RNA, 20 nt, Artificial Sequence
  Synthetic
cauggaaaagugguaacuga

SEQ ID NO: 35174 - RNA, 21 nt, Artificial Sequence
  Synthetic
ucauggaaaagugguaacuga

SEQ ID NO: 35175 - RNA, 22 nt, Artificial Sequence
  Synthetic
aucauggaaaagugguaacuga

SEQ ID NO: 35176 - RNA, 23 nt, Artificial Sequence
  Synthetic
uaucauggaaaagugguaacuga

SEQ ID NO: 35177 - RNA, 24 nt, Artificial Sequence
  Synthetic
uuaucauggaaaagugguaacuga

SEQ ID NO: 35178 - RNA, 18 nt, Artificial Sequence
  Synthetic
cuuaaaagacuuaacuga

SEQ ID NO: 35179 - RNA, 19 nt, Artificial Sequence
  Synthetic
acuuaaaagacuuaacuga

SEQ ID NO: 35180 - RNA, 20 nt, Artificial Sequence
  Synthetic
cacuuaaaagacuuaacuga

SEQ ID NO: 35181 - RNA, 21 nt, Artificial Sequence
  Synthetic
ccacuuaaaagacuuaacuga

SEQ ID NO: 35182 - RNA, 22 nt, Artificial Sequence
  Synthetic
uccacuuaaaagacuuaacuga

SEQ ID NO: 35183 - RNA, 23 nt, Artificial Sequence
  Synthetic
auccacuuaaaagacuuaacuga

SEQ ID NO: 35184 - RNA, 18 nt, Artificial Sequence
  Synthetic
cauuuugcacaccacuga

SEQ ID NO: 35185 - RNA, 20 nt, Artificial Sequence
  Synthetic
ugcauuuugcacaccacuga

SEQ ID NO: 35186 - RNA, 21 nt, Artificial Sequence
  Synthetic
uugcauuuugcacaccacuga

SEQ ID NO: 35187 - RNA, 22 nt, Artificial Sequence
  Synthetic
auugcauuuugcacaccacuga

SEQ ID NO: 35188 - RNA, 23 nt, Artificial Sequence
  Synthetic
cauugcauuuugcacaccacuga

SEQ ID NO: 35189 - RNA, 24 nt, Artificial Sequence
  Synthetic
ucauugcauuuugcacaccacuga

SEQ ID NO: 35190 - RNA, 18 nt, Artificial Sequence
  Synthetic
aucaaaagacagcacuga

SEQ ID NO: 35191 - RNA, 19 nt, Artificial Sequence
  Synthetic
caucaaaagacagcacuga

SEQ ID NO: 35192 - RNA, 20 nt, Artificial Sequence
  Synthetic
acaucaaaagacagcacuga

SEQ ID NO: 35193 - RNA, 21 nt, Artificial Sequence
  Synthetic
uacaucaaaagacagcacuga

SEQ ID NO: 35194 - RNA, 22 nt, Artificial Sequence
  Synthetic
auacaucaaaagacagcacuga

SEQ ID NO: 35195 - RNA, 23 nt, Artificial Sequence
  Synthetic
uauacaucaaaagacagcacuga

SEQ ID NO: 35196 - RNA, 24 nt, Artificial Sequence
  Synthetic
cuauacaucaaaagacagcacuga

SEQ ID NO: 35197 - RNA, 19 nt, Artificial Sequence
  Synthetic
aguccauuuuaaggacuga

SEQ ID NO: 35198 - RNA, 20 nt, Artificial Sequence
  Synthetic
uaguccauuuuaaggacuga

SEQ ID NO: 35199 - RNA, 22 nt, Artificial Sequence
  Synthetic
uguaguccauuuuaaggacuga

SEQ ID NO: 35200 - RNA, 23 nt, Artificial Sequence
  Synthetic
uuguaguccauuuuaaggacuga

SEQ ID NO: 35201 - RNA, 24 nt, Artificial Sequence
  Synthetic
cuuguaguccauuuuaaggacuga

SEQ ID NO: 35202 - RNA, 18 nt, Artificial Sequence
  Synthetic
caugcauucacauacuga

SEQ ID NO: 35203 - RNA, 19 nt, Artificial Sequence
  Synthetic
ucaugcauucacauacuga

SEQ ID NO: 35204 - RNA, 20 nt, Artificial Sequence
  Synthetic
cucaugcauucacauacuga

SEQ ID NO: 35205 - RNA, 21 nt, Artificial Sequence
  Synthetic
acucaugcauucacauacuga

SEQ ID NO: 35206 - RNA, 23 nt, Artificial Sequence
  Synthetic
agacucaugcauucacauacuga

SEQ ID NO: 35207 - RNA, 24 nt, Artificial Sequence
  Synthetic
uagacucaugcauucacauacuga

SEQ ID NO: 35208 - RNA, 18 nt, Artificial Sequence
  Synthetic
cagagauuuaucuacuga

SEQ ID NO: 35209 - RNA, 19 nt, Artificial Sequence
  Synthetic
acagagauuuaucuacuga

SEQ ID NO: 35210 - RNA, 20 nt, Artificial Sequence
  Synthetic
uacagagauuuaucuacuga

SEQ ID NO: 35211 - RNA, 21 nt, Artificial Sequence
  Synthetic
cuacagagauuuaucuacuga

SEQ ID NO: 35212 - RNA, 22 nt, Artificial Sequence
  Synthetic
ucuacagagauuuaucuacuga

SEQ ID NO: 35213 - RNA, 23 nt, Artificial Sequence
  Synthetic
uucuacagagauuuaucuacuga

SEQ ID NO: 35214 - RNA, 24 nt, Artificial Sequence
  Synthetic
uuucuacagagauuuaucuacuga

SEQ ID NO: 35215 - RNA, 18 nt, Artificial Sequence
  Synthetic
auuucuguuuucuacuga

SEQ ID NO: 35216 - RNA, 19 nt, Artificial Sequence
  Synthetic
cauuucuguuuucuacuga

SEQ ID NO: 35217 - RNA, 20 nt, Artificial Sequence
  Synthetic
ucauuucuguuuucuacuga

SEQ ID NO: 35218 - RNA, 21 nt, Artificial Sequence
  Synthetic
cucauuucuguuuucuacuga

SEQ ID NO: 35219 - RNA, 23 nt, Artificial Sequence
  Synthetic
cgcucauuucuguuuucuacuga

SEQ ID NO: 35220 - RNA, 24 nt, Artificial Sequence
  Synthetic
ccgcucauuucuguuuucuacuga

SEQ ID NO: 35221 - RNA, 18 nt, Artificial Sequence
  Synthetic
ucaauuggcagguacuga

SEQ ID NO: 35222 - RNA, 20 nt, Artificial Sequence
  Synthetic
cgucaauuggcagguacuga

SEQ ID NO: 35223 - RNA, 21 nt, Artificial Sequence
  Synthetic
ucgucaauuggcagguacuga

SEQ ID NO: 35224 - RNA, 22 nt, Artificial Sequence
  Synthetic
uucgucaauuggcagguacuga

SEQ ID NO: 35225 - RNA, 18 nt, Artificial Sequence
  Synthetic
cacccacccuuccccuga

SEQ ID NO: 35226 - RNA, 19 nt, Artificial Sequence
  Synthetic
ucacccacccuuccccuga

SEQ ID NO: 35227 - RNA, 20 nt, Artificial Sequence
  Synthetic
aucacccacccuuccccuga

SEQ ID NO: 35228 - RNA, 21 nt, Artificial Sequence
  Synthetic
uaucacccacccuuccccuga

SEQ ID NO: 35229 - RNA, 22 nt, Artificial Sequence
  Synthetic
uuaucacccacccuuccccuga

SEQ ID NO: 35230 - RNA, 23 nt, Artificial Sequence
  Synthetic
auuaucacccacccuuccccuga

SEQ ID NO: 35231 - RNA, 24 nt, Artificial Sequence
  Synthetic
uauuaucacccacccuuccccuga

SEQ ID NO: 35232 - RNA, 18 nt, Artificial Sequence
  Synthetic
ugaacguccaaucccuga

SEQ ID NO: 35233 - RNA, 19 nt, Artificial Sequence
  Synthetic
augaacguccaaucccuga

SEQ ID NO: 35234 - RNA, 20 nt, Artificial Sequence
  Synthetic
aaugaacguccaaucccuga

SEQ ID NO: 35235 - RNA, 22 nt, Artificial Sequence
  Synthetic
agaaugaacguccaaucccuga

SEQ ID NO: 35236 - RNA, 23 nt, Artificial Sequence
  Synthetic
uagaaugaacguccaaucccuga

SEQ ID NO: 35237 - RNA, 24 nt, Artificial Sequence
  Synthetic
uuagaaugaacguccaaucccuga

SEQ ID NO: 35238 - RNA, 18 nt, Artificial Sequence
  Synthetic
uuggcauauauauccuga

SEQ ID NO: 35239 - RNA, 19 nt, Artificial Sequence
  Synthetic
cuuggcauauauauccuga

SEQ ID NO: 35240 - RNA, 21 nt, Artificial Sequence
  Synthetic
ugcuuggcauauauauccuga

SEQ ID NO: 35241 - RNA, 22 nt, Artificial Sequence
  Synthetic
augcuuggcauauauauccuga

SEQ ID NO: 35242 - RNA, 23 nt, Artificial Sequence
  Synthetic
aaugcuuggcauauauauccuga

SEQ ID NO: 35243 - RNA, 24 nt, Artificial Sequence
  Synthetic
caaugcuuggcauauauauccuga

SEQ ID NO: 35244 - RNA, 19 nt, Artificial Sequence
  Synthetic
ugagucuauuuucuccuga

SEQ ID NO: 35245 - RNA, 20 nt, Artificial Sequence
  Synthetic
augagucuauuuucuccuga

SEQ ID NO: 35246 - RNA, 21 nt, Artificial Sequence
  Synthetic
caugagucuauuuucuccuga

SEQ ID NO: 35247 - RNA, 23 nt, Artificial Sequence
  Synthetic
ugcaugagucuauuuucuccuga

SEQ ID NO: 35248 - RNA, 24 nt, Artificial Sequence
  Synthetic
augcaugagucuauuuucuccuga

SEQ ID NO: 35249 - RNA, 18 nt, Artificial Sequence
  Synthetic
cugugucuacuguccuga

SEQ ID NO: 35250 - RNA, 20 nt, Artificial Sequence
  Synthetic
agcugugucuacuguccuga

SEQ ID NO: 35251 - RNA, 22 nt, Artificial Sequence
  Synthetic
agagcugugucuacuguccuga

SEQ ID NO: 35252 - RNA, 23 nt, Artificial Sequence
  Synthetic
uagagcugugucuacuguccuga

SEQ ID NO: 35253 - RNA, 24 nt, Artificial Sequence
  Synthetic
uuagagcugugucuacuguccuga

SEQ ID NO: 35254 - RNA, 19 nt, Artificial Sequence
  Synthetic
ugguuucuuacuguccuga

SEQ ID NO: 35255 - RNA, 20 nt, Artificial Sequence
  Synthetic
augguuucuuacuguccuga

SEQ ID NO: 35256 - RNA, 21 nt, Artificial Sequence
  Synthetic
aaugguuucuuacuguccuga

SEQ ID NO: 35257 - RNA, 22 nt, Artificial Sequence
  Synthetic
aaaugguuucuuacuguccuga

SEQ ID NO: 35258 - RNA, 23 nt, Artificial Sequence
  Synthetic
aaaaugguuucuuacuguccuga

SEQ ID NO: 35259 - RNA, 20 nt, Artificial Sequence
  Synthetic
agggccauaguaaaagcuga

SEQ ID NO: 35260 - RNA, 21 nt, Artificial Sequence
  Synthetic
cagggccauaguaaaagcuga

SEQ ID NO: 35261 - RNA, 22 nt, Artificial Sequence
  Synthetic
ucagggccauaguaaaagcuga

SEQ ID NO: 35262 - RNA, 23 nt, Artificial Sequence
  Synthetic
aucagggccauaguaaaagcuga

SEQ ID NO: 35263 - RNA, 18 nt, Artificial Sequence
  Synthetic
aaauacacagaaagcuga

SEQ ID NO: 35264 - RNA, 19 nt, Artificial Sequence
  Synthetic
caaauacacagaaagcuga

SEQ ID NO: 35265 - RNA, 20 nt, Artificial Sequence
  Synthetic
ucaaauacacagaaagcuga

SEQ ID NO: 35266 - RNA, 21 nt, Artificial Sequence
  Synthetic
uucaaauacacagaaagcuga

SEQ ID NO: 35267 - RNA, 22 nt, Artificial Sequence
  Synthetic
uuucaaauacacagaaagcuga

SEQ ID NO: 35268 - RNA, 23 nt, Artificial Sequence
  Synthetic
uuuucaaauacacagaaagcuga

SEQ ID NO: 35269 - RNA, 24 nt, Artificial Sequence
  Synthetic
uuuuucaaauacacagaaagcuga

SEQ ID NO: 35270 - RNA, 18 nt, Artificial Sequence
  Synthetic
auggcacauuucagcuga

SEQ ID NO: 35271 - RNA, 19 nt, Artificial Sequence
  Synthetic
aauggcacauuucagcuga

SEQ ID NO: 35272 - RNA, 20 nt, Artificial Sequence
  Synthetic
uaauggcacauuucagcuga

SEQ ID NO: 35273 - RNA, 21 nt, Artificial Sequence
  Synthetic
uuaauggcacauuucagcuga

SEQ ID NO: 35274 - RNA, 23 nt, Artificial Sequence
  Synthetic
uguuaauggcacauuucagcuga

SEQ ID NO: 35275 - RNA, 24 nt, Artificial Sequence
  Synthetic
uuguuaauggcacauuucagcuga

SEQ ID NO: 35276 - RNA, 18 nt, Artificial Sequence
  Synthetic
ugauucggucagagcuga

SEQ ID NO: 35277 - RNA, 19 nt, Artificial Sequence
  Synthetic
augauucggucagagcuga

SEQ ID NO: 35278 - RNA, 20 nt, Artificial Sequence
  Synthetic
uaugauucggucagagcuga

SEQ ID NO: 35279 - RNA, 21 nt, Artificial Sequence
  Synthetic
uuaugauucggucagagcuga

SEQ ID NO: 35280 - RNA, 22 nt, Artificial Sequence
  Synthetic
auuaugauucggucagagcuga

SEQ ID NO: 35281 - RNA, 23 nt, Artificial Sequence
  Synthetic
uauuaugauucggucagagcuga

SEQ ID NO: 35282 - RNA, 24 nt, Artificial Sequence
  Synthetic
uuauuaugauucggucagagcuga

SEQ ID NO: 35283 - RNA, 18 nt, Artificial Sequence
  Synthetic
uuaguaugugagagcuga

SEQ ID NO: 35284 - RNA, 19 nt, Artificial Sequence
  Synthetic
cuuaguaugugagagcuga

SEQ ID NO: 35285 - RNA, 21 nt, Artificial Sequence
  Synthetic
ugcuuaguaugugagagcuga

SEQ ID NO: 35286 - RNA, 22 nt, Artificial Sequence
  Synthetic
augcuuaguaugugagagcuga

SEQ ID NO: 35287 - RNA, 23 nt, Artificial Sequence
  Synthetic
aaugcuuaguaugugagagcuga

SEQ ID NO: 35288 - RNA, 24 nt, Artificial Sequence
  Synthetic
aaaugcuuaguaugugagagcuga

SEQ ID NO: 35289 - RNA, 18 nt, Artificial Sequence
  Synthetic
uaaaugacacugagcuga

SEQ ID NO: 35290 - RNA, 19 nt, Artificial Sequence
  Synthetic
auaaaugacacugagcuga

SEQ ID NO: 35291 - RNA, 20 nt, Artificial Sequence
  Synthetic
uauaaaugacacugagcuga

SEQ ID NO: 35292 - RNA, 21 nt, Artificial Sequence
  Synthetic
uuauaaaugacacugagcuga

SEQ ID NO: 35293 - RNA, 22 nt, Artificial Sequence
  Synthetic
cuuauaaaugacacugagcuga

SEQ ID NO: 35294 - RNA, 23 nt, Artificial Sequence
  Synthetic
ucuuauaaaugacacugagcuga

SEQ ID NO: 35295 - RNA, 24 nt, Artificial Sequence
  Synthetic
uucuuauaaaugacacugagcuga

SEQ ID NO: 35296 - RNA, 18 nt, Artificial Sequence
  Synthetic
uaaaagagauuuagcuga

SEQ ID NO: 35297 - RNA, 19 nt, Artificial Sequence
  Synthetic
uuaaaagagauuuagcuga

SEQ ID NO: 35298 - RNA, 20 nt, Artificial Sequence
  Synthetic
auuaaaagagauuuagcuga

SEQ ID NO: 35299 - RNA, 21 nt, Artificial Sequence
  Synthetic
aauuaaaagagauuuagcuga

SEQ ID NO: 35300 - RNA, 22 nt, Artificial Sequence
  Synthetic
caauuaaaagagauuuagcuga

SEQ ID NO: 35301 - RNA, 23 nt, Artificial Sequence
  Synthetic
ccaauuaaaagagauuuagcuga

SEQ ID NO: 35302 - RNA, 24 nt, Artificial Sequence
  Synthetic
accaauuaaaagagauuuagcuga

SEQ ID NO: 35303 - RNA, 19 nt, Artificial Sequence
  Synthetic
uguuauucugaaaugcuga

SEQ ID NO: 35304 - RNA, 20 nt, Artificial Sequence
  Synthetic
auguuauucugaaaugcuga

SEQ ID NO: 35305 - RNA, 21 nt, Artificial Sequence
  Synthetic
cauguuauucugaaaugcuga

SEQ ID NO: 35306 - RNA, 22 nt, Artificial Sequence
  Synthetic
ucauguuauucugaaaugcuga

SEQ ID NO: 35307 - RNA, 23 nt, Artificial Sequence
  Synthetic
uucauguuauucugaaaugcuga

SEQ ID NO: 35308 - RNA, 24 nt, Artificial Sequence
  Synthetic
uuucauguuauucugaaaugcuga

SEQ ID NO: 35309 - RNA, 18 nt, Artificial Sequence
  Synthetic
aucagucuugaaugcuga

SEQ ID NO: 35310 - RNA, 19 nt, Artificial Sequence
  Synthetic
uaucagucuugaaugcuga

SEQ ID NO: 35311 - RNA, 20 nt, Artificial Sequence
  Synthetic
auaucagucuugaaugcuga

SEQ ID NO: 35312 - RNA, 21 nt, Artificial Sequence
  Synthetic
aauaucagucuugaaugcuga

SEQ ID NO: 35313 - RNA, 22 nt, Artificial Sequence
  Synthetic
aaauaucagucuugaaugcuga

SEQ ID NO: 35314 - RNA, 23 nt, Artificial Sequence
  Synthetic
aaaauaucagucuugaaugcuga

SEQ ID NO: 35315 - RNA, 24 nt, Artificial Sequence
  Synthetic
uaaaauaucagucuugaaugcuga

SEQ ID NO: 35316 - RNA, 18 nt, Artificial Sequence
  Synthetic
uggaaagacacaugcuga

SEQ ID NO: 35317 - RNA, 19 nt, Artificial Sequence
  Synthetic
cuggaaagacacaugcuga

SEQ ID NO: 35318 - RNA, 20 nt, Artificial Sequence
  Synthetic
acuggaaagacacaugcuga

SEQ ID NO: 35319 - RNA, 22 nt, Artificial Sequence
  Synthetic
ugacuggaaagacacaugcuga

SEQ ID NO: 35320 - RNA, 23 nt, Artificial Sequence
  Synthetic
cugacuggaaagacacaugcuga

SEQ ID NO: 35321 - RNA, 24 nt, Artificial Sequence
  Synthetic
ucugacuggaaagacacaugcuga

SEQ ID NO: 35322 - RNA, 18 nt, Artificial Sequence
  Synthetic
uaagaaauuucaaucuga

SEQ ID NO: 35323 - RNA, 19 nt, Artificial Sequence
  Synthetic
auaagaaauuucaaucuga

SEQ ID NO: 35324 - RNA, 20 nt, Artificial Sequence
  Synthetic
aauaagaaauuucaaucuga

SEQ ID NO: 35325 - RNA, 22 nt, Artificial Sequence
  Synthetic
agaauaagaaauuucaaucuga

SEQ ID NO: 35326 - RNA, 23 nt, Artificial Sequence
  Synthetic
uagaauaagaaauuucaaucuga

SEQ ID NO: 35327 - RNA, 24 nt, Artificial Sequence
  Synthetic
uuagaauaagaaauuucaaucuga

SEQ ID NO: 35328 - RNA, 18 nt, Artificial Sequence
  Synthetic
ugaaaaggauuaaucuga

SEQ ID NO: 35329 - RNA, 19 nt, Artificial Sequence
  Synthetic
augaaaaggauuaaucuga

SEQ ID NO: 35330 - RNA, 20 nt, Artificial Sequence
  Synthetic
aaugaaaaggauuaaucuga

SEQ ID NO: 35331 - RNA, 21 nt, Artificial Sequence
  Synthetic
aaaugaaaaggauuaaucuga

SEQ ID NO: 35332 - RNA, 22 nt, Artificial Sequence
  Synthetic
caaaugaaaaggauuaaucuga

SEQ ID NO: 35333 - RNA, 23 nt, Artificial Sequence
  Synthetic
ucaaaugaaaaggauuaaucuga

SEQ ID NO: 35334 - RNA, 24 nt, Artificial Sequence
  Synthetic
uucaaaugaaaaggauuaaucuga

SEQ ID NO: 35335 - RNA, 18 nt, Artificial Sequence
  Synthetic
ugauaaaagugcaucuga

SEQ ID NO: 35336 - RNA, 20 nt, Artificial Sequence
  Synthetic
cgugauaaaagugcaucuga

SEQ ID NO: 35337 - RNA, 22 nt, Artificial Sequence
  Synthetic
agcgugauaaaagugcaucuga

SEQ ID NO: 35338 - RNA, 23 nt, Artificial Sequence
  Synthetic
uagcgugauaaaagugcaucuga

SEQ ID NO: 35339 - RNA, 24 nt, Artificial Sequence
  Synthetic
auagcgugauaaaagugcaucuga

SEQ ID NO: 35340 - RNA, 19 nt, Artificial Sequence
  Synthetic
ugggaaagacaagaucuga

SEQ ID NO: 35341 - RNA, 22 nt, Artificial Sequence
  Synthetic
uggugggaaagacaagaucuga

SEQ ID NO: 35342 - RNA, 23 nt, Artificial Sequence
  Synthetic
auggugggaaagacaagaucuga

SEQ ID NO: 35343 - RNA, 18 nt, Artificial Sequence
  Synthetic
aucuuagcccugaucuga

SEQ ID NO: 35344 - RNA, 19 nt, Artificial Sequence
  Synthetic
uaucuuagcccugaucuga

SEQ ID NO: 35345 - RNA, 20 nt, Artificial Sequence
  Synthetic
uuaucuuagcccugaucuga

SEQ ID NO: 35346 - RNA, 21 nt, Artificial Sequence
  Synthetic
auuaucuuagcccugaucuga

SEQ ID NO: 35347 - RNA, 22 nt, Artificial Sequence
  Synthetic
aauuaucuuagcccugaucuga

SEQ ID NO: 35348 - RNA, 18 nt, Artificial Sequence
  Synthetic
aggcaguggcaacucuga

SEQ ID NO: 35349 - RNA, 19 nt, Artificial Sequence
  Synthetic
caggcaguggcaacucuga

SEQ ID NO: 35350 - RNA, 20 nt, Artificial Sequence
  Synthetic
acaggcaguggcaacucuga

SEQ ID NO: 35351 - RNA, 21 nt, Artificial Sequence
  Synthetic
uacaggcaguggcaacucuga

SEQ ID NO: 35352 - RNA, 22 nt, Artificial Sequence
  Synthetic
cuacaggcaguggcaacucuga

SEQ ID NO: 35353 - RNA, 23 nt, Artificial Sequence
  Synthetic
ccuacaggcaguggcaacucuga

SEQ ID NO: 35354 - RNA, 21 nt, Artificial Sequence
  Synthetic
uauagaaaauggagacucuga

SEQ ID NO: 35355 - RNA, 22 nt, Artificial Sequence
  Synthetic
uuauagaaaauggagacucuga

SEQ ID NO: 35356 - RNA, 23 nt, Artificial Sequence
  Synthetic
cuuauagaaaauggagacucuga

SEQ ID NO: 35357 - RNA, 18 nt, Artificial Sequence
  Synthetic
aacauauguggucucuga

SEQ ID NO: 35358 - RNA, 19 nt, Artificial Sequence
  Synthetic
aaacauauguggucucuga

SEQ ID NO: 35359 - RNA, 20 nt, Artificial Sequence
  Synthetic
aaaacauauguggucucuga

SEQ ID NO: 35360 - RNA, 21 nt, Artificial Sequence
  Synthetic
caaaacauauguggucucuga

SEQ ID NO: 35361 - RNA, 22 nt, Artificial Sequence
  Synthetic
acaaaacauauguggucucuga

SEQ ID NO: 35362 - RNA, 23 nt, Artificial Sequence
  Synthetic
cacaaaacauauguggucucuga

SEQ ID NO: 35363 - RNA, 18 nt, Artificial Sequence
  Synthetic
uccaucaagauucucuga

SEQ ID NO: 35364 - RNA, 19 nt, Artificial Sequence
  Synthetic
uuccaucaagauucucuga

SEQ ID NO: 35365 - RNA, 20 nt, Artificial Sequence
  Synthetic
uuuccaucaagauucucuga

SEQ ID NO: 35366 - RNA, 21 nt, Artificial Sequence
  Synthetic
uuuuccaucaagauucucuga

SEQ ID NO: 35367 - RNA, 24 nt, Artificial Sequence
  Synthetic
agguuuuccaucaagauucucuga

SEQ ID NO: 35368 - RNA, 18 nt, Artificial Sequence
  Synthetic
cuuuccuguuuucucuga

SEQ ID NO: 35369 - RNA, 19 nt, Artificial Sequence
  Synthetic
acuuuccuguuuucucuga

SEQ ID NO: 35370 - RNA, 20 nt, Artificial Sequence
  Synthetic
uacuuuccuguuuucucuga

SEQ ID NO: 35371 - RNA, 21 nt, Artificial Sequence
  Synthetic
auacuuuccuguuuucucuga

SEQ ID NO: 35372 - RNA, 22 nt, Artificial Sequence
  Synthetic
cauacuuuccuguuuucucuga

SEQ ID NO: 35373 - RNA, 23 nt, Artificial Sequence
  Synthetic
ccauacuuuccuguuuucucuga

SEQ ID NO: 35374 - RNA, 24 nt, Artificial Sequence
  Synthetic
cccauacuuuccuguuuucucuga

SEQ ID NO: 35375 - RNA, 18 nt, Artificial Sequence
  Synthetic
cuaauuagcucagucuga

SEQ ID NO: 35376 - RNA, 21 nt, Artificial Sequence
  Synthetic
uggcuaauuagcucagucuga

SEQ ID NO: 35377 - RNA, 23 nt, Artificial Sequence
  Synthetic
aguggcuaauuagcucagucuga

SEQ ID NO: 35378 - RNA, 24 nt, Artificial Sequence
  Synthetic
uaguggcuaauuagcucagucuga

SEQ ID NO: 35379 - RNA, 21 nt, Artificial Sequence
  Synthetic
acuugacuaagguucuucuga

SEQ ID NO: 35380 - RNA, 22 nt, Artificial Sequence
  Synthetic
cacuugacuaagguucuucuga

SEQ ID NO: 35381 - RNA, 24 nt, Artificial Sequence
  Synthetic
agcacuugacuaagguucuucuga

SEQ ID NO: 35382 - RNA, 19 nt, Artificial Sequence
  Synthetic
agccaacuuucuuuucuga

SEQ ID NO: 35383 - RNA, 21 nt, Artificial Sequence
  Synthetic
ugagccaacuuucuuuucuga

SEQ ID NO: 35384 - RNA, 22 nt, Artificial Sequence
  Synthetic
augagccaacuuucuuuucuga

SEQ ID NO: 35385 - RNA, 23 nt, Artificial Sequence
  Synthetic
uaugagccaacuuucuuuucuga

SEQ ID NO: 35386 - RNA, 24 nt, Artificial Sequence
  Synthetic
auaugagccaacuuucuuuucuga

SEQ ID NO: 35387 - RNA, 19 nt, Artificial Sequence
  Synthetic
uggaccaagcccaaaguga

SEQ ID NO: 35388 - RNA, 20 nt, Artificial Sequence
  Synthetic
auggaccaagcccaaaguga

SEQ ID NO: 35389 - RNA, 21 nt, Artificial Sequence
  Synthetic
cauggaccaagcccaaaguga

SEQ ID NO: 35390 - RNA, 22 nt, Artificial Sequence
  Synthetic
acauggaccaagcccaaaguga

SEQ ID NO: 35391 - RNA, 23 nt, Artificial Sequence
  Synthetic
cacauggaccaagcccaaaguga

SEQ ID NO: 35392 - RNA, 18 nt, Artificial Sequence
  Synthetic
uaacccuaugcaaaguga

SEQ ID NO: 35393 - RNA, 19 nt, Artificial Sequence
  Synthetic
auaacccuaugcaaaguga

SEQ ID NO: 35394 - RNA, 20 nt, Artificial Sequence
  Synthetic
aauaacccuaugcaaaguga

SEQ ID NO: 35395 - RNA, 22 nt, Artificial Sequence
  Synthetic
ugaauaacccuaugcaaaguga

SEQ ID NO: 35396 - RNA, 23 nt, Artificial Sequence
  Synthetic
cugaauaacccuaugcaaaguga

SEQ ID NO: 35397 - RNA, 24 nt, Artificial Sequence
  Synthetic
ucugaauaacccuaugcaaaguga

SEQ ID NO: 35398 - RNA, 19 nt, Artificial Sequence
  Synthetic
agauuauuguucaaaguga

SEQ ID NO: 35399 - RNA, 20 nt, Artificial Sequence
  Synthetic
uagauuauuguucaaaguga

SEQ ID NO: 35400 - RNA, 21 nt, Artificial Sequence
  Synthetic
auagauuauuguucaaaguga

SEQ ID NO: 35401 - RNA, 23 nt, Artificial Sequence
  Synthetic
ugauagauuauuguucaaaguga

SEQ ID NO: 35402 - RNA, 24 nt, Artificial Sequence
  Synthetic
augauagauuauuguucaaaguga

SEQ ID NO: 35403 - RNA, 18 nt, Artificial Sequence
  Synthetic
uuacuuuguucaaaguga

SEQ ID NO: 35404 - RNA, 19 nt, Artificial Sequence
  Synthetic
auuacuuuguucaaaguga

SEQ ID NO: 35405 - RNA, 20 nt, Artificial Sequence
  Synthetic
aauuacuuuguucaaaguga

SEQ ID NO: 35406 - RNA, 21 nt, Artificial Sequence
  Synthetic
aaauuacuuuguucaaaguga

SEQ ID NO: 35407 - RNA, 23 nt, Artificial Sequence
  Synthetic
ugaaauuacuuuguucaaaguga

SEQ ID NO: 35408 - RNA, 24 nt, Artificial Sequence
  Synthetic
uugaaauuacuuuguucaaaguga

SEQ ID NO: 35409 - RNA, 18 nt, Artificial Sequence
  Synthetic
auauguuggggaaaguga

SEQ ID NO: 35410 - RNA, 19 nt, Artificial Sequence
  Synthetic
aauauguuggggaaaguga

SEQ ID NO: 35411 - RNA, 20 nt, Artificial Sequence
  Synthetic
caauauguuggggaaaguga

SEQ ID NO: 35412 - RNA, 21 nt, Artificial Sequence
  Synthetic
ucaauauguuggggaaaguga

SEQ ID NO: 35413 - RNA, 23 nt, Artificial Sequence
  Synthetic
ugucaauauguuggggaaaguga

SEQ ID NO: 35414 - RNA, 24 nt, Artificial Sequence
  Synthetic
uugucaauauguuggggaaaguga

SEQ ID NO: 35415 - RNA, 21 nt, Artificial Sequence
  Synthetic
caagaauaauauugaaaguga

SEQ ID NO: 35416 - RNA, 22 nt, Artificial Sequence
  Synthetic
ucaagaauaauauugaaaguga

SEQ ID NO: 35417 - RNA, 23 nt, Artificial Sequence
  Synthetic
aucaagaauaauauugaaaguga

SEQ ID NO: 35418 - RNA, 21 nt, Artificial Sequence
  Synthetic
aguaaaguaaaagacaaguga

SEQ ID NO: 35419 - RNA, 22 nt, Artificial Sequence
  Synthetic
aaguaaaguaaaagacaaguga

SEQ ID NO: 35420 - RNA, 24 nt, Artificial Sequence
  Synthetic
agaaguaaaguaaaagacaaguga

SEQ ID NO: 35421 - RNA, 18 nt, Artificial Sequence
  Synthetic
aaaguauaguucaaguga

SEQ ID NO: 35422 - RNA, 19 nt, Artificial Sequence
  Synthetic
aaaaguauaguucaaguga

SEQ ID NO: 35423 - RNA, 20 nt, Artificial Sequence
  Synthetic
caaaaguauaguucaaguga

SEQ ID NO: 35424 - RNA, 23 nt, Artificial Sequence
  Synthetic
uggcaaaaguauaguucaaguga

SEQ ID NO: 35425 - RNA, 24 nt, Artificial Sequence
  Synthetic
uuggcaaaaguauaguucaaguga

SEQ ID NO: 35426 - RNA, 18 nt, Artificial Sequence
  Synthetic
auagccgucuugaaguga

SEQ ID NO: 35427 - RNA, 19 nt, Artificial Sequence
  Synthetic
uauagccgucuugaaguga

SEQ ID NO: 35428 - RNA, 20 nt, Artificial Sequence
  Synthetic
auauagccgucuugaaguga

SEQ ID NO: 35429 - RNA, 21 nt, Artificial Sequence
  Synthetic
uauauagccgucuugaaguga

SEQ ID NO: 35430 - RNA, 22 nt, Artificial Sequence
  Synthetic
uuauauagccgucuugaaguga

SEQ ID NO: 35431 - RNA, 23 nt, Artificial Sequence
  Synthetic
uuuauauagccgucuugaaguga

SEQ ID NO: 35432 - RNA, 22 nt, Artificial Sequence
  Synthetic
uggggaagcuauuacuaaguga

SEQ ID NO: 35433 - RNA, 23 nt, Artificial Sequence
  Synthetic
auggggaagcuauuacuaaguga

SEQ ID NO: 35434 - RNA, 24 nt, Artificial Sequence
  Synthetic
aauggggaagcuauuacuaaguga

SEQ ID NO: 35435 - RNA, 21 nt, Artificial Sequence
  Synthetic
acaaacuguucuccuaaguga

SEQ ID NO: 35436 - RNA, 22 nt, Artificial Sequence
  Synthetic
cacaaacuguucuccuaaguga

SEQ ID NO: 35437 - RNA, 23 nt, Artificial Sequence
  Synthetic
acacaaacuguucuccuaaguga

SEQ ID NO: 35438 - RNA, 24 nt, Artificial Sequence
  Synthetic
uacacaaacuguucuccuaaguga

SEQ ID NO: 35439 - RNA, 18 nt, Artificial Sequence
  Synthetic
uagucuuauuuuaaguga

SEQ ID NO: 35440 - RNA, 19 nt, Artificial Sequence
  Synthetic
auagucuuauuuuaaguga

SEQ ID NO: 35441 - RNA, 20 nt, Artificial Sequence
  Synthetic
uauagucuuauuuuaaguga

SEQ ID NO: 35442 - RNA, 21 nt, Artificial Sequence
  Synthetic
auauagucuuauuuuaaguga

SEQ ID NO: 35443 - RNA, 22 nt, Artificial Sequence
  Synthetic
uauauagucuuauuuuaaguga

SEQ ID NO: 35444 - RNA, 24 nt, Artificial Sequence
  Synthetic
cguauauagucuuauuuuaaguga

SEQ ID NO: 35445 - RNA, 18 nt, Artificial Sequence
  Synthetic
uaacauccaagacaguga

SEQ ID NO: 35446 - RNA, 19 nt, Artificial Sequence
  Synthetic
uuaacauccaagacaguga

SEQ ID NO: 35447 - RNA, 21 nt, Artificial Sequence
  Synthetic
uguuaacauccaagacaguga

SEQ ID NO: 35448 - RNA, 22 nt, Artificial Sequence
  Synthetic
uuguuaacauccaagacaguga

SEQ ID NO: 35449 - RNA, 23 nt, Artificial Sequence
  Synthetic
auuguuaacauccaagacaguga

SEQ ID NO: 35450 - RNA, 24 nt, Artificial Sequence
  Synthetic
cauuguuaacauccaagacaguga

SEQ ID NO: 35451 - RNA, 18 nt, Artificial Sequence
  Synthetic
uaguggugaaagcaguga

SEQ ID NO: 35452 - RNA, 19 nt, Artificial Sequence
  Synthetic
cuaguggugaaagcaguga

SEQ ID NO: 35453 - RNA, 20 nt, Artificial Sequence
  Synthetic
ucuaguggugaaagcaguga

SEQ ID NO: 35454 - RNA, 22 nt, Artificial Sequence
  Synthetic
agucuaguggugaaagcaguga

SEQ ID NO: 35455 - RNA, 23 nt, Artificial Sequence
  Synthetic
cagucuaguggugaaagcaguga

SEQ ID NO: 35456 - RNA, 24 nt, Artificial Sequence
  Synthetic
ucagucuaguggugaaagcaguga

SEQ ID NO: 35457 - RNA, 18 nt, Artificial Sequence
  Synthetic
uagaauguuaugcaguga

SEQ ID NO: 35458 - RNA, 20 nt, Artificial Sequence
  Synthetic
uguagaauguuaugcaguga

SEQ ID NO: 35459 - RNA, 22 nt, Artificial Sequence
  Synthetic
uguguagaauguuaugcaguga

SEQ ID NO: 35460 - RNA, 23 nt, Artificial Sequence
  Synthetic
uuguguagaauguuaugcaguga

SEQ ID NO: 35461 - RNA, 24 nt, Artificial Sequence
  Synthetic
auuguguagaauguuaugcaguga

SEQ ID NO: 35462 - RNA, 18 nt, Artificial Sequence
  Synthetic
agccccauugcucaguga

SEQ ID NO: 35463 - RNA, 19 nt, Artificial Sequence
  Synthetic
uagccccauugcucaguga

SEQ ID NO: 35464 - RNA, 20 nt, Artificial Sequence
  Synthetic
auagccccauugcucaguga

SEQ ID NO: 35465 - RNA, 21 nt, Artificial Sequence
  Synthetic
aauagccccauugcucaguga

SEQ ID NO: 35466 - RNA, 22 nt, Artificial Sequence
  Synthetic
caauagccccauugcucaguga

SEQ ID NO: 35467 - RNA, 18 nt, Artificial Sequence
  Synthetic
ugcgcacuaucucaguga

SEQ ID NO: 35468 - RNA, 21 nt, Artificial Sequence
  Synthetic
cggugcgcacuaucucaguga

SEQ ID NO: 35469 - RNA, 22 nt, Artificial Sequence
  Synthetic
acggugcgcacuaucucaguga

SEQ ID NO: 35470 - RNA, 23 nt, Artificial Sequence
  Synthetic
uacggugcgcacuaucucaguga

SEQ ID NO: 35471 - RNA, 24 nt, Artificial Sequence
  Synthetic
auacggugcgcacuaucucaguga

SEQ ID NO: 35472 - RNA, 18 nt, Artificial Sequence
  Synthetic
ccucaaauguaagaguga

SEQ ID NO: 35473 - RNA, 19 nt, Artificial Sequence
  Synthetic
uccucaaauguaagaguga

SEQ ID NO: 35474 - RNA, 20 nt, Artificial Sequence
  Synthetic
auccucaaauguaagaguga

SEQ ID NO: 35475 - RNA, 21 nt, Artificial Sequence
  Synthetic
cauccucaaauguaagaguga

SEQ ID NO: 35476 - RNA, 22 nt, Artificial Sequence
  Synthetic
ucauccucaaauguaagaguga

SEQ ID NO: 35477 - RNA, 23 nt, Artificial Sequence
  Synthetic
uucauccucaaauguaagaguga

SEQ ID NO: 35478 - RNA, 18 nt, Artificial Sequence
  Synthetic
aguaagugaauggaguga

SEQ ID NO: 35479 - RNA, 19 nt, Artificial Sequence
  Synthetic
aaguaagugaauggaguga

SEQ ID NO: 35480 - RNA, 20 nt, Artificial Sequence
  Synthetic
uaaguaagugaauggaguga

SEQ ID NO: 35481 - RNA, 21 nt, Artificial Sequence
  Synthetic
auaaguaagugaauggaguga

SEQ ID NO: 35482 - RNA, 22 nt, Artificial Sequence
  Synthetic
aauaaguaagugaauggaguga

SEQ ID NO: 35483 - RNA, 24 nt, Artificial Sequence
  Synthetic
ugaauaaguaagugaauggaguga

SEQ ID NO: 35484 - RNA, 20 nt, Artificial Sequence
  Synthetic
aggcuugggagguggaguga

SEQ ID NO: 35485 - RNA, 22 nt, Artificial Sequence
  Synthetic
agaggcuugggagguggaguga

SEQ ID NO: 35486 - RNA, 23 nt, Artificial Sequence
  Synthetic
cagaggcuugggagguggaguga

SEQ ID NO: 35487 - RNA, 24 nt, Artificial Sequence
  Synthetic
acagaggcuugggagguggaguga

SEQ ID NO: 35488 - RNA, 22 nt, Artificial Sequence
  Synthetic
aguaagugaauggagugaguga

SEQ ID NO: 35489 - RNA, 23 nt, Artificial Sequence
  Synthetic
aaguaagugaauggagugaguga

SEQ ID NO: 35490 - RNA, 24 nt, Artificial Sequence
  Synthetic
uaaguaagugaauggagugaguga

SEQ ID NO: 35491 - RNA, 20 nt, Artificial Sequence
  Synthetic
agguacauuuuaacuaguga

SEQ ID NO: 35492 - RNA, 21 nt, Artificial Sequence
  Synthetic
aagguacauuuuaacuaguga

SEQ ID NO: 35493 - RNA, 22 nt, Artificial Sequence
  Synthetic
aaagguacauuuuaacuaguga

SEQ ID NO: 35494 - RNA, 23 nt, Artificial Sequence
  Synthetic
aaaagguacauuuuaacuaguga

SEQ ID NO: 35495 - RNA, 19 nt, Artificial Sequence
  Synthetic
uggacuuggucgguaguga

SEQ ID NO: 35496 - RNA, 20 nt, Artificial Sequence
  Synthetic
uuggacuuggucgguaguga

SEQ ID NO: 35497 - RNA, 21 nt, Artificial Sequence
  Synthetic
cuuggacuuggucgguaguga

SEQ ID NO: 35498 - RNA, 24 nt, Artificial Sequence
  Synthetic
uggcuuggacuuggucgguaguga

SEQ ID NO: 35499 - RNA, 18 nt, Artificial Sequence
  Synthetic
uuuuaaugcauuuaguga

SEQ ID NO: 35500 - RNA, 19 nt, Artificial Sequence
  Synthetic
cuuuuaaugcauuuaguga

SEQ ID NO: 35501 - RNA, 20 nt, Artificial Sequence
  Synthetic
acuuuuaaugcauuuaguga

SEQ ID NO: 35502 - RNA, 21 nt, Artificial Sequence
  Synthetic
uacuuuuaaugcauuuaguga

SEQ ID NO: 35503 - RNA, 24 nt, Artificial Sequence
  Synthetic
agguacuuuuaaugcauuuaguga

SEQ ID NO: 35504 - RNA, 18 nt, Artificial Sequence
  Synthetic
acaaagaccuuuuaguga

SEQ ID NO: 35505 - RNA, 19 nt, Artificial Sequence
  Synthetic
uacaaagaccuuuuaguga

SEQ ID NO: 35506 - RNA, 21 nt, Artificial Sequence
  Synthetic
uguacaaagaccuuuuaguga

SEQ ID NO: 35507 - RNA, 24 nt, Artificial Sequence
  Synthetic
agguguacaaagaccuuuuaguga

SEQ ID NO: 35508 - RNA, 18 nt, Artificial Sequence
  Synthetic
ucaucccagcagacguga

SEQ ID NO: 35509 - RNA, 19 nt, Artificial Sequence
  Synthetic
cucaucccagcagacguga

SEQ ID NO: 35510 - RNA, 20 nt, Artificial Sequence
  Synthetic
ucucaucccagcagacguga

SEQ ID NO: 35511 - RNA, 21 nt, Artificial Sequence
  Synthetic
cucucaucccagcagacguga

SEQ ID NO: 35512 - RNA, 22 nt, Artificial Sequence
  Synthetic
ucucucaucccagcagacguga

SEQ ID NO: 35513 - RNA, 23 nt, Artificial Sequence
  Synthetic
cucucucaucccagcagacguga

SEQ ID NO: 35514 - RNA, 24 nt, Artificial Sequence
  Synthetic
ccucucucaucccagcagacguga

SEQ ID NO: 35515 - RNA, 18 nt, Artificial Sequence
  Synthetic
ccaggaaugauuacguga

SEQ ID NO: 35516 - RNA, 20 nt, Artificial Sequence
  Synthetic
ugccaggaaugauuacguga

SEQ ID NO: 35517 - RNA, 21 nt, Artificial Sequence
  Synthetic
augccaggaaugauuacguga

SEQ ID NO: 35518 - RNA, 22 nt, Artificial Sequence
  Synthetic
uaugccaggaaugauuacguga

SEQ ID NO: 35519 - RNA, 23 nt, Artificial Sequence
  Synthetic
auaugccaggaaugauuacguga

SEQ ID NO: 35520 - RNA, 24 nt, Artificial Sequence
  Synthetic
aauaugccaggaaugauuacguga

SEQ ID NO: 35521 - RNA, 18 nt, Artificial Sequence
  Synthetic
aucuaguugaagagguga

SEQ ID NO: 35522 - RNA, 19 nt, Artificial Sequence
  Synthetic
aaucuaguugaagagguga

SEQ ID NO: 35523 - RNA, 20 nt, Artificial Sequence
  Synthetic
uaaucuaguugaagagguga

SEQ ID NO: 35524 - RNA, 21 nt, Artificial Sequence
  Synthetic
auaaucuaguugaagagguga

SEQ ID NO: 35525 - RNA, 22 nt, Artificial Sequence
  Synthetic
aauaaucuaguugaagagguga

SEQ ID NO: 35526 - RNA, 24 nt, Artificial Sequence
  Synthetic
agaauaaucuaguugaagagguga

SEQ ID NO: 35527 - RNA, 18 nt, Artificial Sequence
  Synthetic
cagugggaccugagguga

SEQ ID NO: 35528 - RNA, 19 nt, Artificial Sequence
  Synthetic
ucagugggaccugagguga

SEQ ID NO: 35529 - RNA, 20 nt, Artificial Sequence
  Synthetic
uucagugggaccugagguga

SEQ ID NO: 35530 - RNA, 21 nt, Artificial Sequence
  Synthetic
cuucagugggaccugagguga

SEQ ID NO: 35531 - RNA, 22 nt, Artificial Sequence
  Synthetic
acuucagugggaccugagguga

SEQ ID NO: 35532 - RNA, 24 nt, Artificial Sequence
  Synthetic
ugacuucagugggaccugagguga

SEQ ID NO: 35533 - RNA, 18 nt, Artificial Sequence
  Synthetic
uacaucugcuuaggguga

SEQ ID NO: 35534 - RNA, 19 nt, Artificial Sequence
  Synthetic
uuacaucugcuuaggguga

SEQ ID NO: 35535 - RNA, 20 nt, Artificial Sequence
  Synthetic
cuuacaucugcuuaggguga

SEQ ID NO: 35536 - RNA, 22 nt, Artificial Sequence
  Synthetic
agcuuacaucugcuuaggguga

SEQ ID NO: 35537 - RNA, 23 nt, Artificial Sequence
  Synthetic
aagcuuacaucugcuuaggguga

SEQ ID NO: 35538 - RNA, 24 nt, Artificial Sequence
  Synthetic
uaagcuuacaucugcuuaggguga

SEQ ID NO: 35539 - RNA, 21 nt, Artificial Sequence
  Synthetic
uggaucaagaaauggggguga

SEQ ID NO: 35540 - RNA, 22 nt, Artificial Sequence
  Synthetic
cuggaucaagaaauggggguga

SEQ ID NO: 35541 - RNA, 23 nt, Artificial Sequence
  Synthetic
ccuggaucaagaaauggggguga

SEQ ID NO: 35542 - RNA, 24 nt, Artificial Sequence
  Synthetic
cccuggaucaagaaauggggguga

SEQ ID NO: 35543 - RNA, 18 nt, Artificial Sequence
  Synthetic
ucguuuuaauugggguga

SEQ ID NO: 35544 - RNA, 20 nt, Artificial Sequence
  Synthetic
ugucguuuuaauugggguga

SEQ ID NO: 35545 - RNA, 21 nt, Artificial Sequence
  Synthetic
augucguuuuaauugggguga

SEQ ID NO: 35546 - RNA, 22 nt, Artificial Sequence
  Synthetic
uaugucguuuuaauugggguga

SEQ ID NO: 35547 - RNA, 23 nt, Artificial Sequence
  Synthetic
auaugucguuuuaauugggguga

SEQ ID NO: 35548 - RNA, 21 nt, Artificial Sequence
  Synthetic
uaauaaugauguuugggguga

SEQ ID NO: 35549 - RNA, 22 nt, Artificial Sequence
  Synthetic
uuaauaaugauguuugggguga

SEQ ID NO: 35550 - RNA, 23 nt, Artificial Sequence
  Synthetic
uuuaauaaugauguuugggguga

SEQ ID NO: 35551 - RNA, 18 nt, Artificial Sequence
  Synthetic
uugagacgguguggguga

SEQ ID NO: 35552 - RNA, 20 nt, Artificial Sequence
  Synthetic
aguugagacgguguggguga

SEQ ID NO: 35553 - RNA, 21 nt, Artificial Sequence
  Synthetic
aaguugagacgguguggguga

SEQ ID NO: 35554 - RNA, 22 nt, Artificial Sequence
  Synthetic
uaaguugagacgguguggguga

SEQ ID NO: 35555 - RNA, 23 nt, Artificial Sequence
  Synthetic
auaaguugagacgguguggguga

SEQ ID NO: 35556 - RNA, 24 nt, Artificial Sequence
  Synthetic
uauaaguugagacgguguggguga

SEQ ID NO: 35557 - RNA, 18 nt, Artificial Sequence
  Synthetic
uccgguauacacugguga

SEQ ID NO: 35558 - RNA, 19 nt, Artificial Sequence
  Synthetic
cuccgguauacacugguga

SEQ ID NO: 35559 - RNA, 20 nt, Artificial Sequence
  Synthetic
ucuccgguauacacugguga

SEQ ID NO: 35560 - RNA, 21 nt, Artificial Sequence
  Synthetic
uucuccgguauacacugguga

SEQ ID NO: 35561 - RNA, 22 nt, Artificial Sequence
  Synthetic
cuucuccgguauacacugguga

SEQ ID NO: 35562 - RNA, 23 nt, Artificial Sequence
  Synthetic
acuucuccgguauacacugguga

SEQ ID NO: 35563 - RNA, 24 nt, Artificial Sequence
  Synthetic
aacuucuccgguauacacugguga

SEQ ID NO: 35564 - RNA, 19 nt, Artificial Sequence
  Synthetic
uguuaagagcaggugguga

SEQ ID NO: 35565 - RNA, 20 nt, Artificial Sequence
  Synthetic
uuguuaagagcaggugguga

SEQ ID NO: 35566 - RNA, 22 nt, Artificial Sequence
  Synthetic
aguuguuaagagcaggugguga

SEQ ID NO: 35567 - RNA, 23 nt, Artificial Sequence
  Synthetic
uaguuguuaagagcaggugguga

SEQ ID NO: 35568 - RNA, 24 nt, Artificial Sequence
  Synthetic
uuaguuguuaagagcaggugguga

SEQ ID NO: 35569 - RNA, 18 nt, Artificial Sequence
  Synthetic
uacacuauguggugguga

SEQ ID NO: 35570 - RNA, 19 nt, Artificial Sequence
  Synthetic
auacacuauguggugguga

SEQ ID NO: 35571 - RNA, 20 nt, Artificial Sequence
  Synthetic
cauacacuauguggugguga

SEQ ID NO: 35572 - RNA, 24 nt, Artificial Sequence
  Synthetic
agggcauacacuauguggugguga

SEQ ID NO: 35573 - RNA, 18 nt, Artificial Sequence
  Synthetic
agaagguccuuuugguga

SEQ ID NO: 35574 - RNA, 19 nt, Artificial Sequence
  Synthetic
aagaagguccuuuugguga

SEQ ID NO: 35575 - RNA, 20 nt, Artificial Sequence
  Synthetic
aaagaagguccuuuugguga

SEQ ID NO: 35576 - RNA, 21 nt, Artificial Sequence
  Synthetic
uaaagaagguccuuuugguga

SEQ ID NO: 35577 - RNA, 22 nt, Artificial Sequence
  Synthetic
auaaagaagguccuuuugguga

SEQ ID NO: 35578 - RNA, 23 nt, Artificial Sequence
  Synthetic
aauaaagaagguccuuuugguga

SEQ ID NO: 35579 - RNA, 24 nt, Artificial Sequence
  Synthetic
aaauaaagaagguccuuuugguga

SEQ ID NO: 35580 - RNA, 18 nt, Artificial Sequence
  Synthetic
uuaauguuagaaauguga

SEQ ID NO: 35581 - RNA, 19 nt, Artificial Sequence
  Synthetic
auuaauguuagaaauguga

SEQ ID NO: 35582 - RNA, 20 nt, Artificial Sequence
  Synthetic
aauuaauguuagaaauguga

SEQ ID NO: 35583 - RNA, 21 nt, Artificial Sequence
  Synthetic
aaauuaauguuagaaauguga

SEQ ID NO: 35584 - RNA, 22 nt, Artificial Sequence
  Synthetic
aaaauuaauguuagaaauguga

SEQ ID NO: 35585 - RNA, 24 nt, Artificial Sequence
  Synthetic
ugaaaauuaauguuagaaauguga

SEQ ID NO: 35586 - RNA, 18 nt, Artificial Sequence
  Synthetic
auacuacuagggauguga

SEQ ID NO: 35587 - RNA, 20 nt, Artificial Sequence
  Synthetic
ugauacuacuagggauguga

SEQ ID NO: 35588 - RNA, 21 nt, Artificial Sequence
  Synthetic
augauacuacuagggauguga

SEQ ID NO: 35589 - RNA, 22 nt, Artificial Sequence
  Synthetic
uaugauacuacuagggauguga

SEQ ID NO: 35590 - RNA, 24 nt, Artificial Sequence
  Synthetic
uguaugauacuacuagggauguga

SEQ ID NO: 35591 - RNA, 18 nt, Artificial Sequence
  Synthetic
augccugccuuuauguga

SEQ ID NO: 35592 - RNA, 20 nt, Artificial Sequence
  Synthetic
agaugccugccuuuauguga

SEQ ID NO: 35593 - RNA, 21 nt, Artificial Sequence
  Synthetic
cagaugccugccuuuauguga

SEQ ID NO: 35594 - RNA, 24 nt, Artificial Sequence
  Synthetic
aggcagaugccugccuuuauguga

SEQ ID NO: 35595 - RNA, 18 nt, Artificial Sequence
  Synthetic
uaaaaucuuauacuguga

SEQ ID NO: 35596 - RNA, 19 nt, Artificial Sequence
  Synthetic
auaaaaucuuauacuguga

SEQ ID NO: 35597 - RNA, 20 nt, Artificial Sequence
  Synthetic
aauaaaaucuuauacuguga

SEQ ID NO: 35598 - RNA, 21 nt, Artificial Sequence
  Synthetic
caauaaaaucuuauacuguga

SEQ ID NO: 35599 - RNA, 22 nt, Artificial Sequence
  Synthetic
ucaauaaaaucuuauacuguga

SEQ ID NO: 35600 - RNA, 24 nt, Artificial Sequence
  Synthetic
ugucaauaaaaucuuauacuguga

SEQ ID NO: 35601 - RNA, 18 nt, Artificial Sequence
  Synthetic
auuucccggaggcuguga

SEQ ID NO: 35602 - RNA, 19 nt, Artificial Sequence
  Synthetic
cauuucccggaggcuguga

SEQ ID NO: 35603 - RNA, 20 nt, Artificial Sequence
  Synthetic
ucauuucccggaggcuguga

SEQ ID NO: 35604 - RNA, 21 nt, Artificial Sequence
  Synthetic
uucauuucccggaggcuguga

SEQ ID NO: 35605 - RNA, 22 nt, Artificial Sequence
  Synthetic
auucauuucccggaggcuguga

SEQ ID NO: 35606 - RNA, 23 nt, Artificial Sequence
  Synthetic
uauucauuucccggaggcuguga

SEQ ID NO: 35607 - RNA, 24 nt, Artificial Sequence
  Synthetic
uuauucauuucccggaggcuguga

SEQ ID NO: 35608 - RNA, 20 nt, Artificial Sequence
  Synthetic
agguacaguaaaaucuguga

SEQ ID NO: 35609 - RNA, 21 nt, Artificial Sequence
  Synthetic
uagguacaguaaaaucuguga

SEQ ID NO: 35610 - RNA, 22 nt, Artificial Sequence
  Synthetic
auagguacaguaaaaucuguga

SEQ ID NO: 35611 - RNA, 24 nt, Artificial Sequence
  Synthetic
agauagguacaguaaaaucuguga

SEQ ID NO: 35612 - RNA, 19 nt, Artificial Sequence
  Synthetic
ugcuuuguguuuucuguga

SEQ ID NO: 35613 - RNA, 20 nt, Artificial Sequence
  Synthetic
cugcuuuguguuuucuguga

SEQ ID NO: 35614 - RNA, 21 nt, Artificial Sequence
  Synthetic
acugcuuuguguuuucuguga

SEQ ID NO: 35615 - RNA, 22 nt, Artificial Sequence
  Synthetic
cacugcuuuguguuuucuguga

SEQ ID NO: 35616 - RNA, 23 nt, Artificial Sequence
  Synthetic
acacugcuuuguguuuucuguga

SEQ ID NO: 35617 - RNA, 24 nt, Artificial Sequence
  Synthetic
uacacugcuuuguguuuucuguga

SEQ ID NO: 35618 - RNA, 18 nt, Artificial Sequence
  Synthetic
acuugaggaaaaguguga

SEQ ID NO: 35619 - RNA, 19 nt, Artificial Sequence
  Synthetic
uacuugaggaaaaguguga

SEQ ID NO: 35620 - RNA, 20 nt, Artificial Sequence
  Synthetic
cuacuugaggaaaaguguga

SEQ ID NO: 35621 - RNA, 21 nt, Artificial Sequence
  Synthetic
ccuacuugaggaaaaguguga

SEQ ID NO: 35622 - RNA, 23 nt, Artificial Sequence
  Synthetic
agccuacuugaggaaaaguguga

SEQ ID NO: 35623 - RNA, 24 nt, Artificial Sequence
  Synthetic
uagccuacuugaggaaaaguguga

SEQ ID NO: 35624 - RNA, 18 nt, Artificial Sequence
  Synthetic
agggccugguagguguga

SEQ ID NO: 35625 - RNA, 19 nt, Artificial Sequence
  Synthetic
cagggccugguagguguga

SEQ ID NO: 35626 - RNA, 22 nt, Artificial Sequence
  Synthetic
aggcagggccugguagguguga

SEQ ID NO: 35627 - RNA, 20 nt, Artificial Sequence
  Synthetic
cgggaauuuuugcauuguga

SEQ ID NO: 35628 - RNA, 21 nt, Artificial Sequence
  Synthetic
ucgggaauuuuugcauuguga

SEQ ID NO: 35629 - RNA, 22 nt, Artificial Sequence
  Synthetic
uucgggaauuuuugcauuguga

SEQ ID NO: 35630 - RNA, 23 nt, Artificial Sequence
  Synthetic
auucgggaauuuuugcauuguga

SEQ ID NO: 35631 - RNA, 24 nt, Artificial Sequence
  Synthetic
uauucgggaauuuuugcauuguga

SEQ ID NO: 35632 - RNA, 18 nt, Artificial Sequence
  Synthetic
uaaaauuacagauuguga

SEQ ID NO: 35633 - RNA, 23 nt, Artificial Sequence
  Synthetic
ugggguaaaauuacagauuguga

SEQ ID NO: 35634 - RNA, 24 nt, Artificial Sequence
  Synthetic
augggguaaaauuacagauuguga

SEQ ID NO: 35635 - RNA, 18 nt, Artificial Sequence
  Synthetic
auguuccuugacuuguga

SEQ ID NO: 35636 - RNA, 19 nt, Artificial Sequence
  Synthetic
aauguuccuugacuuguga

SEQ ID NO: 35637 - RNA, 21 nt, Artificial Sequence
  Synthetic
agaauguuccuugacuuguga

SEQ ID NO: 35638 - RNA, 22 nt, Artificial Sequence
  Synthetic
cagaauguuccuugacuuguga

SEQ ID NO: 35639 - RNA, 23 nt, Artificial Sequence
  Synthetic
acagaauguuccuugacuuguga

SEQ ID NO: 35640 - RNA, 24 nt, Artificial Sequence
  Synthetic
uacagaauguuccuugacuuguga

SEQ ID NO: 35641 - RNA, 18 nt, Artificial Sequence
  Synthetic
aucucccauggcuuguga

SEQ ID NO: 35642 - RNA, 19 nt, Artificial Sequence
  Synthetic
uaucucccauggcuuguga

SEQ ID NO: 35643 - RNA, 20 nt, Artificial Sequence
  Synthetic
auaucucccauggcuuguga

SEQ ID NO: 35644 - RNA, 22 nt, Artificial Sequence
  Synthetic
agauaucucccauggcuuguga

SEQ ID NO: 35645 - RNA, 23 nt, Artificial Sequence
  Synthetic
uagauaucucccauggcuuguga

SEQ ID NO: 35646 - RNA, 24 nt, Artificial Sequence
  Synthetic
auagauaucucccauggcuuguga

SEQ ID NO: 35647 - RNA, 21 nt, Artificial Sequence
  Synthetic
aggguaauauuuaaguuguga

SEQ ID NO: 35648 - RNA, 22 nt, Artificial Sequence
  Synthetic
aaggguaauauuuaaguuguga

SEQ ID NO: 35649 - RNA, 23 nt, Artificial Sequence
  Synthetic
caaggguaauauuuaaguuguga

SEQ ID NO: 35650 - RNA, 24 nt, Artificial Sequence
  Synthetic
ucaaggguaauauuuaaguuguga

SEQ ID NO: 35651 - RNA, 18 nt, Artificial Sequence
  Synthetic
cagcuuuguggguuguga

SEQ ID NO: 35652 - RNA, 20 nt, Artificial Sequence
  Synthetic
agcagcuuuguggguuguga

SEQ ID NO: 35653 - RNA, 21 nt, Artificial Sequence
  Synthetic
uagcagcuuuguggguuguga

SEQ ID NO: 35654 - RNA, 22 nt, Artificial Sequence
  Synthetic
auagcagcuuuguggguuguga

SEQ ID NO: 35655 - RNA, 23 nt, Artificial Sequence
  Synthetic
aauagcagcuuuguggguuguga

SEQ ID NO: 35656 - RNA, 24 nt, Artificial Sequence
  Synthetic
caauagcagcuuuguggguuguga

SEQ ID NO: 35657 - RNA, 18 nt, Artificial Sequence
  Synthetic
uguucuuuacauuuguga

SEQ ID NO: 35658 - RNA, 19 nt, Artificial Sequence
  Synthetic
cuguucuuuacauuuguga

SEQ ID NO: 35659 - RNA, 20 nt, Artificial Sequence
  Synthetic
ucuguucuuuacauuuguga

SEQ ID NO: 35660 - RNA, 21 nt, Artificial Sequence
  Synthetic
aucuguucuuuacauuuguga

SEQ ID NO: 35661 - RNA, 22 nt, Artificial Sequence
  Synthetic
aaucuguucuuuacauuuguga

SEQ ID NO: 35662 - RNA, 23 nt, Artificial Sequence
  Synthetic
aaaucuguucuuuacauuuguga

SEQ ID NO: 35663 - RNA, 24 nt, Artificial Sequence
  Synthetic
caaaucuguucuuuacauuuguga

SEQ ID NO: 35664 - RNA, 21 nt, Artificial Sequence
  Synthetic
aauucuuuauucauuuuguga

SEQ ID NO: 35665 - RNA, 23 nt, Artificial Sequence
  Synthetic
ugaauucuuuauucauuuuguga

SEQ ID NO: 35666 - RNA, 24 nt, Artificial Sequence
  Synthetic
uugaauucuuuauucauuuuguga

SEQ ID NO: 35667 - RNA, 21 nt, Artificial Sequence
  Synthetic
ucacuaaaaaugaaaaauuga

SEQ ID NO: 35668 - RNA, 22 nt, Artificial Sequence
  Synthetic
uucacuaaaaaugaaaaauuga

SEQ ID NO: 35669 - RNA, 23 nt, Artificial Sequence
  Synthetic
cuucacuaaaaaugaaaaauuga

SEQ ID NO: 35670 - RNA, 24 nt, Artificial Sequence
  Synthetic
ucuucacuaaaaaugaaaaauuga

SEQ ID NO: 35671 - RNA, 18 nt, Artificial Sequence
  Synthetic
cuaugaugcagaaauuga

SEQ ID NO: 35672 - RNA, 19 nt, Artificial Sequence
  Synthetic
ucuaugaugcagaaauuga

SEQ ID NO: 35673 - RNA, 20 nt, Artificial Sequence
  Synthetic
uucuaugaugcagaaauuga

SEQ ID NO: 35674 - RNA, 21 nt, Artificial Sequence
  Synthetic
auucuaugaugcagaaauuga

SEQ ID NO: 35675 - RNA, 22 nt, Artificial Sequence
  Synthetic
aauucuaugaugcagaaauuga

SEQ ID NO: 35676 - RNA, 23 nt, Artificial Sequence
  Synthetic
aaauucuaugaugcagaaauuga

SEQ ID NO: 35677 - RNA, 24 nt, Artificial Sequence
  Synthetic
caaauucuaugaugcagaaauuga

SEQ ID NO: 35678 - RNA, 18 nt, Artificial Sequence
  Synthetic
ucucaaaguguaaauuga

SEQ ID NO: 35679 - RNA, 19 nt, Artificial Sequence
  Synthetic
uucucaaaguguaaauuga

SEQ ID NO: 35680 - RNA, 20 nt, Artificial Sequence
  Synthetic
auucucaaaguguaaauuga

SEQ ID NO: 35681 - RNA, 21 nt, Artificial Sequence
  Synthetic
aauucucaaaguguaaauuga

SEQ ID NO: 35682 - RNA, 22 nt, Artificial Sequence
  Synthetic
aaauucucaaaguguaaauuga

SEQ ID NO: 35683 - RNA, 23 nt, Artificial Sequence
  Synthetic
aaaauucucaaaguguaaauuga

SEQ ID NO: 35684 - RNA, 18 nt, Artificial Sequence
  Synthetic
aacagugggagcaauuga

SEQ ID NO: 35685 - RNA, 19 nt, Artificial Sequence
  Synthetic
aaacagugggagcaauuga

SEQ ID NO: 35686 - RNA, 20 nt, Artificial Sequence
  Synthetic
aaaacagugggagcaauuga

SEQ ID NO: 35687 - RNA, 22 nt, Artificial Sequence
  Synthetic
ugaaaacagugggagcaauuga

SEQ ID NO: 35688 - RNA, 23 nt, Artificial Sequence
  Synthetic
augaaaacagugggagcaauuga

SEQ ID NO: 35689 - RNA, 24 nt, Artificial Sequence
  Synthetic
aaugaaaacagugggagcaauuga

SEQ ID NO: 35690 - RNA, 19 nt, Artificial Sequence
  Synthetic
agaaaugcauacuaauuga

SEQ ID NO: 35691 - RNA, 20 nt, Artificial Sequence
  Synthetic
aagaaaugcauacuaauuga

SEQ ID NO: 35692 - RNA, 21 nt, Artificial Sequence
  Synthetic
aaagaaaugcauacuaauuga

SEQ ID NO: 35693 - RNA, 22 nt, Artificial Sequence
  Synthetic
caaagaaaugcauacuaauuga

SEQ ID NO: 35694 - RNA, 23 nt, Artificial Sequence
  Synthetic
acaaagaaaugcauacuaauuga

SEQ ID NO: 35695 - RNA, 24 nt, Artificial Sequence
  Synthetic
uacaaagaaaugcauacuaauuga

SEQ ID NO: 35696 - RNA, 19 nt, Artificial Sequence
  Synthetic
ugcauaaagaggucauuga

SEQ ID NO: 35697 - RNA, 20 nt, Artificial Sequence
  Synthetic
cugcauaaagaggucauuga

SEQ ID NO: 35698 - RNA, 21 nt, Artificial Sequence
  Synthetic
acugcauaaagaggucauuga

SEQ ID NO: 35699 - RNA, 24 nt, Artificial Sequence
  Synthetic
aggacugcauaaagaggucauuga

SEQ ID NO: 35700 - RNA, 18 nt, Artificial Sequence
  Synthetic
uuagccauguuucauuga

SEQ ID NO: 35701 - RNA, 20 nt, Artificial Sequence
  Synthetic
uguuagccauguuucauuga

SEQ ID NO: 35702 - RNA, 21 nt, Artificial Sequence
  Synthetic
uuguuagccauguuucauuga

SEQ ID NO: 35703 - RNA, 22 nt, Artificial Sequence
  Synthetic
uuuguuagccauguuucauuga

SEQ ID NO: 35704 - RNA, 23 nt, Artificial Sequence
  Synthetic
cuuuguuagccauguuucauuga

SEQ ID NO: 35705 - RNA, 24 nt, Artificial Sequence
  Synthetic
ucuuuguuagccauguuucauuga

SEQ ID NO: 35706 - RNA, 22 nt, Artificial Sequence
  Synthetic
uggauggucuuuguuucauuga

SEQ ID NO: 35707 - RNA, 23 nt, Artificial Sequence
  Synthetic
auggauggucuuuguuucauuga

SEQ ID NO: 35708 - RNA, 24 nt, Artificial Sequence
  Synthetic
aauggauggucuuuguuucauuga

SEQ ID NO: 35709 - RNA, 18 nt, Artificial Sequence
  Synthetic
aaacuguauucagauuga

SEQ ID NO: 35710 - RNA, 19 nt, Artificial Sequence
  Synthetic
caaacuguauucagauuga

SEQ ID NO: 35711 - RNA, 20 nt, Artificial Sequence
  Synthetic
ccaaacuguauucagauuga

SEQ ID NO: 35712 - RNA, 21 nt, Artificial Sequence
  Synthetic
cccaaacuguauucagauuga

SEQ ID NO: 35713 - RNA, 22 nt, Artificial Sequence
  Synthetic
acccaaacuguauucagauuga

SEQ ID NO: 35714 - RNA, 23 nt, Artificial Sequence
  Synthetic
uacccaaacuguauucagauuga

SEQ ID NO: 35715 - RNA, 24 nt, Artificial Sequence
  Synthetic
uuacccaaacuguauucagauuga

SEQ ID NO: 35716 - RNA, 18 nt, Artificial Sequence
  Synthetic
uuaacauucagagauuga

SEQ ID NO: 35717 - RNA, 19 nt, Artificial Sequence
  Synthetic
auuaacauucagagauuga

SEQ ID NO: 35718 - RNA, 20 nt, Artificial Sequence
  Synthetic
aauuaacauucagagauuga

SEQ ID NO: 35719 - RNA, 21 nt, Artificial Sequence
  Synthetic
aaauuaacauucagagauuga

SEQ ID NO: 35720 - RNA, 23 nt, Artificial Sequence
  Synthetic
ugaaauuaacauucagagauuga

SEQ ID NO: 35721 - RNA, 24 nt, Artificial Sequence
  Synthetic
uugaaauuaacauucagagauuga

SEQ ID NO: 35722 - RNA, 18 nt, Artificial Sequence
  Synthetic
cuacuagguaaauauuga

SEQ ID NO: 35723 - RNA, 20 nt, Artificial Sequence
  Synthetic
agcuacuagguaaauauuga

SEQ ID NO: 35724 - RNA, 21 nt, Artificial Sequence
  Synthetic
uagcuacuagguaaauauuga

SEQ ID NO: 35725 - RNA, 22 nt, Artificial Sequence
  Synthetic
auagcuacuagguaaauauuga

SEQ ID NO: 35726 - RNA, 23 nt, Artificial Sequence
  Synthetic
aauagcuacuagguaaauauuga

SEQ ID NO: 35727 - RNA, 24 nt, Artificial Sequence
  Synthetic
aaauagcuacuagguaaauauuga

SEQ ID NO: 35728 - RNA, 18 nt, Artificial Sequence
  Synthetic
ucuuauuuuaaauauuga

SEQ ID NO: 35729 - RNA, 19 nt, Artificial Sequence
  Synthetic
aucuuauuuuaaauauuga

SEQ ID NO: 35730 - RNA, 20 nt, Artificial Sequence
  Synthetic
caucuuauuuuaaauauuga

SEQ ID NO: 35731 - RNA, 21 nt, Artificial Sequence
  Synthetic
ucaucuuauuuuaaauauuga

SEQ ID NO: 35732 - RNA, 23 nt, Artificial Sequence
  Synthetic
ugucaucuuauuuuaaauauuga

SEQ ID NO: 35733 - RNA, 24 nt, Artificial Sequence
  Synthetic
cugucaucuuauuuuaaauauuga

SEQ ID NO: 35734 - RNA, 18 nt, Artificial Sequence
  Synthetic
ucuuccaccauauauuga

SEQ ID NO: 35735 - RNA, 19 nt, Artificial Sequence
  Synthetic
uucuuccaccauauauuga

SEQ ID NO: 35736 - RNA, 20 nt, Artificial Sequence
  Synthetic
cuucuuccaccauauauuga

SEQ ID NO: 35737 - RNA, 22 nt, Artificial Sequence
  Synthetic
ugcuucuuccaccauauauuga

SEQ ID NO: 35738 - RNA, 23 nt, Artificial Sequence
  Synthetic
uugcuucuuccaccauauauuga

SEQ ID NO: 35739 - RNA, 24 nt, Artificial Sequence
  Synthetic
uuugcuucuuccaccauauauuga

SEQ ID NO: 35740 - RNA, 18 nt, Artificial Sequence
  Synthetic
uguuagcucauauauuga

SEQ ID NO: 35741 - RNA, 19 nt, Artificial Sequence
  Synthetic
auguuagcucauauauuga

SEQ ID NO: 35742 - RNA, 20 nt, Artificial Sequence
  Synthetic
aauguuagcucauauauuga

SEQ ID NO: 35743 - RNA, 21 nt, Artificial Sequence
  Synthetic
uaauguuagcucauauauuga

SEQ ID NO: 35744 - RNA, 22 nt, Artificial Sequence
  Synthetic
auaauguuagcucauauauuga

SEQ ID NO: 35745 - RNA, 23 nt, Artificial Sequence
  Synthetic
aauaauguuagcucauauauuga

SEQ ID NO: 35746 - RNA, 24 nt, Artificial Sequence
  Synthetic
aaauaauguuagcucauauauuga

SEQ ID NO: 35747 - RNA, 19 nt, Artificial Sequence
  Synthetic
aggaagguguauauauuga

SEQ ID NO: 35748 - RNA, 21 nt, Artificial Sequence
  Synthetic
ugaggaagguguauauauuga

SEQ ID NO: 35749 - RNA, 22 nt, Artificial Sequence
  Synthetic
augaggaagguguauauauuga

SEQ ID NO: 35750 - RNA, 23 nt, Artificial Sequence
  Synthetic
caugaggaagguguauauauuga

SEQ ID NO: 35751 - RNA, 24 nt, Artificial Sequence
  Synthetic
acaugaggaagguguauauauuga

SEQ ID NO: 35752 - RNA, 18 nt, Artificial Sequence
  Synthetic
cuaaauauagcguauuga

SEQ ID NO: 35753 - RNA, 19 nt, Artificial Sequence
  Synthetic
ccuaaauauagcguauuga

SEQ ID NO: 35754 - RNA, 20 nt, Artificial Sequence
  Synthetic
accuaaauauagcguauuga

SEQ ID NO: 35755 - RNA, 21 nt, Artificial Sequence
  Synthetic
uaccuaaauauagcguauuga

SEQ ID NO: 35756 - RNA, 22 nt, Artificial Sequence
  Synthetic
auaccuaaauauagcguauuga

SEQ ID NO: 35757 - RNA, 20 nt, Artificial Sequence
  Synthetic
agggauagauggauuauuga

SEQ ID NO: 35758 - RNA, 22 nt, Artificial Sequence
  Synthetic
agagggauagauggauuauuga

SEQ ID NO: 35759 - RNA, 23 nt, Artificial Sequence
  Synthetic
cagagggauagauggauuauuga

SEQ ID NO: 35760 - RNA, 24 nt, Artificial Sequence
  Synthetic
acagagggauagauggauuauuga

SEQ ID NO: 35761 - RNA, 18 nt, Artificial Sequence
  Synthetic
uaagugcaguuuuauuga

SEQ ID NO: 35762 - RNA, 20 nt, Artificial Sequence
  Synthetic
uguaagugcaguuuuauuga

SEQ ID NO: 35763 - RNA, 21 nt, Artificial Sequence
  Synthetic
uuguaagugcaguuuuauuga

SEQ ID NO: 35764 - RNA, 22 nt, Artificial Sequence
  Synthetic
uuuguaagugcaguuuuauuga

SEQ ID NO: 35765 - RNA, 23 nt, Artificial Sequence
  Synthetic
uuuuguaagugcaguuuuauuga

SEQ ID NO: 35766 - RNA, 24 nt, Artificial Sequence
  Synthetic
uuuuuguaagugcaguuuuauuga

SEQ ID NO: 35767 - RNA, 19 nt, Artificial Sequence
  Synthetic
ugcaguuuagcauacuuga

SEQ ID NO: 35768 - RNA, 20 nt, Artificial Sequence
  Synthetic
cugcaguuuagcauacuuga

SEQ ID NO: 35769 - RNA, 21 nt, Artificial Sequence
  Synthetic
acugcaguuuagcauacuuga

SEQ ID NO: 35770 - RNA, 22 nt, Artificial Sequence
  Synthetic
aacugcaguuuagcauacuuga

SEQ ID NO: 35771 - RNA, 23 nt, Artificial Sequence
  Synthetic
aaacugcaguuuagcauacuuga

SEQ ID NO: 35772 - RNA, 24 nt, Artificial Sequence
  Synthetic
aaaacugcaguuuagcauacuuga

SEQ ID NO: 35773 - RNA, 18 nt, Artificial Sequence
  Synthetic
ugggacauaauuacuuga

SEQ ID NO: 35774 - RNA, 19 nt, Artificial Sequence
  Synthetic
augggacauaauuacuuga

SEQ ID NO: 35775 - RNA, 20 nt, Artificial Sequence
  Synthetic
aaugggacauaauuacuuga

SEQ ID NO: 35776 - RNA, 21 nt, Artificial Sequence
  Synthetic
aaaugggacauaauuacuuga

SEQ ID NO: 35777 - RNA, 22 nt, Artificial Sequence
  Synthetic
uaaaugggacauaauuacuuga

SEQ ID NO: 35778 - RNA, 23 nt, Artificial Sequence
  Synthetic
uuaaaugggacauaauuacuuga

SEQ ID NO: 35779 - RNA, 24 nt, Artificial Sequence
  Synthetic
uuuaaaugggacauaauuacuuga

SEQ ID NO: 35780 - RNA, 18 nt, Artificial Sequence
  Synthetic
uuaaguuaugcaccuuga

SEQ ID NO: 35781 - RNA, 19 nt, Artificial Sequence
  Synthetic
auuaaguuaugcaccuuga

SEQ ID NO: 35782 - RNA, 20 nt, Artificial Sequence
  Synthetic
uauuaaguuaugcaccuuga

SEQ ID NO: 35783 - RNA, 21 nt, Artificial Sequence
  Synthetic
uuauuaaguuaugcaccuuga

SEQ ID NO: 35784 - RNA, 22 nt, Artificial Sequence
  Synthetic
cuuauuaaguuaugcaccuuga

SEQ ID NO: 35785 - RNA, 23 nt, Artificial Sequence
  Synthetic
acuuauuaaguuaugcaccuuga

SEQ ID NO: 35786 - RNA, 18 nt, Artificial Sequence
  Synthetic
uaguuuaggaaugcuuga

SEQ ID NO: 35787 - RNA, 19 nt, Artificial Sequence
  Synthetic
auaguuuaggaaugcuuga

SEQ ID NO: 35788 - RNA, 20 nt, Artificial Sequence
  Synthetic
uauaguuuaggaaugcuuga

SEQ ID NO: 35789 - RNA, 21 nt, Artificial Sequence
  Synthetic
auauaguuuaggaaugcuuga

SEQ ID NO: 35790 - RNA, 22 nt, Artificial Sequence
  Synthetic
cauauaguuuaggaaugcuuga

SEQ ID NO: 35791 - RNA, 23 nt, Artificial Sequence
  Synthetic
ccauauaguuuaggaaugcuuga

SEQ ID NO: 35792 - RNA, 24 nt, Artificial Sequence
  Synthetic
cccauauaguuuaggaaugcuuga

SEQ ID NO: 35793 - RNA, 18 nt, Artificial Sequence
  Synthetic
agucacagugaugcuuga

SEQ ID NO: 35794 - RNA, 19 nt, Artificial Sequence
  Synthetic
aagucacagugaugcuuga

SEQ ID NO: 35795 - RNA, 21 nt, Artificial Sequence
  Synthetic
agaagucacagugaugcuuga

SEQ ID NO: 35796 - RNA, 22 nt, Artificial Sequence
  Synthetic
cagaagucacagugaugcuuga

SEQ ID NO: 35797 - RNA, 23 nt, Artificial Sequence
  Synthetic
ucagaagucacagugaugcuuga

SEQ ID NO: 35798 - RNA, 24 nt, Artificial Sequence
  Synthetic
cucagaagucacagugaugcuuga

SEQ ID NO: 35799 - RNA, 18 nt, Artificial Sequence
  Synthetic
agcuuagggauaucuuga

SEQ ID NO: 35800 - RNA, 19 nt, Artificial Sequence
  Synthetic
uagcuuagggauaucuuga

SEQ ID NO: 35801 - RNA, 21 nt, Artificial Sequence
  Synthetic
uguagcuuagggauaucuuga

SEQ ID NO: 35802 - RNA, 22 nt, Artificial Sequence
  Synthetic
cuguagcuuagggauaucuuga

SEQ ID NO: 35803 - RNA, 23 nt, Artificial Sequence
  Synthetic
acuguagcuuagggauaucuuga

SEQ ID NO: 35804 - RNA, 24 nt, Artificial Sequence
  Synthetic
uacuguagcuuagggauaucuuga

SEQ ID NO: 35805 - RNA, 18 nt, Artificial Sequence
  Synthetic
caaaauaaucaaaguuga

SEQ ID NO: 35806 - RNA, 21 nt, Artificial Sequence
  Synthetic
cggcaaaauaaucaaaguuga

SEQ ID NO: 35807 - RNA, 22 nt, Artificial Sequence
  Synthetic
ccggcaaaauaaucaaaguuga

SEQ ID NO: 35808 - RNA, 23 nt, Artificial Sequence
  Synthetic
accggcaaaauaaucaaaguuga

SEQ ID NO: 35809 - RNA, 24 nt, Artificial Sequence
  Synthetic
uaccggcaaaauaaucaaaguuga

SEQ ID NO: 35810 - RNA, 18 nt, Artificial Sequence
  Synthetic
auggacaggcuaaguuga

SEQ ID NO: 35811 - RNA, 19 nt, Artificial Sequence
  Synthetic
uauggacaggcuaaguuga

SEQ ID NO: 35812 - RNA, 20 nt, Artificial Sequence
  Synthetic
cuauggacaggcuaaguuga

SEQ ID NO: 35813 - RNA, 21 nt, Artificial Sequence
  Synthetic
ucuauggacaggcuaaguuga

SEQ ID NO: 35814 - RNA, 23 nt, Artificial Sequence
  Synthetic
agucuauggacaggcuaaguuga

SEQ ID NO: 35815 - RNA, 24 nt, Artificial Sequence
  Synthetic
cagucuauggacaggcuaaguuga

SEQ ID NO: 35816 - RNA, 18 nt, Artificial Sequence
  Synthetic
uccuuuuauucuaguuga

SEQ ID NO: 35817 - RNA, 19 nt, Artificial Sequence
  Synthetic
uuccuuuuauucuaguuga

SEQ ID NO: 35818 - RNA, 20 nt, Artificial Sequence
  Synthetic
uuuccuuuuauucuaguuga

SEQ ID NO: 35819 - RNA, 21 nt, Artificial Sequence
  Synthetic
uuuuccuuuuauucuaguuga

SEQ ID NO: 35820 - RNA, 22 nt, Artificial Sequence
  Synthetic
uuuuuccuuuuauucuaguuga

SEQ ID NO: 35821 - RNA, 23 nt, Artificial Sequence
  Synthetic
auuuuuccuuuuauucuaguuga

SEQ ID NO: 35822 - RNA, 24 nt, Artificial Sequence
  Synthetic
uauuuuuccuuuuauucuaguuga

SEQ ID NO: 35823 - RNA, 18 nt, Artificial Sequence
  Synthetic
uagggcucaguuaguuga

SEQ ID NO: 35824 - RNA, 19 nt, Artificial Sequence
  Synthetic
cuagggcucaguuaguuga

SEQ ID NO: 35825 - RNA, 20 nt, Artificial Sequence
  Synthetic
ccuagggcucaguuaguuga

SEQ ID NO: 35826 - RNA, 21 nt, Artificial Sequence
  Synthetic
uccuagggcucaguuaguuga

SEQ ID NO: 35827 - RNA, 23 nt, Artificial Sequence
  Synthetic
aguccuagggcucaguuaguuga

SEQ ID NO: 35828 - RNA, 24 nt, Artificial Sequence
  Synthetic
aaguccuagggcucaguuaguuga

SEQ ID NO: 35829 - RNA, 18 nt, Artificial Sequence
  Synthetic
ucuuuuauuuuccguuga

SEQ ID NO: 35830 - RNA, 19 nt, Artificial Sequence
  Synthetic
cucuuuuauuuuccguuga

SEQ ID NO: 35831 - RNA, 20 nt, Artificial Sequence
  Synthetic
ccucuuuuauuuuccguuga

SEQ ID NO: 35832 - RNA, 21 nt, Artificial Sequence
  Synthetic
accucuuuuauuuuccguuga

SEQ ID NO: 35833 - RNA, 22 nt, Artificial Sequence
  Synthetic
caccucuuuuauuuuccguuga

SEQ ID NO: 35834 - RNA, 23 nt, Artificial Sequence
  Synthetic
ccaccucuuuuauuuuccguuga

SEQ ID NO: 35835 - RNA, 24 nt, Artificial Sequence
  Synthetic
accaccucuuuuauuuuccguuga

SEQ ID NO: 35836 - RNA, 18 nt, Artificial Sequence
  Synthetic
ucuuuguauacucguuga

SEQ ID NO: 35837 - RNA, 19 nt, Artificial Sequence
  Synthetic
aucuuuguauacucguuga

SEQ ID NO: 35838 - RNA, 21 nt, Artificial Sequence
  Synthetic
cgaucuuuguauacucguuga

SEQ ID NO: 35839 - RNA, 23 nt, Artificial Sequence
  Synthetic
cgcgaucuuuguauacucguuga

SEQ ID NO: 35840 - RNA, 24 nt, Artificial Sequence
  Synthetic
ccgcgaucuuuguauacucguuga

SEQ ID NO: 35841 - RNA, 18 nt, Artificial Sequence
  Synthetic
caauugacguaauguuga

SEQ ID NO: 35842 - RNA, 19 nt, Artificial Sequence
  Synthetic
ucaauugacguaauguuga

SEQ ID NO: 35843 - RNA, 20 nt, Artificial Sequence
  Synthetic
uucaauugacguaauguuga

SEQ ID NO: 35844 - RNA, 21 nt, Artificial Sequence
  Synthetic
auucaauugacguaauguuga

SEQ ID NO: 35845 - RNA, 22 nt, Artificial Sequence
  Synthetic
uauucaauugacguaauguuga

SEQ ID NO: 35846 - RNA, 23 nt, Artificial Sequence
  Synthetic
uuauucaauugacguaauguuga

SEQ ID NO: 35847 - RNA, 18 nt, Artificial Sequence
  Synthetic
ccuucuuucuucuguuga

SEQ ID NO: 35848 - RNA, 20 nt, Artificial Sequence
  Synthetic
ugccuucuuucuucuguuga

SEQ ID NO: 35849 - RNA, 21 nt, Artificial Sequence
  Synthetic
cugccuucuuucuucuguuga

SEQ ID NO: 35850 - RNA, 22 nt, Artificial Sequence
  Synthetic
ccugccuucuuucuucuguuga

SEQ ID NO: 35851 - RNA, 23 nt, Artificial Sequence
  Synthetic
uccugccuucuuucuucuguuga

SEQ ID NO: 35852 - RNA, 24 nt, Artificial Sequence
  Synthetic
auccugccuucuuucuucuguuga

SEQ ID NO: 35853 - RNA, 19 nt, Artificial Sequence
  Synthetic
ugaaagcagagauuguuga

SEQ ID NO: 35854 - RNA, 20 nt, Artificial Sequence
  Synthetic
uugaaagcagagauuguuga

SEQ ID NO: 35855 - RNA, 22 nt, Artificial Sequence
  Synthetic
uguugaaagcagagauuguuga

SEQ ID NO: 35856 - RNA, 23 nt, Artificial Sequence
  Synthetic
uuguugaaagcagagauuguuga

SEQ ID NO: 35857 - RNA, 24 nt, Artificial Sequence
  Synthetic
cuuguugaaagcagagauuguuga

SEQ ID NO: 35858 - RNA, 18 nt, Artificial Sequence
  Synthetic
uugcuaauggauuguuga

SEQ ID NO: 35859 - RNA, 19 nt, Artificial Sequence
  Synthetic
uuugcuaauggauuguuga

SEQ ID NO: 35860 - RNA, 20 nt, Artificial Sequence
  Synthetic
auuugcuaauggauuguuga

SEQ ID NO: 35861 - RNA, 22 nt, Artificial Sequence
  Synthetic
ugauuugcuaauggauuguuga

SEQ ID NO: 35862 - RNA, 23 nt, Artificial Sequence
  Synthetic
augauuugcuaauggauuguuga

SEQ ID NO: 35863 - RNA, 24 nt, Artificial Sequence
  Synthetic
aaugauuugcuaauggauuguuga

SEQ ID NO: 35864 - RNA, 19 nt, Artificial Sequence
  Synthetic
ugagaugcauaaaauuuga

SEQ ID NO: 35865 - RNA, 20 nt, Artificial Sequence
  Synthetic
uugagaugcauaaaauuuga

SEQ ID NO: 35866 - RNA, 21 nt, Artificial Sequence
  Synthetic
cuugagaugcauaaaauuuga

SEQ ID NO: 35867 - RNA, 23 nt, Artificial Sequence
  Synthetic
ugcuugagaugcauaaaauuuga

SEQ ID NO: 35868 - RNA, 22 nt, Artificial Sequence
  Synthetic
cgagaauuguuuuauaauuuga

SEQ ID NO: 35869 - RNA, 24 nt, Artificial Sequence
  Synthetic
agcgagaauuguuuuauaauuuga

SEQ ID NO: 35870 - RNA, 18 nt, Artificial Sequence
  Synthetic
ugugaugaugacauuuga

SEQ ID NO: 35871 - RNA, 19 nt, Artificial Sequence
  Synthetic
augugaugaugacauuuga

SEQ ID NO: 35872 - RNA, 20 nt, Artificial Sequence
  Synthetic
uaugugaugaugacauuuga

SEQ ID NO: 35873 - RNA, 21 nt, Artificial Sequence
  Synthetic
auaugugaugaugacauuuga

SEQ ID NO: 35874 - RNA, 22 nt, Artificial Sequence
  Synthetic
uauaugugaugaugacauuuga

SEQ ID NO: 35875 - RNA, 23 nt, Artificial Sequence
  Synthetic
uuauaugugaugaugacauuuga

SEQ ID NO: 35876 - RNA, 24 nt, Artificial Sequence
  Synthetic
uuuauaugugaugaugacauuuga

SEQ ID NO: 35877 - RNA, 19 nt, Artificial Sequence
  Synthetic
aguauucagguugauuuga

SEQ ID NO: 35878 - RNA, 20 nt, Artificial Sequence
  Synthetic
aaguauucagguugauuuga

SEQ ID NO: 35879 - RNA, 22 nt, Artificial Sequence
  Synthetic
ugaaguauucagguugauuuga

SEQ ID NO: 35880 - RNA, 23 nt, Artificial Sequence
  Synthetic
augaaguauucagguugauuuga

SEQ ID NO: 35881 - RNA, 18 nt, Artificial Sequence
  Synthetic
caggaccuuuuuauuuga

SEQ ID NO: 35882 - RNA, 19 nt, Artificial Sequence
  Synthetic
acaggaccuuuuuauuuga

SEQ ID NO: 35883 - RNA, 21 nt, Artificial Sequence
  Synthetic
agacaggaccuuuuuauuuga

SEQ ID NO: 35884 - RNA, 22 nt, Artificial Sequence
  Synthetic
aagacaggaccuuuuuauuuga

SEQ ID NO: 35885 - RNA, 23 nt, Artificial Sequence
  Synthetic
caagacaggaccuuuuuauuuga

SEQ ID NO: 35886 - RNA, 24 nt, Artificial Sequence
  Synthetic
acaagacaggaccuuuuuauuuga

SEQ ID NO: 35887 - RNA, 18 nt, Artificial Sequence
  Synthetic
caccugcauaaacuuuga

SEQ ID NO: 35888 - RNA, 19 nt, Artificial Sequence
  Synthetic
ucaccugcauaaacuuuga

SEQ ID NO: 35889 - RNA, 20 nt, Artificial Sequence
  Synthetic
cucaccugcauaaacuuuga

SEQ ID NO: 35890 - RNA, 22 nt, Artificial Sequence
  Synthetic
ugcucaccugcauaaacuuuga

SEQ ID NO: 35891 - RNA, 18 nt, Artificial Sequence
  Synthetic
acguaaacaaggcuuuga

SEQ ID NO: 35892 - RNA, 19 nt, Artificial Sequence
  Synthetic
cacguaaacaaggcuuuga

SEQ ID NO: 35893 - RNA, 22 nt, Artificial Sequence
  Synthetic
uggcacguaaacaaggcuuuga

SEQ ID NO: 35894 - RNA, 23 nt, Artificial Sequence
  Synthetic
auggcacguaaacaaggcuuuga

SEQ ID NO: 35895 - RNA, 24 nt, Artificial Sequence
  Synthetic
aauggcacguaaacaaggcuuuga

SEQ ID NO: 35896 - RNA, 18 nt, Artificial Sequence
  Synthetic
cauccaccugaucuuuga

SEQ ID NO: 35897 - RNA, 19 nt, Artificial Sequence
  Synthetic
ucauccaccugaucuuuga

SEQ ID NO: 35898 - RNA, 20 nt, Artificial Sequence
  Synthetic
uucauccaccugaucuuuga

SEQ ID NO: 35899 - RNA, 21 nt, Artificial Sequence
  Synthetic
cuucauccaccugaucuuuga

SEQ ID NO: 35900 - RNA, 22 nt, Artificial Sequence
  Synthetic
ccuucauccaccugaucuuuga

SEQ ID NO: 35901 - RNA, 23 nt, Artificial Sequence
  Synthetic
uccuucauccaccugaucuuuga

SEQ ID NO: 35902 - RNA, 21 nt, Artificial Sequence
  Synthetic
aauacaacaaauaaauuuuga

SEQ ID NO: 35903 - RNA, 22 nt, Artificial Sequence
  Synthetic
aaauacaacaaauaaauuuuga

SEQ ID NO: 35904 - RNA, 23 nt, Artificial Sequence
  Synthetic
aaaauacaacaaauaaauuuuga

SEQ ID NO: 35905 - RNA, 18 nt, Artificial Sequence
  Synthetic
ccuugucagacauuuuga

SEQ ID NO: 35906 - RNA, 19 nt, Artificial Sequence
  Synthetic
accuugucagacauuuuga

SEQ ID NO: 35907 - RNA, 20 nt, Artificial Sequence
  Synthetic
uaccuugucagacauuuuga

SEQ ID NO: 35908 - RNA, 21 nt, Artificial Sequence
  Synthetic
auaccuugucagacauuuuga

SEQ ID NO: 35909 - RNA, 22 nt, Artificial Sequence
  Synthetic
uauaccuugucagacauuuuga

SEQ ID NO: 35910 - RNA, 23 nt, Artificial Sequence
  Synthetic
uuauaccuugucagacauuuuga

SEQ ID NO: 35911 - RNA, 24 nt, Artificial Sequence
  Synthetic
uuuauaccuugucagacauuuuga

SEQ ID NO: 35912 - RNA, 18 nt, Artificial Sequence
  Synthetic
augggaaagugauuuuga

SEQ ID NO: 35913 - RNA, 19 nt, Artificial Sequence
  Synthetic
caugggaaagugauuuuga

SEQ ID NO: 35914 - RNA, 20 nt, Artificial Sequence
  Synthetic
ucaugggaaagugauuuuga

SEQ ID NO: 35915 - RNA, 22 nt, Artificial Sequence
  Synthetic
agucaugggaaagugauuuuga

SEQ ID NO: 35916 - RNA, 23 nt, Artificial Sequence
  Synthetic
aagucaugggaaagugauuuuga

SEQ ID NO: 35917 - RNA, 18 nt, Artificial Sequence
  Synthetic
ucuuagccauucuuuuga

SEQ ID NO: 35918 - RNA, 19 nt, Artificial Sequence
  Synthetic
aucuuagccauucuuuuga

SEQ ID NO: 35919 - RNA, 20 nt, Artificial Sequence
  Synthetic
caucuuagccauucuuuuga

SEQ ID NO: 35920 - RNA, 21 nt, Artificial Sequence
  Synthetic
ucaucuuagccauucuuuuga

SEQ ID NO: 35921 - RNA, 22 nt, Artificial Sequence
  Synthetic
cucaucuuagccauucuuuuga

SEQ ID NO: 35922 - RNA, 23 nt, Artificial Sequence
  Synthetic
ucucaucuuagccauucuuuuga

SEQ ID NO: 35923 - RNA, 24 nt, Artificial Sequence
  Synthetic
aucucaucuuagccauucuuuuga

SEQ ID NO: 35924 - RNA, 18 nt, Artificial Sequence
  Synthetic
aaucacuguuucuuuuga

SEQ ID NO: 35925 - RNA, 19 nt, Artificial Sequence
  Synthetic
aaaucacuguuucuuuuga

SEQ ID NO: 35926 - RNA, 20 nt, Artificial Sequence
  Synthetic
caaaucacuguuucuuuuga

SEQ ID NO: 35927 - RNA, 21 nt, Artificial Sequence
  Synthetic
ccaaaucacuguuucuuuuga

SEQ ID NO: 35928 - RNA, 22 nt, Artificial Sequence
  Synthetic
cccaaaucacuguuucuuuuga

SEQ ID NO: 35929 - RNA, 23 nt, Artificial Sequence
  Synthetic
acccaaaucacuguuucuuuuga

SEQ ID NO: 35930 - RNA, 24 nt, Artificial Sequence
  Synthetic
cacccaaaucacuguuucuuuuga

SEQ ID NO: 35931 - RNA, 18 nt, Artificial Sequence
  Synthetic
cuguguccuuuguuuuga

SEQ ID NO: 35932 - RNA, 19 nt, Artificial Sequence
  Synthetic
ucuguguccuuuguuuuga

SEQ ID NO: 35933 - RNA, 21 nt, Artificial Sequence
  Synthetic
agucuguguccuuuguuuuga

SEQ ID NO: 35934 - RNA, 22 nt, Artificial Sequence
  Synthetic
cagucuguguccuuuguuuuga

SEQ ID NO: 35935 - RNA, 23 nt, Artificial Sequence
  Synthetic
ccagucuguguccuuuguuuuga

SEQ ID NO: 35936 - RNA, 24 nt, Artificial Sequence
  Synthetic
uccagucuguguccuuuguuuuga

SEQ ID NO: 35937 - RNA, 19 nt, Artificial Sequence
  Synthetic
uggaaaauguacuuuuuga

SEQ ID NO: 35938 - RNA, 21 nt, Artificial Sequence
  Synthetic
aguggaaaauguacuuuuuga

SEQ ID NO: 35939 - RNA, 22 nt, Artificial Sequence
  Synthetic
uaguggaaaauguacuuuuuga

SEQ ID NO: 35940 - RNA, 24 nt, Artificial Sequence
  Synthetic
cguaguggaaaauguacuuuuuga

SEQ ID NO: 35941 - RNA, 18 nt, Artificial Sequence
  Synthetic
uaccaugauguuuuuuga

SEQ ID NO: 35942 - RNA, 19 nt, Artificial Sequence
  Synthetic
uuaccaugauguuuuuuga

SEQ ID NO: 35943 - RNA, 20 nt, Artificial Sequence
  Synthetic
auuaccaugauguuuuuuga

SEQ ID NO: 35944 - RNA, 21 nt, Artificial Sequence
  Synthetic
uauuaccaugauguuuuuuga

SEQ ID NO: 35945 - RNA, 22 nt, Artificial Sequence
  Synthetic
uuauuaccaugauguuuuuuga

SEQ ID NO: 35946 - RNA, 23 nt, Artificial Sequence
  Synthetic
cuuauuaccaugauguuuuuuga

SEQ ID NO: 35947 - RNA, 24 nt, Artificial Sequence
  Synthetic
ucuuauuaccaugauguuuuuuga

SEQ ID NO: 35948 - RNA, 18 nt, Artificial Sequence
  Synthetic
cuaaaugugcaaaaaaua

SEQ ID NO: 35949 - RNA, 19 nt, Artificial Sequence
  Synthetic
ucuaaaugugcaaaaaaua

SEQ ID NO: 35950 - RNA, 20 nt, Artificial Sequence
  Synthetic
uucuaaaugugcaaaaaaua

SEQ ID NO: 35951 - RNA, 21 nt, Artificial Sequence
  Synthetic
cauuucugagacacaaaaaua

SEQ ID NO: 35952 - RNA, 22 nt, Artificial Sequence
  Synthetic
ccauuucugagacacaaaaaua

SEQ ID NO: 35953 - RNA, 24 nt, Artificial Sequence
  Synthetic
agccauuucugagacacaaaaaua

SEQ ID NO: 35954 - RNA, 21 nt, Artificial Sequence
  Synthetic
agcagauuacuuugaaaaaua

SEQ ID NO: 35955 - RNA, 22 nt, Artificial Sequence
  Synthetic
uagcagauuacuuugaaaaaua

SEQ ID NO: 35956 - RNA, 23 nt, Artificial Sequence
  Synthetic
uuagcagauuacuuugaaaaaua

SEQ ID NO: 35957 - RNA, 24 nt, Artificial Sequence
  Synthetic
uuuagcagauuacuuugaaaaaua

SEQ ID NO: 35958 - RNA, 21 nt, Artificial Sequence
  Synthetic
aggauuaauaaauacaaaaua

SEQ ID NO: 35959 - RNA, 22 nt, Artificial Sequence
  Synthetic
aaggauuaauaaauacaaaaua

SEQ ID NO: 35960 - RNA, 24 nt, Artificial Sequence
  Synthetic
agaaggauuaauaaauacaaaaua

SEQ ID NO: 35961 - RNA, 22 nt, Artificial Sequence
  Synthetic
agaauucauuuuuaagaaaaua

SEQ ID NO: 35962 - RNA, 23 nt, Artificial Sequence
  Synthetic
uagaauucauuuuuaagaaaaua

SEQ ID NO: 35963 - RNA, 24 nt, Artificial Sequence
  Synthetic
auagaauucauuuuuaagaaaaua

SEQ ID NO: 35964 - RNA, 21 nt, Artificial Sequence
  Synthetic
aaagacuugcaugggaaaaua

SEQ ID NO: 35965 - RNA, 22 nt, Artificial Sequence
  Synthetic
caaagacuugcaugggaaaaua

SEQ ID NO: 35966 - RNA, 23 nt, Artificial Sequence
  Synthetic
ucaaagacuugcaugggaaaaua

SEQ ID NO: 35967 - RNA, 24 nt, Artificial Sequence
  Synthetic
aucaaagacuugcaugggaaaaua

SEQ ID NO: 35968 - RNA, 18 nt, Artificial Sequence
  Synthetic
ccguuaaaauggaaaaua

SEQ ID NO: 35969 - RNA, 20 nt, Artificial Sequence
  Synthetic
ugccguuaaaauggaaaaua

SEQ ID NO: 35970 - RNA, 22 nt, Artificial Sequence
  Synthetic
ugugccguuaaaauggaaaaua

SEQ ID NO: 35971 - RNA, 23 nt, Artificial Sequence
  Synthetic
uugugccguuaaaauggaaaaua

SEQ ID NO: 35972 - RNA, 24 nt, Artificial Sequence
  Synthetic
uuugugccguuaaaauggaaaaua

SEQ ID NO: 35973 - RNA, 21 nt, Artificial Sequence
  Synthetic
ccuuuagcuaauaugaaaaua

SEQ ID NO: 35974 - RNA, 22 nt, Artificial Sequence
  Synthetic
accuuuagcuaauaugaaaaua

SEQ ID NO: 35975 - RNA, 23 nt, Artificial Sequence
  Synthetic
aaccuuuagcuaauaugaaaaua

SEQ ID NO: 35976 - RNA, 24 nt, Artificial Sequence
  Synthetic
uaaccuuuagcuaauaugaaaaua

SEQ ID NO: 35977 - RNA, 19 nt, Artificial Sequence
  Synthetic
agccaccauacugaaaaua

SEQ ID NO: 35978 - RNA, 21 nt, Artificial Sequence
  Synthetic
agagccaccauacugaaaaua

SEQ ID NO: 35979 - RNA, 23 nt, Artificial Sequence
  Synthetic
agagagccaccauacugaaaaua

SEQ ID NO: 35980 - RNA, 18 nt, Artificial Sequence
  Synthetic
cauccaugccugaaaaua

SEQ ID NO: 35981 - RNA, 19 nt, Artificial Sequence
  Synthetic
ccauccaugccugaaaaua

SEQ ID NO: 35982 - RNA, 21 nt, Artificial Sequence
  Synthetic
agccauccaugccugaaaaua

SEQ ID NO: 35983 - RNA, 24 nt, Artificial Sequence
  Synthetic
uggagccauccaugccugaaaaua

SEQ ID NO: 35984 - RNA, 18 nt, Artificial Sequence
  Synthetic
uacguauuggauaaaaua

SEQ ID NO: 35985 - RNA, 20 nt, Artificial Sequence
  Synthetic
aguacguauuggauaaaaua

SEQ ID NO: 35986 - RNA, 21 nt, Artificial Sequence
  Synthetic
aaguacguauuggauaaaaua

SEQ ID NO: 35987 - RNA, 22 nt, Artificial Sequence
  Synthetic
uaaguacguauuggauaaaaua

SEQ ID NO: 35988 - RNA, 24 nt, Artificial Sequence
  Synthetic
aguaaguacguauuggauaaaaua

SEQ ID NO: 35989 - RNA, 18 nt, Artificial Sequence
  Synthetic
ccuuuuguaaguaaaaua

SEQ ID NO: 35990 - RNA, 19 nt, Artificial Sequence
  Synthetic
accuuuuguaaguaaaaua

SEQ ID NO: 35991 - RNA, 20 nt, Artificial Sequence
  Synthetic
uaccuuuuguaaguaaaaua

SEQ ID NO: 35992 - RNA, 23 nt, Artificial Sequence
  Synthetic
agguaccuuuuguaaguaaaaua

SEQ ID NO: 35993 - RNA, 24 nt, Artificial Sequence
  Synthetic
uagguaccuuuuguaaguaaaaua

SEQ ID NO: 35994 - RNA, 22 nt, Artificial Sequence
  Synthetic
ugaaauuuguuauguuaaaaua

SEQ ID NO: 35995 - RNA, 23 nt, Artificial Sequence
  Synthetic
uugaaauuuguuauguuaaaaua

SEQ ID NO: 35996 - RNA, 24 nt, Artificial Sequence
  Synthetic
uuugaaauuuguuauguuaaaaua

SEQ ID NO: 35997 - RNA, 19 nt, Artificial Sequence
  Synthetic
uggaacauuuaaacaaaua

SEQ ID NO: 35998 - RNA, 20 nt, Artificial Sequence
  Synthetic
uuggaacauuuaaacaaaua

SEQ ID NO: 35999 - RNA, 21 nt, Artificial Sequence
  Synthetic
cuuggaacauuuaaacaaaua

SEQ ID NO: 36000 - RNA, 23 nt, Artificial Sequence
  Synthetic
ugcuuggaacauuuaaacaaaua

SEQ ID NO: 36001 - RNA, 24 nt, Artificial Sequence
  Synthetic
cugcuuggaacauuuaaacaaaua

SEQ ID NO: 36002 - RNA, 18 nt, Artificial Sequence
  Synthetic
ugcuugucuuaacaaaua

SEQ ID NO: 36003 - RNA, 20 nt, Artificial Sequence
  Synthetic
ugugcuugucuuaacaaaua

SEQ ID NO: 36004 - RNA, 21 nt, Artificial Sequence
  Synthetic
augugcuugucuuaacaaaua

SEQ ID NO: 36005 - RNA, 22 nt, Artificial Sequence
  Synthetic
caugugcuugucuuaacaaaua

SEQ ID NO: 36006 - RNA, 23 nt, Artificial Sequence
  Synthetic
ccaugugcuugucuuaacaaaua

SEQ ID NO: 36007 - RNA, 24 nt, Artificial Sequence
  Synthetic
cccaugugcuugucuuaacaaaua

SEQ ID NO: 36008 - RNA, 18 nt, Artificial Sequence
  Synthetic
uaagugaagagacaaaua

SEQ ID NO: 36009 - RNA, 19 nt, Artificial Sequence
  Synthetic
auaagugaagagacaaaua

SEQ ID NO: 36010 - RNA, 21 nt, Artificial Sequence
  Synthetic
agauaagugaagagacaaaua

SEQ ID NO: 36011 - RNA, 22 nt, Artificial Sequence
  Synthetic
aagauaagugaagagacaaaua

SEQ ID NO: 36012 - RNA, 23 nt, Artificial Sequence
  Synthetic
aaagauaagugaagagacaaaua

SEQ ID NO: 36013 - RNA, 24 nt, Artificial Sequence
  Synthetic
aaaagauaagugaagagacaaaua

SEQ ID NO: 36014 - RNA, 18 nt, Artificial Sequence
  Synthetic
uaacaauaacuacaaaua

SEQ ID NO: 36015 - RNA, 21 nt, Artificial Sequence
  Synthetic
ugguaacaauaacuacaaaua

SEQ ID NO: 36016 - RNA, 22 nt, Artificial Sequence
  Synthetic
augguaacaauaacuacaaaua

SEQ ID NO: 36017 - RNA, 23 nt, Artificial Sequence
  Synthetic
uaugguaacaauaacuacaaaua

SEQ ID NO: 36018 - RNA, 21 nt, Artificial Sequence
  Synthetic
acuaucaaaaauuuacaaaua

SEQ ID NO: 36019 - RNA, 22 nt, Artificial Sequence
  Synthetic
aacuaucaaaaauuuacaaaua

SEQ ID NO: 36020 - RNA, 23 nt, Artificial Sequence
  Synthetic
aaacuaucaaaaauuuacaaaua

SEQ ID NO: 36021 - RNA, 21 nt, Artificial Sequence
  Synthetic
caagcaauugaaaagcaaaua

SEQ ID NO: 36022 - RNA, 23 nt, Artificial Sequence
  Synthetic
agcaagcaauugaaaagcaaaua

SEQ ID NO: 36023 - RNA, 21 nt, Artificial Sequence
  Synthetic
agaagaaaagaagugcaaaua

SEQ ID NO: 36024 - RNA, 23 nt, Artificial Sequence
  Synthetic
agagaagaaaagaagugcaaaua

SEQ ID NO: 36025 - RNA, 24 nt, Artificial Sequence
  Synthetic
cagagaagaaaagaagugcaaaua

SEQ ID NO: 36026 - RNA, 21 nt, Artificial Sequence
  Synthetic
aaaaagaagagacaucaaaua

SEQ ID NO: 36027 - RNA, 22 nt, Artificial Sequence
  Synthetic
aaaaaagaagagacaucaaaua

SEQ ID NO: 36028 - RNA, 24 nt, Artificial Sequence
  Synthetic
ugaaaaaagaagagacaucaaaua

SEQ ID NO: 36029 - RNA, 21 nt, Artificial Sequence
  Synthetic
ugcauuuaagauaaagaaaua

SEQ ID NO: 36030 - RNA, 22 nt, Artificial Sequence
  Synthetic
uugcauuuaagauaaagaaaua

SEQ ID NO: 36031 - RNA, 23 nt, Artificial Sequence
  Synthetic
auugcauuuaagauaaagaaaua

SEQ ID NO: 36032 - RNA, 24 nt, Artificial Sequence
  Synthetic
uauugcauuuaagauaaagaaaua

SEQ ID NO: 36033 - RNA, 18 nt, Artificial Sequence
  Synthetic
caccuauuuucagaaaua

SEQ ID NO: 36034 - RNA, 19 nt, Artificial Sequence
  Synthetic
ccaccuauuuucagaaaua

SEQ ID NO: 36035 - RNA, 20 nt, Artificial Sequence
  Synthetic
uccaccuauuuucagaaaua

SEQ ID NO: 36036 - RNA, 21 nt, Artificial Sequence
  Synthetic
cuccaccuauuuucagaaaua

SEQ ID NO: 36037 - RNA, 22 nt, Artificial Sequence
  Synthetic
ccuccaccuauuuucagaaaua

SEQ ID NO: 36038 - RNA, 23 nt, Artificial Sequence
  Synthetic
uccuccaccuauuuucagaaaua

SEQ ID NO: 36039 - RNA, 21 nt, Artificial Sequence
  Synthetic
uuaauauauuuuucagaaaua

SEQ ID NO: 36040 - RNA, 22 nt, Artificial Sequence
  Synthetic
auuaauauauuuuucagaaaua

SEQ ID NO: 36041 - RNA, 24 nt, Artificial Sequence
  Synthetic
ugauuaauauauuuuucagaaaua

SEQ ID NO: 36042 - RNA, 21 nt, Artificial Sequence
  Synthetic
aauucuaaacagagagaaaua

SEQ ID NO: 36043 - RNA, 22 nt, Artificial Sequence
  Synthetic
aaauucuaaacagagagaaaua

SEQ ID NO: 36044 - RNA, 23 nt, Artificial Sequence
  Synthetic
aaaauucuaaacagagagaaaua

SEQ ID NO: 36045 - RNA, 24 nt, Artificial Sequence
  Synthetic
aaaaauucuaaacagagagaaaua

SEQ ID NO: 36046 - RNA, 21 nt, Artificial Sequence
  Synthetic
uaguaaaauagaauagaaaua

SEQ ID NO: 36047 - RNA, 22 nt, Artificial Sequence
  Synthetic
uuaguaaaauagaauagaaaua

SEQ ID NO: 36048 - RNA, 23 nt, Artificial Sequence
  Synthetic
auuaguaaaauagaauagaaaua

SEQ ID NO: 36049 - RNA, 24 nt, Artificial Sequence
  Synthetic
aauuaguaaaauagaauagaaaua

SEQ ID NO: 36050 - RNA, 21 nt, Artificial Sequence
  Synthetic
ugagguguggauguggaaaua

SEQ ID NO: 36051 - RNA, 23 nt, Artificial Sequence
  Synthetic
ugugagguguggauguggaaaua

SEQ ID NO: 36052 - RNA, 24 nt, Artificial Sequence
  Synthetic
augugagguguggauguggaaaua

SEQ ID NO: 36053 - RNA, 18 nt, Artificial Sequence
  Synthetic
ucugucgguguggaaaua

SEQ ID NO: 36054 - RNA, 20 nt, Artificial Sequence
  Synthetic
ugucugucgguguggaaaua

SEQ ID NO: 36055 - RNA, 22 nt, Artificial Sequence
  Synthetic
ugugucugucgguguggaaaua

SEQ ID NO: 36056 - RNA, 24 nt, Artificial Sequence
  Synthetic
ugugugucugucgguguggaaaua

SEQ ID NO: 36057 - RNA, 18 nt, Artificial Sequence
  Synthetic
caaacuauaaaugaaaua

SEQ ID NO: 36058 - RNA, 19 nt, Artificial Sequence
  Synthetic
ucaaacuauaaaugaaaua

SEQ ID NO: 36059 - RNA, 20 nt, Artificial Sequence
  Synthetic
uucaaacuauaaaugaaaua

SEQ ID NO: 36060 - RNA, 21 nt, Artificial Sequence
  Synthetic
uuucaaacuauaaaugaaaua

SEQ ID NO: 36061 - RNA, 22 nt, Artificial Sequence
  Synthetic
auuucaaacuauaaaugaaaua

SEQ ID NO: 36062 - RNA, 23 nt, Artificial Sequence
  Synthetic
aauuucaaacuauaaaugaaaua

SEQ ID NO: 36063 - RNA, 24 nt, Artificial Sequence
  Synthetic
aaauuucaaacuauaaaugaaaua

SEQ ID NO: 36064 - RNA, 18 nt, Artificial Sequence
  Synthetic
aauugaaaggaugaaaua

SEQ ID NO: 36065 - RNA, 19 nt, Artificial Sequence
  Synthetic
uaauugaaaggaugaaaua

SEQ ID NO: 36066 - RNA, 20 nt, Artificial Sequence
  Synthetic
cuaauugaaaggaugaaaua

SEQ ID NO: 36067 - RNA, 21 nt, Artificial Sequence
  Synthetic
acuaauugaaaggaugaaaua

SEQ ID NO: 36068 - RNA, 22 nt, Artificial Sequence
  Synthetic
uacuaauugaaaggaugaaaua

SEQ ID NO: 36069 - RNA, 23 nt, Artificial Sequence
  Synthetic
auacuaauugaaaggaugaaaua

SEQ ID NO: 36070 - RNA, 24 nt, Artificial Sequence
  Synthetic
cauacuaauugaaaggaugaaaua

SEQ ID NO: 36071 - RNA, 18 nt, Artificial Sequence
  Synthetic
cacaauaauggugaaaua

SEQ ID NO: 36072 - RNA, 19 nt, Artificial Sequence
  Synthetic
acacaauaauggugaaaua

SEQ ID NO: 36073 - RNA, 20 nt, Artificial Sequence
  Synthetic
aacacaauaauggugaaaua

SEQ ID NO: 36074 - RNA, 21 nt, Artificial Sequence
  Synthetic
uaacacaauaauggugaaaua

SEQ ID NO: 36075 - RNA, 22 nt, Artificial Sequence
  Synthetic
auaacacaauaauggugaaaua

SEQ ID NO: 36076 - RNA, 23 nt, Artificial Sequence
  Synthetic
aauaacacaauaauggugaaaua

SEQ ID NO: 36077 - RNA, 24 nt, Artificial Sequence
  Synthetic
uaauaacacaauaauggugaaaua

SEQ ID NO: 36078 - RNA, 21 nt, Artificial Sequence
  Synthetic
caaauuuuaaauguugaaaua

SEQ ID NO: 36079 - RNA, 24 nt, Artificial Sequence
  Synthetic
aggcaaauuuuaaauguugaaaua

SEQ ID NO: 36080 - RNA, 21 nt, Artificial Sequence
  Synthetic
ugaauaggcacucaauaaaua

SEQ ID NO: 36081 - RNA, 22 nt, Artificial Sequence
  Synthetic
augaauaggcacucaauaaaua

SEQ ID NO: 36082 - RNA, 23 nt, Artificial Sequence
  Synthetic
caugaauaggcacucaauaaaua

SEQ ID NO: 36083 - RNA, 24 nt, Artificial Sequence
  Synthetic
ucaugaauaggcacucaauaaaua

SEQ ID NO: 36084 - RNA, 20 nt, Artificial Sequence
  Synthetic
uggacggucccuaauaaaua

SEQ ID NO: 36085 - RNA, 22 nt, Artificial Sequence
  Synthetic
uguggacggucccuaauaaaua

SEQ ID NO: 36086 - RNA, 23 nt, Artificial Sequence
  Synthetic
auguggacggucccuaauaaaua

SEQ ID NO: 36087 - RNA, 24 nt, Artificial Sequence
  Synthetic
uauguggacggucccuaauaaaua

SEQ ID NO: 36088 - RNA, 18 nt, Artificial Sequence
  Synthetic
agcaauucuguauaaaua

SEQ ID NO: 36089 - RNA, 20 nt, Artificial Sequence
  Synthetic
agagcaauucuguauaaaua

SEQ ID NO: 36090 - RNA, 21 nt, Artificial Sequence
  Synthetic
aagagcaauucuguauaaaua

SEQ ID NO: 36091 - RNA, 22 nt, Artificial Sequence
  Synthetic
uaagagcaauucuguauaaaua

SEQ ID NO: 36092 - RNA, 24 nt, Artificial Sequence
  Synthetic
uguaagagcaauucuguauaaaua

SEQ ID NO: 36093 - RNA, 19 nt, Artificial Sequence
  Synthetic
agaacaaguuguauaaaua

SEQ ID NO: 36094 - RNA, 20 nt, Artificial Sequence
  Synthetic
aagaacaaguuguauaaaua

SEQ ID NO: 36095 - RNA, 21 nt, Artificial Sequence
  Synthetic
aaagaacaaguuguauaaaua

SEQ ID NO: 36096 - RNA, 23 nt, Artificial Sequence
  Synthetic
ugaaagaacaaguuguauaaaua

SEQ ID NO: 36097 - RNA, 24 nt, Artificial Sequence
  Synthetic
augaaagaacaaguuguauaaaua

SEQ ID NO: 36098 - RNA, 18 nt, Artificial Sequence
  Synthetic
acagaauguuucuaaaua

SEQ ID NO: 36099 - RNA, 20 nt, Artificial Sequence
  Synthetic
agacagaauguuucuaaaua

SEQ ID NO: 36100 - RNA, 21 nt, Artificial Sequence
  Synthetic
uagacagaauguuucuaaaua

SEQ ID NO: 36101 - RNA, 22 nt, Artificial Sequence
  Synthetic
auagacagaauguuucuaaaua

SEQ ID NO: 36102 - RNA, 23 nt, Artificial Sequence
  Synthetic
aauagacagaauguuucuaaaua

SEQ ID NO: 36103 - RNA, 19 nt, Artificial Sequence
  Synthetic
ugguucaugaauguaaaua

SEQ ID NO: 36104 - RNA, 20 nt, Artificial Sequence
  Synthetic
uugguucaugaauguaaaua

SEQ ID NO: 36105 - RNA, 21 nt, Artificial Sequence
  Synthetic
cuugguucaugaauguaaaua

SEQ ID NO: 36106 - RNA, 22 nt, Artificial Sequence
  Synthetic
ccuugguucaugaauguaaaua

SEQ ID NO: 36107 - RNA, 23 nt, Artificial Sequence
  Synthetic
cccuugguucaugaauguaaaua

SEQ ID NO: 36108 - RNA, 24 nt, Artificial Sequence
  Synthetic
ucccuugguucaugaauguaaaua

SEQ ID NO: 36109 - RNA, 21 nt, Artificial Sequence
  Synthetic
cccagcaucaugucuuaaaua

SEQ ID NO: 36110 - RNA, 22 nt, Artificial Sequence
  Synthetic
ucccagcaucaugucuuaaaua

SEQ ID NO: 36111 - RNA, 23 nt, Artificial Sequence
  Synthetic
aucccagcaucaugucuuaaaua

SEQ ID NO: 36112 - RNA, 24 nt, Artificial Sequence
  Synthetic
caucccagcaucaugucuuaaaua

SEQ ID NO: 36113 - RNA, 21 nt, Artificial Sequence
  Synthetic
caacugacuaucauuuaaaua

SEQ ID NO: 36114 - RNA, 22 nt, Artificial Sequence
  Synthetic
ucaacugacuaucauuuaaaua

SEQ ID NO: 36115 - RNA, 23 nt, Artificial Sequence
  Synthetic
uucaacugacuaucauuuaaaua

SEQ ID NO: 36116 - RNA, 24 nt, Artificial Sequence
  Synthetic
cuucaacugacuaucauuuaaaua

SEQ ID NO: 36117 - RNA, 22 nt, Artificial Sequence
  Synthetic
uguuugccauuguguuuaaaua

SEQ ID NO: 36118 - RNA, 23 nt, Artificial Sequence
  Synthetic
auguuugccauuguguuuaaaua

SEQ ID NO: 36119 - RNA, 24 nt, Artificial Sequence
  Synthetic
uauguuugccauuguguuuaaaua

SEQ ID NO: 36120 - RNA, 18 nt, Artificial Sequence
  Synthetic
ugcaauacuaaaacaaua

SEQ ID NO: 36121 - RNA, 19 nt, Artificial Sequence
  Synthetic
uugcaauacuaaaacaaua

SEQ ID NO: 36122 - RNA, 20 nt, Artificial Sequence
  Synthetic
uuugcaauacuaaaacaaua

SEQ ID NO: 36123 - RNA, 21 nt, Artificial Sequence
  Synthetic
auuugcaauacuaaaacaaua

SEQ ID NO: 36124 - RNA, 22 nt, Artificial Sequence
  Synthetic
uauuugcaauacuaaaacaaua

SEQ ID NO: 36125 - RNA, 23 nt, Artificial Sequence
  Synthetic
auauuugcaauacuaaaacaaua

SEQ ID NO: 36126 - RNA, 24 nt, Artificial Sequence
  Synthetic
uauauuugcaauacuaaaacaaua

SEQ ID NO: 36127 - RNA, 19 nt, Artificial Sequence
  Synthetic
agaaaauaagcauacaaua

SEQ ID NO: 36128 - RNA, 20 nt, Artificial Sequence
  Synthetic
aagaaaauaagcauacaaua

SEQ ID NO: 36129 - RNA, 22 nt, Artificial Sequence
  Synthetic
ugaagaaaauaagcauacaaua

SEQ ID NO: 36130 - RNA, 23 nt, Artificial Sequence
  Synthetic
augaagaaaauaagcauacaaua

SEQ ID NO: 36131 - RNA, 24 nt, Artificial Sequence
  Synthetic
aaugaagaaaauaagcauacaaua

SEQ ID NO: 36132 - RNA, 18 nt, Artificial Sequence
  Synthetic
agagcuuuugauacaaua

SEQ ID NO: 36133 - RNA, 19 nt, Artificial Sequence
  Synthetic
aagagcuuuugauacaaua

SEQ ID NO: 36134 - RNA, 20 nt, Artificial Sequence
  Synthetic
uaagagcuuuugauacaaua

SEQ ID NO: 36135 - RNA, 21 nt, Artificial Sequence
  Synthetic
uuaagagcuuuugauacaaua

SEQ ID NO: 36136 - RNA, 22 nt, Artificial Sequence
  Synthetic
uuuaagagcuuuugauacaaua

SEQ ID NO: 36137 - RNA, 23 nt, Artificial Sequence
  Synthetic
uuuuaagagcuuuugauacaaua

SEQ ID NO: 36138 - RNA, 24 nt, Artificial Sequence
  Synthetic
cuuuuaagagcuuuugauacaaua

SEQ ID NO: 36139 - RNA, 19 nt, Artificial Sequence
  Synthetic
ugaaguaaauuauacaaua

SEQ ID NO: 36140 - RNA, 20 nt, Artificial Sequence
  Synthetic
uugaaguaaauuauacaaua

SEQ ID NO: 36141 - RNA, 22 nt, Artificial Sequence
  Synthetic
cguugaaguaaauuauacaaua

SEQ ID NO: 36142 - RNA, 23 nt, Artificial Sequence
  Synthetic
acguugaaguaaauuauacaaua

SEQ ID NO: 36143 - RNA, 24 nt, Artificial Sequence
  Synthetic
aacguugaaguaaauuauacaaua

SEQ ID NO: 36144 - RNA, 19 nt, Artificial Sequence
  Synthetic
agaagagggacauccaaua

SEQ ID NO: 36145 - RNA, 20 nt, Artificial Sequence
  Synthetic
cagaagagggacauccaaua

SEQ ID NO: 36146 - RNA, 21 nt, Artificial Sequence
  Synthetic
acagaagagggacauccaaua

SEQ ID NO: 36147 - RNA, 22 nt, Artificial Sequence
  Synthetic
aacagaagagggacauccaaua

SEQ ID NO: 36148 - RNA, 21 nt, Artificial Sequence
  Synthetic
uagacugaaauggaagcaaua

SEQ ID NO: 36149 - RNA, 22 nt, Artificial Sequence
  Synthetic
uuagacugaaauggaagcaaua

SEQ ID NO: 36150 - RNA, 18 nt, Artificial Sequence
  Synthetic
cguaugcacuuggcaaua

SEQ ID NO: 36151 - RNA, 19 nt, Artificial Sequence
  Synthetic
ucguaugcacuuggcaaua

SEQ ID NO: 36152 - RNA, 20 nt, Artificial Sequence
  Synthetic
uucguaugcacuuggcaaua

SEQ ID NO: 36153 - RNA, 21 nt, Artificial Sequence
  Synthetic
uuucguaugcacuuggcaaua

SEQ ID NO: 36154 - RNA, 22 nt, Artificial Sequence
  Synthetic
auuucguaugcacuuggcaaua

SEQ ID NO: 36155 - RNA, 23 nt, Artificial Sequence
  Synthetic
aauuucguaugcacuuggcaaua

SEQ ID NO: 36156 - RNA, 24 nt, Artificial Sequence
  Synthetic
aaauuucguaugcacuuggcaaua

SEQ ID NO: 36157 - RNA, 21 nt, Artificial Sequence
  Synthetic
aaaauaaguaauuaaucaaua

SEQ ID NO: 36158 - RNA, 22 nt, Artificial Sequence
  Synthetic
uaaaauaaguaauuaaucaaua

SEQ ID NO: 36159 - RNA, 23 nt, Artificial Sequence
  Synthetic
auaaaauaaguaauuaaucaaua

SEQ ID NO: 36160 - RNA, 24 nt, Artificial Sequence
  Synthetic
cauaaaauaaguaauuaaucaaua

SEQ ID NO: 36161 - RNA, 18 nt, Artificial Sequence
  Synthetic
aguuaguacaucucaaua

SEQ ID NO: 36162 - RNA, 22 nt, Artificial Sequence
  Synthetic
ugggaguuaguacaucucaaua

SEQ ID NO: 36163 - RNA, 23 nt, Artificial Sequence
  Synthetic
augggaguuaguacaucucaaua

SEQ ID NO: 36164 - RNA, 24 nt, Artificial Sequence
  Synthetic
uaugggaguuaguacaucucaaua

SEQ ID NO: 36165 - RNA, 18 nt, Artificial Sequence
  Synthetic
aguauucuaaagucaaua

SEQ ID NO: 36166 - RNA, 19 nt, Artificial Sequence
  Synthetic
caguauucuaaagucaaua

SEQ ID NO: 36167 - RNA, 20 nt, Artificial Sequence
  Synthetic
acaguauucuaaagucaaua

SEQ ID NO: 36168 - RNA, 22 nt, Artificial Sequence
  Synthetic
agacaguauucuaaagucaaua

SEQ ID NO: 36169 - RNA, 23 nt, Artificial Sequence
  Synthetic
cagacaguauucuaaagucaaua

SEQ ID NO: 36170 - RNA, 18 nt, Artificial Sequence
  Synthetic
caauucaacaauucaaua

SEQ ID NO: 36171 - RNA, 19 nt, Artificial Sequence
  Synthetic
ccaauucaacaauucaaua

SEQ ID NO: 36172 - RNA, 20 nt, Artificial Sequence
  Synthetic
cccaauucaacaauucaaua

SEQ ID NO: 36173 - RNA, 21 nt, Artificial Sequence
  Synthetic
ucccaauucaacaauucaaua

SEQ ID NO: 36174 - RNA, 22 nt, Artificial Sequence
  Synthetic
cucccaauucaacaauucaaua

SEQ ID NO: 36175 - RNA, 24 nt, Artificial Sequence
  Synthetic
ugcucccaauucaacaauucaaua

SEQ ID NO: 36176 - RNA, 18 nt, Artificial Sequence
  Synthetic
aucaaugauguuucaaua

SEQ ID NO: 36177 - RNA, 19 nt, Artificial Sequence
  Synthetic
aaucaaugauguuucaaua

SEQ ID NO: 36178 - RNA, 20 nt, Artificial Sequence
  Synthetic
aaaucaaugauguuucaaua

SEQ ID NO: 36179 - RNA, 23 nt, Artificial Sequence
  Synthetic
aggaaaucaaugauguuucaaua

SEQ ID NO: 36180 - RNA, 24 nt, Artificial Sequence
  Synthetic
aaggaaaucaaugauguuucaaua

SEQ ID NO: 36181 - RNA, 18 nt, Artificial Sequence
  Synthetic
augggugauugaagaaua

SEQ ID NO: 36182 - RNA, 19 nt, Artificial Sequence
  Synthetic
uaugggugauugaagaaua

SEQ ID NO: 36183 - RNA, 20 nt, Artificial Sequence
  Synthetic
uuaugggugauugaagaaua

SEQ ID NO: 36184 - RNA, 21 nt, Artificial Sequence
  Synthetic
uuuaugggugauugaagaaua

SEQ ID NO: 36185 - RNA, 22 nt, Artificial Sequence
  Synthetic
auuuaugggugauugaagaaua

SEQ ID NO: 36186 - RNA, 23 nt, Artificial Sequence
  Synthetic
uauuuaugggugauugaagaaua

SEQ ID NO: 36187 - RNA, 24 nt, Artificial Sequence
  Synthetic
cuauuuaugggugauugaagaaua

SEQ ID NO: 36188 - RNA, 18 nt, Artificial Sequence
  Synthetic
aguucaaauaucagaaua

SEQ ID NO: 36189 - RNA, 19 nt, Artificial Sequence
  Synthetic
uaguucaaauaucagaaua

SEQ ID NO: 36190 - RNA, 22 nt, Artificial Sequence
  Synthetic
ugguaguucaaauaucagaaua

SEQ ID NO: 36191 - RNA, 24 nt, Artificial Sequence
  Synthetic
ugugguaguucaaauaucagaaua

SEQ ID NO: 36192 - RNA, 18 nt, Artificial Sequence
  Synthetic
cuguaauuuauuagaaua

SEQ ID NO: 36193 - RNA, 19 nt, Artificial Sequence
  Synthetic
ucuguaauuuauuagaaua

SEQ ID NO: 36194 - RNA, 20 nt, Artificial Sequence
  Synthetic
cucuguaauuuauuagaaua

SEQ ID NO: 36195 - RNA, 21 nt, Artificial Sequence
  Synthetic
acucuguaauuuauuagaaua

SEQ ID NO: 36196 - RNA, 24 nt, Artificial Sequence
  Synthetic
uggacucuguaauuuauuagaaua

SEQ ID NO: 36197 - RNA, 18 nt, Artificial Sequence
  Synthetic
agaguaaugccaggaaua

SEQ ID NO: 36198 - RNA, 19 nt, Artificial Sequence
  Synthetic
aagaguaaugccaggaaua

SEQ ID NO: 36199 - RNA, 23 nt, Artificial Sequence
  Synthetic
agggaagaguaaugccaggaaua

SEQ ID NO: 36200 - RNA, 24 nt, Artificial Sequence
  Synthetic
aagggaagaguaaugccaggaaua

SEQ ID NO: 36201 - RNA, 18 nt, Artificial Sequence
  Synthetic
caggauuggggaggaaua

SEQ ID NO: 36202 - RNA, 19 nt, Artificial Sequence
  Synthetic
ucaggauuggggaggaaua

SEQ ID NO: 36203 - RNA, 20 nt, Artificial Sequence
  Synthetic
aucaggauuggggaggaaua

SEQ ID NO: 36204 - RNA, 21 nt, Artificial Sequence
  Synthetic
uaucaggauuggggaggaaua

SEQ ID NO: 36205 - RNA, 18 nt, Artificial Sequence
  Synthetic
aucuauuuaauaggaaua

SEQ ID NO: 36206 - RNA, 19 nt, Artificial Sequence
  Synthetic
uaucuauuuaauaggaaua

SEQ ID NO: 36207 - RNA, 20 nt, Artificial Sequence
  Synthetic
uuaucuauuuaauaggaaua

SEQ ID NO: 36208 - RNA, 21 nt, Artificial Sequence
  Synthetic
cuuaucuauuuaauaggaaua

SEQ ID NO: 36209 - RNA, 22 nt, Artificial Sequence
  Synthetic
acuuaucuauuuaauaggaaua

SEQ ID NO: 36210 - RNA, 23 nt, Artificial Sequence
  Synthetic
aacuuaucuauuuaauaggaaua

SEQ ID NO: 36211 - RNA, 24 nt, Artificial Sequence
  Synthetic
caacuuaucuauuuaauaggaaua

SEQ ID NO: 36212 - RNA, 22 nt, Artificial Sequence
  Synthetic
ugggagguggagugagggaaua

SEQ ID NO: 36213 - RNA, 23 nt, Artificial Sequence
  Synthetic
uugggagguggagugagggaaua

SEQ ID NO: 36214 - RNA, 24 nt, Artificial Sequence
  Synthetic
cuugggagguggagugagggaaua

SEQ ID NO: 36215 - RNA, 18 nt, Artificial Sequence
  Synthetic
ccuuuaugugagggaaua

SEQ ID NO: 36216 - RNA, 20 nt, Artificial Sequence
  Synthetic
ugccuuuaugugagggaaua

SEQ ID NO: 36217 - RNA, 21 nt, Artificial Sequence
  Synthetic
cugccuuuaugugagggaaua

SEQ ID NO: 36218 - RNA, 22 nt, Artificial Sequence
  Synthetic
ccugccuuuaugugagggaaua

SEQ ID NO: 36219 - RNA, 24 nt, Artificial Sequence
  Synthetic
ugccugccuuuaugugagggaaua

SEQ ID NO: 36220 - RNA, 18 nt, Artificial Sequence
  Synthetic
aagauuguucugggaaua

SEQ ID NO: 36221 - RNA, 19 nt, Artificial Sequence
  Synthetic
aaagauuguucugggaaua

SEQ ID NO: 36222 - RNA, 20 nt, Artificial Sequence
  Synthetic
aaaagauuguucugggaaua

SEQ ID NO: 36223 - RNA, 22 nt, Artificial Sequence
  Synthetic
agaaaagauuguucugggaaua

SEQ ID NO: 36224 - RNA, 23 nt, Artificial Sequence
  Synthetic
uagaaaagauuguucugggaaua

SEQ ID NO: 36225 - RNA, 24 nt, Artificial Sequence
  Synthetic
uuagaaaagauuguucugggaaua

SEQ ID NO: 36226 - RNA, 18 nt, Artificial Sequence
  Synthetic
ccaggugccucaugaaua

SEQ ID NO: 36227 - RNA, 19 nt, Artificial Sequence
  Synthetic
cccaggugccucaugaaua

SEQ ID NO: 36228 - RNA, 20 nt, Artificial Sequence
  Synthetic
acccaggugccucaugaaua

SEQ ID NO: 36229 - RNA, 21 nt, Artificial Sequence
  Synthetic
uacccaggugccucaugaaua

SEQ ID NO: 36230 - RNA, 23 nt, Artificial Sequence
  Synthetic
aguacccaggugccucaugaaua

SEQ ID NO: 36231 - RNA, 24 nt, Artificial Sequence
  Synthetic
uaguacccaggugccucaugaaua

SEQ ID NO: 36232 - RNA, 18 nt, Artificial Sequence
  Synthetic
uugaaugaauacugaaua

SEQ ID NO: 36233 - RNA, 19 nt, Artificial Sequence
  Synthetic
auugaaugaauacugaaua

SEQ ID NO: 36234 - RNA, 20 nt, Artificial Sequence
  Synthetic
cauugaaugaauacugaaua

SEQ ID NO: 36235 - RNA, 21 nt, Artificial Sequence
  Synthetic
ucauugaaugaauacugaaua

SEQ ID NO: 36236 - RNA, 22 nt, Artificial Sequence
  Synthetic
uucauugaaugaauacugaaua

SEQ ID NO: 36237 - RNA, 24 nt, Artificial Sequence
  Synthetic
uguucauugaaugaauacugaaua

SEQ ID NO: 36238 - RNA, 18 nt, Artificial Sequence
  Synthetic
auugucauacucugaaua

SEQ ID NO: 36239 - RNA, 19 nt, Artificial Sequence
  Synthetic
aauugucauacucugaaua

SEQ ID NO: 36240 - RNA, 20 nt, Artificial Sequence
  Synthetic
uaauugucauacucugaaua

SEQ ID NO: 36241 - RNA, 18 nt, Artificial Sequence
  Synthetic
cugcacuuguauugaaua

SEQ ID NO: 36242 - RNA, 19 nt, Artificial Sequence
  Synthetic
acugcacuuguauugaaua

SEQ ID NO: 36243 - RNA, 20 nt, Artificial Sequence
  Synthetic
cacugcacuuguauugaaua

SEQ ID NO: 36244 - RNA, 21 nt, Artificial Sequence
  Synthetic
ccacugcacuuguauugaaua

SEQ ID NO: 36245 - RNA, 22 nt, Artificial Sequence
  Synthetic
accacugcacuuguauugaaua

SEQ ID NO: 36246 - RNA, 23 nt, Artificial Sequence
  Synthetic
aaccacugcacuuguauugaaua

SEQ ID NO: 36247 - RNA, 24 nt, Artificial Sequence
  Synthetic
caaccacugcacuuguauugaaua

SEQ ID NO: 36248 - RNA, 22 nt, Artificial Sequence
  Synthetic
ugaauucaugaaggcuugaaua

SEQ ID NO: 36249 - RNA, 18 nt, Artificial Sequence
  Synthetic
aauaaucauguuugaaua

SEQ ID NO: 36250 - RNA, 19 nt, Artificial Sequence
  Synthetic
aaauaaucauguuugaaua

SEQ ID NO: 36251 - RNA, 20 nt, Artificial Sequence
  Synthetic
aaaauaaucauguuugaaua

SEQ ID NO: 36252 - RNA, 21 nt, Artificial Sequence
  Synthetic
aaaaauaaucauguuugaaua

SEQ ID NO: 36253 - RNA, 22 nt, Artificial Sequence
  Synthetic
uaaaaauaaucauguuugaaua

SEQ ID NO: 36254 - RNA, 23 nt, Artificial Sequence
  Synthetic
cuaaaaauaaucauguuugaaua

SEQ ID NO: 36255 - RNA, 24 nt, Artificial Sequence
  Synthetic
ucuaaaaauaaucauguuugaaua

SEQ ID NO: 36256 - RNA, 21 nt, Artificial Sequence
  Synthetic
auacccagggaagaaauaaua

SEQ ID NO: 36257 - RNA, 23 nt, Artificial Sequence
  Synthetic
agauacccagggaagaaauaaua

SEQ ID NO: 36258 - RNA, 24 nt, Artificial Sequence
  Synthetic
uagauacccagggaagaaauaaua

SEQ ID NO: 36259 - RNA, 18 nt, Artificial Sequence
  Synthetic
aaagguauuuuaauaaua

SEQ ID NO: 36260 - RNA, 19 nt, Artificial Sequence
  Synthetic
caaagguauuuuaauaaua

SEQ ID NO: 36261 - RNA, 20 nt, Artificial Sequence
  Synthetic
ccaaagguauuuuaauaaua

SEQ ID NO: 36262 - RNA, 21 nt, Artificial Sequence
  Synthetic
cccaaagguauuuuaauaaua

SEQ ID NO: 36263 - RNA, 22 nt, Artificial Sequence
  Synthetic
ccccaaagguauuuuaauaaua

SEQ ID NO: 36264 - RNA, 24 nt, Artificial Sequence
  Synthetic
ugccccaaagguauuuuaauaaua

SEQ ID NO: 36265 - RNA, 21 nt, Artificial Sequence
  Synthetic
auaggcuuaagcaugauaaua

SEQ ID NO: 36266 - RNA, 22 nt, Artificial Sequence
  Synthetic
uauaggcuuaagcaugauaaua

SEQ ID NO: 36267 - RNA, 23 nt, Artificial Sequence
  Synthetic
cuauaggcuuaagcaugauaaua

SEQ ID NO: 36268 - RNA, 24 nt, Artificial Sequence
  Synthetic
ucuauaggcuuaagcaugauaaua

SEQ ID NO: 36269 - RNA, 18 nt, Artificial Sequence
  Synthetic
ugguaguauuuuauaaua

SEQ ID NO: 36270 - RNA, 19 nt, Artificial Sequence
  Synthetic
augguaguauuuuauaaua

SEQ ID NO: 36271 - RNA, 20 nt, Artificial Sequence
  Synthetic
aaugguaguauuuuauaaua

SEQ ID NO: 36272 - RNA, 21 nt, Artificial Sequence
  Synthetic
aaaugguaguauuuuauaaua

SEQ ID NO: 36273 - RNA, 22 nt, Artificial Sequence
  Synthetic
aaaaugguaguauuuuauaaua

SEQ ID NO: 36274 - RNA, 23 nt, Artificial Sequence
  Synthetic
uaaaaugguaguauuuuauaaua

SEQ ID NO: 36275 - RNA, 24 nt, Artificial Sequence
  Synthetic
cuaaaaugguaguauuuuauaaua

SEQ ID NO: 36276 - RNA, 18 nt, Artificial Sequence
  Synthetic
uucauugacccacuaaua

SEQ ID NO: 36277 - RNA, 23 nt, Artificial Sequence
  Synthetic
agggguucauugacccacuaaua

SEQ ID NO: 36278 - RNA, 24 nt, Artificial Sequence
  Synthetic
aagggguucauugacccacuaaua

SEQ ID NO: 36279 - RNA, 18 nt, Artificial Sequence
  Synthetic
uuuguugauugacuaaua

SEQ ID NO: 36280 - RNA, 19 nt, Artificial Sequence
  Synthetic
cuuuguugauugacuaaua

SEQ ID NO: 36281 - RNA, 20 nt, Artificial Sequence
  Synthetic
ccuuuguugauugacuaaua

SEQ ID NO: 36282 - RNA, 23 nt, Artificial Sequence
  Synthetic
uggccuuuguugauugacuaaua

SEQ ID NO: 36283 - RNA, 24 nt, Artificial Sequence
  Synthetic
uuggccuuuguugauugacuaaua

SEQ ID NO: 36284 - RNA, 18 nt, Artificial Sequence
  Synthetic
aaguuauauuaauuaaua

SEQ ID NO: 36285 - RNA, 19 nt, Artificial Sequence
  Synthetic
aaaguuauauuaauuaaua

SEQ ID NO: 36286 - RNA, 20 nt, Artificial Sequence
  Synthetic
caaaguuauauuaauuaaua

SEQ ID NO: 36287 - RNA, 21 nt, Artificial Sequence
  Synthetic
ucaaaguuauauuaauuaaua

SEQ ID NO: 36288 - RNA, 22 nt, Artificial Sequence
  Synthetic
aucaaaguuauauuaauuaaua

SEQ ID NO: 36289 - RNA, 18 nt, Artificial Sequence
  Synthetic
agaauauguuaauuaaua

SEQ ID NO: 36290 - RNA, 21 nt, Artificial Sequence
  Synthetic
aggagaauauguuaauuaaua

SEQ ID NO: 36291 - RNA, 23 nt, Artificial Sequence
  Synthetic
agaggagaauauguuaauuaaua

SEQ ID NO: 36292 - RNA, 24 nt, Artificial Sequence
  Synthetic
uagaggagaauauguuaauuaaua

SEQ ID NO: 36293 - RNA, 19 nt, Artificial Sequence
  Synthetic
aggucuuagugcauuaaua

SEQ ID NO: 36294 - RNA, 20 nt, Artificial Sequence
  Synthetic
aaggucuuagugcauuaaua

SEQ ID NO: 36295 - RNA, 21 nt, Artificial Sequence
  Synthetic
aaaggucuuagugcauuaaua

SEQ ID NO: 36296 - RNA, 22 nt, Artificial Sequence
  Synthetic
caaaggucuuagugcauuaaua

SEQ ID NO: 36297 - RNA, 23 nt, Artificial Sequence
  Synthetic
acaaaggucuuagugcauuaaua

SEQ ID NO: 36298 - RNA, 24 nt, Artificial Sequence
  Synthetic
uacaaaggucuuagugcauuaaua

SEQ ID NO: 36299 - RNA, 19 nt, Artificial Sequence
  Synthetic
ugaggucuggauauuaaua

SEQ ID NO: 36300 - RNA, 20 nt, Artificial Sequence
  Synthetic
augaggucuggauauuaaua

SEQ ID NO: 36301 - RNA, 21 nt, Artificial Sequence
  Synthetic
aaugaggucuggauauuaaua

SEQ ID NO: 36302 - RNA, 22 nt, Artificial Sequence
  Synthetic
caaugaggucuggauauuaaua

SEQ ID NO: 36303 - RNA, 23 nt, Artificial Sequence
  Synthetic
acaaugaggucuggauauuaaua

SEQ ID NO: 36304 - RNA, 24 nt, Artificial Sequence
  Synthetic
aacaaugaggucuggauauuaaua

SEQ ID NO: 36305 - RNA, 20 nt, Artificial Sequence
  Synthetic
cgggaugauuaugguuaaua

SEQ ID NO: 36306 - RNA, 21 nt, Artificial Sequence
  Synthetic
acgggaugauuaugguuaaua

SEQ ID NO: 36307 - RNA, 22 nt, Artificial Sequence
  Synthetic
aacgggaugauuaugguuaaua

SEQ ID NO: 36308 - RNA, 23 nt, Artificial Sequence
  Synthetic
caacgggaugauuaugguuaaua

SEQ ID NO: 36309 - RNA, 24 nt, Artificial Sequence
  Synthetic
acaacgggaugauuaugguuaaua

SEQ ID NO: 36310 - RNA, 18 nt, Artificial Sequence
  Synthetic
ucuuaaugccuguuaaua

SEQ ID NO: 36311 - RNA, 19 nt, Artificial Sequence
  Synthetic
uucuuaaugccuguuaaua

SEQ ID NO: 36312 - RNA, 20 nt, Artificial Sequence
  Synthetic
auucuuaaugccuguuaaua

SEQ ID NO: 36313 - RNA, 22 nt, Artificial Sequence
  Synthetic
ugauucuuaaugccuguuaaua

SEQ ID NO: 36314 - RNA, 23 nt, Artificial Sequence
  Synthetic
uugauucuuaaugccuguuaaua

SEQ ID NO: 36315 - RNA, 24 nt, Artificial Sequence
  Synthetic
cuugauucuuaaugccuguuaaua

SEQ ID NO: 36316 - RNA, 18 nt, Artificial Sequence
  Synthetic
cucacaccaaguuuaaua

SEQ ID NO: 36317 - RNA, 19 nt, Artificial Sequence
  Synthetic
ucucacaccaaguuuaaua

SEQ ID NO: 36318 - RNA, 20 nt, Artificial Sequence
  Synthetic
aucucacaccaaguuuaaua

SEQ ID NO: 36319 - RNA, 21 nt, Artificial Sequence
  Synthetic
caucucacaccaaguuuaaua

SEQ ID NO: 36320 - RNA, 22 nt, Artificial Sequence
  Synthetic
ucaucucacaccaaguuuaaua

SEQ ID NO: 36321 - RNA, 23 nt, Artificial Sequence
  Synthetic
cucaucucacaccaaguuuaaua

SEQ ID NO: 36322 - RNA, 18 nt, Artificial Sequence
  Synthetic
uguccucguaaaaacaua

SEQ ID NO: 36323 - RNA, 19 nt, Artificial Sequence
  Synthetic
auguccucguaaaaacaua

SEQ ID NO: 36324 - RNA, 20 nt, Artificial Sequence
  Synthetic
aauguccucguaaaaacaua

SEQ ID NO: 36325 - RNA, 21 nt, Artificial Sequence
  Synthetic
aaauguccucguaaaaacaua

SEQ ID NO: 36326 - RNA, 23 nt, Artificial Sequence
  Synthetic
agaaauguccucguaaaaacaua

SEQ ID NO: 36327 - RNA, 18 nt, Artificial Sequence
  Synthetic
caauuaaguucaaacaua

SEQ ID NO: 36328 - RNA, 19 nt, Artificial Sequence
  Synthetic
ucaauuaaguucaaacaua

SEQ ID NO: 36329 - RNA, 20 nt, Artificial Sequence
  Synthetic
uucaauuaaguucaaacaua

SEQ ID NO: 36330 - RNA, 21 nt, Artificial Sequence
  Synthetic
uuucaauuaaguucaaacaua

SEQ ID NO: 36331 - RNA, 22 nt, Artificial Sequence
  Synthetic
auuucaauuaaguucaaacaua

SEQ ID NO: 36332 - RNA, 23 nt, Artificial Sequence
  Synthetic
uauuucaauuaaguucaaacaua

SEQ ID NO: 36333 - RNA, 24 nt, Artificial Sequence
  Synthetic
uuauuucaauuaaguucaaacaua

SEQ ID NO: 36334 - RNA, 21 nt, Artificial Sequence
  Synthetic
uuuaccuuuauguuaaacaua

SEQ ID NO: 36335 - RNA, 22 nt, Artificial Sequence
  Synthetic
uuuuaccuuuauguuaaacaua

SEQ ID NO: 36336 - RNA, 23 nt, Artificial Sequence
  Synthetic
cuuuuaccuuuauguuaaacaua

SEQ ID NO: 36337 - RNA, 24 nt, Artificial Sequence
  Synthetic
ucuuuuaccuuuauguuaaacaua

SEQ ID NO: 36338 - RNA, 18 nt, Artificial Sequence
  Synthetic
agcauucaacucaacaua

SEQ ID NO: 36339 - RNA, 19 nt, Artificial Sequence
  Synthetic
aagcauucaacucaacaua

SEQ ID NO: 36340 - RNA, 20 nt, Artificial Sequence
  Synthetic
uaagcauucaacucaacaua

SEQ ID NO: 36341 - RNA, 21 nt, Artificial Sequence
  Synthetic
cuaagcauucaacucaacaua

SEQ ID NO: 36342 - RNA, 22 nt, Artificial Sequence
  Synthetic
acuaagcauucaacucaacaua

SEQ ID NO: 36343 - RNA, 23 nt, Artificial Sequence
  Synthetic
uacuaagcauucaacucaacaua

SEQ ID NO: 36344 - RNA, 24 nt, Artificial Sequence
  Synthetic
auacuaagcauucaacucaacaua

SEQ ID NO: 36345 - RNA, 19 nt, Artificial Sequence
  Synthetic
ugauuuuuuauugaacaua

SEQ ID NO: 36346 - RNA, 20 nt, Artificial Sequence
  Synthetic
augauuuuuuauugaacaua

SEQ ID NO: 36347 - RNA, 21 nt, Artificial Sequence
  Synthetic
aaugauuuuuuauugaacaua

SEQ ID NO: 36348 - RNA, 22 nt, Artificial Sequence
  Synthetic
uaaugauuuuuuauugaacaua

SEQ ID NO: 36349 - RNA, 23 nt, Artificial Sequence
  Synthetic
auaaugauuuuuuauugaacaua

SEQ ID NO: 36350 - RNA, 24 nt, Artificial Sequence
  Synthetic
cauaaugauuuuuuauugaacaua

SEQ ID NO: 36351 - RNA, 21 nt, Artificial Sequence
  Synthetic
agaagccauacugauaacaua

SEQ ID NO: 36352 - RNA, 22 nt, Artificial Sequence
  Synthetic
cagaagccauacugauaacaua

SEQ ID NO: 36353 - RNA, 23 nt, Artificial Sequence
  Synthetic
acagaagccauacugauaacaua

SEQ ID NO: 36354 - RNA, 18 nt, Artificial Sequence
  Synthetic
uaccugugcuauaacaua

SEQ ID NO: 36355 - RNA, 19 nt, Artificial Sequence
  Synthetic
auaccugugcuauaacaua

SEQ ID NO: 36356 - RNA, 20 nt, Artificial Sequence
  Synthetic
aauaccugugcuauaacaua

SEQ ID NO: 36357 - RNA, 21 nt, Artificial Sequence
  Synthetic
caauaccugugcuauaacaua

SEQ ID NO: 36358 - RNA, 22 nt, Artificial Sequence
  Synthetic
ucaauaccugugcuauaacaua

SEQ ID NO: 36359 - RNA, 24 nt, Artificial Sequence
  Synthetic
ugucaauaccugugcuauaacaua

SEQ ID NO: 36360 - RNA, 18 nt, Artificial Sequence
  Synthetic
uuaauagguuguaacaua

SEQ ID NO: 36361 - RNA, 21 nt, Artificial Sequence
  Synthetic
ugguuaauagguuguaacaua

SEQ ID NO: 36362 - RNA, 22 nt, Artificial Sequence
  Synthetic
uugguuaauagguuguaacaua

SEQ ID NO: 36363 - RNA, 23 nt, Artificial Sequence
  Synthetic
uuugguuaauagguuguaacaua

SEQ ID NO: 36364 - RNA, 24 nt, Artificial Sequence
  Synthetic
uuuugguuaauagguuguaacaua

SEQ ID NO: 36365 - RNA, 18 nt, Artificial Sequence
  Synthetic
aaugaauuacaacacaua

SEQ ID NO: 36366 - RNA, 19 nt, Artificial Sequence
  Synthetic
caaugaauuacaacacaua

SEQ ID NO: 36367 - RNA, 20 nt, Artificial Sequence
  Synthetic
acaaugaauuacaacacaua

SEQ ID NO: 36368 - RNA, 21 nt, Artificial Sequence
  Synthetic
uacaaugaauuacaacacaua

SEQ ID NO: 36369 - RNA, 22 nt, Artificial Sequence
  Synthetic
auacaaugaauuacaacacaua

SEQ ID NO: 36370 - RNA, 23 nt, Artificial Sequence
  Synthetic
aauacaaugaauuacaacacaua

SEQ ID NO: 36371 - RNA, 18 nt, Artificial Sequence
  Synthetic
ucugcguuuagacacaua

SEQ ID NO: 36372 - RNA, 19 nt, Artificial Sequence
  Synthetic
aucugcguuuagacacaua

SEQ ID NO: 36373 - RNA, 20 nt, Artificial Sequence
  Synthetic
caucugcguuuagacacaua

SEQ ID NO: 36374 - RNA, 21 nt, Artificial Sequence
  Synthetic
acaucugcguuuagacacaua

SEQ ID NO: 36375 - RNA, 22 nt, Artificial Sequence
  Synthetic
aacaucugcguuuagacacaua

SEQ ID NO: 36376 - RNA, 23 nt, Artificial Sequence
  Synthetic
aaacaucugcguuuagacacaua

SEQ ID NO: 36377 - RNA, 24 nt, Artificial Sequence
  Synthetic
aaaacaucugcguuuagacacaua

SEQ ID NO: 36378 - RNA, 20 nt, Artificial Sequence
  Synthetic
agguguugcguggccacaua

SEQ ID NO: 36379 - RNA, 21 nt, Artificial Sequence
  Synthetic
aagguguugcguggccacaua

SEQ ID NO: 36380 - RNA, 22 nt, Artificial Sequence
  Synthetic
aaagguguugcguggccacaua

SEQ ID NO: 36381 - RNA, 23 nt, Artificial Sequence
  Synthetic
uaaagguguugcguggccacaua

SEQ ID NO: 36382 - RNA, 24 nt, Artificial Sequence
  Synthetic
uuaaagguguugcguggccacaua

SEQ ID NO: 36383 - RNA, 18 nt, Artificial Sequence
  Synthetic
uagucauacuuccacaua

SEQ ID NO: 36384 - RNA, 19 nt, Artificial Sequence
  Synthetic
uuagucauacuuccacaua

SEQ ID NO: 36385 - RNA, 20 nt, Artificial Sequence
  Synthetic
auuagucauacuuccacaua

SEQ ID NO: 36386 - RNA, 21 nt, Artificial Sequence
  Synthetic
uauuagucauacuuccacaua

SEQ ID NO: 36387 - RNA, 22 nt, Artificial Sequence
  Synthetic
uuauuagucauacuuccacaua

SEQ ID NO: 36388 - RNA, 23 nt, Artificial Sequence
  Synthetic
auuauuagucauacuuccacaua

SEQ ID NO: 36389 - RNA, 24 nt, Artificial Sequence
  Synthetic
uauuauuagucauacuuccacaua

SEQ ID NO: 36390 - RNA, 18 nt, Artificial Sequence
  Synthetic
auacaugauaagcacaua

SEQ ID NO: 36391 - RNA, 20 nt, Artificial Sequence
  Synthetic
agauacaugauaagcacaua

SEQ ID NO: 36392 - RNA, 21 nt, Artificial Sequence
  Synthetic
aagauacaugauaagcacaua

SEQ ID NO: 36393 - RNA, 20 nt, Artificial Sequence
  Synthetic
aggacaguaacucgcacaua

SEQ ID NO: 36394 - RNA, 21 nt, Artificial Sequence
  Synthetic
uaggacaguaacucgcacaua

SEQ ID NO: 36395 - RNA, 22 nt, Artificial Sequence
  Synthetic
uuaggacaguaacucgcacaua

SEQ ID NO: 36396 - RNA, 23 nt, Artificial Sequence
  Synthetic
uuuaggacaguaacucgcacaua

SEQ ID NO: 36397 - RNA, 24 nt, Artificial Sequence
  Synthetic
auuuaggacaguaacucgcacaua

SEQ ID NO: 36398 - RNA, 19 nt, Artificial Sequence
  Synthetic
agacucaugcauucacaua

SEQ ID NO: 36399 - RNA, 20 nt, Artificial Sequence
  Synthetic
uagacucaugcauucacaua

SEQ ID NO: 36400 - RNA, 21 nt, Artificial Sequence
  Synthetic
uuagacucaugcauucacaua

SEQ ID NO: 36401 - RNA, 22 nt, Artificial Sequence
  Synthetic
auuagacucaugcauucacaua

SEQ ID NO: 36402 - RNA, 18 nt, Artificial Sequence
  Synthetic
cuuuuuaggcuucacaua

SEQ ID NO: 36403 - RNA, 19 nt, Artificial Sequence
  Synthetic
ccuuuuuaggcuucacaua

SEQ ID NO: 36404 - RNA, 20 nt, Artificial Sequence
  Synthetic
cccuuuuuaggcuucacaua

SEQ ID NO: 36405 - RNA, 22 nt, Artificial Sequence
  Synthetic
cgcccuuuuuaggcuucacaua

SEQ ID NO: 36406 - RNA, 23 nt, Artificial Sequence
  Synthetic
ucgcccuuuuuaggcuucacaua

SEQ ID NO: 36407 - RNA, 24 nt, Artificial Sequence
  Synthetic
cucgcccuuuuuaggcuucacaua

SEQ ID NO: 36408 - RNA, 19 nt, Artificial Sequence
  Synthetic
aggcuguagagcagacaua

SEQ ID NO: 36409 - RNA, 20 nt, Artificial Sequence
  Synthetic
uaggcuguagagcagacaua

SEQ ID NO: 36410 - RNA, 21 nt, Artificial Sequence
  Synthetic
auaggcuguagagcagacaua

SEQ ID NO: 36411 - RNA, 23 nt, Artificial Sequence
  Synthetic
agauaggcuguagagcagacaua

SEQ ID NO: 36412 - RNA, 24 nt, Artificial Sequence
  Synthetic
uagauaggcuguagagcagacaua

SEQ ID NO: 36413 - RNA, 19 nt, Artificial Sequence
  Synthetic
agcccgucucggggacaua

SEQ ID NO: 36414 - RNA, 20 nt, Artificial Sequence
  Synthetic
cagcccgucucggggacaua

SEQ ID NO: 36415 - RNA, 22 nt, Artificial Sequence
  Synthetic
ugcagcccgucucggggacaua

SEQ ID NO: 36416 - RNA, 24 nt, Artificial Sequence
  Synthetic
cgugcagcccgucucggggacaua

SEQ ID NO: 36417 - RNA, 18 nt, Artificial Sequence
  Synthetic
cagaugaagacugacaua

SEQ ID NO: 36418 - RNA, 19 nt, Artificial Sequence
  Synthetic
acagaugaagacugacaua

SEQ ID NO: 36419 - RNA, 20 nt, Artificial Sequence
  Synthetic
cacagaugaagacugacaua

SEQ ID NO: 36420 - RNA, 21 nt, Artificial Sequence
  Synthetic
ucacagaugaagacugacaua

SEQ ID NO: 36421 - RNA, 22 nt, Artificial Sequence
  Synthetic
aucacagaugaagacugacaua

SEQ ID NO: 36422 - RNA, 23 nt, Artificial Sequence
  Synthetic
uaucacagaugaagacugacaua

SEQ ID NO: 36423 - RNA, 18 nt, Artificial Sequence
  Synthetic
uuccuguaucaguacaua

SEQ ID NO: 36424 - RNA, 19 nt, Artificial Sequence
  Synthetic
uuuccuguaucaguacaua

SEQ ID NO: 36425 - RNA, 20 nt, Artificial Sequence
  Synthetic
uuuuccuguaucaguacaua

SEQ ID NO: 36426 - RNA, 21 nt, Artificial Sequence
  Synthetic
auuuuccuguaucaguacaua

SEQ ID NO: 36427 - RNA, 22 nt, Artificial Sequence
  Synthetic
cauuuuccuguaucaguacaua

SEQ ID NO: 36428 - RNA, 23 nt, Artificial Sequence
  Synthetic
acauuuuccuguaucaguacaua

SEQ ID NO: 36429 - RNA, 18 nt, Artificial Sequence
  Synthetic
aucugaaaagguuacaua

SEQ ID NO: 36430 - RNA, 19 nt, Artificial Sequence
  Synthetic
caucugaaaagguuacaua

SEQ ID NO: 36431 - RNA, 20 nt, Artificial Sequence
  Synthetic
ucaucugaaaagguuacaua

SEQ ID NO: 36432 - RNA, 21 nt, Artificial Sequence
  Synthetic
cucaucugaaaagguuacaua

SEQ ID NO: 36433 - RNA, 23 nt, Artificial Sequence
  Synthetic
agcucaucugaaaagguuacaua

SEQ ID NO: 36434 - RNA, 24 nt, Artificial Sequence
  Synthetic
cagcucaucugaaaagguuacaua

SEQ ID NO: 36435 - RNA, 18 nt, Artificial Sequence
  Synthetic
aacgcuuuagagaccaua

SEQ ID NO: 36436 - RNA, 19 nt, Artificial Sequence
  Synthetic
uaacgcuuuagagaccaua

SEQ ID NO: 36437 - RNA, 20 nt, Artificial Sequence
  Synthetic
auaacgcuuuagagaccaua

SEQ ID NO: 36438 - RNA, 21 nt, Artificial Sequence
  Synthetic
cauaacgcuuuagagaccaua

SEQ ID NO: 36439 - RNA, 23 nt, Artificial Sequence
  Synthetic
agcauaacgcuuuagagaccaua

SEQ ID NO: 36440 - RNA, 18 nt, Artificial Sequence
  Synthetic
uucuuuuacaauaccaua

SEQ ID NO: 36441 - RNA, 20 nt, Artificial Sequence
  Synthetic
cguucuuuuacaauaccaua

SEQ ID NO: 36442 - RNA, 21 nt, Artificial Sequence
  Synthetic
acguucuuuuacaauaccaua

SEQ ID NO: 36443 - RNA, 22 nt, Artificial Sequence
  Synthetic
uacguucuuuuacaauaccaua

SEQ ID NO: 36444 - RNA, 18 nt, Artificial Sequence
  Synthetic
uuuucauauaguaccaua

SEQ ID NO: 36445 - RNA, 20 nt, Artificial Sequence
  Synthetic
cguuuucauauaguaccaua

SEQ ID NO: 36446 - RNA, 21 nt, Artificial Sequence
  Synthetic
acguuuucauauaguaccaua

SEQ ID NO: 36447 - RNA, 22 nt, Artificial Sequence
  Synthetic
cacguuuucauauaguaccaua

SEQ ID NO: 36448 - RNA, 23 nt, Artificial Sequence
  Synthetic
ccacguuuucauauaguaccaua

SEQ ID NO: 36449 - RNA, 21 nt, Artificial Sequence
  Synthetic
aaaguauuaguuugagccaua

SEQ ID NO: 36450 - RNA, 22 nt, Artificial Sequence
  Synthetic
uaaaguauuaguuugagccaua

SEQ ID NO: 36451 - RNA, 23 nt, Artificial Sequence
  Synthetic
uuaaaguauuaguuugagccaua

SEQ ID NO: 36452 - RNA, 18 nt, Artificial Sequence
  Synthetic
aaccuuucucaauccaua

SEQ ID NO: 36453 - RNA, 19 nt, Artificial Sequence
  Synthetic
caaccuuucucaauccaua

SEQ ID NO: 36454 - RNA, 20 nt, Artificial Sequence
  Synthetic
ucaaccuuucucaauccaua

SEQ ID NO: 36455 - RNA, 22 nt, Artificial Sequence
  Synthetic
agucaaccuuucucaauccaua

SEQ ID NO: 36456 - RNA, 23 nt, Artificial Sequence
  Synthetic
aagucaaccuuucucaauccaua

SEQ ID NO: 36457 - RNA, 24 nt, Artificial Sequence
  Synthetic
uaagucaaccuuucucaauccaua

SEQ ID NO: 36458 - RNA, 21 nt, Artificial Sequence
  Synthetic
cuggagaaugagguguccaua

SEQ ID NO: 36459 - RNA, 22 nt, Artificial Sequence
  Synthetic
ucuggagaaugagguguccaua

SEQ ID NO: 36460 - RNA, 23 nt, Artificial Sequence
  Synthetic
cucuggagaaugagguguccaua

SEQ ID NO: 36461 - RNA, 18 nt, Artificial Sequence
  Synthetic
aacagacuuucuuccaua

SEQ ID NO: 36462 - RNA, 19 nt, Artificial Sequence
  Synthetic
aaacagacuuucuuccaua

SEQ ID NO: 36463 - RNA, 20 nt, Artificial Sequence
  Synthetic
uaaacagacuuucuuccaua

SEQ ID NO: 36464 - RNA, 21 nt, Artificial Sequence
  Synthetic
cuaaacagacuuucuuccaua

SEQ ID NO: 36465 - RNA, 22 nt, Artificial Sequence
  Synthetic
acuaaacagacuuucuuccaua

SEQ ID NO: 36466 - RNA, 23 nt, Artificial Sequence
  Synthetic
aacuaaacagacuuucuuccaua

SEQ ID NO: 36467 - RNA, 24 nt, Artificial Sequence
  Synthetic
caacuaaacagacuuucuuccaua

SEQ ID NO: 36468 - RNA, 18 nt, Artificial Sequence
  Synthetic
uuuaugguauuuuccaua

SEQ ID NO: 36469 - RNA, 19 nt, Artificial Sequence
  Synthetic
uuuuaugguauuuuccaua

SEQ ID NO: 36470 - RNA, 20 nt, Artificial Sequence
  Synthetic
auuuuaugguauuuuccaua

SEQ ID NO: 36471 - RNA, 21 nt, Artificial Sequence
  Synthetic
aauuuuaugguauuuuccaua

SEQ ID NO: 36472 - RNA, 22 nt, Artificial Sequence
  Synthetic
caauuuuaugguauuuuccaua

SEQ ID NO: 36473 - RNA, 23 nt, Artificial Sequence
  Synthetic
ucaauuuuaugguauuuuccaua

SEQ ID NO: 36474 - RNA, 24 nt, Artificial Sequence
  Synthetic
aucaauuuuaugguauuuuccaua

SEQ ID NO: 36475 - RNA, 19 nt, Artificial Sequence
  Synthetic
uguaaagagugaaagcaua

SEQ ID NO: 36476 - RNA, 20 nt, Artificial Sequence
  Synthetic
uuguaaagagugaaagcaua

SEQ ID NO: 36477 - RNA, 21 nt, Artificial Sequence
  Synthetic
uuuguaaagagugaaagcaua

SEQ ID NO: 36478 - RNA, 22 nt, Artificial Sequence
  Synthetic
uuuuguaaagagugaaagcaua

SEQ ID NO: 36479 - RNA, 23 nt, Artificial Sequence
  Synthetic
auuuuguaaagagugaaagcaua

SEQ ID NO: 36480 - RNA, 24 nt, Artificial Sequence
  Synthetic
uauuuuguaaagagugaaagcaua

SEQ ID NO: 36481 - RNA, 18 nt, Artificial Sequence
  Synthetic
auuuaucuggcaagcaua

SEQ ID NO: 36482 - RNA, 20 nt, Artificial Sequence
  Synthetic
agauuuaucuggcaagcaua

SEQ ID NO: 36483 - RNA, 22 nt, Artificial Sequence
  Synthetic
agagauuuaucuggcaagcaua

SEQ ID NO: 36484 - RNA, 23 nt, Artificial Sequence
  Synthetic
cagagauuuaucuggcaagcaua

SEQ ID NO: 36485 - RNA, 18 nt, Artificial Sequence
  Synthetic
uagugcaguagcagcaua

SEQ ID NO: 36486 - RNA, 19 nt, Artificial Sequence
  Synthetic
auagugcaguagcagcaua

SEQ ID NO: 36487 - RNA, 20 nt, Artificial Sequence
  Synthetic
cauagugcaguagcagcaua

SEQ ID NO: 36488 - RNA, 21 nt, Artificial Sequence
  Synthetic
acauagugcaguagcagcaua

SEQ ID NO: 36489 - RNA, 22 nt, Artificial Sequence
  Synthetic
cacauagugcaguagcagcaua

SEQ ID NO: 36490 - RNA, 24 nt, Artificial Sequence
  Synthetic
agcacauagugcaguagcagcaua

SEQ ID NO: 36491 - RNA, 18 nt, Artificial Sequence
  Synthetic
uucugaguacagagcaua

SEQ ID NO: 36492 - RNA, 19 nt, Artificial Sequence
  Synthetic
auucugaguacagagcaua

SEQ ID NO: 36493 - RNA, 20 nt, Artificial Sequence
  Synthetic
uauucugaguacagagcaua

SEQ ID NO: 36494 - RNA, 21 nt, Artificial Sequence
  Synthetic
cuauucugaguacagagcaua

SEQ ID NO: 36495 - RNA, 22 nt, Artificial Sequence
  Synthetic
ccuauucugaguacagagcaua

SEQ ID NO: 36496 - RNA, 23 nt, Artificial Sequence
  Synthetic
uccuauucugaguacagagcaua

SEQ ID NO: 36497 - RNA, 24 nt, Artificial Sequence
  Synthetic
uuccuauucugaguacagagcaua

SEQ ID NO: 36498 - RNA, 21 nt, Artificial Sequence
  Synthetic
acagccagcuaugugagcaua

SEQ ID NO: 36499 - RNA, 23 nt, Artificial Sequence
  Synthetic
cgacagccagcuaugugagcaua

SEQ ID NO: 36500 - RNA, 24 nt, Artificial Sequence
  Synthetic
ucgacagccagcuaugugagcaua

SEQ ID NO: 36501 - RNA, 18 nt, Artificial Sequence
  Synthetic
auaaauaauaugggcaua

SEQ ID NO: 36502 - RNA, 19 nt, Artificial Sequence
  Synthetic
aauaaauaauaugggcaua

SEQ ID NO: 36503 - RNA, 20 nt, Artificial Sequence
  Synthetic
aaauaaauaauaugggcaua

SEQ ID NO: 36504 - RNA, 21 nt, Artificial Sequence
  Synthetic
aaaauaaauaauaugggcaua

SEQ ID NO: 36505 - RNA, 23 nt, Artificial Sequence
  Synthetic
agaaaauaaauaauaugggcaua

SEQ ID NO: 36506 - RNA, 24 nt, Artificial Sequence
  Synthetic
uagaaaauaaauaauaugggcaua

SEQ ID NO: 36507 - RNA, 18 nt, Artificial Sequence
  Synthetic
uagacauuacauggcaua

SEQ ID NO: 36508 - RNA, 20 nt, Artificial Sequence
  Synthetic
cguagacauuacauggcaua

SEQ ID NO: 36509 - RNA, 21 nt, Artificial Sequence
  Synthetic
acguagacauuacauggcaua

SEQ ID NO: 36510 - RNA, 22 nt, Artificial Sequence
  Synthetic
aacguagacauuacauggcaua

SEQ ID NO: 36511 - RNA, 23 nt, Artificial Sequence
  Synthetic
uaacguagacauuacauggcaua

SEQ ID NO: 36512 - RNA, 18 nt, Artificial Sequence
  Synthetic
auuaaauguuacugcaua

SEQ ID NO: 36513 - RNA, 19 nt, Artificial Sequence
  Synthetic
uauuaaauguuacugcaua

SEQ ID NO: 36514 - RNA, 20 nt, Artificial Sequence
  Synthetic
auauuaaauguuacugcaua

SEQ ID NO: 36515 - RNA, 21 nt, Artificial Sequence
  Synthetic
aauauuaaauguuacugcaua

SEQ ID NO: 36516 - RNA, 22 nt, Artificial Sequence
  Synthetic
aaauauuaaauguuacugcaua

SEQ ID NO: 36517 - RNA, 23 nt, Artificial Sequence
  Synthetic
aaaauauuaaauguuacugcaua

SEQ ID NO: 36518 - RNA, 24 nt, Artificial Sequence
  Synthetic
aaaaauauuaaauguuacugcaua

SEQ ID NO: 36519 - RNA, 18 nt, Artificial Sequence
  Synthetic
auuaauaauucuugcaua

SEQ ID NO: 36520 - RNA, 20 nt, Artificial Sequence
  Synthetic
ugauuaauaauucuugcaua

SEQ ID NO: 36521 - RNA, 22 nt, Artificial Sequence
  Synthetic
agugauuaauaauucuugcaua

SEQ ID NO: 36522 - RNA, 24 nt, Artificial Sequence
  Synthetic
ugagugauuaauaauucuugcaua

SEQ ID NO: 36523 - RNA, 19 nt, Artificial Sequence
  Synthetic
agagccuauuugaaucaua

SEQ ID NO: 36524 - RNA, 20 nt, Artificial Sequence
  Synthetic
cagagccuauuugaaucaua

SEQ ID NO: 36525 - RNA, 23 nt, Artificial Sequence
  Synthetic
uggcagagccuauuugaaucaua

SEQ ID NO: 36526 - RNA, 24 nt, Artificial Sequence
  Synthetic
cuggcagagccuauuugaaucaua

SEQ ID NO: 36527 - RNA, 20 nt, Artificial Sequence
  Synthetic
agguguuaccacuuaucaua

SEQ ID NO: 36528 - RNA, 22 nt, Artificial Sequence
  Synthetic
agagguguuaccacuuaucaua

SEQ ID NO: 36529 - RNA, 23 nt, Artificial Sequence
  Synthetic
cagagguguuaccacuuaucaua

SEQ ID NO: 36530 - RNA, 24 nt, Artificial Sequence
  Synthetic
acagagguguuaccacuuaucaua

SEQ ID NO: 36531 - RNA, 21 nt, Artificial Sequence
  Synthetic
auguuaagaauuuuuaucaua

SEQ ID NO: 36532 - RNA, 22 nt, Artificial Sequence
  Synthetic
aauguuaagaauuuuuaucaua

SEQ ID NO: 36533 - RNA, 23 nt, Artificial Sequence
  Synthetic
aaauguuaagaauuuuuaucaua

SEQ ID NO: 36534 - RNA, 24 nt, Artificial Sequence
  Synthetic
aaaauguuaagaauuuuuaucaua

SEQ ID NO: 36535 - RNA, 18 nt, Artificial Sequence
  Synthetic
aauauccauuaccucaua

SEQ ID NO: 36536 - RNA, 19 nt, Artificial Sequence
  Synthetic
caauauccauuaccucaua

SEQ ID NO: 36537 - RNA, 21 nt, Artificial Sequence
  Synthetic
agcaauauccauuaccucaua

SEQ ID NO: 36538 - RNA, 22 nt, Artificial Sequence
  Synthetic
uagcaauauccauuaccucaua

SEQ ID NO: 36539 - RNA, 23 nt, Artificial Sequence
  Synthetic
cuagcaauauccauuaccucaua

SEQ ID NO: 36540 - RNA, 24 nt, Artificial Sequence
  Synthetic
ucuagcaauauccauuaccucaua

SEQ ID NO: 36541 - RNA, 18 nt, Artificial Sequence
  Synthetic
ucaagcaauucccucaua

SEQ ID NO: 36542 - RNA, 19 nt, Artificial Sequence
  Synthetic
cucaagcaauucccucaua

SEQ ID NO: 36543 - RNA, 20 nt, Artificial Sequence
  Synthetic
ucucaagcaauucccucaua

SEQ ID NO: 36544 - RNA, 21 nt, Artificial Sequence
  Synthetic
uucucaagcaauucccucaua

SEQ ID NO: 36545 - RNA, 22 nt, Artificial Sequence
  Synthetic
uuucucaagcaauucccucaua

SEQ ID NO: 36546 - RNA, 23 nt, Artificial Sequence
  Synthetic
auuucucaagcaauucccucaua

SEQ ID NO: 36547 - RNA, 24 nt, Artificial Sequence
  Synthetic
cauuucucaagcaauucccucaua

SEQ ID NO: 36548 - RNA, 18 nt, Artificial Sequence
  Synthetic
augggucuuacucucaua

SEQ ID NO: 36549 - RNA, 19 nt, Artificial Sequence
  Synthetic
uaugggucuuacucucaua

SEQ ID NO: 36550 - RNA, 20 nt, Artificial Sequence
  Synthetic
uuaugggucuuacucucaua

SEQ ID NO: 36551 - RNA, 22 nt, Artificial Sequence
  Synthetic
aguuaugggucuuacucucaua

SEQ ID NO: 36552 - RNA, 23 nt, Artificial Sequence
  Synthetic
uaguuaugggucuuacucucaua

SEQ ID NO: 36553 - RNA, 18 nt, Artificial Sequence
  Synthetic
acucuauuaauucucaua

SEQ ID NO: 36554 - RNA, 19 nt, Artificial Sequence
  Synthetic
aacucuauuaauucucaua

SEQ ID NO: 36555 - RNA, 20 nt, Artificial Sequence
  Synthetic
uaacucuauuaauucucaua

SEQ ID NO: 36556 - RNA, 21 nt, Artificial Sequence
  Synthetic
uuaacucuauuaauucucaua

SEQ ID NO: 36557 - RNA, 22 nt, Artificial Sequence
  Synthetic
auuaacucuauuaauucucaua

SEQ ID NO: 36558 - RNA, 23 nt, Artificial Sequence
  Synthetic
uauuaacucuauuaauucucaua

SEQ ID NO: 36559 - RNA, 24 nt, Artificial Sequence
  Synthetic
auauuaacucuauuaauucucaua

SEQ ID NO: 36560 - RNA, 20 nt, Artificial Sequence
  Synthetic
agguauuggauauggucaua

SEQ ID NO: 36561 - RNA, 21 nt, Artificial Sequence
  Synthetic
cagguauuggauauggucaua

SEQ ID NO: 36562 - RNA, 22 nt, Artificial Sequence
  Synthetic
ucagguauuggauauggucaua

SEQ ID NO: 36563 - RNA, 23 nt, Artificial Sequence
  Synthetic
uucagguauuggauauggucaua

SEQ ID NO: 36564 - RNA, 24 nt, Artificial Sequence
  Synthetic
auucagguauuggauauggucaua

SEQ ID NO: 36565 - RNA, 18 nt, Artificial Sequence
  Synthetic
uguaucagugaugucaua

SEQ ID NO: 36566 - RNA, 19 nt, Artificial Sequence
  Synthetic
cuguaucagugaugucaua

SEQ ID NO: 36567 - RNA, 20 nt, Artificial Sequence
  Synthetic
acuguaucagugaugucaua

SEQ ID NO: 36568 - RNA, 21 nt, Artificial Sequence
  Synthetic
uacuguaucagugaugucaua

SEQ ID NO: 36569 - RNA, 23 nt, Artificial Sequence
  Synthetic
aguacuguaucagugaugucaua

SEQ ID NO: 36570 - RNA, 24 nt, Artificial Sequence
  Synthetic
uaguacuguaucagugaugucaua

SEQ ID NO: 36571 - RNA, 18 nt, Artificial Sequence
  Synthetic
acuugugauaucuucaua

SEQ ID NO: 36572 - RNA, 19 nt, Artificial Sequence
  Synthetic
aacuugugauaucuucaua

SEQ ID NO: 36573 - RNA, 20 nt, Artificial Sequence
  Synthetic
aaacuugugauaucuucaua

SEQ ID NO: 36574 - RNA, 21 nt, Artificial Sequence
  Synthetic
uaaacuugugauaucuucaua

SEQ ID NO: 36575 - RNA, 22 nt, Artificial Sequence
  Synthetic
auaaacuugugauaucuucaua

SEQ ID NO: 36576 - RNA, 23 nt, Artificial Sequence
  Synthetic
aauaaacuugugauaucuucaua

SEQ ID NO: 36577 - RNA, 18 nt, Artificial Sequence
  Synthetic
aguauugauuuuuucaua

SEQ ID NO: 36578 - RNA, 19 nt, Artificial Sequence
  Synthetic
aaguauugauuuuuucaua

SEQ ID NO: 36579 - RNA, 20 nt, Artificial Sequence
  Synthetic
aaaguauugauuuuuucaua

SEQ ID NO: 36580 - RNA, 21 nt, Artificial Sequence
  Synthetic
uaaaguauugauuuuuucaua

SEQ ID NO: 36581 - RNA, 22 nt, Artificial Sequence
  Synthetic
uuaaaguauugauuuuuucaua

SEQ ID NO: 36582 - RNA, 23 nt, Artificial Sequence
  Synthetic
auuaaaguauugauuuuuucaua

SEQ ID NO: 36583 - RNA, 24 nt, Artificial Sequence
  Synthetic
uauuaaaguauugauuuuuucaua

SEQ ID NO: 36584 - RNA, 19 nt, Artificial Sequence
  Synthetic
aguguccaggcccaagaua

SEQ ID NO: 36585 - RNA, 22 nt, Artificial Sequence
  Synthetic
uggaguguccaggcccaagaua

SEQ ID NO: 36586 - RNA, 23 nt, Artificial Sequence
  Synthetic
cuggaguguccaggcccaagaua

SEQ ID NO: 36587 - RNA, 24 nt, Artificial Sequence
  Synthetic
ccuggaguguccaggcccaagaua

SEQ ID NO: 36588 - RNA, 18 nt, Artificial Sequence
  Synthetic
acccaaccgcucaagaua

SEQ ID NO: 36589 - RNA, 19 nt, Artificial Sequence
  Synthetic
cacccaaccgcucaagaua

SEQ ID NO: 36590 - RNA, 21 nt, Artificial Sequence
  Synthetic
agcacccaaccgcucaagaua

SEQ ID NO: 36591 - RNA, 22 nt, Artificial Sequence
  Synthetic
cagcacccaaccgcucaagaua

SEQ ID NO: 36592 - RNA, 23 nt, Artificial Sequence
  Synthetic
ucagcacccaaccgcucaagaua

SEQ ID NO: 36593 - RNA, 24 nt, Artificial Sequence
  Synthetic
aucagcacccaaccgcucaagaua

SEQ ID NO: 36594 - RNA, 18 nt, Artificial Sequence
  Synthetic
auauaauucaagaagaua

SEQ ID NO: 36595 - RNA, 19 nt, Artificial Sequence
  Synthetic
uauauaauucaagaagaua

SEQ ID NO: 36596 - RNA, 20 nt, Artificial Sequence
  Synthetic
uuauauaauucaagaagaua

SEQ ID NO: 36597 - RNA, 21 nt, Artificial Sequence
  Synthetic
auuauauaauucaagaagaua

SEQ ID NO: 36598 - RNA, 22 nt, Artificial Sequence
  Synthetic
uauuauauaauucaagaagaua

SEQ ID NO: 36599 - RNA, 24 nt, Artificial Sequence
  Synthetic
aguauuauauaauucaagaagaua

SEQ ID NO: 36600 - RNA, 18 nt, Artificial Sequence
  Synthetic
uggaaauagacuaagaua

SEQ ID NO: 36601 - RNA, 19 nt, Artificial Sequence
  Synthetic
cuggaaauagacuaagaua

SEQ ID NO: 36602 - RNA, 20 nt, Artificial Sequence
  Synthetic
ccuggaaauagacuaagaua

SEQ ID NO: 36603 - RNA, 21 nt, Artificial Sequence
  Synthetic
cccuggaaauagacuaagaua

SEQ ID NO: 36604 - RNA, 22 nt, Artificial Sequence
  Synthetic
ucccuggaaauagacuaagaua

SEQ ID NO: 36605 - RNA, 23 nt, Artificial Sequence
  Synthetic
cucccuggaaauagacuaagaua

SEQ ID NO: 36606 - RNA, 18 nt, Artificial Sequence
  Synthetic
aggugcauuuguaagaua

SEQ ID NO: 36607 - RNA, 19 nt, Artificial Sequence
  Synthetic
caggugcauuuguaagaua

SEQ ID NO: 36608 - RNA, 20 nt, Artificial Sequence
  Synthetic
acaggugcauuuguaagaua

SEQ ID NO: 36609 - RNA, 21 nt, Artificial Sequence
  Synthetic
cacaggugcauuuguaagaua

SEQ ID NO: 36610 - RNA, 22 nt, Artificial Sequence
  Synthetic
acacaggugcauuuguaagaua

SEQ ID NO: 36611 - RNA, 23 nt, Artificial Sequence
  Synthetic
cacacaggugcauuuguaagaua

SEQ ID NO: 36612 - RNA, 24 nt, Artificial Sequence
  Synthetic
ucacacaggugcauuuguaagaua

SEQ ID NO: 36613 - RNA, 18 nt, Artificial Sequence
  Synthetic
uuuuucugauuuaagaua

SEQ ID NO: 36614 - RNA, 20 nt, Artificial Sequence
  Synthetic
aguuuuucugauuuaagaua

SEQ ID NO: 36615 - RNA, 21 nt, Artificial Sequence
  Synthetic
caguuuuucugauuuaagaua

SEQ ID NO: 36616 - RNA, 22 nt, Artificial Sequence
  Synthetic
acaguuuuucugauuuaagaua

SEQ ID NO: 36617 - RNA, 23 nt, Artificial Sequence
  Synthetic
cacaguuuuucugauuuaagaua

SEQ ID NO: 36618 - RNA, 18 nt, Artificial Sequence
  Synthetic
auuaccauacaacagaua

SEQ ID NO: 36619 - RNA, 19 nt, Artificial Sequence
  Synthetic
uauuaccauacaacagaua

SEQ ID NO: 36620 - RNA, 21 nt, Artificial Sequence
  Synthetic
aguauuaccauacaacagaua

SEQ ID NO: 36621 - RNA, 22 nt, Artificial Sequence
  Synthetic
uaguauuaccauacaacagaua

SEQ ID NO: 36622 - RNA, 24 nt, Artificial Sequence
  Synthetic
aguaguauuaccauacaacagaua

SEQ ID NO: 36623 - RNA, 19 nt, Artificial Sequence
  Synthetic
ugauuucuagaaccagaua

SEQ ID NO: 36624 - RNA, 20 nt, Artificial Sequence
  Synthetic
augauuucuagaaccagaua

SEQ ID NO: 36625 - RNA, 21 nt, Artificial Sequence
  Synthetic
aaugauuucuagaaccagaua

SEQ ID NO: 36626 - RNA, 22 nt, Artificial Sequence
  Synthetic
aaaugauuucuagaaccagaua

SEQ ID NO: 36627 - RNA, 23 nt, Artificial Sequence
  Synthetic
aaaaugauuucuagaaccagaua

SEQ ID NO: 36628 - RNA, 24 nt, Artificial Sequence
  Synthetic
aaaaaugauuucuagaaccagaua

SEQ ID NO: 36629 - RNA, 18 nt, Artificial Sequence
  Synthetic
agagggaaaggccagaua

SEQ ID NO: 36630 - RNA, 19 nt, Artificial Sequence
  Synthetic
aagagggaaaggccagaua

SEQ ID NO: 36631 - RNA, 20 nt, Artificial Sequence
  Synthetic
aaagagggaaaggccagaua

SEQ ID NO: 36632 - RNA, 22 nt, Artificial Sequence
  Synthetic
agaaagagggaaaggccagaua

SEQ ID NO: 36633 - RNA, 23 nt, Artificial Sequence
  Synthetic
uagaaagagggaaaggccagaua

SEQ ID NO: 36634 - RNA, 24 nt, Artificial Sequence
  Synthetic
cuagaaagagggaaaggccagaua

SEQ ID NO: 36635 - RNA, 21 nt, Artificial Sequence
  Synthetic
uagauauaaauaauucagaua

SEQ ID NO: 36636 - RNA, 22 nt, Artificial Sequence
  Synthetic
auagauauaaauaauucagaua

SEQ ID NO: 36637 - RNA, 24 nt, Artificial Sequence
  Synthetic
ugauagauauaaauaauucagaua

SEQ ID NO: 36638 - RNA, 18 nt, Artificial Sequence
  Synthetic
aacccaaaugaagagaua

SEQ ID NO: 36639 - RNA, 20 nt, Artificial Sequence
  Synthetic
cgaacccaaaugaagagaua

SEQ ID NO: 36640 - RNA, 21 nt, Artificial Sequence
  Synthetic
ucgaacccaaaugaagagaua

SEQ ID NO: 36641 - RNA, 22 nt, Artificial Sequence
  Synthetic
cucgaacccaaaugaagagaua

SEQ ID NO: 36642 - RNA, 23 nt, Artificial Sequence
  Synthetic
acucgaacccaaaugaagagaua

SEQ ID NO: 36643 - RNA, 24 nt, Artificial Sequence
  Synthetic
aacucgaacccaaaugaagagaua

SEQ ID NO: 36644 - RNA, 18 nt, Artificial Sequence
  Synthetic
auuuguccuccagagaua

SEQ ID NO: 36645 - RNA, 19 nt, Artificial Sequence
  Synthetic
cauuuguccuccagagaua

SEQ ID NO: 36646 - RNA, 20 nt, Artificial Sequence
  Synthetic
acauuuguccuccagagaua

SEQ ID NO: 36647 - RNA, 21 nt, Artificial Sequence
  Synthetic
cacauuuguccuccagagaua

SEQ ID NO: 36648 - RNA, 22 nt, Artificial Sequence
  Synthetic
ucacauuuguccuccagagaua

SEQ ID NO: 36649 - RNA, 23 nt, Artificial Sequence
  Synthetic
uucacauuuguccuccagagaua

SEQ ID NO: 36650 - RNA, 24 nt, Artificial Sequence
  Synthetic
cuucacauuuguccuccagagaua

SEQ ID NO: 36651 - RNA, 21 nt, Artificial Sequence
  Synthetic
agggcagagaacauugagaua

SEQ ID NO: 36652 - RNA, 22 nt, Artificial Sequence
  Synthetic
aagggcagagaacauugagaua

SEQ ID NO: 36653 - RNA, 23 nt, Artificial Sequence
  Synthetic
aaagggcagagaacauugagaua

SEQ ID NO: 36654 - RNA, 24 nt, Artificial Sequence
  Synthetic
caaagggcagagaacauugagaua

SEQ ID NO: 36655 - RNA, 18 nt, Artificial Sequence
  Synthetic
uguagucaaguugagaua

SEQ ID NO: 36656 - RNA, 19 nt, Artificial Sequence
  Synthetic
auguagucaaguugagaua

SEQ ID NO: 36657 - RNA, 20 nt, Artificial Sequence
  Synthetic
aauguagucaaguugagaua

SEQ ID NO: 36658 - RNA, 22 nt, Artificial Sequence
  Synthetic
cgaauguagucaaguugagaua

SEQ ID NO: 36659 - RNA, 23 nt, Artificial Sequence
  Synthetic
acgaauguagucaaguugagaua

SEQ ID NO: 36660 - RNA, 24 nt, Artificial Sequence
  Synthetic
cacgaauguagucaaguugagaua

SEQ ID NO: 36661 - RNA, 18 nt, Artificial Sequence
  Synthetic
cauauuuagacauagaua

SEQ ID NO: 36662 - RNA, 20 nt, Artificial Sequence
  Synthetic
ugcauauuuagacauagaua

SEQ ID NO: 36663 - RNA, 21 nt, Artificial Sequence
  Synthetic
augcauauuuagacauagaua

SEQ ID NO: 36664 - RNA, 22 nt, Artificial Sequence
  Synthetic
caugcauauuuagacauagaua

SEQ ID NO: 36665 - RNA, 23 nt, Artificial Sequence
  Synthetic
acaugcauauuuagacauagaua

SEQ ID NO: 36666 - RNA, 24 nt, Artificial Sequence
  Synthetic
cacaugcauauuuagacauagaua

SEQ ID NO: 36667 - RNA, 18 nt, Artificial Sequence
  Synthetic
uuacuugucaaguagaua

SEQ ID NO: 36668 - RNA, 21 nt, Artificial Sequence
  Synthetic
ugguuacuugucaaguagaua

SEQ ID NO: 36669 - RNA, 22 nt, Artificial Sequence
  Synthetic
augguuacuugucaaguagaua

SEQ ID NO: 36670 - RNA, 23 nt, Artificial Sequence
  Synthetic
caugguuacuugucaaguagaua

SEQ ID NO: 36671 - RNA, 24 nt, Artificial Sequence
  Synthetic
ucaugguuacuugucaaguagaua

SEQ ID NO: 36672 - RNA, 19 nt, Artificial Sequence
  Synthetic
agucaacaucuuuacgaua

SEQ ID NO: 36673 - RNA, 20 nt, Artificial Sequence
  Synthetic
cagucaacaucuuuacgaua

SEQ ID NO: 36674 - RNA, 21 nt, Artificial Sequence
  Synthetic
ucagucaacaucuuuacgaua

SEQ ID NO: 36675 - RNA, 22 nt, Artificial Sequence
  Synthetic
cucagucaacaucuuuacgaua

SEQ ID NO: 36676 - RNA, 24 nt, Artificial Sequence
  Synthetic
agcucagucaacaucuuuacgaua

SEQ ID NO: 36677 - RNA, 18 nt, Artificial Sequence
  Synthetic
cucgugguuuccucgaua

SEQ ID NO: 36678 - RNA, 19 nt, Artificial Sequence
  Synthetic
acucgugguuuccucgaua

SEQ ID NO: 36679 - RNA, 20 nt, Artificial Sequence
  Synthetic
aacucgugguuuccucgaua

SEQ ID NO: 36680 - RNA, 21 nt, Artificial Sequence
  Synthetic
aaacucgugguuuccucgaua

SEQ ID NO: 36681 - RNA, 22 nt, Artificial Sequence
  Synthetic
caaacucgugguuuccucgaua

SEQ ID NO: 36682 - RNA, 23 nt, Artificial Sequence
  Synthetic
ucaaacucgugguuuccucgaua

SEQ ID NO: 36683 - RNA, 24 nt, Artificial Sequence
  Synthetic
cucaaacucgugguuuccucgaua

SEQ ID NO: 36684 - RNA, 19 nt, Artificial Sequence
  Synthetic
ugaucagguaccaaggaua

SEQ ID NO: 36685 - RNA, 18 nt, Artificial Sequence
  Synthetic
agagacaaacucaggaua

SEQ ID NO: 36686 - RNA, 19 nt, Artificial Sequence
  Synthetic
cagagacaaacucaggaua

SEQ ID NO: 36687 - RNA, 20 nt, Artificial Sequence
  Synthetic
ccagagacaaacucaggaua

SEQ ID NO: 36688 - RNA, 21 nt, Artificial Sequence
  Synthetic
accagagacaaacucaggaua

SEQ ID NO: 36689 - RNA, 22 nt, Artificial Sequence
  Synthetic
aaccagagacaaacucaggaua

SEQ ID NO: 36690 - RNA, 23 nt, Artificial Sequence
  Synthetic
uaaccagagacaaacucaggaua

SEQ ID NO: 36691 - RNA, 24 nt, Artificial Sequence
  Synthetic
auaaccagagacaaacucaggaua

SEQ ID NO: 36692 - RNA, 18 nt, Artificial Sequence
  Synthetic
aggaaaaaaaguaggaua

SEQ ID NO: 36693 - RNA, 19 nt, Artificial Sequence
  Synthetic
caggaaaaaaaguaggaua

SEQ ID NO: 36694 - RNA, 20 nt, Artificial Sequence
  Synthetic
ucaggaaaaaaaguaggaua

SEQ ID NO: 36695 - RNA, 21 nt, Artificial Sequence
  Synthetic
cucaggaaaaaaaguaggaua

SEQ ID NO: 36696 - RNA, 23 nt, Artificial Sequence
  Synthetic
ugcucaggaaaaaaaguaggaua

SEQ ID NO: 36697 - RNA, 24 nt, Artificial Sequence
  Synthetic
augcucaggaaaaaaaguaggaua

SEQ ID NO: 36698 - RNA, 18 nt, Artificial Sequence
  Synthetic
auuaguuauuuuaggaua

SEQ ID NO: 36699 - RNA, 19 nt, Artificial Sequence
  Synthetic
aauuaguuauuuuaggaua

SEQ ID NO: 36700 - RNA, 20 nt, Artificial Sequence
  Synthetic
aaauuaguuauuuuaggaua

SEQ ID NO: 36701 - RNA, 21 nt, Artificial Sequence
  Synthetic
caaauuaguuauuuuaggaua

SEQ ID NO: 36702 - RNA, 22 nt, Artificial Sequence
  Synthetic
ccaaauuaguuauuuuaggaua

SEQ ID NO: 36703 - RNA, 23 nt, Artificial Sequence
  Synthetic
accaaauuaguuauuuuaggaua

SEQ ID NO: 36704 - RNA, 24 nt, Artificial Sequence
  Synthetic
uaccaaauuaguuauuuuaggaua

SEQ ID NO: 36705 - RNA, 19 nt, Artificial Sequence
  Synthetic
uggagacucugaagggaua

SEQ ID NO: 36706 - RNA, 20 nt, Artificial Sequence
  Synthetic
auggagacucugaagggaua

SEQ ID NO: 36707 - RNA, 21 nt, Artificial Sequence
  Synthetic
aauggagacucugaagggaua

SEQ ID NO: 36708 - RNA, 22 nt, Artificial Sequence
  Synthetic
aaauggagacucugaagggaua

SEQ ID NO: 36709 - RNA, 23 nt, Artificial Sequence
  Synthetic
aaaauggagacucugaagggaua

SEQ ID NO: 36710 - RNA, 18 nt, Artificial Sequence
  Synthetic
cguuuggcucuauggaua

SEQ ID NO: 36711 - RNA, 21 nt, Artificial Sequence
  Synthetic
aggcguuuggcucuauggaua

SEQ ID NO: 36712 - RNA, 22 nt, Artificial Sequence
  Synthetic
uaggcguuuggcucuauggaua

SEQ ID NO: 36713 - RNA, 24 nt, Artificial Sequence
  Synthetic
aguaggcguuuggcucuauggaua

SEQ ID NO: 36714 - RNA, 18 nt, Artificial Sequence
  Synthetic
aguaaaaucaauuggaua

SEQ ID NO: 36715 - RNA, 19 nt, Artificial Sequence
  Synthetic
caguaaaaucaauuggaua

SEQ ID NO: 36716 - RNA, 20 nt, Artificial Sequence
  Synthetic
ucaguaaaaucaauuggaua

SEQ ID NO: 36717 - RNA, 21 nt, Artificial Sequence
  Synthetic
uucaguaaaaucaauuggaua

SEQ ID NO: 36718 - RNA, 22 nt, Artificial Sequence
  Synthetic
auucaguaaaaucaauuggaua

SEQ ID NO: 36719 - RNA, 23 nt, Artificial Sequence
  Synthetic
aauucaguaaaaucaauuggaua

SEQ ID NO: 36720 - RNA, 24 nt, Artificial Sequence
  Synthetic
caauucaguaaaaucaauuggaua

SEQ ID NO: 36721 - RNA, 18 nt, Artificial Sequence
  Synthetic
aaucuugaaacuaugaua

SEQ ID NO: 36722 - RNA, 19 nt, Artificial Sequence
  Synthetic
uaaucuugaaacuaugaua

SEQ ID NO: 36723 - RNA, 20 nt, Artificial Sequence
  Synthetic
uuaaucuugaaacuaugaua

SEQ ID NO: 36724 - RNA, 21 nt, Artificial Sequence
  Synthetic
auuaaucuugaaacuaugaua

SEQ ID NO: 36725 - RNA, 23 nt, Artificial Sequence
  Synthetic
agauuaaucuugaaacuaugaua

SEQ ID NO: 36726 - RNA, 24 nt, Artificial Sequence
  Synthetic
uagauuaaucuugaaacuaugaua

SEQ ID NO: 36727 - RNA, 18 nt, Artificial Sequence
  Synthetic
auuuccuuguguaugaua

SEQ ID NO: 36728 - RNA, 20 nt, Artificial Sequence
  Synthetic
ugauuuccuuguguaugaua

SEQ ID NO: 36729 - RNA, 21 nt, Artificial Sequence
  Synthetic
uugauuuccuuguguaugaua

SEQ ID NO: 36730 - RNA, 22 nt, Artificial Sequence
  Synthetic
uuugauuuccuuguguaugaua

SEQ ID NO: 36731 - RNA, 23 nt, Artificial Sequence
  Synthetic
auuugauuuccuuguguaugaua

SEQ ID NO: 36732 - RNA, 24 nt, Artificial Sequence
  Synthetic
aauuugauuuccuuguguaugaua

SEQ ID NO: 36733 - RNA, 18 nt, Artificial Sequence
  Synthetic
agucuaucccuuaugaua

SEQ ID NO: 36734 - RNA, 19 nt, Artificial Sequence
  Synthetic
aagucuaucccuuaugaua

SEQ ID NO: 36735 - RNA, 21 nt, Artificial Sequence
  Synthetic
agaagucuaucccuuaugaua

SEQ ID NO: 36736 - RNA, 22 nt, Artificial Sequence
  Synthetic
uagaagucuaucccuuaugaua

SEQ ID NO: 36737 - RNA, 24 nt, Artificial Sequence
  Synthetic
aguagaagucuaucccuuaugaua

SEQ ID NO: 36738 - RNA, 18 nt, Artificial Sequence
  Synthetic
uuucaccuguuuaugaua

SEQ ID NO: 36739 - RNA, 19 nt, Artificial Sequence
  Synthetic
cuuucaccuguuuaugaua

SEQ ID NO: 36740 - RNA, 21 nt, Artificial Sequence
  Synthetic
cgcuuucaccuguuuaugaua

SEQ ID NO: 36741 - RNA, 22 nt, Artificial Sequence
  Synthetic
ucgcuuucaccuguuuaugaua

SEQ ID NO: 36742 - RNA, 23 nt, Artificial Sequence
  Synthetic
cucgcuuucaccuguuuaugaua

SEQ ID NO: 36743 - RNA, 24 nt, Artificial Sequence
  Synthetic
acucgcuuucaccuguuuaugaua

SEQ ID NO: 36744 - RNA, 18 nt, Artificial Sequence
  Synthetic
uuugggcaacagcugaua

SEQ ID NO: 36745 - RNA, 19 nt, Artificial Sequence
  Synthetic
cuuugggcaacagcugaua

SEQ ID NO: 36746 - RNA, 21 nt, Artificial Sequence
  Synthetic
ugcuuugggcaacagcugaua

SEQ ID NO: 36747 - RNA, 22 nt, Artificial Sequence
  Synthetic
cugcuuugggcaacagcugaua

SEQ ID NO: 36748 - RNA, 23 nt, Artificial Sequence
  Synthetic
acugcuuugggcaacagcugaua

SEQ ID NO: 36749 - RNA, 24 nt, Artificial Sequence
  Synthetic
cacugcuuugggcaacagcugaua

SEQ ID NO: 36750 - RNA, 18 nt, Artificial Sequence
  Synthetic
aucuuauauaucuugaua

SEQ ID NO: 36751 - RNA, 19 nt, Artificial Sequence
  Synthetic
uaucuuauauaucuugaua

SEQ ID NO: 36752 - RNA, 21 nt, Artificial Sequence
  Synthetic
uguaucuuauauaucuugaua

SEQ ID NO: 36753 - RNA, 22 nt, Artificial Sequence
  Synthetic
auguaucuuauauaucuugaua

SEQ ID NO: 36754 - RNA, 23 nt, Artificial Sequence
  Synthetic
cauguaucuuauauaucuugaua

SEQ ID NO: 36755 - RNA, 24 nt, Artificial Sequence
  Synthetic
acauguaucuuauauaucuugaua

SEQ ID NO: 36756 - RNA, 23 nt, Artificial Sequence
  Synthetic
agggggauuuguugaauuugaua

SEQ ID NO: 36757 - RNA, 21 nt, Artificial Sequence
  Synthetic
cuuaagaucaauuaaaauaua

SEQ ID NO: 36758 - RNA, 22 nt, Artificial Sequence
  Synthetic
acuuaagaucaauuaaaauaua

SEQ ID NO: 36759 - RNA, 23 nt, Artificial Sequence
  Synthetic
uacuuaagaucaauuaaaauaua

SEQ ID NO: 36760 - RNA, 21 nt, Artificial Sequence
  Synthetic
uguuauuuucugugaaauaua

SEQ ID NO: 36761 - RNA, 22 nt, Artificial Sequence
  Synthetic
uuguuauuuucugugaaauaua

SEQ ID NO: 36762 - RNA, 23 nt, Artificial Sequence
  Synthetic
uuuguuauuuucugugaaauaua

SEQ ID NO: 36763 - RNA, 24 nt, Artificial Sequence
  Synthetic
auuuguuauuuucugugaaauaua

SEQ ID NO: 36764 - RNA, 18 nt, Artificial Sequence
  Synthetic
cucuagcuuauaaauaua

SEQ ID NO: 36765 - RNA, 19 nt, Artificial Sequence
  Synthetic
ucucuagcuuauaaauaua

SEQ ID NO: 36766 - RNA, 20 nt, Artificial Sequence
  Synthetic
aucucuagcuuauaaauaua

SEQ ID NO: 36767 - RNA, 21 nt, Artificial Sequence
  Synthetic
aaucucuagcuuauaaauaua

SEQ ID NO: 36768 - RNA, 22 nt, Artificial Sequence
  Synthetic
caaucucuagcuuauaaauaua

SEQ ID NO: 36769 - RNA, 23 nt, Artificial Sequence
  Synthetic
ccaaucucuagcuuauaaauaua

SEQ ID NO: 36770 - RNA, 24 nt, Artificial Sequence
  Synthetic
cccaaucucuagcuuauaaauaua

SEQ ID NO: 36771 - RNA, 19 nt, Artificial Sequence
  Synthetic
uguaacagagcuaaauaua

SEQ ID NO: 36772 - RNA, 20 nt, Artificial Sequence
  Synthetic
cuguaacagagcuaaauaua

SEQ ID NO: 36773 - RNA, 22 nt, Artificial Sequence
  Synthetic
ugcuguaacagagcuaaauaua

SEQ ID NO: 36774 - RNA, 23 nt, Artificial Sequence
  Synthetic
augcuguaacagagcuaaauaua

SEQ ID NO: 36775 - RNA, 18 nt, Artificial Sequence
  Synthetic
uucuaaguuaauaauaua

SEQ ID NO: 36776 - RNA, 19 nt, Artificial Sequence
  Synthetic
uuucuaaguuaauaauaua

SEQ ID NO: 36777 - RNA, 20 nt, Artificial Sequence
  Synthetic
auuucuaaguuaauaauaua

SEQ ID NO: 36778 - RNA, 21 nt, Artificial Sequence
  Synthetic
uauuucuaaguuaauaauaua

SEQ ID NO: 36779 - RNA, 23 nt, Artificial Sequence
  Synthetic
aguauuucuaaguuaauaauaua

SEQ ID NO: 36780 - RNA, 24 nt, Artificial Sequence
  Synthetic
uaguauuucuaaguuaauaauaua

SEQ ID NO: 36781 - RNA, 20 nt, Artificial Sequence
  Synthetic
uggucugacuauguaauaua

SEQ ID NO: 36782 - RNA, 21 nt, Artificial Sequence
  Synthetic
cuggucugacuauguaauaua

SEQ ID NO: 36783 - RNA, 22 nt, Artificial Sequence
  Synthetic
ccuggucugacuauguaauaua

SEQ ID NO: 36784 - RNA, 23 nt, Artificial Sequence
  Synthetic
uccuggucugacuauguaauaua

SEQ ID NO: 36785 - RNA, 24 nt, Artificial Sequence
  Synthetic
uuccuggucugacuauguaauaua

SEQ ID NO: 36786 - RNA, 18 nt, Artificial Sequence
  Synthetic
auuguauucauuaauaua

SEQ ID NO: 36787 - RNA, 20 nt, Artificial Sequence
  Synthetic
ugauuguauucauuaauaua

SEQ ID NO: 36788 - RNA, 21 nt, Artificial Sequence
  Synthetic
augauuguauucauuaauaua

SEQ ID NO: 36789 - RNA, 22 nt, Artificial Sequence
  Synthetic
aaugauuguauucauuaauaua

SEQ ID NO: 36790 - RNA, 23 nt, Artificial Sequence
  Synthetic
caaugauuguauucauuaauaua

SEQ ID NO: 36791 - RNA, 24 nt, Artificial Sequence
  Synthetic
acaaugauuguauucauuaauaua

SEQ ID NO: 36792 - RNA, 22 nt, Artificial Sequence
  Synthetic
ugaauauguuugaaaacauaua

SEQ ID NO: 36793 - RNA, 23 nt, Artificial Sequence
  Synthetic
cugaauauguuugaaaacauaua

SEQ ID NO: 36794 - RNA, 24 nt, Artificial Sequence
  Synthetic
ucugaauauguuugaaaacauaua

SEQ ID NO: 36795 - RNA, 21 nt, Artificial Sequence
  Synthetic
uuuuaauauauauaacauaua

SEQ ID NO: 36796 - RNA, 23 nt, Artificial Sequence
  Synthetic
uguuuuaauauauauaacauaua

SEQ ID NO: 36797 - RNA, 18 nt, Artificial Sequence
  Synthetic
uuuuccuuuuggcauaua

SEQ ID NO: 36798 - RNA, 19 nt, Artificial Sequence
  Synthetic
cuuuuccuuuuggcauaua

SEQ ID NO: 36799 - RNA, 21 nt, Artificial Sequence
  Synthetic
ugcuuuuccuuuuggcauaua

SEQ ID NO: 36800 - RNA, 22 nt, Artificial Sequence
  Synthetic
uugcuuuuccuuuuggcauaua

SEQ ID NO: 36801 - RNA, 23 nt, Artificial Sequence
  Synthetic
uuugcuuuuccuuuuggcauaua

SEQ ID NO: 36802 - RNA, 21 nt, Artificial Sequence
  Synthetic
auauauguaucugugcauaua

SEQ ID NO: 36803 - RNA, 23 nt, Artificial Sequence
  Synthetic
ugauauauguaucugugcauaua

SEQ ID NO: 36804 - RNA, 24 nt, Artificial Sequence
  Synthetic
augauauauguaucugugcauaua

SEQ ID NO: 36805 - RNA, 18 nt, Artificial Sequence
  Synthetic
ucuuaaauggaagauaua

SEQ ID NO: 36806 - RNA, 19 nt, Artificial Sequence
  Synthetic
cucuuaaauggaagauaua

SEQ ID NO: 36807 - RNA, 22 nt, Artificial Sequence
  Synthetic
uggcucuuaaauggaagauaua

SEQ ID NO: 36808 - RNA, 23 nt, Artificial Sequence
  Synthetic
auggcucuuaaauggaagauaua

SEQ ID NO: 36809 - RNA, 24 nt, Artificial Sequence
  Synthetic
cauggcucuuaaauggaagauaua

SEQ ID NO: 36810 - RNA, 19 nt, Artificial Sequence
  Synthetic
agacauaucaccagauaua

SEQ ID NO: 36811 - RNA, 20 nt, Artificial Sequence
  Synthetic
uagacauaucaccagauaua

SEQ ID NO: 36812 - RNA, 21 nt, Artificial Sequence
  Synthetic
uuagacauaucaccagauaua

SEQ ID NO: 36813 - RNA, 23 nt, Artificial Sequence
  Synthetic
uguuagacauaucaccagauaua

SEQ ID NO: 36814 - RNA, 24 nt, Artificial Sequence
  Synthetic
cuguuagacauaucaccagauaua

SEQ ID NO: 36815 - RNA, 21 nt, Artificial Sequence
  Synthetic
cuuucaguuuauuuugauaua

SEQ ID NO: 36816 - RNA, 22 nt, Artificial Sequence
  Synthetic
ucuuucaguuuauuuugauaua

SEQ ID NO: 36817 - RNA, 23 nt, Artificial Sequence
  Synthetic
uucuuucaguuuauuuugauaua

SEQ ID NO: 36818 - RNA, 24 nt, Artificial Sequence
  Synthetic
cuucuuucaguuuauuuugauaua

SEQ ID NO: 36819 - RNA, 21 nt, Artificial Sequence
  Synthetic
caaacggccaauaaauauaua

SEQ ID NO: 36820 - RNA, 22 nt, Artificial Sequence
  Synthetic
ccaaacggccaauaaauauaua

SEQ ID NO: 36821 - RNA, 23 nt, Artificial Sequence
  Synthetic
uccaaacggccaauaaauauaua

SEQ ID NO: 36822 - RNA, 24 nt, Artificial Sequence
  Synthetic
auccaaacggccaauaaauauaua

SEQ ID NO: 36823 - RNA, 18 nt, Artificial Sequence
  Synthetic
ugugcuaccaacuauaua

SEQ ID NO: 36824 - RNA, 19 nt, Artificial Sequence
  Synthetic
uugugcuaccaacuauaua

SEQ ID NO: 36825 - RNA, 21 nt, Artificial Sequence
  Synthetic
aguugugcuaccaacuauaua

SEQ ID NO: 36826 - RNA, 22 nt, Artificial Sequence
  Synthetic
caguugugcuaccaacuauaua

SEQ ID NO: 36827 - RNA, 23 nt, Artificial Sequence
  Synthetic
ucaguugugcuaccaacuauaua

SEQ ID NO: 36828 - RNA, 24 nt, Artificial Sequence
  Synthetic
cucaguugugcuaccaacuauaua

SEQ ID NO: 36829 - RNA, 21 nt, Artificial Sequence
  Synthetic
cucuuucuaugagucuauaua

SEQ ID NO: 36830 - RNA, 22 nt, Artificial Sequence
  Synthetic
acucuuucuaugagucuauaua

SEQ ID NO: 36831 - RNA, 23 nt, Artificial Sequence
  Synthetic
aacucuuucuaugagucuauaua

SEQ ID NO: 36832 - RNA, 24 nt, Artificial Sequence
  Synthetic
uaacucuuucuaugagucuauaua

SEQ ID NO: 36833 - RNA, 19 nt, Artificial Sequence
  Synthetic
uguucuagguuuguauaua

SEQ ID NO: 36834 - RNA, 20 nt, Artificial Sequence
  Synthetic
uuguucuagguuuguauaua

SEQ ID NO: 36835 - RNA, 21 nt, Artificial Sequence
  Synthetic
auuguucuagguuuguauaua

SEQ ID NO: 36836 - RNA, 22 nt, Artificial Sequence
  Synthetic
aauuguucuagguuuguauaua

SEQ ID NO: 36837 - RNA, 23 nt, Artificial Sequence
  Synthetic
aaauuguucuagguuuguauaua

SEQ ID NO: 36838 - RNA, 21 nt, Artificial Sequence
  Synthetic
aaagacauuuuuaauuauaua

SEQ ID NO: 36839 - RNA, 22 nt, Artificial Sequence
  Synthetic
aaaagacauuuuuaauuauaua

SEQ ID NO: 36840 - RNA, 23 nt, Artificial Sequence
  Synthetic
aaaaagacauuuuuaauuauaua

SEQ ID NO: 36841 - RNA, 18 nt, Artificial Sequence
  Synthetic
caauccauggguuauaua

SEQ ID NO: 36842 - RNA, 19 nt, Artificial Sequence
  Synthetic
ccaauccauggguuauaua

SEQ ID NO: 36843 - RNA, 20 nt, Artificial Sequence
  Synthetic
cccaauccauggguuauaua

SEQ ID NO: 36844 - RNA, 21 nt, Artificial Sequence
  Synthetic
ucccaauccauggguuauaua

SEQ ID NO: 36845 - RNA, 22 nt, Artificial Sequence
  Synthetic
aucccaauccauggguuauaua

SEQ ID NO: 36846 - RNA, 23 nt, Artificial Sequence
  Synthetic
caucccaauccauggguuauaua

SEQ ID NO: 36847 - RNA, 24 nt, Artificial Sequence
  Synthetic
ucaucccaauccauggguuauaua

SEQ ID NO: 36848 - RNA, 18 nt, Artificial Sequence
  Synthetic
uaagaaagaagaacuaua

SEQ ID NO: 36849 - RNA, 21 nt, Artificial Sequence
  Synthetic
ugguaagaaagaagaacuaua

SEQ ID NO: 36850 - RNA, 22 nt, Artificial Sequence
  Synthetic
augguaagaaagaagaacuaua

SEQ ID NO: 36851 - RNA, 23 nt, Artificial Sequence
  Synthetic
aaugguaagaaagaagaacuaua

SEQ ID NO: 36852 - RNA, 18 nt, Artificial Sequence
  Synthetic
ugugaguuacacacuaua

SEQ ID NO: 36853 - RNA, 19 nt, Artificial Sequence
  Synthetic
augugaguuacacacuaua

SEQ ID NO: 36854 - RNA, 20 nt, Artificial Sequence
  Synthetic
caugugaguuacacacuaua

SEQ ID NO: 36855 - RNA, 21 nt, Artificial Sequence
  Synthetic
ucaugugaguuacacacuaua

SEQ ID NO: 36856 - RNA, 22 nt, Artificial Sequence
  Synthetic
uucaugugaguuacacacuaua

SEQ ID NO: 36857 - RNA, 23 nt, Artificial Sequence
  Synthetic
uuucaugugaguuacacacuaua

SEQ ID NO: 36858 - RNA, 24 nt, Artificial Sequence
  Synthetic
uuuucaugugaguuacacacuaua

SEQ ID NO: 36859 - RNA, 22 nt, Artificial Sequence
  Synthetic
agucuuuacuuucuugacuaua

SEQ ID NO: 36860 - RNA, 23 nt, Artificial Sequence
  Synthetic
cagucuuuacuuucuugacuaua

SEQ ID NO: 36861 - RNA, 24 nt, Artificial Sequence
  Synthetic
ucagucuuuacuuucuugacuaua

SEQ ID NO: 36862 - RNA, 18 nt, Artificial Sequence
  Synthetic
aaguguuauuguacuaua

SEQ ID NO: 36863 - RNA, 19 nt, Artificial Sequence
  Synthetic
uaaguguuauuguacuaua

SEQ ID NO: 36864 - RNA, 21 nt, Artificial Sequence
  Synthetic
aguaaguguuauuguacuaua

SEQ ID NO: 36865 - RNA, 22 nt, Artificial Sequence
  Synthetic
caguaaguguuauuguacuaua

SEQ ID NO: 36866 - RNA, 23 nt, Artificial Sequence
  Synthetic
acaguaaguguuauuguacuaua

SEQ ID NO: 36867 - RNA, 19 nt, Artificial Sequence
  Synthetic
ugggaaauuuaaggcuaua

SEQ ID NO: 36868 - RNA, 20 nt, Artificial Sequence
  Synthetic
cugggaaauuuaaggcuaua

SEQ ID NO: 36869 - RNA, 21 nt, Artificial Sequence
  Synthetic
ccugggaaauuuaaggcuaua

SEQ ID NO: 36870 - RNA, 22 nt, Artificial Sequence
  Synthetic
accugggaaauuuaaggcuaua

SEQ ID NO: 36871 - RNA, 24 nt, Artificial Sequence
  Synthetic
agaccugggaaauuuaaggcuaua

SEQ ID NO: 36872 - RNA, 19 nt, Artificial Sequence
  Synthetic
agaaacaaaugcuucuaua

SEQ ID NO: 36873 - RNA, 20 nt, Artificial Sequence
  Synthetic
aagaaacaaaugcuucuaua

SEQ ID NO: 36874 - RNA, 21 nt, Artificial Sequence
  Synthetic
caagaaacaaaugcuucuaua

SEQ ID NO: 36875 - RNA, 22 nt, Artificial Sequence
  Synthetic
acaagaaacaaaugcuucuaua

SEQ ID NO: 36876 - RNA, 23 nt, Artificial Sequence
  Synthetic
uacaagaaacaaaugcuucuaua

SEQ ID NO: 36877 - RNA, 24 nt, Artificial Sequence
  Synthetic
auacaagaaacaaaugcuucuaua

SEQ ID NO: 36878 - RNA, 18 nt, Artificial Sequence
  Synthetic
caguuuagaauuucuaua

SEQ ID NO: 36879 - RNA, 19 nt, Artificial Sequence
  Synthetic
ccaguuuagaauuucuaua

SEQ ID NO: 36880 - RNA, 20 nt, Artificial Sequence
  Synthetic
accaguuuagaauuucuaua

SEQ ID NO: 36881 - RNA, 24 nt, Artificial Sequence
  Synthetic
cgggaccaguuuagaauuucuaua

SEQ ID NO: 36882 - RNA, 18 nt, Artificial Sequence
  Synthetic
uguuuguauucaaguaua

SEQ ID NO: 36883 - RNA, 19 nt, Artificial Sequence
  Synthetic
auguuuguauucaaguaua

SEQ ID NO: 36884 - RNA, 20 nt, Artificial Sequence
  Synthetic
uauguuuguauucaaguaua

SEQ ID NO: 36885 - RNA, 21 nt, Artificial Sequence
  Synthetic
uuauguuuguauucaaguaua

SEQ ID NO: 36886 - RNA, 22 nt, Artificial Sequence
  Synthetic
cuuauguuuguauucaaguaua

SEQ ID NO: 36887 - RNA, 24 nt, Artificial Sequence
  Synthetic
ugcuuauguuuguauucaaguaua

SEQ ID NO: 36888 - RNA, 18 nt, Artificial Sequence
  Synthetic
uuggagccuguaaguaua

SEQ ID NO: 36889 - RNA, 19 nt, Artificial Sequence
  Synthetic
auuggagccuguaaguaua

SEQ ID NO: 36890 - RNA, 20 nt, Artificial Sequence
  Synthetic
uauuggagccuguaaguaua

SEQ ID NO: 36891 - RNA, 21 nt, Artificial Sequence
  Synthetic
cuauuggagccuguaaguaua

SEQ ID NO: 36892 - RNA, 22 nt, Artificial Sequence
  Synthetic
acuauuggagccuguaaguaua

SEQ ID NO: 36893 - RNA, 23 nt, Artificial Sequence
  Synthetic
cacuauuggagccuguaaguaua

SEQ ID NO: 36894 - RNA, 24 nt, Artificial Sequence
  Synthetic
ccacuauuggagccuguaaguaua

SEQ ID NO: 36895 - RNA, 19 nt, Artificial Sequence
  Synthetic
aguugagaaucacaguaua

SEQ ID NO: 36896 - RNA, 20 nt, Artificial Sequence
  Synthetic
aaguugagaaucacaguaua

SEQ ID NO: 36897 - RNA, 21 nt, Artificial Sequence
  Synthetic
uaaguugagaaucacaguaua

SEQ ID NO: 36898 - RNA, 23 nt, Artificial Sequence
  Synthetic
cguaaguugagaaucacaguaua

SEQ ID NO: 36899 - RNA, 18 nt, Artificial Sequence
  Synthetic
acuaaagaaagcaguaua

SEQ ID NO: 36900 - RNA, 19 nt, Artificial Sequence
  Synthetic
uacuaaagaaagcaguaua

SEQ ID NO: 36901 - RNA, 20 nt, Artificial Sequence
  Synthetic
auacuaaagaaagcaguaua

SEQ ID NO: 36902 - RNA, 22 nt, Artificial Sequence
  Synthetic
ugauacuaaagaaagcaguaua

SEQ ID NO: 36903 - RNA, 24 nt, Artificial Sequence
  Synthetic
ugugauacuaaagaaagcaguaua

SEQ ID NO: 36904 - RNA, 18 nt, Artificial Sequence
  Synthetic
cacauaagaugcaguaua

SEQ ID NO: 36905 - RNA, 19 nt, Artificial Sequence
  Synthetic
ucacauaagaugcaguaua

SEQ ID NO: 36906 - RNA, 20 nt, Artificial Sequence
  Synthetic
uucacauaagaugcaguaua

SEQ ID NO: 36907 - RNA, 21 nt, Artificial Sequence
  Synthetic
auucacauaagaugcaguaua

SEQ ID NO: 36908 - RNA, 23 nt, Artificial Sequence
  Synthetic
agauucacauaagaugcaguaua

SEQ ID NO: 36909 - RNA, 24 nt, Artificial Sequence
  Synthetic
aagauucacauaagaugcaguaua

SEQ ID NO: 36910 - RNA, 19 nt, Artificial Sequence
  Synthetic
cgugugcauggcacguaua

SEQ ID NO: 36911 - RNA, 20 nt, Artificial Sequence
  Synthetic
ccgugugcauggcacguaua

SEQ ID NO: 36912 - RNA, 21 nt, Artificial Sequence
  Synthetic
accgugugcauggcacguaua

SEQ ID NO: 36913 - RNA, 23 nt, Artificial Sequence
  Synthetic
ugaccgugugcauggcacguaua

SEQ ID NO: 36914 - RNA, 24 nt, Artificial Sequence
  Synthetic
uugaccgugugcauggcacguaua

SEQ ID NO: 36915 - RNA, 19 nt, Artificial Sequence
  Synthetic
agauaaagcaaaauguaua

SEQ ID NO: 36916 - RNA, 20 nt, Artificial Sequence
  Synthetic
aagauaaagcaaaauguaua

SEQ ID NO: 36917 - RNA, 21 nt, Artificial Sequence
  Synthetic
uaagauaaagcaaaauguaua

SEQ ID NO: 36918 - RNA, 22 nt, Artificial Sequence
  Synthetic
uuaagauaaagcaaaauguaua

SEQ ID NO: 36919 - RNA, 23 nt, Artificial Sequence
  Synthetic
auuaagauaaagcaaaauguaua

SEQ ID NO: 36920 - RNA, 24 nt, Artificial Sequence
  Synthetic
uauuaagauaaagcaaaauguaua

SEQ ID NO: 36921 - RNA, 18 nt, Artificial Sequence
  Synthetic
uagcuuuaagaaauuaua

SEQ ID NO: 36922 - RNA, 19 nt, Artificial Sequence
  Synthetic
uuagcuuuaagaaauuaua

SEQ ID NO: 36923 - RNA, 21 nt, Artificial Sequence
  Synthetic
aguuagcuuuaagaaauuaua

SEQ ID NO: 36924 - RNA, 22 nt, Artificial Sequence
  Synthetic
uaguuagcuuuaagaaauuaua

SEQ ID NO: 36925 - RNA, 23 nt, Artificial Sequence
  Synthetic
uuaguuagcuuuaagaaauuaua

SEQ ID NO: 36926 - RNA, 24 nt, Artificial Sequence
  Synthetic
uuuaguuagcuuuaagaaauuaua

SEQ ID NO: 36927 - RNA, 18 nt, Artificial Sequence
  Synthetic
uguguauucauaauuaua

SEQ ID NO: 36928 - RNA, 20 nt, Artificial Sequence
  Synthetic
uguguguauucauaauuaua

SEQ ID NO: 36929 - RNA, 21 nt, Artificial Sequence
  Synthetic
auguguguauucauaauuaua

SEQ ID NO: 36930 - RNA, 22 nt, Artificial Sequence
  Synthetic
aauguguguauucauaauuaua

SEQ ID NO: 36931 - RNA, 23 nt, Artificial Sequence
  Synthetic
aaauguguguauucauaauuaua

SEQ ID NO: 36932 - RNA, 18 nt, Artificial Sequence
  Synthetic
uccacaacuaggauuaua

SEQ ID NO: 36933 - RNA, 19 nt, Artificial Sequence
  Synthetic
auccacaacuaggauuaua

SEQ ID NO: 36934 - RNA, 20 nt, Artificial Sequence
  Synthetic
aauccacaacuaggauuaua

SEQ ID NO: 36935 - RNA, 21 nt, Artificial Sequence
  Synthetic
aaauccacaacuaggauuaua

SEQ ID NO: 36936 - RNA, 22 nt, Artificial Sequence
  Synthetic
uaaauccacaacuaggauuaua

SEQ ID NO: 36937 - RNA, 23 nt, Artificial Sequence
  Synthetic
auaaauccacaacuaggauuaua

SEQ ID NO: 36938 - RNA, 24 nt, Artificial Sequence
  Synthetic
uauaaauccacaacuaggauuaua

SEQ ID NO: 36939 - RNA, 18 nt, Artificial Sequence
  Synthetic
aucaaaggccauauuaua

SEQ ID NO: 36940 - RNA, 19 nt, Artificial Sequence
  Synthetic
uaucaaaggccauauuaua

SEQ ID NO: 36941 - RNA, 20 nt, Artificial Sequence
  Synthetic
cuaucaaaggccauauuaua

SEQ ID NO: 36942 - RNA, 21 nt, Artificial Sequence
  Synthetic
ucuaucaaaggccauauuaua

SEQ ID NO: 36943 - RNA, 23 nt, Artificial Sequence
  Synthetic
ugucuaucaaaggccauauuaua

SEQ ID NO: 36944 - RNA, 24 nt, Artificial Sequence
  Synthetic
augucuaucaaaggccauauuaua

SEQ ID NO: 36945 - RNA, 19 nt, Artificial Sequence
  Synthetic
uguugcacucuauauuaua

SEQ ID NO: 36946 - RNA, 21 nt, Artificial Sequence
  Synthetic
uguguugcacucuauauuaua

SEQ ID NO: 36947 - RNA, 23 nt, Artificial Sequence
  Synthetic
uguguguugcacucuauauuaua

SEQ ID NO: 36948 - RNA, 18 nt, Artificial Sequence
  Synthetic
uuccauagaucacuuaua

SEQ ID NO: 36949 - RNA, 19 nt, Artificial Sequence
  Synthetic
uuuccauagaucacuuaua

SEQ ID NO: 36950 - RNA, 20 nt, Artificial Sequence
  Synthetic
cuuuccauagaucacuuaua

SEQ ID NO: 36951 - RNA, 21 nt, Artificial Sequence
  Synthetic
ucuuuccauagaucacuuaua

SEQ ID NO: 36952 - RNA, 22 nt, Artificial Sequence
  Synthetic
uucuuuccauagaucacuuaua

SEQ ID NO: 36953 - RNA, 23 nt, Artificial Sequence
  Synthetic
uuucuuuccauagaucacuuaua

SEQ ID NO: 36954 - RNA, 24 nt, Artificial Sequence
  Synthetic
uuuucuuuccauagaucacuuaua

SEQ ID NO: 36955 - RNA, 18 nt, Artificial Sequence
  Synthetic
cauaguguuuaucuuaua

SEQ ID NO: 36956 - RNA, 19 nt, Artificial Sequence
  Synthetic
ccauaguguuuaucuuaua

SEQ ID NO: 36957 - RNA, 20 nt, Artificial Sequence
  Synthetic
uccauaguguuuaucuuaua

SEQ ID NO: 36958 - RNA, 21 nt, Artificial Sequence
  Synthetic
cuccauaguguuuaucuuaua

SEQ ID NO: 36959 - RNA, 22 nt, Artificial Sequence
  Synthetic
ucuccauaguguuuaucuuaua

SEQ ID NO: 36960 - RNA, 23 nt, Artificial Sequence
  Synthetic
uucuccauaguguuuaucuuaua

SEQ ID NO: 36961 - RNA, 24 nt, Artificial Sequence
  Synthetic
uuucuccauaguguuuaucuuaua

SEQ ID NO: 36962 - RNA, 21 nt, Artificial Sequence
  Synthetic
uauuuauuuuuugcucuuaua

SEQ ID NO: 36963 - RNA, 23 nt, Artificial Sequence
  Synthetic
aguauuuauuuuuugcucuuaua

SEQ ID NO: 36964 - RNA, 24 nt, Artificial Sequence
  Synthetic
uaguauuuauuuuuugcucuuaua

SEQ ID NO: 36965 - RNA, 18 nt, Artificial Sequence
  Synthetic
cagguccuuugucuuaua

SEQ ID NO: 36966 - RNA, 19 nt, Artificial Sequence
  Synthetic
ucagguccuuugucuuaua

SEQ ID NO: 36967 - RNA, 20 nt, Artificial Sequence
  Synthetic
cucagguccuuugucuuaua

SEQ ID NO: 36968 - RNA, 23 nt, Artificial Sequence
  Synthetic
uggcucagguccuuugucuuaua

SEQ ID NO: 36969 - RNA, 24 nt, Artificial Sequence
  Synthetic
cuggcucagguccuuugucuuaua

SEQ ID NO: 36970 - RNA, 21 nt, Artificial Sequence
  Synthetic
uaauuuuucuuguuaguuaua

SEQ ID NO: 36971 - RNA, 22 nt, Artificial Sequence
  Synthetic
cuaauuuuucuuguuaguuaua

SEQ ID NO: 36972 - RNA, 23 nt, Artificial Sequence
  Synthetic
acuaauuuuucuuguuaguuaua

SEQ ID NO: 36973 - RNA, 24 nt, Artificial Sequence
  Synthetic
aacuaauuuuucuuguuaguuaua

SEQ ID NO: 36974 - RNA, 18 nt, Artificial Sequence
  Synthetic
cugauugauguuguuaua

SEQ ID NO: 36975 - RNA, 19 nt, Artificial Sequence
  Synthetic
ccugauugauguuguuaua

SEQ ID NO: 36976 - RNA, 20 nt, Artificial Sequence
  Synthetic
cccugauugauguuguuaua

SEQ ID NO: 36977 - RNA, 21 nt, Artificial Sequence
  Synthetic
ucccugauugauguuguuaua

SEQ ID NO: 36978 - RNA, 22 nt, Artificial Sequence
  Synthetic
uucccugauugauguuguuaua

SEQ ID NO: 36979 - RNA, 23 nt, Artificial Sequence
  Synthetic
uuucccugauugauguuguuaua

SEQ ID NO: 36980 - RNA, 24 nt, Artificial Sequence
  Synthetic
cuuucccugauugauguuguuaua

SEQ ID NO: 36981 - RNA, 19 nt, Artificial Sequence
  Synthetic
uguaagaauuagauuuaua

SEQ ID NO: 36982 - RNA, 21 nt, Artificial Sequence
  Synthetic
aguguaagaauuagauuuaua

SEQ ID NO: 36983 - RNA, 23 nt, Artificial Sequence
  Synthetic
agaguguaagaauuagauuuaua

SEQ ID NO: 36984 - RNA, 24 nt, Artificial Sequence
  Synthetic
aagaguguaagaauuagauuuaua

SEQ ID NO: 36985 - RNA, 18 nt, Artificial Sequence
  Synthetic
aggugccugugauuuaua

SEQ ID NO: 36986 - RNA, 19 nt, Artificial Sequence
  Synthetic
uaggugccugugauuuaua

SEQ ID NO: 36987 - RNA, 20 nt, Artificial Sequence
  Synthetic
cuaggugccugugauuuaua

SEQ ID NO: 36988 - RNA, 21 nt, Artificial Sequence
  Synthetic
ucuaggugccugugauuuaua

SEQ ID NO: 36989 - RNA, 22 nt, Artificial Sequence
  Synthetic
ugucugugaauauauauuuaua

SEQ ID NO: 36990 - RNA, 23 nt, Artificial Sequence
  Synthetic
augucugugaauauauauuuaua

SEQ ID NO: 36991 - RNA, 24 nt, Artificial Sequence
  Synthetic
uaugucugugaauauauauuuaua

SEQ ID NO: 36992 - RNA, 18 nt, Artificial Sequence
  Synthetic
aguuagggcuccuuuaua

SEQ ID NO: 36993 - RNA, 19 nt, Artificial Sequence
  Synthetic
uaguuagggcuccuuuaua

SEQ ID NO: 36994 - RNA, 20 nt, Artificial Sequence
  Synthetic
cuaguuagggcuccuuuaua

SEQ ID NO: 36995 - RNA, 21 nt, Artificial Sequence
  Synthetic
ucuaguuagggcuccuuuaua

SEQ ID NO: 36996 - RNA, 22 nt, Artificial Sequence
  Synthetic
aucuaguuagggcuccuuuaua

SEQ ID NO: 36997 - RNA, 18 nt, Artificial Sequence
  Synthetic
uacggucauuucuuuaua

SEQ ID NO: 36998 - RNA, 19 nt, Artificial Sequence
  Synthetic
cuacggucauuucuuuaua

SEQ ID NO: 36999 - RNA, 20 nt, Artificial Sequence
  Synthetic
acuacggucauuucuuuaua

SEQ ID NO: 37000 - RNA, 21 nt, Artificial Sequence
  Synthetic
aacuacggucauuucuuuaua

SEQ ID NO: 37001 - RNA, 23 nt, Artificial Sequence
  Synthetic
agaacuacggucauuucuuuaua

SEQ ID NO: 37002 - RNA, 18 nt, Artificial Sequence
  Synthetic
uuuacuugccauuuuaua

SEQ ID NO: 37003 - RNA, 19 nt, Artificial Sequence
  Synthetic
uuuuacuugccauuuuaua

SEQ ID NO: 37004 - RNA, 20 nt, Artificial Sequence
  Synthetic
uuuuuacuugccauuuuaua

SEQ ID NO: 37005 - RNA, 21 nt, Artificial Sequence
  Synthetic
auuuuuacuugccauuuuaua

SEQ ID NO: 37006 - RNA, 22 nt, Artificial Sequence
  Synthetic
cauuuuuacuugccauuuuaua

SEQ ID NO: 37007 - RNA, 23 nt, Artificial Sequence
  Synthetic
ucauuuuuacuugccauuuuaua

SEQ ID NO: 37008 - RNA, 24 nt, Artificial Sequence
  Synthetic
aucauuuuuacuugccauuuuaua

SEQ ID NO: 37009 - RNA, 18 nt, Artificial Sequence
  Synthetic
aucaaacaguauuuuaua

SEQ ID NO: 37010 - RNA, 19 nt, Artificial Sequence
  Synthetic
aaucaaacaguauuuuaua

SEQ ID NO: 37011 - RNA, 20 nt, Artificial Sequence
  Synthetic
caaucaaacaguauuuuaua

SEQ ID NO: 37012 - RNA, 21 nt, Artificial Sequence
  Synthetic
ccaaucaaacaguauuuuaua

SEQ ID NO: 37013 - RNA, 23 nt, Artificial Sequence
  Synthetic
agccaaucaaacaguauuuuaua

SEQ ID NO: 37014 - RNA, 18 nt, Artificial Sequence
  Synthetic
uuaaaaucagcuuuuaua

SEQ ID NO: 37015 - RNA, 19 nt, Artificial Sequence
  Synthetic
uuuaaaaucagcuuuuaua

SEQ ID NO: 37016 - RNA, 20 nt, Artificial Sequence
  Synthetic
auuuaaaaucagcuuuuaua

SEQ ID NO: 37017 - RNA, 21 nt, Artificial Sequence
  Synthetic
cauuuaaaaucagcuuuuaua

SEQ ID NO: 37018 - RNA, 22 nt, Artificial Sequence
  Synthetic
ccauuuaaaaucagcuuuuaua

SEQ ID NO: 37019 - RNA, 23 nt, Artificial Sequence
  Synthetic
uccauuuaaaaucagcuuuuaua

SEQ ID NO: 37020 - RNA, 24 nt, Artificial Sequence
  Synthetic
uuccauuuaaaaucagcuuuuaua

SEQ ID NO: 37021 - RNA, 21 nt, Artificial Sequence
  Synthetic
aaaaaguuucaguguuuuaua

SEQ ID NO: 37022 - RNA, 22 nt, Artificial Sequence
  Synthetic
aaaaaaguuucaguguuuuaua

SEQ ID NO: 37023 - RNA, 24 nt, Artificial Sequence
  Synthetic
agaaaaaaguuucaguguuuuaua

SEQ ID NO: 37024 - RNA, 18 nt, Artificial Sequence
  Synthetic
ucauugguacuuuuuaua

SEQ ID NO: 37025 - RNA, 19 nt, Artificial Sequence
  Synthetic
cucauugguacuuuuuaua

SEQ ID NO: 37026 - RNA, 20 nt, Artificial Sequence
  Synthetic
ucucauugguacuuuuuaua

SEQ ID NO: 37027 - RNA, 21 nt, Artificial Sequence
  Synthetic
aucucauugguacuuuuuaua

SEQ ID NO: 37028 - RNA, 22 nt, Artificial Sequence
  Synthetic
uaucucauugguacuuuuuaua

SEQ ID NO: 37029 - RNA, 23 nt, Artificial Sequence
  Synthetic
auaucucauugguacuuuuuaua

SEQ ID NO: 37030 - RNA, 24 nt, Artificial Sequence
  Synthetic
aauaucucauugguacuuuuuaua

SEQ ID NO: 37031 - RNA, 18 nt, Artificial Sequence
  Synthetic
caagauaacuuuuuuaua

SEQ ID NO: 37032 - RNA, 19 nt, Artificial Sequence
  Synthetic
ucaagauaacuuuuuuaua

SEQ ID NO: 37033 - RNA, 20 nt, Artificial Sequence
  Synthetic
uucaagauaacuuuuuuaua

SEQ ID NO: 37034 - RNA, 22 nt, Artificial Sequence
  Synthetic
uguucaagauaacuuuuuuaua

SEQ ID NO: 37035 - RNA, 23 nt, Artificial Sequence
  Synthetic
cuguucaagauaacuuuuuuaua

SEQ ID NO: 37036 - RNA, 24 nt, Artificial Sequence
  Synthetic
acuguucaagauaacuuuuuuaua

SEQ ID NO: 37037 - RNA, 18 nt, Artificial Sequence
  Synthetic
ccccauagguucaaacua

SEQ ID NO: 37038 - RNA, 19 nt, Artificial Sequence
  Synthetic
accccauagguucaaacua

SEQ ID NO: 37039 - RNA, 20 nt, Artificial Sequence
  Synthetic
aaccccauagguucaaacua

SEQ ID NO: 37040 - RNA, 22 nt, Artificial Sequence
  Synthetic
ugaaccccauagguucaaacua

SEQ ID NO: 37041 - RNA, 23 nt, Artificial Sequence
  Synthetic
uugaaccccauagguucaaacua

SEQ ID NO: 37042 - RNA, 24 nt, Artificial Sequence
  Synthetic
auugaaccccauagguucaaacua

SEQ ID NO: 37043 - RNA, 20 nt, Artificial Sequence
  Synthetic
ugguagaaauuacuaaacua

SEQ ID NO: 37044 - RNA, 22 nt, Artificial Sequence
  Synthetic
cgugguagaaauuacuaaacua

SEQ ID NO: 37045 - RNA, 23 nt, Artificial Sequence
  Synthetic
ccgugguagaaauuacuaaacua

SEQ ID NO: 37046 - RNA, 24 nt, Artificial Sequence
  Synthetic
accgugguagaaauuacuaaacua

SEQ ID NO: 37047 - RNA, 18 nt, Artificial Sequence
  Synthetic
caaugucaugggcaacua

SEQ ID NO: 37048 - RNA, 21 nt, Artificial Sequence
  Synthetic
aggcaaugucaugggcaacua

SEQ ID NO: 37049 - RNA, 22 nt, Artificial Sequence
  Synthetic
caggcaaugucaugggcaacua

SEQ ID NO: 37050 - RNA, 23 nt, Artificial Sequence
  Synthetic
ccaggcaaugucaugggcaacua

SEQ ID NO: 37051 - RNA, 24 nt, Artificial Sequence
  Synthetic
cccaggcaaugucaugggcaacua

SEQ ID NO: 37052 - RNA, 18 nt, Artificial Sequence
  Synthetic
aauaccaguagagaacua

SEQ ID NO: 37053 - RNA, 19 nt, Artificial Sequence
  Synthetic
aaauaccaguagagaacua

SEQ ID NO: 37054 - RNA, 20 nt, Artificial Sequence
  Synthetic
caaauaccaguagagaacua

SEQ ID NO: 37055 - RNA, 23 nt, Artificial Sequence
  Synthetic
uggcaaauaccaguagagaacua

SEQ ID NO: 37056 - RNA, 24 nt, Artificial Sequence
  Synthetic
auggcaaauaccaguagagaacua

SEQ ID NO: 37057 - RNA, 21 nt, Artificial Sequence
  Synthetic
ugggugauauaauuggaacua

SEQ ID NO: 37058 - RNA, 23 nt, Artificial Sequence
  Synthetic
agugggugauauaauuggaacua

SEQ ID NO: 37059 - RNA, 19 nt, Artificial Sequence
  Synthetic
agguuuggacaaugaacua

SEQ ID NO: 37060 - RNA, 20 nt, Artificial Sequence
  Synthetic
cagguuuggacaaugaacua

SEQ ID NO: 37061 - RNA, 21 nt, Artificial Sequence
  Synthetic
ucagguuuggacaaugaacua

SEQ ID NO: 37062 - RNA, 22 nt, Artificial Sequence
  Synthetic
uucagguuuggacaaugaacua

SEQ ID NO: 37063 - RNA, 24 nt, Artificial Sequence
  Synthetic
uguucagguuuggacaaugaacua

SEQ ID NO: 37064 - RNA, 18 nt, Artificial Sequence
  Synthetic
uucuuucccaaauaacua

SEQ ID NO: 37065 - RNA, 19 nt, Artificial Sequence
  Synthetic
uuucuuucccaaauaacua

SEQ ID NO: 37066 - RNA, 20 nt, Artificial Sequence
  Synthetic
auuucuuucccaaauaacua

SEQ ID NO: 37067 - RNA, 21 nt, Artificial Sequence
  Synthetic
cauuucuuucccaaauaacua

SEQ ID NO: 37068 - RNA, 22 nt, Artificial Sequence
  Synthetic
acauuucuuucccaaauaacua

SEQ ID NO: 37069 - RNA, 23 nt, Artificial Sequence
  Synthetic
uacauuucuuucccaaauaacua

SEQ ID NO: 37070 - RNA, 24 nt, Artificial Sequence
  Synthetic
auacauuucuuucccaaauaacua

SEQ ID NO: 37071 - RNA, 18 nt, Artificial Sequence
  Synthetic
aucauaauauaauaacua

SEQ ID NO: 37072 - RNA, 19 nt, Artificial Sequence
  Synthetic
uaucauaauauaauaacua

SEQ ID NO: 37073 - RNA, 20 nt, Artificial Sequence
  Synthetic
uuaucauaauauaauaacua

SEQ ID NO: 37074 - RNA, 21 nt, Artificial Sequence
  Synthetic
auuaucauaauauaauaacua

SEQ ID NO: 37075 - RNA, 22 nt, Artificial Sequence
  Synthetic
aauuaucauaauauaauaacua

SEQ ID NO: 37076 - RNA, 23 nt, Artificial Sequence
  Synthetic
aaauuaucauaauauaauaacua

SEQ ID NO: 37077 - RNA, 24 nt, Artificial Sequence
  Synthetic
caaauuaucauaauauaauaacua

SEQ ID NO: 37078 - RNA, 19 nt, Artificial Sequence
  Synthetic
ugucucuugguaauaacua

SEQ ID NO: 37079 - RNA, 20 nt, Artificial Sequence
  Synthetic
augucucuugguaauaacua

SEQ ID NO: 37080 - RNA, 21 nt, Artificial Sequence
  Synthetic
aaugucucuugguaauaacua

SEQ ID NO: 37081 - RNA, 22 nt, Artificial Sequence
  Synthetic
aaaugucucuugguaauaacua

SEQ ID NO: 37082 - RNA, 23 nt, Artificial Sequence
  Synthetic
caaaugucucuugguaauaacua

SEQ ID NO: 37083 - RNA, 24 nt, Artificial Sequence
  Synthetic
ucaaaugucucuugguaauaacua

SEQ ID NO: 37084 - RNA, 19 nt, Artificial Sequence
  Synthetic
agaauguaauauauaacua

SEQ ID NO: 37085 - RNA, 20 nt, Artificial Sequence
  Synthetic
cagaauguaauauauaacua

SEQ ID NO: 37086 - RNA, 22 nt, Artificial Sequence
  Synthetic
ugcagaauguaauauauaacua

SEQ ID NO: 37087 - RNA, 23 nt, Artificial Sequence
  Synthetic
uugcagaauguaauauauaacua

SEQ ID NO: 37088 - RNA, 24 nt, Artificial Sequence
  Synthetic
uuugcagaauguaauauauaacua

SEQ ID NO: 37089 - RNA, 21 nt, Artificial Sequence
  Synthetic
aauaacuuuguaaauuaacua

SEQ ID NO: 37090 - RNA, 23 nt, Artificial Sequence
  Synthetic
ugaauaacuuuguaaauuaacua

SEQ ID NO: 37091 - RNA, 24 nt, Artificial Sequence
  Synthetic
uugaauaacuuuguaaauuaacua

SEQ ID NO: 37092 - RNA, 18 nt, Artificial Sequence
  Synthetic
ugcauagucacuuaacua

SEQ ID NO: 37093 - RNA, 20 nt, Artificial Sequence
  Synthetic
ugugcauagucacuuaacua

SEQ ID NO: 37094 - RNA, 21 nt, Artificial Sequence
  Synthetic
uugugcauagucacuuaacua

SEQ ID NO: 37095 - RNA, 22 nt, Artificial Sequence
  Synthetic
uuugugcauagucacuuaacua

SEQ ID NO: 37096 - RNA, 23 nt, Artificial Sequence
  Synthetic
uuuugugcauagucacuuaacua

SEQ ID NO: 37097 - RNA, 24 nt, Artificial Sequence
  Synthetic
cuuuugugcauagucacuuaacua

SEQ ID NO: 37098 - RNA, 18 nt, Artificial Sequence
  Synthetic
uauguagaagguuaacua

SEQ ID NO: 37099 - RNA, 20 nt, Artificial Sequence
  Synthetic
uguauguagaagguuaacua

SEQ ID NO: 37100 - RNA, 21 nt, Artificial Sequence
  Synthetic
uuguauguagaagguuaacua

SEQ ID NO: 37101 - RNA, 22 nt, Artificial Sequence
  Synthetic
uuuguauguagaagguuaacua

SEQ ID NO: 37102 - RNA, 23 nt, Artificial Sequence
  Synthetic
auuuguauguagaagguuaacua

SEQ ID NO: 37103 - RNA, 18 nt, Artificial Sequence
  Synthetic
uucacagaagaaacacua

SEQ ID NO: 37104 - RNA, 19 nt, Artificial Sequence
  Synthetic
cuucacagaagaaacacua

SEQ ID NO: 37105 - RNA, 20 nt, Artificial Sequence
  Synthetic
ucuucacagaagaaacacua

SEQ ID NO: 37106 - RNA, 21 nt, Artificial Sequence
  Synthetic
cucuucacagaagaaacacua

SEQ ID NO: 37107 - RNA, 22 nt, Artificial Sequence
  Synthetic
ccucuucacagaagaaacacua

SEQ ID NO: 37108 - RNA, 23 nt, Artificial Sequence
  Synthetic
accucuucacagaagaaacacua

SEQ ID NO: 37109 - RNA, 24 nt, Artificial Sequence
  Synthetic
uaccucuucacagaagaaacacua

SEQ ID NO: 37110 - RNA, 21 nt, Artificial Sequence
  Synthetic
augggcaaaaucagaacacua

SEQ ID NO: 37111 - RNA, 22 nt, Artificial Sequence
  Synthetic
uaugggcaaaaucagaacacua

SEQ ID NO: 37112 - RNA, 23 nt, Artificial Sequence
  Synthetic
auaugggcaaaaucagaacacua

SEQ ID NO: 37113 - RNA, 24 nt, Artificial Sequence
  Synthetic
cauaugggcaaaaucagaacacua

SEQ ID NO: 37114 - RNA, 19 nt, Artificial Sequence
  Synthetic
uggacugcccuguccacua

SEQ ID NO: 37115 - RNA, 22 nt, Artificial Sequence
  Synthetic
ugguggacugcccuguccacua

SEQ ID NO: 37116 - RNA, 24 nt, Artificial Sequence
  Synthetic
ugugguggacugcccuguccacua

SEQ ID NO: 37117 - RNA, 18 nt, Artificial Sequence
  Synthetic
uauaguagaugggcacua

SEQ ID NO: 37118 - RNA, 19 nt, Artificial Sequence
  Synthetic
uuauaguagaugggcacua

SEQ ID NO: 37119 - RNA, 20 nt, Artificial Sequence
  Synthetic
auuauaguagaugggcacua

SEQ ID NO: 37120 - RNA, 21 nt, Artificial Sequence
  Synthetic
aauuauaguagaugggcacua

SEQ ID NO: 37121 - RNA, 22 nt, Artificial Sequence
  Synthetic
aaauuauaguagaugggcacua

SEQ ID NO: 37122 - RNA, 23 nt, Artificial Sequence
  Synthetic
aaaauuauaguagaugggcacua

SEQ ID NO: 37123 - RNA, 24 nt, Artificial Sequence
  Synthetic
aaaaauuauaguagaugggcacua

SEQ ID NO: 37124 - RNA, 18 nt, Artificial Sequence
  Synthetic
uuuugcuugaaaucacua

SEQ ID NO: 37125 - RNA, 19 nt, Artificial Sequence
  Synthetic
cuuuugcuugaaaucacua

SEQ ID NO: 37126 - RNA, 20 nt, Artificial Sequence
  Synthetic
acuuuugcuugaaaucacua

SEQ ID NO: 37127 - RNA, 23 nt, Artificial Sequence
  Synthetic
aggacuuuugcuugaaaucacua

SEQ ID NO: 37128 - RNA, 24 nt, Artificial Sequence
  Synthetic
aaggacuuuugcuugaaaucacua

SEQ ID NO: 37129 - RNA, 18 nt, Artificial Sequence
  Synthetic
uggucacuaugaucacua

SEQ ID NO: 37130 - RNA, 20 nt, Artificial Sequence
  Synthetic
uguggucacuaugaucacua

SEQ ID NO: 37131 - RNA, 21 nt, Artificial Sequence
  Synthetic
auguggucacuaugaucacua

SEQ ID NO: 37132 - RNA, 22 nt, Artificial Sequence
  Synthetic
cauguggucacuaugaucacua

SEQ ID NO: 37133 - RNA, 23 nt, Artificial Sequence
  Synthetic
ccauguggucacuaugaucacua

SEQ ID NO: 37134 - RNA, 24 nt, Artificial Sequence
  Synthetic
cccauguggucacuaugaucacua

SEQ ID NO: 37135 - RNA, 18 nt, Artificial Sequence
  Synthetic
auccucacguuaucacua

SEQ ID NO: 37136 - RNA, 19 nt, Artificial Sequence
  Synthetic
aauccucacguuaucacua

SEQ ID NO: 37137 - RNA, 20 nt, Artificial Sequence
  Synthetic
uaauccucacguuaucacua

SEQ ID NO: 37138 - RNA, 21 nt, Artificial Sequence
  Synthetic
cuaauccucacguuaucacua

SEQ ID NO: 37139 - RNA, 22 nt, Artificial Sequence
  Synthetic
acuaauccucacguuaucacua

SEQ ID NO: 37140 - RNA, 23 nt, Artificial Sequence
  Synthetic
uacuaauccucacguuaucacua

SEQ ID NO: 37141 - RNA, 24 nt, Artificial Sequence
  Synthetic
auacuaauccucacguuaucacua

SEQ ID NO: 37142 - RNA, 18 nt, Artificial Sequence
  Synthetic
aguucaauuauuucacua

SEQ ID NO: 37143 - RNA, 19 nt, Artificial Sequence
  Synthetic
aaguucaauuauuucacua

SEQ ID NO: 37144 - RNA, 20 nt, Artificial Sequence
  Synthetic
caaguucaauuauuucacua

SEQ ID NO: 37145 - RNA, 21 nt, Artificial Sequence
  Synthetic
acaaguucaauuauuucacua

SEQ ID NO: 37146 - RNA, 22 nt, Artificial Sequence
  Synthetic
cacaaguucaauuauuucacua

SEQ ID NO: 37147 - RNA, 23 nt, Artificial Sequence
  Synthetic
ucacaaguucaauuauuucacua

SEQ ID NO: 37148 - RNA, 24 nt, Artificial Sequence
  Synthetic
aucacaaguucaauuauuucacua

SEQ ID NO: 37149 - RNA, 21 nt, Artificial Sequence
  Synthetic
auaaaacagugaaaaagacua

SEQ ID NO: 37150 - RNA, 22 nt, Artificial Sequence
  Synthetic
uauaaaacagugaaaaagacua

SEQ ID NO: 37151 - RNA, 23 nt, Artificial Sequence
  Synthetic
uuauaaaacagugaaaaagacua

SEQ ID NO: 37152 - RNA, 24 nt, Artificial Sequence
  Synthetic
cuuauaaaacagugaaaaagacua

SEQ ID NO: 37153 - RNA, 18 nt, Artificial Sequence
  Synthetic
cgccaaugagcaagacua

SEQ ID NO: 37154 - RNA, 20 nt, Artificial Sequence
  Synthetic
agcgccaaugagcaagacua

SEQ ID NO: 37155 - RNA, 21 nt, Artificial Sequence
  Synthetic
uagcgccaaugagcaagacua

SEQ ID NO: 37156 - RNA, 22 nt, Artificial Sequence
  Synthetic
uuagcgccaaugagcaagacua

SEQ ID NO: 37157 - RNA, 24 nt, Artificial Sequence
  Synthetic
uguuagcgccaaugagcaagacua

SEQ ID NO: 37158 - RNA, 18 nt, Artificial Sequence
  Synthetic
ucugauugacucggacua

SEQ ID NO: 37159 - RNA, 21 nt, Artificial Sequence
  Synthetic
aggucugauugacucggacua

SEQ ID NO: 37160 - RNA, 22 nt, Artificial Sequence
  Synthetic
caggucugauugacucggacua

SEQ ID NO: 37161 - RNA, 23 nt, Artificial Sequence
  Synthetic
ccaggucugauugacucggacua

SEQ ID NO: 37162 - RNA, 24 nt, Artificial Sequence
  Synthetic
uccaggucugauugacucggacua

SEQ ID NO: 37163 - RNA, 18 nt, Artificial Sequence
  Synthetic
auguguguauuuggacua

SEQ ID NO: 37164 - RNA, 19 nt, Artificial Sequence
  Synthetic
cauguguguauuuggacua

SEQ ID NO: 37165 - RNA, 21 nt, Artificial Sequence
  Synthetic
ugcauguguguauuuggacua

SEQ ID NO: 37166 - RNA, 23 nt, Artificial Sequence
  Synthetic
ugugcauguguguauuuggacua

SEQ ID NO: 37167 - RNA, 24 nt, Artificial Sequence
  Synthetic
cugugcauguguguauuuggacua

SEQ ID NO: 37168 - RNA, 19 nt, Artificial Sequence
  Synthetic
agcccagccaaaaugacua

SEQ ID NO: 37169 - RNA, 20 nt, Artificial Sequence
  Synthetic
uagcccagccaaaaugacua

SEQ ID NO: 37170 - RNA, 22 nt, Artificial Sequence
  Synthetic
aguagcccagccaaaaugacua

SEQ ID NO: 37171 - RNA, 24 nt, Artificial Sequence
  Synthetic
agaguagcccagccaaaaugacua

SEQ ID NO: 37172 - RNA, 18 nt, Artificial Sequence
  Synthetic
ugaaaagauaagugacua

SEQ ID NO: 37173 - RNA, 19 nt, Artificial Sequence
  Synthetic
augaaaagauaagugacua

SEQ ID NO: 37174 - RNA, 20 nt, Artificial Sequence
  Synthetic
aaugaaaagauaagugacua

SEQ ID NO: 37175 - RNA, 21 nt, Artificial Sequence
  Synthetic
uaaugaaaagauaagugacua

SEQ ID NO: 37176 - RNA, 22 nt, Artificial Sequence
  Synthetic
auaaugaaaagauaagugacua

SEQ ID NO: 37177 - RNA, 23 nt, Artificial Sequence
  Synthetic
uauaaugaaaagauaagugacua

SEQ ID NO: 37178 - RNA, 18 nt, Artificial Sequence
  Synthetic
cuggcuauugugugacua

SEQ ID NO: 37179 - RNA, 19 nt, Artificial Sequence
  Synthetic
ucuggcuauugugugacua

SEQ ID NO: 37180 - RNA, 20 nt, Artificial Sequence
  Synthetic
uucuggcuauugugugacua

SEQ ID NO: 37181 - RNA, 21 nt, Artificial Sequence
  Synthetic
auucuggcuauugugugacua

SEQ ID NO: 37182 - RNA, 22 nt, Artificial Sequence
  Synthetic
uauucuggcuauugugugacua

SEQ ID NO: 37183 - RNA, 23 nt, Artificial Sequence
  Synthetic
uuauucuggcuauugugugacua

SEQ ID NO: 37184 - RNA, 24 nt, Artificial Sequence
  Synthetic
cuuauucuggcuauugugugacua

SEQ ID NO: 37185 - RNA, 18 nt, Artificial Sequence
  Synthetic
ccuuugaacccaauacua

SEQ ID NO: 37186 - RNA, 19 nt, Artificial Sequence
  Synthetic
accuuugaacccaauacua

SEQ ID NO: 37187 - RNA, 22 nt, Artificial Sequence
  Synthetic
uggaccuuugaacccaauacua

SEQ ID NO: 37188 - RNA, 23 nt, Artificial Sequence
  Synthetic
cuggaccuuugaacccaauacua

SEQ ID NO: 37189 - RNA, 24 nt, Artificial Sequence
  Synthetic
ucuggaccuuugaacccaauacua

SEQ ID NO: 37190 - RNA, 18 nt, Artificial Sequence
  Synthetic
agaaugugguacauacua

SEQ ID NO: 37191 - RNA, 22 nt, Artificial Sequence
  Synthetic
agggagaaugugguacauacua

SEQ ID NO: 37192 - RNA, 23 nt, Artificial Sequence
  Synthetic
aagggagaaugugguacauacua

SEQ ID NO: 37193 - RNA, 24 nt, Artificial Sequence
  Synthetic
caagggagaaugugguacauacua

SEQ ID NO: 37194 - RNA, 18 nt, Artificial Sequence
  Synthetic
ugaagaacccugauacua

SEQ ID NO: 37195 - RNA, 19 nt, Artificial Sequence
  Synthetic
cugaagaacccugauacua

SEQ ID NO: 37196 - RNA, 21 nt, Artificial Sequence
  Synthetic
cgcugaagaacccugauacua

SEQ ID NO: 37197 - RNA, 22 nt, Artificial Sequence
  Synthetic
acgcugaagaacccugauacua

SEQ ID NO: 37198 - RNA, 23 nt, Artificial Sequence
  Synthetic
aacgcugaagaacccugauacua

SEQ ID NO: 37199 - RNA, 24 nt, Artificial Sequence
  Synthetic
caacgcugaagaacccugauacua

SEQ ID NO: 37200 - RNA, 18 nt, Artificial Sequence
  Synthetic
uuucugcuauuccuacua

SEQ ID NO: 37201 - RNA, 19 nt, Artificial Sequence
  Synthetic
uuuucugcuauuccuacua

SEQ ID NO: 37202 - RNA, 20 nt, Artificial Sequence
  Synthetic
uuuuucugcuauuccuacua

SEQ ID NO: 37203 - RNA, 21 nt, Artificial Sequence
  Synthetic
auuuuucugcuauuccuacua

SEQ ID NO: 37204 - RNA, 22 nt, Artificial Sequence
  Synthetic
uauuuuucugcuauuccuacua

SEQ ID NO: 37205 - RNA, 23 nt, Artificial Sequence
  Synthetic
auauuuuucugcuauuccuacua

SEQ ID NO: 37206 - RNA, 24 nt, Artificial Sequence
  Synthetic
aauauuuuucugcuauuccuacua

SEQ ID NO: 37207 - RNA, 18 nt, Artificial Sequence
  Synthetic
acugaucgugaucuacua

SEQ ID NO: 37208 - RNA, 19 nt, Artificial Sequence
  Synthetic
cacugaucgugaucuacua

SEQ ID NO: 37209 - RNA, 20 nt, Artificial Sequence
  Synthetic
ccacugaucgugaucuacua

SEQ ID NO: 37210 - RNA, 18 nt, Artificial Sequence
  Synthetic
uuaaaaaauauucuacua

SEQ ID NO: 37211 - RNA, 19 nt, Artificial Sequence
  Synthetic
uuuaaaaaauauucuacua

SEQ ID NO: 37212 - RNA, 20 nt, Artificial Sequence
  Synthetic
cuuuaaaaaauauucuacua

SEQ ID NO: 37213 - RNA, 21 nt, Artificial Sequence
  Synthetic
acuuuaaaaaauauucuacua

SEQ ID NO: 37214 - RNA, 22 nt, Artificial Sequence
  Synthetic
aacuuuaaaaaauauucuacua

SEQ ID NO: 37215 - RNA, 23 nt, Artificial Sequence
  Synthetic
uaacuuuaaaaaauauucuacua

SEQ ID NO: 37216 - RNA, 24 nt, Artificial Sequence
  Synthetic
uuaacuuuaaaaaauauucuacua

SEQ ID NO: 37217 - RNA, 18 nt, Artificial Sequence
  Synthetic
cacaucauuuauguacua

SEQ ID NO: 37218 - RNA, 19 nt, Artificial Sequence
  Synthetic
acacaucauuuauguacua

SEQ ID NO: 37219 - RNA, 21 nt, Artificial Sequence
  Synthetic
agacacaucauuuauguacua

SEQ ID NO: 37220 - RNA, 22 nt, Artificial Sequence
  Synthetic
aagacacaucauuuauguacua

SEQ ID NO: 37221 - RNA, 23 nt, Artificial Sequence
  Synthetic
aaagacacaucauuuauguacua

SEQ ID NO: 37222 - RNA, 24 nt, Artificial Sequence
  Synthetic
aaaagacacaucauuuauguacua

SEQ ID NO: 37223 - RNA, 18 nt, Artificial Sequence
  Synthetic
aauaauaguauauuacua

SEQ ID NO: 37224 - RNA, 19 nt, Artificial Sequence
  Synthetic
caauaauaguauauuacua

SEQ ID NO: 37225 - RNA, 21 nt, Artificial Sequence
  Synthetic
cgcaauaauaguauauuacua

SEQ ID NO: 37226 - RNA, 22 nt, Artificial Sequence
  Synthetic
ccgcaauaauaguauauuacua

SEQ ID NO: 37227 - RNA, 23 nt, Artificial Sequence
  Synthetic
uccgcaauaauaguauauuacua

SEQ ID NO: 37228 - RNA, 24 nt, Artificial Sequence
  Synthetic
cuccgcaauaauaguauauuacua

SEQ ID NO: 37229 - RNA, 18 nt, Artificial Sequence
  Synthetic
cuuucuuuguuauuacua

SEQ ID NO: 37230 - RNA, 20 nt, Artificial Sequence
  Synthetic
ugcuuucuuuguuauuacua

SEQ ID NO: 37231 - RNA, 21 nt, Artificial Sequence
  Synthetic
uugcuuucuuuguuauuacua

SEQ ID NO: 37232 - RNA, 22 nt, Artificial Sequence
  Synthetic
uuugcuuucuuuguuauuacua

SEQ ID NO: 37233 - RNA, 23 nt, Artificial Sequence
  Synthetic
uuuugcuuucuuuguuauuacua

SEQ ID NO: 37234 - RNA, 24 nt, Artificial Sequence
  Synthetic
cuuuugcuuucuuuguuauuacua

SEQ ID NO: 37235 - RNA, 18 nt, Artificial Sequence
  Synthetic
cugucacaacaguuacua

SEQ ID NO: 37236 - RNA, 20 nt, Artificial Sequence
  Synthetic
cgcugucacaacaguuacua

SEQ ID NO: 37237 - RNA, 21 nt, Artificial Sequence
  Synthetic
ccgcugucacaacaguuacua

SEQ ID NO: 37238 - RNA, 24 nt, Artificial Sequence
  Synthetic
cggccgcugucacaacaguuacua

SEQ ID NO: 37239 - RNA, 21 nt, Artificial Sequence
  Synthetic
cuacccuucaucccaaaccua

SEQ ID NO: 37240 - RNA, 22 nt, Artificial Sequence
  Synthetic
ccuacccuucaucccaaaccua

SEQ ID NO: 37241 - RNA, 23 nt, Artificial Sequence
  Synthetic
uccuacccuucaucccaaaccua

SEQ ID NO: 37242 - RNA, 24 nt, Artificial Sequence
  Synthetic
cuccuacccuucaucccaaaccua

SEQ ID NO: 37243 - RNA, 21 nt, Artificial Sequence
  Synthetic
cugcccuucaucccaaaccua

SEQ ID NO: 37244 - RNA, 22 nt, Artificial Sequence
  Synthetic
ccugcccuucaucccaaaccua

SEQ ID NO: 37245 - RNA, 24 nt, Artificial Sequence
  Synthetic
ugccugcccuucaucccaaaccua

SEQ ID NO: 37246 - RNA, 18 nt, Artificial Sequence
  Synthetic
uuaggacaaguaaaccua

SEQ ID NO: 37247 - RNA, 20 nt, Artificial Sequence
  Synthetic
uguuaggacaaguaaaccua

SEQ ID NO: 37248 - RNA, 21 nt, Artificial Sequence
  Synthetic
uuguuaggacaaguaaaccua

SEQ ID NO: 37249 - RNA, 22 nt, Artificial Sequence
  Synthetic
auuguuaggacaaguaaaccua

SEQ ID NO: 37250 - RNA, 23 nt, Artificial Sequence
  Synthetic
aauuguuaggacaaguaaaccua

SEQ ID NO: 37251 - RNA, 24 nt, Artificial Sequence
  Synthetic
aaauuguuaggacaaguaaaccua

SEQ ID NO: 37252 - RNA, 18 nt, Artificial Sequence
  Synthetic
aaagaacauaauaaccua

SEQ ID NO: 37253 - RNA, 19 nt, Artificial Sequence
  Synthetic
uaaagaacauaauaaccua

SEQ ID NO: 37254 - RNA, 20 nt, Artificial Sequence
  Synthetic
uuaaagaacauaauaaccua

SEQ ID NO: 37255 - RNA, 21 nt, Artificial Sequence
  Synthetic
auuaaagaacauaauaaccua

SEQ ID NO: 37256 - RNA, 22 nt, Artificial Sequence
  Synthetic
cauuaaagaacauaauaaccua

SEQ ID NO: 37257 - RNA, 23 nt, Artificial Sequence
  Synthetic
ccauuaaagaacauaauaaccua

SEQ ID NO: 37258 - RNA, 24 nt, Artificial Sequence
  Synthetic
accauuaaagaacauaauaaccua

SEQ ID NO: 37259 - RNA, 18 nt, Artificial Sequence
  Synthetic
aaaugagggagacaccua

SEQ ID NO: 37260 - RNA, 19 nt, Artificial Sequence
  Synthetic
caaaugagggagacaccua

SEQ ID NO: 37261 - RNA, 20 nt, Artificial Sequence
  Synthetic
acaaaugagggagacaccua

SEQ ID NO: 37262 - RNA, 21 nt, Artificial Sequence
  Synthetic
aacaaaugagggagacaccua

SEQ ID NO: 37263 - RNA, 22 nt, Artificial Sequence
  Synthetic
aaacaaaugagggagacaccua

SEQ ID NO: 37264 - RNA, 24 nt, Artificial Sequence
  Synthetic
agaaacaaaugagggagacaccua

SEQ ID NO: 37265 - RNA, 18 nt, Artificial Sequence
  Synthetic
accuggaaauacgaccua

SEQ ID NO: 37266 - RNA, 19 nt, Artificial Sequence
  Synthetic
aaccuggaaauacgaccua

SEQ ID NO: 37267 - RNA, 20 nt, Artificial Sequence
  Synthetic
aaaccuggaaauacgaccua

SEQ ID NO: 37268 - RNA, 21 nt, Artificial Sequence
  Synthetic
aaaaccuggaaauacgaccua

SEQ ID NO: 37269 - RNA, 23 nt, Artificial Sequence
  Synthetic
ugaaaaccuggaaauacgaccua

SEQ ID NO: 37270 - RNA, 24 nt, Artificial Sequence
  Synthetic
uugaaaaccuggaaauacgaccua

SEQ ID NO: 37271 - RNA, 18 nt, Artificial Sequence
  Synthetic
uuuuuaucuuaugaccua

SEQ ID NO: 37272 - RNA, 19 nt, Artificial Sequence
  Synthetic
auuuuuaucuuaugaccua

SEQ ID NO: 37273 - RNA, 20 nt, Artificial Sequence
  Synthetic
cauuuuuaucuuaugaccua

SEQ ID NO: 37274 - RNA, 22 nt, Artificial Sequence
  Synthetic
agcauuuuuaucuuaugaccua

SEQ ID NO: 37275 - RNA, 23 nt, Artificial Sequence
  Synthetic
uagcauuuuuaucuuaugaccua

SEQ ID NO: 37276 - RNA, 24 nt, Artificial Sequence
  Synthetic
cuagcauuuuuaucuuaugaccua

SEQ ID NO: 37277 - RNA, 18 nt, Artificial Sequence
  Synthetic
uggauuucuucauaccua

SEQ ID NO: 37278 - RNA, 21 nt, Artificial Sequence
  Synthetic
ugguggauuucuucauaccua

SEQ ID NO: 37279 - RNA, 23 nt, Artificial Sequence
  Synthetic
ugugguggauuucuucauaccua

SEQ ID NO: 37280 - RNA, 24 nt, Artificial Sequence
  Synthetic
uugugguggauuucuucauaccua

SEQ ID NO: 37281 - RNA, 19 nt, Artificial Sequence
  Synthetic
ugacagaggcagauaccua

SEQ ID NO: 37282 - RNA, 21 nt, Artificial Sequence
  Synthetic
agugacagaggcagauaccua

SEQ ID NO: 37283 - RNA, 22 nt, Artificial Sequence
  Synthetic
uagugacagaggcagauaccua

SEQ ID NO: 37284 - RNA, 23 nt, Artificial Sequence
  Synthetic
auagugacagaggcagauaccua

SEQ ID NO: 37285 - RNA, 24 nt, Artificial Sequence
  Synthetic
aauagugacagaggcagauaccua

SEQ ID NO: 37286 - RNA, 18 nt, Artificial Sequence
  Synthetic
aggucugugauuuaccua

SEQ ID NO: 37287 - RNA, 20 nt, Artificial Sequence
  Synthetic
ugaggucugugauuuaccua

SEQ ID NO: 37288 - RNA, 21 nt, Artificial Sequence
  Synthetic
augaggucugugauuuaccua

SEQ ID NO: 37289 - RNA, 24 nt, Artificial Sequence
  Synthetic
aggaugaggucugugauuuaccua

SEQ ID NO: 37290 - RNA, 19 nt, Artificial Sequence
  Synthetic
uguaaaggguaaaacccua

SEQ ID NO: 37291 - RNA, 20 nt, Artificial Sequence
  Synthetic
auguaaaggguaaaacccua

SEQ ID NO: 37292 - RNA, 21 nt, Artificial Sequence
  Synthetic
cauguaaaggguaaaacccua

SEQ ID NO: 37293 - RNA, 24 nt, Artificial Sequence
  Synthetic
uggcauguaaaggguaaaacccua

SEQ ID NO: 37294 - RNA, 18 nt, Artificial Sequence
  Synthetic
auaguagccccuacccua

SEQ ID NO: 37295 - RNA, 19 nt, Artificial Sequence
  Synthetic
aauaguagccccuacccua

SEQ ID NO: 37296 - RNA, 20 nt, Artificial Sequence
  Synthetic
uaauaguagccccuacccua

SEQ ID NO: 37297 - RNA, 21 nt, Artificial Sequence
  Synthetic
auaauaguagccccuacccua

SEQ ID NO: 37298 - RNA, 23 nt, Artificial Sequence
  Synthetic
agauaauaguagccccuacccua

SEQ ID NO: 37299 - RNA, 24 nt, Artificial Sequence
  Synthetic
aagauaauaguagccccuacccua

SEQ ID NO: 37300 - RNA, 18 nt, Artificial Sequence
  Synthetic
aucaaagggagaccccua

SEQ ID NO: 37301 - RNA, 20 nt, Artificial Sequence
  Synthetic
agaucaaagggagaccccua

SEQ ID NO: 37302 - RNA, 21 nt, Artificial Sequence
  Synthetic
aagaucaaagggagaccccua

SEQ ID NO: 37303 - RNA, 22 nt, Artificial Sequence
  Synthetic
aaagaucaaagggagaccccua

SEQ ID NO: 37304 - RNA, 23 nt, Artificial Sequence
  Synthetic
aaaagaucaaagggagaccccua

SEQ ID NO: 37305 - RNA, 24 nt, Artificial Sequence
  Synthetic
aaaaagaucaaagggagaccccua

SEQ ID NO: 37306 - RNA, 18 nt, Artificial Sequence
  Synthetic
cacauucauuucccccua

SEQ ID NO: 37307 - RNA, 19 nt, Artificial Sequence
  Synthetic
acacauucauuucccccua

SEQ ID NO: 37308 - RNA, 21 nt, Artificial Sequence
  Synthetic
ugacacauucauuucccccua

SEQ ID NO: 37309 - RNA, 22 nt, Artificial Sequence
  Synthetic
cugacacauucauuucccccua

SEQ ID NO: 37310 - RNA, 23 nt, Artificial Sequence
  Synthetic
ccugacacauucauuucccccua

SEQ ID NO: 37311 - RNA, 24 nt, Artificial Sequence
  Synthetic
uccugacacauucauuucccccua

SEQ ID NO: 37312 - RNA, 20 nt, Artificial Sequence
  Synthetic
ugguccuaagacauccccua

SEQ ID NO: 37313 - RNA, 21 nt, Artificial Sequence
  Synthetic
cugguccuaagacauccccua

SEQ ID NO: 37314 - RNA, 22 nt, Artificial Sequence
  Synthetic
ccugguccuaagacauccccua

SEQ ID NO: 37315 - RNA, 23 nt, Artificial Sequence
  Synthetic
uccugguccuaagacauccccua

SEQ ID NO: 37316 - RNA, 24 nt, Artificial Sequence
  Synthetic
auccugguccuaagacauccccua

SEQ ID NO: 37317 - RNA, 18 nt, Artificial Sequence
  Synthetic
auaaacaugucaucccua

SEQ ID NO: 37318 - RNA, 21 nt, Artificial Sequence
  Synthetic
aggauaaacaugucaucccua

SEQ ID NO: 37319 - RNA, 22 nt, Artificial Sequence
  Synthetic
caggauaaacaugucaucccua

SEQ ID NO: 37320 - RNA, 24 nt, Artificial Sequence
  Synthetic
ugcaggauaaacaugucaucccua

SEQ ID NO: 37321 - RNA, 19 nt, Artificial Sequence
  Synthetic
agggccaaauguuucccua

SEQ ID NO: 37322 - RNA, 20 nt, Artificial Sequence
  Synthetic
uagggccaaauguuucccua

SEQ ID NO: 37323 - RNA, 21 nt, Artificial Sequence
  Synthetic
uuagggccaaauguuucccua

SEQ ID NO: 37324 - RNA, 22 nt, Artificial Sequence
  Synthetic
cuuagggccaaauguuucccua

SEQ ID NO: 37325 - RNA, 23 nt, Artificial Sequence
  Synthetic
ucuuagggccaaauguuucccua

SEQ ID NO: 37326 - RNA, 18 nt, Artificial Sequence
  Synthetic
cugcaguuggaaagccua

SEQ ID NO: 37327 - RNA, 20 nt, Artificial Sequence
  Synthetic
ugcugcaguuggaaagccua

SEQ ID NO: 37328 - RNA, 21 nt, Artificial Sequence
  Synthetic
cugcugcaguuggaaagccua

SEQ ID NO: 37329 - RNA, 23 nt, Artificial Sequence
  Synthetic
ugcugcugcaguuggaaagccua

SEQ ID NO: 37330 - RNA, 18 nt, Artificial Sequence
  Synthetic
aagaauuaguacggccua

SEQ ID NO: 37331 - RNA, 19 nt, Artificial Sequence
  Synthetic
uaagaauuaguacggccua

SEQ ID NO: 37332 - RNA, 20 nt, Artificial Sequence
  Synthetic
auaagaauuaguacggccua

SEQ ID NO: 37333 - RNA, 22 nt, Artificial Sequence
  Synthetic
ugauaagaauuaguacggccua

SEQ ID NO: 37334 - RNA, 23 nt, Artificial Sequence
  Synthetic
augauaagaauuaguacggccua

SEQ ID NO: 37335 - RNA, 24 nt, Artificial Sequence
  Synthetic
uaugauaagaauuaguacggccua

SEQ ID NO: 37336 - RNA, 21 nt, Artificial Sequence
  Synthetic
aggguuguaagucagggccua

SEQ ID NO: 37337 - RNA, 22 nt, Artificial Sequence
  Synthetic
caggguuguaagucagggccua

SEQ ID NO: 37338 - RNA, 23 nt, Artificial Sequence
  Synthetic
acaggguuguaagucagggccua

SEQ ID NO: 37339 - RNA, 24 nt, Artificial Sequence
  Synthetic
aacaggguuguaagucagggccua

SEQ ID NO: 37340 - RNA, 18 nt, Artificial Sequence
  Synthetic
ugaaaucaaaguggccua

SEQ ID NO: 37341 - RNA, 19 nt, Artificial Sequence
  Synthetic
cugaaaucaaaguggccua

SEQ ID NO: 37342 - RNA, 20 nt, Artificial Sequence
  Synthetic
ccugaaaucaaaguggccua

SEQ ID NO: 37343 - RNA, 21 nt, Artificial Sequence
  Synthetic
cccugaaaucaaaguggccua

SEQ ID NO: 37344 - RNA, 22 nt, Artificial Sequence
  Synthetic
acccugaaaucaaaguggccua

SEQ ID NO: 37345 - RNA, 23 nt, Artificial Sequence
  Synthetic
aacccugaaaucaaaguggccua

SEQ ID NO: 37346 - RNA, 24 nt, Artificial Sequence
  Synthetic
uaacccugaaaucaaaguggccua

SEQ ID NO: 37347 - RNA, 18 nt, Artificial Sequence
  Synthetic
uaucacaacgaaugccua

SEQ ID NO: 37348 - RNA, 19 nt, Artificial Sequence
  Synthetic
auaucacaacgaaugccua

SEQ ID NO: 37349 - RNA, 20 nt, Artificial Sequence
  Synthetic
aauaucacaacgaaugccua

SEQ ID NO: 37350 - RNA, 21 nt, Artificial Sequence
  Synthetic
uaauaucacaacgaaugccua

SEQ ID NO: 37351 - RNA, 23 nt, Artificial Sequence
  Synthetic
aguaauaucacaacgaaugccua

SEQ ID NO: 37352 - RNA, 24 nt, Artificial Sequence
  Synthetic
aaguaauaucacaacgaaugccua

SEQ ID NO: 37353 - RNA, 18 nt, Artificial Sequence
  Synthetic
cgggagaauacuugccua

SEQ ID NO: 37354 - RNA, 20 nt, Artificial Sequence
  Synthetic
ugcgggagaauacuugccua

SEQ ID NO: 37355 - RNA, 21 nt, Artificial Sequence
  Synthetic
uugcgggagaauacuugccua

SEQ ID NO: 37356 - RNA, 22 nt, Artificial Sequence
  Synthetic
cuugcgggagaauacuugccua

SEQ ID NO: 37357 - RNA, 23 nt, Artificial Sequence
  Synthetic
ccuugcgggagaauacuugccua

SEQ ID NO: 37358 - RNA, 24 nt, Artificial Sequence
  Synthetic
uccuugcgggagaauacuugccua

SEQ ID NO: 37359 - RNA, 18 nt, Artificial Sequence
  Synthetic
augacuuaacccauccua

SEQ ID NO: 37360 - RNA, 19 nt, Artificial Sequence
  Synthetic
aaugacuuaacccauccua

SEQ ID NO: 37361 - RNA, 20 nt, Artificial Sequence
  Synthetic
caaugacuuaacccauccua

SEQ ID NO: 37362 - RNA, 21 nt, Artificial Sequence
  Synthetic
ucaaugacuuaacccauccua

SEQ ID NO: 37363 - RNA, 22 nt, Artificial Sequence
  Synthetic
aucaaugacuuaacccauccua

SEQ ID NO: 37364 - RNA, 23 nt, Artificial Sequence
  Synthetic
uaucaaugacuuaacccauccua

SEQ ID NO: 37365 - RNA, 24 nt, Artificial Sequence
  Synthetic
uuaucaaugacuuaacccauccua

SEQ ID NO: 37366 - RNA, 18 nt, Artificial Sequence
  Synthetic
uuaauagcauugauccua

SEQ ID NO: 37367 - RNA, 19 nt, Artificial Sequence
  Synthetic
uuuaauagcauugauccua

SEQ ID NO: 37368 - RNA, 21 nt, Artificial Sequence
  Synthetic
uguuuaauagcauugauccua

SEQ ID NO: 37369 - RNA, 23 nt, Artificial Sequence
  Synthetic
uguguuuaauagcauugauccua

SEQ ID NO: 37370 - RNA, 24 nt, Artificial Sequence
  Synthetic
auguguuuaauagcauugauccua

SEQ ID NO: 37371 - RNA, 19 nt, Artificial Sequence
  Synthetic
aggccagcaaaaccuccua

SEQ ID NO: 37372 - RNA, 20 nt, Artificial Sequence
  Synthetic
uaggccagcaaaaccuccua

SEQ ID NO: 37373 - RNA, 21 nt, Artificial Sequence
  Synthetic
uuaggccagcaaaaccuccua

SEQ ID NO: 37374 - RNA, 22 nt, Artificial Sequence
  Synthetic
uuuaggccagcaaaaccuccua

SEQ ID NO: 37375 - RNA, 23 nt, Artificial Sequence
  Synthetic
auuuaggccagcaaaaccuccua

SEQ ID NO: 37376 - RNA, 24 nt, Artificial Sequence
  Synthetic
aauuuaggccagcaaaaccuccua

SEQ ID NO: 37377 - RNA, 18 nt, Artificial Sequence
  Synthetic
cuauauaguuuccuccua

SEQ ID NO: 37378 - RNA, 19 nt, Artificial Sequence
  Synthetic
acuauauaguuuccuccua

SEQ ID NO: 37379 - RNA, 20 nt, Artificial Sequence
  Synthetic
cacuauauaguuuccuccua

SEQ ID NO: 37380 - RNA, 21 nt, Artificial Sequence
  Synthetic
ucacuauauaguuuccuccua

SEQ ID NO: 37381 - RNA, 22 nt, Artificial Sequence
  Synthetic
uucacuauauaguuuccuccua

SEQ ID NO: 37382 - RNA, 24 nt, Artificial Sequence
  Synthetic
uguucacuauauaguuuccuccua

SEQ ID NO: 37383 - RNA, 18 nt, Artificial Sequence
  Synthetic
uaggcagguucuguccua

SEQ ID NO: 37384 - RNA, 19 nt, Artificial Sequence
  Synthetic
auaggcagguucuguccua

SEQ ID NO: 37385 - RNA, 21 nt, Artificial Sequence
  Synthetic
agauaggcagguucuguccua

SEQ ID NO: 37386 - RNA, 22 nt, Artificial Sequence
  Synthetic
aagauaggcagguucuguccua

SEQ ID NO: 37387 - RNA, 23 nt, Artificial Sequence
  Synthetic
caagauaggcagguucuguccua

SEQ ID NO: 37388 - RNA, 24 nt, Artificial Sequence
  Synthetic
ucaagauaggcagguucuguccua

SEQ ID NO: 37389 - RNA, 18 nt, Artificial Sequence
  Synthetic
aauaguaaaguguuccua

SEQ ID NO: 37390 - RNA, 19 nt, Artificial Sequence
  Synthetic
uaauaguaaaguguuccua

SEQ ID NO: 37391 - RNA, 20 nt, Artificial Sequence
  Synthetic
auaauaguaaaguguuccua

SEQ ID NO: 37392 - RNA, 21 nt, Artificial Sequence
  Synthetic
aauaauaguaaaguguuccua

SEQ ID NO: 37393 - RNA, 22 nt, Artificial Sequence
  Synthetic
aaauaauaguaaaguguuccua

SEQ ID NO: 37394 - RNA, 23 nt, Artificial Sequence
  Synthetic
aaaauaauaguaaaguguuccua

SEQ ID NO: 37395 - RNA, 24 nt, Artificial Sequence
  Synthetic
aaaaauaauaguaaaguguuccua

SEQ ID NO: 37396 - RNA, 18 nt, Artificial Sequence
  Synthetic
acuccuaagguuuuccua

SEQ ID NO: 37397 - RNA, 19 nt, Artificial Sequence
  Synthetic
aacuccuaagguuuuccua

SEQ ID NO: 37398 - RNA, 20 nt, Artificial Sequence
  Synthetic
uaacuccuaagguuuuccua

SEQ ID NO: 37399 - RNA, 21 nt, Artificial Sequence
  Synthetic
auaacuccuaagguuuuccua

SEQ ID NO: 37400 - RNA, 23 nt, Artificial Sequence
  Synthetic
agauaacuccuaagguuuuccua

SEQ ID NO: 37401 - RNA, 24 nt, Artificial Sequence
  Synthetic
cagauaacuccuaagguuuuccua

SEQ ID NO: 37402 - RNA, 18 nt, Artificial Sequence
  Synthetic
uaaaauauuuagaagcua

SEQ ID NO: 37403 - RNA, 19 nt, Artificial Sequence
  Synthetic
uuaaaauauuuagaagcua

SEQ ID NO: 37404 - RNA, 20 nt, Artificial Sequence
  Synthetic
cuuaaaauauuuagaagcua

SEQ ID NO: 37405 - RNA, 21 nt, Artificial Sequence
  Synthetic
acuuaaaauauuuagaagcua

SEQ ID NO: 37406 - RNA, 22 nt, Artificial Sequence
  Synthetic
uacuuaaaauauuuagaagcua

SEQ ID NO: 37407 - RNA, 24 nt, Artificial Sequence
  Synthetic
aguacuuaaaauauuuagaagcua

SEQ ID NO: 37408 - RNA, 18 nt, Artificial Sequence
  Synthetic
ccaaaaagcuaucagcua

SEQ ID NO: 37409 - RNA, 19 nt, Artificial Sequence
  Synthetic
uccaaaaagcuaucagcua

SEQ ID NO: 37410 - RNA, 20 nt, Artificial Sequence
  Synthetic
uuccaaaaagcuaucagcua

SEQ ID NO: 37411 - RNA, 23 nt, Artificial Sequence
  Synthetic
ugguuccaaaaagcuaucagcua

SEQ ID NO: 37412 - RNA, 24 nt, Artificial Sequence
  Synthetic
uugguuccaaaaagcuaucagcua

SEQ ID NO: 37413 - RNA, 18 nt, Artificial Sequence
  Synthetic
uacauuuucagucagcua

SEQ ID NO: 37414 - RNA, 19 nt, Artificial Sequence
  Synthetic
auacauuuucagucagcua

SEQ ID NO: 37415 - RNA, 20 nt, Artificial Sequence
  Synthetic
cauacauuuucagucagcua

SEQ ID NO: 37416 - RNA, 21 nt, Artificial Sequence
  Synthetic
ucauacauuuucagucagcua

SEQ ID NO: 37417 - RNA, 22 nt, Artificial Sequence
  Synthetic
cucauacauuuucagucagcua

SEQ ID NO: 37418 - RNA, 23 nt, Artificial Sequence
  Synthetic
acucauacauuuucagucagcua

SEQ ID NO: 37419 - RNA, 24 nt, Artificial Sequence
  Synthetic
cacucauacauuuucagucagcua

SEQ ID NO: 37420 - RNA, 18 nt, Artificial Sequence
  Synthetic
aaucaaaauguucagcua

SEQ ID NO: 37421 - RNA, 19 nt, Artificial Sequence
  Synthetic
uaaucaaaauguucagcua

SEQ ID NO: 37422 - RNA, 23 nt, Artificial Sequence
  Synthetic
cggguaaucaaaauguucagcua

SEQ ID NO: 37423 - RNA, 24 nt, Artificial Sequence
  Synthetic
acggguaaucaaaauguucagcua

SEQ ID NO: 37424 - RNA, 18 nt, Artificial Sequence
  Synthetic
cacucuaguagugagcua

SEQ ID NO: 37425 - RNA, 19 nt, Artificial Sequence
  Synthetic
acacucuaguagugagcua

SEQ ID NO: 37426 - RNA, 20 nt, Artificial Sequence
  Synthetic
uacacucuaguagugagcua

SEQ ID NO: 37427 - RNA, 21 nt, Artificial Sequence
  Synthetic
uuacacucuaguagugagcua

SEQ ID NO: 37428 - RNA, 22 nt, Artificial Sequence
  Synthetic
cuuacacucuaguagugagcua

SEQ ID NO: 37429 - RNA, 23 nt, Artificial Sequence
  Synthetic
acuuacacucuaguagugagcua

SEQ ID NO: 37430 - RNA, 24 nt, Artificial Sequence
  Synthetic
aacuuacacucuaguagugagcua

SEQ ID NO: 37431 - RNA, 19 nt, Artificial Sequence
  Synthetic
cgugguguugcucuagcua

SEQ ID NO: 37432 - RNA, 20 nt, Artificial Sequence
  Synthetic
ucgugguguugcucuagcua

SEQ ID NO: 37433 - RNA, 21 nt, Artificial Sequence
  Synthetic
uucgugguguugcucuagcua

SEQ ID NO: 37434 - RNA, 22 nt, Artificial Sequence
  Synthetic
uuucgugguguugcucuagcua

SEQ ID NO: 37435 - RNA, 23 nt, Artificial Sequence
  Synthetic
cuuucgugguguugcucuagcua

SEQ ID NO: 37436 - RNA, 24 nt, Artificial Sequence
  Synthetic
ucuuucgugguguugcucuagcua

SEQ ID NO: 37437 - RNA, 18 nt, Artificial Sequence
  Synthetic
aagcauuugaauuagcua

SEQ ID NO: 37438 - RNA, 19 nt, Artificial Sequence
  Synthetic
aaagcauuugaauuagcua

SEQ ID NO: 37439 - RNA, 20 nt, Artificial Sequence
  Synthetic
aaaagcauuugaauuagcua

SEQ ID NO: 37440 - RNA, 21 nt, Artificial Sequence
  Synthetic
aaaaagcauuugaauuagcua

SEQ ID NO: 37441 - RNA, 22 nt, Artificial Sequence
  Synthetic
caaaaagcauuugaauuagcua

SEQ ID NO: 37442 - RNA, 23 nt, Artificial Sequence
  Synthetic
acaaaaagcauuugaauuagcua

SEQ ID NO: 37443 - RNA, 24 nt, Artificial Sequence
  Synthetic
cacaaaaagcauuugaauuagcua

SEQ ID NO: 37444 - RNA, 18 nt, Artificial Sequence
  Synthetic
ucuaauuaucuuuagcua

SEQ ID NO: 37445 - RNA, 19 nt, Artificial Sequence
  Synthetic
uucuaauuaucuuuagcua

SEQ ID NO: 37446 - RNA, 20 nt, Artificial Sequence
  Synthetic
auucuaauuaucuuuagcua

SEQ ID NO: 37447 - RNA, 21 nt, Artificial Sequence
  Synthetic
cauucuaauuaucuuuagcua

SEQ ID NO: 37448 - RNA, 22 nt, Artificial Sequence
  Synthetic
acauucuaauuaucuuuagcua

SEQ ID NO: 37449 - RNA, 23 nt, Artificial Sequence
  Synthetic
aacauucuaauuaucuuuagcua

SEQ ID NO: 37450 - RNA, 24 nt, Artificial Sequence
  Synthetic
caacauucuaauuaucuuuagcua

SEQ ID NO: 37451 - RNA, 18 nt, Artificial Sequence
  Synthetic
uagcauuugaaaccgcua

SEQ ID NO: 37452 - RNA, 19 nt, Artificial Sequence
  Synthetic
cuagcauuugaaaccgcua

SEQ ID NO: 37453 - RNA, 20 nt, Artificial Sequence
  Synthetic
ccuagcauuugaaaccgcua

SEQ ID NO: 37454 - RNA, 21 nt, Artificial Sequence
  Synthetic
uccuagcauuugaaaccgcua

SEQ ID NO: 37455 - RNA, 22 nt, Artificial Sequence
  Synthetic
cuccuagcauuugaaaccgcua

SEQ ID NO: 37456 - RNA, 23 nt, Artificial Sequence
  Synthetic
acuccuagcauuugaaaccgcua

SEQ ID NO: 37457 - RNA, 19 nt, Artificial Sequence
  Synthetic
uguguaagguaacaggcua

SEQ ID NO: 37458 - RNA, 20 nt, Artificial Sequence
  Synthetic
uuguguaagguaacaggcua

SEQ ID NO: 37459 - RNA, 21 nt, Artificial Sequence
  Synthetic
uuuguguaagguaacaggcua

SEQ ID NO: 37460 - RNA, 22 nt, Artificial Sequence
  Synthetic
cuuuguguaagguaacaggcua

SEQ ID NO: 37461 - RNA, 24 nt, Artificial Sequence
  Synthetic
ugcuuuguguaagguaacaggcua

SEQ ID NO: 37462 - RNA, 18 nt, Artificial Sequence
  Synthetic
acaguuacauacaggcua

SEQ ID NO: 37463 - RNA, 19 nt, Artificial Sequence
  Synthetic
cacaguuacauacaggcua

SEQ ID NO: 37464 - RNA, 20 nt, Artificial Sequence
  Synthetic
ccacaguuacauacaggcua

SEQ ID NO: 37465 - RNA, 21 nt, Artificial Sequence
  Synthetic
cccacaguuacauacaggcua

SEQ ID NO: 37466 - RNA, 22 nt, Artificial Sequence
  Synthetic
ucccacaguuacauacaggcua

SEQ ID NO: 37467 - RNA, 23 nt, Artificial Sequence
  Synthetic
cucccacaguuacauacaggcua

SEQ ID NO: 37468 - RNA, 20 nt, Artificial Sequence
  Synthetic
uggagaaauguucuaggcua

SEQ ID NO: 37469 - RNA, 21 nt, Artificial Sequence
  Synthetic
auggagaaauguucuaggcua

SEQ ID NO: 37470 - RNA, 22 nt, Artificial Sequence
  Synthetic
uauggagaaauguucuaggcua

SEQ ID NO: 37471 - RNA, 23 nt, Artificial Sequence
  Synthetic
cuauggagaaauguucuaggcua

SEQ ID NO: 37472 - RNA, 24 nt, Artificial Sequence
  Synthetic
ccuauggagaaauguucuaggcua

SEQ ID NO: 37473 - RNA, 18 nt, Artificial Sequence
  Synthetic
ucucuaugcugugggcua

SEQ ID NO: 37474 - RNA, 19 nt, Artificial Sequence
  Synthetic
aucucuaugcugugggcua

SEQ ID NO: 37475 - RNA, 20 nt, Artificial Sequence
  Synthetic
uaucucuaugcugugggcua

SEQ ID NO: 37476 - RNA, 21 nt, Artificial Sequence
  Synthetic
auaucucuaugcugugggcua

SEQ ID NO: 37477 - RNA, 22 nt, Artificial Sequence
  Synthetic
aauaucucuaugcugugggcua

SEQ ID NO: 37478 - RNA, 23 nt, Artificial Sequence
  Synthetic
uaauaucucuaugcugugggcua

SEQ ID NO: 37479 - RNA, 24 nt, Artificial Sequence
  Synthetic
uuaauaucucuaugcugugggcua

SEQ ID NO: 37480 - RNA, 18 nt, Artificial Sequence
  Synthetic
aauagcguuguauggcua

SEQ ID NO: 37481 - RNA, 19 nt, Artificial Sequence
  Synthetic
uaauagcguuguauggcua

SEQ ID NO: 37482 - RNA, 20 nt, Artificial Sequence
  Synthetic
uuaauagcguuguauggcua

SEQ ID NO: 37483 - RNA, 22 nt, Artificial Sequence
  Synthetic
uguuaauagcguuguauggcua

SEQ ID NO: 37484 - RNA, 23 nt, Artificial Sequence
  Synthetic
auguuaauagcguuguauggcua

SEQ ID NO: 37485 - RNA, 24 nt, Artificial Sequence
  Synthetic
aauguuaauagcguuguauggcua

SEQ ID NO: 37486 - RNA, 18 nt, Artificial Sequence
  Synthetic
uacuucauacaaaugcua

SEQ ID NO: 37487 - RNA, 19 nt, Artificial Sequence
  Synthetic
uuacuucauacaaaugcua

SEQ ID NO: 37488 - RNA, 20 nt, Artificial Sequence
  Synthetic
uuuacuucauacaaaugcua

SEQ ID NO: 37489 - RNA, 21 nt, Artificial Sequence
  Synthetic
auuuacuucauacaaaugcua

SEQ ID NO: 37490 - RNA, 23 nt, Artificial Sequence
  Synthetic
ugauuuacuucauacaaaugcua

SEQ ID NO: 37491 - RNA, 24 nt, Artificial Sequence
  Synthetic
augauuuacuucauacaaaugcua

SEQ ID NO: 37492 - RNA, 19 nt, Artificial Sequence
  Synthetic
uguuuauuacaguaugcua

SEQ ID NO: 37493 - RNA, 20 nt, Artificial Sequence
  Synthetic
auguuuauuacaguaugcua

SEQ ID NO: 37494 - RNA, 23 nt, Artificial Sequence
  Synthetic
uggauguuuauuacaguaugcua

SEQ ID NO: 37495 - RNA, 24 nt, Artificial Sequence
  Synthetic
auggauguuuauuacaguaugcua

SEQ ID NO: 37496 - RNA, 18 nt, Artificial Sequence
  Synthetic
uacuuauuauaugugcua

SEQ ID NO: 37497 - RNA, 20 nt, Artificial Sequence
  Synthetic
aguacuuauuauaugugcua

SEQ ID NO: 37498 - RNA, 21 nt, Artificial Sequence
  Synthetic
caguacuuauuauaugugcua

SEQ ID NO: 37499 - RNA, 23 nt, Artificial Sequence
  Synthetic
ugcaguacuuauuauaugugcua

SEQ ID NO: 37500 - RNA, 24 nt, Artificial Sequence
  Synthetic
cugcaguacuuauuauaugugcua

SEQ ID NO: 37501 - RNA, 18 nt, Artificial Sequence
  Synthetic
aaguuaaaugauuugcua

SEQ ID NO: 37502 - RNA, 19 nt, Artificial Sequence
  Synthetic
uaaguuaaaugauuugcua

SEQ ID NO: 37503 - RNA, 20 nt, Artificial Sequence
  Synthetic
uuaaguuaaaugauuugcua

SEQ ID NO: 37504 - RNA, 21 nt, Artificial Sequence
  Synthetic
uuuaaguuaaaugauuugcua

SEQ ID NO: 37505 - RNA, 22 nt, Artificial Sequence
  Synthetic
uuuuaaguuaaaugauuugcua

SEQ ID NO: 37506 - RNA, 23 nt, Artificial Sequence
  Synthetic
uuuuuaaguuaaaugauuugcua

SEQ ID NO: 37507 - RNA, 24 nt, Artificial Sequence
  Synthetic
auuuuuaaguuaaaugauuugcua

SEQ ID NO: 37508 - RNA, 21 nt, Artificial Sequence
  Synthetic
uacaacugaaagaaaaaucua

SEQ ID NO: 37509 - RNA, 22 nt, Artificial Sequence
  Synthetic
uuacaacugaaagaaaaaucua

SEQ ID NO: 37510 - RNA, 23 nt, Artificial Sequence
  Synthetic
cuuacaacugaaagaaaaaucua

SEQ ID NO: 37511 - RNA, 24 nt, Artificial Sequence
  Synthetic
ucuuacaacugaaagaaaaaucua

SEQ ID NO: 37512 - RNA, 19 nt, Artificial Sequence
  Synthetic
aguagaucuggaaaaucua

SEQ ID NO: 37513 - RNA, 20 nt, Artificial Sequence
  Synthetic
aaguagaucuggaaaaucua

SEQ ID NO: 37514 - RNA, 21 nt, Artificial Sequence
  Synthetic
aaaguagaucuggaaaaucua

SEQ ID NO: 37515 - RNA, 22 nt, Artificial Sequence
  Synthetic
aaaaguagaucuggaaaaucua

SEQ ID NO: 37516 - RNA, 23 nt, Artificial Sequence
  Synthetic
aaaaaguagaucuggaaaaucua

SEQ ID NO: 37517 - RNA, 24 nt, Artificial Sequence
  Synthetic
caaaaaguagaucuggaaaaucua

SEQ ID NO: 37518 - RNA, 18 nt, Artificial Sequence
  Synthetic
caacacuuuagaaaucua

SEQ ID NO: 37519 - RNA, 19 nt, Artificial Sequence
  Synthetic
acaacacuuuagaaaucua

SEQ ID NO: 37520 - RNA, 20 nt, Artificial Sequence
  Synthetic
aacaacacuuuagaaaucua

SEQ ID NO: 37521 - RNA, 21 nt, Artificial Sequence
  Synthetic
aaacaacacuuuagaaaucua

SEQ ID NO: 37522 - RNA, 22 nt, Artificial Sequence
  Synthetic
uaaacaacacuuuagaaaucua

SEQ ID NO: 37523 - RNA, 23 nt, Artificial Sequence
  Synthetic
uuaaacaacacuuuagaaaucua

SEQ ID NO: 37524 - RNA, 24 nt, Artificial Sequence
  Synthetic
uuuaaacaacacuuuagaaaucua

SEQ ID NO: 37525 - RNA, 21 nt, Artificial Sequence
  Synthetic
auaauuuaaugggagaaucua

SEQ ID NO: 37526 - RNA, 22 nt, Artificial Sequence
  Synthetic
uauaauuuaaugggagaaucua

SEQ ID NO: 37527 - RNA, 23 nt, Artificial Sequence
  Synthetic
uuauaauuuaaugggagaaucua

SEQ ID NO: 37528 - RNA, 18 nt, Artificial Sequence
  Synthetic
cugaaaugagggaaucua

SEQ ID NO: 37529 - RNA, 19 nt, Artificial Sequence
  Synthetic
acugaaaugagggaaucua

SEQ ID NO: 37530 - RNA, 20 nt, Artificial Sequence
  Synthetic
uacugaaaugagggaaucua

SEQ ID NO: 37531 - RNA, 21 nt, Artificial Sequence
  Synthetic
uuacugaaaugagggaaucua

SEQ ID NO: 37532 - RNA, 22 nt, Artificial Sequence
  Synthetic
uuuacugaaaugagggaaucua

SEQ ID NO: 37533 - RNA, 23 nt, Artificial Sequence
  Synthetic
auuuacugaaaugagggaaucua

SEQ ID NO: 37534 - RNA, 24 nt, Artificial Sequence
  Synthetic
cauuuacugaaaugagggaaucua

SEQ ID NO: 37535 - RNA, 18 nt, Artificial Sequence
  Synthetic
ucggauacuaugaaucua

SEQ ID NO: 37536 - RNA, 19 nt, Artificial Sequence
  Synthetic
uucggauacuaugaaucua

SEQ ID NO: 37537 - RNA, 20 nt, Artificial Sequence
  Synthetic
uuucggauacuaugaaucua

SEQ ID NO: 37538 - RNA, 22 nt, Artificial Sequence
  Synthetic
aguuucggauacuaugaaucua

SEQ ID NO: 37539 - RNA, 23 nt, Artificial Sequence
  Synthetic
aaguuucggauacuaugaaucua

SEQ ID NO: 37540 - RNA, 24 nt, Artificial Sequence
  Synthetic
uaaguuucggauacuaugaaucua

SEQ ID NO: 37541 - RNA, 18 nt, Artificial Sequence
  Synthetic
augugggcacaguaucua

SEQ ID NO: 37542 - RNA, 19 nt, Artificial Sequence
  Synthetic
uaugugggcacaguaucua

SEQ ID NO: 37543 - RNA, 20 nt, Artificial Sequence
  Synthetic
auaugugggcacaguaucua

SEQ ID NO: 37544 - RNA, 21 nt, Artificial Sequence
  Synthetic
uauaugugggcacaguaucua

SEQ ID NO: 37545 - RNA, 22 nt, Artificial Sequence
  Synthetic
auauaugugggcacaguaucua

SEQ ID NO: 37546 - RNA, 23 nt, Artificial Sequence
  Synthetic
cauauaugugggcacaguaucua

SEQ ID NO: 37547 - RNA, 24 nt, Artificial Sequence
  Synthetic
acauauaugugggcacaguaucua

SEQ ID NO: 37548 - RNA, 18 nt, Artificial Sequence
  Synthetic
ucucacuugaaaacucua

SEQ ID NO: 37549 - RNA, 19 nt, Artificial Sequence
  Synthetic
aucucacuugaaaacucua

SEQ ID NO: 37550 - RNA, 21 nt, Artificial Sequence
  Synthetic
agaucucacuugaaaacucua

SEQ ID NO: 37551 - RNA, 22 nt, Artificial Sequence
  Synthetic
cagaucucacuugaaaacucua

SEQ ID NO: 37552 - RNA, 23 nt, Artificial Sequence
  Synthetic
ccagaucucacuugaaaacucua

SEQ ID NO: 37553 - RNA, 24 nt, Artificial Sequence
  Synthetic
uccagaucucacuugaaaacucua

SEQ ID NO: 37554 - RNA, 18 nt, Artificial Sequence
  Synthetic
uauauaugaggaacucua

SEQ ID NO: 37555 - RNA, 19 nt, Artificial Sequence
  Synthetic
uuauauaugaggaacucua

SEQ ID NO: 37556 - RNA, 20 nt, Artificial Sequence
  Synthetic
cuuauauaugaggaacucua

SEQ ID NO: 37557 - RNA, 22 nt, Artificial Sequence
  Synthetic
ugcuuauauaugaggaacucua

SEQ ID NO: 37558 - RNA, 23 nt, Artificial Sequence
  Synthetic
uugcuuauauaugaggaacucua

SEQ ID NO: 37559 - RNA, 24 nt, Artificial Sequence
  Synthetic
cuugcuuauauaugaggaacucua

SEQ ID NO: 37560 - RNA, 19 nt, Artificial Sequence
  Synthetic
agaaaauaauggaacucua

SEQ ID NO: 37561 - RNA, 20 nt, Artificial Sequence
  Synthetic
cagaaaauaauggaacucua

SEQ ID NO: 37562 - RNA, 21 nt, Artificial Sequence
  Synthetic
acagaaaauaauggaacucua

SEQ ID NO: 37563 - RNA, 23 nt, Artificial Sequence
  Synthetic
agacagaaaauaauggaacucua

SEQ ID NO: 37564 - RNA, 24 nt, Artificial Sequence
  Synthetic
aagacagaaaauaauggaacucua

SEQ ID NO: 37565 - RNA, 18 nt, Artificial Sequence
  Synthetic
ucuuagcauuuaacucua

SEQ ID NO: 37566 - RNA, 19 nt, Artificial Sequence
  Synthetic
uucuuagcauuuaacucua

SEQ ID NO: 37567 - RNA, 20 nt, Artificial Sequence
  Synthetic
uuucuuagcauuuaacucua

SEQ ID NO: 37568 - RNA, 21 nt, Artificial Sequence
  Synthetic
auuucuuagcauuuaacucua

SEQ ID NO: 37569 - RNA, 22 nt, Artificial Sequence
  Synthetic
aauuucuuagcauuuaacucua

SEQ ID NO: 37570 - RNA, 23 nt, Artificial Sequence
  Synthetic
aaauuucuuagcauuuaacucua

SEQ ID NO: 37571 - RNA, 24 nt, Artificial Sequence
  Synthetic
uaaauuucuuagcauuuaacucua

SEQ ID NO: 37572 - RNA, 18 nt, Artificial Sequence
  Synthetic
auugaucuacagacucua

SEQ ID NO: 37573 - RNA, 19 nt, Artificial Sequence
  Synthetic
aauugaucuacagacucua

SEQ ID NO: 37574 - RNA, 20 nt, Artificial Sequence
  Synthetic
caauugaucuacagacucua

SEQ ID NO: 37575 - RNA, 21 nt, Artificial Sequence
  Synthetic
ccaauugaucuacagacucua

SEQ ID NO: 37576 - RNA, 22 nt, Artificial Sequence
  Synthetic
cccaauugaucuacagacucua

SEQ ID NO: 37577 - RNA, 23 nt, Artificial Sequence
  Synthetic
ccccaauugaucuacagacucua

SEQ ID NO: 37578 - RNA, 24 nt, Artificial Sequence
  Synthetic
cccccaauugaucuacagacucua

SEQ ID NO: 37579 - RNA, 19 nt, Artificial Sequence
  Synthetic
agagugaaaacuaccucua

SEQ ID NO: 37580 - RNA, 20 nt, Artificial Sequence
  Synthetic
cagagugaaaacuaccucua

SEQ ID NO: 37581 - RNA, 21 nt, Artificial Sequence
  Synthetic
acagagugaaaacuaccucua

SEQ ID NO: 37582 - RNA, 22 nt, Artificial Sequence
  Synthetic
aacagagugaaaacuaccucua

SEQ ID NO: 37583 - RNA, 23 nt, Artificial Sequence
  Synthetic
uaacagagugaaaacuaccucua

SEQ ID NO: 37584 - RNA, 24 nt, Artificial Sequence
  Synthetic
auaacagagugaaaacuaccucua

SEQ ID NO: 37585 - RNA, 18 nt, Artificial Sequence
  Synthetic
aaaauaguggucccucua

SEQ ID NO: 37586 - RNA, 19 nt, Artificial Sequence
  Synthetic
uaaaauaguggucccucua

SEQ ID NO: 37587 - RNA, 20 nt, Artificial Sequence
  Synthetic
auaaaauaguggucccucua

SEQ ID NO: 37588 - RNA, 21 nt, Artificial Sequence
  Synthetic
uauaaaauaguggucccucua

SEQ ID NO: 37589 - RNA, 22 nt, Artificial Sequence
  Synthetic
cuauaaaauaguggucccucua

SEQ ID NO: 37590 - RNA, 18 nt, Artificial Sequence
  Synthetic
uugggguuauauccucua

SEQ ID NO: 37591 - RNA, 19 nt, Artificial Sequence
  Synthetic
uuugggguuauauccucua

SEQ ID NO: 37592 - RNA, 20 nt, Artificial Sequence
  Synthetic
cuuugggguuauauccucua

SEQ ID NO: 37593 - RNA, 21 nt, Artificial Sequence
  Synthetic
ccuuugggguuauauccucua

SEQ ID NO: 37594 - RNA, 23 nt, Artificial Sequence
  Synthetic
agccuuugggguuauauccucua

SEQ ID NO: 37595 - RNA, 24 nt, Artificial Sequence
  Synthetic
cagccuuugggguuauauccucua

SEQ ID NO: 37596 - RNA, 21 nt, Artificial Sequence
  Synthetic
ccacucuacuuucugucucua

SEQ ID NO: 37597 - RNA, 22 nt, Artificial Sequence
  Synthetic
accacucuacuuucugucucua

SEQ ID NO: 37598 - RNA, 24 nt, Artificial Sequence
  Synthetic
ugaccacucuacuuucugucucua

SEQ ID NO: 37599 - RNA, 18 nt, Artificial Sequence
  Synthetic
acgccuucccuuucucua

SEQ ID NO: 37600 - RNA, 19 nt, Artificial Sequence
  Synthetic
aacgccuucccuuucucua

SEQ ID NO: 37601 - RNA, 20 nt, Artificial Sequence
  Synthetic
aaacgccuucccuuucucua

SEQ ID NO: 37602 - RNA, 21 nt, Artificial Sequence
  Synthetic
caaacgccuucccuuucucua

SEQ ID NO: 37603 - RNA, 22 nt, Artificial Sequence
  Synthetic
ucaaacgccuucccuuucucua

SEQ ID NO: 37604 - RNA, 23 nt, Artificial Sequence
  Synthetic
uucaaacgccuucccuuucucua

SEQ ID NO: 37605 - RNA, 18 nt, Artificial Sequence
  Synthetic
agauacaacugaagucua

SEQ ID NO: 37606 - RNA, 21 nt, Artificial Sequence
  Synthetic
uggagauacaacugaagucua

SEQ ID NO: 37607 - RNA, 22 nt, Artificial Sequence
  Synthetic
uuggagauacaacugaagucua

SEQ ID NO: 37608 - RNA, 23 nt, Artificial Sequence
  Synthetic
auuggagauacaacugaagucua

SEQ ID NO: 37609 - RNA, 18 nt, Artificial Sequence
  Synthetic
caagugaaaaagagucua

SEQ ID NO: 37610 - RNA, 20 nt, Artificial Sequence
  Synthetic
agcaagugaaaaagagucua

SEQ ID NO: 37611 - RNA, 21 nt, Artificial Sequence
  Synthetic
aagcaagugaaaaagagucua

SEQ ID NO: 37612 - RNA, 22 nt, Artificial Sequence
  Synthetic
aaagcaagugaaaaagagucua

SEQ ID NO: 37613 - RNA, 23 nt, Artificial Sequence
  Synthetic
caaagcaagugaaaaagagucua

SEQ ID NO: 37614 - RNA, 18 nt, Artificial Sequence
  Synthetic
ucaaaagccaauagucua

SEQ ID NO: 37615 - RNA, 19 nt, Artificial Sequence
  Synthetic
cucaaaagccaauagucua

SEQ ID NO: 37616 - RNA, 20 nt, Artificial Sequence
  Synthetic
ucucaaaagccaauagucua

SEQ ID NO: 37617 - RNA, 21 nt, Artificial Sequence
  Synthetic
uucucaaaagccaauagucua

SEQ ID NO: 37618 - RNA, 22 nt, Artificial Sequence
  Synthetic
auucucaaaagccaauagucua

SEQ ID NO: 37619 - RNA, 23 nt, Artificial Sequence
  Synthetic
uauucucaaaagccaauagucua

SEQ ID NO: 37620 - RNA, 24 nt, Artificial Sequence
  Synthetic
auauucucaaaagccaauagucua

SEQ ID NO: 37621 - RNA, 18 nt, Artificial Sequence
  Synthetic
auucccaaauguagucua

SEQ ID NO: 37622 - RNA, 19 nt, Artificial Sequence
  Synthetic
cauucccaaauguagucua

SEQ ID NO: 37623 - RNA, 21 nt, Artificial Sequence
  Synthetic
agcauucccaaauguagucua

SEQ ID NO: 37624 - RNA, 22 nt, Artificial Sequence
  Synthetic
aagcauucccaaauguagucua

SEQ ID NO: 37625 - RNA, 18 nt, Artificial Sequence
  Synthetic
uaccucuacugaggucua

SEQ ID NO: 37626 - RNA, 19 nt, Artificial Sequence
  Synthetic
auaccucuacugaggucua

SEQ ID NO: 37627 - RNA, 20 nt, Artificial Sequence
  Synthetic
cauaccucuacugaggucua

SEQ ID NO: 37628 - RNA, 21 nt, Artificial Sequence
  Synthetic
acauaccucuacugaggucua

SEQ ID NO: 37629 - RNA, 22 nt, Artificial Sequence
  Synthetic
cacauaccucuacugaggucua

SEQ ID NO: 37630 - RNA, 23 nt, Artificial Sequence
  Synthetic
ucacauaccucuacugaggucua

SEQ ID NO: 37631 - RNA, 24 nt, Artificial Sequence
  Synthetic
uucacauaccucuacugaggucua

SEQ ID NO: 37632 - RNA, 18 nt, Artificial Sequence
  Synthetic
ucccuucacugcugucua

SEQ ID NO: 37633 - RNA, 19 nt, Artificial Sequence
  Synthetic
cucccuucacugcugucua

SEQ ID NO: 37634 - RNA, 21 nt, Artificial Sequence
  Synthetic
ugcucccuucacugcugucua

SEQ ID NO: 37635 - RNA, 22 nt, Artificial Sequence
  Synthetic
augcucccuucacugcugucua

SEQ ID NO: 37636 - RNA, 23 nt, Artificial Sequence
  Synthetic
uaugcucccuucacugcugucua

SEQ ID NO: 37637 - RNA, 24 nt, Artificial Sequence
  Synthetic
cuaugcucccuucacugcugucua

SEQ ID NO: 37638 - RNA, 18 nt, Artificial Sequence
  Synthetic
aauggcuaagauugucua

SEQ ID NO: 37639 - RNA, 19 nt, Artificial Sequence
  Synthetic
aaauggcuaagauugucua

SEQ ID NO: 37640 - RNA, 21 nt, Artificial Sequence
  Synthetic
agaaauggcuaagauugucua

SEQ ID NO: 37641 - RNA, 22 nt, Artificial Sequence
  Synthetic
uagaaauggcuaagauugucua

SEQ ID NO: 37642 - RNA, 23 nt, Artificial Sequence
  Synthetic
auagaaauggcuaagauugucua

SEQ ID NO: 37643 - RNA, 18 nt, Artificial Sequence
  Synthetic
uauuuugauuguugucua

SEQ ID NO: 37644 - RNA, 19 nt, Artificial Sequence
  Synthetic
cuauuuugauuguugucua

SEQ ID NO: 37645 - RNA, 20 nt, Artificial Sequence
  Synthetic
ucuauuuugauuguugucua

SEQ ID NO: 37646 - RNA, 21 nt, Artificial Sequence
  Synthetic
uucuauuuugauuguugucua

SEQ ID NO: 37647 - RNA, 22 nt, Artificial Sequence
  Synthetic
uuucuauuuugauuguugucua

SEQ ID NO: 37648 - RNA, 23 nt, Artificial Sequence
  Synthetic
cuuucuauuuugauuguugucua

SEQ ID NO: 37649 - RNA, 24 nt, Artificial Sequence
  Synthetic
ucuuucuauuuugauuguugucua

SEQ ID NO: 37650 - RNA, 18 nt, Artificial Sequence
  Synthetic
uucauuugaagaauucua

SEQ ID NO: 37651 - RNA, 22 nt, Artificial Sequence
  Synthetic
aggguucauuugaagaauucua

SEQ ID NO: 37652 - RNA, 18 nt, Artificial Sequence
  Synthetic
cuccauucuuccauucua

SEQ ID NO: 37653 - RNA, 19 nt, Artificial Sequence
  Synthetic
ccuccauucuuccauucua

SEQ ID NO: 37654 - RNA, 21 nt, Artificial Sequence
  Synthetic
agccuccauucuuccauucua

SEQ ID NO: 37655 - RNA, 22 nt, Artificial Sequence
  Synthetic
uagccuccauucuuccauucua

SEQ ID NO: 37656 - RNA, 23 nt, Artificial Sequence
  Synthetic
cuagccuccauucuuccauucua

SEQ ID NO: 37657 - RNA, 24 nt, Artificial Sequence
  Synthetic
ucuagccuccauucuuccauucua

SEQ ID NO: 37658 - RNA, 21 nt, Artificial Sequence
  Synthetic
uugcagaguuuuuguauucua

SEQ ID NO: 37659 - RNA, 22 nt, Artificial Sequence
  Synthetic
uuugcagaguuuuuguauucua

SEQ ID NO: 37660 - RNA, 23 nt, Artificial Sequence
  Synthetic
auuugcagaguuuuuguauucua

SEQ ID NO: 37661 - RNA, 24 nt, Artificial Sequence
  Synthetic
uauuugcagaguuuuuguauucua

SEQ ID NO: 37662 - RNA, 18 nt, Artificial Sequence
  Synthetic
ugucacaggaaacuucua

SEQ ID NO: 37663 - RNA, 19 nt, Artificial Sequence
  Synthetic
uugucacaggaaacuucua

SEQ ID NO: 37664 - RNA, 20 nt, Artificial Sequence
  Synthetic
auugucacaggaaacuucua

SEQ ID NO: 37665 - RNA, 21 nt, Artificial Sequence
  Synthetic
cauugucacaggaaacuucua

SEQ ID NO: 37666 - RNA, 23 nt, Artificial Sequence
  Synthetic
ugcauugucacaggaaacuucua

SEQ ID NO: 37667 - RNA, 24 nt, Artificial Sequence
  Synthetic
uugcauugucacaggaaacuucua

SEQ ID NO: 37668 - RNA, 19 nt, Artificial Sequence
  Synthetic
agugaauaucugccuucua

SEQ ID NO: 37669 - RNA, 21 nt, Artificial Sequence
  Synthetic
ugagugaauaucugccuucua

SEQ ID NO: 37670 - RNA, 22 nt, Artificial Sequence
  Synthetic
augagugaauaucugccuucua

SEQ ID NO: 37671 - RNA, 23 nt, Artificial Sequence
  Synthetic
aaugagugaauaucugccuucua

SEQ ID NO: 37672 - RNA, 24 nt, Artificial Sequence
  Synthetic
uaaugagugaauaucugccuucua

SEQ ID NO: 37673 - RNA, 19 nt, Artificial Sequence
  Synthetic
aggcagagagcuccuucua

SEQ ID NO: 37674 - RNA, 20 nt, Artificial Sequence
  Synthetic
aaggcagagagcuccuucua

SEQ ID NO: 37675 - RNA, 22 nt, Artificial Sequence
  Synthetic
ugaaggcagagagcuccuucua

SEQ ID NO: 37676 - RNA, 19 nt, Artificial Sequence
  Synthetic
aggaaaagggauaguucua

SEQ ID NO: 37677 - RNA, 21 nt, Artificial Sequence
  Synthetic
ugaggaaaagggauaguucua

SEQ ID NO: 37678 - RNA, 22 nt, Artificial Sequence
  Synthetic
cugaggaaaagggauaguucua

SEQ ID NO: 37679 - RNA, 23 nt, Artificial Sequence
  Synthetic
acugaggaaaagggauaguucua

SEQ ID NO: 37680 - RNA, 24 nt, Artificial Sequence
  Synthetic
aacugaggaaaagggauaguucua

SEQ ID NO: 37681 - RNA, 21 nt, Artificial Sequence
  Synthetic
caauccuauucuuuuguucua

SEQ ID NO: 37682 - RNA, 22 nt, Artificial Sequence
  Synthetic
ucaauccuauucuuuuguucua

SEQ ID NO: 37683 - RNA, 23 nt, Artificial Sequence
  Synthetic
cucaauccuauucuuuuguucua

SEQ ID NO: 37684 - RNA, 24 nt, Artificial Sequence
  Synthetic
acucaauccuauucuuuuguucua

SEQ ID NO: 37685 - RNA, 18 nt, Artificial Sequence
  Synthetic
uuucauauaugguuucua

SEQ ID NO: 37686 - RNA, 19 nt, Artificial Sequence
  Synthetic
uuuucauauaugguuucua

SEQ ID NO: 37687 - RNA, 20 nt, Artificial Sequence
  Synthetic
cuuuucauauaugguuucua

SEQ ID NO: 37688 - RNA, 21 nt, Artificial Sequence
  Synthetic
acuuuucauauaugguuucua

SEQ ID NO: 37689 - RNA, 22 nt, Artificial Sequence
  Synthetic
aacuuuucauauaugguuucua

SEQ ID NO: 37690 - RNA, 23 nt, Artificial Sequence
  Synthetic
aaacuuuucauauaugguuucua

SEQ ID NO: 37691 - RNA, 24 nt, Artificial Sequence
  Synthetic
uaaacuuuucauauaugguuucua

SEQ ID NO: 37692 - RNA, 18 nt, Artificial Sequence
  Synthetic
agucauuuuaauuuucua

SEQ ID NO: 37693 - RNA, 20 nt, Artificial Sequence
  Synthetic
agagucauuuuaauuuucua

SEQ ID NO: 37694 - RNA, 21 nt, Artificial Sequence
  Synthetic
uagagucauuuuaauuuucua

SEQ ID NO: 37695 - RNA, 23 nt, Artificial Sequence
  Synthetic
aguagagucauuuuaauuuucua

SEQ ID NO: 37696 - RNA, 24 nt, Artificial Sequence
  Synthetic
uaguagagucauuuuaauuuucua

SEQ ID NO: 37697 - RNA, 18 nt, Artificial Sequence
  Synthetic
ucuuaauugcauuuucua

SEQ ID NO: 37698 - RNA, 19 nt, Artificial Sequence
  Synthetic
cucuuaauugcauuuucua

SEQ ID NO: 37699 - RNA, 20 nt, Artificial Sequence
  Synthetic
ccucuuaauugcauuuucua

SEQ ID NO: 37700 - RNA, 21 nt, Artificial Sequence
  Synthetic
cccucuuaauugcauuuucua

SEQ ID NO: 37701 - RNA, 22 nt, Artificial Sequence
  Synthetic
acccucuuaauugcauuuucua

SEQ ID NO: 37702 - RNA, 23 nt, Artificial Sequence
  Synthetic
uacccucuuaauugcauuuucua

SEQ ID NO: 37703 - RNA, 24 nt, Artificial Sequence
  Synthetic
auacccucuuaauugcauuuucua

SEQ ID NO: 37704 - RNA, 21 nt, Artificial Sequence
  Synthetic
cccgcucauuucuguuuucua

SEQ ID NO: 37705 - RNA, 22 nt, Artificial Sequence
  Synthetic
ccccgcucauuucuguuuucua

SEQ ID NO: 37706 - RNA, 22 nt, Artificial Sequence
  Synthetic
ugaauaucaaucacuuuuucua

SEQ ID NO: 37707 - RNA, 23 nt, Artificial Sequence
  Synthetic
uugaauaucaaucacuuuuucua

SEQ ID NO: 37708 - RNA, 18 nt, Artificial Sequence
  Synthetic
aguucagacaaaaaagua

SEQ ID NO: 37709 - RNA, 19 nt, Artificial Sequence
  Synthetic
uaguucagacaaaaaagua

SEQ ID NO: 37710 - RNA, 20 nt, Artificial Sequence
  Synthetic
cuaguucagacaaaaaagua

SEQ ID NO: 37711 - RNA, 21 nt, Artificial Sequence
  Synthetic
ucuaguucagacaaaaaagua

SEQ ID NO: 37712 - RNA, 23 nt, Artificial Sequence
  Synthetic
ugucuaguucagacaaaaaagua

SEQ ID NO: 37713 - RNA, 24 nt, Artificial Sequence
  Synthetic
uugucuaguucagacaaaaaagua

SEQ ID NO: 37714 - RNA, 21 nt, Artificial Sequence
  Synthetic
ucacccuaggaaauaaaagua

SEQ ID NO: 37715 - RNA, 22 nt, Artificial Sequence
  Synthetic
uucacccuaggaaauaaaagua

SEQ ID NO: 37716 - RNA, 23 nt, Artificial Sequence
  Synthetic
uuucacccuaggaaauaaaagua

SEQ ID NO: 37717 - RNA, 24 nt, Artificial Sequence
  Synthetic
uuuucacccuaggaaauaaaagua

SEQ ID NO: 37718 - RNA, 18 nt, Artificial Sequence
  Synthetic
aacaguucaguaaaagua

SEQ ID NO: 37719 - RNA, 19 nt, Artificial Sequence
  Synthetic
aaacaguucaguaaaagua

SEQ ID NO: 37720 - RNA, 20 nt, Artificial Sequence
  Synthetic
aaaacaguucaguaaaagua

SEQ ID NO: 37721 - RNA, 21 nt, Artificial Sequence
  Synthetic
aaaaacaguucaguaaaagua

SEQ ID NO: 37722 - RNA, 22 nt, Artificial Sequence
  Synthetic
caaaaacaguucaguaaaagua

SEQ ID NO: 37723 - RNA, 23 nt, Artificial Sequence
  Synthetic
ucaaaaacaguucaguaaaagua

SEQ ID NO: 37724 - RNA, 24 nt, Artificial Sequence
  Synthetic
uucaaaaacaguucaguaaaagua

SEQ ID NO: 37725 - RNA, 18 nt, Artificial Sequence
  Synthetic
ucagcaggagucaaagua

SEQ ID NO: 37726 - RNA, 19 nt, Artificial Sequence
  Synthetic
aucagcaggagucaaagua

SEQ ID NO: 37727 - RNA, 20 nt, Artificial Sequence
  Synthetic
aaucagcaggagucaaagua

SEQ ID NO: 37728 - RNA, 21 nt, Artificial Sequence
  Synthetic
aaaucagcaggagucaaagua

SEQ ID NO: 37729 - RNA, 22 nt, Artificial Sequence
  Synthetic
aaaaucagcaggagucaaagua

SEQ ID NO: 37730 - RNA, 24 nt, Artificial Sequence
  Synthetic
agaaaaucagcaggagucaaagua

SEQ ID NO: 37731 - RNA, 18 nt, Artificial Sequence
  Synthetic
uaaacacuccagaaagua

SEQ ID NO: 37732 - RNA, 20 nt, Artificial Sequence
  Synthetic
aguaaacacuccagaaagua

SEQ ID NO: 37733 - RNA, 21 nt, Artificial Sequence
  Synthetic
aaguaaacacuccagaaagua

SEQ ID NO: 37734 - RNA, 22 nt, Artificial Sequence
  Synthetic
uaaguaaacacuccagaaagua

SEQ ID NO: 37735 - RNA, 24 nt, Artificial Sequence
  Synthetic
aguaaguaaacacuccagaaagua

SEQ ID NO: 37736 - RNA, 18 nt, Artificial Sequence
  Synthetic
cacagaggcaggaaagua

SEQ ID NO: 37737 - RNA, 19 nt, Artificial Sequence
  Synthetic
ucacagaggcaggaaagua

SEQ ID NO: 37738 - RNA, 21 nt, Artificial Sequence
  Synthetic
agucacagaggcaggaaagua

SEQ ID NO: 37739 - RNA, 23 nt, Artificial Sequence
  Synthetic
agagucacagaggcaggaaagua

SEQ ID NO: 37740 - RNA, 24 nt, Artificial Sequence
  Synthetic
cagagucacagaggcaggaaagua

SEQ ID NO: 37741 - RNA, 18 nt, Artificial Sequence
  Synthetic
ugcaguuggaugaaagua

SEQ ID NO: 37742 - RNA, 20 nt, Artificial Sequence
  Synthetic
agugcaguuggaugaaagua

SEQ ID NO: 37743 - RNA, 22 nt, Artificial Sequence
  Synthetic
agagugcaguuggaugaaagua

SEQ ID NO: 37744 - RNA, 23 nt, Artificial Sequence
  Synthetic
aagagugcaguuggaugaaagua

SEQ ID NO: 37745 - RNA, 24 nt, Artificial Sequence
  Synthetic
aaagagugcaguuggaugaaagua

SEQ ID NO: 37746 - RNA, 18 nt, Artificial Sequence
  Synthetic
ucuccuuaacgagaagua

SEQ ID NO: 37747 - RNA, 19 nt, Artificial Sequence
  Synthetic
uucuccuuaacgagaagua

SEQ ID NO: 37748 - RNA, 20 nt, Artificial Sequence
  Synthetic
cuucuccuuaacgagaagua

SEQ ID NO: 37749 - RNA, 21 nt, Artificial Sequence
  Synthetic
ucuucuccuuaacgagaagua

SEQ ID NO: 37750 - RNA, 22 nt, Artificial Sequence
  Synthetic
cucuucuccuuaacgagaagua

SEQ ID NO: 37751 - RNA, 23 nt, Artificial Sequence
  Synthetic
ucucuucuccuuaacgagaagua

SEQ ID NO: 37752 - RNA, 24 nt, Artificial Sequence
  Synthetic
cucucuucuccuuaacgagaagua

SEQ ID NO: 37753 - RNA, 18 nt, Artificial Sequence
  Synthetic
ugguagaauuaggaagua

SEQ ID NO: 37754 - RNA, 19 nt, Artificial Sequence
  Synthetic
uugguagaauuaggaagua

SEQ ID NO: 37755 - RNA, 20 nt, Artificial Sequence
  Synthetic
cuugguagaauuaggaagua

SEQ ID NO: 37756 - RNA, 22 nt, Artificial Sequence
  Synthetic
agcuugguagaauuaggaagua

SEQ ID NO: 37757 - RNA, 24 nt, Artificial Sequence
  Synthetic
ugagcuugguagaauuaggaagua

SEQ ID NO: 37758 - RNA, 18 nt, Artificial Sequence
  Synthetic
ucuucaaauucugaagua

SEQ ID NO: 37759 - RNA, 19 nt, Artificial Sequence
  Synthetic
uucuucaaauucugaagua

SEQ ID NO: 37760 - RNA, 20 nt, Artificial Sequence
  Synthetic
uuucuucaaauucugaagua

SEQ ID NO: 37761 - RNA, 21 nt, Artificial Sequence
  Synthetic
uuuucuucaaauucugaagua

SEQ ID NO: 37762 - RNA, 22 nt, Artificial Sequence
  Synthetic
uuuuucuucaaauucugaagua

SEQ ID NO: 37763 - RNA, 23 nt, Artificial Sequence
  Synthetic
cuuuuucuucaaauucugaagua

SEQ ID NO: 37764 - RNA, 18 nt, Artificial Sequence
  Synthetic
augaaguuaaucuaagua

SEQ ID NO: 37765 - RNA, 20 nt, Artificial Sequence
  Synthetic
agaugaaguuaaucuaagua

SEQ ID NO: 37766 - RNA, 21 nt, Artificial Sequence
  Synthetic
cagaugaaguuaaucuaagua

SEQ ID NO: 37767 - RNA, 23 nt, Artificial Sequence
  Synthetic
agcagaugaaguuaaucuaagua

SEQ ID NO: 37768 - RNA, 24 nt, Artificial Sequence
  Synthetic
aagcagaugaaguuaaucuaagua

SEQ ID NO: 37769 - RNA, 18 nt, Artificial Sequence
  Synthetic
cuucucagcuguuaagua

SEQ ID NO: 37770 - RNA, 19 nt, Artificial Sequence
  Synthetic
ucuucucagcuguuaagua

SEQ ID NO: 37771 - RNA, 20 nt, Artificial Sequence
  Synthetic
uucuucucagcuguuaagua

SEQ ID NO: 37772 - RNA, 21 nt, Artificial Sequence
  Synthetic
auucuucucagcuguuaagua

SEQ ID NO: 37773 - RNA, 22 nt, Artificial Sequence
  Synthetic
uauucuucucagcuguuaagua

SEQ ID NO: 37774 - RNA, 23 nt, Artificial Sequence
  Synthetic
auauucuucucagcuguuaagua

SEQ ID NO: 37775 - RNA, 24 nt, Artificial Sequence
  Synthetic
cauauucuucucagcuguuaagua

SEQ ID NO: 37776 - RNA, 18 nt, Artificial Sequence
  Synthetic
cucuguauucagacagua

SEQ ID NO: 37777 - RNA, 19 nt, Artificial Sequence
  Synthetic
ucucuguauucagacagua

SEQ ID NO: 37778 - RNA, 21 nt, Artificial Sequence
  Synthetic
cgucucuguauucagacagua

SEQ ID NO: 37779 - RNA, 22 nt, Artificial Sequence
  Synthetic
ucgucucuguauucagacagua

SEQ ID NO: 37780 - RNA, 23 nt, Artificial Sequence
  Synthetic
aucgucucuguauucagacagua

SEQ ID NO: 37781 - RNA, 24 nt, Artificial Sequence
  Synthetic
aaucgucucuguauucagacagua

SEQ ID NO: 37782 - RNA, 18 nt, Artificial Sequence
  Synthetic
acucuaacagugacagua

SEQ ID NO: 37783 - RNA, 19 nt, Artificial Sequence
  Synthetic
cacucuaacagugacagua

SEQ ID NO: 37784 - RNA, 20 nt, Artificial Sequence
  Synthetic
acacucuaacagugacagua

SEQ ID NO: 37785 - RNA, 21 nt, Artificial Sequence
  Synthetic
cacacucuaacagugacagua

SEQ ID NO: 37786 - RNA, 22 nt, Artificial Sequence
  Synthetic
ucacacucuaacagugacagua

SEQ ID NO: 37787 - RNA, 24 nt, Artificial Sequence
  Synthetic
agucacacucuaacagugacagua

SEQ ID NO: 37788 - RNA, 19 nt, Artificial Sequence
  Synthetic
ugaggcaaggcagccagua

SEQ ID NO: 37789 - RNA, 22 nt, Artificial Sequence
  Synthetic
aggugaggcaaggcagccagua

SEQ ID NO: 37790 - RNA, 23 nt, Artificial Sequence
  Synthetic
caggugaggcaaggcagccagua

SEQ ID NO: 37791 - RNA, 24 nt, Artificial Sequence
  Synthetic
acaggugaggcaaggcagccagua

SEQ ID NO: 37792 - RNA, 21 nt, Artificial Sequence
  Synthetic
ugagucagaaaagagccagua

SEQ ID NO: 37793 - RNA, 22 nt, Artificial Sequence
  Synthetic
uugagucagaaaagagccagua

SEQ ID NO: 37794 - RNA, 23 nt, Artificial Sequence
  Synthetic
uuugagucagaaaagagccagua

SEQ ID NO: 37795 - RNA, 24 nt, Artificial Sequence
  Synthetic
auuugagucagaaaagagccagua

SEQ ID NO: 37796 - RNA, 21 nt, Artificial Sequence
  Synthetic
agucuuuccaugaaggcagua

SEQ ID NO: 37797 - RNA, 22 nt, Artificial Sequence
  Synthetic
aagucuuuccaugaaggcagua

SEQ ID NO: 37798 - RNA, 19 nt, Artificial Sequence
  Synthetic
aguggaguaauaggcagua

SEQ ID NO: 37799 - RNA, 20 nt, Artificial Sequence
  Synthetic
aaguggaguaauaggcagua

SEQ ID NO: 37800 - RNA, 22 nt, Artificial Sequence
  Synthetic
agaaguggaguaauaggcagua

SEQ ID NO: 37801 - RNA, 23 nt, Artificial Sequence
  Synthetic
aagaaguggaguaauaggcagua

SEQ ID NO: 37802 - RNA, 24 nt, Artificial Sequence
  Synthetic
uaagaaguggaguaauaggcagua

SEQ ID NO: 37803 - RNA, 18 nt, Artificial Sequence
  Synthetic
cugugcucccuggcagua

SEQ ID NO: 37804 - RNA, 20 nt, Artificial Sequence
  Synthetic
ugcugugcucccuggcagua

SEQ ID NO: 37805 - RNA, 21 nt, Artificial Sequence
  Synthetic
augcugugcucccuggcagua

SEQ ID NO: 37806 - RNA, 22 nt, Artificial Sequence
  Synthetic
uaugcugugcucccuggcagua

SEQ ID NO: 37807 - RNA, 23 nt, Artificial Sequence
  Synthetic
auaugcugugcucccuggcagua

SEQ ID NO: 37808 - RNA, 24 nt, Artificial Sequence
  Synthetic
aauaugcugugcucccuggcagua

SEQ ID NO: 37809 - RNA, 18 nt, Artificial Sequence
  Synthetic
uauaaagacaaaucagua

SEQ ID NO: 37810 - RNA, 19 nt, Artificial Sequence
  Synthetic
auauaaagacaaaucagua

SEQ ID NO: 37811 - RNA, 20 nt, Artificial Sequence
  Synthetic
uauauaaagacaaaucagua

SEQ ID NO: 37812 - RNA, 21 nt, Artificial Sequence
  Synthetic
auauauaaagacaaaucagua

SEQ ID NO: 37813 - RNA, 22 nt, Artificial Sequence
  Synthetic
aauauauaaagacaaaucagua

SEQ ID NO: 37814 - RNA, 23 nt, Artificial Sequence
  Synthetic
aaauauauaaagacaaaucagua

SEQ ID NO: 37815 - RNA, 24 nt, Artificial Sequence
  Synthetic
caaauauauaaagacaaaucagua

SEQ ID NO: 37816 - RNA, 18 nt, Artificial Sequence
  Synthetic
ucucuaggaggaucagua

SEQ ID NO: 37817 - RNA, 19 nt, Artificial Sequence
  Synthetic
aucucuaggaggaucagua

SEQ ID NO: 37818 - RNA, 20 nt, Artificial Sequence
  Synthetic
aaucucuaggaggaucagua

SEQ ID NO: 37819 - RNA, 22 nt, Artificial Sequence
  Synthetic
ugaaucucuaggaggaucagua

SEQ ID NO: 37820 - RNA, 23 nt, Artificial Sequence
  Synthetic
uugaaucucuaggaggaucagua

SEQ ID NO: 37821 - RNA, 24 nt, Artificial Sequence
  Synthetic
uuugaaucucuaggaggaucagua

SEQ ID NO: 37822 - RNA, 19 nt, Artificial Sequence
  Synthetic
agagaccugcaacucagua

SEQ ID NO: 37823 - RNA, 20 nt, Artificial Sequence
  Synthetic
cagagaccugcaacucagua

SEQ ID NO: 37824 - RNA, 22 nt, Artificial Sequence
  Synthetic
agcagagaccugcaacucagua

SEQ ID NO: 37825 - RNA, 23 nt, Artificial Sequence
  Synthetic
aagcagagaccugcaacucagua

SEQ ID NO: 37826 - RNA, 18 nt, Artificial Sequence
  Synthetic
uacaaguaaaucucagua

SEQ ID NO: 37827 - RNA, 19 nt, Artificial Sequence
  Synthetic
uuacaaguaaaucucagua

SEQ ID NO: 37828 - RNA, 20 nt, Artificial Sequence
  Synthetic
auuacaaguaaaucucagua

SEQ ID NO: 37829 - RNA, 21 nt, Artificial Sequence
  Synthetic
aauuacaaguaaaucucagua

SEQ ID NO: 37830 - RNA, 22 nt, Artificial Sequence
  Synthetic
aaauuacaaguaaaucucagua

SEQ ID NO: 37831 - RNA, 23 nt, Artificial Sequence
  Synthetic
aaaauuacaaguaaaucucagua

SEQ ID NO: 37832 - RNA, 24 nt, Artificial Sequence
  Synthetic
caaaauuacaaguaaaucucagua

SEQ ID NO: 37833 - RNA, 18 nt, Artificial Sequence
  Synthetic
cuaauagagacgucagua

SEQ ID NO: 37834 - RNA, 20 nt, Artificial Sequence
  Synthetic
agcuaauagagacgucagua

SEQ ID NO: 37835 - RNA, 21 nt, Artificial Sequence
  Synthetic
aagcuaauagagacgucagua

SEQ ID NO: 37836 - RNA, 22 nt, Artificial Sequence
  Synthetic
uaagcuaauagagacgucagua

SEQ ID NO: 37837 - RNA, 23 nt, Artificial Sequence
  Synthetic
cuaagcuaauagagacgucagua

SEQ ID NO: 37838 - RNA, 24 nt, Artificial Sequence
  Synthetic
acuaagcuaauagagacgucagua

SEQ ID NO: 37839 - RNA, 18 nt, Artificial Sequence
  Synthetic
uuagauacuaugucagua

SEQ ID NO: 37840 - RNA, 19 nt, Artificial Sequence
  Synthetic
auuagauacuaugucagua

SEQ ID NO: 37841 - RNA, 20 nt, Artificial Sequence
  Synthetic
uauuagauacuaugucagua

SEQ ID NO: 37842 - RNA, 21 nt, Artificial Sequence
  Synthetic
uuauuagauacuaugucagua

SEQ ID NO: 37843 - RNA, 23 nt, Artificial Sequence
  Synthetic
aguuauuagauacuaugucagua

SEQ ID NO: 37844 - RNA, 24 nt, Artificial Sequence
  Synthetic
caguuauuagauacuaugucagua

SEQ ID NO: 37845 - RNA, 18 nt, Artificial Sequence
  Synthetic
auccauuuuguuucagua

SEQ ID NO: 37846 - RNA, 19 nt, Artificial Sequence
  Synthetic
aauccauuuuguuucagua

SEQ ID NO: 37847 - RNA, 20 nt, Artificial Sequence
  Synthetic
aaauccauuuuguuucagua

SEQ ID NO: 37848 - RNA, 21 nt, Artificial Sequence
  Synthetic
aaaauccauuuuguuucagua

SEQ ID NO: 37849 - RNA, 22 nt, Artificial Sequence
  Synthetic
aaaaauccauuuuguuucagua

SEQ ID NO: 37850 - RNA, 23 nt, Artificial Sequence
  Synthetic
uaaaaauccauuuuguuucagua

SEQ ID NO: 37851 - RNA, 21 nt, Artificial Sequence
  Synthetic
uuuuuaacaaaugaaagagua

SEQ ID NO: 37852 - RNA, 22 nt, Artificial Sequence
  Synthetic
uuuuuuaacaaaugaaagagua

SEQ ID NO: 37853 - RNA, 23 nt, Artificial Sequence
  Synthetic
cuuuuuuaacaaaugaaagagua

SEQ ID NO: 37854 - RNA, 24 nt, Artificial Sequence
  Synthetic
ucuuuuuuaacaaaugaaagagua

SEQ ID NO: 37855 - RNA, 18 nt, Artificial Sequence
  Synthetic
aaaucaacucuaagagua

SEQ ID NO: 37856 - RNA, 20 nt, Artificial Sequence
  Synthetic
ugaaaucaacucuaagagua

SEQ ID NO: 37857 - RNA, 21 nt, Artificial Sequence
  Synthetic
cugaaaucaacucuaagagua

SEQ ID NO: 37858 - RNA, 22 nt, Artificial Sequence
  Synthetic
acugaaaucaacucuaagagua

SEQ ID NO: 37859 - RNA, 23 nt, Artificial Sequence
  Synthetic
aacugaaaucaacucuaagagua

SEQ ID NO: 37860 - RNA, 24 nt, Artificial Sequence
  Synthetic
aaacugaaaucaacucuaagagua

SEQ ID NO: 37861 - RNA, 18 nt, Artificial Sequence
  Synthetic
aaaguaugccccagagua

SEQ ID NO: 37862 - RNA, 19 nt, Artificial Sequence
  Synthetic
uaaaguaugccccagagua

SEQ ID NO: 37863 - RNA, 20 nt, Artificial Sequence
  Synthetic
uuaaaguaugccccagagua

SEQ ID NO: 37864 - RNA, 22 nt, Artificial Sequence
  Synthetic
uguuaaaguaugccccagagua

SEQ ID NO: 37865 - RNA, 24 nt, Artificial Sequence
  Synthetic
aguguuaaaguaugccccagagua

SEQ ID NO: 37866 - RNA, 18 nt, Artificial Sequence
  Synthetic
auuaaccacaagagagua

SEQ ID NO: 37867 - RNA, 19 nt, Artificial Sequence
  Synthetic
uauuaaccacaagagagua

SEQ ID NO: 37868 - RNA, 20 nt, Artificial Sequence
  Synthetic
uuauuaaccacaagagagua

SEQ ID NO: 37869 - RNA, 21 nt, Artificial Sequence
  Synthetic
auuauuaaccacaagagagua

SEQ ID NO: 37870 - RNA, 22 nt, Artificial Sequence
  Synthetic
uauuauuaaccacaagagagua

SEQ ID NO: 37871 - RNA, 24 nt, Artificial Sequence
  Synthetic
uguauuauuaaccacaagagagua

SEQ ID NO: 37872 - RNA, 18 nt, Artificial Sequence
  Synthetic
augauaagcaguagagua

SEQ ID NO: 37873 - RNA, 19 nt, Artificial Sequence
  Synthetic
uaugauaagcaguagagua

SEQ ID NO: 37874 - RNA, 20 nt, Artificial Sequence
  Synthetic
uuaugauaagcaguagagua

SEQ ID NO: 37875 - RNA, 23 nt, Artificial Sequence
  Synthetic
ugguuaugauaagcaguagagua

SEQ ID NO: 37876 - RNA, 18 nt, Artificial Sequence
  Synthetic
auuaaaauauaucgagua

SEQ ID NO: 37877 - RNA, 19 nt, Artificial Sequence
  Synthetic
aauuaaaauauaucgagua

SEQ ID NO: 37878 - RNA, 20 nt, Artificial Sequence
  Synthetic
caauuaaaauauaucgagua

SEQ ID NO: 37879 - RNA, 21 nt, Artificial Sequence
  Synthetic
ucaauuaaaauauaucgagua

SEQ ID NO: 37880 - RNA, 22 nt, Artificial Sequence
  Synthetic
aucaauuaaaauauaucgagua

SEQ ID NO: 37881 - RNA, 24 nt, Artificial Sequence
  Synthetic
agaucaauuaaaauauaucgagua

SEQ ID NO: 37882 - RNA, 21 nt, Artificial Sequence
  Synthetic
uaccuugcagagucaggagua

SEQ ID NO: 37883 - RNA, 22 nt, Artificial Sequence
  Synthetic
cuaccuugcagagucaggagua

SEQ ID NO: 37884 - RNA, 23 nt, Artificial Sequence
  Synthetic
ucuaccuugcagagucaggagua

SEQ ID NO: 37885 - RNA, 24 nt, Artificial Sequence
  Synthetic
aucuaccuugcagagucaggagua

SEQ ID NO: 37886 - RNA, 18 nt, Artificial Sequence
  Synthetic
uccuauagaggaggagua

SEQ ID NO: 37887 - RNA, 19 nt, Artificial Sequence
  Synthetic
uuccuauagaggaggagua

SEQ ID NO: 37888 - RNA, 20 nt, Artificial Sequence
  Synthetic
auuccuauagaggaggagua

SEQ ID NO: 37889 - RNA, 21 nt, Artificial Sequence
  Synthetic
uauuccuauagaggaggagua

SEQ ID NO: 37890 - RNA, 22 nt, Artificial Sequence
  Synthetic
uuauuccuauagaggaggagua

SEQ ID NO: 37891 - RNA, 24 nt, Artificial Sequence
  Synthetic
uguuauuccuauagaggaggagua

SEQ ID NO: 37892 - RNA, 18 nt, Artificial Sequence
  Synthetic
aacuauuaaagaugagua

SEQ ID NO: 37893 - RNA, 19 nt, Artificial Sequence
  Synthetic
uaacuauuaaagaugagua

SEQ ID NO: 37894 - RNA, 20 nt, Artificial Sequence
  Synthetic
cuaacuauuaaagaugagua

SEQ ID NO: 37895 - RNA, 22 nt, Artificial Sequence
  Synthetic
ugcuaacuauuaaagaugagua

SEQ ID NO: 37896 - RNA, 23 nt, Artificial Sequence
  Synthetic
augcuaacuauuaaagaugagua

SEQ ID NO: 37897 - RNA, 24 nt, Artificial Sequence
  Synthetic
uaugcuaacuauuaaagaugagua

SEQ ID NO: 37898 - RNA, 18 nt, Artificial Sequence
  Synthetic
acauaaugccacugagua

SEQ ID NO: 37899 - RNA, 20 nt, Artificial Sequence
  Synthetic
cgacauaaugccacugagua

SEQ ID NO: 37900 - RNA, 21 nt, Artificial Sequence
  Synthetic
ccgacauaaugccacugagua

SEQ ID NO: 37901 - RNA, 22 nt, Artificial Sequence
  Synthetic
accgacauaaugccacugagua

SEQ ID NO: 37902 - RNA, 23 nt, Artificial Sequence
  Synthetic
uaccgacauaaugccacugagua

SEQ ID NO: 37903 - RNA, 24 nt, Artificial Sequence
  Synthetic
cuaccgacauaaugccacugagua

SEQ ID NO: 37904 - RNA, 18 nt, Artificial Sequence
  Synthetic
uuaauaggaaagugagua

SEQ ID NO: 37905 - RNA, 19 nt, Artificial Sequence
  Synthetic
uuuaauaggaaagugagua

SEQ ID NO: 37906 - RNA, 21 nt, Artificial Sequence
  Synthetic
uguuuaauaggaaagugagua

SEQ ID NO: 37907 - RNA, 22 nt, Artificial Sequence
  Synthetic
auguuuaauaggaaagugagua

SEQ ID NO: 37908 - RNA, 24 nt, Artificial Sequence
  Synthetic
agauguuuaauaggaaagugagua

SEQ ID NO: 37909 - RNA, 18 nt, Artificial Sequence
  Synthetic
uuagcaaaccugugagua

SEQ ID NO: 37910 - RNA, 19 nt, Artificial Sequence
  Synthetic
uuuagcaaaccugugagua

SEQ ID NO: 37911 - RNA, 20 nt, Artificial Sequence
  Synthetic
uuuuagcaaaccugugagua

SEQ ID NO: 37912 - RNA, 21 nt, Artificial Sequence
  Synthetic
cuuuuagcaaaccugugagua

SEQ ID NO: 37913 - RNA, 22 nt, Artificial Sequence
  Synthetic
ucuuuuagcaaaccugugagua

SEQ ID NO: 37914 - RNA, 23 nt, Artificial Sequence
  Synthetic
aucuuuuagcaaaccugugagua

SEQ ID NO: 37915 - RNA, 19 nt, Artificial Sequence
  Synthetic
ugcagaccaaagcauagua

SEQ ID NO: 37916 - RNA, 20 nt, Artificial Sequence
  Synthetic
augcagaccaaagcauagua

SEQ ID NO: 37917 - RNA, 21 nt, Artificial Sequence
  Synthetic
aaugcagaccaaagcauagua

SEQ ID NO: 37918 - RNA, 24 nt, Artificial Sequence
  Synthetic
aggaaugcagaccaaagcauagua

SEQ ID NO: 37919 - RNA, 19 nt, Artificial Sequence
  Synthetic
uggucccucuuucauagua

SEQ ID NO: 37920 - RNA, 21 nt, Artificial Sequence
  Synthetic
cguggucccucuuucauagua

SEQ ID NO: 37921 - RNA, 22 nt, Artificial Sequence
  Synthetic
ucguggucccucuuucauagua

SEQ ID NO: 37922 - RNA, 23 nt, Artificial Sequence
  Synthetic
uucguggucccucuuucauagua

SEQ ID NO: 37923 - RNA, 24 nt, Artificial Sequence
  Synthetic
auucguggucccucuuucauagua

SEQ ID NO: 37924 - RNA, 18 nt, Artificial Sequence
  Synthetic
auucuggcauugauagua

SEQ ID NO: 37925 - RNA, 19 nt, Artificial Sequence
  Synthetic
aauucuggcauugauagua

SEQ ID NO: 37926 - RNA, 20 nt, Artificial Sequence
  Synthetic
uaauucuggcauugauagua

SEQ ID NO: 37927 - RNA, 21 nt, Artificial Sequence
  Synthetic
auaauucuggcauugauagua

SEQ ID NO: 37928 - RNA, 23 nt, Artificial Sequence
  Synthetic
ugauaauucuggcauugauagua

SEQ ID NO: 37929 - RNA, 24 nt, Artificial Sequence
  Synthetic
uugauaauucuggcauugauagua

SEQ ID NO: 37930 - RNA, 18 nt, Artificial Sequence
  Synthetic
cauguggacuauauagua

SEQ ID NO: 37931 - RNA, 19 nt, Artificial Sequence
  Synthetic
ucauguggacuauauagua

SEQ ID NO: 37932 - RNA, 20 nt, Artificial Sequence
  Synthetic
uucauguggacuauauagua

SEQ ID NO: 37933 - RNA, 21 nt, Artificial Sequence
  Synthetic
cuucauguggacuauauagua

SEQ ID NO: 37934 - RNA, 22 nt, Artificial Sequence
  Synthetic
ucuucauguggacuauauagua

SEQ ID NO: 37935 - RNA, 23 nt, Artificial Sequence
  Synthetic
cucuucauguggacuauauagua

SEQ ID NO: 37936 - RNA, 24 nt, Artificial Sequence
  Synthetic
ccucuucauguggacuauauagua

SEQ ID NO: 37937 - RNA, 18 nt, Artificial Sequence
  Synthetic
ugcuccauucaacuagua

SEQ ID NO: 37938 - RNA, 19 nt, Artificial Sequence
  Synthetic
cugcuccauucaacuagua

SEQ ID NO: 37939 - RNA, 20 nt, Artificial Sequence
  Synthetic
acugcuccauucaacuagua

SEQ ID NO: 37940 - RNA, 21 nt, Artificial Sequence
  Synthetic
cacugcuccauucaacuagua

SEQ ID NO: 37941 - RNA, 22 nt, Artificial Sequence
  Synthetic
ucacugcuccauucaacuagua

SEQ ID NO: 37942 - RNA, 23 nt, Artificial Sequence
  Synthetic
uucacugcuccauucaacuagua

SEQ ID NO: 37943 - RNA, 24 nt, Artificial Sequence
  Synthetic
uuucacugcuccauucaacuagua

SEQ ID NO: 37944 - RNA, 22 nt, Artificial Sequence
  Synthetic
uguguacuuuuaaauacuagua

SEQ ID NO: 37945 - RNA, 24 nt, Artificial Sequence
  Synthetic
uguguguacuuuuaaauacuagua

SEQ ID NO: 37946 - RNA, 18 nt, Artificial Sequence
  Synthetic
agacuuugcuaucuagua

SEQ ID NO: 37947 - RNA, 19 nt, Artificial Sequence
  Synthetic
uagacuuugcuaucuagua

SEQ ID NO: 37948 - RNA, 20 nt, Artificial Sequence
  Synthetic
auagacuuugcuaucuagua

SEQ ID NO: 37949 - RNA, 21 nt, Artificial Sequence
  Synthetic
cauagacuuugcuaucuagua

SEQ ID NO: 37950 - RNA, 22 nt, Artificial Sequence
  Synthetic
acauagacuuugcuaucuagua

SEQ ID NO: 37951 - RNA, 23 nt, Artificial Sequence
  Synthetic
aacauagacuuugcuaucuagua

SEQ ID NO: 37952 - RNA, 24 nt, Artificial Sequence
  Synthetic
aaacauagacuuugcuaucuagua

SEQ ID NO: 37953 - RNA, 18 nt, Artificial Sequence
  Synthetic
uguuuuuguaaaguagua

SEQ ID NO: 37954 - RNA, 19 nt, Artificial Sequence
  Synthetic
uuguuuuuguaaaguagua

SEQ ID NO: 37955 - RNA, 20 nt, Artificial Sequence
  Synthetic
cuuguuuuuguaaaguagua

SEQ ID NO: 37956 - RNA, 21 nt, Artificial Sequence
  Synthetic
acuuguuuuuguaaaguagua

SEQ ID NO: 37957 - RNA, 22 nt, Artificial Sequence
  Synthetic
cacuuguuuuuguaaaguagua

SEQ ID NO: 37958 - RNA, 23 nt, Artificial Sequence
  Synthetic
ccacuuguuuuuguaaaguagua

SEQ ID NO: 37959 - RNA, 24 nt, Artificial Sequence
  Synthetic
accacuuguuuuuguaaaguagua

SEQ ID NO: 37960 - RNA, 18 nt, Artificial Sequence
  Synthetic
aucacacaaccaguagua

SEQ ID NO: 37961 - RNA, 21 nt, Artificial Sequence
  Synthetic
aggaucacacaaccaguagua

SEQ ID NO: 37962 - RNA, 22 nt, Artificial Sequence
  Synthetic
aaggaucacacaaccaguagua

SEQ ID NO: 37963 - RNA, 23 nt, Artificial Sequence
  Synthetic
caaggaucacacaaccaguagua

SEQ ID NO: 37964 - RNA, 24 nt, Artificial Sequence
  Synthetic
ccaaggaucacacaaccaguagua

SEQ ID NO: 37965 - RNA, 18 nt, Artificial Sequence
  Synthetic
ugcuuccucauaguagua

SEQ ID NO: 37966 - RNA, 19 nt, Artificial Sequence
  Synthetic
augcuuccucauaguagua

SEQ ID NO: 37967 - RNA, 20 nt, Artificial Sequence
  Synthetic
uaugcuuccucauaguagua

SEQ ID NO: 37968 - RNA, 21 nt, Artificial Sequence
  Synthetic
auaugcuuccucauaguagua

SEQ ID NO: 37969 - RNA, 22 nt, Artificial Sequence
  Synthetic
aauaugcuuccucauaguagua

SEQ ID NO: 37970 - RNA, 23 nt, Artificial Sequence
  Synthetic
uaauaugcuuccucauaguagua

SEQ ID NO: 37971 - RNA, 24 nt, Artificial Sequence
  Synthetic
auaauaugcuuccucauaguagua

SEQ ID NO: 37972 - RNA, 18 nt, Artificial Sequence
  Synthetic
uacuacucaguaguagua

SEQ ID NO: 37973 - RNA, 20 nt, Artificial Sequence
  Synthetic
aguacuacucaguaguagua

SEQ ID NO: 37974 - RNA, 21 nt, Artificial Sequence
  Synthetic
uaguacuacucaguaguagua

SEQ ID NO: 37975 - RNA, 23 nt, Artificial Sequence
  Synthetic
aguaguacuacucaguaguagua

SEQ ID NO: 37976 - RNA, 24 nt, Artificial Sequence
  Synthetic
caguaguacuacucaguaguagua

SEQ ID NO: 37977 - RNA, 18 nt, Artificial Sequence
  Synthetic
auguuacuuacuguagua

SEQ ID NO: 37978 - RNA, 19 nt, Artificial Sequence
  Synthetic
aauguuacuuacuguagua

SEQ ID NO: 37979 - RNA, 20 nt, Artificial Sequence
  Synthetic
aaauguuacuuacuguagua

SEQ ID NO: 37980 - RNA, 21 nt, Artificial Sequence
  Synthetic
aaaauguuacuuacuguagua

SEQ ID NO: 37981 - RNA, 22 nt, Artificial Sequence
  Synthetic
caaaauguuacuuacuguagua

SEQ ID NO: 37982 - RNA, 23 nt, Artificial Sequence
  Synthetic
ccaaaauguuacuuacuguagua

SEQ ID NO: 37983 - RNA, 24 nt, Artificial Sequence
  Synthetic
accaaaauguuacuuacuguagua

SEQ ID NO: 37984 - RNA, 19 nt, Artificial Sequence
  Synthetic
agacuuugcugaauuagua

SEQ ID NO: 37985 - RNA, 20 nt, Artificial Sequence
  Synthetic
aagacuuugcugaauuagua

SEQ ID NO: 37986 - RNA, 21 nt, Artificial Sequence
  Synthetic
uaagacuuugcugaauuagua

SEQ ID NO: 37987 - RNA, 22 nt, Artificial Sequence
  Synthetic
auaagacuuugcugaauuagua

SEQ ID NO: 37988 - RNA, 23 nt, Artificial Sequence
  Synthetic
uauaagacuuugcugaauuagua

SEQ ID NO: 37989 - RNA, 24 nt, Artificial Sequence
  Synthetic
uuauaagacuuugcugaauuagua

SEQ ID NO: 37990 - RNA, 18 nt, Artificial Sequence
  Synthetic
ugaucguagacauuagua

SEQ ID NO: 37991 - RNA, 20 nt, Artificial Sequence
  Synthetic
ugugaucguagacauuagua

SEQ ID NO: 37992 - RNA, 21 nt, Artificial Sequence
  Synthetic
uugugaucguagacauuagua

SEQ ID NO: 37993 - RNA, 22 nt, Artificial Sequence
  Synthetic
auugugaucguagacauuagua

SEQ ID NO: 37994 - RNA, 24 nt, Artificial Sequence
  Synthetic
agauugugaucguagacauuagua

SEQ ID NO: 37995 - RNA, 18 nt, Artificial Sequence
  Synthetic
aauugacuuuuaaacgua

SEQ ID NO: 37996 - RNA, 19 nt, Artificial Sequence
  Synthetic
aaauugacuuuuaaacgua

SEQ ID NO: 37997 - RNA, 20 nt, Artificial Sequence
  Synthetic
caaauugacuuuuaaacgua

SEQ ID NO: 37998 - RNA, 21 nt, Artificial Sequence
  Synthetic
acaaauugacuuuuaaacgua

SEQ ID NO: 37999 - RNA, 22 nt, Artificial Sequence
  Synthetic
cacaaauugacuuuuaaacgua

SEQ ID NO: 38000 - RNA, 23 nt, Artificial Sequence
  Synthetic
ccacaaauugacuuuuaaacgua

SEQ ID NO: 38001 - RNA, 24 nt, Artificial Sequence
  Synthetic
uccacaaauugacuuuuaaacgua

SEQ ID NO: 38002 - RNA, 18 nt, Artificial Sequence
  Synthetic
cacuuucuuuggcacgua

SEQ ID NO: 38003 - RNA, 19 nt, Artificial Sequence
  Synthetic
acacuuucuuuggcacgua

SEQ ID NO: 38004 - RNA, 20 nt, Artificial Sequence
  Synthetic
aacacuuucuuuggcacgua

SEQ ID NO: 38005 - RNA, 21 nt, Artificial Sequence
  Synthetic
aaacacuuucuuuggcacgua

SEQ ID NO: 38006 - RNA, 22 nt, Artificial Sequence
  Synthetic
uaaacacuuucuuuggcacgua

SEQ ID NO: 38007 - RNA, 23 nt, Artificial Sequence
  Synthetic
auaaacacuuucuuuggcacgua

SEQ ID NO: 38008 - RNA, 19 nt, Artificial Sequence
  Synthetic
agugaucaguaaguacgua

SEQ ID NO: 38009 - RNA, 20 nt, Artificial Sequence
  Synthetic
aagugaucaguaaguacgua

SEQ ID NO: 38010 - RNA, 21 nt, Artificial Sequence
  Synthetic
uaagugaucaguaaguacgua

SEQ ID NO: 38011 - RNA, 22 nt, Artificial Sequence
  Synthetic
auaagugaucaguaaguacgua

SEQ ID NO: 38012 - RNA, 23 nt, Artificial Sequence
  Synthetic
aauaagugaucaguaaguacgua

SEQ ID NO: 38013 - RNA, 24 nt, Artificial Sequence
  Synthetic
uaauaagugaucaguaaguacgua

SEQ ID NO: 38014 - RNA, 18 nt, Artificial Sequence
  Synthetic
auaccuaaauauagcgua

SEQ ID NO: 38015 - RNA, 22 nt, Artificial Sequence
  Synthetic
agggauaccuaaauauagcgua

SEQ ID NO: 38016 - RNA, 23 nt, Artificial Sequence
  Synthetic
aagggauaccuaaauauagcgua

SEQ ID NO: 38017 - RNA, 24 nt, Artificial Sequence
  Synthetic
aaagggauaccuaaauauagcgua

SEQ ID NO: 38018 - RNA, 19 nt, Artificial Sequence
  Synthetic
uguucauuuucuaaaggua

SEQ ID NO: 38019 - RNA, 20 nt, Artificial Sequence
  Synthetic
cuguucauuuucuaaaggua

SEQ ID NO: 38020 - RNA, 21 nt, Artificial Sequence
  Synthetic
ucuguucauuuucuaaaggua

SEQ ID NO: 38021 - RNA, 22 nt, Artificial Sequence
  Synthetic
uucuguucauuuucuaaaggua

SEQ ID NO: 38022 - RNA, 23 nt, Artificial Sequence
  Synthetic
uuucuguucauuuucuaaaggua

SEQ ID NO: 38023 - RNA, 24 nt, Artificial Sequence
  Synthetic
auuucuguucauuuucuaaaggua

SEQ ID NO: 38024 - RNA, 18 nt, Artificial Sequence
  Synthetic
accuagcacuuaaaggua

SEQ ID NO: 38025 - RNA, 19 nt, Artificial Sequence
  Synthetic
caccuagcacuuaaaggua

SEQ ID NO: 38026 - RNA, 21 nt, Artificial Sequence
  Synthetic
agcaccuagcacuuaaaggua

SEQ ID NO: 38027 - RNA, 22 nt, Artificial Sequence
  Synthetic
cagcaccuagcacuuaaaggua

SEQ ID NO: 38028 - RNA, 23 nt, Artificial Sequence
  Synthetic
acagcaccuagcacuuaaaggua

SEQ ID NO: 38029 - RNA, 24 nt, Artificial Sequence
  Synthetic
aacagcaccuagcacuuaaaggua

SEQ ID NO: 38030 - RNA, 19 nt, Artificial Sequence
  Synthetic
agacuuuugagucaaggua

SEQ ID NO: 38031 - RNA, 20 nt, Artificial Sequence
  Synthetic
uagacuuuugagucaaggua

SEQ ID NO: 38032 - RNA, 22 nt, Artificial Sequence
  Synthetic
aguagacuuuugagucaaggua

SEQ ID NO: 38033 - RNA, 23 nt, Artificial Sequence
  Synthetic
caguagacuuuugagucaaggua

SEQ ID NO: 38034 - RNA, 24 nt, Artificial Sequence
  Synthetic
ccaguagacuuuugagucaaggua

SEQ ID NO: 38035 - RNA, 18 nt, Artificial Sequence
  Synthetic
auuucuggaaugcaggua

SEQ ID NO: 38036 - RNA, 19 nt, Artificial Sequence
  Synthetic
aauuucuggaaugcaggua

SEQ ID NO: 38037 - RNA, 20 nt, Artificial Sequence
  Synthetic
uaauuucuggaaugcaggua

SEQ ID NO: 38038 - RNA, 21 nt, Artificial Sequence
  Synthetic
uuaauuucuggaaugcaggua

SEQ ID NO: 38039 - RNA, 22 nt, Artificial Sequence
  Synthetic
uuuaauuucuggaaugcaggua

SEQ ID NO: 38040 - RNA, 18 nt, Artificial Sequence
  Synthetic
uggaagagaauucaggua

SEQ ID NO: 38041 - RNA, 20 nt, Artificial Sequence
  Synthetic
aguggaagagaauucaggua

SEQ ID NO: 38042 - RNA, 21 nt, Artificial Sequence
  Synthetic
aaguggaagagaauucaggua

SEQ ID NO: 38043 - RNA, 22 nt, Artificial Sequence
  Synthetic
aaaguggaagagaauucaggua

SEQ ID NO: 38044 - RNA, 23 nt, Artificial Sequence
  Synthetic
uaaaguggaagagaauucaggua

SEQ ID NO: 38045 - RNA, 18 nt, Artificial Sequence
  Synthetic
uuaaaugguagggaggua

SEQ ID NO: 38046 - RNA, 19 nt, Artificial Sequence
  Synthetic
cuuaaaugguagggaggua

SEQ ID NO: 38047 - RNA, 20 nt, Artificial Sequence
  Synthetic
ucuuaaaugguagggaggua

SEQ ID NO: 38048 - RNA, 21 nt, Artificial Sequence
  Synthetic
uucuuaaaugguagggaggua

SEQ ID NO: 38049 - RNA, 22 nt, Artificial Sequence
  Synthetic
cuucuuaaaugguagggaggua

SEQ ID NO: 38050 - RNA, 23 nt, Artificial Sequence
  Synthetic
acuucuuaaaugguagggaggua

SEQ ID NO: 38051 - RNA, 24 nt, Artificial Sequence
  Synthetic
uacuucuuaaaugguagggaggua

SEQ ID NO: 38052 - RNA, 18 nt, Artificial Sequence
  Synthetic
ccugguacacaauaggua

SEQ ID NO: 38053 - RNA, 19 nt, Artificial Sequence
  Synthetic
uccugguacacaauaggua

SEQ ID NO: 38054 - RNA, 20 nt, Artificial Sequence
  Synthetic
auccugguacacaauaggua

SEQ ID NO: 38055 - RNA, 22 nt, Artificial Sequence
  Synthetic
agauccugguacacaauaggua

SEQ ID NO: 38056 - RNA, 23 nt, Artificial Sequence
  Synthetic
cagauccugguacacaauaggua

SEQ ID NO: 38057 - RNA, 24 nt, Artificial Sequence
  Synthetic
acagauccugguacacaauaggua

SEQ ID NO: 38058 - RNA, 19 nt, Artificial Sequence
  Synthetic
agaucuuguaggauaggua

SEQ ID NO: 38059 - RNA, 20 nt, Artificial Sequence
  Synthetic
aagaucuuguaggauaggua

SEQ ID NO: 38060 - RNA, 21 nt, Artificial Sequence
  Synthetic
aaagaucuuguaggauaggua

SEQ ID NO: 38061 - RNA, 22 nt, Artificial Sequence
  Synthetic
aaaagaucuuguaggauaggua

SEQ ID NO: 38062 - RNA, 23 nt, Artificial Sequence
  Synthetic
uaaaagaucuuguaggauaggua

SEQ ID NO: 38063 - RNA, 24 nt, Artificial Sequence
  Synthetic
auaaaagaucuuguaggauaggua

SEQ ID NO: 38064 - RNA, 18 nt, Artificial Sequence
  Synthetic
aaguuguguaacuaggua

SEQ ID NO: 38065 - RNA, 20 nt, Artificial Sequence
  Synthetic
ugaaguuguguaacuaggua

SEQ ID NO: 38066 - RNA, 21 nt, Artificial Sequence
  Synthetic
augaaguuguguaacuaggua

SEQ ID NO: 38067 - RNA, 22 nt, Artificial Sequence
  Synthetic
uaugaaguuguguaacuaggua

SEQ ID NO: 38068 - RNA, 23 nt, Artificial Sequence
  Synthetic
uuaugaaguuguguaacuaggua

SEQ ID NO: 38069 - RNA, 24 nt, Artificial Sequence
  Synthetic
auuaugaaguuguguaacuaggua

SEQ ID NO: 38070 - RNA, 18 nt, Artificial Sequence
  Synthetic
cacuucauuaaguaggua

SEQ ID NO: 38071 - RNA, 19 nt, Artificial Sequence
  Synthetic
acacuucauuaaguaggua

SEQ ID NO: 38072 - RNA, 20 nt, Artificial Sequence
  Synthetic
uacacuucauuaaguaggua

SEQ ID NO: 38073 - RNA, 21 nt, Artificial Sequence
  Synthetic
uuacacuucauuaaguaggua

SEQ ID NO: 38074 - RNA, 22 nt, Artificial Sequence
  Synthetic
uuuacacuucauuaaguaggua

SEQ ID NO: 38075 - RNA, 23 nt, Artificial Sequence
  Synthetic
cuuuacacuucauuaaguaggua

SEQ ID NO: 38076 - RNA, 24 nt, Artificial Sequence
  Synthetic
acuuuacacuucauuaaguaggua

SEQ ID NO: 38077 - RNA, 21 nt, Artificial Sequence
  Synthetic
cuaagaaggaaagaaagggua

SEQ ID NO: 38078 - RNA, 23 nt, Artificial Sequence
  Synthetic
agcuaagaaggaaagaaagggua

SEQ ID NO: 38079 - RNA, 24 nt, Artificial Sequence
  Synthetic
uagcuaagaaggaaagaaagggua

SEQ ID NO: 38080 - RNA, 18 nt, Artificial Sequence
  Synthetic
ugugugaggagaagggua

SEQ ID NO: 38081 - RNA, 19 nt, Artificial Sequence
  Synthetic
cugugugaggagaagggua

SEQ ID NO: 38082 - RNA, 20 nt, Artificial Sequence
  Synthetic
ucugugugaggagaagggua

SEQ ID NO: 38083 - RNA, 21 nt, Artificial Sequence
  Synthetic
uucugugugaggagaagggua

SEQ ID NO: 38084 - RNA, 22 nt, Artificial Sequence
  Synthetic
uuucugugugaggagaagggua

SEQ ID NO: 38085 - RNA, 23 nt, Artificial Sequence
  Synthetic
auuucugugugaggagaagggua

SEQ ID NO: 38086 - RNA, 24 nt, Artificial Sequence
  Synthetic
cauuucugugugaggagaagggua

SEQ ID NO: 38087 - RNA, 18 nt, Artificial Sequence
  Synthetic
aguuugggacagggggua

SEQ ID NO: 38088 - RNA, 19 nt, Artificial Sequence
  Synthetic
aaguuugggacagggggua

SEQ ID NO: 38089 - RNA, 20 nt, Artificial Sequence
  Synthetic
aaaguuugggacagggggua

SEQ ID NO: 38090 - RNA, 21 nt, Artificial Sequence
  Synthetic
uaaaguuugggacagggggua

SEQ ID NO: 38091 - RNA, 22 nt, Artificial Sequence
  Synthetic
uuaaaguuugggacagggggua

SEQ ID NO: 38092 - RNA, 23 nt, Artificial Sequence
  Synthetic
uuuaaaguuugggacagggggua

SEQ ID NO: 38093 - RNA, 24 nt, Artificial Sequence
  Synthetic
uuuuaaaguuugggacagggggua

SEQ ID NO: 38094 - RNA, 18 nt, Artificial Sequence
  Synthetic
uugcugaugaauggggua

SEQ ID NO: 38095 - RNA, 19 nt, Artificial Sequence
  Synthetic
uuugcugaugaauggggua

SEQ ID NO: 38096 - RNA, 22 nt, Artificial Sequence
  Synthetic
agguuugcugaugaauggggua

SEQ ID NO: 38097 - RNA, 23 nt, Artificial Sequence
  Synthetic
cagguuugcugaugaauggggua

SEQ ID NO: 38098 - RNA, 24 nt, Artificial Sequence
  Synthetic
ccagguuugcugaugaauggggua

SEQ ID NO: 38099 - RNA, 18 nt, Artificial Sequence
  Synthetic
agagaagagguuggggua

SEQ ID NO: 38100 - RNA, 19 nt, Artificial Sequence
  Synthetic
aagagaagagguuggggua

SEQ ID NO: 38101 - RNA, 20 nt, Artificial Sequence
  Synthetic
uaagagaagagguuggggua

SEQ ID NO: 38102 - RNA, 21 nt, Artificial Sequence
  Synthetic
uuaagagaagagguuggggua

SEQ ID NO: 38103 - RNA, 22 nt, Artificial Sequence
  Synthetic
auuaagagaagagguuggggua

SEQ ID NO: 38104 - RNA, 23 nt, Artificial Sequence
  Synthetic
cauuaagagaagagguuggggua

SEQ ID NO: 38105 - RNA, 24 nt, Artificial Sequence
  Synthetic
ccauuaagagaagagguuggggua

SEQ ID NO: 38106 - RNA, 21 nt, Artificial Sequence
  Synthetic
aauuuauuucccaaaugggua

SEQ ID NO: 38107 - RNA, 22 nt, Artificial Sequence
  Synthetic
caauuuauuucccaaaugggua

SEQ ID NO: 38108 - RNA, 23 nt, Artificial Sequence
  Synthetic
ucaauuuauuucccaaaugggua

SEQ ID NO: 38109 - RNA, 24 nt, Artificial Sequence
  Synthetic
aucaauuuauuucccaaaugggua

SEQ ID NO: 38110 - RNA, 18 nt, Artificial Sequence
  Synthetic
uggaguaggaaaugggua

SEQ ID NO: 38111 - RNA, 20 nt, Artificial Sequence
  Synthetic
aguggaguaggaaaugggua

SEQ ID NO: 38112 - RNA, 22 nt, Artificial Sequence
  Synthetic
ugaguggaguaggaaaugggua

SEQ ID NO: 38113 - RNA, 23 nt, Artificial Sequence
  Synthetic
cugaguggaguaggaaaugggua

SEQ ID NO: 38114 - RNA, 24 nt, Artificial Sequence
  Synthetic
acugaguggaguaggaaaugggua

SEQ ID NO: 38115 - RNA, 18 nt, Artificial Sequence
  Synthetic
cagacuuugcaaugggua

SEQ ID NO: 38116 - RNA, 19 nt, Artificial Sequence
  Synthetic
ccagacuuugcaaugggua

SEQ ID NO: 38117 - RNA, 20 nt, Artificial Sequence
  Synthetic
cccagacuuugcaaugggua

SEQ ID NO: 38118 - RNA, 21 nt, Artificial Sequence
  Synthetic
acccagacuuugcaaugggua

SEQ ID NO: 38119 - RNA, 23 nt, Artificial Sequence
  Synthetic
agacccagacuuugcaaugggua

SEQ ID NO: 38120 - RNA, 24 nt, Artificial Sequence
  Synthetic
cagacccagacuuugcaaugggua

SEQ ID NO: 38121 - RNA, 18 nt, Artificial Sequence
  Synthetic
auaggaaaauuaugggua

SEQ ID NO: 38122 - RNA, 22 nt, Artificial Sequence
  Synthetic
agggauaggaaaauuaugggua

SEQ ID NO: 38123 - RNA, 23 nt, Artificial Sequence
  Synthetic
aagggauaggaaaauuaugggua

SEQ ID NO: 38124 - RNA, 24 nt, Artificial Sequence
  Synthetic
caagggauaggaaaauuaugggua

SEQ ID NO: 38125 - RNA, 19 nt, Artificial Sequence
  Synthetic
ugcauuuagugacugggua

SEQ ID NO: 38126 - RNA, 20 nt, Artificial Sequence
  Synthetic
augcauuuagugacugggua

SEQ ID NO: 38127 - RNA, 21 nt, Artificial Sequence
  Synthetic
aaugcauuuagugacugggua

SEQ ID NO: 38128 - RNA, 22 nt, Artificial Sequence
  Synthetic
uaaugcauuuagugacugggua

SEQ ID NO: 38129 - RNA, 23 nt, Artificial Sequence
  Synthetic
uuaaugcauuuagugacugggua

SEQ ID NO: 38130 - RNA, 24 nt, Artificial Sequence
  Synthetic
uuuaaugcauuuagugacugggua

SEQ ID NO: 38131 - RNA, 18 nt, Artificial Sequence
  Synthetic
uccacgcuuucgugggua

SEQ ID NO: 38132 - RNA, 19 nt, Artificial Sequence
  Synthetic
uuccacgcuuucgugggua

SEQ ID NO: 38133 - RNA, 20 nt, Artificial Sequence
  Synthetic
cuuccacgcuuucgugggua

SEQ ID NO: 38134 - RNA, 22 nt, Artificial Sequence
  Synthetic
ugcuuccacgcuuucgugggua

SEQ ID NO: 38135 - RNA, 23 nt, Artificial Sequence
  Synthetic
augcuuccacgcuuucgugggua

SEQ ID NO: 38136 - RNA, 24 nt, Artificial Sequence
  Synthetic
caugcuuccacgcuuucgugggua

SEQ ID NO: 38137 - RNA, 18 nt, Artificial Sequence
  Synthetic
cauucauucaggugggua

SEQ ID NO: 38138 - RNA, 20 nt, Artificial Sequence
  Synthetic
agcauucauucaggugggua

SEQ ID NO: 38139 - RNA, 21 nt, Artificial Sequence
  Synthetic
aagcauucauucaggugggua

SEQ ID NO: 38140 - RNA, 22 nt, Artificial Sequence
  Synthetic
aaagcauucauucaggugggua

SEQ ID NO: 38141 - RNA, 23 nt, Artificial Sequence
  Synthetic
caaagcauucauucaggugggua

SEQ ID NO: 38142 - RNA, 24 nt, Artificial Sequence
  Synthetic
ucaaagcauucauucaggugggua

SEQ ID NO: 38143 - RNA, 18 nt, Artificial Sequence
  Synthetic
uauggaaaaagaauggua

SEQ ID NO: 38144 - RNA, 19 nt, Artificial Sequence
  Synthetic
auauggaaaaagaauggua

SEQ ID NO: 38145 - RNA, 20 nt, Artificial Sequence
  Synthetic
uauauggaaaaagaauggua

SEQ ID NO: 38146 - RNA, 21 nt, Artificial Sequence
  Synthetic
auauauggaaaaagaauggua

SEQ ID NO: 38147 - RNA, 22 nt, Artificial Sequence
  Synthetic
uauauauggaaaaagaauggua

SEQ ID NO: 38148 - RNA, 24 nt, Artificial Sequence
  Synthetic
aguauauauggaaaaagaauggua

SEQ ID NO: 38149 - RNA, 18 nt, Artificial Sequence
  Synthetic
agggccugacacauggua

SEQ ID NO: 38150 - RNA, 20 nt, Artificial Sequence
  Synthetic
ugagggccugacacauggua

SEQ ID NO: 38151 - RNA, 22 nt, Artificial Sequence
  Synthetic
ugugagggccugacacauggua

SEQ ID NO: 38152 - RNA, 23 nt, Artificial Sequence
  Synthetic
uugugagggccugacacauggua

SEQ ID NO: 38153 - RNA, 24 nt, Artificial Sequence
  Synthetic
cuugugagggccugacacauggua

SEQ ID NO: 38154 - RNA, 18 nt, Artificial Sequence
  Synthetic
cuauuuugauacauggua

SEQ ID NO: 38155 - RNA, 19 nt, Artificial Sequence
  Synthetic
ccuauuuugauacauggua

SEQ ID NO: 38156 - RNA, 20 nt, Artificial Sequence
  Synthetic
cccuauuuugauacauggua

SEQ ID NO: 38157 - RNA, 21 nt, Artificial Sequence
  Synthetic
ccccuauuuugauacauggua

SEQ ID NO: 38158 - RNA, 22 nt, Artificial Sequence
  Synthetic
accccuauuuugauacauggua

SEQ ID NO: 38159 - RNA, 23 nt, Artificial Sequence
  Synthetic
uaccccuauuuugauacauggua

SEQ ID NO: 38160 - RNA, 24 nt, Artificial Sequence
  Synthetic
cuaccccuauuuugauacauggua

SEQ ID NO: 38161 - RNA, 18 nt, Artificial Sequence
  Synthetic
cagggacacacacuggua

SEQ ID NO: 38162 - RNA, 19 nt, Artificial Sequence
  Synthetic
ccagggacacacacuggua

SEQ ID NO: 38163 - RNA, 20 nt, Artificial Sequence
  Synthetic
uccagggacacacacuggua

SEQ ID NO: 38164 - RNA, 21 nt, Artificial Sequence
  Synthetic
cuccagggacacacacuggua

SEQ ID NO: 38165 - RNA, 22 nt, Artificial Sequence
  Synthetic
ccuccagggacacacacuggua

SEQ ID NO: 38166 - RNA, 23 nt, Artificial Sequence
  Synthetic
cccuccagggacacacacuggua

SEQ ID NO: 38167 - RNA, 24 nt, Artificial Sequence
  Synthetic
ucccuccagggacacacacuggua

SEQ ID NO: 38168 - RNA, 18 nt, Artificial Sequence
  Synthetic
uagcaaagccaaguggua

SEQ ID NO: 38169 - RNA, 19 nt, Artificial Sequence
  Synthetic
uuagcaaagccaaguggua

SEQ ID NO: 38170 - RNA, 20 nt, Artificial Sequence
  Synthetic
cuuagcaaagccaaguggua

SEQ ID NO: 38171 - RNA, 22 nt, Artificial Sequence
  Synthetic
ugcuuagcaaagccaaguggua

SEQ ID NO: 38172 - RNA, 23 nt, Artificial Sequence
  Synthetic
augcuuagcaaagccaaguggua

SEQ ID NO: 38173 - RNA, 18 nt, Artificial Sequence
  Synthetic
auucuaauagcaguggua

SEQ ID NO: 38174 - RNA, 19 nt, Artificial Sequence
  Synthetic
aauucuaauagcaguggua

SEQ ID NO: 38175 - RNA, 20 nt, Artificial Sequence
  Synthetic
aaauucuaauagcaguggua

SEQ ID NO: 38176 - RNA, 21 nt, Artificial Sequence
  Synthetic
aaaauucuaauagcaguggua

SEQ ID NO: 38177 - RNA, 22 nt, Artificial Sequence
  Synthetic
uaaaauucuaauagcaguggua

SEQ ID NO: 38178 - RNA, 23 nt, Artificial Sequence
  Synthetic
auaaaauucuaauagcaguggua

SEQ ID NO: 38179 - RNA, 24 nt, Artificial Sequence
  Synthetic
cauaaaauucuaauagcaguggua

SEQ ID NO: 38180 - RNA, 18 nt, Artificial Sequence
  Synthetic
ugaucugaacagguggua

SEQ ID NO: 38181 - RNA, 19 nt, Artificial Sequence
  Synthetic
cugaucugaacagguggua

SEQ ID NO: 38182 - RNA, 21 nt, Artificial Sequence
  Synthetic
cgcugaucugaacagguggua

SEQ ID NO: 38183 - RNA, 22 nt, Artificial Sequence
  Synthetic
acgcugaucugaacagguggua

SEQ ID NO: 38184 - RNA, 23 nt, Artificial Sequence
  Synthetic
aacgcugaucugaacagguggua

SEQ ID NO: 38185 - RNA, 24 nt, Artificial Sequence
  Synthetic
caacgcugaucugaacagguggua

SEQ ID NO: 38186 - RNA, 18 nt, Artificial Sequence
  Synthetic
aaguucaugguuguggua

SEQ ID NO: 38187 - RNA, 19 nt, Artificial Sequence
  Synthetic
aaaguucaugguuguggua

SEQ ID NO: 38188 - RNA, 20 nt, Artificial Sequence
  Synthetic
aaaaguucaugguuguggua

SEQ ID NO: 38189 - RNA, 21 nt, Artificial Sequence
  Synthetic
aaaaaguucaugguuguggua

SEQ ID NO: 38190 - RNA, 23 nt, Artificial Sequence
  Synthetic
ugaaaaaguucaugguuguggua

SEQ ID NO: 38191 - RNA, 19 nt, Artificial Sequence
  Synthetic
aguucuugugucauuggua

SEQ ID NO: 38192 - RNA, 20 nt, Artificial Sequence
  Synthetic
caguucuugugucauuggua

SEQ ID NO: 38193 - RNA, 22 nt, Artificial Sequence
  Synthetic
agcaguucuugugucauuggua

SEQ ID NO: 38194 - RNA, 24 nt, Artificial Sequence
  Synthetic
ugagcaguucuugugucauuggua

SEQ ID NO: 38195 - RNA, 18 nt, Artificial Sequence
  Synthetic
uuggaaauuuuauuggua

SEQ ID NO: 38196 - RNA, 19 nt, Artificial Sequence
  Synthetic
cuuggaaauuuuauuggua

SEQ ID NO: 38197 - RNA, 21 nt, Artificial Sequence
  Synthetic
agcuuggaaauuuuauuggua

SEQ ID NO: 38198 - RNA, 22 nt, Artificial Sequence
  Synthetic
aagcuuggaaauuuuauuggua

SEQ ID NO: 38199 - RNA, 23 nt, Artificial Sequence
  Synthetic
aaagcuuggaaauuuuauuggua

SEQ ID NO: 38200 - RNA, 24 nt, Artificial Sequence
  Synthetic
caaagcuuggaaauuuuauuggua

SEQ ID NO: 38201 - RNA, 18 nt, Artificial Sequence
  Synthetic
auggaaauguauuuggua

SEQ ID NO: 38202 - RNA, 19 nt, Artificial Sequence
  Synthetic
aauggaaauguauuuggua

SEQ ID NO: 38203 - RNA, 20 nt, Artificial Sequence
  Synthetic
uaauggaaauguauuuggua

SEQ ID NO: 38204 - RNA, 21 nt, Artificial Sequence
  Synthetic
uuaauggaaauguauuuggua

SEQ ID NO: 38205 - RNA, 22 nt, Artificial Sequence
  Synthetic
uuuaauggaaauguauuuggua

SEQ ID NO: 38206 - RNA, 23 nt, Artificial Sequence
  Synthetic
auuuaauggaaauguauuuggua

SEQ ID NO: 38207 - RNA, 24 nt, Artificial Sequence
  Synthetic
uauuuaauggaaauguauuuggua

SEQ ID NO: 38208 - RNA, 21 nt, Artificial Sequence
  Synthetic
uggauguucaauaaaaaugua

SEQ ID NO: 38209 - RNA, 22 nt, Artificial Sequence
  Synthetic
auggauguucaauaaaaaugua

SEQ ID NO: 38210 - RNA, 24 nt, Artificial Sequence
  Synthetic
cgauggauguucaauaaaaaugua

SEQ ID NO: 38211 - RNA, 18 nt, Artificial Sequence
  Synthetic
uuaucuuucccaaaugua

SEQ ID NO: 38212 - RNA, 19 nt, Artificial Sequence
  Synthetic
uuuaucuuucccaaaugua

SEQ ID NO: 38213 - RNA, 20 nt, Artificial Sequence
  Synthetic
auuuaucuuucccaaaugua

SEQ ID NO: 38214 - RNA, 21 nt, Artificial Sequence
  Synthetic
aauuuaucuuucccaaaugua

SEQ ID NO: 38215 - RNA, 22 nt, Artificial Sequence
  Synthetic
aaauuuaucuuucccaaaugua

SEQ ID NO: 38216 - RNA, 18 nt, Artificial Sequence
  Synthetic
cugucaguaagcaaugua

SEQ ID NO: 38217 - RNA, 19 nt, Artificial Sequence
  Synthetic
ucugucaguaagcaaugua

SEQ ID NO: 38218 - RNA, 20 nt, Artificial Sequence
  Synthetic
uucugucaguaagcaaugua

SEQ ID NO: 38219 - RNA, 22 nt, Artificial Sequence
  Synthetic
aguucugucaguaagcaaugua

SEQ ID NO: 38220 - RNA, 23 nt, Artificial Sequence
  Synthetic
aaguucugucaguaagcaaugua

SEQ ID NO: 38221 - RNA, 24 nt, Artificial Sequence
  Synthetic
aaaguucugucaguaagcaaugua

SEQ ID NO: 38222 - RNA, 18 nt, Artificial Sequence
  Synthetic
uaucgaaaacggaaugua

SEQ ID NO: 38223 - RNA, 19 nt, Artificial Sequence
  Synthetic
uuaucgaaaacggaaugua

SEQ ID NO: 38224 - RNA, 20 nt, Artificial Sequence
  Synthetic
cuuaucgaaaacggaaugua

SEQ ID NO: 38225 - RNA, 23 nt, Artificial Sequence
  Synthetic
uggcuuaucgaaaacggaaugua

SEQ ID NO: 38226 - RNA, 24 nt, Artificial Sequence
  Synthetic
cuggcuuaucgaaaacggaaugua

SEQ ID NO: 38227 - RNA, 19 nt, Artificial Sequence
  Synthetic
ugagacaaugaugaaugua

SEQ ID NO: 38228 - RNA, 21 nt, Artificial Sequence
  Synthetic
agugagacaaugaugaaugua

SEQ ID NO: 38229 - RNA, 22 nt, Artificial Sequence
  Synthetic
uagugagacaaugaugaaugua

SEQ ID NO: 38230 - RNA, 23 nt, Artificial Sequence
  Synthetic
auagugagacaaugaugaaugua

SEQ ID NO: 38231 - RNA, 24 nt, Artificial Sequence
  Synthetic
aauagugagacaaugaugaaugua

SEQ ID NO: 38232 - RNA, 18 nt, Artificial Sequence
  Synthetic
aauguauuguugaaugua

SEQ ID NO: 38233 - RNA, 19 nt, Artificial Sequence
  Synthetic
aaauguauuguugaaugua

SEQ ID NO: 38234 - RNA, 20 nt, Artificial Sequence
  Synthetic
caaauguauuguugaaugua

SEQ ID NO: 38235 - RNA, 21 nt, Artificial Sequence
  Synthetic
ucaaauguauuguugaaugua

SEQ ID NO: 38236 - RNA, 23 nt, Artificial Sequence
  Synthetic
agucaaauguauuguugaaugua

SEQ ID NO: 38237 - RNA, 24 nt, Artificial Sequence
  Synthetic
aagucaaauguauuguugaaugua

SEQ ID NO: 38238 - RNA, 18 nt, Artificial Sequence
  Synthetic
auucaaauaaauaaugua

SEQ ID NO: 38239 - RNA, 19 nt, Artificial Sequence
  Synthetic
cauucaaauaaauaaugua

SEQ ID NO: 38240 - RNA, 20 nt, Artificial Sequence
  Synthetic
ucauucaaauaaauaaugua

SEQ ID NO: 38241 - RNA, 22 nt, Artificial Sequence
  Synthetic
ugucauucaaauaaauaaugua

SEQ ID NO: 38242 - RNA, 23 nt, Artificial Sequence
  Synthetic
augucauucaaauaaauaaugua

SEQ ID NO: 38243 - RNA, 18 nt, Artificial Sequence
  Synthetic
agcacucacaauaaugua

SEQ ID NO: 38244 - RNA, 19 nt, Artificial Sequence
  Synthetic
aagcacucacaauaaugua

SEQ ID NO: 38245 - RNA, 22 nt, Artificial Sequence
  Synthetic
uggaagcacucacaauaaugua

SEQ ID NO: 38246 - RNA, 23 nt, Artificial Sequence
  Synthetic
auggaagcacucacaauaaugua

SEQ ID NO: 38247 - RNA, 24 nt, Artificial Sequence
  Synthetic
cauggaagcacucacaauaaugua

SEQ ID NO: 38248 - RNA, 18 nt, Artificial Sequence
  Synthetic
uugggacaguaacaugua

SEQ ID NO: 38249 - RNA, 19 nt, Artificial Sequence
  Synthetic
uuugggacaguaacaugua

SEQ ID NO: 38250 - RNA, 20 nt, Artificial Sequence
  Synthetic
cuuugggacaguaacaugua

SEQ ID NO: 38251 - RNA, 22 nt, Artificial Sequence
  Synthetic
ugcuuugggacaguaacaugua

SEQ ID NO: 38252 - RNA, 23 nt, Artificial Sequence
  Synthetic
uugcuuugggacaguaacaugua

SEQ ID NO: 38253 - RNA, 24 nt, Artificial Sequence
  Synthetic
uuugcuuugggacaguaacaugua

SEQ ID NO: 38254 - RNA, 18 nt, Artificial Sequence
  Synthetic
aaaucuaucauacaugua

SEQ ID NO: 38255 - RNA, 19 nt, Artificial Sequence
  Synthetic
uaaaucuaucauacaugua

SEQ ID NO: 38256 - RNA, 20 nt, Artificial Sequence
  Synthetic
auaaaucuaucauacaugua

SEQ ID NO: 38257 - RNA, 21 nt, Artificial Sequence
  Synthetic
uauaaaucuaucauacaugua

SEQ ID NO: 38258 - RNA, 24 nt, Artificial Sequence
  Synthetic
agguauaaaucuaucauacaugua

SEQ ID NO: 38259 - RNA, 18 nt, Artificial Sequence
  Synthetic
acaauuuaauggcaugua

SEQ ID NO: 38260 - RNA, 20 nt, Artificial Sequence
  Synthetic
ugacaauuuaauggcaugua

SEQ ID NO: 38261 - RNA, 21 nt, Artificial Sequence
  Synthetic
augacaauuuaauggcaugua

SEQ ID NO: 38262 - RNA, 22 nt, Artificial Sequence
  Synthetic
uaugacaauuuaauggcaugua

SEQ ID NO: 38263 - RNA, 23 nt, Artificial Sequence
  Synthetic
uuaugacaauuuaauggcaugua

SEQ ID NO: 38264 - RNA, 24 nt, Artificial Sequence
  Synthetic
auuaugacaauuuaauggcaugua

SEQ ID NO: 38265 - RNA, 18 nt, Artificial Sequence
  Synthetic
ucgcuguuccuucaugua

SEQ ID NO: 38266 - RNA, 19 nt, Artificial Sequence
  Synthetic
cucgcuguuccuucaugua

SEQ ID NO: 38267 - RNA, 20 nt, Artificial Sequence
  Synthetic
ucucgcuguuccuucaugua

SEQ ID NO: 38268 - RNA, 21 nt, Artificial Sequence
  Synthetic
uucucgcuguuccuucaugua

SEQ ID NO: 38269 - RNA, 22 nt, Artificial Sequence
  Synthetic
auucucgcuguuccuucaugua

SEQ ID NO: 38270 - RNA, 23 nt, Artificial Sequence
  Synthetic
uauucucgcuguuccuucaugua

SEQ ID NO: 38271 - RNA, 24 nt, Artificial Sequence
  Synthetic
uuauucucgcuguuccuucaugua

SEQ ID NO: 38272 - RNA, 18 nt, Artificial Sequence
  Synthetic
augguuucaauagaugua

SEQ ID NO: 38273 - RNA, 19 nt, Artificial Sequence
  Synthetic
uaugguuucaauagaugua

SEQ ID NO: 38274 - RNA, 21 nt, Artificial Sequence
  Synthetic
cguaugguuucaauagaugua

SEQ ID NO: 38275 - RNA, 22 nt, Artificial Sequence
  Synthetic
acguaugguuucaauagaugua

SEQ ID NO: 38276 - RNA, 23 nt, Artificial Sequence
  Synthetic
cacguaugguuucaauagaugua

SEQ ID NO: 38277 - RNA, 19 nt, Artificial Sequence
  Synthetic
aggcaauccaaaggaugua

SEQ ID NO: 38278 - RNA, 20 nt, Artificial Sequence
  Synthetic
aaggcaauccaaaggaugua

SEQ ID NO: 38279 - RNA, 21 nt, Artificial Sequence
  Synthetic
aaaggcaauccaaaggaugua

SEQ ID NO: 38280 - RNA, 22 nt, Artificial Sequence
  Synthetic
aaaaggcaauccaaaggaugua

SEQ ID NO: 38281 - RNA, 23 nt, Artificial Sequence
  Synthetic
uaaaaggcaauccaaaggaugua

SEQ ID NO: 38282 - RNA, 24 nt, Artificial Sequence
  Synthetic
auaaaaggcaauccaaaggaugua

SEQ ID NO: 38283 - RNA, 19 nt, Artificial Sequence
  Synthetic
aggaaaaauuaaugaugua

SEQ ID NO: 38284 - RNA, 20 nt, Artificial Sequence
  Synthetic
uaggaaaaauuaaugaugua

SEQ ID NO: 38285 - RNA, 21 nt, Artificial Sequence
  Synthetic
auaggaaaaauuaaugaugua

SEQ ID NO: 38286 - RNA, 22 nt, Artificial Sequence
  Synthetic
aauaggaaaaauuaaugaugua

SEQ ID NO: 38287 - RNA, 24 nt, Artificial Sequence
  Synthetic
agaauaggaaaaauuaaugaugua

SEQ ID NO: 38288 - RNA, 18 nt, Artificial Sequence
  Synthetic
caaugagaucgugaugua

SEQ ID NO: 38289 - RNA, 19 nt, Artificial Sequence
  Synthetic
ucaaugagaucgugaugua

SEQ ID NO: 38290 - RNA, 20 nt, Artificial Sequence
  Synthetic
aucaaugagaucgugaugua

SEQ ID NO: 38291 - RNA, 21 nt, Artificial Sequence
  Synthetic
aaucaaugagaucgugaugua

SEQ ID NO: 38292 - RNA, 22 nt, Artificial Sequence
  Synthetic
uaaucaaugagaucgugaugua

SEQ ID NO: 38293 - RNA, 23 nt, Artificial Sequence
  Synthetic
auaaucaaugagaucgugaugua

SEQ ID NO: 38294 - RNA, 24 nt, Artificial Sequence
  Synthetic
cauaaucaaugagaucgugaugua

SEQ ID NO: 38295 - RNA, 18 nt, Artificial Sequence
  Synthetic
uaugaaaggcuguaugua

SEQ ID NO: 38296 - RNA, 20 nt, Artificial Sequence
  Synthetic
aguaugaaaggcuguaugua

SEQ ID NO: 38297 - RNA, 21 nt, Artificial Sequence
  Synthetic
caguaugaaaggcuguaugua

SEQ ID NO: 38298 - RNA, 22 nt, Artificial Sequence
  Synthetic
ccaguaugaaaggcuguaugua

SEQ ID NO: 38299 - RNA, 23 nt, Artificial Sequence
  Synthetic
accaguaugaaaggcuguaugua

SEQ ID NO: 38300 - RNA, 24 nt, Artificial Sequence
  Synthetic
uaccaguaugaaaggcuguaugua

SEQ ID NO: 38301 - RNA, 18 nt, Artificial Sequence
  Synthetic
aaacugugccuaacugua

SEQ ID NO: 38302 - RNA, 19 nt, Artificial Sequence
  Synthetic
aaaacugugccuaacugua

SEQ ID NO: 38303 - RNA, 21 nt, Artificial Sequence
  Synthetic
ugaaaacugugccuaacugua

SEQ ID NO: 38304 - RNA, 22 nt, Artificial Sequence
  Synthetic
augaaaacugugccuaacugua

SEQ ID NO: 38305 - RNA, 24 nt, Artificial Sequence
  Synthetic
ugaugaaaacugugccuaacugua

SEQ ID NO: 38306 - RNA, 18 nt, Artificial Sequence
  Synthetic
acuuuagguaacacugua

SEQ ID NO: 38307 - RNA, 19 nt, Artificial Sequence
  Synthetic
cacuuuagguaacacugua

SEQ ID NO: 38308 - RNA, 20 nt, Artificial Sequence
  Synthetic
ucacuuuagguaacacugua

SEQ ID NO: 38309 - RNA, 21 nt, Artificial Sequence
  Synthetic
cucacuuuagguaacacugua

SEQ ID NO: 38310 - RNA, 22 nt, Artificial Sequence
  Synthetic
ccucacuuuagguaacacugua

SEQ ID NO: 38311 - RNA, 23 nt, Artificial Sequence
  Synthetic
uccucacuuuagguaacacugua

SEQ ID NO: 38312 - RNA, 24 nt, Artificial Sequence
  Synthetic
uuccucacuuuagguaacacugua

SEQ ID NO: 38313 - RNA, 18 nt, Artificial Sequence
  Synthetic
aagagaaagcaaccugua

SEQ ID NO: 38314 - RNA, 19 nt, Artificial Sequence
  Synthetic
uaagagaaagcaaccugua

SEQ ID NO: 38315 - RNA, 20 nt, Artificial Sequence
  Synthetic
uuaagagaaagcaaccugua

SEQ ID NO: 38316 - RNA, 22 nt, Artificial Sequence
  Synthetic
aguuaagagaaagcaaccugua

SEQ ID NO: 38317 - RNA, 23 nt, Artificial Sequence
  Synthetic
aaguuaagagaaagcaaccugua

SEQ ID NO: 38318 - RNA, 24 nt, Artificial Sequence
  Synthetic
aaaguuaagagaaagcaaccugua

SEQ ID NO: 38319 - RNA, 18 nt, Artificial Sequence
  Synthetic
uuucacaccugaccugua

SEQ ID NO: 38320 - RNA, 19 nt, Artificial Sequence
  Synthetic
auuucacaccugaccugua

SEQ ID NO: 38321 - RNA, 20 nt, Artificial Sequence
  Synthetic
aauuucacaccugaccugua

SEQ ID NO: 38322 - RNA, 21 nt, Artificial Sequence
  Synthetic
aaauuucacaccugaccugua

SEQ ID NO: 38323 - RNA, 22 nt, Artificial Sequence
  Synthetic
aaaauuucacaccugaccugua

SEQ ID NO: 38324 - RNA, 18 nt, Artificial Sequence
  Synthetic
uaaauaguaugcccugua

SEQ ID NO: 38325 - RNA, 19 nt, Artificial Sequence
  Synthetic
uuaaauaguaugcccugua

SEQ ID NO: 38326 - RNA, 20 nt, Artificial Sequence
  Synthetic
cuuaaauaguaugcccugua

SEQ ID NO: 38327 - RNA, 21 nt, Artificial Sequence
  Synthetic
ucuuaaauaguaugcccugua

SEQ ID NO: 38328 - RNA, 22 nt, Artificial Sequence
  Synthetic
uucuuaaauaguaugcccugua

SEQ ID NO: 38329 - RNA, 23 nt, Artificial Sequence
  Synthetic
uuucuuaaauaguaugcccugua

SEQ ID NO: 38330 - RNA, 24 nt, Artificial Sequence
  Synthetic
uuuucuuaaauaguaugcccugua

SEQ ID NO: 38331 - RNA, 18 nt, Artificial Sequence
  Synthetic
ucacauuuuuagccugua

SEQ ID NO: 38332 - RNA, 19 nt, Artificial Sequence
  Synthetic
cucacauuuuuagccugua

SEQ ID NO: 38333 - RNA, 20 nt, Artificial Sequence
  Synthetic
acucacauuuuuagccugua

SEQ ID NO: 38334 - RNA, 21 nt, Artificial Sequence
  Synthetic
aacucacauuuuuagccugua

SEQ ID NO: 38335 - RNA, 22 nt, Artificial Sequence
  Synthetic
caacucacauuuuuagccugua

SEQ ID NO: 38336 - RNA, 23 nt, Artificial Sequence
  Synthetic
ccaacucacauuuuuagccugua

SEQ ID NO: 38337 - RNA, 18 nt, Artificial Sequence
  Synthetic
cugucuccaacagcugua

SEQ ID NO: 38338 - RNA, 19 nt, Artificial Sequence
  Synthetic
ucugucuccaacagcugua

SEQ ID NO: 38339 - RNA, 21 nt, Artificial Sequence
  Synthetic
ugucugucuccaacagcugua

SEQ ID NO: 38340 - RNA, 23 nt, Artificial Sequence
  Synthetic
agugucugucuccaacagcugua

SEQ ID NO: 38341 - RNA, 24 nt, Artificial Sequence
  Synthetic
uagugucugucuccaacagcugua

SEQ ID NO: 38342 - RNA, 18 nt, Artificial Sequence
  Synthetic
aaauaaauaaucgcugua

SEQ ID NO: 38343 - RNA, 19 nt, Artificial Sequence
  Synthetic
aaaauaaauaaucgcugua

SEQ ID NO: 38344 - RNA, 21 nt, Artificial Sequence
  Synthetic
agaaaauaaauaaucgcugua

SEQ ID NO: 38345 - RNA, 22 nt, Artificial Sequence
  Synthetic
aagaaaauaaauaaucgcugua

SEQ ID NO: 38346 - RNA, 23 nt, Artificial Sequence
  Synthetic
uaagaaaauaaauaaucgcugua

SEQ ID NO: 38347 - RNA, 24 nt, Artificial Sequence
  Synthetic
uuaagaaaauaaauaaucgcugua

SEQ ID NO: 38348 - RNA, 18 nt, Artificial Sequence
  Synthetic
aauuaaagauaaucugua

SEQ ID NO: 38349 - RNA, 20 nt, Artificial Sequence
  Synthetic
agaauuaaagauaaucugua

SEQ ID NO: 38350 - RNA, 21 nt, Artificial Sequence
  Synthetic
cagaauuaaagauaaucugua

SEQ ID NO: 38351 - RNA, 22 nt, Artificial Sequence
  Synthetic
ucagaauuaaagauaaucugua

SEQ ID NO: 38352 - RNA, 23 nt, Artificial Sequence
  Synthetic
uucagaauuaaagauaaucugua

SEQ ID NO: 38353 - RNA, 20 nt, Artificial Sequence
  Synthetic
aggcuuauaacagaucugua

SEQ ID NO: 38354 - RNA, 21 nt, Artificial Sequence
  Synthetic
aaggcuuauaacagaucugua

SEQ ID NO: 38355 - RNA, 22 nt, Artificial Sequence
  Synthetic
caaggcuuauaacagaucugua

SEQ ID NO: 38356 - RNA, 23 nt, Artificial Sequence
  Synthetic
ccaaggcuuauaacagaucugua

SEQ ID NO: 38357 - RNA, 18 nt, Artificial Sequence
  Synthetic
caacaucucuccucugua

SEQ ID NO: 38358 - RNA, 19 nt, Artificial Sequence
  Synthetic
acaacaucucuccucugua

SEQ ID NO: 38359 - RNA, 20 nt, Artificial Sequence
  Synthetic
cacaacaucucuccucugua

SEQ ID NO: 38360 - RNA, 22 nt, Artificial Sequence
  Synthetic
agcacaacaucucuccucugua

SEQ ID NO: 38361 - RNA, 23 nt, Artificial Sequence
  Synthetic
aagcacaacaucucuccucugua

SEQ ID NO: 38362 - RNA, 24 nt, Artificial Sequence
  Synthetic
uaagcacaacaucucuccucugua

SEQ ID NO: 38363 - RNA, 21 nt, Artificial Sequence
  Synthetic
uuuuagcaaacaguuucugua

SEQ ID NO: 38364 - RNA, 22 nt, Artificial Sequence
  Synthetic
uuuuuagcaaacaguuucugua

SEQ ID NO: 38365 - RNA, 23 nt, Artificial Sequence
  Synthetic
cuuuuuagcaaacaguuucugua

SEQ ID NO: 38366 - RNA, 24 nt, Artificial Sequence
  Synthetic
acuuuuuagcaaacaguuucugua

SEQ ID NO: 38367 - RNA, 18 nt, Artificial Sequence
  Synthetic
cucuuauucugaagugua

SEQ ID NO: 38368 - RNA, 19 nt, Artificial Sequence
  Synthetic
ucucuuauucugaagugua

SEQ ID NO: 38369 - RNA, 20 nt, Artificial Sequence
  Synthetic
aucucuuauucugaagugua

SEQ ID NO: 38370 - RNA, 22 nt, Artificial Sequence
  Synthetic
agaucucuuauucugaagugua

SEQ ID NO: 38371 - RNA, 23 nt, Artificial Sequence
  Synthetic
aagaucucuuauucugaagugua

SEQ ID NO: 38372 - RNA, 24 nt, Artificial Sequence
  Synthetic
aaagaucucuuauucugaagugua

SEQ ID NO: 38373 - RNA, 18 nt, Artificial Sequence
  Synthetic
uaacauaggugaagugua

SEQ ID NO: 38374 - RNA, 19 nt, Artificial Sequence
  Synthetic
auaacauaggugaagugua

SEQ ID NO: 38375 - RNA, 20 nt, Artificial Sequence
  Synthetic
aauaacauaggugaagugua

SEQ ID NO: 38376 - RNA, 21 nt, Artificial Sequence
  Synthetic
uaauaacauaggugaagugua

SEQ ID NO: 38377 - RNA, 22 nt, Artificial Sequence
  Synthetic
uuaauaacauaggugaagugua

SEQ ID NO: 38378 - RNA, 23 nt, Artificial Sequence
  Synthetic
auuaauaacauaggugaagugua

SEQ ID NO: 38379 - RNA, 24 nt, Artificial Sequence
  Synthetic
uauuaauaacauaggugaagugua

SEQ ID NO: 38380 - RNA, 21 nt, Artificial Sequence
  Synthetic
ucccaguucucaugcagugua

SEQ ID NO: 38381 - RNA, 22 nt, Artificial Sequence
  Synthetic
aucccaguucucaugcagugua

SEQ ID NO: 38382 - RNA, 23 nt, Artificial Sequence
  Synthetic
aaucccaguucucaugcagugua

SEQ ID NO: 38383 - RNA, 24 nt, Artificial Sequence
  Synthetic
uaaucccaguucucaugcagugua

SEQ ID NO: 38384 - RNA, 18 nt, Artificial Sequence
  Synthetic
uacaggcacuucagugua

SEQ ID NO: 38385 - RNA, 19 nt, Artificial Sequence
  Synthetic
uuacaggcacuucagugua

SEQ ID NO: 38386 - RNA, 20 nt, Artificial Sequence
  Synthetic
auuacaggcacuucagugua

SEQ ID NO: 38387 - RNA, 21 nt, Artificial Sequence
  Synthetic
cauuacaggcacuucagugua

SEQ ID NO: 38388 - RNA, 22 nt, Artificial Sequence
  Synthetic
ucauuacaggcacuucagugua

SEQ ID NO: 38389 - RNA, 24 nt, Artificial Sequence
  Synthetic
agucauuacaggcacuucagugua

SEQ ID NO: 38390 - RNA, 18 nt, Artificial Sequence
  Synthetic
aacucaguaaagagugua

SEQ ID NO: 38391 - RNA, 19 nt, Artificial Sequence
  Synthetic
caacucaguaaagagugua

SEQ ID NO: 38392 - RNA, 21 nt, Artificial Sequence
  Synthetic
ugcaacucaguaaagagugua

SEQ ID NO: 38393 - RNA, 22 nt, Artificial Sequence
  Synthetic
cugcaacucaguaaagagugua

SEQ ID NO: 38394 - RNA, 23 nt, Artificial Sequence
  Synthetic
ccugcaacucaguaaagagugua

SEQ ID NO: 38395 - RNA, 24 nt, Artificial Sequence
  Synthetic
accugcaacucaguaaagagugua

SEQ ID NO: 38396 - RNA, 18 nt, Artificial Sequence
  Synthetic
ugauaugggcagagugua

SEQ ID NO: 38397 - RNA, 23 nt, Artificial Sequence
  Synthetic
aggggugauaugggcagagugua

SEQ ID NO: 38398 - RNA, 24 nt, Artificial Sequence
  Synthetic
aaggggugauaugggcagagugua

SEQ ID NO: 38399 - RNA, 18 nt, Artificial Sequence
  Synthetic
aaagaauccaguagugua

SEQ ID NO: 38400 - RNA, 19 nt, Artificial Sequence
  Synthetic
caaagaauccaguagugua

SEQ ID NO: 38401 - RNA, 20 nt, Artificial Sequence
  Synthetic
ucaaagaauccaguagugua

SEQ ID NO: 38402 - RNA, 21 nt, Artificial Sequence
  Synthetic
uucaaagaauccaguagugua

SEQ ID NO: 38403 - RNA, 24 nt, Artificial Sequence
  Synthetic
ugguucaaagaauccaguagugua

SEQ ID NO: 38404 - RNA, 18 nt, Artificial Sequence
  Synthetic
cuuguguggauuagugua

SEQ ID NO: 38405 - RNA, 19 nt, Artificial Sequence
  Synthetic
acuuguguggauuagugua

SEQ ID NO: 38406 - RNA, 20 nt, Artificial Sequence
  Synthetic
uacuuguguggauuagugua

SEQ ID NO: 38407 - RNA, 21 nt, Artificial Sequence
  Synthetic
cuacuuguguggauuagugua

SEQ ID NO: 38408 - RNA, 22 nt, Artificial Sequence
  Synthetic
acuacuuguguggauuagugua

SEQ ID NO: 38409 - RNA, 24 nt, Artificial Sequence
  Synthetic
cgacuacuuguguggauuagugua

SEQ ID NO: 38410 - RNA, 19 nt, Artificial Sequence
  Synthetic
cgaaaaucuuugaggugua

SEQ ID NO: 38411 - RNA, 20 nt, Artificial Sequence
  Synthetic
ucgaaaaucuuugaggugua

SEQ ID NO: 38412 - RNA, 21 nt, Artificial Sequence
  Synthetic
aucgaaaaucuuugaggugua

SEQ ID NO: 38413 - RNA, 22 nt, Artificial Sequence
  Synthetic
aaucgaaaaucuuugaggugua

SEQ ID NO: 38414 - RNA, 23 nt, Artificial Sequence
  Synthetic
aaaucgaaaaucuuugaggugua

SEQ ID NO: 38415 - RNA, 18 nt, Artificial Sequence
  Synthetic
aagcacagguagggugua

SEQ ID NO: 38416 - RNA, 19 nt, Artificial Sequence
  Synthetic
uaagcacagguagggugua

SEQ ID NO: 38417 - RNA, 20 nt, Artificial Sequence
  Synthetic
auaagcacagguagggugua

SEQ ID NO: 38418 - RNA, 22 nt, Artificial Sequence
  Synthetic
ugauaagcacagguagggugua

SEQ ID NO: 38419 - RNA, 23 nt, Artificial Sequence
  Synthetic
cugauaagcacagguagggugua

SEQ ID NO: 38420 - RNA, 18 nt, Artificial Sequence
  Synthetic
uuucauagaguuggugua

SEQ ID NO: 38421 - RNA, 19 nt, Artificial Sequence
  Synthetic
auuucauagaguuggugua

SEQ ID NO: 38422 - RNA, 20 nt, Artificial Sequence
  Synthetic
uauuucauagaguuggugua

SEQ ID NO: 38423 - RNA, 21 nt, Artificial Sequence
  Synthetic
cuauuucauagaguuggugua

SEQ ID NO: 38424 - RNA, 22 nt, Artificial Sequence
  Synthetic
ccuauuucauagaguuggugua

SEQ ID NO: 38425 - RNA, 21 nt, Artificial Sequence
  Synthetic
cuaaaagaaagcccuugugua

SEQ ID NO: 38426 - RNA, 22 nt, Artificial Sequence
  Synthetic
ucuaaaagaaagcccuugugua

SEQ ID NO: 38427 - RNA, 23 nt, Artificial Sequence
  Synthetic
uucuaaaagaaagcccuugugua

SEQ ID NO: 38428 - RNA, 24 nt, Artificial Sequence
  Synthetic
auucuaaaagaaagcccuugugua

SEQ ID NO: 38429 - RNA, 18 nt, Artificial Sequence
  Synthetic
auucuaaugguuugugua

SEQ ID NO: 38430 - RNA, 19 nt, Artificial Sequence
  Synthetic
uauucuaaugguuugugua

SEQ ID NO: 38431 - RNA, 20 nt, Artificial Sequence
  Synthetic
auauucuaaugguuugugua

SEQ ID NO: 38432 - RNA, 21 nt, Artificial Sequence
  Synthetic
aauauucuaaugguuugugua

SEQ ID NO: 38433 - RNA, 22 nt, Artificial Sequence
  Synthetic
aaauauucuaaugguuugugua

SEQ ID NO: 38434 - RNA, 23 nt, Artificial Sequence
  Synthetic
caaauauucuaaugguuugugua

SEQ ID NO: 38435 - RNA, 24 nt, Artificial Sequence
  Synthetic
ucaaauauucuaaugguuugugua

SEQ ID NO: 38436 - RNA, 18 nt, Artificial Sequence
  Synthetic
uaaccuuccaaaauugua

SEQ ID NO: 38437 - RNA, 19 nt, Artificial Sequence
  Synthetic
cuaaccuuccaaaauugua

SEQ ID NO: 38438 - RNA, 20 nt, Artificial Sequence
  Synthetic
ucuaaccuuccaaaauugua

SEQ ID NO: 38439 - RNA, 21 nt, Artificial Sequence
  Synthetic
cucuaaccuuccaaaauugua

SEQ ID NO: 38440 - RNA, 22 nt, Artificial Sequence
  Synthetic
ccucuaaccuuccaaaauugua

SEQ ID NO: 38441 - RNA, 18 nt, Artificial Sequence
  Synthetic
ucauauucuucuauugua

SEQ ID NO: 38442 - RNA, 19 nt, Artificial Sequence
  Synthetic
aucauauucuucuauugua

SEQ ID NO: 38443 - RNA, 21 nt, Artificial Sequence
  Synthetic
ugaucauauucuucuauugua

SEQ ID NO: 38444 - RNA, 22 nt, Artificial Sequence
  Synthetic
uugaucauauucuucuauugua

SEQ ID NO: 38445 - RNA, 23 nt, Artificial Sequence
  Synthetic
uuugaucauauucuucuauugua

SEQ ID NO: 38446 - RNA, 24 nt, Artificial Sequence
  Synthetic
uuuugaucauauucuucuauugua

SEQ ID NO: 38447 - RNA, 18 nt, Artificial Sequence
  Synthetic
uucaguggacaacuugua

SEQ ID NO: 38448 - RNA, 20 nt, Artificial Sequence
  Synthetic
uguucaguggacaacuugua

SEQ ID NO: 38449 - RNA, 21 nt, Artificial Sequence
  Synthetic
uuguucaguggacaacuugua

SEQ ID NO: 38450 - RNA, 22 nt, Artificial Sequence
  Synthetic
auuguucaguggacaacuugua

SEQ ID NO: 38451 - RNA, 23 nt, Artificial Sequence
  Synthetic
aauuguucaguggacaacuugua

SEQ ID NO: 38452 - RNA, 24 nt, Artificial Sequence
  Synthetic
aaauuguucaguggacaacuugua

SEQ ID NO: 38453 - RNA, 18 nt, Artificial Sequence
  Synthetic
ucaaccacugcacuugua

SEQ ID NO: 38454 - RNA, 19 nt, Artificial Sequence
  Synthetic
cucaaccacugcacuugua

SEQ ID NO: 38455 - RNA, 20 nt, Artificial Sequence
  Synthetic
ucucaaccacugcacuugua

SEQ ID NO: 38456 - RNA, 21 nt, Artificial Sequence
  Synthetic
aucucaaccacugcacuugua

SEQ ID NO: 38457 - RNA, 22 nt, Artificial Sequence
  Synthetic
aaucucaaccacugcacuugua

SEQ ID NO: 38458 - RNA, 23 nt, Artificial Sequence
  Synthetic
aaaucucaaccacugcacuugua

SEQ ID NO: 38459 - RNA, 24 nt, Artificial Sequence
  Synthetic
aaaaucucaaccacugcacuugua

SEQ ID NO: 38460 - RNA, 18 nt, Artificial Sequence
  Synthetic
uccaacugcaaaguugua

SEQ ID NO: 38461 - RNA, 19 nt, Artificial Sequence
  Synthetic
auccaacugcaaaguugua

SEQ ID NO: 38462 - RNA, 20 nt, Artificial Sequence
  Synthetic
cauccaacugcaaaguugua

SEQ ID NO: 38463 - RNA, 21 nt, Artificial Sequence
  Synthetic
acauccaacugcaaaguugua

SEQ ID NO: 38464 - RNA, 22 nt, Artificial Sequence
  Synthetic
aacauccaacugcaaaguugua

SEQ ID NO: 38465 - RNA, 23 nt, Artificial Sequence
  Synthetic
uaacauccaacugcaaaguugua

SEQ ID NO: 38466 - RNA, 24 nt, Artificial Sequence
  Synthetic
uuaacauccaacugcaaaguugua

SEQ ID NO: 38467 - RNA, 18 nt, Artificial Sequence
  Synthetic
aucucucaguaaguugua

SEQ ID NO: 38468 - RNA, 19 nt, Artificial Sequence
  Synthetic
aaucucucaguaaguugua

SEQ ID NO: 38469 - RNA, 20 nt, Artificial Sequence
  Synthetic
aaaucucucaguaaguugua

SEQ ID NO: 38470 - RNA, 21 nt, Artificial Sequence
  Synthetic
caaaucucucaguaaguugua

SEQ ID NO: 38471 - RNA, 22 nt, Artificial Sequence
  Synthetic
acaaaucucucaguaaguugua

SEQ ID NO: 38472 - RNA, 23 nt, Artificial Sequence
  Synthetic
uacaaaucucucaguaaguugua

SEQ ID NO: 38473 - RNA, 24 nt, Artificial Sequence
  Synthetic
uuacaaaucucucaguaaguugua

SEQ ID NO: 38474 - RNA, 18 nt, Artificial Sequence
  Synthetic
ucaggaaaggcaguugua

SEQ ID NO: 38475 - RNA, 19 nt, Artificial Sequence
  Synthetic
uucaggaaaggcaguugua

SEQ ID NO: 38476 - RNA, 20 nt, Artificial Sequence
  Synthetic
cuucaggaaaggcaguugua

SEQ ID NO: 38477 - RNA, 21 nt, Artificial Sequence
  Synthetic
acuucaggaaaggcaguugua

SEQ ID NO: 38478 - RNA, 22 nt, Artificial Sequence
  Synthetic
uacuucaggaaaggcaguugua

SEQ ID NO: 38479 - RNA, 23 nt, Artificial Sequence
  Synthetic
uuacuucaggaaaggcaguugua

SEQ ID NO: 38480 - RNA, 24 nt, Artificial Sequence
  Synthetic
auuacuucaggaaaggcaguugua

SEQ ID NO: 38481 - RNA, 19 nt, Artificial Sequence
  Synthetic
agucuuccgggacguugua

SEQ ID NO: 38482 - RNA, 20 nt, Artificial Sequence
  Synthetic
cagucuuccgggacguugua

SEQ ID NO: 38483 - RNA, 22 nt, Artificial Sequence
  Synthetic
ugcagucuuccgggacguugua

SEQ ID NO: 38484 - RNA, 24 nt, Artificial Sequence
  Synthetic
ugugcagucuuccgggacguugua

SEQ ID NO: 38485 - RNA, 18 nt, Artificial Sequence
  Synthetic
ucuauguucaugguugua

SEQ ID NO: 38486 - RNA, 19 nt, Artificial Sequence
  Synthetic
uucuauguucaugguugua

SEQ ID NO: 38487 - RNA, 20 nt, Artificial Sequence
  Synthetic
cuucuauguucaugguugua

SEQ ID NO: 38488 - RNA, 21 nt, Artificial Sequence
  Synthetic
ucuucuauguucaugguugua

SEQ ID NO: 38489 - RNA, 22 nt, Artificial Sequence
  Synthetic
uucuucuauguucaugguugua

SEQ ID NO: 38490 - RNA, 23 nt, Artificial Sequence
  Synthetic
auucuucuauguucaugguugua

SEQ ID NO: 38491 - RNA, 24 nt, Artificial Sequence
  Synthetic
cauucuucuauguucaugguugua

SEQ ID NO: 38492 - RNA, 19 nt, Artificial Sequence
  Synthetic
agaccugguugguguugua

SEQ ID NO: 38493 - RNA, 21 nt, Artificial Sequence
  Synthetic
ugagaccugguugguguugua

SEQ ID NO: 38494 - RNA, 22 nt, Artificial Sequence
  Synthetic
augagaccugguugguguugua

SEQ ID NO: 38495 - RNA, 23 nt, Artificial Sequence
  Synthetic
uaugagaccugguugguguugua

SEQ ID NO: 38496 - RNA, 18 nt, Artificial Sequence
  Synthetic
uuaaguaggauuguugua

SEQ ID NO: 38497 - RNA, 21 nt, Artificial Sequence
  Synthetic
agguuaaguaggauuguugua

SEQ ID NO: 38498 - RNA, 22 nt, Artificial Sequence
  Synthetic
aagguuaaguaggauuguugua

SEQ ID NO: 38499 - RNA, 23 nt, Artificial Sequence
  Synthetic
aaagguuaaguaggauuguugua

SEQ ID NO: 38500 - RNA, 19 nt, Artificial Sequence
  Synthetic
uguguuuucucuuguugua

SEQ ID NO: 38501 - RNA, 20 nt, Artificial Sequence
  Synthetic
uuguguuuucucuuguugua

SEQ ID NO: 38502 - RNA, 21 nt, Artificial Sequence
  Synthetic
uuuguguuuucucuuguugua

SEQ ID NO: 38503 - RNA, 22 nt, Artificial Sequence
  Synthetic
cuuuguguuuucucuuguugua

SEQ ID NO: 38504 - RNA, 23 nt, Artificial Sequence
  Synthetic
acuuuguguuuucucuuguugua

SEQ ID NO: 38505 - RNA, 24 nt, Artificial Sequence
  Synthetic
uacuuuguguuuucucuuguugua

SEQ ID NO: 38506 - RNA, 18 nt, Artificial Sequence
  Synthetic
ugguuauaaauauuugua

SEQ ID NO: 38507 - RNA, 20 nt, Artificial Sequence
  Synthetic
agugguuauaaauauuugua

SEQ ID NO: 38508 - RNA, 21 nt, Artificial Sequence
  Synthetic
uagugguuauaaauauuugua

SEQ ID NO: 38509 - RNA, 22 nt, Artificial Sequence
  Synthetic
auagugguuauaaauauuugua

SEQ ID NO: 38510 - RNA, 23 nt, Artificial Sequence
  Synthetic
cauagugguuauaaauauuugua

SEQ ID NO: 38511 - RNA, 24 nt, Artificial Sequence
  Synthetic
ucauagugguuauaaauauuugua

SEQ ID NO: 38512 - RNA, 18 nt, Artificial Sequence
  Synthetic
uauuugccauuauuugua

SEQ ID NO: 38513 - RNA, 19 nt, Artificial Sequence
  Synthetic
uuauuugccauuauuugua

SEQ ID NO: 38514 - RNA, 20 nt, Artificial Sequence
  Synthetic
cuuauuugccauuauuugua

SEQ ID NO: 38515 - RNA, 21 nt, Artificial Sequence
  Synthetic
acuuauuugccauuauuugua

SEQ ID NO: 38516 - RNA, 22 nt, Artificial Sequence
  Synthetic
aacuuauuugccauuauuugua

SEQ ID NO: 38517 - RNA, 23 nt, Artificial Sequence
  Synthetic
aaacuuauuugccauuauuugua

SEQ ID NO: 38518 - RNA, 24 nt, Artificial Sequence
  Synthetic
uaaacuuauuugccauuauuugua

SEQ ID NO: 38519 - RNA, 18 nt, Artificial Sequence
  Synthetic
auuuaauuguuguuugua

SEQ ID NO: 38520 - RNA, 20 nt, Artificial Sequence
  Synthetic
ugauuuaauuguuguuugua

SEQ ID NO: 38521 - RNA, 21 nt, Artificial Sequence
  Synthetic
uugauuuaauuguuguuugua

SEQ ID NO: 38522 - RNA, 22 nt, Artificial Sequence
  Synthetic
cuugauuuaauuguuguuugua

SEQ ID NO: 38523 - RNA, 23 nt, Artificial Sequence
  Synthetic
ucuugauuuaauuguuguuugua

SEQ ID NO: 38524 - RNA, 24 nt, Artificial Sequence
  Synthetic
uucuugauuuaauuguuguuugua

SEQ ID NO: 38525 - RNA, 19 nt, Artificial Sequence
  Synthetic
aggauaaauuuauuuugua

SEQ ID NO: 38526 - RNA, 20 nt, Artificial Sequence
  Synthetic
aaggauaaauuuauuuugua

SEQ ID NO: 38527 - RNA, 21 nt, Artificial Sequence
  Synthetic
caaggauaaauuuauuuugua

SEQ ID NO: 38528 - RNA, 22 nt, Artificial Sequence
  Synthetic
acaaggauaaauuuauuuugua

SEQ ID NO: 38529 - RNA, 23 nt, Artificial Sequence
  Synthetic
aacaaggauaaauuuauuuugua

SEQ ID NO: 38530 - RNA, 24 nt, Artificial Sequence
  Synthetic
caacaaggauaaauuuauuuugua

SEQ ID NO: 38531 - RNA, 21 nt, Artificial Sequence
  Synthetic
uuguuuccuaauaaaaaauua

SEQ ID NO: 38532 - RNA, 22 nt, Artificial Sequence
  Synthetic
auuguuuccuaauaaaaaauua

SEQ ID NO: 38533 - RNA, 23 nt, Artificial Sequence
  Synthetic
cauuguuuccuaauaaaaaauua

SEQ ID NO: 38534 - RNA, 24 nt, Artificial Sequence
  Synthetic
ccauuguuuccuaauaaaaaauua

SEQ ID NO: 38535 - RNA, 18 nt, Artificial Sequence
  Synthetic
acuuugaaucuaaaauua

SEQ ID NO: 38536 - RNA, 19 nt, Artificial Sequence
  Synthetic
cacuuugaaucuaaaauua

SEQ ID NO: 38537 - RNA, 20 nt, Artificial Sequence
  Synthetic
ccacuuugaaucuaaaauua

SEQ ID NO: 38538 - RNA, 21 nt, Artificial Sequence
  Synthetic
cccacuuugaaucuaaaauua

SEQ ID NO: 38539 - RNA, 22 nt, Artificial Sequence
  Synthetic
acccacuuugaaucuaaaauua

SEQ ID NO: 38540 - RNA, 24 nt, Artificial Sequence
  Synthetic
ugacccacuuugaaucuaaaauua

SEQ ID NO: 38541 - RNA, 19 nt, Artificial Sequence
  Synthetic
aguacacacaaucaaauua

SEQ ID NO: 38542 - RNA, 20 nt, Artificial Sequence
  Synthetic
uaguacacacaaucaaauua

SEQ ID NO: 38543 - RNA, 22 nt, Artificial Sequence
  Synthetic
aguaguacacacaaucaaauua

SEQ ID NO: 38544 - RNA, 23 nt, Artificial Sequence
  Synthetic
aaguaguacacacaaucaaauua

SEQ ID NO: 38545 - RNA, 24 nt, Artificial Sequence
  Synthetic
aaaguaguacacacaaucaaauua

SEQ ID NO: 38546 - RNA, 18 nt, Artificial Sequence
  Synthetic
ucaauacuuuucaaauua

SEQ ID NO: 38547 - RNA, 19 nt, Artificial Sequence
  Synthetic
uucaauacuuuucaaauua

SEQ ID NO: 38548 - RNA, 20 nt, Artificial Sequence
  Synthetic
auucaauacuuuucaaauua

SEQ ID NO: 38549 - RNA, 21 nt, Artificial Sequence
  Synthetic
aauucaauacuuuucaaauua

SEQ ID NO: 38550 - RNA, 22 nt, Artificial Sequence
  Synthetic
aaauucaauacuuuucaaauua

SEQ ID NO: 38551 - RNA, 24 nt, Artificial Sequence
  Synthetic
agaaauucaauacuuuucaaauua

SEQ ID NO: 38552 - RNA, 18 nt, Artificial Sequence
  Synthetic
uaagaauuuuagaaauua

SEQ ID NO: 38553 - RNA, 19 nt, Artificial Sequence
  Synthetic
cuaagaauuuuagaaauua

SEQ ID NO: 38554 - RNA, 20 nt, Artificial Sequence
  Synthetic
ucuaagaauuuuagaaauua

SEQ ID NO: 38555 - RNA, 21 nt, Artificial Sequence
  Synthetic
cucuaagaauuuuagaaauua

SEQ ID NO: 38556 - RNA, 22 nt, Artificial Sequence
  Synthetic
acucuaagaauuuuagaaauua

SEQ ID NO: 38557 - RNA, 23 nt, Artificial Sequence
  Synthetic
cacucuaagaauuuuagaaauua

SEQ ID NO: 38558 - RNA, 24 nt, Artificial Sequence
  Synthetic
acacucuaagaauuuuagaaauua

SEQ ID NO: 38559 - RNA, 18 nt, Artificial Sequence
  Synthetic
ccuucaguguggaaauua

SEQ ID NO: 38560 - RNA, 19 nt, Artificial Sequence
  Synthetic
cccuucaguguggaaauua

SEQ ID NO: 38561 - RNA, 20 nt, Artificial Sequence
  Synthetic
acccuucaguguggaaauua

SEQ ID NO: 38562 - RNA, 21 nt, Artificial Sequence
  Synthetic
uacccuucaguguggaaauua

SEQ ID NO: 38563 - RNA, 22 nt, Artificial Sequence
  Synthetic
auacccuucaguguggaaauua

SEQ ID NO: 38564 - RNA, 23 nt, Artificial Sequence
  Synthetic
aauacccuucaguguggaaauua

SEQ ID NO: 38565 - RNA, 24 nt, Artificial Sequence
  Synthetic
aaauacccuucaguguggaaauua

SEQ ID NO: 38566 - RNA, 21 nt, Artificial Sequence
  Synthetic
auacugcaaacaaauaaauua

SEQ ID NO: 38567 - RNA, 22 nt, Artificial Sequence
  Synthetic
uauacugcaaacaaauaaauua

SEQ ID NO: 38568 - RNA, 23 nt, Artificial Sequence
  Synthetic
uuauacugcaaacaaauaaauua

SEQ ID NO: 38569 - RNA, 24 nt, Artificial Sequence
  Synthetic
cuuauacugcaaacaaauaaauua

SEQ ID NO: 38570 - RNA, 18 nt, Artificial Sequence
  Synthetic
augcacauuuauaaauua

SEQ ID NO: 38571 - RNA, 19 nt, Artificial Sequence
  Synthetic
aaugcacauuuauaaauua

SEQ ID NO: 38572 - RNA, 24 nt, Artificial Sequence
  Synthetic
uggggaaugcacauuuauaaauua

SEQ ID NO: 38573 - RNA, 18 nt, Artificial Sequence
  Synthetic
agagaagaggcuaaauua

SEQ ID NO: 38574 - RNA, 20 nt, Artificial Sequence
  Synthetic
agagagaagaggcuaaauua

SEQ ID NO: 38575 - RNA, 21 nt, Artificial Sequence
  Synthetic
uagagagaagaggcuaaauua

SEQ ID NO: 38576 - RNA, 22 nt, Artificial Sequence
  Synthetic
cuagagagaagaggcuaaauua

SEQ ID NO: 38577 - RNA, 18 nt, Artificial Sequence
  Synthetic
uccaauuuggguaaauua

SEQ ID NO: 38578 - RNA, 19 nt, Artificial Sequence
  Synthetic
uuccaauuuggguaaauua

SEQ ID NO: 38579 - RNA, 20 nt, Artificial Sequence
  Synthetic
uuuccaauuuggguaaauua

SEQ ID NO: 38580 - RNA, 21 nt, Artificial Sequence
  Synthetic
uuuuccaauuuggguaaauua

SEQ ID NO: 38581 - RNA, 22 nt, Artificial Sequence
  Synthetic
auuuuccaauuuggguaaauua

SEQ ID NO: 38582 - RNA, 23 nt, Artificial Sequence
  Synthetic
cauuuuccaauuuggguaaauua

SEQ ID NO: 38583 - RNA, 24 nt, Artificial Sequence
  Synthetic
ccauuuuccaauuuggguaaauua

SEQ ID NO: 38584 - RNA, 18 nt, Artificial Sequence
  Synthetic
uuaauaagauaacaauua

SEQ ID NO: 38585 - RNA, 19 nt, Artificial Sequence
  Synthetic
auuaauaagauaacaauua

SEQ ID NO: 38586 - RNA, 21 nt, Artificial Sequence
  Synthetic
agauuaauaagauaacaauua

SEQ ID NO: 38587 - RNA, 23 nt, Artificial Sequence
  Synthetic
ugagauuaauaagauaacaauua

SEQ ID NO: 38588 - RNA, 24 nt, Artificial Sequence
  Synthetic
cugagauuaauaagauaacaauua

SEQ ID NO: 38589 - RNA, 18 nt, Artificial Sequence
  Synthetic
uucucauguggacaauua

SEQ ID NO: 38590 - RNA, 19 nt, Artificial Sequence
  Synthetic
auucucauguggacaauua

SEQ ID NO: 38591 - RNA, 20 nt, Artificial Sequence
  Synthetic
uauucucauguggacaauua

SEQ ID NO: 38592 - RNA, 21 nt, Artificial Sequence
  Synthetic
auauucucauguggacaauua

SEQ ID NO: 38593 - RNA, 22 nt, Artificial Sequence
  Synthetic
uauauucucauguggacaauua

SEQ ID NO: 38594 - RNA, 23 nt, Artificial Sequence
  Synthetic
uuauauucucauguggacaauua

SEQ ID NO: 38595 - RNA, 24 nt, Artificial Sequence
  Synthetic
uuuauauucucauguggacaauua

SEQ ID NO: 38596 - RNA, 18 nt, Artificial Sequence
  Synthetic
cauaauacauugcaauua

SEQ ID NO: 38597 - RNA, 19 nt, Artificial Sequence
  Synthetic
ucauaauacauugcaauua

SEQ ID NO: 38598 - RNA, 20 nt, Artificial Sequence
  Synthetic
aucauaauacauugcaauua

SEQ ID NO: 38599 - RNA, 21 nt, Artificial Sequence
  Synthetic
aaucauaauacauugcaauua

SEQ ID NO: 38600 - RNA, 22 nt, Artificial Sequence
  Synthetic
aaaucauaauacauugcaauua

SEQ ID NO: 38601 - RNA, 23 nt, Artificial Sequence
  Synthetic
caaaucauaauacauugcaauua

SEQ ID NO: 38602 - RNA, 24 nt, Artificial Sequence
  Synthetic
ccaaaucauaauacauugcaauua

SEQ ID NO: 38603 - RNA, 18 nt, Artificial Sequence
  Synthetic
cugacucguuuucaauua

SEQ ID NO: 38604 - RNA, 19 nt, Artificial Sequence
  Synthetic
acugacucguuuucaauua

SEQ ID NO: 38605 - RNA, 21 nt, Artificial Sequence
  Synthetic
agacugacucguuuucaauua

SEQ ID NO: 38606 - RNA, 22 nt, Artificial Sequence
  Synthetic
uagacugacucguuuucaauua

SEQ ID NO: 38607 - RNA, 23 nt, Artificial Sequence
  Synthetic
cuagacugacucguuuucaauua

SEQ ID NO: 38608 - RNA, 24 nt, Artificial Sequence
  Synthetic
acuagacugacucguuuucaauua

SEQ ID NO: 38609 - RNA, 21 nt, Artificial Sequence
  Synthetic
cgucuugaagugacagaauua

SEQ ID NO: 38610 - RNA, 22 nt, Artificial Sequence
  Synthetic
ccgucuugaagugacagaauua

SEQ ID NO: 38611 - RNA, 24 nt, Artificial Sequence
  Synthetic
agccgucuugaagugacagaauua

SEQ ID NO: 38612 - RNA, 18 nt, Artificial Sequence
  Synthetic
ugucugucagcagaauua

SEQ ID NO: 38613 - RNA, 20 nt, Artificial Sequence
  Synthetic
ugugucugucagcagaauua

SEQ ID NO: 38614 - RNA, 21 nt, Artificial Sequence
  Synthetic
augugucugucagcagaauua

SEQ ID NO: 38615 - RNA, 22 nt, Artificial Sequence
  Synthetic
caugugucugucagcagaauua

SEQ ID NO: 38616 - RNA, 24 nt, Artificial Sequence
  Synthetic
agcaugugucugucagcagaauua

SEQ ID NO: 38617 - RNA, 18 nt, Artificial Sequence
  Synthetic
uauaugaaaagagaauua

SEQ ID NO: 38618 - RNA, 21 nt, Artificial Sequence
  Synthetic
ugguauaugaaaagagaauua

SEQ ID NO: 38619 - RNA, 23 nt, Artificial Sequence
  Synthetic
agugguauaugaaaagagaauua

SEQ ID NO: 38620 - RNA, 18 nt, Artificial Sequence
  Synthetic
agaaugauuugagaauua

SEQ ID NO: 38621 - RNA, 19 nt, Artificial Sequence
  Synthetic
aagaaugauuugagaauua

SEQ ID NO: 38622 - RNA, 20 nt, Artificial Sequence
  Synthetic
caagaaugauuugagaauua

SEQ ID NO: 38623 - RNA, 22 nt, Artificial Sequence
  Synthetic
ugcaagaaugauuugagaauua

SEQ ID NO: 38624 - RNA, 23 nt, Artificial Sequence
  Synthetic
augcaagaaugauuugagaauua

SEQ ID NO: 38625 - RNA, 24 nt, Artificial Sequence
  Synthetic
aaugcaagaaugauuugagaauua

SEQ ID NO: 38626 - RNA, 18 nt, Artificial Sequence
  Synthetic
ucuuuucuuauagaauua

SEQ ID NO: 38627 - RNA, 19 nt, Artificial Sequence
  Synthetic
aucuuuucuuauagaauua

SEQ ID NO: 38628 - RNA, 20 nt, Artificial Sequence
  Synthetic
uaucuuuucuuauagaauua

SEQ ID NO: 38629 - RNA, 21 nt, Artificial Sequence
  Synthetic
uuaucuuuucuuauagaauua

SEQ ID NO: 38630 - RNA, 22 nt, Artificial Sequence
  Synthetic
cuuaucuuuucuuauagaauua

SEQ ID NO: 38631 - RNA, 23 nt, Artificial Sequence
  Synthetic
acuuaucuuuucuuauagaauua

SEQ ID NO: 38632 - RNA, 24 nt, Artificial Sequence
  Synthetic
aacuuaucuuuucuuauagaauua

SEQ ID NO: 38633 - RNA, 18 nt, Artificial Sequence
  Synthetic
aaguaaaauaaugaauua

SEQ ID NO: 38634 - RNA, 19 nt, Artificial Sequence
  Synthetic
uaaguaaaauaaugaauua

SEQ ID NO: 38635 - RNA, 21 nt, Artificial Sequence
  Synthetic
uguaaguaaaauaaugaauua

SEQ ID NO: 38636 - RNA, 22 nt, Artificial Sequence
  Synthetic
uuguaaguaaaauaaugaauua

SEQ ID NO: 38637 - RNA, 23 nt, Artificial Sequence
  Synthetic
uuuguaaguaaaauaaugaauua

SEQ ID NO: 38638 - RNA, 24 nt, Artificial Sequence
  Synthetic
uuuuguaaguaaaauaaugaauua

SEQ ID NO: 38639 - RNA, 21 nt, Artificial Sequence
  Synthetic
aauggaugcauggaugaauua

SEQ ID NO: 38640 - RNA, 24 nt, Artificial Sequence
  Synthetic
cggaauggaugcauggaugaauua

SEQ ID NO: 38641 - RNA, 18 nt, Artificial Sequence
  Synthetic
aggggguacuaugaauua

SEQ ID NO: 38642 - RNA, 19 nt, Artificial Sequence
  Synthetic
caggggguacuaugaauua

SEQ ID NO: 38643 - RNA, 20 nt, Artificial Sequence
  Synthetic
ucaggggguacuaugaauua

SEQ ID NO: 38644 - RNA, 18 nt, Artificial Sequence
  Synthetic
cucagagucccugaauua

SEQ ID NO: 38645 - RNA, 19 nt, Artificial Sequence
  Synthetic
acucagagucccugaauua

SEQ ID NO: 38646 - RNA, 22 nt, Artificial Sequence
  Synthetic
aggacucagagucccugaauua

SEQ ID NO: 38647 - RNA, 23 nt, Artificial Sequence
  Synthetic
aaggacucagagucccugaauua

SEQ ID NO: 38648 - RNA, 21 nt, Artificial Sequence
  Synthetic
uuuuaaacauuuggugaauua

SEQ ID NO: 38649 - RNA, 22 nt, Artificial Sequence
  Synthetic
auuuuaaacauuuggugaauua

SEQ ID NO: 38650 - RNA, 23 nt, Artificial Sequence
  Synthetic
cauuuuaaacauuuggugaauua

SEQ ID NO: 38651 - RNA, 19 nt, Artificial Sequence
  Synthetic
ugguuagcucugugaauua

SEQ ID NO: 38652 - RNA, 20 nt, Artificial Sequence
  Synthetic
uugguuagcucugugaauua

SEQ ID NO: 38653 - RNA, 21 nt, Artificial Sequence
  Synthetic
uuugguuagcucugugaauua

SEQ ID NO: 38654 - RNA, 22 nt, Artificial Sequence
  Synthetic
cuuugguuagcucugugaauua

SEQ ID NO: 38655 - RNA, 23 nt, Artificial Sequence
  Synthetic
ccuuugguuagcucugugaauua

SEQ ID NO: 38656 - RNA, 24 nt, Artificial Sequence
  Synthetic
accuuugguuagcucugugaauua

SEQ ID NO: 38657 - RNA, 18 nt, Artificial Sequence
  Synthetic
uuaauacagauugaauua

SEQ ID NO: 38658 - RNA, 19 nt, Artificial Sequence
  Synthetic
auuaauacagauugaauua

SEQ ID NO: 38659 - RNA, 20 nt, Artificial Sequence
  Synthetic
uauuaauacagauugaauua

SEQ ID NO: 38660 - RNA, 22 nt, Artificial Sequence
  Synthetic
ugaauguacaucuguugaauua

SEQ ID NO: 38661 - RNA, 23 nt, Artificial Sequence
  Synthetic
cugaauguacaucuguugaauua

SEQ ID NO: 38662 - RNA, 24 nt, Artificial Sequence
  Synthetic
acugaauguacaucuguugaauua

SEQ ID NO: 38663 - RNA, 18 nt, Artificial Sequence
  Synthetic
acaaucaauuuugaauua

SEQ ID NO: 38664 - RNA, 19 nt, Artificial Sequence
  Synthetic
cacaaucaauuuugaauua

SEQ ID NO: 38665 - RNA, 21 nt, Artificial Sequence
  Synthetic
agcacaaucaauuuugaauua

SEQ ID NO: 38666 - RNA, 23 nt, Artificial Sequence
  Synthetic
agagcacaaucaauuuugaauua

SEQ ID NO: 38667 - RNA, 18 nt, Artificial Sequence
  Synthetic
uaaccaacaucauaauua

SEQ ID NO: 38668 - RNA, 19 nt, Artificial Sequence
  Synthetic
cuaaccaacaucauaauua

SEQ ID NO: 38669 - RNA, 20 nt, Artificial Sequence
  Synthetic
acuaaccaacaucauaauua

SEQ ID NO: 38670 - RNA, 18 nt, Artificial Sequence
  Synthetic
cuguagcuucccuaauua

SEQ ID NO: 38671 - RNA, 19 nt, Artificial Sequence
  Synthetic
ucuguagcuucccuaauua

SEQ ID NO: 38672 - RNA, 20 nt, Artificial Sequence
  Synthetic
uucuguagcuucccuaauua

SEQ ID NO: 38673 - RNA, 21 nt, Artificial Sequence
  Synthetic
auucuguagcuucccuaauua

SEQ ID NO: 38674 - RNA, 22 nt, Artificial Sequence
  Synthetic
cauucuguagcuucccuaauua

SEQ ID NO: 38675 - RNA, 18 nt, Artificial Sequence
  Synthetic
uauauguuuuucuaauua

SEQ ID NO: 38676 - RNA, 19 nt, Artificial Sequence
  Synthetic
auauauguuuuucuaauua

SEQ ID NO: 38677 - RNA, 22 nt, Artificial Sequence
  Synthetic
uggauauauguuuuucuaauua

SEQ ID NO: 38678 - RNA, 23 nt, Artificial Sequence
  Synthetic
cuggauauauguuuuucuaauua

SEQ ID NO: 38679 - RNA, 24 nt, Artificial Sequence
  Synthetic
ccuggauauauguuuuucuaauua

SEQ ID NO: 38680 - RNA, 21 nt, Artificial Sequence
  Synthetic
uagaugaaaaugaaguaauua

SEQ ID NO: 38681 - RNA, 23 nt, Artificial Sequence
  Synthetic
uguagaugaaaaugaaguaauua

SEQ ID NO: 38682 - RNA, 24 nt, Artificial Sequence
  Synthetic
auguagaugaaaaugaaguaauua

SEQ ID NO: 38683 - RNA, 18 nt, Artificial Sequence
  Synthetic
ugguaguugauaacauua

SEQ ID NO: 38684 - RNA, 19 nt, Artificial Sequence
  Synthetic
cugguaguugauaacauua

SEQ ID NO: 38685 - RNA, 20 nt, Artificial Sequence
  Synthetic
ucugguaguugauaacauua

SEQ ID NO: 38686 - RNA, 21 nt, Artificial Sequence
  Synthetic
cucugguaguugauaacauua

SEQ ID NO: 38687 - RNA, 22 nt, Artificial Sequence
  Synthetic
acucugguaguugauaacauua

SEQ ID NO: 38688 - RNA, 23 nt, Artificial Sequence
  Synthetic
uacucugguaguugauaacauua

SEQ ID NO: 38689 - RNA, 18 nt, Artificial Sequence
  Synthetic
uaaaggaggaucacauua

SEQ ID NO: 38690 - RNA, 19 nt, Artificial Sequence
  Synthetic
auaaaggaggaucacauua

SEQ ID NO: 38691 - RNA, 20 nt, Artificial Sequence
  Synthetic
uauaaaggaggaucacauua

SEQ ID NO: 38692 - RNA, 21 nt, Artificial Sequence
  Synthetic
uuauaaaggaggaucacauua

SEQ ID NO: 38693 - RNA, 22 nt, Artificial Sequence
  Synthetic
uuuauaaaggaggaucacauua

SEQ ID NO: 38694 - RNA, 23 nt, Artificial Sequence
  Synthetic
uuuuauaaaggaggaucacauua

SEQ ID NO: 38695 - RNA, 24 nt, Artificial Sequence
  Synthetic
auuuuauaaaggaggaucacauua

SEQ ID NO: 38696 - RNA, 18 nt, Artificial Sequence
  Synthetic
aaacugagcuagacauua

SEQ ID NO: 38697 - RNA, 20 nt, Artificial Sequence
  Synthetic
ugaaacugagcuagacauua

SEQ ID NO: 38698 - RNA, 21 nt, Artificial Sequence
  Synthetic
uugaaacugagcuagacauua

SEQ ID NO: 38699 - RNA, 22 nt, Artificial Sequence
  Synthetic
uuugaaacugagcuagacauua

SEQ ID NO: 38700 - RNA, 23 nt, Artificial Sequence
  Synthetic
uuuugaaacugagcuagacauua

SEQ ID NO: 38701 - RNA, 24 nt, Artificial Sequence
  Synthetic
auuuugaaacugagcuagacauua

SEQ ID NO: 38702 - RNA, 18 nt, Artificial Sequence
  Synthetic
uucagaauacauacauua

SEQ ID NO: 38703 - RNA, 20 nt, Artificial Sequence
  Synthetic
cguucagaauacauacauua

SEQ ID NO: 38704 - RNA, 22 nt, Artificial Sequence
  Synthetic
agcguucagaauacauacauua

SEQ ID NO: 38705 - RNA, 18 nt, Artificial Sequence
  Synthetic
ucucugugcuauacauua

SEQ ID NO: 38706 - RNA, 20 nt, Artificial Sequence
  Synthetic
ugucucugugcuauacauua

SEQ ID NO: 38707 - RNA, 18 nt, Artificial Sequence
  Synthetic
cuauccuguaagccauua

SEQ ID NO: 38708 - RNA, 19 nt, Artificial Sequence
  Synthetic
acuauccuguaagccauua

SEQ ID NO: 38709 - RNA, 20 nt, Artificial Sequence
  Synthetic
uacuauccuguaagccauua

SEQ ID NO: 38710 - RNA, 21 nt, Artificial Sequence
  Synthetic
uuacuauccuguaagccauua

SEQ ID NO: 38711 - RNA, 22 nt, Artificial Sequence
  Synthetic
uuuacuauccuguaagccauua

SEQ ID NO: 38712 - RNA, 23 nt, Artificial Sequence
  Synthetic
cuuuacuauccuguaagccauua

SEQ ID NO: 38713 - RNA, 24 nt, Artificial Sequence
  Synthetic
ucuuuacuauccuguaagccauua

SEQ ID NO: 38714 - RNA, 21 nt, Artificial Sequence
  Synthetic
aaauauuuaaugaaagcauua

SEQ ID NO: 38715 - RNA, 22 nt, Artificial Sequence
  Synthetic
uaaauauuuaaugaaagcauua

SEQ ID NO: 38716 - RNA, 23 nt, Artificial Sequence
  Synthetic
auaaauauuuaaugaaagcauua

SEQ ID NO: 38717 - RNA, 24 nt, Artificial Sequence
  Synthetic
aauaaauauuuaaugaaagcauua

SEQ ID NO: 38718 - RNA, 18 nt, Artificial Sequence
  Synthetic
aacuuaagccaggcauua

SEQ ID NO: 38719 - RNA, 19 nt, Artificial Sequence
  Synthetic
aaacuuaagccaggcauua

SEQ ID NO: 38720 - RNA, 20 nt, Artificial Sequence
  Synthetic
aaaacuuaagccaggcauua

SEQ ID NO: 38721 - RNA, 21 nt, Artificial Sequence
  Synthetic
aaaaacuuaagccaggcauua

SEQ ID NO: 38722 - RNA, 24 nt, Artificial Sequence
  Synthetic
aggaaaaacuuaagccaggcauua

SEQ ID NO: 38723 - RNA, 18 nt, Artificial Sequence
  Synthetic
uucuacuaauaugcauua

SEQ ID NO: 38724 - RNA, 19 nt, Artificial Sequence
  Synthetic
auucuacuaauaugcauua

SEQ ID NO: 38725 - RNA, 20 nt, Artificial Sequence
  Synthetic
uauucuacuaauaugcauua

SEQ ID NO: 38726 - RNA, 21 nt, Artificial Sequence
  Synthetic
uuauucuacuaauaugcauua

SEQ ID NO: 38727 - RNA, 22 nt, Artificial Sequence
  Synthetic
auuauucuacuaauaugcauua

SEQ ID NO: 38728 - RNA, 23 nt, Artificial Sequence
  Synthetic
aauuauucuacuaauaugcauua

SEQ ID NO: 38729 - RNA, 24 nt, Artificial Sequence
  Synthetic
caauuauucuacuaauaugcauua

SEQ ID NO: 38730 - RNA, 18 nt, Artificial Sequence
  Synthetic
cuccugagaaacucauua

SEQ ID NO: 38731 - RNA, 19 nt, Artificial Sequence
  Synthetic
ucuccugagaaacucauua

SEQ ID NO: 38732 - RNA, 20 nt, Artificial Sequence
  Synthetic
uucuccugagaaacucauua

SEQ ID NO: 38733 - RNA, 21 nt, Artificial Sequence
  Synthetic
auucuccugagaaacucauua

SEQ ID NO: 38734 - RNA, 22 nt, Artificial Sequence
  Synthetic
uauucuccugagaaacucauua

SEQ ID NO: 38735 - RNA, 23 nt, Artificial Sequence
  Synthetic
uuauucuccugagaaacucauua

SEQ ID NO: 38736 - RNA, 24 nt, Artificial Sequence
  Synthetic
auuauucuccugagaaacucauua

SEQ ID NO: 38737 - RNA, 19 nt, Artificial Sequence
  Synthetic
agguaauaagugcucauua

SEQ ID NO: 38738 - RNA, 20 nt, Artificial Sequence
  Synthetic
aagguaauaagugcucauua

SEQ ID NO: 38739 - RNA, 18 nt, Artificial Sequence
  Synthetic
agaagucugaucucauua

SEQ ID NO: 38740 - RNA, 20 nt, Artificial Sequence
  Synthetic
agagaagucugaucucauua

SEQ ID NO: 38741 - RNA, 21 nt, Artificial Sequence
  Synthetic
cagagaagucugaucucauua

SEQ ID NO: 38742 - RNA, 22 nt, Artificial Sequence
  Synthetic
ccagagaagucugaucucauua

SEQ ID NO: 38743 - RNA, 23 nt, Artificial Sequence
  Synthetic
cccagagaagucugaucucauua

SEQ ID NO: 38744 - RNA, 24 nt, Artificial Sequence
  Synthetic
acccagagaagucugaucucauua

SEQ ID NO: 38745 - RNA, 18 nt, Artificial Sequence
  Synthetic
agauuacccuucucauua

SEQ ID NO: 38746 - RNA, 20 nt, Artificial Sequence
  Synthetic
ugagauuacccuucucauua

SEQ ID NO: 38747 - RNA, 21 nt, Artificial Sequence
  Synthetic
cugagauuacccuucucauua

SEQ ID NO: 38748 - RNA, 23 nt, Artificial Sequence
  Synthetic
ugcugagauuacccuucucauua

SEQ ID NO: 38749 - RNA, 24 nt, Artificial Sequence
  Synthetic
augcugagauuacccuucucauua

SEQ ID NO: 38750 - RNA, 21 nt, Artificial Sequence
  Synthetic
ccuuuaugcuuuuauucauua

SEQ ID NO: 38751 - RNA, 22 nt, Artificial Sequence
  Synthetic
uccuuuaugcuuuuauucauua

SEQ ID NO: 38752 - RNA, 23 nt, Artificial Sequence
  Synthetic
auccuuuaugcuuuuauucauua

SEQ ID NO: 38753 - RNA, 18 nt, Artificial Sequence
  Synthetic
uauucuggaauaagauua

SEQ ID NO: 38754 - RNA, 20 nt, Artificial Sequence
  Synthetic
aguauucuggaauaagauua

SEQ ID NO: 38755 - RNA, 21 nt, Artificial Sequence
  Synthetic
aaguauucuggaauaagauua

SEQ ID NO: 38756 - RNA, 22 nt, Artificial Sequence
  Synthetic
aaaguauucuggaauaagauua

SEQ ID NO: 38757 - RNA, 23 nt, Artificial Sequence
  Synthetic
aaaaguauucuggaauaagauua

SEQ ID NO: 38758 - RNA, 24 nt, Artificial Sequence
  Synthetic
aaaaaguauucuggaauaagauua

SEQ ID NO: 38759 - RNA, 19 nt, Artificial Sequence
  Synthetic
aguaccaaaagugagauua

SEQ ID NO: 38760 - RNA, 20 nt, Artificial Sequence
  Synthetic
aaguaccaaaagugagauua

SEQ ID NO: 38761 - RNA, 21 nt, Artificial Sequence
  Synthetic
aaaguaccaaaagugagauua

SEQ ID NO: 38762 - RNA, 22 nt, Artificial Sequence
  Synthetic
uaaaguaccaaaagugagauua

SEQ ID NO: 38763 - RNA, 23 nt, Artificial Sequence
  Synthetic
auaaaguaccaaaagugagauua

SEQ ID NO: 38764 - RNA, 19 nt, Artificial Sequence
  Synthetic
uguuuuagaaaaccgauua

SEQ ID NO: 38765 - RNA, 21 nt, Artificial Sequence
  Synthetic
uguguuuuagaaaaccgauua

SEQ ID NO: 38766 - RNA, 22 nt, Artificial Sequence
  Synthetic
uuguguuuuagaaaaccgauua

SEQ ID NO: 38767 - RNA, 23 nt, Artificial Sequence
  Synthetic
uuuguguuuuagaaaaccgauua

SEQ ID NO: 38768 - RNA, 24 nt, Artificial Sequence
  Synthetic
uuuuguguuuuagaaaaccgauua

SEQ ID NO: 38769 - RNA, 18 nt, Artificial Sequence
  Synthetic
aacacuguucuaggauua

SEQ ID NO: 38770 - RNA, 19 nt, Artificial Sequence
  Synthetic
aaacacuguucuaggauua

SEQ ID NO: 38771 - RNA, 21 nt, Artificial Sequence
  Synthetic
agaaacacuguucuaggauua

SEQ ID NO: 38772 - RNA, 23 nt, Artificial Sequence
  Synthetic
ugagaaacacuguucuaggauua

SEQ ID NO: 38773 - RNA, 24 nt, Artificial Sequence
  Synthetic
uugagaaacacuguucuaggauua

SEQ ID NO: 38774 - RNA, 18 nt, Artificial Sequence
  Synthetic
agagggauagauggauua

SEQ ID NO: 38775 - RNA, 19 nt, Artificial Sequence
  Synthetic
cagagggauagauggauua

SEQ ID NO: 38776 - RNA, 20 nt, Artificial Sequence
  Synthetic
acagagggauagauggauua

SEQ ID NO: 38777 - RNA, 21 nt, Artificial Sequence
  Synthetic
cacagagggauagauggauua

SEQ ID NO: 38778 - RNA, 23 nt, Artificial Sequence
  Synthetic
ugcacagagggauagauggauua

SEQ ID NO: 38779 - RNA, 24 nt, Artificial Sequence
  Synthetic
augcacagagggauagauggauua

SEQ ID NO: 38780 - RNA, 18 nt, Artificial Sequence
  Synthetic
acaguuggcacuggauua

SEQ ID NO: 38781 - RNA, 19 nt, Artificial Sequence
  Synthetic
aacaguuggcacuggauua

SEQ ID NO: 38782 - RNA, 20 nt, Artificial Sequence
  Synthetic
uaacaguuggcacuggauua

SEQ ID NO: 38783 - RNA, 21 nt, Artificial Sequence
  Synthetic
auaacaguuggcacuggauua

SEQ ID NO: 38784 - RNA, 22 nt, Artificial Sequence
  Synthetic
cauaacaguuggcacuggauua

SEQ ID NO: 38785 - RNA, 23 nt, Artificial Sequence
  Synthetic
ucauaacaguuggcacuggauua

SEQ ID NO: 38786 - RNA, 18 nt, Artificial Sequence
  Synthetic
uuauuaccuuuaugauua

SEQ ID NO: 38787 - RNA, 19 nt, Artificial Sequence
  Synthetic
auuauuaccuuuaugauua

SEQ ID NO: 38788 - RNA, 21 nt, Artificial Sequence
  Synthetic
agauuauuaccuuuaugauua

SEQ ID NO: 38789 - RNA, 22 nt, Artificial Sequence
  Synthetic
aagauuauuaccuuuaugauua

SEQ ID NO: 38790 - RNA, 24 nt, Artificial Sequence
  Synthetic
ugaagauuauuaccuuuaugauua

SEQ ID NO: 38791 - RNA, 18 nt, Artificial Sequence
  Synthetic
uaaaaucaaaagugauua

SEQ ID NO: 38792 - RNA, 21 nt, Artificial Sequence
  Synthetic
ugguaaaaucaaaagugauua

SEQ ID NO: 38793 - RNA, 22 nt, Artificial Sequence
  Synthetic
augguaaaaucaaaagugauua

SEQ ID NO: 38794 - RNA, 24 nt, Artificial Sequence
  Synthetic
agaugguaaaaucaaaagugauua

SEQ ID NO: 38795 - RNA, 21 nt, Artificial Sequence
  Synthetic
uaggagaauacaaaaauauua

SEQ ID NO: 38796 - RNA, 23 nt, Artificial Sequence
  Synthetic
aguaggagaauacaaaaauauua

SEQ ID NO: 38797 - RNA, 21 nt, Artificial Sequence
  Synthetic
aaagauaagaaagaaauauua

SEQ ID NO: 38798 - RNA, 22 nt, Artificial Sequence
  Synthetic
aaaagauaagaaagaaauauua

SEQ ID NO: 38799 - RNA, 23 nt, Artificial Sequence
  Synthetic
uaaaagauaagaaagaaauauua

SEQ ID NO: 38800 - RNA, 24 nt, Artificial Sequence
  Synthetic
cuaaaagauaagaaagaaauauua

SEQ ID NO: 38801 - RNA, 21 nt, Artificial Sequence
  Synthetic
caaaauuauauuacaauauua

SEQ ID NO: 38802 - RNA, 23 nt, Artificial Sequence
  Synthetic
ugcaaaauuauauuacaauauua

SEQ ID NO: 38803 - RNA, 24 nt, Artificial Sequence
  Synthetic
augcaaaauuauauuacaauauua

SEQ ID NO: 38804 - RNA, 21 nt, Artificial Sequence
  Synthetic
acucuuuucucaauaauauua

SEQ ID NO: 38805 - RNA, 22 nt, Artificial Sequence
  Synthetic
uacucuuuucucaauaauauua

SEQ ID NO: 38806 - RNA, 23 nt, Artificial Sequence
  Synthetic
auacucuuuucucaauaauauua

SEQ ID NO: 38807 - RNA, 24 nt, Artificial Sequence
  Synthetic
uauacucuuuucucaauaauauua

SEQ ID NO: 38808 - RNA, 21 nt, Artificial Sequence
  Synthetic
uaaauaugcccuuuaauauua

SEQ ID NO: 38809 - RNA, 23 nt, Artificial Sequence
  Synthetic
aguaaauaugcccuuuaauauua

SEQ ID NO: 38810 - RNA, 24 nt, Artificial Sequence
  Synthetic
uaguaaauaugcccuuuaauauua

SEQ ID NO: 38811 - RNA, 18 nt, Artificial Sequence
  Synthetic
agucaaguagugauauua

SEQ ID NO: 38812 - RNA, 19 nt, Artificial Sequence
  Synthetic
aagucaaguagugauauua

SEQ ID NO: 38813 - RNA, 20 nt, Artificial Sequence
  Synthetic
caagucaaguagugauauua

SEQ ID NO: 38814 - RNA, 21 nt, Artificial Sequence
  Synthetic
acaagucaaguagugauauua

SEQ ID NO: 38815 - RNA, 22 nt, Artificial Sequence
  Synthetic
uacaagucaaguagugauauua

SEQ ID NO: 38816 - RNA, 23 nt, Artificial Sequence
  Synthetic
uuacaagucaaguagugauauua

SEQ ID NO: 38817 - RNA, 24 nt, Artificial Sequence
  Synthetic
uuuacaagucaaguagugauauua

SEQ ID NO: 38818 - RNA, 18 nt, Artificial Sequence
  Synthetic
ugcuggagaaauauauua

SEQ ID NO: 38819 - RNA, 20 nt, Artificial Sequence
  Synthetic
ugugcuggagaaauauauua

SEQ ID NO: 38820 - RNA, 21 nt, Artificial Sequence
  Synthetic
cugugcuggagaaauauauua

SEQ ID NO: 38821 - RNA, 22 nt, Artificial Sequence
  Synthetic
acugugcuggagaaauauauua

SEQ ID NO: 38822 - RNA, 23 nt, Artificial Sequence
  Synthetic
aacugugcuggagaaauauauua

SEQ ID NO: 38823 - RNA, 18 nt, Artificial Sequence
  Synthetic
uuaugaguaaauauauua

SEQ ID NO: 38824 - RNA, 19 nt, Artificial Sequence
  Synthetic
auuaugaguaaauauauua

SEQ ID NO: 38825 - RNA, 21 nt, Artificial Sequence
  Synthetic
ugauuaugaguaaauauauua

SEQ ID NO: 38826 - RNA, 22 nt, Artificial Sequence
  Synthetic
augauuaugaguaaauauauua

SEQ ID NO: 38827 - RNA, 24 nt, Artificial Sequence
  Synthetic
agaugauuaugaguaaauauauua

SEQ ID NO: 38828 - RNA, 18 nt, Artificial Sequence
  Synthetic
uuaaggcuuuauauauua

SEQ ID NO: 38829 - RNA, 19 nt, Artificial Sequence
  Synthetic
auuaaggcuuuauauauua

SEQ ID NO: 38830 - RNA, 20 nt, Artificial Sequence
  Synthetic
aauuaaggcuuuauauauua

SEQ ID NO: 38831 - RNA, 21 nt, Artificial Sequence
  Synthetic
uaauuaaggcuuuauauauua

SEQ ID NO: 38832 - RNA, 22 nt, Artificial Sequence
  Synthetic
auaauuaaggcuuuauauauua

SEQ ID NO: 38833 - RNA, 23 nt, Artificial Sequence
  Synthetic
cauaauuaaggcuuuauauauua

SEQ ID NO: 38834 - RNA, 24 nt, Artificial Sequence
  Synthetic
acauaauuaaggcuuuauauauua

SEQ ID NO: 38835 - RNA, 18 nt, Artificial Sequence
  Synthetic
uagucgacaacuauauua

SEQ ID NO: 38836 - RNA, 19 nt, Artificial Sequence
  Synthetic
uuagucgacaacuauauua

SEQ ID NO: 38837 - RNA, 20 nt, Artificial Sequence
  Synthetic
uuuagucgacaacuauauua

SEQ ID NO: 38838 - RNA, 21 nt, Artificial Sequence
  Synthetic
uuuuagucgacaacuauauua

SEQ ID NO: 38839 - RNA, 22 nt, Artificial Sequence
  Synthetic
uuuuuagucgacaacuauauua

SEQ ID NO: 38840 - RNA, 24 nt, Artificial Sequence
  Synthetic
cguuuuuagucgacaacuauauua

SEQ ID NO: 38841 - RNA, 21 nt, Artificial Sequence
  Synthetic
uguuuuaaaauuuuuauauua

SEQ ID NO: 38842 - RNA, 22 nt, Artificial Sequence
  Synthetic
cuguuuuaaaauuuuuauauua

SEQ ID NO: 38843 - RNA, 23 nt, Artificial Sequence
  Synthetic
acuguuuuaaaauuuuuauauua

SEQ ID NO: 38844 - RNA, 24 nt, Artificial Sequence
  Synthetic
uacuguuuuaaaauuuuuauauua

SEQ ID NO: 38845 - RNA, 18 nt, Artificial Sequence
  Synthetic
aauuuuccugaacuauua

SEQ ID NO: 38846 - RNA, 19 nt, Artificial Sequence
  Synthetic
uaauuuuccugaacuauua

SEQ ID NO: 38847 - RNA, 20 nt, Artificial Sequence
  Synthetic
auaauuuuccugaacuauua

SEQ ID NO: 38848 - RNA, 21 nt, Artificial Sequence
  Synthetic
uauaauuuuccugaacuauua

SEQ ID NO: 38849 - RNA, 22 nt, Artificial Sequence
  Synthetic
auauaauuuuccugaacuauua

SEQ ID NO: 38850 - RNA, 24 nt, Artificial Sequence
  Synthetic
ugauauaauuuuccugaacuauua

SEQ ID NO: 38851 - RNA, 18 nt, Artificial Sequence
  Synthetic
ugucauaacagacuauua

SEQ ID NO: 38852 - RNA, 19 nt, Artificial Sequence
  Synthetic
uugucauaacagacuauua

SEQ ID NO: 38853 - RNA, 21 nt, Artificial Sequence
  Synthetic
aguugucauaacagacuauua

SEQ ID NO: 38854 - RNA, 22 nt, Artificial Sequence
  Synthetic
caguugucauaacagacuauua

SEQ ID NO: 38855 - RNA, 24 nt, Artificial Sequence
  Synthetic
agcaguugucauaacagacuauua

SEQ ID NO: 38856 - RNA, 18 nt, Artificial Sequence
  Synthetic
aaaacaaaagaccuauua

SEQ ID NO: 38857 - RNA, 19 nt, Artificial Sequence
  Synthetic
aaaaacaaaagaccuauua

SEQ ID NO: 38858 - RNA, 20 nt, Artificial Sequence
  Synthetic
caaaaacaaaagaccuauua

SEQ ID NO: 38859 - RNA, 21 nt, Artificial Sequence
  Synthetic
acaaaaacaaaagaccuauua

SEQ ID NO: 38860 - RNA, 22 nt, Artificial Sequence
  Synthetic
aacaaaaacaaaagaccuauua

SEQ ID NO: 38861 - RNA, 23 nt, Artificial Sequence
  Synthetic
caacaaaaacaaaagaccuauua

SEQ ID NO: 38862 - RNA, 24 nt, Artificial Sequence
  Synthetic
ccaacaaaaacaaaagaccuauua

SEQ ID NO: 38863 - RNA, 18 nt, Artificial Sequence
  Synthetic
aucaaugaggagcuauua

SEQ ID NO: 38864 - RNA, 19 nt, Artificial Sequence
  Synthetic
caucaaugaggagcuauua

SEQ ID NO: 38865 - RNA, 20 nt, Artificial Sequence
  Synthetic
acaucaaugaggagcuauua

SEQ ID NO: 38866 - RNA, 21 nt, Artificial Sequence
  Synthetic
uacaucaaugaggagcuauua

SEQ ID NO: 38867 - RNA, 22 nt, Artificial Sequence
  Synthetic
auacaucaaugaggagcuauua

SEQ ID NO: 38868 - RNA, 23 nt, Artificial Sequence
  Synthetic
cauacaucaaugaggagcuauua

SEQ ID NO: 38869 - RNA, 24 nt, Artificial Sequence
  Synthetic
acauacaucaaugaggagcuauua

SEQ ID NO: 38870 - RNA, 19 nt, Artificial Sequence
  Synthetic
ugugaucuuaaggcuauua

SEQ ID NO: 38871 - RNA, 20 nt, Artificial Sequence
  Synthetic
uugugaucuuaaggcuauua

SEQ ID NO: 38872 - RNA, 21 nt, Artificial Sequence
  Synthetic
auugugaucuuaaggcuauua

SEQ ID NO: 38873 - RNA, 22 nt, Artificial Sequence
  Synthetic
uauugugaucuuaaggcuauua

SEQ ID NO: 38874 - RNA, 23 nt, Artificial Sequence
  Synthetic
auauugugaucuuaaggcuauua

SEQ ID NO: 38875 - RNA, 24 nt, Artificial Sequence
  Synthetic
uauauugugaucuuaaggcuauua

SEQ ID NO: 38876 - RNA, 18 nt, Artificial Sequence
  Synthetic
ugaaauuacaaucuauua

SEQ ID NO: 38877 - RNA, 19 nt, Artificial Sequence
  Synthetic
uugaaauuacaaucuauua

SEQ ID NO: 38878 - RNA, 21 nt, Artificial Sequence
  Synthetic
cguugaaauuacaaucuauua

SEQ ID NO: 38879 - RNA, 22 nt, Artificial Sequence
  Synthetic
ucguugaaauuacaaucuauua

SEQ ID NO: 38880 - RNA, 23 nt, Artificial Sequence
  Synthetic
aucguugaaauuacaaucuauua

SEQ ID NO: 38881 - RNA, 24 nt, Artificial Sequence
  Synthetic
aaucguugaaauuacaaucuauua

SEQ ID NO: 38882 - RNA, 18 nt, Artificial Sequence
  Synthetic
acauauugucuucuauua

SEQ ID NO: 38883 - RNA, 19 nt, Artificial Sequence
  Synthetic
uacauauugucuucuauua

SEQ ID NO: 38884 - RNA, 20 nt, Artificial Sequence
  Synthetic
uuacauauugucuucuauua

SEQ ID NO: 38885 - RNA, 21 nt, Artificial Sequence
  Synthetic
uuuacauauugucuucuauua

SEQ ID NO: 38886 - RNA, 22 nt, Artificial Sequence
  Synthetic
auuuacauauugucuucuauua

SEQ ID NO: 38887 - RNA, 23 nt, Artificial Sequence
  Synthetic
cauuuacauauugucuucuauua

SEQ ID NO: 38888 - RNA, 24 nt, Artificial Sequence
  Synthetic
ucauuuacauauugucuucuauua

SEQ ID NO: 38889 - RNA, 18 nt, Artificial Sequence
  Synthetic
ucucuuagguuucuauua

SEQ ID NO: 38890 - RNA, 19 nt, Artificial Sequence
  Synthetic
uucucuuagguuucuauua

SEQ ID NO: 38891 - RNA, 20 nt, Artificial Sequence
  Synthetic
uuucucuuagguuucuauua

SEQ ID NO: 38892 - RNA, 21 nt, Artificial Sequence
  Synthetic
auuucucuuagguuucuauua

SEQ ID NO: 38893 - RNA, 22 nt, Artificial Sequence
  Synthetic
aauuucucuuagguuucuauua

SEQ ID NO: 38894 - RNA, 23 nt, Artificial Sequence
  Synthetic
uaauuucucuuagguuucuauua

SEQ ID NO: 38895 - RNA, 24 nt, Artificial Sequence
  Synthetic
cuaauuucucuuagguuucuauua

SEQ ID NO: 38896 - RNA, 18 nt, Artificial Sequence
  Synthetic
aauauacucucaguauua

SEQ ID NO: 38897 - RNA, 19 nt, Artificial Sequence
  Synthetic
uaauauacucucaguauua

SEQ ID NO: 38898 - RNA, 21 nt, Artificial Sequence
  Synthetic
aguaauauacucucaguauua

SEQ ID NO: 38899 - RNA, 22 nt, Artificial Sequence
  Synthetic
aaguaauauacucucaguauua

SEQ ID NO: 38900 - RNA, 23 nt, Artificial Sequence
  Synthetic
uaaguaauauacucucaguauua

SEQ ID NO: 38901 - RNA, 24 nt, Artificial Sequence
  Synthetic
uuaaguaauauacucucaguauua

SEQ ID NO: 38902 - RNA, 19 nt, Artificial Sequence
  Synthetic
agaaagaguuaagguauua

SEQ ID NO: 38903 - RNA, 21 nt, Artificial Sequence
  Synthetic
agagaaagaguuaagguauua

SEQ ID NO: 38904 - RNA, 22 nt, Artificial Sequence
  Synthetic
uagagaaagaguuaagguauua

SEQ ID NO: 38905 - RNA, 23 nt, Artificial Sequence
  Synthetic
uuagagaaagaguuaagguauua

SEQ ID NO: 38906 - RNA, 24 nt, Artificial Sequence
  Synthetic
auuagagaaagaguuaagguauua

SEQ ID NO: 38907 - RNA, 18 nt, Artificial Sequence
  Synthetic
uuggacauauagguauua

SEQ ID NO: 38908 - RNA, 19 nt, Artificial Sequence
  Synthetic
uuuggacauauagguauua

SEQ ID NO: 38909 - RNA, 21 nt, Artificial Sequence
  Synthetic
uguuuggacauauagguauua

SEQ ID NO: 38910 - RNA, 22 nt, Artificial Sequence
  Synthetic
auguuuggacauauagguauua

SEQ ID NO: 38911 - RNA, 23 nt, Artificial Sequence
  Synthetic
aauguuuggacauauagguauua

SEQ ID NO: 38912 - RNA, 24 nt, Artificial Sequence
  Synthetic
aaauguuuggacauauagguauua

SEQ ID NO: 38913 - RNA, 19 nt, Artificial Sequence
  Synthetic
agggagacauuggguauua

SEQ ID NO: 38914 - RNA, 20 nt, Artificial Sequence
  Synthetic
aagggagacauuggguauua

SEQ ID NO: 38915 - RNA, 21 nt, Artificial Sequence
  Synthetic
aaagggagacauuggguauua

SEQ ID NO: 38916 - RNA, 22 nt, Artificial Sequence
  Synthetic
aaaagggagacauuggguauua

SEQ ID NO: 38917 - RNA, 23 nt, Artificial Sequence
  Synthetic
aaaaagggagacauuggguauua

SEQ ID NO: 38918 - RNA, 24 nt, Artificial Sequence
  Synthetic
uaaaaagggagacauuggguauua

SEQ ID NO: 38919 - RNA, 18 nt, Artificial Sequence
  Synthetic
accaaaguccauguauua

SEQ ID NO: 38920 - RNA, 19 nt, Artificial Sequence
  Synthetic
uaccaaaguccauguauua

SEQ ID NO: 38921 - RNA, 20 nt, Artificial Sequence
  Synthetic
auaccaaaguccauguauua

SEQ ID NO: 38922 - RNA, 21 nt, Artificial Sequence
  Synthetic
aauaccaaaguccauguauua

SEQ ID NO: 38923 - RNA, 22 nt, Artificial Sequence
  Synthetic
aaauaccaaaguccauguauua

SEQ ID NO: 38924 - RNA, 23 nt, Artificial Sequence
  Synthetic
uaaauaccaaaguccauguauua

SEQ ID NO: 38925 - RNA, 24 nt, Artificial Sequence
  Synthetic
uuaaauaccaaaguccauguauua

SEQ ID NO: 38926 - RNA, 18 nt, Artificial Sequence
  Synthetic
auuaacggauauguauua

SEQ ID NO: 38927 - RNA, 19 nt, Artificial Sequence
  Synthetic
aauuaacggauauguauua

SEQ ID NO: 38928 - RNA, 20 nt, Artificial Sequence
  Synthetic
aaauuaacggauauguauua

SEQ ID NO: 38929 - RNA, 21 nt, Artificial Sequence
  Synthetic
aaaauuaacggauauguauua

SEQ ID NO: 38930 - RNA, 22 nt, Artificial Sequence
  Synthetic
aaaaauuaacggauauguauua

SEQ ID NO: 38931 - RNA, 23 nt, Artificial Sequence
  Synthetic
aaaaaauuaacggauauguauua

SEQ ID NO: 38932 - RNA, 24 nt, Artificial Sequence
  Synthetic
uaaaaaauuaacggauauguauua

SEQ ID NO: 38933 - RNA, 18 nt, Artificial Sequence
  Synthetic
auaauacuaccuguauua

SEQ ID NO: 38934 - RNA, 19 nt, Artificial Sequence
  Synthetic
aauaauacuaccuguauua

SEQ ID NO: 38935 - RNA, 20 nt, Artificial Sequence
  Synthetic
caauaauacuaccuguauua

SEQ ID NO: 38936 - RNA, 21 nt, Artificial Sequence
  Synthetic
acaauaauacuaccuguauua

SEQ ID NO: 38937 - RNA, 22 nt, Artificial Sequence
  Synthetic
aacaauaauacuaccuguauua

SEQ ID NO: 38938 - RNA, 18 nt, Artificial Sequence
  Synthetic
aucugauugccauuauua

SEQ ID NO: 38939 - RNA, 19 nt, Artificial Sequence
  Synthetic
aaucugauugccauuauua

SEQ ID NO: 38940 - RNA, 20 nt, Artificial Sequence
  Synthetic
aaaucugauugccauuauua

SEQ ID NO: 38941 - RNA, 22 nt, Artificial Sequence
  Synthetic
agaaaucugauugccauuauua

SEQ ID NO: 38942 - RNA, 23 nt, Artificial Sequence
  Synthetic
aagaaaucugauugccauuauua

SEQ ID NO: 38943 - RNA, 24 nt, Artificial Sequence
  Synthetic
caagaaaucugauugccauuauua

SEQ ID NO: 38944 - RNA, 19 nt, Artificial Sequence
  Synthetic
ugaugacauaauauuauua

SEQ ID NO: 38945 - RNA, 20 nt, Artificial Sequence
  Synthetic
cugaugacauaauauuauua

SEQ ID NO: 38946 - RNA, 21 nt, Artificial Sequence
  Synthetic
acugaugacauaauauuauua

SEQ ID NO: 38947 - RNA, 24 nt, Artificial Sequence
  Synthetic
aggacugaugacauaauauuauua

SEQ ID NO: 38948 - RNA, 18 nt, Artificial Sequence
  Synthetic
cauuuuuaauuauuauua

SEQ ID NO: 38949 - RNA, 21 nt, Artificial Sequence
  Synthetic
aggcauuuuuaauuauuauua

SEQ ID NO: 38950 - RNA, 24 nt, Artificial Sequence
  Synthetic
uggaggcauuuuuaauuauuauua

SEQ ID NO: 38951 - RNA, 18 nt, Artificial Sequence
  Synthetic
uagaagaaaagcuuauua

SEQ ID NO: 38952 - RNA, 19 nt, Artificial Sequence
  Synthetic
auagaagaaaagcuuauua

SEQ ID NO: 38953 - RNA, 20 nt, Artificial Sequence
  Synthetic
aauagaagaaaagcuuauua

SEQ ID NO: 38954 - RNA, 21 nt, Artificial Sequence
  Synthetic
caauagaagaaaagcuuauua

SEQ ID NO: 38955 - RNA, 22 nt, Artificial Sequence
  Synthetic
ccaauagaagaaaagcuuauua

SEQ ID NO: 38956 - RNA, 23 nt, Artificial Sequence
  Synthetic
uccaauagaagaaaagcuuauua

SEQ ID NO: 38957 - RNA, 24 nt, Artificial Sequence
  Synthetic
auccaauagaagaaaagcuuauua

SEQ ID NO: 38958 - RNA, 18 nt, Artificial Sequence
  Synthetic
uaccaauuccauuuauua

SEQ ID NO: 38959 - RNA, 19 nt, Artificial Sequence
  Synthetic
cuaccaauuccauuuauua

SEQ ID NO: 38960 - RNA, 20 nt, Artificial Sequence
  Synthetic
acuaccaauuccauuuauua

SEQ ID NO: 38961 - RNA, 21 nt, Artificial Sequence
  Synthetic
uacuaccaauuccauuuauua

SEQ ID NO: 38962 - RNA, 22 nt, Artificial Sequence
  Synthetic
uuacuaccaauuccauuuauua

SEQ ID NO: 38963 - RNA, 23 nt, Artificial Sequence
  Synthetic
uuuacuaccaauuccauuuauua

SEQ ID NO: 38964 - RNA, 24 nt, Artificial Sequence
  Synthetic
uuuuacuaccaauuccauuuauua

SEQ ID NO: 38965 - RNA, 18 nt, Artificial Sequence
  Synthetic
aagagguagauuuuauua

SEQ ID NO: 38966 - RNA, 19 nt, Artificial Sequence
  Synthetic
uaagagguagauuuuauua

SEQ ID NO: 38967 - RNA, 20 nt, Artificial Sequence
  Synthetic
cuaagagguagauuuuauua

SEQ ID NO: 38968 - RNA, 21 nt, Artificial Sequence
  Synthetic
ccuaagagguagauuuuauua

SEQ ID NO: 38969 - RNA, 22 nt, Artificial Sequence
  Synthetic
cccuaagagguagauuuuauua

SEQ ID NO: 38970 - RNA, 23 nt, Artificial Sequence
  Synthetic
acccuaagagguagauuuuauua

SEQ ID NO: 38971 - RNA, 24 nt, Artificial Sequence
  Synthetic
aacccuaagagguagauuuuauua

SEQ ID NO: 38972 - RNA, 21 nt, Artificial Sequence
  Synthetic
cuucucuuuucuguuuuauua

SEQ ID NO: 38973 - RNA, 22 nt, Artificial Sequence
  Synthetic
ccuucucuuuucuguuuuauua

SEQ ID NO: 38974 - RNA, 23 nt, Artificial Sequence
  Synthetic
accuucucuuuucuguuuuauua

SEQ ID NO: 38975 - RNA, 24 nt, Artificial Sequence
  Synthetic
uaccuucucuuuucuguuuuauua

SEQ ID NO: 38976 - RNA, 19 nt, Artificial Sequence
  Synthetic
cgacuccauuacaaacuua

SEQ ID NO: 38977 - RNA, 21 nt, Artificial Sequence
  Synthetic
cgcgacuccauuacaaacuua

SEQ ID NO: 38978 - RNA, 22 nt, Artificial Sequence
  Synthetic
ucgcgacuccauuacaaacuua

SEQ ID NO: 38979 - RNA, 23 nt, Artificial Sequence
  Synthetic
aucgcgacuccauuacaaacuua

SEQ ID NO: 38980 - RNA, 24 nt, Artificial Sequence
  Synthetic
uaucgcgacuccauuacaaacuua

SEQ ID NO: 38981 - RNA, 18 nt, Artificial Sequence
  Synthetic
ucaccacaaaguaacuua

SEQ ID NO: 38982 - RNA, 19 nt, Artificial Sequence
  Synthetic
aucaccacaaaguaacuua

SEQ ID NO: 38983 - RNA, 20 nt, Artificial Sequence
  Synthetic
caucaccacaaaguaacuua

SEQ ID NO: 38984 - RNA, 21 nt, Artificial Sequence
  Synthetic
ucaucaccacaaaguaacuua

SEQ ID NO: 38985 - RNA, 22 nt, Artificial Sequence
  Synthetic
uucaucaccacaaaguaacuua

SEQ ID NO: 38986 - RNA, 23 nt, Artificial Sequence
  Synthetic
uuucaucaccacaaaguaacuua

SEQ ID NO: 38987 - RNA, 19 nt, Artificial Sequence
  Synthetic
uguuuaaaauguacacuua

SEQ ID NO: 38988 - RNA, 22 nt, Artificial Sequence
  Synthetic
agguguuuaaaauguacacuua

SEQ ID NO: 38989 - RNA, 23 nt, Artificial Sequence
  Synthetic
aagguguuuaaaauguacacuua

SEQ ID NO: 38990 - RNA, 18 nt, Artificial Sequence
  Synthetic
aagcaaagauuacacuua

SEQ ID NO: 38991 - RNA, 19 nt, Artificial Sequence
  Synthetic
uaagcaaagauuacacuua

SEQ ID NO: 38992 - RNA, 20 nt, Artificial Sequence
  Synthetic
auaagcaaagauuacacuua

SEQ ID NO: 38993 - RNA, 21 nt, Artificial Sequence
  Synthetic
cauaagcaaagauuacacuua

SEQ ID NO: 38994 - RNA, 22 nt, Artificial Sequence
  Synthetic
acauaagcaaagauuacacuua

SEQ ID NO: 38995 - RNA, 23 nt, Artificial Sequence
  Synthetic
uacauaagcaaagauuacacuua

SEQ ID NO: 38996 - RNA, 24 nt, Artificial Sequence
  Synthetic
uuacauaagcaaagauuacacuua

SEQ ID NO: 38997 - RNA, 18 nt, Artificial Sequence
  Synthetic
uauaaugugugccacuua

SEQ ID NO: 38998 - RNA, 19 nt, Artificial Sequence
  Synthetic
cuauaaugugugccacuua

SEQ ID NO: 38999 - RNA, 20 nt, Artificial Sequence
  Synthetic
ucuauaaugugugccacuua

SEQ ID NO: 39000 - RNA, 22 nt, Artificial Sequence
  Synthetic
agucuauaaugugugccacuua

SEQ ID NO: 39001 - RNA, 23 nt, Artificial Sequence
  Synthetic
uagucuauaaugugugccacuua

SEQ ID NO: 39002 - RNA, 18 nt, Artificial Sequence
  Synthetic
aacuguuggacucacuua

SEQ ID NO: 39003 - RNA, 19 nt, Artificial Sequence
  Synthetic
aaacuguuggacucacuua

SEQ ID NO: 39004 - RNA, 22 nt, Artificial Sequence
  Synthetic
aggaaacuguuggacucacuua

SEQ ID NO: 39005 - RNA, 24 nt, Artificial Sequence
  Synthetic
agaggaaacuguuggacucacuua

SEQ ID NO: 39006 - RNA, 21 nt, Artificial Sequence
  Synthetic
uuuaugaggacauuagacuua

SEQ ID NO: 39007 - RNA, 22 nt, Artificial Sequence
  Synthetic
uuuuaugaggacauuagacuua

SEQ ID NO: 39008 - RNA, 23 nt, Artificial Sequence
  Synthetic
cuuuuaugaggacauuagacuua

SEQ ID NO: 39009 - RNA, 24 nt, Artificial Sequence
  Synthetic
ccuuuuaugaggacauuagacuua

SEQ ID NO: 39010 - RNA, 18 nt, Artificial Sequence
  Synthetic
caaucaauaauugacuua

SEQ ID NO: 39011 - RNA, 19 nt, Artificial Sequence
  Synthetic
ccaaucaauaauugacuua

SEQ ID NO: 39012 - RNA, 20 nt, Artificial Sequence
  Synthetic
uccaaucaauaauugacuua

SEQ ID NO: 39013 - RNA, 21 nt, Artificial Sequence
  Synthetic
auccaaucaauaauugacuua

SEQ ID NO: 39014 - RNA, 22 nt, Artificial Sequence
  Synthetic
uauccaaucaauaauugacuua

SEQ ID NO: 39015 - RNA, 18 nt, Artificial Sequence
  Synthetic
cguaaacaauuauacuua

SEQ ID NO: 39016 - RNA, 19 nt, Artificial Sequence
  Synthetic
acguaaacaauuauacuua

SEQ ID NO: 39017 - RNA, 20 nt, Artificial Sequence
  Synthetic
aacguaaacaauuauacuua

SEQ ID NO: 39018 - RNA, 22 nt, Artificial Sequence
  Synthetic
agaacguaaacaauuauacuua

SEQ ID NO: 39019 - RNA, 23 nt, Artificial Sequence
  Synthetic
aagaacguaaacaauuauacuua

SEQ ID NO: 39020 - RNA, 24 nt, Artificial Sequence
  Synthetic
aaagaacguaaacaauuauacuua

SEQ ID NO: 39021 - RNA, 18 nt, Artificial Sequence
  Synthetic
ucacuaagcuuauacuua

SEQ ID NO: 39022 - RNA, 19 nt, Artificial Sequence
  Synthetic
cucacuaagcuuauacuua

SEQ ID NO: 39023 - RNA, 20 nt, Artificial Sequence
  Synthetic
acucacuaagcuuauacuua

SEQ ID NO: 39024 - RNA, 21 nt, Artificial Sequence
  Synthetic
cacucacuaagcuuauacuua

SEQ ID NO: 39025 - RNA, 22 nt, Artificial Sequence
  Synthetic
ucacucacuaagcuuauacuua

SEQ ID NO: 39026 - RNA, 23 nt, Artificial Sequence
  Synthetic
uucacucacuaagcuuauacuua

SEQ ID NO: 39027 - RNA, 24 nt, Artificial Sequence
  Synthetic
auucacucacuaagcuuauacuua

SEQ ID NO: 39028 - RNA, 18 nt, Artificial Sequence
  Synthetic
accugguuuaacuacuua

SEQ ID NO: 39029 - RNA, 19 nt, Artificial Sequence
  Synthetic
caccugguuuaacuacuua

SEQ ID NO: 39030 - RNA, 20 nt, Artificial Sequence
  Synthetic
acaccugguuuaacuacuua

SEQ ID NO: 39031 - RNA, 21 nt, Artificial Sequence
  Synthetic
cacaccugguuuaacuacuua

SEQ ID NO: 39032 - RNA, 22 nt, Artificial Sequence
  Synthetic
ucacaccugguuuaacuacuua

SEQ ID NO: 39033 - RNA, 23 nt, Artificial Sequence
  Synthetic
cucacaccugguuuaacuacuua

SEQ ID NO: 39034 - RNA, 24 nt, Artificial Sequence
  Synthetic
ccucacaccugguuuaacuacuua

SEQ ID NO: 39035 - RNA, 19 nt, Artificial Sequence
  Synthetic
agccagcccuaccuacuua

SEQ ID NO: 39036 - RNA, 21 nt, Artificial Sequence
  Synthetic
agagccagcccuaccuacuua

SEQ ID NO: 39037 - RNA, 22 nt, Artificial Sequence
  Synthetic
uagagccagcccuaccuacuua

SEQ ID NO: 39038 - RNA, 23 nt, Artificial Sequence
  Synthetic
cuagagccagcccuaccuacuua

SEQ ID NO: 39039 - RNA, 24 nt, Artificial Sequence
  Synthetic
ccuagagccagcccuaccuacuua

SEQ ID NO: 39040 - RNA, 18 nt, Artificial Sequence
  Synthetic
ccaacucaagaguacuua

SEQ ID NO: 39041 - RNA, 19 nt, Artificial Sequence
  Synthetic
accaacucaagaguacuua

SEQ ID NO: 39042 - RNA, 20 nt, Artificial Sequence
  Synthetic
aaccaacucaagaguacuua

SEQ ID NO: 39043 - RNA, 21 nt, Artificial Sequence
  Synthetic
uaaccaacucaagaguacuua

SEQ ID NO: 39044 - RNA, 22 nt, Artificial Sequence
  Synthetic
uuaaccaacucaagaguacuua

SEQ ID NO: 39045 - RNA, 23 nt, Artificial Sequence
  Synthetic
uuuaaccaacucaagaguacuua

SEQ ID NO: 39046 - RNA, 24 nt, Artificial Sequence
  Synthetic
cuuuaaccaacucaagaguacuua

SEQ ID NO: 39047 - RNA, 18 nt, Artificial Sequence
  Synthetic
cuaaauguuagguacuua

SEQ ID NO: 39048 - RNA, 20 nt, Artificial Sequence
  Synthetic
agcuaaauguuagguacuua

SEQ ID NO: 39049 - RNA, 23 nt, Artificial Sequence
  Synthetic
uggagcuaaauguuagguacuua

SEQ ID NO: 39050 - RNA, 24 nt, Artificial Sequence
  Synthetic
uuggagcuaaauguuagguacuua

SEQ ID NO: 39051 - RNA, 18 nt, Artificial Sequence
  Synthetic
aauuauguaauuuacuua

SEQ ID NO: 39052 - RNA, 19 nt, Artificial Sequence
  Synthetic
caauuauguaauuuacuua

SEQ ID NO: 39053 - RNA, 20 nt, Artificial Sequence
  Synthetic
ucaauuauguaauuuacuua

SEQ ID NO: 39054 - RNA, 21 nt, Artificial Sequence
  Synthetic
cucaauuauguaauuuacuua

SEQ ID NO: 39055 - RNA, 22 nt, Artificial Sequence
  Synthetic
acucaauuauguaauuuacuua

SEQ ID NO: 39056 - RNA, 23 nt, Artificial Sequence
  Synthetic
uacucaauuauguaauuuacuua

SEQ ID NO: 39057 - RNA, 24 nt, Artificial Sequence
  Synthetic
auacucaauuauguaauuuacuua

SEQ ID NO: 39058 - RNA, 18 nt, Artificial Sequence
  Synthetic
aagauguaguuuuacuua

SEQ ID NO: 39059 - RNA, 19 nt, Artificial Sequence
  Synthetic
caagauguaguuuuacuua

SEQ ID NO: 39060 - RNA, 20 nt, Artificial Sequence
  Synthetic
ucaagauguaguuuuacuua

SEQ ID NO: 39061 - RNA, 21 nt, Artificial Sequence
  Synthetic
aucaagauguaguuuuacuua

SEQ ID NO: 39062 - RNA, 22 nt, Artificial Sequence
  Synthetic
caucaagauguaguuuuacuua

SEQ ID NO: 39063 - RNA, 24 nt, Artificial Sequence
  Synthetic
agcaucaagauguaguuuuacuua

SEQ ID NO: 39064 - RNA, 18 nt, Artificial Sequence
  Synthetic
ucauuagaaccaaccuua

SEQ ID NO: 39065 - RNA, 20 nt, Artificial Sequence
  Synthetic
ugucauuagaaccaaccuua

SEQ ID NO: 39066 - RNA, 21 nt, Artificial Sequence
  Synthetic
augucauuagaaccaaccuua

SEQ ID NO: 39067 - RNA, 23 nt, Artificial Sequence
  Synthetic
agaugucauuagaaccaaccuua

SEQ ID NO: 39068 - RNA, 18 nt, Artificial Sequence
  Synthetic
aauccagauaacaccuua

SEQ ID NO: 39069 - RNA, 19 nt, Artificial Sequence
  Synthetic
caauccagauaacaccuua

SEQ ID NO: 39070 - RNA, 21 nt, Artificial Sequence
  Synthetic
ugcaauccagauaacaccuua

SEQ ID NO: 39071 - RNA, 22 nt, Artificial Sequence
  Synthetic
augcaauccagauaacaccuua

SEQ ID NO: 39072 - RNA, 23 nt, Artificial Sequence
  Synthetic
aaugcaauccagauaacaccuua

SEQ ID NO: 39073 - RNA, 24 nt, Artificial Sequence
  Synthetic
aaaugcaauccagauaacaccuua

SEQ ID NO: 39074 - RNA, 18 nt, Artificial Sequence
  Synthetic
caagggagagaagccuua

SEQ ID NO: 39075 - RNA, 19 nt, Artificial Sequence
  Synthetic
ccaagggagagaagccuua

SEQ ID NO: 39076 - RNA, 20 nt, Artificial Sequence
  Synthetic
uccaagggagagaagccuua

SEQ ID NO: 39077 - RNA, 21 nt, Artificial Sequence
  Synthetic
uuccaagggagagaagccuua

SEQ ID NO: 39078 - RNA, 22 nt, Artificial Sequence
  Synthetic
auuccaagggagagaagccuua

SEQ ID NO: 39079 - RNA, 23 nt, Artificial Sequence
  Synthetic
aauuccaagggagagaagccuua

SEQ ID NO: 39080 - RNA, 24 nt, Artificial Sequence
  Synthetic
uaauuccaagggagagaagccuua

SEQ ID NO: 39081 - RNA, 19 nt, Artificial Sequence
  Synthetic
aguauguucaugagccuua

SEQ ID NO: 39082 - RNA, 20 nt, Artificial Sequence
  Synthetic
aaguauguucaugagccuua

SEQ ID NO: 39083 - RNA, 18 nt, Artificial Sequence
  Synthetic
aauggacagguggccuua

SEQ ID NO: 39084 - RNA, 19 nt, Artificial Sequence
  Synthetic
caauggacagguggccuua

SEQ ID NO: 39085 - RNA, 20 nt, Artificial Sequence
  Synthetic
acaauggacagguggccuua

SEQ ID NO: 39086 - RNA, 21 nt, Artificial Sequence
  Synthetic
uacaauggacagguggccuua

SEQ ID NO: 39087 - RNA, 22 nt, Artificial Sequence
  Synthetic
uuacaauggacagguggccuua

SEQ ID NO: 39088 - RNA, 23 nt, Artificial Sequence
  Synthetic
auuacaauggacagguggccuua

SEQ ID NO: 39089 - RNA, 24 nt, Artificial Sequence
  Synthetic
cauuacaauggacagguggccuua

SEQ ID NO: 39090 - RNA, 18 nt, Artificial Sequence
  Synthetic
uaucucacagaugccuua

SEQ ID NO: 39091 - RNA, 19 nt, Artificial Sequence
  Synthetic
auaucucacagaugccuua

SEQ ID NO: 39092 - RNA, 20 nt, Artificial Sequence
  Synthetic
aauaucucacagaugccuua

SEQ ID NO: 39093 - RNA, 21 nt, Artificial Sequence
  Synthetic
aaauaucucacagaugccuua

SEQ ID NO: 39094 - RNA, 22 nt, Artificial Sequence
  Synthetic
uaaauaucucacagaugccuua

SEQ ID NO: 39095 - RNA, 23 nt, Artificial Sequence
  Synthetic
cuaaauaucucacagaugccuua

SEQ ID NO: 39096 - RNA, 24 nt, Artificial Sequence
  Synthetic
acuaaauaucucacagaugccuua

SEQ ID NO: 39097 - RNA, 18 nt, Artificial Sequence
  Synthetic
ccagaauuggcauccuua

SEQ ID NO: 39098 - RNA, 19 nt, Artificial Sequence
  Synthetic
accagaauuggcauccuua

SEQ ID NO: 39099 - RNA, 20 nt, Artificial Sequence
  Synthetic
aaccagaauuggcauccuua

SEQ ID NO: 39100 - RNA, 21 nt, Artificial Sequence
  Synthetic
aaaccagaauuggcauccuua

SEQ ID NO: 39101 - RNA, 22 nt, Artificial Sequence
  Synthetic
aaaaccagaauuggcauccuua

SEQ ID NO: 39102 - RNA, 23 nt, Artificial Sequence
  Synthetic
uaaaaccagaauuggcauccuua

SEQ ID NO: 39103 - RNA, 18 nt, Artificial Sequence
  Synthetic
aguggaauauuauccuua

SEQ ID NO: 39104 - RNA, 19 nt, Artificial Sequence
  Synthetic
caguggaauauuauccuua

SEQ ID NO: 39105 - RNA, 20 nt, Artificial Sequence
  Synthetic
acaguggaauauuauccuua

SEQ ID NO: 39106 - RNA, 21 nt, Artificial Sequence
  Synthetic
uacaguggaauauuauccuua

SEQ ID NO: 39107 - RNA, 22 nt, Artificial Sequence
  Synthetic
cuacaguggaauauuauccuua

SEQ ID NO: 39108 - RNA, 24 nt, Artificial Sequence
  Synthetic
agcuacaguggaauauuauccuua

SEQ ID NO: 39109 - RNA, 18 nt, Artificial Sequence
  Synthetic
uccuuaucguaguccuua

SEQ ID NO: 39110 - RNA, 19 nt, Artificial Sequence
  Synthetic
uuccuuaucguaguccuua

SEQ ID NO: 39111 - RNA, 20 nt, Artificial Sequence
  Synthetic
uuuccuuaucguaguccuua

SEQ ID NO: 39112 - RNA, 21 nt, Artificial Sequence
  Synthetic
uuuuccuuaucguaguccuua

SEQ ID NO: 39113 - RNA, 23 nt, Artificial Sequence
  Synthetic
uguuuuccuuaucguaguccuua

SEQ ID NO: 39114 - RNA, 24 nt, Artificial Sequence
  Synthetic
uuguuuuccuuaucguaguccuua

SEQ ID NO: 39115 - RNA, 18 nt, Artificial Sequence
  Synthetic
uugacaaaaucuuccuua

SEQ ID NO: 39116 - RNA, 19 nt, Artificial Sequence
  Synthetic
uuugacaaaaucuuccuua

SEQ ID NO: 39117 - RNA, 20 nt, Artificial Sequence
  Synthetic
uuuugacaaaaucuuccuua

SEQ ID NO: 39118 - RNA, 21 nt, Artificial Sequence
  Synthetic
cuuuugacaaaaucuuccuua

SEQ ID NO: 39119 - RNA, 23 nt, Artificial Sequence
  Synthetic
ugcuuuugacaaaaucuuccuua

SEQ ID NO: 39120 - RNA, 24 nt, Artificial Sequence
  Synthetic
uugcuuuugacaaaaucuuccuua

SEQ ID NO: 39121 - RNA, 18 nt, Artificial Sequence
  Synthetic
cuuagaugagccagcuua

SEQ ID NO: 39122 - RNA, 19 nt, Artificial Sequence
  Synthetic
ucuuagaugagccagcuua

SEQ ID NO: 39123 - RNA, 18 nt, Artificial Sequence
  Synthetic
auauauguggggagcuua

SEQ ID NO: 39124 - RNA, 19 nt, Artificial Sequence
  Synthetic
aauauauguggggagcuua

SEQ ID NO: 39125 - RNA, 20 nt, Artificial Sequence
  Synthetic
caauauauguggggagcuua

SEQ ID NO: 39126 - RNA, 21 nt, Artificial Sequence
  Synthetic
acaauauauguggggagcuua

SEQ ID NO: 39127 - RNA, 22 nt, Artificial Sequence
  Synthetic
cacaauauauguggggagcuua

SEQ ID NO: 39128 - RNA, 23 nt, Artificial Sequence
  Synthetic
acacaauauauguggggagcuua

SEQ ID NO: 39129 - RNA, 18 nt, Artificial Sequence
  Synthetic
uugauuaguuuuggcuua

SEQ ID NO: 39130 - RNA, 19 nt, Artificial Sequence
  Synthetic
auugauuaguuuuggcuua

SEQ ID NO: 39131 - RNA, 20 nt, Artificial Sequence
  Synthetic
cauugauuaguuuuggcuua

SEQ ID NO: 39132 - RNA, 21 nt, Artificial Sequence
  Synthetic
ucauugauuaguuuuggcuua

SEQ ID NO: 39133 - RNA, 24 nt, Artificial Sequence
  Synthetic
aggucauugauuaguuuuggcuua

SEQ ID NO: 39134 - RNA, 18 nt, Artificial Sequence
  Synthetic
uaucagguuucaugcuua

SEQ ID NO: 39135 - RNA, 19 nt, Artificial Sequence
  Synthetic
cuaucagguuucaugcuua

SEQ ID NO: 39136 - RNA, 20 nt, Artificial Sequence
  Synthetic
ucuaucagguuucaugcuua

SEQ ID NO: 39137 - RNA, 22 nt, Artificial Sequence
  Synthetic
ugucuaucagguuucaugcuua

SEQ ID NO: 39138 - RNA, 23 nt, Artificial Sequence
  Synthetic
augucuaucagguuucaugcuua

SEQ ID NO: 39139 - RNA, 24 nt, Artificial Sequence
  Synthetic
aaugucuaucagguuucaugcuua

SEQ ID NO: 39140 - RNA, 18 nt, Artificial Sequence
  Synthetic
ugaggggcaauaugcuua

SEQ ID NO: 39141 - RNA, 19 nt, Artificial Sequence
  Synthetic
cugaggggcaauaugcuua

SEQ ID NO: 39142 - RNA, 20 nt, Artificial Sequence
  Synthetic
ucugaggggcaauaugcuua

SEQ ID NO: 39143 - RNA, 21 nt, Artificial Sequence
  Synthetic
uucugaggggcaauaugcuua

SEQ ID NO: 39144 - RNA, 22 nt, Artificial Sequence
  Synthetic
auucugaggggcaauaugcuua

SEQ ID NO: 39145 - RNA, 23 nt, Artificial Sequence
  Synthetic
cauucugaggggcaauaugcuua

SEQ ID NO: 39146 - RNA, 24 nt, Artificial Sequence
  Synthetic
ucauucugaggggcaauaugcuua

SEQ ID NO: 39147 - RNA, 21 nt, Artificial Sequence
  Synthetic
uagacacauagagggugcuua

SEQ ID NO: 39148 - RNA, 22 nt, Artificial Sequence
  Synthetic
uuagacacauagagggugcuua

SEQ ID NO: 39149 - RNA, 23 nt, Artificial Sequence
  Synthetic
uuuagacacauagagggugcuua

SEQ ID NO: 39150 - RNA, 18 nt, Artificial Sequence
  Synthetic
uacaaaaaguggugcuua

SEQ ID NO: 39151 - RNA, 19 nt, Artificial Sequence
  Synthetic
uuacaaaaaguggugcuua

SEQ ID NO: 39152 - RNA, 21 nt, Artificial Sequence
  Synthetic
aguuacaaaaaguggugcuua

SEQ ID NO: 39153 - RNA, 22 nt, Artificial Sequence
  Synthetic
uaguuacaaaaaguggugcuua

SEQ ID NO: 39154 - RNA, 23 nt, Artificial Sequence
  Synthetic
auaguuacaaaaaguggugcuua

SEQ ID NO: 39155 - RNA, 18 nt, Artificial Sequence
  Synthetic
acuacaugagauugcuua

SEQ ID NO: 39156 - RNA, 19 nt, Artificial Sequence
  Synthetic
uacuacaugagauugcuua

SEQ ID NO: 39157 - RNA, 20 nt, Artificial Sequence
  Synthetic
uuacuacaugagauugcuua

SEQ ID NO: 39158 - RNA, 21 nt, Artificial Sequence
  Synthetic
auuacuacaugagauugcuua

SEQ ID NO: 39159 - RNA, 22 nt, Artificial Sequence
  Synthetic
uauuacuacaugagauugcuua

SEQ ID NO: 39160 - RNA, 23 nt, Artificial Sequence
  Synthetic
auauuacuacaugagauugcuua

SEQ ID NO: 39161 - RNA, 24 nt, Artificial Sequence
  Synthetic
aauauuacuacaugagauugcuua

SEQ ID NO: 39162 - RNA, 18 nt, Artificial Sequence
  Synthetic
ccaaaagagugaaucuua

SEQ ID NO: 39163 - RNA, 19 nt, Artificial Sequence
  Synthetic
cccaaaagagugaaucuua

SEQ ID NO: 39164 - RNA, 20 nt, Artificial Sequence
  Synthetic
acccaaaagagugaaucuua

SEQ ID NO: 39165 - RNA, 22 nt, Artificial Sequence
  Synthetic
ugacccaaaagagugaaucuua

SEQ ID NO: 39166 - RNA, 23 nt, Artificial Sequence
  Synthetic
cugacccaaaagagugaaucuua

SEQ ID NO: 39167 - RNA, 24 nt, Artificial Sequence
  Synthetic
acugacccaaaagagugaaucuua

SEQ ID NO: 39168 - RNA, 21 nt, Artificial Sequence
  Synthetic
aaaaagauaaaauuaaucuua

SEQ ID NO: 39169 - RNA, 22 nt, Artificial Sequence
  Synthetic
aaaaaagauaaaauuaaucuua

SEQ ID NO: 39170 - RNA, 23 nt, Artificial Sequence
  Synthetic
uaaaaaagauaaaauuaaucuua

SEQ ID NO: 39171 - RNA, 24 nt, Artificial Sequence
  Synthetic
auaaaaaagauaaaauuaaucuua

SEQ ID NO: 39172 - RNA, 18 nt, Artificial Sequence
  Synthetic
ccaaaaauaaacaucuua

SEQ ID NO: 39173 - RNA, 21 nt, Artificial Sequence
  Synthetic
uggccaaaaauaaacaucuua

SEQ ID NO: 39174 - RNA, 23 nt, Artificial Sequence
  Synthetic
aguggccaaaaauaaacaucuua

SEQ ID NO: 39175 - RNA, 18 nt, Artificial Sequence
  Synthetic
uauaaaaugcagaucuua

SEQ ID NO: 39176 - RNA, 19 nt, Artificial Sequence
  Synthetic
auauaaaaugcagaucuua

SEQ ID NO: 39177 - RNA, 20 nt, Artificial Sequence
  Synthetic
aauauaaaaugcagaucuua

SEQ ID NO: 39178 - RNA, 21 nt, Artificial Sequence
  Synthetic
aaauauaaaaugcagaucuua

SEQ ID NO: 39179 - RNA, 22 nt, Artificial Sequence
  Synthetic
aaaauauaaaaugcagaucuua

SEQ ID NO: 39180 - RNA, 23 nt, Artificial Sequence
  Synthetic
aaaaauauaaaaugcagaucuua

SEQ ID NO: 39181 - RNA, 18 nt, Artificial Sequence
  Synthetic
auggucuuuaauaucuua

SEQ ID NO: 39182 - RNA, 19 nt, Artificial Sequence
  Synthetic
aauggucuuuaauaucuua

SEQ ID NO: 39183 - RNA, 20 nt, Artificial Sequence
  Synthetic
aaauggucuuuaauaucuua

SEQ ID NO: 39184 - RNA, 22 nt, Artificial Sequence
  Synthetic
agaaauggucuuuaauaucuua

SEQ ID NO: 39185 - RNA, 23 nt, Artificial Sequence
  Synthetic
uagaaauggucuuuaauaucuua

SEQ ID NO: 39186 - RNA, 24 nt, Artificial Sequence
  Synthetic
auagaaauggucuuuaauaucuua

SEQ ID NO: 39187 - RNA, 21 nt, Artificial Sequence
  Synthetic
auuuuaauuuuugcuaucuua

SEQ ID NO: 39188 - RNA, 22 nt, Artificial Sequence
  Synthetic
cauuuuaauuuuugcuaucuua

SEQ ID NO: 39189 - RNA, 23 nt, Artificial Sequence
  Synthetic
ucauuuuaauuuuugcuaucuua

SEQ ID NO: 39190 - RNA, 18 nt, Artificial Sequence
  Synthetic
cuagcaaaucugcucuua

SEQ ID NO: 39191 - RNA, 20 nt, Artificial Sequence
  Synthetic
ugcuagcaaaucugcucuua

SEQ ID NO: 39192 - RNA, 21 nt, Artificial Sequence
  Synthetic
uugcuagcaaaucugcucuua

SEQ ID NO: 39193 - RNA, 22 nt, Artificial Sequence
  Synthetic
cuugcuagcaaaucugcucuua

SEQ ID NO: 39194 - RNA, 23 nt, Artificial Sequence
  Synthetic
ucuugcuagcaaaucugcucuua

SEQ ID NO: 39195 - RNA, 24 nt, Artificial Sequence
  Synthetic
uucuugcuagcaaaucugcucuua

SEQ ID NO: 39196 - RNA, 18 nt, Artificial Sequence
  Synthetic
agugaauuuucagucuua

SEQ ID NO: 39197 - RNA, 19 nt, Artificial Sequence
  Synthetic
uagugaauuuucagucuua

SEQ ID NO: 39198 - RNA, 23 nt, Artificial Sequence
  Synthetic
uggguagugaauuuucagucuua

SEQ ID NO: 39199 - RNA, 24 nt, Artificial Sequence
  Synthetic
auggguagugaauuuucagucuua

SEQ ID NO: 39200 - RNA, 18 nt, Artificial Sequence
  Synthetic
ucucugggaugggucuua

SEQ ID NO: 39201 - RNA, 19 nt, Artificial Sequence
  Synthetic
aucucugggaugggucuua

SEQ ID NO: 39202 - RNA, 21 nt, Artificial Sequence
  Synthetic
ugaucucugggaugggucuua

SEQ ID NO: 39203 - RNA, 23 nt, Artificial Sequence
  Synthetic
cgugaucucugggaugggucuua

SEQ ID NO: 39204 - RNA, 24 nt, Artificial Sequence
  Synthetic
acgugaucucugggaugggucuua

SEQ ID NO: 39205 - RNA, 18 nt, Artificial Sequence
  Synthetic
cuuuaucugaaauucuua

SEQ ID NO: 39206 - RNA, 20 nt, Artificial Sequence
  Synthetic
agcuuuaucugaaauucuua

SEQ ID NO: 39207 - RNA, 22 nt, Artificial Sequence
  Synthetic
agagcuuuaucugaaauucuua

SEQ ID NO: 39208 - RNA, 23 nt, Artificial Sequence
  Synthetic
aagagcuuuaucugaaauucuua

SEQ ID NO: 39209 - RNA, 24 nt, Artificial Sequence
  Synthetic
uaagagcuuuaucugaaauucuua

SEQ ID NO: 39210 - RNA, 18 nt, Artificial Sequence
  Synthetic
aguucucuugaauucuua

SEQ ID NO: 39211 - RNA, 19 nt, Artificial Sequence
  Synthetic
aaguucucuugaauucuua

SEQ ID NO: 39212 - RNA, 21 nt, Artificial Sequence
  Synthetic
agaaguucucuugaauucuua

SEQ ID NO: 39213 - RNA, 22 nt, Artificial Sequence
  Synthetic
cagaaguucucuugaauucuua

SEQ ID NO: 39214 - RNA, 23 nt, Artificial Sequence
  Synthetic
ucagaaguucucuugaauucuua

SEQ ID NO: 39215 - RNA, 24 nt, Artificial Sequence
  Synthetic
uucagaaguucucuugaauucuua

SEQ ID NO: 39216 - RNA, 18 nt, Artificial Sequence
  Synthetic
ccauagguugccuucuua

SEQ ID NO: 39217 - RNA, 19 nt, Artificial Sequence
  Synthetic
cccauagguugccuucuua

SEQ ID NO: 39218 - RNA, 20 nt, Artificial Sequence
  Synthetic
ucccauagguugccuucuua

SEQ ID NO: 39219 - RNA, 21 nt, Artificial Sequence
  Synthetic
cucccauagguugccuucuua

SEQ ID NO: 39220 - RNA, 22 nt, Artificial Sequence
  Synthetic
ucucccauagguugccuucuua

SEQ ID NO: 39221 - RNA, 23 nt, Artificial Sequence
  Synthetic
uucucccauagguugccuucuua

SEQ ID NO: 39222 - RNA, 24 nt, Artificial Sequence
  Synthetic
uuucucccauagguugccuucuua

SEQ ID NO: 39223 - RNA, 18 nt, Artificial Sequence
  Synthetic
auuggaaaaagcuucuua

SEQ ID NO: 39224 - RNA, 19 nt, Artificial Sequence
  Synthetic
cauuggaaaaagcuucuua

SEQ ID NO: 39225 - RNA, 23 nt, Artificial Sequence
  Synthetic
agggcauuggaaaaagcuucuua

SEQ ID NO: 39226 - RNA, 18 nt, Artificial Sequence
  Synthetic
aacaaguauggcuucuua

SEQ ID NO: 39227 - RNA, 19 nt, Artificial Sequence
  Synthetic
aaacaaguauggcuucuua

SEQ ID NO: 39228 - RNA, 21 nt, Artificial Sequence
  Synthetic
ugaaacaaguauggcuucuua

SEQ ID NO: 39229 - RNA, 22 nt, Artificial Sequence
  Synthetic
augaaacaaguauggcuucuua

SEQ ID NO: 39230 - RNA, 23 nt, Artificial Sequence
  Synthetic
aaugaaacaaguauggcuucuua

SEQ ID NO: 39231 - RNA, 24 nt, Artificial Sequence
  Synthetic
caaugaaacaaguauggcuucuua

SEQ ID NO: 39232 - RNA, 18 nt, Artificial Sequence
  Synthetic
auuuuccacgcuuucuua

SEQ ID NO: 39233 - RNA, 19 nt, Artificial Sequence
  Synthetic
uauuuuccacgcuuucuua

SEQ ID NO: 39234 - RNA, 20 nt, Artificial Sequence
  Synthetic
auauuuuccacgcuuucuua

SEQ ID NO: 39235 - RNA, 21 nt, Artificial Sequence
  Synthetic
uauauuuuccacgcuuucuua

SEQ ID NO: 39236 - RNA, 22 nt, Artificial Sequence
  Synthetic
auauauuuuccacgcuuucuua

SEQ ID NO: 39237 - RNA, 23 nt, Artificial Sequence
  Synthetic
aauauauuuuccacgcuuucuua

SEQ ID NO: 39238 - RNA, 24 nt, Artificial Sequence
  Synthetic
uaauauauuuuccacgcuuucuua

SEQ ID NO: 39239 - RNA, 18 nt, Artificial Sequence
  Synthetic
caugcagaugguuucuua

SEQ ID NO: 39240 - RNA, 19 nt, Artificial Sequence
  Synthetic
ccaugcagaugguuucuua

SEQ ID NO: 39241 - RNA, 20 nt, Artificial Sequence
  Synthetic
uccaugcagaugguuucuua

SEQ ID NO: 39242 - RNA, 21 nt, Artificial Sequence
  Synthetic
uuccaugcagaugguuucuua

SEQ ID NO: 39243 - RNA, 22 nt, Artificial Sequence
  Synthetic
uuuccaugcagaugguuucuua

SEQ ID NO: 39244 - RNA, 23 nt, Artificial Sequence
  Synthetic
auuuccaugcagaugguuucuua

SEQ ID NO: 39245 - RNA, 18 nt, Artificial Sequence
  Synthetic
uugaaguaugguuucuua

SEQ ID NO: 39246 - RNA, 19 nt, Artificial Sequence
  Synthetic
uuugaaguaugguuucuua

SEQ ID NO: 39247 - RNA, 20 nt, Artificial Sequence
  Synthetic
auuugaaguaugguuucuua

SEQ ID NO: 39248 - RNA, 21 nt, Artificial Sequence
  Synthetic
aauuugaaguaugguuucuua

SEQ ID NO: 39249 - RNA, 22 nt, Artificial Sequence
  Synthetic
aaauuugaaguaugguuucuua

SEQ ID NO: 39250 - RNA, 23 nt, Artificial Sequence
  Synthetic
aaaauuugaaguaugguuucuua

SEQ ID NO: 39251 - RNA, 24 nt, Artificial Sequence
  Synthetic
caaaauuugaaguaugguuucuua

SEQ ID NO: 39252 - RNA, 20 nt, Artificial Sequence
  Synthetic
uggauuguucacuuuucuua

SEQ ID NO: 39253 - RNA, 22 nt, Artificial Sequence
  Synthetic
uguggauuguucacuuuucuua

SEQ ID NO: 39254 - RNA, 23 nt, Artificial Sequence
  Synthetic
uuguggauuguucacuuuucuua

SEQ ID NO: 39255 - RNA, 18 nt, Artificial Sequence
  Synthetic
aaaacuuaucuuuucuua

SEQ ID NO: 39256 - RNA, 21 nt, Artificial Sequence
  Synthetic
aggaaaacuuaucuuuucuua

SEQ ID NO: 39257 - RNA, 22 nt, Artificial Sequence
  Synthetic
aaggaaaacuuaucuuuucuua

SEQ ID NO: 39258 - RNA, 23 nt, Artificial Sequence
  Synthetic
uaaggaaaacuuaucuuuucuua

SEQ ID NO: 39259 - RNA, 18 nt, Artificial Sequence
  Synthetic
caccccuugccaaaguua

SEQ ID NO: 39260 - RNA, 19 nt, Artificial Sequence
  Synthetic
acaccccuugccaaaguua

SEQ ID NO: 39261 - RNA, 20 nt, Artificial Sequence
  Synthetic
cacaccccuugccaaaguua

SEQ ID NO: 39262 - RNA, 21 nt, Artificial Sequence
  Synthetic
acacaccccuugccaaaguua

SEQ ID NO: 39263 - RNA, 22 nt, Artificial Sequence
  Synthetic
cacacaccccuugccaaaguua

SEQ ID NO: 39264 - RNA, 23 nt, Artificial Sequence
  Synthetic
acacacaccccuugccaaaguua

SEQ ID NO: 39265 - RNA, 24 nt, Artificial Sequence
  Synthetic
cacacacaccccuugccaaaguua

SEQ ID NO: 39266 - RNA, 18 nt, Artificial Sequence
  Synthetic
aguuauacaaacaaguua

SEQ ID NO: 39267 - RNA, 19 nt, Artificial Sequence
  Synthetic
uaguuauacaaacaaguua

SEQ ID NO: 39268 - RNA, 20 nt, Artificial Sequence
  Synthetic
auaguuauacaaacaaguua

SEQ ID NO: 39269 - RNA, 21 nt, Artificial Sequence
  Synthetic
uauaguuauacaaacaaguua

SEQ ID NO: 39270 - RNA, 22 nt, Artificial Sequence
  Synthetic
uuauaguuauacaaacaaguua

SEQ ID NO: 39271 - RNA, 23 nt, Artificial Sequence
  Synthetic
auuauaguuauacaaacaaguua

SEQ ID NO: 39272 - RNA, 24 nt, Artificial Sequence
  Synthetic
uauuauaguuauacaaacaaguua

SEQ ID NO: 39273 - RNA, 18 nt, Artificial Sequence
  Synthetic
ucuuggccauggaaguua

SEQ ID NO: 39274 - RNA, 19 nt, Artificial Sequence
  Synthetic
aucuuggccauggaaguua

SEQ ID NO: 39275 - RNA, 20 nt, Artificial Sequence
  Synthetic
uaucuuggccauggaaguua

SEQ ID NO: 39276 - RNA, 23 nt, Artificial Sequence
  Synthetic
agguaucuuggccauggaaguua

SEQ ID NO: 39277 - RNA, 24 nt, Artificial Sequence
  Synthetic
uagguaucuuggccauggaaguua

SEQ ID NO: 39278 - RNA, 18 nt, Artificial Sequence
  Synthetic
uuguuuucagcuaaguua

SEQ ID NO: 39279 - RNA, 19 nt, Artificial Sequence
  Synthetic
uuuguuuucagcuaaguua

SEQ ID NO: 39280 - RNA, 20 nt, Artificial Sequence
  Synthetic
uuuuguuuucagcuaaguua

SEQ ID NO: 39281 - RNA, 21 nt, Artificial Sequence
  Synthetic
cuuuuguuuucagcuaaguua

SEQ ID NO: 39282 - RNA, 23 nt, Artificial Sequence
  Synthetic
cgcuuuuguuuucagcuaaguua

SEQ ID NO: 39283 - RNA, 21 nt, Artificial Sequence
  Synthetic
caugaugagaaguaacaguua

SEQ ID NO: 39284 - RNA, 22 nt, Artificial Sequence
  Synthetic
ucaugaugagaaguaacaguua

SEQ ID NO: 39285 - RNA, 23 nt, Artificial Sequence
  Synthetic
aucaugaugagaaguaacaguua

SEQ ID NO: 39286 - RNA, 24 nt, Artificial Sequence
  Synthetic
aaucaugaugagaaguaacaguua

SEQ ID NO: 39287 - RNA, 18 nt, Artificial Sequence
  Synthetic
uuucacuaacuacaguua

SEQ ID NO: 39288 - RNA, 19 nt, Artificial Sequence
  Synthetic
uuuucacuaacuacaguua

SEQ ID NO: 39289 - RNA, 20 nt, Artificial Sequence
  Synthetic
uuuuucacuaacuacaguua

SEQ ID NO: 39290 - RNA, 21 nt, Artificial Sequence
  Synthetic
auuuuucacuaacuacaguua

SEQ ID NO: 39291 - RNA, 22 nt, Artificial Sequence
  Synthetic
uauuuuucacuaacuacaguua

SEQ ID NO: 39292 - RNA, 23 nt, Artificial Sequence
  Synthetic
uuauuuuucacuaacuacaguua

SEQ ID NO: 39293 - RNA, 24 nt, Artificial Sequence
  Synthetic
cuuauuuuucacuaacuacaguua

SEQ ID NO: 39294 - RNA, 18 nt, Artificial Sequence
  Synthetic
auacacagugaccaguua

SEQ ID NO: 39295 - RNA, 19 nt, Artificial Sequence
  Synthetic
uauacacagugaccaguua

SEQ ID NO: 39296 - RNA, 20 nt, Artificial Sequence
  Synthetic
uuauacacagugaccaguua

SEQ ID NO: 39297 - RNA, 22 nt, Artificial Sequence
  Synthetic
aguuauacacagugaccaguua

SEQ ID NO: 39298 - RNA, 23 nt, Artificial Sequence
  Synthetic
uaguuauacacagugaccaguua

SEQ ID NO: 39299 - RNA, 24 nt, Artificial Sequence
  Synthetic
uuaguuauacacagugaccaguua

SEQ ID NO: 39300 - RNA, 18 nt, Artificial Sequence
  Synthetic
uuguaaaaucugcaguua

SEQ ID NO: 39301 - RNA, 20 nt, Artificial Sequence
  Synthetic
aguuguaaaaucugcaguua

SEQ ID NO: 39302 - RNA, 21 nt, Artificial Sequence
  Synthetic
caguuguaaaaucugcaguua

SEQ ID NO: 39303 - RNA, 22 nt, Artificial Sequence
  Synthetic
ucaguuguaaaaucugcaguua

SEQ ID NO: 39304 - RNA, 23 nt, Artificial Sequence
  Synthetic
uucaguuguaaaaucugcaguua

SEQ ID NO: 39305 - RNA, 24 nt, Artificial Sequence
  Synthetic
cuucaguuguaaaaucugcaguua

SEQ ID NO: 39306 - RNA, 18 nt, Artificial Sequence
  Synthetic
uguuuccuauuucaguua

SEQ ID NO: 39307 - RNA, 19 nt, Artificial Sequence
  Synthetic
cuguuuccuauuucaguua

SEQ ID NO: 39308 - RNA, 20 nt, Artificial Sequence
  Synthetic
ccuguuuccuauuucaguua

SEQ ID NO: 39309 - RNA, 21 nt, Artificial Sequence
  Synthetic
uccuguuuccuauuucaguua

SEQ ID NO: 39310 - RNA, 22 nt, Artificial Sequence
  Synthetic
uuccuguuuccuauuucaguua

SEQ ID NO: 39311 - RNA, 23 nt, Artificial Sequence
  Synthetic
uuuccuguuuccuauuucaguua

SEQ ID NO: 39312 - RNA, 24 nt, Artificial Sequence
  Synthetic
uuuuccuguuuccuauuucaguua

SEQ ID NO: 39313 - RNA, 19 nt, Artificial Sequence
  Synthetic
ugauggaagagaagaguua

SEQ ID NO: 39314 - RNA, 21 nt, Artificial Sequence
  Synthetic
agugauggaagagaagaguua

SEQ ID NO: 39315 - RNA, 22 nt, Artificial Sequence
  Synthetic
uagugauggaagagaagaguua

SEQ ID NO: 39316 - RNA, 23 nt, Artificial Sequence
  Synthetic
uuagugauggaagagaagaguua

SEQ ID NO: 39317 - RNA, 24 nt, Artificial Sequence
  Synthetic
auuagugauggaagagaagaguua

SEQ ID NO: 39318 - RNA, 18 nt, Artificial Sequence
  Synthetic
uguucaucucaggaguua

SEQ ID NO: 39319 - RNA, 20 nt, Artificial Sequence
  Synthetic
uguguucaucucaggaguua

SEQ ID NO: 39320 - RNA, 21 nt, Artificial Sequence
  Synthetic
uuguguucaucucaggaguua

SEQ ID NO: 39321 - RNA, 22 nt, Artificial Sequence
  Synthetic
auuguguucaucucaggaguua

SEQ ID NO: 39322 - RNA, 23 nt, Artificial Sequence
  Synthetic
cauuguguucaucucaggaguua

SEQ ID NO: 39323 - RNA, 18 nt, Artificial Sequence
  Synthetic
uuuggagagcgggaguua

SEQ ID NO: 39324 - RNA, 19 nt, Artificial Sequence
  Synthetic
cuuuggagagcgggaguua

SEQ ID NO: 39325 - RNA, 20 nt, Artificial Sequence
  Synthetic
acuuuggagagcgggaguua

SEQ ID NO: 39326 - RNA, 21 nt, Artificial Sequence
  Synthetic
cacuuuggagagcgggaguua

SEQ ID NO: 39327 - RNA, 22 nt, Artificial Sequence
  Synthetic
ucacuuuggagagcgggaguua

SEQ ID NO: 39328 - RNA, 23 nt, Artificial Sequence
  Synthetic
uucacuuuggagagcgggaguua

SEQ ID NO: 39329 - RNA, 24 nt, Artificial Sequence
  Synthetic
auucacuuuggagagcgggaguua

SEQ ID NO: 39330 - RNA, 18 nt, Artificial Sequence
  Synthetic
cacauggacauggaguua

SEQ ID NO: 39331 - RNA, 19 nt, Artificial Sequence
  Synthetic
ucacauggacauggaguua

SEQ ID NO: 39332 - RNA, 21 nt, Artificial Sequence
  Synthetic
ugucacauggacauggaguua

SEQ ID NO: 39333 - RNA, 22 nt, Artificial Sequence
  Synthetic
augucacauggacauggaguua

SEQ ID NO: 39334 - RNA, 23 nt, Artificial Sequence
  Synthetic
uaugucacauggacauggaguua

SEQ ID NO: 39335 - RNA, 24 nt, Artificial Sequence
  Synthetic
cuaugucacauggacauggaguua

SEQ ID NO: 39336 - RNA, 18 nt, Artificial Sequence
  Synthetic
uuuugucagaaugaguua

SEQ ID NO: 39337 - RNA, 19 nt, Artificial Sequence
  Synthetic
cuuuugucagaaugaguua

SEQ ID NO: 39338 - RNA, 20 nt, Artificial Sequence
  Synthetic
acuuuugucagaaugaguua

SEQ ID NO: 39339 - RNA, 21 nt, Artificial Sequence
  Synthetic
uacuuuugucagaaugaguua

SEQ ID NO: 39340 - RNA, 22 nt, Artificial Sequence
  Synthetic
auacuuuugucagaaugaguua

SEQ ID NO: 39341 - RNA, 23 nt, Artificial Sequence
  Synthetic
cauacuuuugucagaaugaguua

SEQ ID NO: 39342 - RNA, 24 nt, Artificial Sequence
  Synthetic
acauacuuuugucagaaugaguua

SEQ ID NO: 39343 - RNA, 21 nt, Artificial Sequence
  Synthetic
caacaaauauuucuugaguua

SEQ ID NO: 39344 - RNA, 22 nt, Artificial Sequence
  Synthetic
ucaacaaauauuucuugaguua

SEQ ID NO: 39345 - RNA, 23 nt, Artificial Sequence
  Synthetic
uucaacaaauauuucuugaguua

SEQ ID NO: 39346 - RNA, 24 nt, Artificial Sequence
  Synthetic
uuucaacaaauauuucuugaguua

SEQ ID NO: 39347 - RNA, 18 nt, Artificial Sequence
  Synthetic
cuugguuuaauauaguua

SEQ ID NO: 39348 - RNA, 19 nt, Artificial Sequence
  Synthetic
ccuugguuuaauauaguua

SEQ ID NO: 39349 - RNA, 20 nt, Artificial Sequence
  Synthetic
accuugguuuaauauaguua

SEQ ID NO: 39350 - RNA, 21 nt, Artificial Sequence
  Synthetic
uaccuugguuuaauauaguua

SEQ ID NO: 39351 - RNA, 22 nt, Artificial Sequence
  Synthetic
uuaccuugguuuaauauaguua

SEQ ID NO: 39352 - RNA, 23 nt, Artificial Sequence
  Synthetic
cuuaccuugguuuaauauaguua

SEQ ID NO: 39353 - RNA, 24 nt, Artificial Sequence
  Synthetic
ccuuaccuugguuuaauauaguua

SEQ ID NO: 39354 - RNA, 18 nt, Artificial Sequence
  Synthetic
aguuuggcuuuauaguua

SEQ ID NO: 39355 - RNA, 20 nt, Artificial Sequence
  Synthetic
ugaguuuggcuuuauaguua

SEQ ID NO: 39356 - RNA, 22 nt, Artificial Sequence
  Synthetic
agugaguuuggcuuuauaguua

SEQ ID NO: 39357 - RNA, 23 nt, Artificial Sequence
  Synthetic
aagugaguuuggcuuuauaguua

SEQ ID NO: 39358 - RNA, 24 nt, Artificial Sequence
  Synthetic
uaagugaguuuggcuuuauaguua

SEQ ID NO: 39359 - RNA, 18 nt, Artificial Sequence
  Synthetic
acaguuuauuccuaguua

SEQ ID NO: 39360 - RNA, 19 nt, Artificial Sequence
  Synthetic
aacaguuuauuccuaguua

SEQ ID NO: 39361 - RNA, 21 nt, Artificial Sequence
  Synthetic
agaacaguuuauuccuaguua

SEQ ID NO: 39362 - RNA, 22 nt, Artificial Sequence
  Synthetic
aagaacaguuuauuccuaguua

SEQ ID NO: 39363 - RNA, 18 nt, Artificial Sequence
  Synthetic
cuuuggagaaguuaguua

SEQ ID NO: 39364 - RNA, 19 nt, Artificial Sequence
  Synthetic
ucuuuggagaaguuaguua

SEQ ID NO: 39365 - RNA, 20 nt, Artificial Sequence
  Synthetic
uucuuuggagaaguuaguua

SEQ ID NO: 39366 - RNA, 21 nt, Artificial Sequence
  Synthetic
uuucuuuggagaaguuaguua

SEQ ID NO: 39367 - RNA, 22 nt, Artificial Sequence
  Synthetic
cuuucuuuggagaaguuaguua

SEQ ID NO: 39368 - RNA, 24 nt, Artificial Sequence
  Synthetic
agcuuucuuuggagaaguuaguua

SEQ ID NO: 39369 - RNA, 18 nt, Artificial Sequence
  Synthetic
uguucagggaugacguua

SEQ ID NO: 39370 - RNA, 19 nt, Artificial Sequence
  Synthetic
auguucagggaugacguua

SEQ ID NO: 39371 - RNA, 20 nt, Artificial Sequence
  Synthetic
uauguucagggaugacguua

SEQ ID NO: 39372 - RNA, 23 nt, Artificial Sequence
  Synthetic
agguauguucagggaugacguua

SEQ ID NO: 39373 - RNA, 24 nt, Artificial Sequence
  Synthetic
aagguauguucagggaugacguua

SEQ ID NO: 39374 - RNA, 18 nt, Artificial Sequence
  Synthetic
aauuuuuguagcagguua

SEQ ID NO: 39375 - RNA, 20 nt, Artificial Sequence
  Synthetic
agaauuuuuguagcagguua

SEQ ID NO: 39376 - RNA, 21 nt, Artificial Sequence
  Synthetic
aagaauuuuuguagcagguua

SEQ ID NO: 39377 - RNA, 22 nt, Artificial Sequence
  Synthetic
aaagaauuuuuguagcagguua

SEQ ID NO: 39378 - RNA, 23 nt, Artificial Sequence
  Synthetic
caaagaauuuuuguagcagguua

SEQ ID NO: 39379 - RNA, 19 nt, Artificial Sequence
  Synthetic
uguaacacuaugcagguua

SEQ ID NO: 39380 - RNA, 20 nt, Artificial Sequence
  Synthetic
uuguaacacuaugcagguua

SEQ ID NO: 39381 - RNA, 21 nt, Artificial Sequence
  Synthetic
cuuguaacacuaugcagguua

SEQ ID NO: 39382 - RNA, 22 nt, Artificial Sequence
  Synthetic
acuuguaacacuaugcagguua

SEQ ID NO: 39383 - RNA, 23 nt, Artificial Sequence
  Synthetic
cacuuguaacacuaugcagguua

SEQ ID NO: 39384 - RNA, 24 nt, Artificial Sequence
  Synthetic
ucacuuguaacacuaugcagguua

SEQ ID NO: 39385 - RNA, 18 nt, Artificial Sequence
  Synthetic
caaauggucuuuugguua

SEQ ID NO: 39386 - RNA, 19 nt, Artificial Sequence
  Synthetic
ucaaauggucuuuugguua

SEQ ID NO: 39387 - RNA, 20 nt, Artificial Sequence
  Synthetic
uucaaauggucuuuugguua

SEQ ID NO: 39388 - RNA, 21 nt, Artificial Sequence
  Synthetic
auucaaauggucuuuugguua

SEQ ID NO: 39389 - RNA, 22 nt, Artificial Sequence
  Synthetic
aauucaaauggucuuuugguua

SEQ ID NO: 39390 - RNA, 23 nt, Artificial Sequence
  Synthetic
caauucaaauggucuuuugguua

SEQ ID NO: 39391 - RNA, 24 nt, Artificial Sequence
  Synthetic
ucaauucaaauggucuuuugguua

SEQ ID NO: 39392 - RNA, 18 nt, Artificial Sequence
  Synthetic
caauaugguauaauguua

SEQ ID NO: 39393 - RNA, 19 nt, Artificial Sequence
  Synthetic
ccaauaugguauaauguua

SEQ ID NO: 39394 - RNA, 20 nt, Artificial Sequence
  Synthetic
uccaauaugguauaauguua

SEQ ID NO: 39395 - RNA, 21 nt, Artificial Sequence
  Synthetic
uuccaauaugguauaauguua

SEQ ID NO: 39396 - RNA, 22 nt, Artificial Sequence
  Synthetic
uuuccaauaugguauaauguua

SEQ ID NO: 39397 - RNA, 24 nt, Artificial Sequence
  Synthetic
uguuuccaauaugguauaauguua

SEQ ID NO: 39398 - RNA, 18 nt, Artificial Sequence
  Synthetic
uucaugugcuucauguua

SEQ ID NO: 39399 - RNA, 19 nt, Artificial Sequence
  Synthetic
auucaugugcuucauguua

SEQ ID NO: 39400 - RNA, 20 nt, Artificial Sequence
  Synthetic
cauucaugugcuucauguua

SEQ ID NO: 39401 - RNA, 21 nt, Artificial Sequence
  Synthetic
acauucaugugcuucauguua

SEQ ID NO: 39402 - RNA, 22 nt, Artificial Sequence
  Synthetic
uacauucaugugcuucauguua

SEQ ID NO: 39403 - RNA, 24 nt, Artificial Sequence
  Synthetic
uguacauucaugugcuucauguua

SEQ ID NO: 39404 - RNA, 18 nt, Artificial Sequence
  Synthetic
uggugauaagagauguua

SEQ ID NO: 39405 - RNA, 19 nt, Artificial Sequence
  Synthetic
cuggugauaagagauguua

SEQ ID NO: 39406 - RNA, 20 nt, Artificial Sequence
  Synthetic
acuggugauaagagauguua

SEQ ID NO: 39407 - RNA, 21 nt, Artificial Sequence
  Synthetic
uacuggugauaagagauguua

SEQ ID NO: 39408 - RNA, 23 nt, Artificial Sequence
  Synthetic
uguacuggugauaagagauguua

SEQ ID NO: 39409 - RNA, 24 nt, Artificial Sequence
  Synthetic
auguacuggugauaagagauguua

SEQ ID NO: 39410 - RNA, 21 nt, Artificial Sequence
  Synthetic
uggaaauuauugaauauguua

SEQ ID NO: 39411 - RNA, 23 nt, Artificial Sequence
  Synthetic
uguggaaauuauugaauauguua

SEQ ID NO: 39412 - RNA, 21 nt, Artificial Sequence
  Synthetic
uugacuauuuuguguauguua

SEQ ID NO: 39413 - RNA, 22 nt, Artificial Sequence
  Synthetic
cuugacuauuuuguguauguua

SEQ ID NO: 39414 - RNA, 23 nt, Artificial Sequence
  Synthetic
ccuugacuauuuuguguauguua

SEQ ID NO: 39415 - RNA, 24 nt, Artificial Sequence
  Synthetic
accuugacuauuuuguguauguua

SEQ ID NO: 39416 - RNA, 18 nt, Artificial Sequence
  Synthetic
uacucacauccgcuguua

SEQ ID NO: 39417 - RNA, 19 nt, Artificial Sequence
  Synthetic
auacucacauccgcuguua

SEQ ID NO: 39418 - RNA, 20 nt, Artificial Sequence
  Synthetic
uauacucacauccgcuguua

SEQ ID NO: 39419 - RNA, 21 nt, Artificial Sequence
  Synthetic
cuauacucacauccgcuguua

SEQ ID NO: 39420 - RNA, 22 nt, Artificial Sequence
  Synthetic
ccuauacucacauccgcuguua

SEQ ID NO: 39421 - RNA, 24 nt, Artificial Sequence
  Synthetic
ugccuauacucacauccgcuguua

SEQ ID NO: 39422 - RNA, 18 nt, Artificial Sequence
  Synthetic
uuaugacagaugcuguua

SEQ ID NO: 39423 - RNA, 20 nt, Artificial Sequence
  Synthetic
aguuaugacagaugcuguua

SEQ ID NO: 39424 - RNA, 22 nt, Artificial Sequence
  Synthetic
agaguuaugacagaugcuguua

SEQ ID NO: 39425 - RNA, 23 nt, Artificial Sequence
  Synthetic
cagaguuaugacagaugcuguua

SEQ ID NO: 39426 - RNA, 24 nt, Artificial Sequence
  Synthetic
ucagaguuaugacagaugcuguua

SEQ ID NO: 39427 - RNA, 21 nt, Artificial Sequence
  Synthetic
auguuuauuucauugguguua

SEQ ID NO: 39428 - RNA, 22 nt, Artificial Sequence
  Synthetic
uauguuuauuucauugguguua

SEQ ID NO: 39429 - RNA, 23 nt, Artificial Sequence
  Synthetic
uuauguuuauuucauugguguua

SEQ ID NO: 39430 - RNA, 24 nt, Artificial Sequence
  Synthetic
cuuauguuuauuucauugguguua

SEQ ID NO: 39431 - RNA, 18 nt, Artificial Sequence
  Synthetic
aauugguuauuauuguua

SEQ ID NO: 39432 - RNA, 20 nt, Artificial Sequence
  Synthetic
agaauugguuauuauuguua

SEQ ID NO: 39433 - RNA, 21 nt, Artificial Sequence
  Synthetic
uagaauugguuauuauuguua

SEQ ID NO: 39434 - RNA, 22 nt, Artificial Sequence
  Synthetic
cuagaauugguuauuauuguua

SEQ ID NO: 39435 - RNA, 24 nt, Artificial Sequence
  Synthetic
agcuagaauugguuauuauuguua

SEQ ID NO: 39436 - RNA, 18 nt, Artificial Sequence
  Synthetic
auauguauacucuuguua

SEQ ID NO: 39437 - RNA, 19 nt, Artificial Sequence
  Synthetic
aauauguauacucuuguua

SEQ ID NO: 39438 - RNA, 20 nt, Artificial Sequence
  Synthetic
aaauauguauacucuuguua

SEQ ID NO: 39439 - RNA, 21 nt, Artificial Sequence
  Synthetic
aaaauauguauacucuuguua

SEQ ID NO: 39440 - RNA, 22 nt, Artificial Sequence
  Synthetic
uaaaauauguauacucuuguua

SEQ ID NO: 39441 - RNA, 23 nt, Artificial Sequence
  Synthetic
auaaaauauguauacucuuguua

SEQ ID NO: 39442 - RNA, 24 nt, Artificial Sequence
  Synthetic
uauaaaauauguauacucuuguua

SEQ ID NO: 39443 - RNA, 18 nt, Artificial Sequence
  Synthetic
ugggaaagaaaaaauuua

SEQ ID NO: 39444 - RNA, 20 nt, Artificial Sequence
  Synthetic
ugugggaaagaaaaaauuua

SEQ ID NO: 39445 - RNA, 23 nt, Artificial Sequence
  Synthetic
cggugugggaaagaaaaaauuua

SEQ ID NO: 39446 - RNA, 24 nt, Artificial Sequence
  Synthetic
ccggugugggaaagaaaaaauuua

SEQ ID NO: 39447 - RNA, 18 nt, Artificial Sequence
  Synthetic
auuauuuccaaaaauuua

SEQ ID NO: 39448 - RNA, 21 nt, Artificial Sequence
  Synthetic
ccccaauuaaaauaaaauuua

SEQ ID NO: 39449 - RNA, 22 nt, Artificial Sequence
  Synthetic
uccccaauuaaaauaaaauuua

SEQ ID NO: 39450 - RNA, 23 nt, Artificial Sequence
  Synthetic
uuccccaauuaaaauaaaauuua

SEQ ID NO: 39451 - RNA, 24 nt, Artificial Sequence
  Synthetic
uuuccccaauuaaaauaaaauuua

SEQ ID NO: 39452 - RNA, 21 nt, Artificial Sequence
  Synthetic
caagcaacuucagcaaauuua

SEQ ID NO: 39453 - RNA, 22 nt, Artificial Sequence
  Synthetic
ccaagcaacuucagcaaauuua

SEQ ID NO: 39454 - RNA, 23 nt, Artificial Sequence
  Synthetic
uccaagcaacuucagcaaauuua

SEQ ID NO: 39455 - RNA, 24 nt, Artificial Sequence
  Synthetic
cuccaagcaacuucagcaaauuua

SEQ ID NO: 39456 - RNA, 21 nt, Artificial Sequence
  Synthetic
ucugaggccucaagaaauuua

SEQ ID NO: 39457 - RNA, 22 nt, Artificial Sequence
  Synthetic
cucugaggccucaagaaauuua

SEQ ID NO: 39458 - RNA, 23 nt, Artificial Sequence
  Synthetic
acucugaggccucaagaaauuua

SEQ ID NO: 39459 - RNA, 24 nt, Artificial Sequence
  Synthetic
cacucugaggccucaagaaauuua

SEQ ID NO: 39460 - RNA, 21 nt, Artificial Sequence
  Synthetic
caaauauucaagagaaauuua

SEQ ID NO: 39461 - RNA, 22 nt, Artificial Sequence
  Synthetic
acaaauauucaagagaaauuua

SEQ ID NO: 39462 - RNA, 23 nt, Artificial Sequence
  Synthetic
aacaaauauucaagagaaauuua

SEQ ID NO: 39463 - RNA, 24 nt, Artificial Sequence
  Synthetic
caacaaauauucaagagaaauuua

SEQ ID NO: 39464 - RNA, 22 nt, Artificial Sequence
  Synthetic
ugagauuuuacuuugaaauuua

SEQ ID NO: 39465 - RNA, 18 nt, Artificial Sequence
  Synthetic
ugacuuuaauuaaauuua

SEQ ID NO: 39466 - RNA, 19 nt, Artificial Sequence
  Synthetic
uugacuuuaauuaaauuua

SEQ ID NO: 39467 - RNA, 20 nt, Artificial Sequence
  Synthetic
auugacuuuaauuaaauuua

SEQ ID NO: 39468 - RNA, 21 nt, Artificial Sequence
  Synthetic
uauugacuuuaauuaaauuua

SEQ ID NO: 39469 - RNA, 22 nt, Artificial Sequence
  Synthetic
uuauugacuuuaauuaaauuua

SEQ ID NO: 39470 - RNA, 23 nt, Artificial Sequence
  Synthetic
uuuauugacuuuaauuaaauuua

SEQ ID NO: 39471 - RNA, 18 nt, Artificial Sequence
  Synthetic
aaauguauucccaauuua

SEQ ID NO: 39472 - RNA, 19 nt, Artificial Sequence
  Synthetic
aaaauguauucccaauuua

SEQ ID NO: 39473 - RNA, 21 nt, Artificial Sequence
  Synthetic
ugaaaauguauucccaauuua

SEQ ID NO: 39474 - RNA, 22 nt, Artificial Sequence
  Synthetic
uugaaaauguauucccaauuua

SEQ ID NO: 39475 - RNA, 23 nt, Artificial Sequence
  Synthetic
cuugaaaauguauucccaauuua

SEQ ID NO: 39476 - RNA, 18 nt, Artificial Sequence
  Synthetic
aauggucagggcaauuua

SEQ ID NO: 39477 - RNA, 20 nt, Artificial Sequence
  Synthetic
agaauggucagggcaauuua

SEQ ID NO: 39478 - RNA, 21 nt, Artificial Sequence
  Synthetic
aagaauggucagggcaauuua

SEQ ID NO: 39479 - RNA, 22 nt, Artificial Sequence
  Synthetic
aaagaauggucagggcaauuua

SEQ ID NO: 39480 - RNA, 23 nt, Artificial Sequence
  Synthetic
caaagaauggucagggcaauuua

SEQ ID NO: 39481 - RNA, 24 nt, Artificial Sequence
  Synthetic
ucaaagaauggucagggcaauuua

SEQ ID NO: 39482 - RNA, 18 nt, Artificial Sequence
  Synthetic
uaauuuuauggcaauuua

SEQ ID NO: 39483 - RNA, 19 nt, Artificial Sequence
  Synthetic
cuaauuuuauggcaauuua

SEQ ID NO: 39484 - RNA, 20 nt, Artificial Sequence
  Synthetic
ucuaauuuuauggcaauuua

SEQ ID NO: 39485 - RNA, 21 nt, Artificial Sequence
  Synthetic
uucuaauuuuauggcaauuua

SEQ ID NO: 39486 - RNA, 23 nt, Artificial Sequence
  Synthetic
uguucuaauuuuauggcaauuua

SEQ ID NO: 39487 - RNA, 24 nt, Artificial Sequence
  Synthetic
uuguucuaauuuuauggcaauuua

SEQ ID NO: 39488 - RNA, 18 nt, Artificial Sequence
  Synthetic
cagaaccauuggaauuua

SEQ ID NO: 39489 - RNA, 19 nt, Artificial Sequence
  Synthetic
ucagaaccauuggaauuua

SEQ ID NO: 39490 - RNA, 20 nt, Artificial Sequence
  Synthetic
aucagaaccauuggaauuua

SEQ ID NO: 39491 - RNA, 21 nt, Artificial Sequence
  Synthetic
uaucagaaccauuggaauuua

SEQ ID NO: 39492 - RNA, 22 nt, Artificial Sequence
  Synthetic
auaucagaaccauuggaauuua

SEQ ID NO: 39493 - RNA, 23 nt, Artificial Sequence
  Synthetic
uauaucagaaccauuggaauuua

SEQ ID NO: 39494 - RNA, 24 nt, Artificial Sequence
  Synthetic
auauaucagaaccauuggaauuua

SEQ ID NO: 39495 - RNA, 18 nt, Artificial Sequence
  Synthetic
aagaaagcugauaauuua

SEQ ID NO: 39496 - RNA, 19 nt, Artificial Sequence
  Synthetic
aaagaaagcugauaauuua

SEQ ID NO: 39497 - RNA, 20 nt, Artificial Sequence
  Synthetic
aaaagaaagcugauaauuua

SEQ ID NO: 39498 - RNA, 21 nt, Artificial Sequence
  Synthetic
aaaaagaaagcugauaauuua

SEQ ID NO: 39499 - RNA, 22 nt, Artificial Sequence
  Synthetic
uaaaaagaaagcugauaauuua

SEQ ID NO: 39500 - RNA, 24 nt, Artificial Sequence
  Synthetic
aguaaaaagaaagcugauaauuua

SEQ ID NO: 39501 - RNA, 18 nt, Artificial Sequence
  Synthetic
uaggagagaaguaauuua

SEQ ID NO: 39502 - RNA, 19 nt, Artificial Sequence
  Synthetic
auaggagagaaguaauuua

SEQ ID NO: 39503 - RNA, 20 nt, Artificial Sequence
  Synthetic
uauaggagagaaguaauuua

SEQ ID NO: 39504 - RNA, 21 nt, Artificial Sequence
  Synthetic
auauaggagagaaguaauuua

SEQ ID NO: 39505 - RNA, 22 nt, Artificial Sequence
  Synthetic
aauauaggagagaaguaauuua

SEQ ID NO: 39506 - RNA, 23 nt, Artificial Sequence
  Synthetic
aaauauaggagagaaguaauuua

SEQ ID NO: 39507 - RNA, 18 nt, Artificial Sequence
  Synthetic
aaggcuacacguaauuua

SEQ ID NO: 39508 - RNA, 19 nt, Artificial Sequence
  Synthetic
caaggcuacacguaauuua

SEQ ID NO: 39509 - RNA, 20 nt, Artificial Sequence
  Synthetic
ucaaggcuacacguaauuua

SEQ ID NO: 39510 - RNA, 21 nt, Artificial Sequence
  Synthetic
aucaaggcuacacguaauuua

SEQ ID NO: 39511 - RNA, 22 nt, Artificial Sequence
  Synthetic
caucaaggcuacacguaauuua

SEQ ID NO: 39512 - RNA, 23 nt, Artificial Sequence
  Synthetic
ccaucaaggcuacacguaauuua

SEQ ID NO: 39513 - RNA, 24 nt, Artificial Sequence
  Synthetic
cccaucaaggcuacacguaauuua

SEQ ID NO: 39514 - RNA, 18 nt, Artificial Sequence
  Synthetic
agggaauagcaacauuua

SEQ ID NO: 39515 - RNA, 19 nt, Artificial Sequence
  Synthetic
uagggaauagcaacauuua

SEQ ID NO: 39516 - RNA, 20 nt, Artificial Sequence
  Synthetic
cuagggaauagcaacauuua

SEQ ID NO: 39517 - RNA, 21 nt, Artificial Sequence
  Synthetic
ccuagggaauagcaacauuua

SEQ ID NO: 39518 - RNA, 22 nt, Artificial Sequence
  Synthetic
cccuagggaauagcaacauuua

SEQ ID NO: 39519 - RNA, 23 nt, Artificial Sequence
  Synthetic
ccccuagggaauagcaacauuua

SEQ ID NO: 39520 - RNA, 24 nt, Artificial Sequence
  Synthetic
accccuagggaauagcaacauuua

SEQ ID NO: 39521 - RNA, 21 nt, Artificial Sequence
  Synthetic
cuuaagacaaaagaacauuua

SEQ ID NO: 39522 - RNA, 22 nt, Artificial Sequence
  Synthetic
acuuaagacaaaagaacauuua

SEQ ID NO: 39523 - RNA, 23 nt, Artificial Sequence
  Synthetic
uacuuaagacaaaagaacauuua

SEQ ID NO: 39524 - RNA, 24 nt, Artificial Sequence
  Synthetic
uuacuuaagacaaaagaacauuua

SEQ ID NO: 39525 - RNA, 18 nt, Artificial Sequence
  Synthetic
uaguugucuuaacauuua

SEQ ID NO: 39526 - RNA, 19 nt, Artificial Sequence
  Synthetic
auaguugucuuaacauuua

SEQ ID NO: 39527 - RNA, 20 nt, Artificial Sequence
  Synthetic
uauaguugucuuaacauuua

SEQ ID NO: 39528 - RNA, 21 nt, Artificial Sequence
  Synthetic
auauaguugucuuaacauuua

SEQ ID NO: 39529 - RNA, 23 nt, Artificial Sequence
  Synthetic
ugauauaguugucuuaacauuua

SEQ ID NO: 39530 - RNA, 24 nt, Artificial Sequence
  Synthetic
uugauauaguugucuuaacauuua

SEQ ID NO: 39531 - RNA, 19 nt, Artificial Sequence
  Synthetic
agaaguugguuuacauuua

SEQ ID NO: 39532 - RNA, 20 nt, Artificial Sequence
  Synthetic
uagaaguugguuuacauuua

SEQ ID NO: 39533 - RNA, 21 nt, Artificial Sequence
  Synthetic
cuagaaguugguuuacauuua

SEQ ID NO: 39534 - RNA, 22 nt, Artificial Sequence
  Synthetic
ccuagaaguugguuuacauuua

SEQ ID NO: 39535 - RNA, 24 nt, Artificial Sequence
  Synthetic
agccuagaaguugguuuacauuua

SEQ ID NO: 39536 - RNA, 18 nt, Artificial Sequence
  Synthetic
ugaauauuuugccauuua

SEQ ID NO: 39537 - RNA, 19 nt, Artificial Sequence
  Synthetic
uugaauauuuugccauuua

SEQ ID NO: 39538 - RNA, 20 nt, Artificial Sequence
  Synthetic
auugaauauuuugccauuua

SEQ ID NO: 39539 - RNA, 21 nt, Artificial Sequence
  Synthetic
aauugaauauuuugccauuua

SEQ ID NO: 39540 - RNA, 22 nt, Artificial Sequence
  Synthetic
uaauugaauauuuugccauuua

SEQ ID NO: 39541 - RNA, 23 nt, Artificial Sequence
  Synthetic
uuaauugaauauuuugccauuua

SEQ ID NO: 39542 - RNA, 24 nt, Artificial Sequence
  Synthetic
uuuaauugaauauuuugccauuua

SEQ ID NO: 39543 - RNA, 21 nt, Artificial Sequence
  Synthetic
augaguuaugaaauccauuua

SEQ ID NO: 39544 - RNA, 23 nt, Artificial Sequence
  Synthetic
ugaugaguuaugaaauccauuua

SEQ ID NO: 39545 - RNA, 24 nt, Artificial Sequence
  Synthetic
cugaugaguuaugaaauccauuua

SEQ ID NO: 39546 - RNA, 19 nt, Artificial Sequence
  Synthetic
uguucacaguuggcauuua

SEQ ID NO: 39547 - RNA, 20 nt, Artificial Sequence
  Synthetic
uuguucacaguuggcauuua

SEQ ID NO: 39548 - RNA, 21 nt, Artificial Sequence
  Synthetic
cuuguucacaguuggcauuua

SEQ ID NO: 39549 - RNA, 22 nt, Artificial Sequence
  Synthetic
acuuguucacaguuggcauuua

SEQ ID NO: 39550 - RNA, 23 nt, Artificial Sequence
  Synthetic
cacuuguucacaguuggcauuua

SEQ ID NO: 39551 - RNA, 24 nt, Artificial Sequence
  Synthetic
ucacuuguucacaguuggcauuua

SEQ ID NO: 39552 - RNA, 18 nt, Artificial Sequence
  Synthetic
cuuacagcuaugcauuua

SEQ ID NO: 39553 - RNA, 20 nt, Artificial Sequence
  Synthetic
ugcuuacagcuaugcauuua

SEQ ID NO: 39554 - RNA, 24 nt, Artificial Sequence
  Synthetic
ugggugcuuacagcuaugcauuua

SEQ ID NO: 39555 - RNA, 18 nt, Artificial Sequence
  Synthetic
aucaguucauaucauuua

SEQ ID NO: 39556 - RNA, 19 nt, Artificial Sequence
  Synthetic
aaucaguucauaucauuua

SEQ ID NO: 39557 - RNA, 20 nt, Artificial Sequence
  Synthetic
aaaucaguucauaucauuua

SEQ ID NO: 39558 - RNA, 21 nt, Artificial Sequence
  Synthetic
aaaaucaguucauaucauuua

SEQ ID NO: 39559 - RNA, 22 nt, Artificial Sequence
  Synthetic
aaaaaucaguucauaucauuua

SEQ ID NO: 39560 - RNA, 23 nt, Artificial Sequence
  Synthetic
aaaaaaucaguucauaucauuua

SEQ ID NO: 39561 - RNA, 24 nt, Artificial Sequence
  Synthetic
uaaaaaaucaguucauaucauuua

SEQ ID NO: 39562 - RNA, 18 nt, Artificial Sequence
  Synthetic
ucauggaacuaucauuua

SEQ ID NO: 39563 - RNA, 19 nt, Artificial Sequence
  Synthetic
uucauggaacuaucauuua

SEQ ID NO: 39564 - RNA, 21 nt, Artificial Sequence
  Synthetic
uguucauggaacuaucauuua

SEQ ID NO: 39565 - RNA, 22 nt, Artificial Sequence
  Synthetic
uuguucauggaacuaucauuua

SEQ ID NO: 39566 - RNA, 24 nt, Artificial Sequence
  Synthetic
aguuguucauggaacuaucauuua

SEQ ID NO: 39567 - RNA, 18 nt, Artificial Sequence
  Synthetic
acaacaugucaagauuua

SEQ ID NO: 39568 - RNA, 19 nt, Artificial Sequence
  Synthetic
cacaacaugucaagauuua

SEQ ID NO: 39569 - RNA, 21 nt, Artificial Sequence
  Synthetic
agcacaacaugucaagauuua

SEQ ID NO: 39570 - RNA, 22 nt, Artificial Sequence
  Synthetic
aagcacaacaugucaagauuua

SEQ ID NO: 39571 - RNA, 23 nt, Artificial Sequence
  Synthetic
aaagcacaacaugucaagauuua

SEQ ID NO: 39572 - RNA, 24 nt, Artificial Sequence
  Synthetic
aaaagcacaacaugucaagauuua

SEQ ID NO: 39573 - RNA, 18 nt, Artificial Sequence
  Synthetic
cuuagaguaacagauuua

SEQ ID NO: 39574 - RNA, 20 nt, Artificial Sequence
  Synthetic
ugcuuagaguaacagauuua

SEQ ID NO: 39575 - RNA, 21 nt, Artificial Sequence
  Synthetic
uugcuuagaguaacagauuua

SEQ ID NO: 39576 - RNA, 22 nt, Artificial Sequence
  Synthetic
uuugcuuagaguaacagauuua

SEQ ID NO: 39577 - RNA, 23 nt, Artificial Sequence
  Synthetic
uuuugcuuagaguaacagauuua

SEQ ID NO: 39578 - RNA, 24 nt, Artificial Sequence
  Synthetic
auuuugcuuagaguaacagauuua

SEQ ID NO: 39579 - RNA, 18 nt, Artificial Sequence
  Synthetic
caacugaacacagauuua

SEQ ID NO: 39580 - RNA, 20 nt, Artificial Sequence
  Synthetic
ugcaacugaacacagauuua

SEQ ID NO: 39581 - RNA, 21 nt, Artificial Sequence
  Synthetic
augcaacugaacacagauuua

SEQ ID NO: 39582 - RNA, 22 nt, Artificial Sequence
  Synthetic
caugcaacugaacacagauuua

SEQ ID NO: 39583 - RNA, 23 nt, Artificial Sequence
  Synthetic
ccaugcaacugaacacagauuua

SEQ ID NO: 39584 - RNA, 24 nt, Artificial Sequence
  Synthetic
accaugcaacugaacacagauuua

SEQ ID NO: 39585 - RNA, 18 nt, Artificial Sequence
  Synthetic
cauaucaaaagagauuua

SEQ ID NO: 39586 - RNA, 20 nt, Artificial Sequence
  Synthetic
ugcauaucaaaagagauuua

SEQ ID NO: 39587 - RNA, 21 nt, Artificial Sequence
  Synthetic
uugcauaucaaaagagauuua

SEQ ID NO: 39588 - RNA, 22 nt, Artificial Sequence
  Synthetic
uuugcauaucaaaagagauuua

SEQ ID NO: 39589 - RNA, 23 nt, Artificial Sequence
  Synthetic
cuuugcauaucaaaagagauuua

SEQ ID NO: 39590 - RNA, 24 nt, Artificial Sequence
  Synthetic
acuuugcauaucaaaagagauuua

SEQ ID NO: 39591 - RNA, 18 nt, Artificial Sequence
  Synthetic
uauugaguuauagauuua

SEQ ID NO: 39592 - RNA, 20 nt, Artificial Sequence
  Synthetic
aguauugaguuauagauuua

SEQ ID NO: 39593 - RNA, 21 nt, Artificial Sequence
  Synthetic
aaguauugaguuauagauuua

SEQ ID NO: 39594 - RNA, 22 nt, Artificial Sequence
  Synthetic
uaaguauugaguuauagauuua

SEQ ID NO: 39595 - RNA, 23 nt, Artificial Sequence
  Synthetic
uuaaguauugaguuauagauuua

SEQ ID NO: 39596 - RNA, 19 nt, Artificial Sequence
  Synthetic
ugauuucuaaguagauuua

SEQ ID NO: 39597 - RNA, 20 nt, Artificial Sequence
  Synthetic
augauuucuaaguagauuua

SEQ ID NO: 39598 - RNA, 21 nt, Artificial Sequence
  Synthetic
uaugauuucuaaguagauuua

SEQ ID NO: 39599 - RNA, 23 nt, Artificial Sequence
  Synthetic
uguaugauuucuaaguagauuua

SEQ ID NO: 39600 - RNA, 24 nt, Artificial Sequence
  Synthetic
cuguaugauuucuaaguagauuua

SEQ ID NO: 39601 - RNA, 19 nt, Artificial Sequence
  Synthetic
agucaucaugauggauuua

SEQ ID NO: 39602 - RNA, 20 nt, Artificial Sequence
  Synthetic
cagucaucaugauggauuua

SEQ ID NO: 39603 - RNA, 22 nt, Artificial Sequence
  Synthetic
ugcagucaucaugauggauuua

SEQ ID NO: 39604 - RNA, 23 nt, Artificial Sequence
  Synthetic
uugcagucaucaugauggauuua

SEQ ID NO: 39605 - RNA, 24 nt, Artificial Sequence
  Synthetic
uuugcagucaucaugauggauuua

SEQ ID NO: 39606 - RNA, 18 nt, Artificial Sequence
  Synthetic
auguggcuuuuggauuua

SEQ ID NO: 39607 - RNA, 19 nt, Artificial Sequence
  Synthetic
aauguggcuuuuggauuua

SEQ ID NO: 39608 - RNA, 20 nt, Artificial Sequence
  Synthetic
aaauguggcuuuuggauuua

SEQ ID NO: 39609 - RNA, 21 nt, Artificial Sequence
  Synthetic
caaauguggcuuuuggauuua

SEQ ID NO: 39610 - RNA, 23 nt, Artificial Sequence
  Synthetic
agcaaauguggcuuuuggauuua

SEQ ID NO: 39611 - RNA, 24 nt, Artificial Sequence
  Synthetic
uagcaaauguggcuuuuggauuua

SEQ ID NO: 39612 - RNA, 18 nt, Artificial Sequence
  Synthetic
aaaauuccccaugauuua

SEQ ID NO: 39613 - RNA, 19 nt, Artificial Sequence
  Synthetic
aaaaauuccccaugauuua

SEQ ID NO: 39614 - RNA, 20 nt, Artificial Sequence
  Synthetic
aaaaaauuccccaugauuua

SEQ ID NO: 39615 - RNA, 21 nt, Artificial Sequence
  Synthetic
uaaaaaauuccccaugauuua

SEQ ID NO: 39616 - RNA, 22 nt, Artificial Sequence
  Synthetic
auaaaaaauuccccaugauuua

SEQ ID NO: 39617 - RNA, 23 nt, Artificial Sequence
  Synthetic
aauaaaaaauuccccaugauuua

SEQ ID NO: 39618 - RNA, 24 nt, Artificial Sequence
  Synthetic
aaauaaaaaauuccccaugauuua

SEQ ID NO: 39619 - RNA, 18 nt, Artificial Sequence
  Synthetic
caccgguuugcugauuua

SEQ ID NO: 39620 - RNA, 19 nt, Artificial Sequence
  Synthetic
ucaccgguuugcugauuua

SEQ ID NO: 39621 - RNA, 21 nt, Artificial Sequence
  Synthetic
ugucaccgguuugcugauuua

SEQ ID NO: 39622 - RNA, 23 nt, Artificial Sequence
  Synthetic
cgugucaccgguuugcugauuua

SEQ ID NO: 39623 - RNA, 24 nt, Artificial Sequence
  Synthetic
ccgugucaccgguuugcugauuua

SEQ ID NO: 39624 - RNA, 18 nt, Artificial Sequence
  Synthetic
uaaccagauucugauuua

SEQ ID NO: 39625 - RNA, 19 nt, Artificial Sequence
  Synthetic
auaaccagauucugauuua

SEQ ID NO: 39626 - RNA, 20 nt, Artificial Sequence
  Synthetic
aauaaccagauucugauuua

SEQ ID NO: 39627 - RNA, 21 nt, Artificial Sequence
  Synthetic
caauaaccagauucugauuua

SEQ ID NO: 39628 - RNA, 22 nt, Artificial Sequence
  Synthetic
ccaauaaccagauucugauuua

SEQ ID NO: 39629 - RNA, 23 nt, Artificial Sequence
  Synthetic
uccaauaaccagauucugauuua

SEQ ID NO: 39630 - RNA, 18 nt, Artificial Sequence
  Synthetic
ugucucagucuugauuua

SEQ ID NO: 39631 - RNA, 19 nt, Artificial Sequence
  Synthetic
augucucagucuugauuua

SEQ ID NO: 39632 - RNA, 20 nt, Artificial Sequence
  Synthetic
uaugucucagucuugauuua

SEQ ID NO: 39633 - RNA, 21 nt, Artificial Sequence
  Synthetic
uuaugucucagucuugauuua

SEQ ID NO: 39634 - RNA, 22 nt, Artificial Sequence
  Synthetic
auuaugucucagucuugauuua

SEQ ID NO: 39635 - RNA, 23 nt, Artificial Sequence
  Synthetic
aauuaugucucagucuugauuua

SEQ ID NO: 39636 - RNA, 24 nt, Artificial Sequence
  Synthetic
caauuaugucucagucuugauuua

SEQ ID NO: 39637 - RNA, 19 nt, Artificial Sequence
  Synthetic
aguaaucugucaauauuua

SEQ ID NO: 39638 - RNA, 20 nt, Artificial Sequence
  Synthetic
aaguaaucugucaauauuua

SEQ ID NO: 39639 - RNA, 21 nt, Artificial Sequence
  Synthetic
uaaguaaucugucaauauuua

SEQ ID NO: 39640 - RNA, 22 nt, Artificial Sequence
  Synthetic
auaaguaaucugucaauauuua

SEQ ID NO: 39641 - RNA, 23 nt, Artificial Sequence
  Synthetic
aauaaguaaucugucaauauuua

SEQ ID NO: 39642 - RNA, 24 nt, Artificial Sequence
  Synthetic
caauaaguaaucugucaauauuua

SEQ ID NO: 39643 - RNA, 18 nt, Artificial Sequence
  Synthetic
ucauuccauuccuauuua

SEQ ID NO: 39644 - RNA, 19 nt, Artificial Sequence
  Synthetic
uucauuccauuccuauuua

SEQ ID NO: 39645 - RNA, 23 nt, Artificial Sequence
  Synthetic
uggguucauuccauuccuauuua

SEQ ID NO: 39646 - RNA, 24 nt, Artificial Sequence
  Synthetic
uuggguucauuccauuccuauuua

SEQ ID NO: 39647 - RNA, 21 nt, Artificial Sequence
  Synthetic
ugaucauuugacaaguauuua

SEQ ID NO: 39648 - RNA, 22 nt, Artificial Sequence
  Synthetic
cugaucauuugacaaguauuua

SEQ ID NO: 39649 - RNA, 23 nt, Artificial Sequence
  Synthetic
ucugaucauuugacaaguauuua

SEQ ID NO: 39650 - RNA, 24 nt, Artificial Sequence
  Synthetic
aucugaucauuugacaaguauuua

SEQ ID NO: 39651 - RNA, 19 nt, Artificial Sequence
  Synthetic
agaaguauuaagguauuua

SEQ ID NO: 39652 - RNA, 20 nt, Artificial Sequence
  Synthetic
uagaaguauuaagguauuua

SEQ ID NO: 39653 - RNA, 21 nt, Artificial Sequence
  Synthetic
auagaaguauuaagguauuua

SEQ ID NO: 39654 - RNA, 22 nt, Artificial Sequence
  Synthetic
aauagaaguauuaagguauuua

SEQ ID NO: 39655 - RNA, 23 nt, Artificial Sequence
  Synthetic
uaauagaaguauuaagguauuua

SEQ ID NO: 39656 - RNA, 24 nt, Artificial Sequence
  Synthetic
uuaauagaaguauuaagguauuua

SEQ ID NO: 39657 - RNA, 18 nt, Artificial Sequence
  Synthetic
acugaagaaauguauuua

SEQ ID NO: 39658 - RNA, 19 nt, Artificial Sequence
  Synthetic
uacugaagaaauguauuua

SEQ ID NO: 39659 - RNA, 20 nt, Artificial Sequence
  Synthetic
auacugaagaaauguauuua

SEQ ID NO: 39660 - RNA, 21 nt, Artificial Sequence
  Synthetic
uauacugaagaaauguauuua

SEQ ID NO: 39661 - RNA, 22 nt, Artificial Sequence
  Synthetic
auauacugaagaaauguauuua

SEQ ID NO: 39662 - RNA, 24 nt, Artificial Sequence
  Synthetic
agauauacugaagaaauguauuua

SEQ ID NO: 39663 - RNA, 21 nt, Artificial Sequence
  Synthetic
uguaauaacuauauguauuua

SEQ ID NO: 39664 - RNA, 22 nt, Artificial Sequence
  Synthetic
uuguaauaacuauauguauuua

SEQ ID NO: 39665 - RNA, 23 nt, Artificial Sequence
  Synthetic
uuuguaauaacuauauguauuua

SEQ ID NO: 39666 - RNA, 24 nt, Artificial Sequence
  Synthetic
auuuguaauaacuauauguauuua

SEQ ID NO: 39667 - RNA, 18 nt, Artificial Sequence
  Synthetic
ucacuugcuuuguauuua

SEQ ID NO: 39668 - RNA, 20 nt, Artificial Sequence
  Synthetic
agucacuugcuuuguauuua

SEQ ID NO: 39669 - RNA, 21 nt, Artificial Sequence
  Synthetic
aagucacuugcuuuguauuua

SEQ ID NO: 39670 - RNA, 23 nt, Artificial Sequence
  Synthetic
agaagucacuugcuuuguauuua

SEQ ID NO: 39671 - RNA, 24 nt, Artificial Sequence
  Synthetic
cagaagucacuugcuuuguauuua

SEQ ID NO: 39672 - RNA, 18 nt, Artificial Sequence
  Synthetic
caaacuaagacuuauuua

SEQ ID NO: 39673 - RNA, 19 nt, Artificial Sequence
  Synthetic
acaaacuaagacuuauuua

SEQ ID NO: 39674 - RNA, 20 nt, Artificial Sequence
  Synthetic
uacaaacuaagacuuauuua

SEQ ID NO: 39675 - RNA, 21 nt, Artificial Sequence
  Synthetic
auacaaacuaagacuuauuua

SEQ ID NO: 39676 - RNA, 22 nt, Artificial Sequence
  Synthetic
aauacaaacuaagacuuauuua

SEQ ID NO: 39677 - RNA, 23 nt, Artificial Sequence
  Synthetic
caauacaaacuaagacuuauuua

SEQ ID NO: 39678 - RNA, 24 nt, Artificial Sequence
  Synthetic
ucaauacaaacuaagacuuauuua

SEQ ID NO: 39679 - RNA, 21 nt, Artificial Sequence
  Synthetic
aauaauaauuuuguuuauuua

SEQ ID NO: 39680 - RNA, 22 nt, Artificial Sequence
  Synthetic
uaauaauaauuuuguuuauuua

SEQ ID NO: 39681 - RNA, 23 nt, Artificial Sequence
  Synthetic
auaauaauaauuuuguuuauuua

SEQ ID NO: 39682 - RNA, 24 nt, Artificial Sequence
  Synthetic
aauaauaauaauuuuguuuauuua

SEQ ID NO: 39683 - RNA, 18 nt, Artificial Sequence
  Synthetic
acauuuaguagaacuuua

SEQ ID NO: 39684 - RNA, 19 nt, Artificial Sequence
  Synthetic
uacauuuaguagaacuuua

SEQ ID NO: 39685 - RNA, 20 nt, Artificial Sequence
  Synthetic
auacauuuaguagaacuuua

SEQ ID NO: 39686 - RNA, 21 nt, Artificial Sequence
  Synthetic
cauacauuuaguagaacuuua

SEQ ID NO: 39687 - RNA, 22 nt, Artificial Sequence
  Synthetic
acauacauuuaguagaacuuua

SEQ ID NO: 39688 - RNA, 24 nt, Artificial Sequence
  Synthetic
agacauacauuuaguagaacuuua

SEQ ID NO: 39689 - RNA, 20 nt, Artificial Sequence
  Synthetic
uggguuguauaaucacuuua

SEQ ID NO: 39690 - RNA, 21 nt, Artificial Sequence
  Synthetic
cuggguuguauaaucacuuua

SEQ ID NO: 39691 - RNA, 22 nt, Artificial Sequence
  Synthetic
acuggguuguauaaucacuuua

SEQ ID NO: 39692 - RNA, 23 nt, Artificial Sequence
  Synthetic
uacuggguuguauaaucacuuua

SEQ ID NO: 39693 - RNA, 18 nt, Artificial Sequence
  Synthetic
uguuacuuuaggacuuua

SEQ ID NO: 39694 - RNA, 19 nt, Artificial Sequence
  Synthetic
uuguuacuuuaggacuuua

SEQ ID NO: 39695 - RNA, 20 nt, Artificial Sequence
  Synthetic
auuguuacuuuaggacuuua

SEQ ID NO: 39696 - RNA, 21 nt, Artificial Sequence
  Synthetic
cauuguuacuuuaggacuuua

SEQ ID NO: 39697 - RNA, 24 nt, Artificial Sequence
  Synthetic
aggcauuguuacuuuaggacuuua

SEQ ID NO: 39698 - RNA, 18 nt, Artificial Sequence
  Synthetic
ugauaaaauaguacuuua

SEQ ID NO: 39699 - RNA, 19 nt, Artificial Sequence
  Synthetic
augauaaaauaguacuuua

SEQ ID NO: 39700 - RNA, 21 nt, Artificial Sequence
  Synthetic
ugaugauaaaauaguacuuua

SEQ ID NO: 39701 - RNA, 22 nt, Artificial Sequence
  Synthetic
cugaugauaaaauaguacuuua

SEQ ID NO: 39702 - RNA, 23 nt, Artificial Sequence
  Synthetic
acugaugauaaaauaguacuuua

SEQ ID NO: 39703 - RNA, 24 nt, Artificial Sequence
  Synthetic
uacugaugauaaaauaguacuuua

SEQ ID NO: 39704 - RNA, 24 nt, Artificial Sequence
  Synthetic
agggucuuauguuuuuaaccuuua

SEQ ID NO: 39705 - RNA, 18 nt, Artificial Sequence
  Synthetic
accuguguucacccuuua

SEQ ID NO: 39706 - RNA, 19 nt, Artificial Sequence
  Synthetic
uaccuguguucacccuuua

SEQ ID NO: 39707 - RNA, 21 nt, Artificial Sequence
  Synthetic
aguaccuguguucacccuuua

SEQ ID NO: 39708 - RNA, 22 nt, Artificial Sequence
  Synthetic
aaguaccuguguucacccuuua

SEQ ID NO: 39709 - RNA, 23 nt, Artificial Sequence
  Synthetic
aaaguaccuguguucacccuuua

SEQ ID NO: 39710 - RNA, 24 nt, Artificial Sequence
  Synthetic
caaaguaccuguguucacccuuua

SEQ ID NO: 39711 - RNA, 18 nt, Artificial Sequence
  Synthetic
ccaauucaaaugccuuua

SEQ ID NO: 39712 - RNA, 19 nt, Artificial Sequence
  Synthetic
accaauucaaaugccuuua

SEQ ID NO: 39713 - RNA, 20 nt, Artificial Sequence
  Synthetic
caccaauucaaaugccuuua

SEQ ID NO: 39714 - RNA, 21 nt, Artificial Sequence
  Synthetic
ccaccaauucaaaugccuuua

SEQ ID NO: 39715 - RNA, 23 nt, Artificial Sequence
  Synthetic
agccaccaauucaaaugccuuua

SEQ ID NO: 39716 - RNA, 18 nt, Artificial Sequence
  Synthetic
aucugcaugagagcuuua

SEQ ID NO: 39717 - RNA, 19 nt, Artificial Sequence
  Synthetic
aaucugcaugagagcuuua

SEQ ID NO: 39718 - RNA, 20 nt, Artificial Sequence
  Synthetic
aaaucugcaugagagcuuua

SEQ ID NO: 39719 - RNA, 21 nt, Artificial Sequence
  Synthetic
aaaaucugcaugagagcuuua

SEQ ID NO: 39720 - RNA, 22 nt, Artificial Sequence
  Synthetic
uaaaaucugcaugagagcuuua

SEQ ID NO: 39721 - RNA, 23 nt, Artificial Sequence
  Synthetic
uuaaaaucugcaugagagcuuua

SEQ ID NO: 39722 - RNA, 24 nt, Artificial Sequence
  Synthetic
auuaaaaucugcaugagagcuuua

SEQ ID NO: 39723 - RNA, 18 nt, Artificial Sequence
  Synthetic
aaauuaugccgcgcuuua

SEQ ID NO: 39724 - RNA, 19 nt, Artificial Sequence
  Synthetic
aaaauuaugccgcgcuuua

SEQ ID NO: 39725 - RNA, 20 nt, Artificial Sequence
  Synthetic
aaaaauuaugccgcgcuuua

SEQ ID NO: 39726 - RNA, 22 nt, Artificial Sequence
  Synthetic
agaaaaauuaugccgcgcuuua

SEQ ID NO: 39727 - RNA, 23 nt, Artificial Sequence
  Synthetic
aagaaaaauuaugccgcgcuuua

SEQ ID NO: 39728 - RNA, 24 nt, Artificial Sequence
  Synthetic
caagaaaaauuaugccgcgcuuua

SEQ ID NO: 39729 - RNA, 19 nt, Artificial Sequence
  Synthetic
uguguguacaaaaucuuua

SEQ ID NO: 39730 - RNA, 21 nt, Artificial Sequence
  Synthetic
uguguguguacaaaaucuuua

SEQ ID NO: 39731 - RNA, 23 nt, Artificial Sequence
  Synthetic
uguguguguguacaaaaucuuua

SEQ ID NO: 39732 - RNA, 24 nt, Artificial Sequence
  Synthetic
cuguguguguguacaaaaucuuua

SEQ ID NO: 39733 - RNA, 21 nt, Artificial Sequence
  Synthetic
acauuaggaaauauaucuuua

SEQ ID NO: 39734 - RNA, 22 nt, Artificial Sequence
  Synthetic
aacauuaggaaauauaucuuua

SEQ ID NO: 39735 - RNA, 23 nt, Artificial Sequence
  Synthetic
caacauuaggaaauauaucuuua

SEQ ID NO: 39736 - RNA, 24 nt, Artificial Sequence
  Synthetic
ucaacauuaggaaauauaucuuua

SEQ ID NO: 39737 - RNA, 18 nt, Artificial Sequence
  Synthetic
ccuguauuuguaucuuua

SEQ ID NO: 39738 - RNA, 19 nt, Artificial Sequence
  Synthetic
accuguauuuguaucuuua

SEQ ID NO: 39739 - RNA, 20 nt, Artificial Sequence
  Synthetic
caccuguauuuguaucuuua

SEQ ID NO: 39740 - RNA, 21 nt, Artificial Sequence
  Synthetic
acaccuguauuuguaucuuua

SEQ ID NO: 39741 - RNA, 22 nt, Artificial Sequence
  Synthetic
aacaccuguauuuguaucuuua

SEQ ID NO: 39742 - RNA, 23 nt, Artificial Sequence
  Synthetic
caacaccuguauuuguaucuuua

SEQ ID NO: 39743 - RNA, 24 nt, Artificial Sequence
  Synthetic
ucaacaccuguauuuguaucuuua

SEQ ID NO: 39744 - RNA, 18 nt, Artificial Sequence
  Synthetic
auuuauaauuuaucuuua

SEQ ID NO: 39745 - RNA, 19 nt, Artificial Sequence
  Synthetic
aauuuauaauuuaucuuua

SEQ ID NO: 39746 - RNA, 21 nt, Artificial Sequence
  Synthetic
agaauuuauaauuuaucuuua

SEQ ID NO: 39747 - RNA, 22 nt, Artificial Sequence
  Synthetic
uagaauuuauaauuuaucuuua

SEQ ID NO: 39748 - RNA, 23 nt, Artificial Sequence
  Synthetic
cuagaauuuauaauuuaucuuua

SEQ ID NO: 39749 - RNA, 18 nt, Artificial Sequence
  Synthetic
uguugguguaacucuuua

SEQ ID NO: 39750 - RNA, 19 nt, Artificial Sequence
  Synthetic
cuguugguguaacucuuua

SEQ ID NO: 39751 - RNA, 20 nt, Artificial Sequence
  Synthetic
ucuguugguguaacucuuua

SEQ ID NO: 39752 - RNA, 21 nt, Artificial Sequence
  Synthetic
cucuguugguguaacucuuua

SEQ ID NO: 39753 - RNA, 22 nt, Artificial Sequence
  Synthetic
ucucuguugguguaacucuuua

SEQ ID NO: 39754 - RNA, 23 nt, Artificial Sequence
  Synthetic
uucucuguugguguaacucuuua

SEQ ID NO: 39755 - RNA, 24 nt, Artificial Sequence
  Synthetic
auucucuguugguguaacucuuua

SEQ ID NO: 39756 - RNA, 19 nt, Artificial Sequence
  Synthetic
agguggaaucuucucuuua

SEQ ID NO: 39757 - RNA, 20 nt, Artificial Sequence
  Synthetic
cagguggaaucuucucuuua

SEQ ID NO: 39758 - RNA, 21 nt, Artificial Sequence
  Synthetic
ccagguggaaucuucucuuua

SEQ ID NO: 39759 - RNA, 22 nt, Artificial Sequence
  Synthetic
uccagguggaaucuucucuuua

SEQ ID NO: 39760 - RNA, 23 nt, Artificial Sequence
  Synthetic
auccagguggaaucuucucuuua

SEQ ID NO: 39761 - RNA, 18 nt, Artificial Sequence
  Synthetic
cucuguccauuuucuuua

SEQ ID NO: 39762 - RNA, 19 nt, Artificial Sequence
  Synthetic
ucucuguccauuuucuuua

SEQ ID NO: 39763 - RNA, 20 nt, Artificial Sequence
  Synthetic
aucucuguccauuuucuuua

SEQ ID NO: 39764 - RNA, 21 nt, Artificial Sequence
  Synthetic
aaucucuguccauuuucuuua

SEQ ID NO: 39765 - RNA, 22 nt, Artificial Sequence
  Synthetic
uaaucucuguccauuuucuuua

SEQ ID NO: 39766 - RNA, 24 nt, Artificial Sequence
  Synthetic
aguaaucucuguccauuuucuuua

SEQ ID NO: 39767 - RNA, 19 nt, Artificial Sequence
  Synthetic
cgcacucagauuuucuuua

SEQ ID NO: 39768 - RNA, 20 nt, Artificial Sequence
  Synthetic
ccgcacucagauuuucuuua

SEQ ID NO: 39769 - RNA, 21 nt, Artificial Sequence
  Synthetic
uccgcacucagauuuucuuua

SEQ ID NO: 39770 - RNA, 22 nt, Artificial Sequence
  Synthetic
uuccgcacucagauuuucuuua

SEQ ID NO: 39771 - RNA, 23 nt, Artificial Sequence
  Synthetic
uuuccgcacucagauuuucuuua

SEQ ID NO: 39772 - RNA, 24 nt, Artificial Sequence
  Synthetic
auuuccgcacucagauuuucuuua

SEQ ID NO: 39773 - RNA, 21 nt, Artificial Sequence
  Synthetic
uaauacuuauauuuuucuuua

SEQ ID NO: 39774 - RNA, 22 nt, Artificial Sequence
  Synthetic
auaauacuuauauuuuucuuua

SEQ ID NO: 39775 - RNA, 23 nt, Artificial Sequence
  Synthetic
cauaauacuuauauuuuucuuua

SEQ ID NO: 39776 - RNA, 24 nt, Artificial Sequence
  Synthetic
ucauaauacuuauauuuuucuuua

SEQ ID NO: 39777 - RNA, 18 nt, Artificial Sequence
  Synthetic
acuugucccaccaguuua

SEQ ID NO: 39778 - RNA, 19 nt, Artificial Sequence
  Synthetic
aacuugucccaccaguuua

SEQ ID NO: 39779 - RNA, 22 nt, Artificial Sequence
  Synthetic
aggaacuugucccaccaguuua

SEQ ID NO: 39780 - RNA, 23 nt, Artificial Sequence
  Synthetic
uaggaacuugucccaccaguuua

SEQ ID NO: 39781 - RNA, 24 nt, Artificial Sequence
  Synthetic
uuaggaacuugucccaccaguuua

SEQ ID NO: 39782 - RNA, 19 nt, Artificial Sequence
  Synthetic
agcuuucuucuuuaguuua

SEQ ID NO: 39783 - RNA, 20 nt, Artificial Sequence
  Synthetic
cagcuuucuucuuuaguuua

SEQ ID NO: 39784 - RNA, 21 nt, Artificial Sequence
  Synthetic
ucagcuuucuucuuuaguuua

SEQ ID NO: 39785 - RNA, 22 nt, Artificial Sequence
  Synthetic
cucagcuuucuucuuuaguuua

SEQ ID NO: 39786 - RNA, 23 nt, Artificial Sequence
  Synthetic
ccucagcuuucuucuuuaguuua

SEQ ID NO: 39787 - RNA, 24 nt, Artificial Sequence
  Synthetic
cccucagcuuucuucuuuaguuua

SEQ ID NO: 39788 - RNA, 18 nt, Artificial Sequence
  Synthetic
cauuugggggcagguuua

SEQ ID NO: 39789 - RNA, 19 nt, Artificial Sequence
  Synthetic
acauuugggggcagguuua

SEQ ID NO: 39790 - RNA, 20 nt, Artificial Sequence
  Synthetic
uacauuugggggcagguuua

SEQ ID NO: 39791 - RNA, 21 nt, Artificial Sequence
  Synthetic
auacauuugggggcagguuua

SEQ ID NO: 39792 - RNA, 23 nt, Artificial Sequence
  Synthetic
ugauacauuugggggcagguuua

SEQ ID NO: 39793 - RNA, 24 nt, Artificial Sequence
  Synthetic
cugauacauuugggggcagguuua

SEQ ID NO: 39794 - RNA, 18 nt, Artificial Sequence
  Synthetic
auuuagagcucauguuua

SEQ ID NO: 39795 - RNA, 19 nt, Artificial Sequence
  Synthetic
uauuuagagcucauguuua

SEQ ID NO: 39796 - RNA, 20 nt, Artificial Sequence
  Synthetic
cuauuuagagcucauguuua

SEQ ID NO: 39797 - RNA, 21 nt, Artificial Sequence
  Synthetic
acuauuuagagcucauguuua

SEQ ID NO: 39798 - RNA, 22 nt, Artificial Sequence
  Synthetic
uacuauuuagagcucauguuua

SEQ ID NO: 39799 - RNA, 23 nt, Artificial Sequence
  Synthetic
cuacuauuuagagcucauguuua

SEQ ID NO: 39800 - RNA, 24 nt, Artificial Sequence
  Synthetic
ucuacuauuuagagcucauguuua

SEQ ID NO: 39801 - RNA, 18 nt, Artificial Sequence
  Synthetic
caguaggccagauguuua

SEQ ID NO: 39802 - RNA, 19 nt, Artificial Sequence
  Synthetic
acaguaggccagauguuua

SEQ ID NO: 39803 - RNA, 20 nt, Artificial Sequence
  Synthetic
aacaguaggccagauguuua

SEQ ID NO: 39804 - RNA, 21 nt, Artificial Sequence
  Synthetic
aaacaguaggccagauguuua

SEQ ID NO: 39805 - RNA, 22 nt, Artificial Sequence
  Synthetic
uaaacaguaggccagauguuua

SEQ ID NO: 39806 - RNA, 23 nt, Artificial Sequence
  Synthetic
uuaaacaguaggccagauguuua

SEQ ID NO: 39807 - RNA, 24 nt, Artificial Sequence
  Synthetic
uuuaaacaguaggccagauguuua

SEQ ID NO: 39808 - RNA, 18 nt, Artificial Sequence
  Synthetic
cauaaaacgcuauguuua

SEQ ID NO: 39809 - RNA, 19 nt, Artificial Sequence
  Synthetic
ccauaaaacgcuauguuua

SEQ ID NO: 39810 - RNA, 20 nt, Artificial Sequence
  Synthetic
accauaaaacgcuauguuua

SEQ ID NO: 39811 - RNA, 21 nt, Artificial Sequence
  Synthetic
caccauaaaacgcuauguuua

SEQ ID NO: 39812 - RNA, 22 nt, Artificial Sequence
  Synthetic
ucaccauaaaacgcuauguuua

SEQ ID NO: 39813 - RNA, 24 nt, Artificial Sequence
  Synthetic
agucaccauaaaacgcuauguuua

SEQ ID NO: 39814 - RNA, 18 nt, Artificial Sequence
  Synthetic
cauauaaugcuauguuua

SEQ ID NO: 39815 - RNA, 19 nt, Artificial Sequence
  Synthetic
acauauaaugcuauguuua

SEQ ID NO: 39816 - RNA, 20 nt, Artificial Sequence
  Synthetic
aacauauaaugcuauguuua

SEQ ID NO: 39817 - RNA, 21 nt, Artificial Sequence
  Synthetic
aaacauauaaugcuauguuua

SEQ ID NO: 39818 - RNA, 22 nt, Artificial Sequence
  Synthetic
uaaacauauaaugcuauguuua

SEQ ID NO: 39819 - RNA, 23 nt, Artificial Sequence
  Synthetic
cuaaacauauaaugcuauguuua

SEQ ID NO: 39820 - RNA, 24 nt, Artificial Sequence
  Synthetic
acuaaacauauaaugcuauguuua

SEQ ID NO: 39821 - RNA, 18 nt, Artificial Sequence
  Synthetic
uaggacguguccuguuua

SEQ ID NO: 39822 - RNA, 19 nt, Artificial Sequence
  Synthetic
uuaggacguguccuguuua

SEQ ID NO: 39823 - RNA, 20 nt, Artificial Sequence
  Synthetic
uuuaggacguguccuguuua

SEQ ID NO: 39824 - RNA, 21 nt, Artificial Sequence
  Synthetic
auuuaggacguguccuguuua

SEQ ID NO: 39825 - RNA, 23 nt, Artificial Sequence
  Synthetic
ugauuuaggacguguccuguuua

SEQ ID NO: 39826 - RNA, 24 nt, Artificial Sequence
  Synthetic
cugauuuaggacguguccuguuua

SEQ ID NO: 39827 - RNA, 19 nt, Artificial Sequence
  Synthetic
ugacaacaauuaguguuua

SEQ ID NO: 39828 - RNA, 22 nt, Artificial Sequence
  Synthetic
aggugacaacaauuaguguuua

SEQ ID NO: 39829 - RNA, 23 nt, Artificial Sequence
  Synthetic
caggugacaacaauuaguguuua

SEQ ID NO: 39830 - RNA, 24 nt, Artificial Sequence
  Synthetic
ucaggugacaacaauuaguguuua

SEQ ID NO: 39831 - RNA, 20 nt, Artificial Sequence
  Synthetic
aggugacuuuggaaauuuua

SEQ ID NO: 39832 - RNA, 21 nt, Artificial Sequence
  Synthetic
uaggugacuuuggaaauuuua

SEQ ID NO: 39833 - RNA, 22 nt, Artificial Sequence
  Synthetic
uuaggugacuuuggaaauuuua

SEQ ID NO: 39834 - RNA, 23 nt, Artificial Sequence
  Synthetic
auuaggugacuuuggaaauuuua

SEQ ID NO: 39835 - RNA, 24 nt, Artificial Sequence
  Synthetic
uauuaggugacuuuggaaauuuua

SEQ ID NO: 39836 - RNA, 21 nt, Artificial Sequence
  Synthetic
auggaauaaauguaaauuuua

SEQ ID NO: 39837 - RNA, 22 nt, Artificial Sequence
  Synthetic
aauggaauaaauguaaauuuua

SEQ ID NO: 39838 - RNA, 23 nt, Artificial Sequence
  Synthetic
aaauggaauaaauguaaauuuua

SEQ ID NO: 39839 - RNA, 24 nt, Artificial Sequence
  Synthetic
aaaauggaauaaauguaaauuuua

SEQ ID NO: 39840 - RNA, 21 nt, Artificial Sequence
  Synthetic
uaauguuuuacuuaaauuuua

SEQ ID NO: 39841 - RNA, 22 nt, Artificial Sequence
  Synthetic
uuaauguuuuacuuaaauuuua

SEQ ID NO: 39842 - RNA, 23 nt, Artificial Sequence
  Synthetic
cuuaauguuuuacuuaaauuuua

SEQ ID NO: 39843 - RNA, 24 nt, Artificial Sequence
  Synthetic
ucuuaauguuuuacuuaaauuuua

SEQ ID NO: 39844 - RNA, 18 nt, Artificial Sequence
  Synthetic
ugaguagguauaauuuua

SEQ ID NO: 39845 - RNA, 19 nt, Artificial Sequence
  Synthetic
uugaguagguauaauuuua

SEQ ID NO: 39846 - RNA, 20 nt, Artificial Sequence
  Synthetic
uuugaguagguauaauuuua

SEQ ID NO: 39847 - RNA, 21 nt, Artificial Sequence
  Synthetic
auuugaguagguauaauuuua

SEQ ID NO: 39848 - RNA, 23 nt, Artificial Sequence
  Synthetic
agauuugaguagguauaauuuua

SEQ ID NO: 39849 - RNA, 24 nt, Artificial Sequence
  Synthetic
cagauuugaguagguauaauuuua

SEQ ID NO: 39850 - RNA, 19 nt, Artificial Sequence
  Synthetic
cgcucucauuauaauuuua

SEQ ID NO: 39851 - RNA, 20 nt, Artificial Sequence
  Synthetic
ucgcucucauuauaauuuua

SEQ ID NO: 39852 - RNA, 21 nt, Artificial Sequence
  Synthetic
aucgcucucauuauaauuuua

SEQ ID NO: 39853 - RNA, 22 nt, Artificial Sequence
  Synthetic
uaucgcucucauuauaauuuua

SEQ ID NO: 39854 - RNA, 24 nt, Artificial Sequence
  Synthetic
uguaucgcucucauuauaauuuua

SEQ ID NO: 39855 - RNA, 18 nt, Artificial Sequence
  Synthetic
uuuugaaaugccauuuua

SEQ ID NO: 39856 - RNA, 19 nt, Artificial Sequence
  Synthetic
auuuugaaaugccauuuua

SEQ ID NO: 39857 - RNA, 20 nt, Artificial Sequence
  Synthetic
aauuuugaaaugccauuuua

SEQ ID NO: 39858 - RNA, 21 nt, Artificial Sequence
  Synthetic
aaauuuugaaaugccauuuua

SEQ ID NO: 39859 - RNA, 22 nt, Artificial Sequence
  Synthetic
uaaauuuugaaaugccauuuua

SEQ ID NO: 39860 - RNA, 23 nt, Artificial Sequence
  Synthetic
auaaauuuugaaaugccauuuua

SEQ ID NO: 39861 - RNA, 24 nt, Artificial Sequence
  Synthetic
uauaaauuuugaaaugccauuuua

SEQ ID NO: 39862 - RNA, 18 nt, Artificial Sequence
  Synthetic
cuucuuaaacagauuuua

SEQ ID NO: 39863 - RNA, 19 nt, Artificial Sequence
  Synthetic
ucuucuuaaacagauuuua

SEQ ID NO: 39864 - RNA, 20 nt, Artificial Sequence
  Synthetic
uucuucuuaaacagauuuua

SEQ ID NO: 39865 - RNA, 21 nt, Artificial Sequence
  Synthetic
uuucuucuuaaacagauuuua

SEQ ID NO: 39866 - RNA, 22 nt, Artificial Sequence
  Synthetic
cuuucuucuuaaacagauuuua

SEQ ID NO: 39867 - RNA, 24 nt, Artificial Sequence
  Synthetic
ugcuuucuucuuaaacagauuuua

SEQ ID NO: 39868 - RNA, 18 nt, Artificial Sequence
  Synthetic
aaguacaguaugauuuua

SEQ ID NO: 39869 - RNA, 19 nt, Artificial Sequence
  Synthetic
caaguacaguaugauuuua

SEQ ID NO: 39870 - RNA, 20 nt, Artificial Sequence
  Synthetic
ucaaguacaguaugauuuua

SEQ ID NO: 39871 - RNA, 21 nt, Artificial Sequence
  Synthetic
uucaaguacaguaugauuuua

SEQ ID NO: 39872 - RNA, 23 nt, Artificial Sequence
  Synthetic
aguucaaguacaguaugauuuua

SEQ ID NO: 39873 - RNA, 24 nt, Artificial Sequence
  Synthetic
caguucaaguacaguaugauuuua

SEQ ID NO: 39874 - RNA, 18 nt, Artificial Sequence
  Synthetic
auguuccaugugauuuua

SEQ ID NO: 39875 - RNA, 19 nt, Artificial Sequence
  Synthetic
aauguuccaugugauuuua

SEQ ID NO: 39876 - RNA, 20 nt, Artificial Sequence
  Synthetic
aaauguuccaugugauuuua

SEQ ID NO: 39877 - RNA, 21 nt, Artificial Sequence
  Synthetic
aaaauguuccaugugauuuua

SEQ ID NO: 39878 - RNA, 22 nt, Artificial Sequence
  Synthetic
caaaauguuccaugugauuuua

SEQ ID NO: 39879 - RNA, 23 nt, Artificial Sequence
  Synthetic
ccaaaauguuccaugugauuuua

SEQ ID NO: 39880 - RNA, 24 nt, Artificial Sequence
  Synthetic
accaaaauguuccaugugauuuua

SEQ ID NO: 39881 - RNA, 18 nt, Artificial Sequence
  Synthetic
agguggaauucuauuuua

SEQ ID NO: 39882 - RNA, 19 nt, Artificial Sequence
  Synthetic
uagguggaauucuauuuua

SEQ ID NO: 39883 - RNA, 20 nt, Artificial Sequence
  Synthetic
uuagguggaauucuauuuua

SEQ ID NO: 39884 - RNA, 21 nt, Artificial Sequence
  Synthetic
uuuagguggaauucuauuuua

SEQ ID NO: 39885 - RNA, 22 nt, Artificial Sequence
  Synthetic
auuuagguggaauucuauuuua

SEQ ID NO: 39886 - RNA, 23 nt, Artificial Sequence
  Synthetic
uauuuagguggaauucuauuuua

SEQ ID NO: 39887 - RNA, 24 nt, Artificial Sequence
  Synthetic
uuauuuagguggaauucuauuuua

SEQ ID NO: 39888 - RNA, 18 nt, Artificial Sequence
  Synthetic
ugaggcuucaguauuuua

SEQ ID NO: 39889 - RNA, 19 nt, Artificial Sequence
  Synthetic
uugaggcuucaguauuuua

SEQ ID NO: 39890 - RNA, 20 nt, Artificial Sequence
  Synthetic
auugaggcuucaguauuuua

SEQ ID NO: 39891 - RNA, 21 nt, Artificial Sequence
  Synthetic
cauugaggcuucaguauuuua

SEQ ID NO: 39892 - RNA, 24 nt, Artificial Sequence
  Synthetic
cggcauugaggcuucaguauuuua

SEQ ID NO: 39893 - RNA, 18 nt, Artificial Sequence
  Synthetic
acuugagauuuuauuuua

SEQ ID NO: 39894 - RNA, 19 nt, Artificial Sequence
  Synthetic
aacuugagauuuuauuuua

SEQ ID NO: 39895 - RNA, 22 nt, Artificial Sequence
  Synthetic
aggaacuugagauuuuauuuua

SEQ ID NO: 39896 - RNA, 24 nt, Artificial Sequence
  Synthetic
ugaggaacuugagauuuuauuuua

SEQ ID NO: 39897 - RNA, 21 nt, Artificial Sequence
  Synthetic
uaauguuaauaauaacuuuua

SEQ ID NO: 39898 - RNA, 22 nt, Artificial Sequence
  Synthetic
cuaauguuaauaauaacuuuua

SEQ ID NO: 39899 - RNA, 23 nt, Artificial Sequence
  Synthetic
ccuaauguuaauaauaacuuuua

SEQ ID NO: 39900 - RNA, 24 nt, Artificial Sequence
  Synthetic
uccuaauguuaauaauaacuuuua

SEQ ID NO: 39901 - RNA, 18 nt, Artificial Sequence
  Synthetic
aggaaugcuauacuuuua

SEQ ID NO: 39902 - RNA, 19 nt, Artificial Sequence
  Synthetic
uaggaaugcuauacuuuua

SEQ ID NO: 39903 - RNA, 20 nt, Artificial Sequence
  Synthetic
auaggaaugcuauacuuuua

SEQ ID NO: 39904 - RNA, 21 nt, Artificial Sequence
  Synthetic
aauaggaaugcuauacuuuua

SEQ ID NO: 39905 - RNA, 22 nt, Artificial Sequence
  Synthetic
caauaggaaugcuauacuuuua

SEQ ID NO: 39906 - RNA, 23 nt, Artificial Sequence
  Synthetic
ucaauaggaaugcuauacuuuua

SEQ ID NO: 39907 - RNA, 20 nt, Artificial Sequence
  Synthetic
agguguacaaagaccuuuua

SEQ ID NO: 39908 - RNA, 21 nt, Artificial Sequence
  Synthetic
uagguguacaaagaccuuuua

SEQ ID NO: 39909 - RNA, 22 nt, Artificial Sequence
  Synthetic
uuagguguacaaagaccuuuua

SEQ ID NO: 39910 - RNA, 23 nt, Artificial Sequence
  Synthetic
auuagguguacaaagaccuuuua

SEQ ID NO: 39911 - RNA, 24 nt, Artificial Sequence
  Synthetic
uauuagguguacaaagaccuuuua

SEQ ID NO: 39912 - RNA, 18 nt, Artificial Sequence
  Synthetic
ccacugucuugccuuuua

SEQ ID NO: 39913 - RNA, 20 nt, Artificial Sequence
  Synthetic
agccacugucuugccuuuua

SEQ ID NO: 39914 - RNA, 22 nt, Artificial Sequence
  Synthetic
ugagccacugucuugccuuuua

SEQ ID NO: 39915 - RNA, 23 nt, Artificial Sequence
  Synthetic
augagccacugucuugccuuuua

SEQ ID NO: 39916 - RNA, 24 nt, Artificial Sequence
  Synthetic
caugagccacugucuugccuuuua

SEQ ID NO: 39917 - RNA, 18 nt, Artificial Sequence
  Synthetic
uguggcuauauucuuuua

SEQ ID NO: 39918 - RNA, 19 nt, Artificial Sequence
  Synthetic
cuguggcuauauucuuuua

SEQ ID NO: 39919 - RNA, 20 nt, Artificial Sequence
  Synthetic
ccuguggcuauauucuuuua

SEQ ID NO: 39920 - RNA, 21 nt, Artificial Sequence
  Synthetic
uccuguggcuauauucuuuua

SEQ ID NO: 39921 - RNA, 22 nt, Artificial Sequence
  Synthetic
cuccuguggcuauauucuuuua

SEQ ID NO: 39922 - RNA, 23 nt, Artificial Sequence
  Synthetic
ccuccuguggcuauauucuuuua

SEQ ID NO: 39923 - RNA, 24 nt, Artificial Sequence
  Synthetic
accuccuguggcuauauucuuuua

SEQ ID NO: 39924 - RNA, 21 nt, Artificial Sequence
  Synthetic
acagauuucuauuuucuuuua

SEQ ID NO: 39925 - RNA, 23 nt, Artificial Sequence
  Synthetic
agacagauuucuauuuucuuuua

SEQ ID NO: 39926 - RNA, 24 nt, Artificial Sequence
  Synthetic
aagacagauuucuauuuucuuuua

SEQ ID NO: 39927 - RNA, 18 nt, Artificial Sequence
  Synthetic
uuuugaauggaaguuuua

SEQ ID NO: 39928 - RNA, 19 nt, Artificial Sequence
  Synthetic
auuuugaauggaaguuuua

SEQ ID NO: 39929 - RNA, 20 nt, Artificial Sequence
  Synthetic
aauuuugaauggaaguuuua

SEQ ID NO: 39930 - RNA, 21 nt, Artificial Sequence
  Synthetic
aaauuuugaauggaaguuuua

SEQ ID NO: 39931 - RNA, 22 nt, Artificial Sequence
  Synthetic
uaaauuuugaauggaaguuuua

SEQ ID NO: 39932 - RNA, 23 nt, Artificial Sequence
  Synthetic
uuaaauuuugaauggaaguuuua

SEQ ID NO: 39933 - RNA, 24 nt, Artificial Sequence
  Synthetic
auuaaauuuugaauggaaguuuua

SEQ ID NO: 39934 - RNA, 18 nt, Artificial Sequence
  Synthetic
cucacccuugaaguuuua

SEQ ID NO: 39935 - RNA, 19 nt, Artificial Sequence
  Synthetic
ucucacccuugaaguuuua

SEQ ID NO: 39936 - RNA, 20 nt, Artificial Sequence
  Synthetic
uucucacccuugaaguuuua

SEQ ID NO: 39937 - RNA, 21 nt, Artificial Sequence
  Synthetic
uuucucacccuugaaguuuua

SEQ ID NO: 39938 - RNA, 22 nt, Artificial Sequence
  Synthetic
cuuucucacccuugaaguuuua

SEQ ID NO: 39939 - RNA, 24 nt, Artificial Sequence
  Synthetic
agcuuucucacccuugaaguuuua

SEQ ID NO: 39940 - RNA, 18 nt, Artificial Sequence
  Synthetic
auugaaugagcaguuuua

SEQ ID NO: 39941 - RNA, 19 nt, Artificial Sequence
  Synthetic
aauugaaugagcaguuuua

SEQ ID NO: 39942 - RNA, 20 nt, Artificial Sequence
  Synthetic
aaauugaaugagcaguuuua

SEQ ID NO: 39943 - RNA, 21 nt, Artificial Sequence
  Synthetic
aaaauugaaugagcaguuuua

SEQ ID NO: 39944 - RNA, 22 nt, Artificial Sequence
  Synthetic
aaaaauugaaugagcaguuuua

SEQ ID NO: 39945 - RNA, 23 nt, Artificial Sequence
  Synthetic
uaaaaauugaaugagcaguuuua

SEQ ID NO: 39946 - RNA, 24 nt, Artificial Sequence
  Synthetic
cuaaaaauugaaugagcaguuuua

SEQ ID NO: 39947 - RNA, 19 nt, Artificial Sequence
  Synthetic
ugaaguuaucuuaguuuua

SEQ ID NO: 39948 - RNA, 20 nt, Artificial Sequence
  Synthetic
uugaaguuaucuuaguuuua

SEQ ID NO: 39949 - RNA, 21 nt, Artificial Sequence
  Synthetic
cuugaaguuaucuuaguuuua

SEQ ID NO: 39950 - RNA, 22 nt, Artificial Sequence
  Synthetic
ucuugaaguuaucuuaguuuua

SEQ ID NO: 39951 - RNA, 23 nt, Artificial Sequence
  Synthetic
uucuugaaguuaucuuaguuuua

SEQ ID NO: 39952 - RNA, 24 nt, Artificial Sequence
  Synthetic
uuucuugaaguuaucuuaguuuua

SEQ ID NO: 39953 - RNA, 18 nt, Artificial Sequence
  Synthetic
caugcguaucucguuuua

SEQ ID NO: 39954 - RNA, 19 nt, Artificial Sequence
  Synthetic
acaugcguaucucguuuua

SEQ ID NO: 39955 - RNA, 20 nt, Artificial Sequence
  Synthetic
uacaugcguaucucguuuua

SEQ ID NO: 39956 - RNA, 22 nt, Artificial Sequence
  Synthetic
uguacaugcguaucucguuuua

SEQ ID NO: 39957 - RNA, 23 nt, Artificial Sequence
  Synthetic
auguacaugcguaucucguuuua

SEQ ID NO: 39958 - RNA, 24 nt, Artificial Sequence
  Synthetic
uauguacaugcguaucucguuuua

SEQ ID NO: 39959 - RNA, 18 nt, Artificial Sequence
  Synthetic
ucuaugauaaagguuuua

SEQ ID NO: 39960 - RNA, 19 nt, Artificial Sequence
  Synthetic
uucuaugauaaagguuuua

SEQ ID NO: 39961 - RNA, 20 nt, Artificial Sequence
  Synthetic
uuucuaugauaaagguuuua

SEQ ID NO: 39962 - RNA, 21 nt, Artificial Sequence
  Synthetic
uuuucuaugauaaagguuuua

SEQ ID NO: 39963 - RNA, 24 nt, Artificial Sequence
  Synthetic
ugguuuucuaugauaaagguuuua

SEQ ID NO: 39964 - RNA, 18 nt, Artificial Sequence
  Synthetic
ucagggaccacuguuuua

SEQ ID NO: 39965 - RNA, 22 nt, Artificial Sequence
  Synthetic
agggucagggaccacuguuuua

SEQ ID NO: 39966 - RNA, 23 nt, Artificial Sequence
  Synthetic
aagggucagggaccacuguuuua

SEQ ID NO: 39967 - RNA, 24 nt, Artificial Sequence
  Synthetic
aaagggucagggaccacuguuuua

SEQ ID NO: 39968 - RNA, 21 nt, Artificial Sequence
  Synthetic
acaccaaaaauaaaauuuuua

SEQ ID NO: 39969 - RNA, 22 nt, Artificial Sequence
  Synthetic
aacaccaaaaauaaaauuuuua

SEQ ID NO: 39970 - RNA, 24 nt, Artificial Sequence
  Synthetic
ugaacaccaaaaauaaaauuuuua

SEQ ID NO: 39971 - RNA, 18 nt, Artificial Sequence
  Synthetic
ccuuguaccaaauuuuua

SEQ ID NO: 39972 - RNA, 19 nt, Artificial Sequence
  Synthetic
accuuguaccaaauuuuua

SEQ ID NO: 39973 - RNA, 20 nt, Artificial Sequence
  Synthetic
uaccuuguaccaaauuuuua

SEQ ID NO: 39974 - RNA, 22 nt, Artificial Sequence
  Synthetic
uguaccuuguaccaaauuuuua

SEQ ID NO: 39975 - RNA, 23 nt, Artificial Sequence
  Synthetic
cuguaccuuguaccaaauuuuua

SEQ ID NO: 39976 - RNA, 24 nt, Artificial Sequence
  Synthetic
ucuguaccuuguaccaaauuuuua

SEQ ID NO: 39977 - RNA, 19 nt, Artificial Sequence
  Synthetic
ugugcuuuuaugauuuuua

SEQ ID NO: 39978 - RNA, 20 nt, Artificial Sequence
  Synthetic
uugugcuuuuaugauuuuua

SEQ ID NO: 39979 - RNA, 21 nt, Artificial Sequence
  Synthetic
auugugcuuuuaugauuuuua

SEQ ID NO: 39980 - RNA, 23 nt, Artificial Sequence
  Synthetic
ugauugugcuuuuaugauuuuua

SEQ ID NO: 39981 - RNA, 24 nt, Artificial Sequence
  Synthetic
uugauugugcuuuuaugauuuuua

SEQ ID NO: 39982 - RNA, 18 nt, Artificial Sequence
  Synthetic
aaucagagacuauuuuua

SEQ ID NO: 39983 - RNA, 21 nt, Artificial Sequence
  Synthetic
uggaaucagagacuauuuuua

SEQ ID NO: 39984 - RNA, 22 nt, Artificial Sequence
  Synthetic
uuggaaucagagacuauuuuua

SEQ ID NO: 39985 - RNA, 23 nt, Artificial Sequence
  Synthetic
auuggaaucagagacuauuuuua

SEQ ID NO: 39986 - RNA, 24 nt, Artificial Sequence
  Synthetic
aauuggaaucagagacuauuuuua

SEQ ID NO: 39987 - RNA, 18 nt, Artificial Sequence
  Synthetic
uuugucuaucuauuuuua

SEQ ID NO: 39988 - RNA, 19 nt, Artificial Sequence
  Synthetic
cuuugucuaucuauuuuua

SEQ ID NO: 39989 - RNA, 20 nt, Artificial Sequence
  Synthetic
ucuuugucuaucuauuuuua

SEQ ID NO: 39990 - RNA, 21 nt, Artificial Sequence
  Synthetic
uucuuugucuaucuauuuuua

SEQ ID NO: 39991 - RNA, 22 nt, Artificial Sequence
  Synthetic
uuucuuugucuaucuauuuuua

SEQ ID NO: 39992 - RNA, 23 nt, Artificial Sequence
  Synthetic
uuuucuuugucuaucuauuuuua

SEQ ID NO: 39993 - RNA, 24 nt, Artificial Sequence
  Synthetic
auuuucuuugucuaucuauuuuua

SEQ ID NO: 39994 - RNA, 18 nt, Artificial Sequence
  Synthetic
aaugccauaguauuuuua

SEQ ID NO: 39995 - RNA, 19 nt, Artificial Sequence
  Synthetic
uaaugccauaguauuuuua

SEQ ID NO: 39996 - RNA, 20 nt, Artificial Sequence
  Synthetic
uuaaugccauaguauuuuua

SEQ ID NO: 39997 - RNA, 21 nt, Artificial Sequence
  Synthetic
cuuaaugccauaguauuuuua

SEQ ID NO: 39998 - RNA, 22 nt, Artificial Sequence
  Synthetic
ucuuaaugccauaguauuuuua

SEQ ID NO: 39999 - RNA, 24 nt, Artificial Sequence
  Synthetic
agucuuaaugccauaguauuuuua

SEQ ID NO: 40000 - RNA, 21 nt, Artificial Sequence
  Synthetic
cugcuacuuuggguauuuuua

SEQ ID NO: 40001 - RNA, 22 nt, Artificial Sequence
  Synthetic
ucugcuacuuuggguauuuuua

SEQ ID NO: 40002 - RNA, 23 nt, Artificial Sequence
  Synthetic
uucugcuacuuuggguauuuuua

SEQ ID NO: 40003 - RNA, 24 nt, Artificial Sequence
  Synthetic
uuucugcuacuuuggguauuuuua

SEQ ID NO: 40004 - RNA, 18 nt, Artificial Sequence
  Synthetic
uacaaaauguacuuuuua

SEQ ID NO: 40005 - RNA, 19 nt, Artificial Sequence
  Synthetic
uuacaaaauguacuuuuua

SEQ ID NO: 40006 - RNA, 20 nt, Artificial Sequence
  Synthetic
cuuacaaaauguacuuuuua

SEQ ID NO: 40007 - RNA, 18 nt, Artificial Sequence
  Synthetic
acuauggcuuccuuuuua

SEQ ID NO: 40008 - RNA, 22 nt, Artificial Sequence
  Synthetic
agggacuauggcuuccuuuuua

SEQ ID NO: 40009 - RNA, 23 nt, Artificial Sequence
  Synthetic
aagggacuauggcuuccuuuuua

SEQ ID NO: 40010 - RNA, 24 nt, Artificial Sequence
  Synthetic
caagggacuauggcuuccuuuuua

SEQ ID NO: 40011 - RNA, 20 nt, Artificial Sequence
  Synthetic
agguuaggcaaggcuuuuua

SEQ ID NO: 40012 - RNA, 21 nt, Artificial Sequence
  Synthetic
uagguuaggcaaggcuuuuua

SEQ ID NO: 40013 - RNA, 22 nt, Artificial Sequence
  Synthetic
cuagguuaggcaaggcuuuuua

SEQ ID NO: 40014 - RNA, 23 nt, Artificial Sequence
  Synthetic
ucuagguuaggcaaggcuuuuua

SEQ ID NO: 40015 - RNA, 24 nt, Artificial Sequence
  Synthetic
cucuagguuaggcaaggcuuuuua

SEQ ID NO: 40016 - RNA, 18 nt, Artificial Sequence
  Synthetic
uccaucuuucucuuuuua

SEQ ID NO: 40017 - RNA, 19 nt, Artificial Sequence
  Synthetic
cuccaucuuucucuuuuua

SEQ ID NO: 40018 - RNA, 20 nt, Artificial Sequence
  Synthetic
ccuccaucuuucucuuuuua

SEQ ID NO: 40019 - RNA, 21 nt, Artificial Sequence
  Synthetic
uccuccaucuuucucuuuuua

SEQ ID NO: 40020 - RNA, 22 nt, Artificial Sequence
  Synthetic
uuccuccaucuuucucuuuuua

SEQ ID NO: 40021 - RNA, 24 nt, Artificial Sequence
  Synthetic
aguuccuccaucuuucucuuuuua

SEQ ID NO: 40022 - RNA, 18 nt, Artificial Sequence
  Synthetic
uuuucaagagucuuuuua

SEQ ID NO: 40023 - RNA, 19 nt, Artificial Sequence
  Synthetic
uuuuucaagagucuuuuua

SEQ ID NO: 40024 - RNA, 20 nt, Artificial Sequence
  Synthetic
auuuuucaagagucuuuuua

SEQ ID NO: 40025 - RNA, 21 nt, Artificial Sequence
  Synthetic
cauuuuucaagagucuuuuua

SEQ ID NO: 40026 - RNA, 22 nt, Artificial Sequence
  Synthetic
ucauuuuucaagagucuuuuua

SEQ ID NO: 40027 - RNA, 23 nt, Artificial Sequence
  Synthetic
cucauuuuucaagagucuuuuua

SEQ ID NO: 40028 - RNA, 24 nt, Artificial Sequence
  Synthetic
acucauuuuucaagagucuuuuua

SEQ ID NO: 40029 - RNA, 18 nt, Artificial Sequence
  Synthetic
aguauuuugagguuuuua

SEQ ID NO: 40030 - RNA, 22 nt, Artificial Sequence
  Synthetic
ugggaguauuuugagguuuuua

SEQ ID NO: 40031 - RNA, 24 nt, Artificial Sequence
  Synthetic
cgugggaguauuuugagguuuuua

SEQ ID NO: 40032 - RNA, 18 nt, Artificial Sequence
  Synthetic
aggcaggagggaaaaaac

SEQ ID NO: 40033 - RNA, 20 nt, Artificial Sequence
  Synthetic
ugaggcaggagggaaaaaac

SEQ ID NO: 40034 - RNA, 22 nt, Artificial Sequence
  Synthetic
ugugaggcaggagggaaaaaac

SEQ ID NO: 40035 - RNA, 24 nt, Artificial Sequence
  Synthetic
ugugugaggcaggagggaaaaaac

SEQ ID NO: 40036 - RNA, 20 nt, Artificial Sequence
  Synthetic
uggaacaccaccagaaaaac

SEQ ID NO: 40037 - RNA, 18 nt, Artificial Sequence
  Synthetic
uaaaaucggcagaaaaac

SEQ ID NO: 40038 - RNA, 19 nt, Artificial Sequence
  Synthetic
auaaaaucggcagaaaaac

SEQ ID NO: 40039 - RNA, 20 nt, Artificial Sequence
  Synthetic
aauaaaaucggcagaaaaac

SEQ ID NO: 40040 - RNA, 23 nt, Artificial Sequence
  Synthetic
aggaauaaaaucggcagaaaaac

SEQ ID NO: 40041 - RNA, 24 nt, Artificial Sequence
  Synthetic
uaggaauaaaaucggcagaaaaac

SEQ ID NO: 40042 - RNA, 18 nt, Artificial Sequence
  Synthetic
ccuguaguucagaaaaac

SEQ ID NO: 40043 - RNA, 19 nt, Artificial Sequence
  Synthetic
accuguaguucagaaaaac

SEQ ID NO: 40044 - RNA, 20 nt, Artificial Sequence
  Synthetic
uaccuguaguucagaaaaac

SEQ ID NO: 40045 - RNA, 21 nt, Artificial Sequence
  Synthetic
uuaccuguaguucagaaaaac

SEQ ID NO: 40046 - RNA, 23 nt, Artificial Sequence
  Synthetic
uguuaccuguaguucagaaaaac

SEQ ID NO: 40047 - RNA, 24 nt, Artificial Sequence
  Synthetic
auguuaccuguaguucagaaaaac

SEQ ID NO: 40048 - RNA, 18 nt, Artificial Sequence
  Synthetic
aaguuuaccuauaaaaac

SEQ ID NO: 40049 - RNA, 19 nt, Artificial Sequence
  Synthetic
caaguuuaccuauaaaaac

SEQ ID NO: 40050 - RNA, 20 nt, Artificial Sequence
  Synthetic
acaaguuuaccuauaaaaac

SEQ ID NO: 40051 - RNA, 21 nt, Artificial Sequence
  Synthetic
aacaaguuuaccuauaaaaac

SEQ ID NO: 40052 - RNA, 22 nt, Artificial Sequence
  Synthetic
uaacaaguuuaccuauaaaaac

SEQ ID NO: 40053 - RNA, 23 nt, Artificial Sequence
  Synthetic
uuaacaaguuuaccuauaaaaac

SEQ ID NO: 40054 - RNA, 24 nt, Artificial Sequence
  Synthetic
uuuaacaaguuuaccuauaaaaac

SEQ ID NO: 40055 - RNA, 18 nt, Artificial Sequence
  Synthetic
aaguacuccucacaaaac

SEQ ID NO: 40056 - RNA, 19 nt, Artificial Sequence
  Synthetic
aaaguacuccucacaaaac

SEQ ID NO: 40057 - RNA, 21 nt, Artificial Sequence
  Synthetic
agaaaguacuccucacaaaac

SEQ ID NO: 40058 - RNA, 22 nt, Artificial Sequence
  Synthetic
aagaaaguacuccucacaaaac

SEQ ID NO: 40059 - RNA, 24 nt, Artificial Sequence
  Synthetic
agaagaaaguacuccucacaaaac

SEQ ID NO: 40060 - RNA, 19 nt, Artificial Sequence
  Synthetic
agccuccacaaugcaaaac

SEQ ID NO: 40061 - RNA, 20 nt, Artificial Sequence
  Synthetic
aagccuccacaaugcaaaac

SEQ ID NO: 40062 - RNA, 21 nt, Artificial Sequence
  Synthetic
aaagccuccacaaugcaaaac

SEQ ID NO: 40063 - RNA, 22 nt, Artificial Sequence
  Synthetic
uaaagccuccacaaugcaaaac

SEQ ID NO: 40064 - RNA, 23 nt, Artificial Sequence
  Synthetic
auaaagccuccacaaugcaaaac

SEQ ID NO: 40065 - RNA, 18 nt, Artificial Sequence
  Synthetic
cguggaauauaggaaaac

SEQ ID NO: 40066 - RNA, 19 nt, Artificial Sequence
  Synthetic
ccguggaauauaggaaaac

SEQ ID NO: 40067 - RNA, 20 nt, Artificial Sequence
  Synthetic
accguggaauauaggaaaac

SEQ ID NO: 40068 - RNA, 23 nt, Artificial Sequence
  Synthetic
uggaccguggaauauaggaaaac

SEQ ID NO: 40069 - RNA, 24 nt, Artificial Sequence
  Synthetic
auggaccguggaauauaggaaaac

SEQ ID NO: 40070 - RNA, 18 nt, Artificial Sequence
  Synthetic
ucaaaucaaauggaaaac

SEQ ID NO: 40071 - RNA, 19 nt, Artificial Sequence
  Synthetic
uucaaaucaaauggaaaac

SEQ ID NO: 40072 - RNA, 18 nt, Artificial Sequence
  Synthetic
auccuuaagggugaaaac

SEQ ID NO: 40073 - RNA, 19 nt, Artificial Sequence
  Synthetic
uauccuuaagggugaaaac

SEQ ID NO: 40074 - RNA, 20 nt, Artificial Sequence
  Synthetic
uuauccuuaagggugaaaac

SEQ ID NO: 40075 - RNA, 21 nt, Artificial Sequence
  Synthetic
uuuauccuuaagggugaaaac

SEQ ID NO: 40076 - RNA, 22 nt, Artificial Sequence
  Synthetic
uuuuauccuuaagggugaaaac

SEQ ID NO: 40077 - RNA, 23 nt, Artificial Sequence
  Synthetic
cuuuuauccuuaagggugaaaac

SEQ ID NO: 40078 - RNA, 24 nt, Artificial Sequence
  Synthetic
ccuuuuauccuuaagggugaaaac

SEQ ID NO: 40079 - RNA, 18 nt, Artificial Sequence
  Synthetic
aaucaccuaaaauaaaac

SEQ ID NO: 40080 - RNA, 19 nt, Artificial Sequence
  Synthetic
uaaucaccuaaaauaaaac

SEQ ID NO: 40081 - RNA, 20 nt, Artificial Sequence
  Synthetic
uuaaucaccuaaaauaaaac

SEQ ID NO: 40082 - RNA, 21 nt, Artificial Sequence
  Synthetic
uuuaaucaccuaaaauaaaac

SEQ ID NO: 40083 - RNA, 22 nt, Artificial Sequence
  Synthetic
uuuuaaucaccuaaaauaaaac

SEQ ID NO: 40084 - RNA, 24 nt, Artificial Sequence
  Synthetic
uguuuuaaucaccuaaaauaaaac

SEQ ID NO: 40085 - RNA, 18 nt, Artificial Sequence
  Synthetic
agugacaaagaauaaaac

SEQ ID NO: 40086 - RNA, 19 nt, Artificial Sequence
  Synthetic
aagugacaaagaauaaaac

SEQ ID NO: 40087 - RNA, 20 nt, Artificial Sequence
  Synthetic
aaagugacaaagaauaaaac

SEQ ID NO: 40088 - RNA, 21 nt, Artificial Sequence
  Synthetic
uaaacacuuucuuaauaaaac

SEQ ID NO: 40089 - RNA, 23 nt, Artificial Sequence
  Synthetic
uguaaacacuuucuuaauaaaac

SEQ ID NO: 40090 - RNA, 24 nt, Artificial Sequence
  Synthetic
uuguaaacacuuucuuaauaaaac

SEQ ID NO: 40091 - RNA, 18 nt, Artificial Sequence
  Synthetic
aucacauuugacuaaaac

SEQ ID NO: 40092 - RNA, 19 nt, Artificial Sequence
  Synthetic
aaucacauuugacuaaaac

SEQ ID NO: 40093 - RNA, 20 nt, Artificial Sequence
  Synthetic
uaaucacauuugacuaaaac

SEQ ID NO: 40094 - RNA, 21 nt, Artificial Sequence
  Synthetic
auaaucacauuugacuaaaac

SEQ ID NO: 40095 - RNA, 22 nt, Artificial Sequence
  Synthetic
uauaaucacauuugacuaaaac

SEQ ID NO: 40096 - RNA, 24 nt, Artificial Sequence
  Synthetic
aguauaaucacauuugacuaaaac

SEQ ID NO: 40097 - RNA, 18 nt, Artificial Sequence
  Synthetic
auaugaagucaguaaaac

SEQ ID NO: 40098 - RNA, 19 nt, Artificial Sequence
  Synthetic
aauaugaagucaguaaaac

SEQ ID NO: 40099 - RNA, 21 nt, Artificial Sequence
  Synthetic
agaauaugaagucaguaaaac

SEQ ID NO: 40100 - RNA, 22 nt, Artificial Sequence
  Synthetic
uagaauaugaagucaguaaaac

SEQ ID NO: 40101 - RNA, 24 nt, Artificial Sequence
  Synthetic
aguagaauaugaagucaguaaaac

SEQ ID NO: 40102 - RNA, 18 nt, Artificial Sequence
  Synthetic
aaguugauuuuguaaaac

SEQ ID NO: 40103 - RNA, 19 nt, Artificial Sequence
  Synthetic
aaaguugauuuuguaaaac

SEQ ID NO: 40104 - RNA, 20 nt, Artificial Sequence
  Synthetic
uaaaguugauuuuguaaaac

SEQ ID NO: 40105 - RNA, 21 nt, Artificial Sequence
  Synthetic
auaaaguugauuuuguaaaac

SEQ ID NO: 40106 - RNA, 22 nt, Artificial Sequence
  Synthetic
uauaaaguugauuuuguaaaac

SEQ ID NO: 40107 - RNA, 23 nt, Artificial Sequence
  Synthetic
auauaaaguugauuuuguaaaac

SEQ ID NO: 40108 - RNA, 24 nt, Artificial Sequence
  Synthetic
aauauaaaguugauuuuguaaaac

SEQ ID NO: 40109 - RNA, 18 nt, Artificial Sequence
  Synthetic
cugcaaaaugauuaaaac

SEQ ID NO: 40110 - RNA, 19 nt, Artificial Sequence
  Synthetic
ccugcaaaaugauuaaaac

SEQ ID NO: 40111 - RNA, 20 nt, Artificial Sequence
  Synthetic
uccugcaaaaugauuaaaac

SEQ ID NO: 40112 - RNA, 21 nt, Artificial Sequence
  Synthetic
uuccugcaaaaugauuaaaac

SEQ ID NO: 40113 - RNA, 22 nt, Artificial Sequence
  Synthetic
uuuccugcaaaaugauuaaaac

SEQ ID NO: 40114 - RNA, 23 nt, Artificial Sequence
  Synthetic
cuuuccugcaaaaugauuaaaac

SEQ ID NO: 40115 - RNA, 24 nt, Artificial Sequence
  Synthetic
ucuuuccugcaaaaugauuaaaac

SEQ ID NO: 40116 - RNA, 19 nt, Artificial Sequence
  Synthetic
ugcuaaccaguaaacaaac

SEQ ID NO: 40117 - RNA, 20 nt, Artificial Sequence
  Synthetic
uugcuaaccaguaaacaaac

SEQ ID NO: 40118 - RNA, 21 nt, Artificial Sequence
  Synthetic
uuugcuaaccaguaaacaaac

SEQ ID NO: 40119 - RNA, 22 nt, Artificial Sequence
  Synthetic
auuugcuaaccaguaaacaaac

SEQ ID NO: 40120 - RNA, 23 nt, Artificial Sequence
  Synthetic
aauuugcuaaccaguaaacaaac

SEQ ID NO: 40121 - RNA, 24 nt, Artificial Sequence
  Synthetic
uaauuugcuaaccaguaaacaaac

SEQ ID NO: 40122 - RNA, 18 nt, Artificial Sequence
  Synthetic
uugcagcugaagacaaac

SEQ ID NO: 40123 - RNA, 19 nt, Artificial Sequence
  Synthetic
auugcagcugaagacaaac

SEQ ID NO: 40124 - RNA, 20 nt, Artificial Sequence
  Synthetic
cauugcagcugaagacaaac

SEQ ID NO: 40125 - RNA, 21 nt, Artificial Sequence
  Synthetic
ucauugcagcugaagacaaac

SEQ ID NO: 40126 - RNA, 22 nt, Artificial Sequence
  Synthetic
cucauugcagcugaagacaaac

SEQ ID NO: 40127 - RNA, 23 nt, Artificial Sequence
  Synthetic
ucucauugcagcugaagacaaac

SEQ ID NO: 40128 - RNA, 24 nt, Artificial Sequence
  Synthetic
uucucauugcagcugaagacaaac

SEQ ID NO: 40129 - RNA, 21 nt, Artificial Sequence
  Synthetic
aagaagaacugauggacaaac

SEQ ID NO: 40130 - RNA, 23 nt, Artificial Sequence
  Synthetic
ugaagaagaacugauggacaaac

SEQ ID NO: 40131 - RNA, 24 nt, Artificial Sequence
  Synthetic
uugaagaagaacugauggacaaac

SEQ ID NO: 40132 - RNA, 18 nt, Artificial Sequence
  Synthetic
ucugacgaaaccccaaac

SEQ ID NO: 40133 - RNA, 19 nt, Artificial Sequence
  Synthetic
aucugacgaaaccccaaac

SEQ ID NO: 40134 - RNA, 20 nt, Artificial Sequence
  Synthetic
caucugacgaaaccccaaac

SEQ ID NO: 40135 - RNA, 21 nt, Artificial Sequence
  Synthetic
ucaucugacgaaaccccaaac

SEQ ID NO: 40136 - RNA, 23 nt, Artificial Sequence
  Synthetic
agucaucugacgaaaccccaaac

SEQ ID NO: 40137 - RNA, 24 nt, Artificial Sequence
  Synthetic
cagucaucugacgaaaccccaaac

SEQ ID NO: 40138 - RNA, 18 nt, Artificial Sequence
  Synthetic
ucagaaucauauccaaac

SEQ ID NO: 40139 - RNA, 19 nt, Artificial Sequence
  Synthetic
uucagaaucauauccaaac

SEQ ID NO: 40140 - RNA, 20 nt, Artificial Sequence
  Synthetic
auucagaaucauauccaaac

SEQ ID NO: 40141 - RNA, 21 nt, Artificial Sequence
  Synthetic
aauucagaaucauauccaaac

SEQ ID NO: 40142 - RNA, 22 nt, Artificial Sequence
  Synthetic
aaauucagaaucauauccaaac

SEQ ID NO: 40143 - RNA, 23 nt, Artificial Sequence
  Synthetic
aaaauucagaaucauauccaaac

SEQ ID NO: 40144 - RNA, 24 nt, Artificial Sequence
  Synthetic
caaaauucagaaucauauccaaac

SEQ ID NO: 40145 - RNA, 18 nt, Artificial Sequence
  Synthetic
agaacuucuucuccaaac

SEQ ID NO: 40146 - RNA, 19 nt, Artificial Sequence
  Synthetic
cagaacuucuucuccaaac

SEQ ID NO: 40147 - RNA, 20 nt, Artificial Sequence
  Synthetic
ucagaacuucuucuccaaac

SEQ ID NO: 40148 - RNA, 21 nt, Artificial Sequence
  Synthetic
uucagaacuucuucuccaaac

SEQ ID NO: 40149 - RNA, 22 nt, Artificial Sequence
  Synthetic
uuucagaacuucuucuccaaac

SEQ ID NO: 40150 - RNA, 23 nt, Artificial Sequence
  Synthetic
auuucagaacuucuucuccaaac

SEQ ID NO: 40151 - RNA, 24 nt, Artificial Sequence
  Synthetic
aauuucagaacuucuucuccaaac

SEQ ID NO: 40152 - RNA, 19 nt, Artificial Sequence
  Synthetic
ugguggagaaagggcaaac

SEQ ID NO: 40153 - RNA, 20 nt, Artificial Sequence
  Synthetic
cugguggagaaagggcaaac

SEQ ID NO: 40154 - RNA, 21 nt, Artificial Sequence
  Synthetic
ccugguggagaaagggcaaac

SEQ ID NO: 40155 - RNA, 22 nt, Artificial Sequence
  Synthetic
cccugguggagaaagggcaaac

SEQ ID NO: 40156 - RNA, 23 nt, Artificial Sequence
  Synthetic
acccugguggagaaagggcaaac

SEQ ID NO: 40157 - RNA, 18 nt, Artificial Sequence
  Synthetic
uuacauuuuguggcaaac

SEQ ID NO: 40158 - RNA, 19 nt, Artificial Sequence
  Synthetic
uuuacauuuuguggcaaac

SEQ ID NO: 40159 - RNA, 20 nt, Artificial Sequence
  Synthetic
auuuacauuuuguggcaaac

SEQ ID NO: 40160 - RNA, 21 nt, Artificial Sequence
  Synthetic
cauuuacauuuuguggcaaac

SEQ ID NO: 40161 - RNA, 22 nt, Artificial Sequence
  Synthetic
acauuuacauuuuguggcaaac

SEQ ID NO: 40162 - RNA, 23 nt, Artificial Sequence
  Synthetic
uacauuuacauuuuguggcaaac

SEQ ID NO: 40163 - RNA, 24 nt, Artificial Sequence
  Synthetic
auacauuuacauuuuguggcaaac

SEQ ID NO: 40164 - RNA, 19 nt, Artificial Sequence
  Synthetic
aguucaauauauuucaaac

SEQ ID NO: 40165 - RNA, 20 nt, Artificial Sequence
  Synthetic
aaguucaauauauuucaaac

SEQ ID NO: 40166 - RNA, 21 nt, Artificial Sequence
  Synthetic
aaaguucaauauauuucaaac

SEQ ID NO: 40167 - RNA, 22 nt, Artificial Sequence
  Synthetic
uaaaguucaauauauuucaaac

SEQ ID NO: 40168 - RNA, 23 nt, Artificial Sequence
  Synthetic
auaaaguucaauauauuucaaac

SEQ ID NO: 40169 - RNA, 24 nt, Artificial Sequence
  Synthetic
aauaaaguucaauauauuucaaac

SEQ ID NO: 40170 - RNA, 18 nt, Artificial Sequence
  Synthetic
ccuuguugcugaagaaac

SEQ ID NO: 40171 - RNA, 19 nt, Artificial Sequence
  Synthetic
uccuuguugcugaagaaac

SEQ ID NO: 40172 - RNA, 20 nt, Artificial Sequence
  Synthetic
uuccuuguugcugaagaaac

SEQ ID NO: 40173 - RNA, 21 nt, Artificial Sequence
  Synthetic
uuuccuuguugcugaagaaac

SEQ ID NO: 40174 - RNA, 22 nt, Artificial Sequence
  Synthetic
uuuuccuuguugcugaagaaac

SEQ ID NO: 40175 - RNA, 23 nt, Artificial Sequence
  Synthetic
auuuuccuuguugcugaagaaac

SEQ ID NO: 40176 - RNA, 24 nt, Artificial Sequence
  Synthetic
uauuuuccuuguugcugaagaaac

SEQ ID NO: 40177 - RNA, 19 nt, Artificial Sequence
  Synthetic
aggcuagaaguacagaaac

SEQ ID NO: 40178 - RNA, 20 nt, Artificial Sequence
  Synthetic
uaggcuagaaguacagaaac

SEQ ID NO: 40179 - RNA, 22 nt, Artificial Sequence
  Synthetic
cguaggcuagaaguacagaaac

SEQ ID NO: 40180 - RNA, 23 nt, Artificial Sequence
  Synthetic
acguaggcuagaaguacagaaac

SEQ ID NO: 40181 - RNA, 19 nt, Artificial Sequence
  Synthetic
cgauauuguaaagagaaac

SEQ ID NO: 40182 - RNA, 20 nt, Artificial Sequence
  Synthetic
ucgauauuguaaagagaaac

SEQ ID NO: 40183 - RNA, 21 nt, Artificial Sequence
  Synthetic
uucgauauuguaaagagaaac

SEQ ID NO: 40184 - RNA, 22 nt, Artificial Sequence
  Synthetic
uuucgauauuguaaagagaaac

SEQ ID NO: 40185 - RNA, 23 nt, Artificial Sequence
  Synthetic
uuuucgauauuguaaagagaaac

SEQ ID NO: 40186 - RNA, 24 nt, Artificial Sequence
  Synthetic
uuuuucgauauuguaaagagaaac

SEQ ID NO: 40187 - RNA, 19 nt, Artificial Sequence
  Synthetic
ugagacaaaugauagaaac

SEQ ID NO: 40188 - RNA, 20 nt, Artificial Sequence
  Synthetic
augagacaaaugauagaaac

SEQ ID NO: 40189 - RNA, 22 nt, Artificial Sequence
  Synthetic
ugaugagacaaaugauagaaac

SEQ ID NO: 40190 - RNA, 23 nt, Artificial Sequence
  Synthetic
uugaugagacaaaugauagaaac

SEQ ID NO: 40191 - RNA, 18 nt, Artificial Sequence
  Synthetic
uaucccuauaugggaaac

SEQ ID NO: 40192 - RNA, 19 nt, Artificial Sequence
  Synthetic
cuaucccuauaugggaaac

SEQ ID NO: 40193 - RNA, 20 nt, Artificial Sequence
  Synthetic
ucuaucccuauaugggaaac

SEQ ID NO: 40194 - RNA, 21 nt, Artificial Sequence
  Synthetic
uucuaucccuauaugggaaac

SEQ ID NO: 40195 - RNA, 22 nt, Artificial Sequence
  Synthetic
auucuaucccuauaugggaaac

SEQ ID NO: 40196 - RNA, 24 nt, Artificial Sequence
  Synthetic
ugauucuaucccuauaugggaaac

SEQ ID NO: 40197 - RNA, 18 nt, Artificial Sequence
  Synthetic
cuccuaacaucuggaaac

SEQ ID NO: 40198 - RNA, 20 nt, Artificial Sequence
  Synthetic
cgcuccuaacaucuggaaac

SEQ ID NO: 40199 - RNA, 21 nt, Artificial Sequence
  Synthetic
ucgcuccuaacaucuggaaac

SEQ ID NO: 40200 - RNA, 23 nt, Artificial Sequence
  Synthetic
agucgcuccuaacaucuggaaac

SEQ ID NO: 40201 - RNA, 24 nt, Artificial Sequence
  Synthetic
uagucgcuccuaacaucuggaaac

SEQ ID NO: 40202 - RNA, 18 nt, Artificial Sequence
  Synthetic
uuagcauaucuuggaaac

SEQ ID NO: 40203 - RNA, 20 nt, Artificial Sequence
  Synthetic
aguuagcauaucuuggaaac

SEQ ID NO: 40204 - RNA, 23 nt, Artificial Sequence
  Synthetic
aggaguuagcauaucuuggaaac

SEQ ID NO: 40205 - RNA, 18 nt, Artificial Sequence
  Synthetic
uaagugccaguuggaaac

SEQ ID NO: 40206 - RNA, 19 nt, Artificial Sequence
  Synthetic
cuaagugccaguuggaaac

SEQ ID NO: 40207 - RNA, 20 nt, Artificial Sequence
  Synthetic
ucuaagugccaguuggaaac

SEQ ID NO: 40208 - RNA, 21 nt, Artificial Sequence
  Synthetic
aucuaagugccaguuggaaac

SEQ ID NO: 40209 - RNA, 22 nt, Artificial Sequence
  Synthetic
aaucuaagugccaguuggaaac

SEQ ID NO: 40210 - RNA, 23 nt, Artificial Sequence
  Synthetic
aaaucuaagugccaguuggaaac

SEQ ID NO: 40211 - RNA, 24 nt, Artificial Sequence
  Synthetic
aaaaucuaagugccaguuggaaac

SEQ ID NO: 40212 - RNA, 18 nt, Artificial Sequence
  Synthetic
acugaauugaaaugaaac

SEQ ID NO: 40213 - RNA, 19 nt, Artificial Sequence
  Synthetic
aacugaauugaaaugaaac

SEQ ID NO: 40214 - RNA, 20 nt, Artificial Sequence
  Synthetic
uaacugaauugaaaugaaac

SEQ ID NO: 40215 - RNA, 21 nt, Artificial Sequence
  Synthetic
uuaacugaauugaaaugaaac

SEQ ID NO: 40216 - RNA, 22 nt, Artificial Sequence
  Synthetic
uuuaacugaauugaaaugaaac

SEQ ID NO: 40217 - RNA, 23 nt, Artificial Sequence
  Synthetic
cuuuaacugaauugaaaugaaac

SEQ ID NO: 40218 - RNA, 24 nt, Artificial Sequence
  Synthetic
ucuuuaacugaauugaaaugaaac

SEQ ID NO: 40219 - RNA, 18 nt, Artificial Sequence
  Synthetic
cauaaacacacaugaaac

SEQ ID NO: 40220 - RNA, 19 nt, Artificial Sequence
  Synthetic
ucauaaacacacaugaaac

SEQ ID NO: 40221 - RNA, 20 nt, Artificial Sequence
  Synthetic
aucauaaacacacaugaaac

SEQ ID NO: 40222 - RNA, 21 nt, Artificial Sequence
  Synthetic
aaucauaaacacacaugaaac

SEQ ID NO: 40223 - RNA, 22 nt, Artificial Sequence
  Synthetic
caaucauaaacacacaugaaac

SEQ ID NO: 40224 - RNA, 23 nt, Artificial Sequence
  Synthetic
acaaucauaaacacacaugaaac

SEQ ID NO: 40225 - RNA, 19 nt, Artificial Sequence
  Synthetic
ugaaacaucuacaugaaac

SEQ ID NO: 40226 - RNA, 20 nt, Artificial Sequence
  Synthetic
cugaaacaucuacaugaaac

SEQ ID NO: 40227 - RNA, 21 nt, Artificial Sequence
  Synthetic
ucugaaacaucuacaugaaac

SEQ ID NO: 40228 - RNA, 22 nt, Artificial Sequence
  Synthetic
aucugaaacaucuacaugaaac

SEQ ID NO: 40229 - RNA, 23 nt, Artificial Sequence
  Synthetic
caucugaaacaucuacaugaaac

SEQ ID NO: 40230 - RNA, 24 nt, Artificial Sequence
  Synthetic
acaucugaaacaucuacaugaaac

SEQ ID NO: 40231 - RNA, 18 nt, Artificial Sequence
  Synthetic
uugaugacuuacugaaac

SEQ ID NO: 40232 - RNA, 19 nt, Artificial Sequence
  Synthetic
auugaugacuuacugaaac

SEQ ID NO: 40233 - RNA, 20 nt, Artificial Sequence
  Synthetic
aauugaugacuuacugaaac

SEQ ID NO: 40234 - RNA, 21 nt, Artificial Sequence
  Synthetic
uaauugaugacuuacugaaac

SEQ ID NO: 40235 - RNA, 22 nt, Artificial Sequence
  Synthetic
uuaauugaugacuuacugaaac

SEQ ID NO: 40236 - RNA, 23 nt, Artificial Sequence
  Synthetic
auuaauugaugacuuacugaaac

SEQ ID NO: 40237 - RNA, 24 nt, Artificial Sequence
  Synthetic
cauuaauugaugacuuacugaaac

SEQ ID NO: 40238 - RNA, 18 nt, Artificial Sequence
  Synthetic
aagucuuuaugcugaaac

SEQ ID NO: 40239 - RNA, 19 nt, Artificial Sequence
  Synthetic
caagucuuuaugcugaaac

SEQ ID NO: 40240 - RNA, 20 nt, Artificial Sequence
  Synthetic
ucaagucuuuaugcugaaac

SEQ ID NO: 40241 - RNA, 21 nt, Artificial Sequence
  Synthetic
uucaagucuuuaugcugaaac

SEQ ID NO: 40242 - RNA, 23 nt, Artificial Sequence
  Synthetic
uguucaagucuuuaugcugaaac

SEQ ID NO: 40243 - RNA, 24 nt, Artificial Sequence
  Synthetic
auguucaagucuuuaugcugaaac

SEQ ID NO: 40244 - RNA, 18 nt, Artificial Sequence
  Synthetic
aucuuaucagagugaaac

SEQ ID NO: 40245 - RNA, 19 nt, Artificial Sequence
  Synthetic
aaucuuaucagagugaaac

SEQ ID NO: 40246 - RNA, 22 nt, Artificial Sequence
  Synthetic
uggaaucuuaucagagugaaac

SEQ ID NO: 40247 - RNA, 23 nt, Artificial Sequence
  Synthetic
auggaaucuuaucagagugaaac

SEQ ID NO: 40248 - RNA, 24 nt, Artificial Sequence
  Synthetic
cauggaaucuuaucagagugaaac

SEQ ID NO: 40249 - RNA, 18 nt, Artificial Sequence
  Synthetic
aagaaauguaugugaaac

SEQ ID NO: 40250 - RNA, 19 nt, Artificial Sequence
  Synthetic
caagaaauguaugugaaac

SEQ ID NO: 40251 - RNA, 20 nt, Artificial Sequence
  Synthetic
ccaagaaauguaugugaaac

SEQ ID NO: 40252 - RNA, 22 nt, Artificial Sequence
  Synthetic
agccaagaaauguaugugaaac

SEQ ID NO: 40253 - RNA, 23 nt, Artificial Sequence
  Synthetic
aagccaagaaauguaugugaaac

SEQ ID NO: 40254 - RNA, 24 nt, Artificial Sequence
  Synthetic
aaagccaagaaauguaugugaaac

SEQ ID NO: 40255 - RNA, 18 nt, Artificial Sequence
  Synthetic
aggggaaugguaauaaac

SEQ ID NO: 40256 - RNA, 19 nt, Artificial Sequence
  Synthetic
aaggggaaugguaauaaac

SEQ ID NO: 40257 - RNA, 20 nt, Artificial Sequence
  Synthetic
aaaggggaaugguaauaaac

SEQ ID NO: 40258 - RNA, 18 nt, Artificial Sequence
  Synthetic
ucauucagcuugauaaac

SEQ ID NO: 40259 - RNA, 19 nt, Artificial Sequence
  Synthetic
uucauucagcuugauaaac

SEQ ID NO: 40260 - RNA, 21 nt, Artificial Sequence
  Synthetic
uguucauucagcuugauaaac

SEQ ID NO: 40261 - RNA, 22 nt, Artificial Sequence
  Synthetic
uuguucauucagcuugauaaac

SEQ ID NO: 40262 - RNA, 23 nt, Artificial Sequence
  Synthetic
uuuguucauucagcuugauaaac

SEQ ID NO: 40263 - RNA, 24 nt, Artificial Sequence
  Synthetic
auuuguucauucagcuugauaaac

SEQ ID NO: 40264 - RNA, 19 nt, Artificial Sequence
  Synthetic
ugcuaucaagaauauaaac

SEQ ID NO: 40265 - RNA, 20 nt, Artificial Sequence
  Synthetic
cugcuaucaagaauauaaac

SEQ ID NO: 40266 - RNA, 21 nt, Artificial Sequence
  Synthetic
ucugcuaucaagaauauaaac

SEQ ID NO: 40267 - RNA, 22 nt, Artificial Sequence
  Synthetic
uucugcuaucaagaauauaaac

SEQ ID NO: 40268 - RNA, 23 nt, Artificial Sequence
  Synthetic
auucugcuaucaagaauauaaac

SEQ ID NO: 40269 - RNA, 24 nt, Artificial Sequence
  Synthetic
uauucugcuaucaagaauauaaac

SEQ ID NO: 40270 - RNA, 21 nt, Artificial Sequence
  Synthetic
acaaacaaggaaaaaguaaac

SEQ ID NO: 40271 - RNA, 22 nt, Artificial Sequence
  Synthetic
uacaaacaaggaaaaaguaaac

SEQ ID NO: 40272 - RNA, 23 nt, Artificial Sequence
  Synthetic
uuacaaacaaggaaaaaguaaac

SEQ ID NO: 40273 - RNA, 24 nt, Artificial Sequence
  Synthetic
uuuacaaacaaggaaaaaguaaac

SEQ ID NO: 40274 - RNA, 18 nt, Artificial Sequence
  Synthetic
uauauacuaaugguaaac

SEQ ID NO: 40275 - RNA, 19 nt, Artificial Sequence
  Synthetic
uuauauacuaaugguaaac

SEQ ID NO: 40276 - RNA, 20 nt, Artificial Sequence
  Synthetic
auuauauacuaaugguaaac

SEQ ID NO: 40277 - RNA, 21 nt, Artificial Sequence
  Synthetic
uauuauauacuaaugguaaac

SEQ ID NO: 40278 - RNA, 22 nt, Artificial Sequence
  Synthetic
cuauuauauacuaaugguaaac

SEQ ID NO: 40279 - RNA, 24 nt, Artificial Sequence
  Synthetic
agcuauuauauacuaaugguaaac

SEQ ID NO: 40280 - RNA, 18 nt, Artificial Sequence
  Synthetic
uagcagauggugguaaac

SEQ ID NO: 40281 - RNA, 19 nt, Artificial Sequence
  Synthetic
auagcagauggugguaaac

SEQ ID NO: 40282 - RNA, 20 nt, Artificial Sequence
  Synthetic
cauagcagauggugguaaac

SEQ ID NO: 40283 - RNA, 21 nt, Artificial Sequence
  Synthetic
acauagcagauggugguaaac

SEQ ID NO: 40284 - RNA, 22 nt, Artificial Sequence
  Synthetic
cacauagcagauggugguaaac

SEQ ID NO: 40285 - RNA, 23 nt, Artificial Sequence
  Synthetic
ucacauagcagauggugguaaac

SEQ ID NO: 40286 - RNA, 24 nt, Artificial Sequence
  Synthetic
aucacauagcagauggugguaaac

SEQ ID NO: 40287 - RNA, 18 nt, Artificial Sequence
  Synthetic
cacacugguggcuuaaac

SEQ ID NO: 40288 - RNA, 19 nt, Artificial Sequence
  Synthetic
acacacugguggcuuaaac

SEQ ID NO: 40289 - RNA, 20 nt, Artificial Sequence
  Synthetic
aacacacugguggcuuaaac

SEQ ID NO: 40290 - RNA, 22 nt, Artificial Sequence
  Synthetic
ugaacacacugguggcuuaaac

SEQ ID NO: 40291 - RNA, 23 nt, Artificial Sequence
  Synthetic
uugaacacacugguggcuuaaac

SEQ ID NO: 40292 - RNA, 18 nt, Artificial Sequence
  Synthetic
cuguacccucuguuaaac

SEQ ID NO: 40293 - RNA, 19 nt, Artificial Sequence
  Synthetic
ucuguacccucuguuaaac

SEQ ID NO: 40294 - RNA, 20 nt, Artificial Sequence
  Synthetic
aucuguacccucuguuaaac

SEQ ID NO: 40295 - RNA, 21 nt, Artificial Sequence
  Synthetic
uaucuguacccucuguuaaac

SEQ ID NO: 40296 - RNA, 22 nt, Artificial Sequence
  Synthetic
cuaucuguacccucuguuaaac

SEQ ID NO: 40297 - RNA, 23 nt, Artificial Sequence
  Synthetic
ccuaucuguacccucuguuaaac

SEQ ID NO: 40298 - RNA, 24 nt, Artificial Sequence
  Synthetic
accuaucuguacccucuguuaaac

SEQ ID NO: 40299 - RNA, 21 nt, Artificial Sequence
  Synthetic
aaaaaaagucuaagaaacaac

SEQ ID NO: 40300 - RNA, 22 nt, Artificial Sequence
  Synthetic
aaaaaaaagucuaagaaacaac

SEQ ID NO: 40301 - RNA, 23 nt, Artificial Sequence
  Synthetic
caaaaaaaagucuaagaaacaac

SEQ ID NO: 40302 - RNA, 22 nt, Artificial Sequence
  Synthetic
ugccacauuuuaaaauaacaac

SEQ ID NO: 40303 - RNA, 23 nt, Artificial Sequence
  Synthetic
augccacauuuuaaaauaacaac

SEQ ID NO: 40304 - RNA, 24 nt, Artificial Sequence
  Synthetic
caugccacauuuuaaaauaacaac

SEQ ID NO: 40305 - RNA, 18 nt, Artificial Sequence
  Synthetic
aaaauauaaauccacaac

SEQ ID NO: 40306 - RNA, 19 nt, Artificial Sequence
  Synthetic
aaaaauauaaauccacaac

SEQ ID NO: 40307 - RNA, 21 nt, Artificial Sequence
  Synthetic
agaaaaauauaaauccacaac

SEQ ID NO: 40308 - RNA, 22 nt, Artificial Sequence
  Synthetic
aagaaaaauauaaauccacaac

SEQ ID NO: 40309 - RNA, 23 nt, Artificial Sequence
  Synthetic
aaagaaaaauauaaauccacaac

SEQ ID NO: 40310 - RNA, 24 nt, Artificial Sequence
  Synthetic
aaaagaaaaauauaaauccacaac

SEQ ID NO: 40311 - RNA, 18 nt, Artificial Sequence
  Synthetic
agaaaggagauucacaac

SEQ ID NO: 40312 - RNA, 20 nt, Artificial Sequence
  Synthetic
ugagaaaggagauucacaac

SEQ ID NO: 40313 - RNA, 21 nt, Artificial Sequence
  Synthetic
cugagaaaggagauucacaac

SEQ ID NO: 40314 - RNA, 23 nt, Artificial Sequence
  Synthetic
agcugagaaaggagauucacaac

SEQ ID NO: 40315 - RNA, 24 nt, Artificial Sequence
  Synthetic
aagcugagaaaggagauucacaac

SEQ ID NO: 40316 - RNA, 19 nt, Artificial Sequence
  Synthetic
agagaaggcaucagacaac

SEQ ID NO: 40317 - RNA, 20 nt, Artificial Sequence
  Synthetic
uagagaaggcaucagacaac

SEQ ID NO: 40318 - RNA, 21 nt, Artificial Sequence
  Synthetic
uuagagaaggcaucagacaac

SEQ ID NO: 40319 - RNA, 22 nt, Artificial Sequence
  Synthetic
cuuagagaaggcaucagacaac

SEQ ID NO: 40320 - RNA, 23 nt, Artificial Sequence
  Synthetic
ccuuagagaaggcaucagacaac

SEQ ID NO: 40321 - RNA, 24 nt, Artificial Sequence
  Synthetic
accuuagagaaggcaucagacaac

SEQ ID NO: 40322 - RNA, 18 nt, Artificial Sequence
  Synthetic
ugucgcucauucuacaac

SEQ ID NO: 40323 - RNA, 20 nt, Artificial Sequence
  Synthetic
ugugucgcucauucuacaac

SEQ ID NO: 40324 - RNA, 22 nt, Artificial Sequence
  Synthetic
ugugugucgcucauucuacaac

SEQ ID NO: 40325 - RNA, 23 nt, Artificial Sequence
  Synthetic
cugugugucgcucauucuacaac

SEQ ID NO: 40326 - RNA, 19 nt, Artificial Sequence
  Synthetic
ugauaaguaaaauuacaac

SEQ ID NO: 40327 - RNA, 20 nt, Artificial Sequence
  Synthetic
cugauaaguaaaauuacaac

SEQ ID NO: 40328 - RNA, 21 nt, Artificial Sequence
  Synthetic
ccugauaaguaaaauuacaac

SEQ ID NO: 40329 - RNA, 22 nt, Artificial Sequence
  Synthetic
uccugauaaguaaaauuacaac

SEQ ID NO: 40330 - RNA, 23 nt, Artificial Sequence
  Synthetic
uuccugauaaguaaaauuacaac

SEQ ID NO: 40331 - RNA, 24 nt, Artificial Sequence
  Synthetic
auuccugauaaguaaaauuacaac

SEQ ID NO: 40332 - RNA, 18 nt, Artificial Sequence
  Synthetic
agcagucagggaaccaac

SEQ ID NO: 40333 - RNA, 20 nt, Artificial Sequence
  Synthetic
agagcagucagggaaccaac

SEQ ID NO: 40334 - RNA, 21 nt, Artificial Sequence
  Synthetic
cagagcagucagggaaccaac

SEQ ID NO: 40335 - RNA, 22 nt, Artificial Sequence
  Synthetic
ucagagcagucagggaaccaac

SEQ ID NO: 40336 - RNA, 23 nt, Artificial Sequence
  Synthetic
aucagagcagucagggaaccaac

SEQ ID NO: 40337 - RNA, 24 nt, Artificial Sequence
  Synthetic
caucagagcagucagggaaccaac

SEQ ID NO: 40338 - RNA, 18 nt, Artificial Sequence
  Synthetic
auaucacugcuuaccaac

SEQ ID NO: 40339 - RNA, 19 nt, Artificial Sequence
  Synthetic
aauaucacugcuuaccaac

SEQ ID NO: 40340 - RNA, 20 nt, Artificial Sequence
  Synthetic
aaauaucacugcuuaccaac

SEQ ID NO: 40341 - RNA, 22 nt, Artificial Sequence
  Synthetic
ugaaauaucacugcuuaccaac

SEQ ID NO: 40342 - RNA, 23 nt, Artificial Sequence
  Synthetic
augaaauaucacugcuuaccaac

SEQ ID NO: 40343 - RNA, 24 nt, Artificial Sequence
  Synthetic
aaugaaauaucacugcuuaccaac

SEQ ID NO: 40344 - RNA, 18 nt, Artificial Sequence
  Synthetic
ucugucauuugucccaac

SEQ ID NO: 40345 - RNA, 19 nt, Artificial Sequence
  Synthetic
aucugucauuugucccaac

SEQ ID NO: 40346 - RNA, 21 nt, Artificial Sequence
  Synthetic
agaucugucauuugucccaac

SEQ ID NO: 40347 - RNA, 22 nt, Artificial Sequence
  Synthetic
aagaucugucauuugucccaac

SEQ ID NO: 40348 - RNA, 24 nt, Artificial Sequence
  Synthetic
agaagaucugucauuugucccaac

SEQ ID NO: 40349 - RNA, 18 nt, Artificial Sequence
  Synthetic
uuuggaaguggggccaac

SEQ ID NO: 40350 - RNA, 20 nt, Artificial Sequence
  Synthetic
uguuuggaaguggggccaac

SEQ ID NO: 40351 - RNA, 22 nt, Artificial Sequence
  Synthetic
cguguuuggaaguggggccaac

SEQ ID NO: 40352 - RNA, 23 nt, Artificial Sequence
  Synthetic
acguguuuggaaguggggccaac

SEQ ID NO: 40353 - RNA, 24 nt, Artificial Sequence
  Synthetic
aacguguuuggaaguggggccaac

SEQ ID NO: 40354 - RNA, 18 nt, Artificial Sequence
  Synthetic
aaauuucugaacuccaac

SEQ ID NO: 40355 - RNA, 19 nt, Artificial Sequence
  Synthetic
caaauuucugaacuccaac

SEQ ID NO: 40356 - RNA, 22 nt, Artificial Sequence
  Synthetic
uggcaaauuucugaacuccaac

SEQ ID NO: 40357 - RNA, 23 nt, Artificial Sequence
  Synthetic
uuggcaaauuucugaacuccaac

SEQ ID NO: 40358 - RNA, 24 nt, Artificial Sequence
  Synthetic
auuggcaaauuucugaacuccaac

SEQ ID NO: 40359 - RNA, 18 nt, Artificial Sequence
  Synthetic
uuaaagcaaauuuccaac

SEQ ID NO: 40360 - RNA, 19 nt, Artificial Sequence
  Synthetic
auuaaagcaaauuuccaac

SEQ ID NO: 40361 - RNA, 21 nt, Artificial Sequence
  Synthetic
agauuaaagcaaauuuccaac

SEQ ID NO: 40362 - RNA, 22 nt, Artificial Sequence
  Synthetic
aagauuaaagcaaauuuccaac

SEQ ID NO: 40363 - RNA, 23 nt, Artificial Sequence
  Synthetic
uaagauuaaagcaaauuuccaac

SEQ ID NO: 40364 - RNA, 24 nt, Artificial Sequence
  Synthetic
cuaagauuaaagcaaauuuccaac

SEQ ID NO: 40365 - RNA, 18 nt, Artificial Sequence
  Synthetic
auuggcuuuauuuccaac

SEQ ID NO: 40366 - RNA, 19 nt, Artificial Sequence
  Synthetic
uauuggcuuuauuuccaac

SEQ ID NO: 40367 - RNA, 20 nt, Artificial Sequence
  Synthetic
cuauuggcuuuauuuccaac

SEQ ID NO: 40368 - RNA, 21 nt, Artificial Sequence
  Synthetic
ucuauuggcuuuauuuccaac

SEQ ID NO: 40369 - RNA, 22 nt, Artificial Sequence
  Synthetic
uucuauuggcuuuauuuccaac

SEQ ID NO: 40370 - RNA, 23 nt, Artificial Sequence
  Synthetic
auucuauuggcuuuauuuccaac

SEQ ID NO: 40371 - RNA, 20 nt, Artificial Sequence
  Synthetic
aggguuuacucuaaagcaac

SEQ ID NO: 40372 - RNA, 21 nt, Artificial Sequence
  Synthetic
uaggguuuacucuaaagcaac

SEQ ID NO: 40373 - RNA, 22 nt, Artificial Sequence
  Synthetic
auaggguuuacucuaaagcaac

SEQ ID NO: 40374 - RNA, 23 nt, Artificial Sequence
  Synthetic
cauaggguuuacucuaaagcaac

SEQ ID NO: 40375 - RNA, 24 nt, Artificial Sequence
  Synthetic
ccauaggguuuacucuaaagcaac

SEQ ID NO: 40376 - RNA, 19 nt, Artificial Sequence
  Synthetic
ugauugauugagaagcaac

SEQ ID NO: 40377 - RNA, 21 nt, Artificial Sequence
  Synthetic
agugauugauugagaagcaac

SEQ ID NO: 40378 - RNA, 22 nt, Artificial Sequence
  Synthetic
uagugauugauugagaagcaac

SEQ ID NO: 40379 - RNA, 23 nt, Artificial Sequence
  Synthetic
auagugauugauugagaagcaac

SEQ ID NO: 40380 - RNA, 24 nt, Artificial Sequence
  Synthetic
cauagugauugauugagaagcaac

SEQ ID NO: 40381 - RNA, 18 nt, Artificial Sequence
  Synthetic
acuaaaauuauaugcaac

SEQ ID NO: 40382 - RNA, 20 nt, Artificial Sequence
  Synthetic
agacuaaaauuauaugcaac

SEQ ID NO: 40383 - RNA, 21 nt, Artificial Sequence
  Synthetic
cagacuaaaauuauaugcaac

SEQ ID NO: 40384 - RNA, 22 nt, Artificial Sequence
  Synthetic
acagacuaaaauuauaugcaac

SEQ ID NO: 40385 - RNA, 23 nt, Artificial Sequence
  Synthetic
aacagacuaaaauuauaugcaac

SEQ ID NO: 40386 - RNA, 18 nt, Artificial Sequence
  Synthetic
accaauaauagaaucaac

SEQ ID NO: 40387 - RNA, 23 nt, Artificial Sequence
  Synthetic
aggggaccaauaauagaaucaac

SEQ ID NO: 40388 - RNA, 24 nt, Artificial Sequence
  Synthetic
uaggggaccaauaauagaaucaac

SEQ ID NO: 40389 - RNA, 18 nt, Artificial Sequence
  Synthetic
cggcuguaggacaucaac

SEQ ID NO: 40390 - RNA, 19 nt, Artificial Sequence
  Synthetic
ccggcuguaggacaucaac

SEQ ID NO: 40391 - RNA, 20 nt, Artificial Sequence
  Synthetic
uccggcuguaggacaucaac

SEQ ID NO: 40392 - RNA, 21 nt, Artificial Sequence
  Synthetic
uuccggcuguaggacaucaac

SEQ ID NO: 40393 - RNA, 22 nt, Artificial Sequence
  Synthetic
uuuccggcuguaggacaucaac

SEQ ID NO: 40394 - RNA, 24 nt, Artificial Sequence
  Synthetic
aguuuccggcuguaggacaucaac

SEQ ID NO: 40395 - RNA, 18 nt, Artificial Sequence
  Synthetic
aagaccaaaauccucaac

SEQ ID NO: 40396 - RNA, 19 nt, Artificial Sequence
  Synthetic
aaagaccaaaauccucaac

SEQ ID NO: 40397 - RNA, 20 nt, Artificial Sequence
  Synthetic
aaaagaccaaaauccucaac

SEQ ID NO: 40398 - RNA, 21 nt, Artificial Sequence
  Synthetic
aaaaagaccaaaauccucaac

SEQ ID NO: 40399 - RNA, 24 nt, Artificial Sequence
  Synthetic
uggaaaaagaccaaaauccucaac

SEQ ID NO: 40400 - RNA, 18 nt, Artificial Sequence
  Synthetic
ucucauggucuagucaac

SEQ ID NO: 40401 - RNA, 19 nt, Artificial Sequence
  Synthetic
aucucauggucuagucaac

SEQ ID NO: 40402 - RNA, 22 nt, Artificial Sequence
  Synthetic
uggaucucauggucuagucaac

SEQ ID NO: 40403 - RNA, 23 nt, Artificial Sequence
  Synthetic
auggaucucauggucuagucaac

SEQ ID NO: 40404 - RNA, 24 nt, Artificial Sequence
  Synthetic
cauggaucucauggucuagucaac

SEQ ID NO: 40405 - RNA, 18 nt, Artificial Sequence
  Synthetic
cccuuuauauauuucaac

SEQ ID NO: 40406 - RNA, 19 nt, Artificial Sequence
  Synthetic
acccuuuauauauuucaac

SEQ ID NO: 40407 - RNA, 20 nt, Artificial Sequence
  Synthetic
aacccuuuauauauuucaac

SEQ ID NO: 40408 - RNA, 21 nt, Artificial Sequence
  Synthetic
caacccuuuauauauuucaac

SEQ ID NO: 40409 - RNA, 22 nt, Artificial Sequence
  Synthetic
ucaacccuuuauauauuucaac

SEQ ID NO: 40410 - RNA, 23 nt, Artificial Sequence
  Synthetic
uucaacccuuuauauauuucaac

SEQ ID NO: 40411 - RNA, 24 nt, Artificial Sequence
  Synthetic
cuucaacccuuuauauauuucaac

SEQ ID NO: 40412 - RNA, 21 nt, Artificial Sequence
  Synthetic
acaaugaagaaaaaaaagaac

SEQ ID NO: 40413 - RNA, 22 nt, Artificial Sequence
  Synthetic
uacaaugaagaaaaaaaagaac

SEQ ID NO: 40414 - RNA, 23 nt, Artificial Sequence
  Synthetic
auacaaugaagaaaaaaaagaac

SEQ ID NO: 40415 - RNA, 24 nt, Artificial Sequence
  Synthetic
cauacaaugaagaaaaaaaagaac

SEQ ID NO: 40416 - RNA, 20 nt, Artificial Sequence
  Synthetic
ugguauauauuuaaaagaac

SEQ ID NO: 40417 - RNA, 21 nt, Artificial Sequence
  Synthetic
uugguauauauuuaaaagaac

SEQ ID NO: 40418 - RNA, 22 nt, Artificial Sequence
  Synthetic
cuugguauauauuuaaaagaac

SEQ ID NO: 40419 - RNA, 23 nt, Artificial Sequence
  Synthetic
acuugguauauauuuaaaagaac

SEQ ID NO: 40420 - RNA, 24 nt, Artificial Sequence
  Synthetic
uacuugguauauauuuaaaagaac

SEQ ID NO: 40421 - RNA, 18 nt, Artificial Sequence
  Synthetic
agcucccccgcaaagaac

SEQ ID NO: 40422 - RNA, 20 nt, Artificial Sequence
  Synthetic
ugagcucccccgcaaagaac

SEQ ID NO: 40423 - RNA, 21 nt, Artificial Sequence
  Synthetic
uugagcucccccgcaaagaac

SEQ ID NO: 40424 - RNA, 22 nt, Artificial Sequence
  Synthetic
cuugagcucccccgcaaagaac

SEQ ID NO: 40425 - RNA, 23 nt, Artificial Sequence
  Synthetic
acuugagcucccccgcaaagaac

SEQ ID NO: 40426 - RNA, 18 nt, Artificial Sequence
  Synthetic
cuaugugauauaaagaac

SEQ ID NO: 40427 - RNA, 19 nt, Artificial Sequence
  Synthetic
ucuaugugauauaaagaac

SEQ ID NO: 40428 - RNA, 20 nt, Artificial Sequence
  Synthetic
uucuaugugauauaaagaac

SEQ ID NO: 40429 - RNA, 21 nt, Artificial Sequence
  Synthetic
uuucuaugugauauaaagaac

SEQ ID NO: 40430 - RNA, 22 nt, Artificial Sequence
  Synthetic
auuucuaugugauauaaagaac

SEQ ID NO: 40431 - RNA, 23 nt, Artificial Sequence
  Synthetic
uauuucuaugugauauaaagaac

SEQ ID NO: 40432 - RNA, 24 nt, Artificial Sequence
  Synthetic
uuauuucuaugugauauaaagaac

SEQ ID NO: 40433 - RNA, 18 nt, Artificial Sequence
  Synthetic
aaaugagagcacaagaac

SEQ ID NO: 40434 - RNA, 20 nt, Artificial Sequence
  Synthetic
agaaaugagagcacaagaac

SEQ ID NO: 40435 - RNA, 22 nt, Artificial Sequence
  Synthetic
agagaaaugagagcacaagaac

SEQ ID NO: 40436 - RNA, 24 nt, Artificial Sequence
  Synthetic
agagagaaaugagagcacaagaac

SEQ ID NO: 40437 - RNA, 18 nt, Artificial Sequence
  Synthetic
aagugauugugcaagaac

SEQ ID NO: 40438 - RNA, 19 nt, Artificial Sequence
  Synthetic
caagugauugugcaagaac

SEQ ID NO: 40439 - RNA, 21 nt, Artificial Sequence
  Synthetic
agcaagugauugugcaagaac

SEQ ID NO: 40440 - RNA, 24 nt, Artificial Sequence
  Synthetic
aggagcaagugauugugcaagaac

SEQ ID NO: 40441 - RNA, 18 nt, Artificial Sequence
  Synthetic
uagugcaguugcaagaac

SEQ ID NO: 40442 - RNA, 19 nt, Artificial Sequence
  Synthetic
auagugcaguugcaagaac

SEQ ID NO: 40443 - RNA, 20 nt, Artificial Sequence
  Synthetic
aauagugcaguugcaagaac

SEQ ID NO: 40444 - RNA, 21 nt, Artificial Sequence
  Synthetic
uaauagugcaguugcaagaac

SEQ ID NO: 40445 - RNA, 22 nt, Artificial Sequence
  Synthetic
uuaauagugcaguugcaagaac

SEQ ID NO: 40446 - RNA, 23 nt, Artificial Sequence
  Synthetic
uuuaauagugcaguugcaagaac

SEQ ID NO: 40447 - RNA, 24 nt, Artificial Sequence
  Synthetic
cuuuaauagugcaguugcaagaac

SEQ ID NO: 40448 - RNA, 19 nt, Artificial Sequence
  Synthetic
uggauguuuuugacagaac

SEQ ID NO: 40449 - RNA, 20 nt, Artificial Sequence
  Synthetic
cuggauguuuuugacagaac

SEQ ID NO: 40450 - RNA, 21 nt, Artificial Sequence
  Synthetic
acuggauguuuuugacagaac

SEQ ID NO: 40451 - RNA, 22 nt, Artificial Sequence
  Synthetic
cacuggauguuuuugacagaac

SEQ ID NO: 40452 - RNA, 23 nt, Artificial Sequence
  Synthetic
acacuggauguuuuugacagaac

SEQ ID NO: 40453 - RNA, 24 nt, Artificial Sequence
  Synthetic
cacacuggauguuuuugacagaac

SEQ ID NO: 40454 - RNA, 21 nt, Artificial Sequence
  Synthetic
auucccaguaaguagcagaac

SEQ ID NO: 40455 - RNA, 22 nt, Artificial Sequence
  Synthetic
aauucccaguaaguagcagaac

SEQ ID NO: 40456 - RNA, 23 nt, Artificial Sequence
  Synthetic
aaauucccaguaaguagcagaac

SEQ ID NO: 40457 - RNA, 24 nt, Artificial Sequence
  Synthetic
caaauucccaguaaguagcagaac

SEQ ID NO: 40458 - RNA, 18 nt, Artificial Sequence
  Synthetic
ccacuuggagaucagaac

SEQ ID NO: 40459 - RNA, 22 nt, Artificial Sequence
  Synthetic
ugggccacuuggagaucagaac

SEQ ID NO: 40460 - RNA, 23 nt, Artificial Sequence
  Synthetic
cugggccacuuggagaucagaac

SEQ ID NO: 40461 - RNA, 24 nt, Artificial Sequence
  Synthetic
acugggccacuuggagaucagaac

SEQ ID NO: 40462 - RNA, 21 nt, Artificial Sequence
  Synthetic
aaauggagagauacagagaac

SEQ ID NO: 40463 - RNA, 22 nt, Artificial Sequence
  Synthetic
aaaauggagagauacagagaac

SEQ ID NO: 40464 - RNA, 23 nt, Artificial Sequence
  Synthetic
uaaaauggagagauacagagaac

SEQ ID NO: 40465 - RNA, 24 nt, Artificial Sequence
  Synthetic
auaaaauggagagauacagagaac

SEQ ID NO: 40466 - RNA, 18 nt, Artificial Sequence
  Synthetic
ugggauauuuaggagaac

SEQ ID NO: 40467 - RNA, 19 nt, Artificial Sequence
  Synthetic
augggauauuuaggagaac

SEQ ID NO: 40468 - RNA, 20 nt, Artificial Sequence
  Synthetic
caugggauauuuaggagaac

SEQ ID NO: 40469 - RNA, 21 nt, Artificial Sequence
  Synthetic
ucaugggauauuuaggagaac

SEQ ID NO: 40470 - RNA, 24 nt, Artificial Sequence
  Synthetic
uggucaugggauauuuaggagaac

SEQ ID NO: 40471 - RNA, 18 nt, Artificial Sequence
  Synthetic
auuugguggcaugagaac

SEQ ID NO: 40472 - RNA, 21 nt, Artificial Sequence
  Synthetic
uggauuugguggcaugagaac

SEQ ID NO: 40473 - RNA, 22 nt, Artificial Sequence
  Synthetic
auggauuugguggcaugagaac

SEQ ID NO: 40474 - RNA, 24 nt, Artificial Sequence
  Synthetic
ugauggauuugguggcaugagaac

SEQ ID NO: 40475 - RNA, 18 nt, Artificial Sequence
  Synthetic
aacgcagacccugagaac

SEQ ID NO: 40476 - RNA, 20 nt, Artificial Sequence
  Synthetic
ugaacgcagacccugagaac

SEQ ID NO: 40477 - RNA, 21 nt, Artificial Sequence
  Synthetic
augaacgcagacccugagaac

SEQ ID NO: 40478 - RNA, 22 nt, Artificial Sequence
  Synthetic
caugaacgcagacccugagaac

SEQ ID NO: 40479 - RNA, 23 nt, Artificial Sequence
  Synthetic
ccaugaacgcagacccugagaac

SEQ ID NO: 40480 - RNA, 24 nt, Artificial Sequence
  Synthetic
uccaugaacgcagacccugagaac

SEQ ID NO: 40481 - RNA, 18 nt, Artificial Sequence
  Synthetic
aacuacaguagugagaac

SEQ ID NO: 40482 - RNA, 19 nt, Artificial Sequence
  Synthetic
uaacuacaguagugagaac

SEQ ID NO: 40483 - RNA, 20 nt, Artificial Sequence
  Synthetic
cuaacuacaguagugagaac

SEQ ID NO: 40484 - RNA, 21 nt, Artificial Sequence
  Synthetic
ucuaacuacaguagugagaac

SEQ ID NO: 40485 - RNA, 22 nt, Artificial Sequence
  Synthetic
uucuaacuacaguagugagaac

SEQ ID NO: 40486 - RNA, 23 nt, Artificial Sequence
  Synthetic
cuucuaacuacaguagugagaac

SEQ ID NO: 40487 - RNA, 24 nt, Artificial Sequence
  Synthetic
ucuucuaacuacaguagugagaac

SEQ ID NO: 40488 - RNA, 18 nt, Artificial Sequence
  Synthetic
uguuuucucuuugagaac

SEQ ID NO: 40489 - RNA, 19 nt, Artificial Sequence
  Synthetic
uuguuuucucuuugagaac

SEQ ID NO: 40490 - RNA, 20 nt, Artificial Sequence
  Synthetic
uuuguuuucucuuugagaac

SEQ ID NO: 40491 - RNA, 22 nt, Artificial Sequence
  Synthetic
cguuuguuuucucuuugagaac

SEQ ID NO: 40492 - RNA, 23 nt, Artificial Sequence
  Synthetic
ucguuuguuuucucuuugagaac

SEQ ID NO: 40493 - RNA, 24 nt, Artificial Sequence
  Synthetic
cucguuuguuuucucuuugagaac

SEQ ID NO: 40494 - RNA, 18 nt, Artificial Sequence
  Synthetic
uuaggcaagaacuagaac

SEQ ID NO: 40495 - RNA, 20 nt, Artificial Sequence
  Synthetic
uguuaggcaagaacuagaac

SEQ ID NO: 40496 - RNA, 21 nt, Artificial Sequence
  Synthetic
auguuaggcaagaacuagaac

SEQ ID NO: 40497 - RNA, 22 nt, Artificial Sequence
  Synthetic
aauguuaggcaagaacuagaac

SEQ ID NO: 40498 - RNA, 23 nt, Artificial Sequence
  Synthetic
aaauguuaggcaagaacuagaac

SEQ ID NO: 40499 - RNA, 24 nt, Artificial Sequence
  Synthetic
aaaauguuaggcaagaacuagaac

SEQ ID NO: 40500 - RNA, 18 nt, Artificial Sequence
  Synthetic
caccauuuaaccuagaac

SEQ ID NO: 40501 - RNA, 20 nt, Artificial Sequence
  Synthetic
agcaccauuuaaccuagaac

SEQ ID NO: 40502 - RNA, 21 nt, Artificial Sequence
  Synthetic
cagcaccauuuaaccuagaac

SEQ ID NO: 40503 - RNA, 22 nt, Artificial Sequence
  Synthetic
ucagcaccauuuaaccuagaac

SEQ ID NO: 40504 - RNA, 24 nt, Artificial Sequence
  Synthetic
agucagcaccauuuaaccuagaac

SEQ ID NO: 40505 - RNA, 18 nt, Artificial Sequence
  Synthetic
auuuccaucaucuagaac

SEQ ID NO: 40506 - RNA, 19 nt, Artificial Sequence
  Synthetic
cauuuccaucaucuagaac

SEQ ID NO: 40507 - RNA, 20 nt, Artificial Sequence
  Synthetic
ucauuuccaucaucuagaac

SEQ ID NO: 40508 - RNA, 21 nt, Artificial Sequence
  Synthetic
aucauuuccaucaucuagaac

SEQ ID NO: 40509 - RNA, 22 nt, Artificial Sequence
  Synthetic
caucauuuccaucaucuagaac

SEQ ID NO: 40510 - RNA, 23 nt, Artificial Sequence
  Synthetic
acaucauuuccaucaucuagaac

SEQ ID NO: 40511 - RNA, 18 nt, Artificial Sequence
  Synthetic
uauccauuuugguagaac

SEQ ID NO: 40512 - RNA, 19 nt, Artificial Sequence
  Synthetic
uuauccauuuugguagaac

SEQ ID NO: 40513 - RNA, 20 nt, Artificial Sequence
  Synthetic
uuuauccauuuugguagaac

SEQ ID NO: 40514 - RNA, 22 nt, Artificial Sequence
  Synthetic
aguuuauccauuuugguagaac

SEQ ID NO: 40515 - RNA, 23 nt, Artificial Sequence
  Synthetic
aaguuuauccauuuugguagaac

SEQ ID NO: 40516 - RNA, 24 nt, Artificial Sequence
  Synthetic
aaaguuuauccauuuugguagaac

SEQ ID NO: 40517 - RNA, 18 nt, Artificial Sequence
  Synthetic
acaguauaaaaaacgaac

SEQ ID NO: 40518 - RNA, 19 nt, Artificial Sequence
  Synthetic
aacaguauaaaaaacgaac

SEQ ID NO: 40519 - RNA, 20 nt, Artificial Sequence
  Synthetic
aaacaguauaaaaaacgaac

SEQ ID NO: 40520 - RNA, 21 nt, Artificial Sequence
  Synthetic
aaaacaguauaaaaaacgaac

SEQ ID NO: 40521 - RNA, 22 nt, Artificial Sequence
  Synthetic
uaaaacaguauaaaaaacgaac

SEQ ID NO: 40522 - RNA, 18 nt, Artificial Sequence
  Synthetic
ugacauuugaaaaggaac

SEQ ID NO: 40523 - RNA, 19 nt, Artificial Sequence
  Synthetic
augacauuugaaaaggaac

SEQ ID NO: 40524 - RNA, 20 nt, Artificial Sequence
  Synthetic
aaugacauuugaaaaggaac

SEQ ID NO: 40525 - RNA, 18 nt, Artificial Sequence
  Synthetic
cugccaucccaaaggaac

SEQ ID NO: 40526 - RNA, 19 nt, Artificial Sequence
  Synthetic
ccugccaucccaaaggaac

SEQ ID NO: 40527 - RNA, 21 nt, Artificial Sequence
  Synthetic
agccugccaucccaaaggaac

SEQ ID NO: 40528 - RNA, 22 nt, Artificial Sequence
  Synthetic
cagccugccaucccaaaggaac

SEQ ID NO: 40529 - RNA, 23 nt, Artificial Sequence
  Synthetic
ccagccugccaucccaaaggaac

SEQ ID NO: 40530 - RNA, 24 nt, Artificial Sequence
  Synthetic
accagccugccaucccaaaggaac

SEQ ID NO: 40531 - RNA, 21 nt, Artificial Sequence
  Synthetic
agguagaaauaacacaggaac

SEQ ID NO: 40532 - RNA, 22 nt, Artificial Sequence
  Synthetic
aagguagaaauaacacaggaac

SEQ ID NO: 40533 - RNA, 23 nt, Artificial Sequence
  Synthetic
uaagguagaaauaacacaggaac

SEQ ID NO: 40534 - RNA, 24 nt, Artificial Sequence
  Synthetic
auaagguagaaauaacacaggaac

SEQ ID NO: 40535 - RNA, 18 nt, Artificial Sequence
  Synthetic
cacgccuuuuguaggaac

SEQ ID NO: 40536 - RNA, 19 nt, Artificial Sequence
  Synthetic
ucacgccuuuuguaggaac

SEQ ID NO: 40537 - RNA, 21 nt, Artificial Sequence
  Synthetic
agucacgccuuuuguaggaac

SEQ ID NO: 40538 - RNA, 22 nt, Artificial Sequence
  Synthetic
cagucacgccuuuuguaggaac

SEQ ID NO: 40539 - RNA, 23 nt, Artificial Sequence
  Synthetic
acagucacgccuuuuguaggaac

SEQ ID NO: 40540 - RNA, 24 nt, Artificial Sequence
  Synthetic
uacagucacgccuuuuguaggaac

SEQ ID NO: 40541 - RNA, 18 nt, Artificial Sequence
  Synthetic
ucacacagauagcggaac

SEQ ID NO: 40542 - RNA, 19 nt, Artificial Sequence
  Synthetic
aucacacagauagcggaac

SEQ ID NO: 40543 - RNA, 21 nt, Artificial Sequence
  Synthetic
agaucacacagauagcggaac

SEQ ID NO: 40544 - RNA, 22 nt, Artificial Sequence
  Synthetic
aagaucacacagauagcggaac

SEQ ID NO: 40545 - RNA, 23 nt, Artificial Sequence
  Synthetic
uaagaucacacagauagcggaac

SEQ ID NO: 40546 - RNA, 24 nt, Artificial Sequence
  Synthetic
auaagaucacacagauagcggaac

SEQ ID NO: 40547 - RNA, 18 nt, Artificial Sequence
  Synthetic
cagcuuuggaucuggaac

SEQ ID NO: 40548 - RNA, 19 nt, Artificial Sequence
  Synthetic
ucagcuuuggaucuggaac

SEQ ID NO: 40549 - RNA, 20 nt, Artificial Sequence
  Synthetic
cucagcuuuggaucuggaac

SEQ ID NO: 40550 - RNA, 21 nt, Artificial Sequence
  Synthetic
acucagcuuuggaucuggaac

SEQ ID NO: 40551 - RNA, 22 nt, Artificial Sequence
  Synthetic
cacucagcuuuggaucuggaac

SEQ ID NO: 40552 - RNA, 23 nt, Artificial Sequence
  Synthetic
acacucagcuuuggaucuggaac

SEQ ID NO: 40553 - RNA, 18 nt, Artificial Sequence
  Synthetic
cagagagugaaaaugaac

SEQ ID NO: 40554 - RNA, 19 nt, Artificial Sequence
  Synthetic
ccagagagugaaaaugaac

SEQ ID NO: 40555 - RNA, 20 nt, Artificial Sequence
  Synthetic
uccagagagugaaaaugaac

SEQ ID NO: 40556 - RNA, 21 nt, Artificial Sequence
  Synthetic
uuccagagagugaaaaugaac

SEQ ID NO: 40557 - RNA, 22 nt, Artificial Sequence
  Synthetic
auuccagagagugaaaaugaac

SEQ ID NO: 40558 - RNA, 23 nt, Artificial Sequence
  Synthetic
aauuccagagagugaaaaugaac

SEQ ID NO: 40559 - RNA, 24 nt, Artificial Sequence
  Synthetic
aaauuccagagagugaaaaugaac

SEQ ID NO: 40560 - RNA, 18 nt, Artificial Sequence
  Synthetic
uaugugcuuagaaugaac

SEQ ID NO: 40561 - RNA, 20 nt, Artificial Sequence
  Synthetic
uguaugugcuuagaaugaac

SEQ ID NO: 40562 - RNA, 22 nt, Artificial Sequence
  Synthetic
aguguaugugcuuagaaugaac

SEQ ID NO: 40563 - RNA, 24 nt, Artificial Sequence
  Synthetic
ugaguguaugugcuuagaaugaac

SEQ ID NO: 40564 - RNA, 18 nt, Artificial Sequence
  Synthetic
cgaagggaaaaacugaac

SEQ ID NO: 40565 - RNA, 20 nt, Artificial Sequence
  Synthetic
ugcgaagggaaaaacugaac

SEQ ID NO: 40566 - RNA, 21 nt, Artificial Sequence
  Synthetic
cugcgaagggaaaaacugaac

SEQ ID NO: 40567 - RNA, 22 nt, Artificial Sequence
  Synthetic
ucugcgaagggaaaaacugaac

SEQ ID NO: 40568 - RNA, 24 nt, Artificial Sequence
  Synthetic
ugucugcgaagggaaaaacugaac

SEQ ID NO: 40569 - RNA, 18 nt, Artificial Sequence
  Synthetic
ucuuacgugaaacugaac

SEQ ID NO: 40570 - RNA, 19 nt, Artificial Sequence
  Synthetic
aucuuacgugaaacugaac

SEQ ID NO: 40571 - RNA, 20 nt, Artificial Sequence
  Synthetic
caucuuacgugaaacugaac

SEQ ID NO: 40572 - RNA, 21 nt, Artificial Sequence
  Synthetic
ucaucuuacgugaaacugaac

SEQ ID NO: 40573 - RNA, 22 nt, Artificial Sequence
  Synthetic
aucaucuuacgugaaacugaac

SEQ ID NO: 40574 - RNA, 23 nt, Artificial Sequence
  Synthetic
aaucaucuuacgugaaacugaac

SEQ ID NO: 40575 - RNA, 24 nt, Artificial Sequence
  Synthetic
aaaucaucuuacgugaaacugaac

SEQ ID NO: 40576 - RNA, 18 nt, Artificial Sequence
  Synthetic
ccucccaagucccugaac

SEQ ID NO: 40577 - RNA, 18 nt, Artificial Sequence
  Synthetic
caggcuucuuugcugaac

SEQ ID NO: 40578 - RNA, 19 nt, Artificial Sequence
  Synthetic
acaggcuucuuugcugaac

SEQ ID NO: 40579 - RNA, 21 nt, Artificial Sequence
  Synthetic
ugacaggcuucuuugcugaac

SEQ ID NO: 40580 - RNA, 22 nt, Artificial Sequence
  Synthetic
cugacaggcuucuuugcugaac

SEQ ID NO: 40581 - RNA, 23 nt, Artificial Sequence
  Synthetic
acugacaggcuucuuugcugaac

SEQ ID NO: 40582 - RNA, 24 nt, Artificial Sequence
  Synthetic
aacugacaggcuucuuugcugaac

SEQ ID NO: 40583 - RNA, 18 nt, Artificial Sequence
  Synthetic
agagcuucuaaucugaac

SEQ ID NO: 40584 - RNA, 19 nt, Artificial Sequence
  Synthetic
aagagcuucuaaucugaac

SEQ ID NO: 40585 - RNA, 20 nt, Artificial Sequence
  Synthetic
aaagagcuucuaaucugaac

SEQ ID NO: 40586 - RNA, 21 nt, Artificial Sequence
  Synthetic
aaaagagcuucuaaucugaac

SEQ ID NO: 40587 - RNA, 22 nt, Artificial Sequence
  Synthetic
caaaagagcuucuaaucugaac

SEQ ID NO: 40588 - RNA, 23 nt, Artificial Sequence
  Synthetic
ucaaaagagcuucuaaucugaac

SEQ ID NO: 40589 - RNA, 24 nt, Artificial Sequence
  Synthetic
cucaaaagagcuucuaaucugaac

SEQ ID NO: 40590 - RNA, 18 nt, Artificial Sequence
  Synthetic
cugacugugcuagugaac

SEQ ID NO: 40591 - RNA, 19 nt, Artificial Sequence
  Synthetic
ucugacugugcuagugaac

SEQ ID NO: 40592 - RNA, 20 nt, Artificial Sequence
  Synthetic
uucugacugugcuagugaac

SEQ ID NO: 40593 - RNA, 22 nt, Artificial Sequence
  Synthetic
uguucugacugugcuagugaac

SEQ ID NO: 40594 - RNA, 23 nt, Artificial Sequence
  Synthetic
cuguucugacugugcuagugaac

SEQ ID NO: 40595 - RNA, 24 nt, Artificial Sequence
  Synthetic
ccuguucugacugugcuagugaac

SEQ ID NO: 40596 - RNA, 18 nt, Artificial Sequence
  Synthetic
uacuggcaucuagugaac

SEQ ID NO: 40597 - RNA, 19 nt, Artificial Sequence
  Synthetic
uuacuggcaucuagugaac

SEQ ID NO: 40598 - RNA, 20 nt, Artificial Sequence
  Synthetic
uuuacuggcaucuagugaac

SEQ ID NO: 40599 - RNA, 21 nt, Artificial Sequence
  Synthetic
uuuuacuggcaucuagugaac

SEQ ID NO: 40600 - RNA, 22 nt, Artificial Sequence
  Synthetic
auuuuacuggcaucuagugaac

SEQ ID NO: 40601 - RNA, 23 nt, Artificial Sequence
  Synthetic
aauuuuacuggcaucuagugaac

SEQ ID NO: 40602 - RNA, 24 nt, Artificial Sequence
  Synthetic
aaauuuuacuggcaucuagugaac

SEQ ID NO: 40603 - RNA, 18 nt, Artificial Sequence
  Synthetic
ucagucccugaggugaac

SEQ ID NO: 40604 - RNA, 19 nt, Artificial Sequence
  Synthetic
aucagucccugaggugaac

SEQ ID NO: 40605 - RNA, 20 nt, Artificial Sequence
  Synthetic
caucagucccugaggugaac

SEQ ID NO: 40606 - RNA, 21 nt, Artificial Sequence
  Synthetic
ccaucagucccugaggugaac

SEQ ID NO: 40607 - RNA, 22 nt, Artificial Sequence
  Synthetic
cccaucagucccugaggugaac

SEQ ID NO: 40608 - RNA, 23 nt, Artificial Sequence
  Synthetic
ccccaucagucccugaggugaac

SEQ ID NO: 40609 - RNA, 24 nt, Artificial Sequence
  Synthetic
uccccaucagucccugaggugaac

SEQ ID NO: 40610 - RNA, 18 nt, Artificial Sequence
  Synthetic
cacagcauggccuugaac

SEQ ID NO: 40611 - RNA, 22 nt, Artificial Sequence
  Synthetic
ugggcacagcauggccuugaac

SEQ ID NO: 40612 - RNA, 24 nt, Artificial Sequence
  Synthetic
agugggcacagcauggccuugaac

SEQ ID NO: 40613 - RNA, 19 nt, Artificial Sequence
  Synthetic
agccagcaaguauuugaac

SEQ ID NO: 40614 - RNA, 20 nt, Artificial Sequence
  Synthetic
cagccagcaaguauuugaac

SEQ ID NO: 40615 - RNA, 21 nt, Artificial Sequence
  Synthetic
acagccagcaaguauuugaac

SEQ ID NO: 40616 - RNA, 22 nt, Artificial Sequence
  Synthetic
cacagccagcaaguauuugaac

SEQ ID NO: 40617 - RNA, 24 nt, Artificial Sequence
  Synthetic
ugcacagccagcaaguauuugaac

SEQ ID NO: 40618 - RNA, 18 nt, Artificial Sequence
  Synthetic
aaauggcauuguuugaac

SEQ ID NO: 40619 - RNA, 19 nt, Artificial Sequence
  Synthetic
aaaauggcauuguuugaac

SEQ ID NO: 40620 - RNA, 20 nt, Artificial Sequence
  Synthetic
uaaaauggcauuguuugaac

SEQ ID NO: 40621 - RNA, 21 nt, Artificial Sequence
  Synthetic
auaaaauggcauuguuugaac

SEQ ID NO: 40622 - RNA, 23 nt, Artificial Sequence
  Synthetic
agauaaaauggcauuguuugaac

SEQ ID NO: 40623 - RNA, 24 nt, Artificial Sequence
  Synthetic
aagauaaaauggcauuguuugaac

SEQ ID NO: 40624 - RNA, 18 nt, Artificial Sequence
  Synthetic
ucuuguucugaaaauaac

SEQ ID NO: 40625 - RNA, 19 nt, Artificial Sequence
  Synthetic
aucuuguucugaaaauaac

SEQ ID NO: 40626 - RNA, 20 nt, Artificial Sequence
  Synthetic
caucuuguucugaaaauaac

SEQ ID NO: 40627 - RNA, 21 nt, Artificial Sequence
  Synthetic
acaucuuguucugaaaauaac

SEQ ID NO: 40628 - RNA, 22 nt, Artificial Sequence
  Synthetic
aacaucuuguucugaaaauaac

SEQ ID NO: 40629 - RNA, 23 nt, Artificial Sequence
  Synthetic
uaacaucuuguucugaaaauaac

SEQ ID NO: 40630 - RNA, 24 nt, Artificial Sequence
  Synthetic
cuaacaucuuguucugaaaauaac

SEQ ID NO: 40631 - RNA, 21 nt, Artificial Sequence
  Synthetic
aagcauaaggaaggaaauaac

SEQ ID NO: 40632 - RNA, 24 nt, Artificial Sequence
  Synthetic
aggaagcauaaggaaggaaauaac

SEQ ID NO: 40633 - RNA, 18 nt, Artificial Sequence
  Synthetic
auguguaccaacaauaac

SEQ ID NO: 40634 - RNA, 19 nt, Artificial Sequence
  Synthetic
aauguguaccaacaauaac

SEQ ID NO: 40635 - RNA, 20 nt, Artificial Sequence
  Synthetic
aaauguguaccaacaauaac

SEQ ID NO: 40636 - RNA, 21 nt, Artificial Sequence
  Synthetic
caaauguguaccaacaauaac

SEQ ID NO: 40637 - RNA, 22 nt, Artificial Sequence
  Synthetic
acaaauguguaccaacaauaac

SEQ ID NO: 40638 - RNA, 24 nt, Artificial Sequence
  Synthetic
agacaaauguguaccaacaauaac

SEQ ID NO: 40639 - RNA, 18 nt, Artificial Sequence
  Synthetic
cuggucuaucuacauaac

SEQ ID NO: 40640 - RNA, 19 nt, Artificial Sequence
  Synthetic
ccuggucuaucuacauaac

SEQ ID NO: 40641 - RNA, 20 nt, Artificial Sequence
  Synthetic
accuggucuaucuacauaac

SEQ ID NO: 40642 - RNA, 21 nt, Artificial Sequence
  Synthetic
caccuggucuaucuacauaac

SEQ ID NO: 40643 - RNA, 22 nt, Artificial Sequence
  Synthetic
acaccuggucuaucuacauaac

SEQ ID NO: 40644 - RNA, 23 nt, Artificial Sequence
  Synthetic
aacaccuggucuaucuacauaac

SEQ ID NO: 40645 - RNA, 24 nt, Artificial Sequence
  Synthetic
uaacaccuggucuaucuacauaac

SEQ ID NO: 40646 - RNA, 18 nt, Artificial Sequence
  Synthetic
ccacauuccagucauaac

SEQ ID NO: 40647 - RNA, 19 nt, Artificial Sequence
  Synthetic
uccacauuccagucauaac

SEQ ID NO: 40648 - RNA, 20 nt, Artificial Sequence
  Synthetic
uuccacauuccagucauaac

SEQ ID NO: 40649 - RNA, 21 nt, Artificial Sequence
  Synthetic
cuuccacauuccagucauaac

SEQ ID NO: 40650 - RNA, 22 nt, Artificial Sequence
  Synthetic
ucuuccacauuccagucauaac

SEQ ID NO: 40651 - RNA, 23 nt, Artificial Sequence
  Synthetic
uucuuccacauuccagucauaac

SEQ ID NO: 40652 - RNA, 24 nt, Artificial Sequence
  Synthetic
uuucuuccacauuccagucauaac

SEQ ID NO: 40653 - RNA, 18 nt, Artificial Sequence
  Synthetic
ugaguuacaacagauaac

SEQ ID NO: 40654 - RNA, 19 nt, Artificial Sequence
  Synthetic
cugaguuacaacagauaac

SEQ ID NO: 40655 - RNA, 20 nt, Artificial Sequence
  Synthetic
ccugaguuacaacagauaac

SEQ ID NO: 40656 - RNA, 21 nt, Artificial Sequence
  Synthetic
cccugaguuacaacagauaac

SEQ ID NO: 40657 - RNA, 22 nt, Artificial Sequence
  Synthetic
acccugaguuacaacagauaac

SEQ ID NO: 40658 - RNA, 23 nt, Artificial Sequence
  Synthetic
cacccugaguuacaacagauaac

SEQ ID NO: 40659 - RNA, 24 nt, Artificial Sequence
  Synthetic
ucacccugaguuacaacagauaac

SEQ ID NO: 40660 - RNA, 18 nt, Artificial Sequence
  Synthetic
acuaaacaaauagauaac

SEQ ID NO: 40661 - RNA, 19 nt, Artificial Sequence
  Synthetic
aacuaaacaaauagauaac

SEQ ID NO: 40662 - RNA, 20 nt, Artificial Sequence
  Synthetic
caacuaaacaaauagauaac

SEQ ID NO: 40663 - RNA, 21 nt, Artificial Sequence
  Synthetic
acaacuaaacaaauagauaac

SEQ ID NO: 40664 - RNA, 22 nt, Artificial Sequence
  Synthetic
aacaacuaaacaaauagauaac

SEQ ID NO: 40665 - RNA, 24 nt, Artificial Sequence
  Synthetic
ugaacaacuaaacaaauagauaac

SEQ ID NO: 40666 - RNA, 18 nt, Artificial Sequence
  Synthetic
aauagucuuagugauaac

SEQ ID NO: 40667 - RNA, 19 nt, Artificial Sequence
  Synthetic
uaauagucuuagugauaac

SEQ ID NO: 40668 - RNA, 20 nt, Artificial Sequence
  Synthetic
uuaauagucuuagugauaac

SEQ ID NO: 40669 - RNA, 21 nt, Artificial Sequence
  Synthetic
uuuaauagucuuagugauaac

SEQ ID NO: 40670 - RNA, 22 nt, Artificial Sequence
  Synthetic
uuuuaauagucuuagugauaac

SEQ ID NO: 40671 - RNA, 23 nt, Artificial Sequence
  Synthetic
auuuuaauagucuuagugauaac

SEQ ID NO: 40672 - RNA, 24 nt, Artificial Sequence
  Synthetic
uauuuuaauagucuuagugauaac

SEQ ID NO: 40673 - RNA, 18 nt, Artificial Sequence
  Synthetic
uugaggugugaauauaac

SEQ ID NO: 40674 - RNA, 19 nt, Artificial Sequence
  Synthetic
cuugaggugugaauauaac

SEQ ID NO: 40675 - RNA, 21 nt, Artificial Sequence
  Synthetic
agcuugaggugugaauauaac

SEQ ID NO: 40676 - RNA, 22 nt, Artificial Sequence
  Synthetic
uagcuugaggugugaauauaac

SEQ ID NO: 40677 - RNA, 23 nt, Artificial Sequence
  Synthetic
uuagcuugaggugugaauauaac

SEQ ID NO: 40678 - RNA, 24 nt, Artificial Sequence
  Synthetic
cuuagcuugaggugugaauauaac

SEQ ID NO: 40679 - RNA, 18 nt, Artificial Sequence
  Synthetic
agucacauguucuauaac

SEQ ID NO: 40680 - RNA, 19 nt, Artificial Sequence
  Synthetic
aagucacauguucuauaac

SEQ ID NO: 40681 - RNA, 21 nt, Artificial Sequence
  Synthetic
ugaagucacauguucuauaac

SEQ ID NO: 40682 - RNA, 22 nt, Artificial Sequence
  Synthetic
cugaagucacauguucuauaac

SEQ ID NO: 40683 - RNA, 23 nt, Artificial Sequence
  Synthetic
ccugaagucacauguucuauaac

SEQ ID NO: 40684 - RNA, 21 nt, Artificial Sequence
  Synthetic
aauagaauuaaaaaguauaac

SEQ ID NO: 40685 - RNA, 22 nt, Artificial Sequence
  Synthetic
aaauagaauuaaaaaguauaac

SEQ ID NO: 40686 - RNA, 23 nt, Artificial Sequence
  Synthetic
uaaauagaauuaaaaaguauaac

SEQ ID NO: 40687 - RNA, 19 nt, Artificial Sequence
  Synthetic
agggguuauagcaacuaac

SEQ ID NO: 40688 - RNA, 20 nt, Artificial Sequence
  Synthetic
cagggguuauagcaacuaac

SEQ ID NO: 40689 - RNA, 22 nt, Artificial Sequence
  Synthetic
ugcagggguuauagcaacuaac

SEQ ID NO: 40690 - RNA, 23 nt, Artificial Sequence
  Synthetic
cugcagggguuauagcaacuaac

SEQ ID NO: 40691 - RNA, 24 nt, Artificial Sequence
  Synthetic
acugcagggguuauagcaacuaac

SEQ ID NO: 40692 - RNA, 18 nt, Artificial Sequence
  Synthetic
ugucauaccauaacuaac

SEQ ID NO: 40693 - RNA, 20 nt, Artificial Sequence
  Synthetic
agugucauaccauaacuaac

SEQ ID NO: 40694 - RNA, 22 nt, Artificial Sequence
  Synthetic
agagugucauaccauaacuaac

SEQ ID NO: 40695 - RNA, 23 nt, Artificial Sequence
  Synthetic
aagagugucauaccauaacuaac

SEQ ID NO: 40696 - RNA, 24 nt, Artificial Sequence
  Synthetic
aaagagugucauaccauaacuaac

SEQ ID NO: 40697 - RNA, 18 nt, Artificial Sequence
  Synthetic
uauuucugauaugcuaac

SEQ ID NO: 40698 - RNA, 19 nt, Artificial Sequence
  Synthetic
uuauuucugauaugcuaac

SEQ ID NO: 40699 - RNA, 21 nt, Artificial Sequence
  Synthetic
uguuauuucugauaugcuaac

SEQ ID NO: 40700 - RNA, 22 nt, Artificial Sequence
  Synthetic
uuguuauuucugauaugcuaac

SEQ ID NO: 40701 - RNA, 23 nt, Artificial Sequence
  Synthetic
auuguuauuucugauaugcuaac

SEQ ID NO: 40702 - RNA, 24 nt, Artificial Sequence
  Synthetic
uauuguuauuucugauaugcuaac

SEQ ID NO: 40703 - RNA, 18 nt, Artificial Sequence
  Synthetic
caagcagaaaauucuaac

SEQ ID NO: 40704 - RNA, 21 nt, Artificial Sequence
  Synthetic
uggcaagcagaaaauucuaac

SEQ ID NO: 40705 - RNA, 23 nt, Artificial Sequence
  Synthetic
aguggcaagcagaaaauucuaac

SEQ ID NO: 40706 - RNA, 24 nt, Artificial Sequence
  Synthetic
aaguggcaagcagaaaauucuaac

SEQ ID NO: 40707 - RNA, 21 nt, Artificial Sequence
  Synthetic
uggggaaagugaaagaguaac

SEQ ID NO: 40708 - RNA, 22 nt, Artificial Sequence
  Synthetic
uuggggaaagugaaagaguaac

SEQ ID NO: 40709 - RNA, 24 nt, Artificial Sequence
  Synthetic
uguuggggaaagugaaagaguaac

SEQ ID NO: 40710 - RNA, 21 nt, Artificial Sequence
  Synthetic
auuccuguuauuuggaguaac

SEQ ID NO: 40711 - RNA, 22 nt, Artificial Sequence
  Synthetic
aauuccuguuauuuggaguaac

SEQ ID NO: 40712 - RNA, 23 nt, Artificial Sequence
  Synthetic
uaauuccuguuauuuggaguaac

SEQ ID NO: 40713 - RNA, 24 nt, Artificial Sequence
  Synthetic
cuaauuccuguuauuuggaguaac

SEQ ID NO: 40714 - RNA, 21 nt, Artificial Sequence
  Synthetic
ccuguuuucucauuuaguaac

SEQ ID NO: 40715 - RNA, 22 nt, Artificial Sequence
  Synthetic
accuguuuucucauuuaguaac

SEQ ID NO: 40716 - RNA, 23 nt, Artificial Sequence
  Synthetic
aaccuguuuucucauuuaguaac

SEQ ID NO: 40717 - RNA, 24 nt, Artificial Sequence
  Synthetic
uaaccuguuuucucauuuaguaac

SEQ ID NO: 40718 - RNA, 18 nt, Artificial Sequence
  Synthetic
auuuuggaguagcguaac

SEQ ID NO: 40719 - RNA, 21 nt, Artificial Sequence
  Synthetic
uggauuuuggaguagcguaac

SEQ ID NO: 40720 - RNA, 23 nt, Artificial Sequence
  Synthetic
uguggauuuuggaguagcguaac

SEQ ID NO: 40721 - RNA, 24 nt, Artificial Sequence
  Synthetic
uuguggauuuuggaguagcguaac

SEQ ID NO: 40722 - RNA, 18 nt, Artificial Sequence
  Synthetic
cuuuauucaguauguaac

SEQ ID NO: 40723 - RNA, 21 nt, Artificial Sequence
  Synthetic
uggcuuuauucaguauguaac

SEQ ID NO: 40724 - RNA, 22 nt, Artificial Sequence
  Synthetic
uuggcuuuauucaguauguaac

SEQ ID NO: 40725 - RNA, 23 nt, Artificial Sequence
  Synthetic
uuuggcuuuauucaguauguaac

SEQ ID NO: 40726 - RNA, 24 nt, Artificial Sequence
  Synthetic
cuuuggcuuuauucaguauguaac

SEQ ID NO: 40727 - RNA, 18 nt, Artificial Sequence
  Synthetic
acugauaugcacuguaac

SEQ ID NO: 40728 - RNA, 19 nt, Artificial Sequence
  Synthetic
uacugauaugcacuguaac

SEQ ID NO: 40729 - RNA, 20 nt, Artificial Sequence
  Synthetic
auacugauaugcacuguaac

SEQ ID NO: 40730 - RNA, 18 nt, Artificial Sequence
  Synthetic
agugugguagaguguaac

SEQ ID NO: 40731 - RNA, 19 nt, Artificial Sequence
  Synthetic
cagugugguagaguguaac

SEQ ID NO: 40732 - RNA, 21 nt, Artificial Sequence
  Synthetic
agcagugugguagaguguaac

SEQ ID NO: 40733 - RNA, 23 nt, Artificial Sequence
  Synthetic
ugagcagugugguagaguguaac

SEQ ID NO: 40734 - RNA, 18 nt, Artificial Sequence
  Synthetic
uagugaauuuugauuaac

SEQ ID NO: 40735 - RNA, 19 nt, Artificial Sequence
  Synthetic
uuagugaauuuugauuaac

SEQ ID NO: 40736 - RNA, 20 nt, Artificial Sequence
  Synthetic
uuuagugaauuuugauuaac

SEQ ID NO: 40737 - RNA, 21 nt, Artificial Sequence
  Synthetic
uuuuagugaauuuugauuaac

SEQ ID NO: 40738 - RNA, 22 nt, Artificial Sequence
  Synthetic
auuuuagugaauuuugauuaac

SEQ ID NO: 40739 - RNA, 23 nt, Artificial Sequence
  Synthetic
uauuuuagugaauuuugauuaac

SEQ ID NO: 40740 - RNA, 24 nt, Artificial Sequence
  Synthetic
uuauuuuagugaauuuugauuaac

SEQ ID NO: 40741 - RNA, 19 nt, Artificial Sequence
  Synthetic
ugagaacguacauauuaac

SEQ ID NO: 40742 - RNA, 20 nt, Artificial Sequence
  Synthetic
uugagaacguacauauuaac

SEQ ID NO: 40743 - RNA, 21 nt, Artificial Sequence
  Synthetic
auugagaacguacauauuaac

SEQ ID NO: 40744 - RNA, 22 nt, Artificial Sequence
  Synthetic
aauugagaacguacauauuaac

SEQ ID NO: 40745 - RNA, 23 nt, Artificial Sequence
  Synthetic
uaauugagaacguacauauuaac

SEQ ID NO: 40746 - RNA, 18 nt, Artificial Sequence
  Synthetic
acgccaaauucucuuaac

SEQ ID NO: 40747 - RNA, 19 nt, Artificial Sequence
  Synthetic
aacgccaaauucucuuaac

SEQ ID NO: 40748 - RNA, 20 nt, Artificial Sequence
  Synthetic
aaacgccaaauucucuuaac

SEQ ID NO: 40749 - RNA, 22 nt, Artificial Sequence
  Synthetic
ugaaacgccaaauucucuuaac

SEQ ID NO: 40750 - RNA, 23 nt, Artificial Sequence
  Synthetic
cugaaacgccaaauucucuuaac

SEQ ID NO: 40751 - RNA, 24 nt, Artificial Sequence
  Synthetic
ccugaaacgccaaauucucuuaac

SEQ ID NO: 40752 - RNA, 18 nt, Artificial Sequence
  Synthetic
uuguaaauccuaguuaac

SEQ ID NO: 40753 - RNA, 19 nt, Artificial Sequence
  Synthetic
auuguaaauccuaguuaac

SEQ ID NO: 40754 - RNA, 20 nt, Artificial Sequence
  Synthetic
uauuguaaauccuaguuaac

SEQ ID NO: 40755 - RNA, 22 nt, Artificial Sequence
  Synthetic
uguauuguaaauccuaguuaac

SEQ ID NO: 40756 - RNA, 23 nt, Artificial Sequence
  Synthetic
uuguauuguaaauccuaguuaac

SEQ ID NO: 40757 - RNA, 24 nt, Artificial Sequence
  Synthetic
cuuguauuguaaauccuaguuaac

SEQ ID NO: 40758 - RNA, 18 nt, Artificial Sequence
  Synthetic
aagacuguauggguuaac

SEQ ID NO: 40759 - RNA, 20 nt, Artificial Sequence
  Synthetic
agaagacuguauggguuaac

SEQ ID NO: 40760 - RNA, 21 nt, Artificial Sequence
  Synthetic
aagaagacuguauggguuaac

SEQ ID NO: 40761 - RNA, 22 nt, Artificial Sequence
  Synthetic
aaagaagacuguauggguuaac

SEQ ID NO: 40762 - RNA, 19 nt, Artificial Sequence
  Synthetic
ugauaaacagaauguuaac

SEQ ID NO: 40763 - RNA, 20 nt, Artificial Sequence
  Synthetic
uugauaaacagaauguuaac

SEQ ID NO: 40764 - RNA, 21 nt, Artificial Sequence
  Synthetic
uuugauaaacagaauguuaac

SEQ ID NO: 40765 - RNA, 22 nt, Artificial Sequence
  Synthetic
uuuugauaaacagaauguuaac

SEQ ID NO: 40766 - RNA, 23 nt, Artificial Sequence
  Synthetic
cuuuugauaaacagaauguuaac

SEQ ID NO: 40767 - RNA, 24 nt, Artificial Sequence
  Synthetic
ucuuuugauaaacagaauguuaac

SEQ ID NO: 40768 - RNA, 18 nt, Artificial Sequence
  Synthetic
ccgaagaugccauuuaac

SEQ ID NO: 40769 - RNA, 19 nt, Artificial Sequence
  Synthetic
accgaagaugccauuuaac

SEQ ID NO: 40770 - RNA, 20 nt, Artificial Sequence
  Synthetic
caccgaagaugccauuuaac

SEQ ID NO: 40771 - RNA, 21 nt, Artificial Sequence
  Synthetic
acaccgaagaugccauuuaac

SEQ ID NO: 40772 - RNA, 22 nt, Artificial Sequence
  Synthetic
cacaccgaagaugccauuuaac

SEQ ID NO: 40773 - RNA, 23 nt, Artificial Sequence
  Synthetic
acacaccgaagaugccauuuaac

SEQ ID NO: 40774 - RNA, 18 nt, Artificial Sequence
  Synthetic
ugaagcaucuccuuuaac

SEQ ID NO: 40775 - RNA, 19 nt, Artificial Sequence
  Synthetic
uugaagcaucuccuuuaac

SEQ ID NO: 40776 - RNA, 21 nt, Artificial Sequence
  Synthetic
uguugaagcaucuccuuuaac

SEQ ID NO: 40777 - RNA, 23 nt, Artificial Sequence
  Synthetic
uguguugaagcaucuccuuuaac

SEQ ID NO: 40778 - RNA, 24 nt, Artificial Sequence
  Synthetic
cuguguugaagcaucuccuuuaac

SEQ ID NO: 40779 - RNA, 18 nt, Artificial Sequence
  Synthetic
aguuaaaacaucuuuaac

SEQ ID NO: 40780 - RNA, 19 nt, Artificial Sequence
  Synthetic
caguuaaaacaucuuuaac

SEQ ID NO: 40781 - RNA, 20 nt, Artificial Sequence
  Synthetic
ccaguuaaaacaucuuuaac

SEQ ID NO: 40782 - RNA, 22 nt, Artificial Sequence
  Synthetic
agccaguuaaaacaucuuuaac

SEQ ID NO: 40783 - RNA, 24 nt, Artificial Sequence
  Synthetic
agagccaguuaaaacaucuuuaac

SEQ ID NO: 40784 - RNA, 19 nt, Artificial Sequence
  Synthetic
ugauaaacuaauguuuaac

SEQ ID NO: 40785 - RNA, 21 nt, Artificial Sequence
  Synthetic
ugugauaaacuaauguuuaac

SEQ ID NO: 40786 - RNA, 22 nt, Artificial Sequence
  Synthetic
uugugauaaacuaauguuuaac

SEQ ID NO: 40787 - RNA, 23 nt, Artificial Sequence
  Synthetic
auugugauaaacuaauguuuaac

SEQ ID NO: 40788 - RNA, 24 nt, Artificial Sequence
  Synthetic
cauugugauaaacuaauguuuaac

SEQ ID NO: 40789 - RNA, 18 nt, Artificial Sequence
  Synthetic
aacucuuuaauguuuaac

SEQ ID NO: 40790 - RNA, 19 nt, Artificial Sequence
  Synthetic
uaacucuuuaauguuuaac

SEQ ID NO: 40791 - RNA, 20 nt, Artificial Sequence
  Synthetic
uuaacucuuuaauguuuaac

SEQ ID NO: 40792 - RNA, 22 nt, Artificial Sequence
  Synthetic
uguuaacucuuuaauguuuaac

SEQ ID NO: 40793 - RNA, 24 nt, Artificial Sequence
  Synthetic
aguguuaacucuuuaauguuuaac

SEQ ID NO: 40794 - RNA, 18 nt, Artificial Sequence
  Synthetic
uuguaugaaaaaaaacac

SEQ ID NO: 40795 - RNA, 19 nt, Artificial Sequence
  Synthetic
auuguaugaaaaaaaacac

SEQ ID NO: 40796 - RNA, 20 nt, Artificial Sequence
  Synthetic
aauuguaugaaaaaaaacac

SEQ ID NO: 40797 - RNA, 21 nt, Artificial Sequence
  Synthetic
uaauuguaugaaaaaaaacac

SEQ ID NO: 40798 - RNA, 22 nt, Artificial Sequence
  Synthetic
uuaauuguaugaaaaaaaacac

SEQ ID NO: 40799 - RNA, 23 nt, Artificial Sequence
  Synthetic
cuuaauuguaugaaaaaaaacac

SEQ ID NO: 40800 - RNA, 24 nt, Artificial Sequence
  Synthetic
acuuaauuguaugaaaaaaaacac

SEQ ID NO: 40801 - RNA, 18 nt, Artificial Sequence
  Synthetic
cuuccgcauuuaaaacac

SEQ ID NO: 40802 - RNA, 19 nt, Artificial Sequence
  Synthetic
ucuuccgcauuuaaaacac

SEQ ID NO: 40803 - RNA, 20 nt, Artificial Sequence
  Synthetic
cucuuccgcauuuaaaacac

SEQ ID NO: 40804 - RNA, 21 nt, Artificial Sequence
  Synthetic
ucucuuccgcauuuaaaacac

SEQ ID NO: 40805 - RNA, 22 nt, Artificial Sequence
  Synthetic
uucucuuccgcauuuaaaacac

SEQ ID NO: 40806 - RNA, 23 nt, Artificial Sequence
  Synthetic
uuucucuuccgcauuuaaaacac

SEQ ID NO: 40807 - RNA, 24 nt, Artificial Sequence
  Synthetic
uuuucucuuccgcauuuaaaacac

SEQ ID NO: 40808 - RNA, 21 nt, Artificial Sequence
  Synthetic
uuuaaugauauuuuaaaacac

SEQ ID NO: 40809 - RNA, 22 nt, Artificial Sequence
  Synthetic
auuuaaugauauuuuaaaacac

SEQ ID NO: 40810 - RNA, 23 nt, Artificial Sequence
  Synthetic
cauuuaaugauauuuuaaaacac

SEQ ID NO: 40811 - RNA, 24 nt, Artificial Sequence
  Synthetic
acauuuaaugauauuuuaaaacac

SEQ ID NO: 40812 - RNA, 18 nt, Artificial Sequence
  Synthetic
uuucaugaucagaaacac

SEQ ID NO: 40813 - RNA, 19 nt, Artificial Sequence
  Synthetic
auuucaugaucagaaacac

SEQ ID NO: 40814 - RNA, 20 nt, Artificial Sequence
  Synthetic
aauuucaugaucagaaacac

SEQ ID NO: 40815 - RNA, 21 nt, Artificial Sequence
  Synthetic
aaauuucaugaucagaaacac

SEQ ID NO: 40816 - RNA, 22 nt, Artificial Sequence
  Synthetic
uaaauuucaugaucagaaacac

SEQ ID NO: 40817 - RNA, 23 nt, Artificial Sequence
  Synthetic
auaaauuucaugaucagaaacac

SEQ ID NO: 40818 - RNA, 24 nt, Artificial Sequence
  Synthetic
uauaaauuucaugaucagaaacac

SEQ ID NO: 40819 - RNA, 18 nt, Artificial Sequence
  Synthetic
auuuuaucugagaaacac

SEQ ID NO: 40820 - RNA, 19 nt, Artificial Sequence
  Synthetic
cauuuuaucugagaaacac

SEQ ID NO: 40821 - RNA, 20 nt, Artificial Sequence
  Synthetic
ucauuuuaucugagaaacac

SEQ ID NO: 40822 - RNA, 21 nt, Artificial Sequence
  Synthetic
aucauuuuaucugagaaacac

SEQ ID NO: 40823 - RNA, 22 nt, Artificial Sequence
  Synthetic
aaucauuuuaucugagaaacac

SEQ ID NO: 40824 - RNA, 24 nt, Artificial Sequence
  Synthetic
agaaucauuuuaucugagaaacac

SEQ ID NO: 40825 - RNA, 19 nt, Artificial Sequence
  Synthetic
ugagaaaucggugaaacac

SEQ ID NO: 40826 - RNA, 20 nt, Artificial Sequence
  Synthetic
cugagaaaucggugaaacac

SEQ ID NO: 40827 - RNA, 21 nt, Artificial Sequence
  Synthetic
ccugagaaaucggugaaacac

SEQ ID NO: 40828 - RNA, 23 nt, Artificial Sequence
  Synthetic
agccugagaaaucggugaaacac

SEQ ID NO: 40829 - RNA, 24 nt, Artificial Sequence
  Synthetic
uagccugagaaaucggugaaacac

SEQ ID NO: 40830 - RNA, 18 nt, Artificial Sequence
  Synthetic
acacauacuccacaacac

SEQ ID NO: 40831 - RNA, 20 nt, Artificial Sequence
  Synthetic
agacacauacuccacaacac

SEQ ID NO: 40832 - RNA, 21 nt, Artificial Sequence
  Synthetic
aagacacauacuccacaacac

SEQ ID NO: 40833 - RNA, 22 nt, Artificial Sequence
  Synthetic
aaagacacauacuccacaacac

SEQ ID NO: 40834 - RNA, 23 nt, Artificial Sequence
  Synthetic
uaaagacacauacuccacaacac

SEQ ID NO: 40835 - RNA, 24 nt, Artificial Sequence
  Synthetic
uuaaagacacauacuccacaacac

SEQ ID NO: 40836 - RNA, 18 nt, Artificial Sequence
  Synthetic
cauugaauuuagcaacac

SEQ ID NO: 40837 - RNA, 19 nt, Artificial Sequence
  Synthetic
ucauugaauuuagcaacac

SEQ ID NO: 40838 - RNA, 20 nt, Artificial Sequence
  Synthetic
uucauugaauuuagcaacac

SEQ ID NO: 40839 - RNA, 21 nt, Artificial Sequence
  Synthetic
auucauugaauuuagcaacac

SEQ ID NO: 40840 - RNA, 22 nt, Artificial Sequence
  Synthetic
aauucauugaauuuagcaacac

SEQ ID NO: 40841 - RNA, 23 nt, Artificial Sequence
  Synthetic
aaauucauugaauuuagcaacac

SEQ ID NO: 40842 - RNA, 24 nt, Artificial Sequence
  Synthetic
uaaauucauugaauuuagcaacac

SEQ ID NO: 40843 - RNA, 21 nt, Artificial Sequence
  Synthetic
acucguuuucucuuucaacac

SEQ ID NO: 40844 - RNA, 23 nt, Artificial Sequence
  Synthetic
agacucguuuucucuuucaacac

SEQ ID NO: 40845 - RNA, 24 nt, Artificial Sequence
  Synthetic
aagacucguuuucucuuucaacac

SEQ ID NO: 40846 - RNA, 18 nt, Artificial Sequence
  Synthetic
uugugcuguggggaacac

SEQ ID NO: 40847 - RNA, 19 nt, Artificial Sequence
  Synthetic
auugugcuguggggaacac

SEQ ID NO: 40848 - RNA, 21 nt, Artificial Sequence
  Synthetic
cgauugugcuguggggaacac

SEQ ID NO: 40849 - RNA, 24 nt, Artificial Sequence
  Synthetic
aggcgauugugcuguggggaacac

SEQ ID NO: 40850 - RNA, 18 nt, Artificial Sequence
  Synthetic
acauaucuaagugaacac

SEQ ID NO: 40851 - RNA, 19 nt, Artificial Sequence
  Synthetic
uacauaucuaagugaacac

SEQ ID NO: 40852 - RNA, 20 nt, Artificial Sequence
  Synthetic
uuacauaucuaagugaacac

SEQ ID NO: 40853 - RNA, 21 nt, Artificial Sequence
  Synthetic
auuacauaucuaagugaacac

SEQ ID NO: 40854 - RNA, 23 nt, Artificial Sequence
  Synthetic
agauuacauaucuaagugaacac

SEQ ID NO: 40855 - RNA, 24 nt, Artificial Sequence
  Synthetic
uagauuacauaucuaagugaacac

SEQ ID NO: 40856 - RNA, 18 nt, Artificial Sequence
  Synthetic
uuuccaugccaauaacac

SEQ ID NO: 40857 - RNA, 19 nt, Artificial Sequence
  Synthetic
auuuccaugccaauaacac

SEQ ID NO: 40858 - RNA, 20 nt, Artificial Sequence
  Synthetic
aauuuccaugccaauaacac

SEQ ID NO: 40859 - RNA, 21 nt, Artificial Sequence
  Synthetic
caauuuccaugccaauaacac

SEQ ID NO: 40860 - RNA, 22 nt, Artificial Sequence
  Synthetic
acaauuuccaugccaauaacac

SEQ ID NO: 40861 - RNA, 23 nt, Artificial Sequence
  Synthetic
cacaauuuccaugccaauaacac

SEQ ID NO: 40862 - RNA, 18 nt, Artificial Sequence
  Synthetic
uucuguccucuauaacac

SEQ ID NO: 40863 - RNA, 19 nt, Artificial Sequence
  Synthetic
auucuguccucuauaacac

SEQ ID NO: 40864 - RNA, 20 nt, Artificial Sequence
  Synthetic
uauucuguccucuauaacac

SEQ ID NO: 40865 - RNA, 21 nt, Artificial Sequence
  Synthetic
uuauucuguccucuauaacac

SEQ ID NO: 40866 - RNA, 22 nt, Artificial Sequence
  Synthetic
uuuauucuguccucuauaacac

SEQ ID NO: 40867 - RNA, 23 nt, Artificial Sequence
  Synthetic
cuuuauucuguccucuauaacac

SEQ ID NO: 40868 - RNA, 24 nt, Artificial Sequence
  Synthetic
acuuuauucuguccucuauaacac

SEQ ID NO: 40869 - RNA, 18 nt, Artificial Sequence
  Synthetic
augagcgugcacacacac

SEQ ID NO: 40870 - RNA, 19 nt, Artificial Sequence
  Synthetic
caugagcgugcacacacac

SEQ ID NO: 40871 - RNA, 20 nt, Artificial Sequence
  Synthetic
acaugagcgugcacacacac

SEQ ID NO: 40872 - RNA, 19 nt, Artificial Sequence
  Synthetic
aggcagcgcccagccacac

SEQ ID NO: 40873 - RNA, 21 nt, Artificial Sequence
  Synthetic
ugaggcagcgcccagccacac

SEQ ID NO: 40874 - RNA, 22 nt, Artificial Sequence
  Synthetic
augaggcagcgcccagccacac

SEQ ID NO: 40875 - RNA, 23 nt, Artificial Sequence
  Synthetic
caugaggcagcgcccagccacac

SEQ ID NO: 40876 - RNA, 24 nt, Artificial Sequence
  Synthetic
ucaugaggcagcgcccagccacac

SEQ ID NO: 40877 - RNA, 18 nt, Artificial Sequence
  Synthetic
uguuuucccuauccacac

SEQ ID NO: 40878 - RNA, 19 nt, Artificial Sequence
  Synthetic
auguuuucccuauccacac

SEQ ID NO: 40879 - RNA, 20 nt, Artificial Sequence
  Synthetic
cauguuuucccuauccacac

SEQ ID NO: 40880 - RNA, 21 nt, Artificial Sequence
  Synthetic
ucauguuuucccuauccacac

SEQ ID NO: 40881 - RNA, 22 nt, Artificial Sequence
  Synthetic
aucauguuuucccuauccacac

SEQ ID NO: 40882 - RNA, 23 nt, Artificial Sequence
  Synthetic
aaucauguuuucccuauccacac

SEQ ID NO: 40883 - RNA, 24 nt, Artificial Sequence
  Synthetic
uaaucauguuuucccuauccacac

SEQ ID NO: 40884 - RNA, 18 nt, Artificial Sequence
  Synthetic
ucauugcuuuaaucacac

SEQ ID NO: 40885 - RNA, 19 nt, Artificial Sequence
  Synthetic
uucauugcuuuaaucacac

SEQ ID NO: 40886 - RNA, 20 nt, Artificial Sequence
  Synthetic
auucauugcuuuaaucacac

SEQ ID NO: 40887 - RNA, 22 nt, Artificial Sequence
  Synthetic
agauucauugcuuuaaucacac

SEQ ID NO: 40888 - RNA, 23 nt, Artificial Sequence
  Synthetic
uagauucauugcuuuaaucacac

SEQ ID NO: 40889 - RNA, 24 nt, Artificial Sequence
  Synthetic
auagauucauugcuuuaaucacac

SEQ ID NO: 40890 - RNA, 18 nt, Artificial Sequence
  Synthetic
augcaacagugaucacac

SEQ ID NO: 40891 - RNA, 19 nt, Artificial Sequence
  Synthetic
uaugcaacagugaucacac

SEQ ID NO: 40892 - RNA, 20 nt, Artificial Sequence
  Synthetic
auaugcaacagugaucacac

SEQ ID NO: 40893 - RNA, 21 nt, Artificial Sequence
  Synthetic
cauaugcaacagugaucacac

SEQ ID NO: 40894 - RNA, 22 nt, Artificial Sequence
  Synthetic
acauaugcaacagugaucacac

SEQ ID NO: 40895 - RNA, 23 nt, Artificial Sequence
  Synthetic
aacauaugcaacagugaucacac

SEQ ID NO: 40896 - RNA, 24 nt, Artificial Sequence
  Synthetic
uaacauaugcaacagugaucacac

SEQ ID NO: 40897 - RNA, 20 nt, Artificial Sequence
  Synthetic
aggagaauagaaagagacac

SEQ ID NO: 40898 - RNA, 21 nt, Artificial Sequence
  Synthetic
aaggagaauagaaagagacac

SEQ ID NO: 40899 - RNA, 22 nt, Artificial Sequence
  Synthetic
aaaggagaauagaaagagacac

SEQ ID NO: 40900 - RNA, 24 nt, Artificial Sequence
  Synthetic
agaaaggagaauagaaagagacac

SEQ ID NO: 40901 - RNA, 18 nt, Artificial Sequence
  Synthetic
uccuagugugaaugacac

SEQ ID NO: 40902 - RNA, 19 nt, Artificial Sequence
  Synthetic
uuccuagugugaaugacac

SEQ ID NO: 40903 - RNA, 22 nt, Artificial Sequence
  Synthetic
ugguuccuagugugaaugacac

SEQ ID NO: 40904 - RNA, 23 nt, Artificial Sequence
  Synthetic
augguuccuagugugaaugacac

SEQ ID NO: 40905 - RNA, 24 nt, Artificial Sequence
  Synthetic
caugguuccuagugugaaugacac

SEQ ID NO: 40906 - RNA, 18 nt, Artificial Sequence
  Synthetic
cuugcuucguagauacac

SEQ ID NO: 40907 - RNA, 19 nt, Artificial Sequence
  Synthetic
ucuugcuucguagauacac

SEQ ID NO: 40908 - RNA, 20 nt, Artificial Sequence
  Synthetic
uucuugcuucguagauacac

SEQ ID NO: 40909 - RNA, 21 nt, Artificial Sequence
  Synthetic
uuucuugcuucguagauacac

SEQ ID NO: 40910 - RNA, 22 nt, Artificial Sequence
  Synthetic
auuucuugcuucguagauacac

SEQ ID NO: 40911 - RNA, 23 nt, Artificial Sequence
  Synthetic
cauuucuugcuucguagauacac

SEQ ID NO: 40912 - RNA, 24 nt, Artificial Sequence
  Synthetic
ucauuucuugcuucguagauacac

SEQ ID NO: 40913 - RNA, 18 nt, Artificial Sequence
  Synthetic
cacuuaaauuuuauacac

SEQ ID NO: 40914 - RNA, 19 nt, Artificial Sequence
  Synthetic
acacuuaaauuuuauacac

SEQ ID NO: 40915 - RNA, 20 nt, Artificial Sequence
  Synthetic
uacacuuaaauuuuauacac

SEQ ID NO: 40916 - RNA, 21 nt, Artificial Sequence
  Synthetic
uuacacuuaaauuuuauacac

SEQ ID NO: 40917 - RNA, 22 nt, Artificial Sequence
  Synthetic
uuuacacuuaaauuuuauacac

SEQ ID NO: 40918 - RNA, 23 nt, Artificial Sequence
  Synthetic
auuuacacuuaaauuuuauacac

SEQ ID NO: 40919 - RNA, 22 nt, Artificial Sequence
  Synthetic
uguugcaaaacaaaauguacac

SEQ ID NO: 40920 - RNA, 21 nt, Artificial Sequence
  Synthetic
uuguugaaugucagaaaccac

SEQ ID NO: 40921 - RNA, 24 nt, Artificial Sequence
  Synthetic
ugguuguugaaugucagaaaccac

SEQ ID NO: 40922 - RNA, 18 nt, Artificial Sequence
  Synthetic
ugggguaugaaucaccac

SEQ ID NO: 40923 - RNA, 19 nt, Artificial Sequence
  Synthetic
cugggguaugaaucaccac

SEQ ID NO: 40924 - RNA, 20 nt, Artificial Sequence
  Synthetic
ccugggguaugaaucaccac

SEQ ID NO: 40925 - RNA, 21 nt, Artificial Sequence
  Synthetic
cccugggguaugaaucaccac

SEQ ID NO: 40926 - RNA, 24 nt, Artificial Sequence
  Synthetic
aggcccugggguaugaaucaccac

SEQ ID NO: 40927 - RNA, 18 nt, Artificial Sequence
  Synthetic
auaaucuauuuucaccac

SEQ ID NO: 40928 - RNA, 19 nt, Artificial Sequence
  Synthetic
uauaaucuauuuucaccac

SEQ ID NO: 40929 - RNA, 20 nt, Artificial Sequence
  Synthetic
uuauaaucuauuuucaccac

SEQ ID NO: 40930 - RNA, 21 nt, Artificial Sequence
  Synthetic
auuauaaucuauuuucaccac

SEQ ID NO: 40931 - RNA, 22 nt, Artificial Sequence
  Synthetic
aauuauaaucuauuuucaccac

SEQ ID NO: 40932 - RNA, 23 nt, Artificial Sequence
  Synthetic
caauuauaaucuauuuucaccac

SEQ ID NO: 40933 - RNA, 19 nt, Artificial Sequence
  Synthetic
ugucaauauuucagaccac

SEQ ID NO: 40934 - RNA, 20 nt, Artificial Sequence
  Synthetic
uugucaauauuucagaccac

SEQ ID NO: 40935 - RNA, 22 nt, Artificial Sequence
  Synthetic
uguugucaauauuucagaccac

SEQ ID NO: 40936 - RNA, 23 nt, Artificial Sequence
  Synthetic
auguugucaauauuucagaccac

SEQ ID NO: 40937 - RNA, 21 nt, Artificial Sequence
  Synthetic
uaagguaaaguuucugaccac

SEQ ID NO: 40938 - RNA, 23 nt, Artificial Sequence
  Synthetic
uguaagguaaaguuucugaccac

SEQ ID NO: 40939 - RNA, 18 nt, Artificial Sequence
  Synthetic
cagggauguuuguaccac

SEQ ID NO: 40940 - RNA, 20 nt, Artificial Sequence
  Synthetic
agcagggauguuuguaccac

SEQ ID NO: 40941 - RNA, 21 nt, Artificial Sequence
  Synthetic
uagcagggauguuuguaccac

SEQ ID NO: 40942 - RNA, 22 nt, Artificial Sequence
  Synthetic
cuagcagggauguuuguaccac

SEQ ID NO: 40943 - RNA, 23 nt, Artificial Sequence
  Synthetic
ucuagcagggauguuuguaccac

SEQ ID NO: 40944 - RNA, 24 nt, Artificial Sequence
  Synthetic
cucuagcagggauguuuguaccac

SEQ ID NO: 40945 - RNA, 18 nt, Artificial Sequence
  Synthetic
ccuaaccuacauuaccac

SEQ ID NO: 40946 - RNA, 19 nt, Artificial Sequence
  Synthetic
accuaaccuacauuaccac

SEQ ID NO: 40947 - RNA, 20 nt, Artificial Sequence
  Synthetic
caccuaaccuacauuaccac

SEQ ID NO: 40948 - RNA, 21 nt, Artificial Sequence
  Synthetic
ccaccuaaccuacauuaccac

SEQ ID NO: 40949 - RNA, 23 nt, Artificial Sequence
  Synthetic
ugccaccuaaccuacauuaccac

SEQ ID NO: 40950 - RNA, 24 nt, Artificial Sequence
  Synthetic
cugccaccuaaccuacauuaccac

SEQ ID NO: 40951 - RNA, 18 nt, Artificial Sequence
  Synthetic
caagguucccuaacccac

SEQ ID NO: 40952 - RNA, 19 nt, Artificial Sequence
  Synthetic
ccaagguucccuaacccac

SEQ ID NO: 40953 - RNA, 20 nt, Artificial Sequence
  Synthetic
uccaagguucccuaacccac

SEQ ID NO: 40954 - RNA, 21 nt, Artificial Sequence
  Synthetic
uuccaagguucccuaacccac

SEQ ID NO: 40955 - RNA, 22 nt, Artificial Sequence
  Synthetic
uuuccaagguucccuaacccac

SEQ ID NO: 40956 - RNA, 23 nt, Artificial Sequence
  Synthetic
cuuuccaagguucccuaacccac

SEQ ID NO: 40957 - RNA, 24 nt, Artificial Sequence
  Synthetic
ucuuuccaagguucccuaacccac

SEQ ID NO: 40958 - RNA, 18 nt, Artificial Sequence
  Synthetic
auaguacuuuuuacccac

SEQ ID NO: 40959 - RNA, 20 nt, Artificial Sequence
  Synthetic
agauaguacuuuuuacccac

SEQ ID NO: 40960 - RNA, 18 nt, Artificial Sequence
  Synthetic
uucuaacucuauccccac

SEQ ID NO: 40961 - RNA, 19 nt, Artificial Sequence
  Synthetic
auucuaacucuauccccac

SEQ ID NO: 40962 - RNA, 20 nt, Artificial Sequence
  Synthetic
aauucuaacucuauccccac

SEQ ID NO: 40963 - RNA, 21 nt, Artificial Sequence
  Synthetic
aaauucuaacucuauccccac

SEQ ID NO: 40964 - RNA, 22 nt, Artificial Sequence
  Synthetic
uaaauucuaacucuauccccac

SEQ ID NO: 40965 - RNA, 23 nt, Artificial Sequence
  Synthetic
uuaaauucuaacucuauccccac

SEQ ID NO: 40966 - RNA, 24 nt, Artificial Sequence
  Synthetic
auuaaauucuaacucuauccccac

SEQ ID NO: 40967 - RNA, 18 nt, Artificial Sequence
  Synthetic
uuuugaaaagcuccccac

SEQ ID NO: 40968 - RNA, 19 nt, Artificial Sequence
  Synthetic
auuuugaaaagcuccccac

SEQ ID NO: 40969 - RNA, 20 nt, Artificial Sequence
  Synthetic
uauuuugaaaagcuccccac

SEQ ID NO: 40970 - RNA, 21 nt, Artificial Sequence
  Synthetic
auauuuugaaaagcuccccac

SEQ ID NO: 40971 - RNA, 22 nt, Artificial Sequence
  Synthetic
uauauuuugaaaagcuccccac

SEQ ID NO: 40972 - RNA, 23 nt, Artificial Sequence
  Synthetic
uuauauuuugaaaagcuccccac

SEQ ID NO: 40973 - RNA, 24 nt, Artificial Sequence
  Synthetic
uuuauauuuugaaaagcuccccac

SEQ ID NO: 40974 - RNA, 18 nt, Artificial Sequence
  Synthetic
cuucuaguaauaucccac

SEQ ID NO: 40975 - RNA, 19 nt, Artificial Sequence
  Synthetic
acuucuaguaauaucccac

SEQ ID NO: 40976 - RNA, 20 nt, Artificial Sequence
  Synthetic
uacuucuaguaauaucccac

SEQ ID NO: 40977 - RNA, 21 nt, Artificial Sequence
  Synthetic
uuacuucuaguaauaucccac

SEQ ID NO: 40978 - RNA, 23 nt, Artificial Sequence
  Synthetic
uguuacuucuaguaauaucccac

SEQ ID NO: 40979 - RNA, 18 nt, Artificial Sequence
  Synthetic
cuguguuuuuuaucccac

SEQ ID NO: 40980 - RNA, 19 nt, Artificial Sequence
  Synthetic
ccuguguuuuuuaucccac

SEQ ID NO: 40981 - RNA, 20 nt, Artificial Sequence
  Synthetic
accuguguuuuuuaucccac

SEQ ID NO: 40982 - RNA, 21 nt, Artificial Sequence
  Synthetic
aaccuguguuuuuuaucccac

SEQ ID NO: 40983 - RNA, 22 nt, Artificial Sequence
  Synthetic
aaaccuguguuuuuuaucccac

SEQ ID NO: 40984 - RNA, 23 nt, Artificial Sequence
  Synthetic
aaaaccuguguuuuuuaucccac

SEQ ID NO: 40985 - RNA, 24 nt, Artificial Sequence
  Synthetic
aaaaaccuguguuuuuuaucccac

SEQ ID NO: 40986 - RNA, 18 nt, Artificial Sequence
  Synthetic
augauucucuuuagccac

SEQ ID NO: 40987 - RNA, 20 nt, Artificial Sequence
  Synthetic
agaugauucucuuuagccac

SEQ ID NO: 40988 - RNA, 21 nt, Artificial Sequence
  Synthetic
aagaugauucucuuuagccac

SEQ ID NO: 40989 - RNA, 22 nt, Artificial Sequence
  Synthetic
caagaugauucucuuuagccac

SEQ ID NO: 40990 - RNA, 24 nt, Artificial Sequence
  Synthetic
agcaagaugauucucuuuagccac

SEQ ID NO: 40991 - RNA, 18 nt, Artificial Sequence
  Synthetic
uacuauaccucaggccac

SEQ ID NO: 40992 - RNA, 20 nt, Artificial Sequence
  Synthetic
aguacuauaccucaggccac

SEQ ID NO: 40993 - RNA, 21 nt, Artificial Sequence
  Synthetic
caguacuauaccucaggccac

SEQ ID NO: 40994 - RNA, 23 nt, Artificial Sequence
  Synthetic
agcaguacuauaccucaggccac

SEQ ID NO: 40995 - RNA, 24 nt, Artificial Sequence
  Synthetic
cagcaguacuauaccucaggccac

SEQ ID NO: 40996 - RNA, 19 nt, Artificial Sequence
  Synthetic
aguuauugcuuugggccac

SEQ ID NO: 40997 - RNA, 20 nt, Artificial Sequence
  Synthetic
uaguuauugcuuugggccac

SEQ ID NO: 40998 - RNA, 21 nt, Artificial Sequence
  Synthetic
cuaguuauugcuuugggccac

SEQ ID NO: 40999 - RNA, 22 nt, Artificial Sequence
  Synthetic
acuaguuauugcuuugggccac

SEQ ID NO: 41000 - RNA, 23 nt, Artificial Sequence
  Synthetic
aacuaguuauugcuuugggccac

SEQ ID NO: 41001 - RNA, 18 nt, Artificial Sequence
  Synthetic
uauucucaugguggccac

SEQ ID NO: 41002 - RNA, 19 nt, Artificial Sequence
  Synthetic
auauucucaugguggccac

SEQ ID NO: 41003 - RNA, 20 nt, Artificial Sequence
  Synthetic
cauauucucaugguggccac

SEQ ID NO: 41004 - RNA, 22 nt, Artificial Sequence
  Synthetic
ugcauauucucaugguggccac

SEQ ID NO: 41005 - RNA, 23 nt, Artificial Sequence
  Synthetic
cugcauauucucaugguggccac

SEQ ID NO: 41006 - RNA, 24 nt, Artificial Sequence
  Synthetic
ccugcauauucucaugguggccac

SEQ ID NO: 41007 - RNA, 18 nt, Artificial Sequence
  Synthetic
ucuagaccucucugccac

SEQ ID NO: 41008 - RNA, 19 nt, Artificial Sequence
  Synthetic
cucuagaccucucugccac

SEQ ID NO: 41009 - RNA, 20 nt, Artificial Sequence
  Synthetic
ccucuagaccucucugccac

SEQ ID NO: 41010 - RNA, 21 nt, Artificial Sequence
  Synthetic
uccucuagaccucucugccac

SEQ ID NO: 41011 - RNA, 22 nt, Artificial Sequence
  Synthetic
cuccucuagaccucucugccac

SEQ ID NO: 41012 - RNA, 23 nt, Artificial Sequence
  Synthetic
ccuccucuagaccucucugccac

SEQ ID NO: 41013 - RNA, 24 nt, Artificial Sequence
  Synthetic
uccuccucuagaccucucugccac

SEQ ID NO: 41014 - RNA, 18 nt, Artificial Sequence
  Synthetic
cagaacaaaucaauccac

SEQ ID NO: 41015 - RNA, 19 nt, Artificial Sequence
  Synthetic
ucagaacaaaucaauccac

SEQ ID NO: 41016 - RNA, 20 nt, Artificial Sequence
  Synthetic
uucagaacaaaucaauccac

SEQ ID NO: 41017 - RNA, 21 nt, Artificial Sequence
  Synthetic
auucagaacaaaucaauccac

SEQ ID NO: 41018 - RNA, 22 nt, Artificial Sequence
  Synthetic
cauucagaacaaaucaauccac

SEQ ID NO: 41019 - RNA, 23 nt, Artificial Sequence
  Synthetic
ucauucagaacaaaucaauccac

SEQ ID NO: 41020 - RNA, 24 nt, Artificial Sequence
  Synthetic
uucauucagaacaaaucaauccac

SEQ ID NO: 41021 - RNA, 22 nt, Artificial Sequence
  Synthetic
agcucucaaaauucacauccac

SEQ ID NO: 41022 - RNA, 23 nt, Artificial Sequence
  Synthetic
cagcucucaaaauucacauccac

SEQ ID NO: 41023 - RNA, 18 nt, Artificial Sequence
  Synthetic
cccauaacaguuauccac

SEQ ID NO: 41024 - RNA, 19 nt, Artificial Sequence
  Synthetic
ccccauaacaguuauccac

SEQ ID NO: 41025 - RNA, 22 nt, Artificial Sequence
  Synthetic
uggccccauaacaguuauccac

SEQ ID NO: 41026 - RNA, 23 nt, Artificial Sequence
  Synthetic
cuggccccauaacaguuauccac

SEQ ID NO: 41027 - RNA, 24 nt, Artificial Sequence
  Synthetic
acuggccccauaacaguuauccac

SEQ ID NO: 41028 - RNA, 18 nt, Artificial Sequence
  Synthetic
auaaugggugagcuccac

SEQ ID NO: 41029 - RNA, 20 nt, Artificial Sequence
  Synthetic
agauaaugggugagcuccac

SEQ ID NO: 41030 - RNA, 21 nt, Artificial Sequence
  Synthetic
aagauaaugggugagcuccac

SEQ ID NO: 41031 - RNA, 22 nt, Artificial Sequence
  Synthetic
caagauaaugggugagcuccac

SEQ ID NO: 41032 - RNA, 23 nt, Artificial Sequence
  Synthetic
ccaagauaaugggugagcuccac

SEQ ID NO: 41033 - RNA, 24 nt, Artificial Sequence
  Synthetic
cccaagauaaugggugagcuccac

SEQ ID NO: 41034 - RNA, 18 nt, Artificial Sequence
  Synthetic
aaaaggcaggcauuccac

SEQ ID NO: 41035 - RNA, 20 nt, Artificial Sequence
  Synthetic
agaaaaggcaggcauuccac

SEQ ID NO: 41036 - RNA, 21 nt, Artificial Sequence
  Synthetic
aagaaaaggcaggcauuccac

SEQ ID NO: 41037 - RNA, 24 nt, Artificial Sequence
  Synthetic
uggaagaaaaggcaggcauuccac

SEQ ID NO: 41038 - RNA, 18 nt, Artificial Sequence
  Synthetic
cuaacaucugauuuccac

SEQ ID NO: 41039 - RNA, 19 nt, Artificial Sequence
  Synthetic
ucuaacaucugauuuccac

SEQ ID NO: 41040 - RNA, 20 nt, Artificial Sequence
  Synthetic
uucuaacaucugauuuccac

SEQ ID NO: 41041 - RNA, 21 nt, Artificial Sequence
  Synthetic
uuucuaacaucugauuuccac

SEQ ID NO: 41042 - RNA, 22 nt, Artificial Sequence
  Synthetic
auuucuaacaucugauuuccac

SEQ ID NO: 41043 - RNA, 23 nt, Artificial Sequence
  Synthetic
uauuucuaacaucugauuuccac

SEQ ID NO: 41044 - RNA, 24 nt, Artificial Sequence
  Synthetic
cuauuucuaacaucugauuuccac

SEQ ID NO: 41045 - RNA, 19 nt, Artificial Sequence
  Synthetic
agauuggguuuaaaagcac

SEQ ID NO: 41046 - RNA, 20 nt, Artificial Sequence
  Synthetic
uagauuggguuuaaaagcac

SEQ ID NO: 41047 - RNA, 22 nt, Artificial Sequence
  Synthetic
uguagauuggguuuaaaagcac

SEQ ID NO: 41048 - RNA, 23 nt, Artificial Sequence
  Synthetic
uuguagauuggguuuaaaagcac

SEQ ID NO: 41049 - RNA, 24 nt, Artificial Sequence
  Synthetic
auuguagauuggguuuaaaagcac

SEQ ID NO: 41050 - RNA, 18 nt, Artificial Sequence
  Synthetic
agguaauaugaacagcac

SEQ ID NO: 41051 - RNA, 19 nt, Artificial Sequence
  Synthetic
aagguaauaugaacagcac

SEQ ID NO: 41052 - RNA, 20 nt, Artificial Sequence
  Synthetic
uaagguaauaugaacagcac

SEQ ID NO: 41053 - RNA, 21 nt, Artificial Sequence
  Synthetic
auaagguaauaugaacagcac

SEQ ID NO: 41054 - RNA, 23 nt, Artificial Sequence
  Synthetic
cgauaagguaauaugaacagcac

SEQ ID NO: 41055 - RNA, 24 nt, Artificial Sequence
  Synthetic
acgauaagguaauaugaacagcac

SEQ ID NO: 41056 - RNA, 19 nt, Artificial Sequence
  Synthetic
uggaaaaucaugacagcac

SEQ ID NO: 41057 - RNA, 20 nt, Artificial Sequence
  Synthetic
uuggaaaaucaugacagcac

SEQ ID NO: 41058 - RNA, 21 nt, Artificial Sequence
  Synthetic
uuuggaaaaucaugacagcac

SEQ ID NO: 41059 - RNA, 22 nt, Artificial Sequence
  Synthetic
uuuuggaaaaucaugacagcac

SEQ ID NO: 41060 - RNA, 23 nt, Artificial Sequence
  Synthetic
auuuuggaaaaucaugacagcac

SEQ ID NO: 41061 - RNA, 24 nt, Artificial Sequence
  Synthetic
uauuuuggaaaaucaugacagcac

SEQ ID NO: 41062 - RNA, 18 nt, Artificial Sequence
  Synthetic
uagcucuaugcccagcac

SEQ ID NO: 41063 - RNA, 19 nt, Artificial Sequence
  Synthetic
cuagcucuaugcccagcac

SEQ ID NO: 41064 - RNA, 22 nt, Artificial Sequence
  Synthetic
uggcuagcucuaugcccagcac

SEQ ID NO: 41065 - RNA, 23 nt, Artificial Sequence
  Synthetic
uuggcuagcucuaugcccagcac

SEQ ID NO: 41066 - RNA, 24 nt, Artificial Sequence
  Synthetic
auuggcuagcucuaugcccagcac

SEQ ID NO: 41067 - RNA, 18 nt, Artificial Sequence
  Synthetic
ucucaucaugucuagcac

SEQ ID NO: 41068 - RNA, 19 nt, Artificial Sequence
  Synthetic
uucucaucaugucuagcac

SEQ ID NO: 41069 - RNA, 20 nt, Artificial Sequence
  Synthetic
auucucaucaugucuagcac

SEQ ID NO: 41070 - RNA, 21 nt, Artificial Sequence
  Synthetic
aauucucaucaugucuagcac

SEQ ID NO: 41071 - RNA, 22 nt, Artificial Sequence
  Synthetic
aaauucucaucaugucuagcac

SEQ ID NO: 41072 - RNA, 18 nt, Artificial Sequence
  Synthetic
uaucggauaaaguagcac

SEQ ID NO: 41073 - RNA, 19 nt, Artificial Sequence
  Synthetic
uuaucggauaaaguagcac

SEQ ID NO: 41074 - RNA, 20 nt, Artificial Sequence
  Synthetic
auuaucggauaaaguagcac

SEQ ID NO: 41075 - RNA, 21 nt, Artificial Sequence
  Synthetic
uauuaucggauaaaguagcac

SEQ ID NO: 41076 - RNA, 22 nt, Artificial Sequence
  Synthetic
uuauuaucggauaaaguagcac

SEQ ID NO: 41077 - RNA, 23 nt, Artificial Sequence
  Synthetic
auuauuaucggauaaaguagcac

SEQ ID NO: 41078 - RNA, 24 nt, Artificial Sequence
  Synthetic
uauuauuaucggauaaaguagcac

SEQ ID NO: 41079 - RNA, 19 nt, Artificial Sequence
  Synthetic
cgugcaauuuugggcgcac

SEQ ID NO: 41080 - RNA, 20 nt, Artificial Sequence
  Synthetic
acgugcaauuuugggcgcac

SEQ ID NO: 41081 - RNA, 23 nt, Artificial Sequence
  Synthetic
aggacgugcaauuuugggcgcac

SEQ ID NO: 41082 - RNA, 24 nt, Artificial Sequence
  Synthetic
caggacgugcaauuuugggcgcac

SEQ ID NO: 41083 - RNA, 18 nt, Artificial Sequence
  Synthetic
acauacuaauauaggcac

SEQ ID NO: 41084 - RNA, 19 nt, Artificial Sequence
  Synthetic
cacauacuaauauaggcac

SEQ ID NO: 41085 - RNA, 20 nt, Artificial Sequence
  Synthetic
ccacauacuaauauaggcac

SEQ ID NO: 41086 - RNA, 22 nt, Artificial Sequence
  Synthetic
ugccacauacuaauauaggcac

SEQ ID NO: 41087 - RNA, 24 nt, Artificial Sequence
  Synthetic
ugugccacauacuaauauaggcac

SEQ ID NO: 41088 - RNA, 18 nt, Artificial Sequence
  Synthetic
caacacguuacuaggcac

SEQ ID NO: 41089 - RNA, 20 nt, Artificial Sequence
  Synthetic
agcaacacguuacuaggcac

SEQ ID NO: 41090 - RNA, 21 nt, Artificial Sequence
  Synthetic
uagcaacacguuacuaggcac

SEQ ID NO: 41091 - RNA, 24 nt, Artificial Sequence
  Synthetic
agguagcaacacguuacuaggcac

SEQ ID NO: 41092 - RNA, 18 nt, Artificial Sequence
  Synthetic
cccacggugagagggcac

SEQ ID NO: 41093 - RNA, 19 nt, Artificial Sequence
  Synthetic
ccccacggugagagggcac

SEQ ID NO: 41094 - RNA, 20 nt, Artificial Sequence
  Synthetic
uccccacggugagagggcac

SEQ ID NO: 41095 - RNA, 21 nt, Artificial Sequence
  Synthetic
cuccccacggugagagggcac

SEQ ID NO: 41096 - RNA, 22 nt, Artificial Sequence
  Synthetic
acuccccacggugagagggcac

SEQ ID NO: 41097 - RNA, 23 nt, Artificial Sequence
  Synthetic
uacuccccacggugagagggcac

SEQ ID NO: 41098 - RNA, 24 nt, Artificial Sequence
  Synthetic
uuacuccccacggugagagggcac

SEQ ID NO: 41099 - RNA, 18 nt, Artificial Sequence
  Synthetic
agugagauuugggggcac

SEQ ID NO: 41100 - RNA, 19 nt, Artificial Sequence
  Synthetic
cagugagauuugggggcac

SEQ ID NO: 41101 - RNA, 20 nt, Artificial Sequence
  Synthetic
acagugagauuugggggcac

SEQ ID NO: 41102 - RNA, 22 nt, Artificial Sequence
  Synthetic
agacagugagauuugggggcac

SEQ ID NO: 41103 - RNA, 24 nt, Artificial Sequence
  Synthetic
ugagacagugagauuugggggcac

SEQ ID NO: 41104 - RNA, 18 nt, Artificial Sequence
  Synthetic
auuuuaucccauuggcac

SEQ ID NO: 41105 - RNA, 19 nt, Artificial Sequence
  Synthetic
uauuuuaucccauuggcac

SEQ ID NO: 41106 - RNA, 20 nt, Artificial Sequence
  Synthetic
auauuuuaucccauuggcac

SEQ ID NO: 41107 - RNA, 21 nt, Artificial Sequence
  Synthetic
uauauuuuaucccauuggcac

SEQ ID NO: 41108 - RNA, 22 nt, Artificial Sequence
  Synthetic
uuauauuuuaucccauuggcac

SEQ ID NO: 41109 - RNA, 24 nt, Artificial Sequence
  Synthetic
aguuauauuuuaucccauuggcac

SEQ ID NO: 41110 - RNA, 21 nt, Artificial Sequence
  Synthetic
uaguaaugaaauuauuggcac

SEQ ID NO: 41111 - RNA, 22 nt, Artificial Sequence
  Synthetic
auaguaaugaaauuauuggcac

SEQ ID NO: 41112 - RNA, 23 nt, Artificial Sequence
  Synthetic
uauaguaaugaaauuauuggcac

SEQ ID NO: 41113 - RNA, 24 nt, Artificial Sequence
  Synthetic
auauaguaaugaaauuauuggcac

SEQ ID NO: 41114 - RNA, 18 nt, Artificial Sequence
  Synthetic
uauauuguucccaugcac

SEQ ID NO: 41115 - RNA, 20 nt, Artificial Sequence
  Synthetic
uguauauuguucccaugcac

SEQ ID NO: 41116 - RNA, 21 nt, Artificial Sequence
  Synthetic
cuguauauuguucccaugcac

SEQ ID NO: 41117 - RNA, 22 nt, Artificial Sequence
  Synthetic
acuguauauuguucccaugcac

SEQ ID NO: 41118 - RNA, 23 nt, Artificial Sequence
  Synthetic
uacuguauauuguucccaugcac

SEQ ID NO: 41119 - RNA, 24 nt, Artificial Sequence
  Synthetic
auacuguauauuguucccaugcac

SEQ ID NO: 41120 - RNA, 18 nt, Artificial Sequence
  Synthetic
caauauuccacauugcac

SEQ ID NO: 41121 - RNA, 19 nt, Artificial Sequence
  Synthetic
ucaauauuccacauugcac

SEQ ID NO: 41122 - RNA, 20 nt, Artificial Sequence
  Synthetic
uucaauauuccacauugcac

SEQ ID NO: 41123 - RNA, 21 nt, Artificial Sequence
  Synthetic
cuucaauauuccacauugcac

SEQ ID NO: 41124 - RNA, 22 nt, Artificial Sequence
  Synthetic
ccuucaauauuccacauugcac

SEQ ID NO: 41125 - RNA, 23 nt, Artificial Sequence
  Synthetic
cccuucaauauuccacauugcac

SEQ ID NO: 41126 - RNA, 24 nt, Artificial Sequence
  Synthetic
ucccuucaauauuccacauugcac

SEQ ID NO: 41127 - RNA, 18 nt, Artificial Sequence
  Synthetic
cuaauuguaucauugcac

SEQ ID NO: 41128 - RNA, 19 nt, Artificial Sequence
  Synthetic
ucuaauuguaucauugcac

SEQ ID NO: 41129 - RNA, 21 nt, Artificial Sequence
  Synthetic
agucuaauuguaucauugcac

SEQ ID NO: 41130 - RNA, 22 nt, Artificial Sequence
  Synthetic
aagucuaauuguaucauugcac

SEQ ID NO: 41131 - RNA, 18 nt, Artificial Sequence
  Synthetic
agguuaggcaucuugcac

SEQ ID NO: 41132 - RNA, 19 nt, Artificial Sequence
  Synthetic
cagguuaggcaucuugcac

SEQ ID NO: 41133 - RNA, 20 nt, Artificial Sequence
  Synthetic
ucagguuaggcaucuugcac

SEQ ID NO: 41134 - RNA, 21 nt, Artificial Sequence
  Synthetic
aucagguuaggcaucuugcac

SEQ ID NO: 41135 - RNA, 22 nt, Artificial Sequence
  Synthetic
aaucagguuaggcaucuugcac

SEQ ID NO: 41136 - RNA, 18 nt, Artificial Sequence
  Synthetic
aggguauuuuaguugcac

SEQ ID NO: 41137 - RNA, 19 nt, Artificial Sequence
  Synthetic
caggguauuuuaguugcac

SEQ ID NO: 41138 - RNA, 24 nt, Artificial Sequence
  Synthetic
aggggcaggguauuuuaguugcac

SEQ ID NO: 41139 - RNA, 18 nt, Artificial Sequence
  Synthetic
uuaagggaaauguugcac

SEQ ID NO: 41140 - RNA, 20 nt, Artificial Sequence
  Synthetic
uguuaagggaaauguugcac

SEQ ID NO: 41141 - RNA, 21 nt, Artificial Sequence
  Synthetic
uuguuaagggaaauguugcac

SEQ ID NO: 41142 - RNA, 24 nt, Artificial Sequence
  Synthetic
ugguuguuaagggaaauguugcac

SEQ ID NO: 41143 - RNA, 18 nt, Artificial Sequence
  Synthetic
acagaucauccuuugcac

SEQ ID NO: 41144 - RNA, 19 nt, Artificial Sequence
  Synthetic
aacagaucauccuuugcac

SEQ ID NO: 41145 - RNA, 20 nt, Artificial Sequence
  Synthetic
aaacagaucauccuuugcac

SEQ ID NO: 41146 - RNA, 21 nt, Artificial Sequence
  Synthetic
caaacagaucauccuuugcac

SEQ ID NO: 41147 - RNA, 22 nt, Artificial Sequence
  Synthetic
acaaacagaucauccuuugcac

SEQ ID NO: 41148 - RNA, 23 nt, Artificial Sequence
  Synthetic
aacaaacagaucauccuuugcac

SEQ ID NO: 41149 - RNA, 24 nt, Artificial Sequence
  Synthetic
aaacaaacagaucauccuuugcac

SEQ ID NO: 41150 - RNA, 21 nt, Artificial Sequence
  Synthetic
uuauuuaauucuuuuuugcac

SEQ ID NO: 41151 - RNA, 22 nt, Artificial Sequence
  Synthetic
cuuauuuaauucuuuuuugcac

SEQ ID NO: 41152 - RNA, 23 nt, Artificial Sequence
  Synthetic
acuuauuuaauucuuuuuugcac

SEQ ID NO: 41153 - RNA, 24 nt, Artificial Sequence
  Synthetic
cacuuauuuaauucuuuuuugcac

SEQ ID NO: 41154 - RNA, 18 nt, Artificial Sequence
  Synthetic
cuuugauggaaaaaucac

SEQ ID NO: 41155 - RNA, 19 nt, Artificial Sequence
  Synthetic
acuuugauggaaaaaucac

SEQ ID NO: 41156 - RNA, 20 nt, Artificial Sequence
  Synthetic
aacuuugauggaaaaaucac

SEQ ID NO: 41157 - RNA, 21 nt, Artificial Sequence
  Synthetic
aaacuuugauggaaaaaucac

SEQ ID NO: 41158 - RNA, 23 nt, Artificial Sequence
  Synthetic
agaaacuuugauggaaaaaucac

SEQ ID NO: 41159 - RNA, 24 nt, Artificial Sequence
  Synthetic
uagaaacuuugauggaaaaaucac

SEQ ID NO: 41160 - RNA, 18 nt, Artificial Sequence
  Synthetic
agaucuuaggcaaaucac

SEQ ID NO: 41161 - RNA, 19 nt, Artificial Sequence
  Synthetic
aagaucuuaggcaaaucac

SEQ ID NO: 41162 - RNA, 20 nt, Artificial Sequence
  Synthetic
uaagaucuuaggcaaaucac

SEQ ID NO: 41163 - RNA, 21 nt, Artificial Sequence
  Synthetic
uuaagaucuuaggcaaaucac

SEQ ID NO: 41164 - RNA, 23 nt, Artificial Sequence
  Synthetic
uguuaagaucuuaggcaaaucac

SEQ ID NO: 41165 - RNA, 24 nt, Artificial Sequence
  Synthetic
auguuaagaucuuaggcaaaucac

SEQ ID NO: 41166 - RNA, 18 nt, Artificial Sequence
  Synthetic
cagagcugauggaaucac

SEQ ID NO: 41167 - RNA, 19 nt, Artificial Sequence
  Synthetic
ucagagcugauggaaucac

SEQ ID NO: 41168 - RNA, 22 nt, Artificial Sequence
  Synthetic
cggucagagcugauggaaucac

SEQ ID NO: 41169 - RNA, 23 nt, Artificial Sequence
  Synthetic
ucggucagagcugauggaaucac

SEQ ID NO: 41170 - RNA, 24 nt, Artificial Sequence
  Synthetic
uucggucagagcugauggaaucac

SEQ ID NO: 41171 - RNA, 18 nt, Artificial Sequence
  Synthetic
cauaacucccaacaucac

SEQ ID NO: 41172 - RNA, 19 nt, Artificial Sequence
  Synthetic
ucauaacucccaacaucac

SEQ ID NO: 41173 - RNA, 20 nt, Artificial Sequence
  Synthetic
uucauaacucccaacaucac

SEQ ID NO: 41174 - RNA, 21 nt, Artificial Sequence
  Synthetic
uuucauaacucccaacaucac

SEQ ID NO: 41175 - RNA, 22 nt, Artificial Sequence
  Synthetic
auuucauaacucccaacaucac

SEQ ID NO: 41176 - RNA, 23 nt, Artificial Sequence
  Synthetic
uauuucauaacucccaacaucac

SEQ ID NO: 41177 - RNA, 24 nt, Artificial Sequence
  Synthetic
uuauuucauaacucccaacaucac

SEQ ID NO: 41178 - RNA, 18 nt, Artificial Sequence
  Synthetic
augaccaugagucaucac

SEQ ID NO: 41179 - RNA, 19 nt, Artificial Sequence
  Synthetic
caugaccaugagucaucac

SEQ ID NO: 41180 - RNA, 20 nt, Artificial Sequence
  Synthetic
ccaugaccaugagucaucac

SEQ ID NO: 41181 - RNA, 21 nt, Artificial Sequence
  Synthetic
uccaugaccaugagucaucac

SEQ ID NO: 41182 - RNA, 22 nt, Artificial Sequence
  Synthetic
cuccaugaccaugagucaucac

SEQ ID NO: 41183 - RNA, 23 nt, Artificial Sequence
  Synthetic
ucuccaugaccaugagucaucac

SEQ ID NO: 41184 - RNA, 24 nt, Artificial Sequence
  Synthetic
aucuccaugaccaugagucaucac

SEQ ID NO: 41185 - RNA, 18 nt, Artificial Sequence
  Synthetic
cuaaagcuuuacuaucac

SEQ ID NO: 41186 - RNA, 20 nt, Artificial Sequence
  Synthetic
ugcuaaagcuuuacuaucac

SEQ ID NO: 41187 - RNA, 22 nt, Artificial Sequence
  Synthetic
agugcuaaagcuuuacuaucac

SEQ ID NO: 41188 - RNA, 23 nt, Artificial Sequence
  Synthetic
aagugcuaaagcuuuacuaucac

SEQ ID NO: 41189 - RNA, 24 nt, Artificial Sequence
  Synthetic
caagugcuaaagcuuuacuaucac

SEQ ID NO: 41190 - RNA, 18 nt, Artificial Sequence
  Synthetic
cuuauuuguaaaacucac

SEQ ID NO: 41191 - RNA, 19 nt, Artificial Sequence
  Synthetic
acuuauuuguaaaacucac

SEQ ID NO: 41192 - RNA, 20 nt, Artificial Sequence
  Synthetic
cacuuauuuguaaaacucac

SEQ ID NO: 41193 - RNA, 21 nt, Artificial Sequence
  Synthetic
acacuuauuuguaaaacucac

SEQ ID NO: 41194 - RNA, 22 nt, Artificial Sequence
  Synthetic
cacacuuauuuguaaaacucac

SEQ ID NO: 41195 - RNA, 23 nt, Artificial Sequence
  Synthetic
ucacacuuauuuguaaaacucac

SEQ ID NO: 41196 - RNA, 24 nt, Artificial Sequence
  Synthetic
uucacacuuauuuguaaaacucac

SEQ ID NO: 41197 - RNA, 19 nt, Artificial Sequence
  Synthetic
aguuaugagugauacucac

SEQ ID NO: 41198 - RNA, 21 nt, Artificial Sequence
  Synthetic
agaguuaugagugauacucac

SEQ ID NO: 41199 - RNA, 22 nt, Artificial Sequence
  Synthetic
uagaguuaugagugauacucac

SEQ ID NO: 41200 - RNA, 23 nt, Artificial Sequence
  Synthetic
cuagaguuaugagugauacucac

SEQ ID NO: 41201 - RNA, 18 nt, Artificial Sequence
  Synthetic
ucuuuguuuuauacucac

SEQ ID NO: 41202 - RNA, 19 nt, Artificial Sequence
  Synthetic
aucuuuguuuuauacucac

SEQ ID NO: 41203 - RNA, 20 nt, Artificial Sequence
  Synthetic
caucuuuguuuuauacucac

SEQ ID NO: 41204 - RNA, 21 nt, Artificial Sequence
  Synthetic
acaucuuuguuuuauacucac

SEQ ID NO: 41205 - RNA, 22 nt, Artificial Sequence
  Synthetic
cacaucuuuguuuuauacucac

SEQ ID NO: 41206 - RNA, 23 nt, Artificial Sequence
  Synthetic
acacaucuuuguuuuauacucac

SEQ ID NO: 41207 - RNA, 24 nt, Artificial Sequence
  Synthetic
cacacaucuuuguuuuauacucac

SEQ ID NO: 41208 - RNA, 18 nt, Artificial Sequence
  Synthetic
ccuccuucccuaccucac

SEQ ID NO: 41209 - RNA, 19 nt, Artificial Sequence
  Synthetic
uccuccuucccuaccucac

SEQ ID NO: 41210 - RNA, 20 nt, Artificial Sequence
  Synthetic
uuccuccuucccuaccucac

SEQ ID NO: 41211 - RNA, 21 nt, Artificial Sequence
  Synthetic
auuccuccuucccuaccucac

SEQ ID NO: 41212 - RNA, 22 nt, Artificial Sequence
  Synthetic
uauuccuccuucccuaccucac

SEQ ID NO: 41213 - RNA, 23 nt, Artificial Sequence
  Synthetic
auauuccuccuucccuaccucac

SEQ ID NO: 41214 - RNA, 24 nt, Artificial Sequence
  Synthetic
aauauuccuccuucccuaccucac

SEQ ID NO: 41215 - RNA, 18 nt, Artificial Sequence
  Synthetic
agcuuucucuccccucac

SEQ ID NO: 41216 - RNA, 19 nt, Artificial Sequence
  Synthetic
cagcuuucucuccccucac

SEQ ID NO: 41217 - RNA, 20 nt, Artificial Sequence
  Synthetic
ucagcuuucucuccccucac

SEQ ID NO: 41218 - RNA, 21 nt, Artificial Sequence
  Synthetic
cucagcuuucucuccccucac

SEQ ID NO: 41219 - RNA, 22 nt, Artificial Sequence
  Synthetic
ucucagcuuucucuccccucac

SEQ ID NO: 41220 - RNA, 23 nt, Artificial Sequence
  Synthetic
aucucagcuuucucuccccucac

SEQ ID NO: 41221 - RNA, 24 nt, Artificial Sequence
  Synthetic
aaucucagcuuucucuccccucac

SEQ ID NO: 41222 - RNA, 18 nt, Artificial Sequence
  Synthetic
agaaacgguaaaagucac

SEQ ID NO: 41223 - RNA, 19 nt, Artificial Sequence
  Synthetic
uagaaacgguaaaagucac

SEQ ID NO: 41224 - RNA, 20 nt, Artificial Sequence
  Synthetic
uuagaaacgguaaaagucac

SEQ ID NO: 41225 - RNA, 21 nt, Artificial Sequence
  Synthetic
auuagaaacgguaaaagucac

SEQ ID NO: 41226 - RNA, 22 nt, Artificial Sequence
  Synthetic
cauuagaaacgguaaaagucac

SEQ ID NO: 41227 - RNA, 23 nt, Artificial Sequence
  Synthetic
acauuagaaacgguaaaagucac

SEQ ID NO: 41228 - RNA, 24 nt, Artificial Sequence
  Synthetic
uacauuagaaacgguaaaagucac

SEQ ID NO: 41229 - RNA, 18 nt, Artificial Sequence
  Synthetic
uuacaccauuguagucac

SEQ ID NO: 41230 - RNA, 19 nt, Artificial Sequence
  Synthetic
uuuacaccauuguagucac

SEQ ID NO: 41231 - RNA, 20 nt, Artificial Sequence
  Synthetic
uuuuacaccauuguagucac

SEQ ID NO: 41232 - RNA, 21 nt, Artificial Sequence
  Synthetic
cuuuuacaccauuguagucac

SEQ ID NO: 41233 - RNA, 22 nt, Artificial Sequence
  Synthetic
ucuuuuacaccauuguagucac

SEQ ID NO: 41234 - RNA, 24 nt, Artificial Sequence
  Synthetic
agucuuuuacaccauuguagucac

SEQ ID NO: 41235 - RNA, 19 nt, Artificial Sequence
  Synthetic
ugucacgucaacaggucac

SEQ ID NO: 41236 - RNA, 20 nt, Artificial Sequence
  Synthetic
uugucacgucaacaggucac

SEQ ID NO: 41237 - RNA, 21 nt, Artificial Sequence
  Synthetic
uuugucacgucaacaggucac

SEQ ID NO: 41238 - RNA, 22 nt, Artificial Sequence
  Synthetic
cuuugucacgucaacaggucac

SEQ ID NO: 41239 - RNA, 23 nt, Artificial Sequence
  Synthetic
ucuuugucacgucaacaggucac

SEQ ID NO: 41240 - RNA, 24 nt, Artificial Sequence
  Synthetic
cucuuugucacgucaacaggucac

SEQ ID NO: 41241 - RNA, 21 nt, Artificial Sequence
  Synthetic
uacauuugaucagacugucac

SEQ ID NO: 41242 - RNA, 22 nt, Artificial Sequence
  Synthetic
auacauuugaucagacugucac

SEQ ID NO: 41243 - RNA, 24 nt, Artificial Sequence
  Synthetic
ugauacauuugaucagacugucac

SEQ ID NO: 41244 - RNA, 20 nt, Artificial Sequence
  Synthetic
ugguaugucuagccugucac

SEQ ID NO: 41245 - RNA, 21 nt, Artificial Sequence
  Synthetic
cugguaugucuagccugucac

SEQ ID NO: 41246 - RNA, 22 nt, Artificial Sequence
  Synthetic
ccugguaugucuagccugucac

SEQ ID NO: 41247 - RNA, 24 nt, Artificial Sequence
  Synthetic
ugccugguaugucuagccugucac

SEQ ID NO: 41248 - RNA, 21 nt, Artificial Sequence
  Synthetic
uuuuaaaaagccagaauucac

SEQ ID NO: 41249 - RNA, 22 nt, Artificial Sequence
  Synthetic
auuuuaaaaagccagaauucac

SEQ ID NO: 41250 - RNA, 23 nt, Artificial Sequence
  Synthetic
aauuuuaaaaagccagaauucac

SEQ ID NO: 41251 - RNA, 24 nt, Artificial Sequence
  Synthetic
uaauuuuaaaaagccagaauucac

SEQ ID NO: 41252 - RNA, 18 nt, Artificial Sequence
  Synthetic
cugauaacucuaauucac

SEQ ID NO: 41253 - RNA, 19 nt, Artificial Sequence
  Synthetic
ucugauaacucuaauucac

SEQ ID NO: 41254 - RNA, 20 nt, Artificial Sequence
  Synthetic
cucugauaacucuaauucac

SEQ ID NO: 41255 - RNA, 21 nt, Artificial Sequence
  Synthetic
ccucugauaacucuaauucac

SEQ ID NO: 41256 - RNA, 22 nt, Artificial Sequence
  Synthetic
cccucugauaacucuaauucac

SEQ ID NO: 41257 - RNA, 23 nt, Artificial Sequence
  Synthetic
ucccucugauaacucuaauucac

SEQ ID NO: 41258 - RNA, 24 nt, Artificial Sequence
  Synthetic
uucccucugauaacucuaauucac

SEQ ID NO: 41259 - RNA, 18 nt, Artificial Sequence
  Synthetic
uugucuccuugcauucac

SEQ ID NO: 41260 - RNA, 19 nt, Artificial Sequence
  Synthetic
uuugucuccuugcauucac

SEQ ID NO: 41261 - RNA, 20 nt, Artificial Sequence
  Synthetic
cuuugucuccuugcauucac

SEQ ID NO: 41262 - RNA, 21 nt, Artificial Sequence
  Synthetic
ucuuugucuccuugcauucac

SEQ ID NO: 41263 - RNA, 22 nt, Artificial Sequence
  Synthetic
cucuuugucuccuugcauucac

SEQ ID NO: 41264 - RNA, 23 nt, Artificial Sequence
  Synthetic
ucucuuugucuccuugcauucac

SEQ ID NO: 41265 - RNA, 24 nt, Artificial Sequence
  Synthetic
cucucuuugucuccuugcauucac

SEQ ID NO: 41266 - RNA, 18 nt, Artificial Sequence
  Synthetic
aaccuuuuagauauucac

SEQ ID NO: 41267 - RNA, 19 nt, Artificial Sequence
  Synthetic
uaaccuuuuagauauucac

SEQ ID NO: 41268 - RNA, 20 nt, Artificial Sequence
  Synthetic
cuaaccuuuuagauauucac

SEQ ID NO: 41269 - RNA, 21 nt, Artificial Sequence
  Synthetic
ccuaaccuuuuagauauucac

SEQ ID NO: 41270 - RNA, 22 nt, Artificial Sequence
  Synthetic
cccuaaccuuuuagauauucac

SEQ ID NO: 41271 - RNA, 23 nt, Artificial Sequence
  Synthetic
ucccuaaccuuuuagauauucac

SEQ ID NO: 41272 - RNA, 24 nt, Artificial Sequence
  Synthetic
aucccuaaccuuuuagauauucac

SEQ ID NO: 41273 - RNA, 18 nt, Artificial Sequence
  Synthetic
acacuguauuauauucac

SEQ ID NO: 41274 - RNA, 19 nt, Artificial Sequence
  Synthetic
uacacuguauuauauucac

SEQ ID NO: 41275 - RNA, 21 nt, Artificial Sequence
  Synthetic
aguacacuguauuauauucac

SEQ ID NO: 41276 - RNA, 22 nt, Artificial Sequence
  Synthetic
aaguacacuguauuauauucac

SEQ ID NO: 41277 - RNA, 23 nt, Artificial Sequence
  Synthetic
aaaguacacuguauuauauucac

SEQ ID NO: 41278 - RNA, 24 nt, Artificial Sequence
  Synthetic
uaaaguacacuguauuauauucac

SEQ ID NO: 41279 - RNA, 18 nt, Artificial Sequence
  Synthetic
uggggcacucaacuucac

SEQ ID NO: 41280 - RNA, 20 nt, Artificial Sequence
  Synthetic
cguggggcacucaacuucac

SEQ ID NO: 41281 - RNA, 21 nt, Artificial Sequence
  Synthetic
acguggggcacucaacuucac

SEQ ID NO: 41282 - RNA, 22 nt, Artificial Sequence
  Synthetic
aacguggggcacucaacuucac

SEQ ID NO: 41283 - RNA, 23 nt, Artificial Sequence
  Synthetic
uaacguggggcacucaacuucac

SEQ ID NO: 41284 - RNA, 24 nt, Artificial Sequence
  Synthetic
auaacguggggcacucaacuucac

SEQ ID NO: 41285 - RNA, 18 nt, Artificial Sequence
  Synthetic
auuugagaaagacuucac

SEQ ID NO: 41286 - RNA, 19 nt, Artificial Sequence
  Synthetic
cauuugagaaagacuucac

SEQ ID NO: 41287 - RNA, 20 nt, Artificial Sequence
  Synthetic
acauuugagaaagacuucac

SEQ ID NO: 41288 - RNA, 23 nt, Artificial Sequence
  Synthetic
aggacauuugagaaagacuucac

SEQ ID NO: 41289 - RNA, 24 nt, Artificial Sequence
  Synthetic
uaggacauuugagaaagacuucac

SEQ ID NO: 41290 - RNA, 18 nt, Artificial Sequence
  Synthetic
ucugaccucauacuucac

SEQ ID NO: 41291 - RNA, 19 nt, Artificial Sequence
  Synthetic
uucugaccucauacuucac

SEQ ID NO: 41292 - RNA, 20 nt, Artificial Sequence
  Synthetic
uuucugaccucauacuucac

SEQ ID NO: 41293 - RNA, 21 nt, Artificial Sequence
  Synthetic
uuuucugaccucauacuucac

SEQ ID NO: 41294 - RNA, 22 nt, Artificial Sequence
  Synthetic
uuuuucugaccucauacuucac

SEQ ID NO: 41295 - RNA, 23 nt, Artificial Sequence
  Synthetic
auuuuucugaccucauacuucac

SEQ ID NO: 41296 - RNA, 24 nt, Artificial Sequence
  Synthetic
cauuuuucugaccucauacuucac

SEQ ID NO: 41297 - RNA, 18 nt, Artificial Sequence
  Synthetic
uugaucuaaguacuucac

SEQ ID NO: 41298 - RNA, 19 nt, Artificial Sequence
  Synthetic
auugaucuaaguacuucac

SEQ ID NO: 41299 - RNA, 20 nt, Artificial Sequence
  Synthetic
cauugaucuaaguacuucac

SEQ ID NO: 41300 - RNA, 21 nt, Artificial Sequence
  Synthetic
ucauugaucuaaguacuucac

SEQ ID NO: 41301 - RNA, 23 nt, Artificial Sequence
  Synthetic
agucauugaucuaaguacuucac

SEQ ID NO: 41302 - RNA, 24 nt, Artificial Sequence
  Synthetic
cagucauugaucuaaguacuucac

SEQ ID NO: 41303 - RNA, 18 nt, Artificial Sequence
  Synthetic
uuacaaagcacuguucac

SEQ ID NO: 41304 - RNA, 19 nt, Artificial Sequence
  Synthetic
uuuacaaagcacuguucac

SEQ ID NO: 41305 - RNA, 21 nt, Artificial Sequence
  Synthetic
aguuuacaaagcacuguucac

SEQ ID NO: 41306 - RNA, 22 nt, Artificial Sequence
  Synthetic
caguuuacaaagcacuguucac

SEQ ID NO: 41307 - RNA, 24 nt, Artificial Sequence
  Synthetic
ugcaguuuacaaagcacuguucac

SEQ ID NO: 41308 - RNA, 18 nt, Artificial Sequence
  Synthetic
cagucaugaacauuucac

SEQ ID NO: 41309 - RNA, 19 nt, Artificial Sequence
  Synthetic
ccagucaugaacauuucac

SEQ ID NO: 41310 - RNA, 20 nt, Artificial Sequence
  Synthetic
uccagucaugaacauuucac

SEQ ID NO: 41311 - RNA, 21 nt, Artificial Sequence
  Synthetic
cuccagucaugaacauuucac

SEQ ID NO: 41312 - RNA, 22 nt, Artificial Sequence
  Synthetic
ucuccagucaugaacauuucac

SEQ ID NO: 41313 - RNA, 23 nt, Artificial Sequence
  Synthetic
uucuccagucaugaacauuucac

SEQ ID NO: 41314 - RNA, 24 nt, Artificial Sequence
  Synthetic
cuucuccagucaugaacauuucac

SEQ ID NO: 41315 - RNA, 18 nt, Artificial Sequence
  Synthetic
agaauuuacacauuucac

SEQ ID NO: 41316 - RNA, 19 nt, Artificial Sequence
  Synthetic
aagaauuuacacauuucac

SEQ ID NO: 41317 - RNA, 20 nt, Artificial Sequence
  Synthetic
uaagaauuuacacauuucac

SEQ ID NO: 41318 - RNA, 21 nt, Artificial Sequence
  Synthetic
auaagaauuuacacauuucac

SEQ ID NO: 41319 - RNA, 22 nt, Artificial Sequence
  Synthetic
uauaagaauuuacacauuucac

SEQ ID NO: 41320 - RNA, 18 nt, Artificial Sequence
  Synthetic
uucuggacaugauuucac

SEQ ID NO: 41321 - RNA, 19 nt, Artificial Sequence
  Synthetic
auucuggacaugauuucac

SEQ ID NO: 41322 - RNA, 21 nt, Artificial Sequence
  Synthetic
agauucuggacaugauuucac

SEQ ID NO: 41323 - RNA, 22 nt, Artificial Sequence
  Synthetic
uagauucuggacaugauuucac

SEQ ID NO: 41324 - RNA, 23 nt, Artificial Sequence
  Synthetic
auagauucuggacaugauuucac

SEQ ID NO: 41325 - RNA, 24 nt, Artificial Sequence
  Synthetic
cauagauucuggacaugauuucac

SEQ ID NO: 41326 - RNA, 18 nt, Artificial Sequence
  Synthetic
ucuuucugaauauuucac

SEQ ID NO: 41327 - RNA, 20 nt, Artificial Sequence
  Synthetic
ugucuuucugaauauuucac

SEQ ID NO: 41328 - RNA, 21 nt, Artificial Sequence
  Synthetic
cugucuuucugaauauuucac

SEQ ID NO: 41329 - RNA, 22 nt, Artificial Sequence
  Synthetic
ucugucuuucugaauauuucac

SEQ ID NO: 41330 - RNA, 23 nt, Artificial Sequence
  Synthetic
cucugucuuucugaauauuucac

SEQ ID NO: 41331 - RNA, 24 nt, Artificial Sequence
  Synthetic
acucugucuuucugaauauuucac

SEQ ID NO: 41332 - RNA, 18 nt, Artificial Sequence
  Synthetic
cuguaaggcaauuuucac

SEQ ID NO: 41333 - RNA, 19 nt, Artificial Sequence
  Synthetic
ccuguaaggcaauuuucac

SEQ ID NO: 41334 - RNA, 21 nt, Artificial Sequence
  Synthetic
ugccuguaaggcaauuuucac

SEQ ID NO: 41335 - RNA, 22 nt, Artificial Sequence
  Synthetic
uugccuguaaggcaauuuucac

SEQ ID NO: 41336 - RNA, 23 nt, Artificial Sequence
  Synthetic
cuugccuguaaggcaauuuucac

SEQ ID NO: 41337 - RNA, 24 nt, Artificial Sequence
  Synthetic
ucuugccuguaaggcaauuuucac

SEQ ID NO: 41338 - RNA, 18 nt, Artificial Sequence
  Synthetic
uucauauucaacaaagac

SEQ ID NO: 41339 - RNA, 19 nt, Artificial Sequence
  Synthetic
cuucauauucaacaaagac

SEQ ID NO: 41340 - RNA, 20 nt, Artificial Sequence
  Synthetic
acuucauauucaacaaagac

SEQ ID NO: 41341 - RNA, 21 nt, Artificial Sequence
  Synthetic
aacuucauauucaacaaagac

SEQ ID NO: 41342 - RNA, 22 nt, Artificial Sequence
  Synthetic
aaacuucauauucaacaaagac

SEQ ID NO: 41343 - RNA, 20 nt, Artificial Sequence
  Synthetic
aggauuugccucagaaagac

SEQ ID NO: 41344 - RNA, 21 nt, Artificial Sequence
  Synthetic
caggauuugccucagaaagac

SEQ ID NO: 41345 - RNA, 23 nt, Artificial Sequence
  Synthetic
ugcaggauuugccucagaaagac

SEQ ID NO: 41346 - RNA, 24 nt, Artificial Sequence
  Synthetic
augcaggauuugccucagaaagac

SEQ ID NO: 41347 - RNA, 21 nt, Artificial Sequence
  Synthetic
agacuuaggagucagaaagac

SEQ ID NO: 41348 - RNA, 22 nt, Artificial Sequence
  Synthetic
uagacuuaggagucagaaagac

SEQ ID NO: 41349 - RNA, 23 nt, Artificial Sequence
  Synthetic
cuagacuuaggagucagaaagac

SEQ ID NO: 41350 - RNA, 21 nt, Artificial Sequence
  Synthetic
cccuacagaaauuagaaagac

SEQ ID NO: 41351 - RNA, 22 nt, Artificial Sequence
  Synthetic
acccuacagaaauuagaaagac

SEQ ID NO: 41352 - RNA, 23 nt, Artificial Sequence
  Synthetic
aacccuacagaaauuagaaagac

SEQ ID NO: 41353 - RNA, 24 nt, Artificial Sequence
  Synthetic
caacccuacagaaauuagaaagac

SEQ ID NO: 41354 - RNA, 21 nt, Artificial Sequence
  Synthetic
ugaauuuuauuuuugaaagac

SEQ ID NO: 41355 - RNA, 23 nt, Artificial Sequence
  Synthetic
cgugaauuuuauuuuugaaagac

SEQ ID NO: 41356 - RNA, 24 nt, Artificial Sequence
  Synthetic
ccgugaauuuuauuuuugaaagac

SEQ ID NO: 41357 - RNA, 18 nt, Artificial Sequence
  Synthetic
aguuuauuggcacaagac

SEQ ID NO: 41358 - RNA, 20 nt, Artificial Sequence
  Synthetic
ugaguuuauuggcacaagac

SEQ ID NO: 41359 - RNA, 21 nt, Artificial Sequence
  Synthetic
augaguuuauuggcacaagac

SEQ ID NO: 41360 - RNA, 23 nt, Artificial Sequence
  Synthetic
ugaugaguuuauuggcacaagac

SEQ ID NO: 41361 - RNA, 24 nt, Artificial Sequence
  Synthetic
augaugaguuuauuggcacaagac

SEQ ID NO: 41362 - RNA, 21 nt, Artificial Sequence
  Synthetic
ucacagagcauuugucaagac

SEQ ID NO: 41363 - RNA, 22 nt, Artificial Sequence
  Synthetic
aucacagagcauuugucaagac

SEQ ID NO: 41364 - RNA, 18 nt, Artificial Sequence
  Synthetic
aauucuacaacagaagac

SEQ ID NO: 41365 - RNA, 19 nt, Artificial Sequence
  Synthetic
uaauucuacaacagaagac

SEQ ID NO: 41366 - RNA, 20 nt, Artificial Sequence
  Synthetic
uuaauucuacaacagaagac

SEQ ID NO: 41367 - RNA, 21 nt, Artificial Sequence
  Synthetic
uuuaauucuacaacagaagac

SEQ ID NO: 41368 - RNA, 22 nt, Artificial Sequence
  Synthetic
auuuaauucuacaacagaagac

SEQ ID NO: 41369 - RNA, 24 nt, Artificial Sequence
  Synthetic
agauuuaauucuacaacagaagac

SEQ ID NO: 41370 - RNA, 18 nt, Artificial Sequence
  Synthetic
agcuugaauacagaagac

SEQ ID NO: 41371 - RNA, 20 nt, Artificial Sequence
  Synthetic
ugagcuugaauacagaagac

SEQ ID NO: 41372 - RNA, 21 nt, Artificial Sequence
  Synthetic
uugagcuugaauacagaagac

SEQ ID NO: 41373 - RNA, 22 nt, Artificial Sequence
  Synthetic
cuugagcuugaauacagaagac

SEQ ID NO: 41374 - RNA, 23 nt, Artificial Sequence
  Synthetic
ccuugagcuugaauacagaagac

SEQ ID NO: 41375 - RNA, 18 nt, Artificial Sequence
  Synthetic
aacugcagcucagaagac

SEQ ID NO: 41376 - RNA, 19 nt, Artificial Sequence
  Synthetic
aaacugcagcucagaagac

SEQ ID NO: 41377 - RNA, 20 nt, Artificial Sequence
  Synthetic
uaaacugcagcucagaagac

SEQ ID NO: 41378 - RNA, 21 nt, Artificial Sequence
  Synthetic
uuaaacugcagcucagaagac

SEQ ID NO: 41379 - RNA, 22 nt, Artificial Sequence
  Synthetic
auuaaacugcagcucagaagac

SEQ ID NO: 41380 - RNA, 23 nt, Artificial Sequence
  Synthetic
aauuaaacugcagcucagaagac

SEQ ID NO: 41381 - RNA, 19 nt, Artificial Sequence
  Synthetic
ugggcgaccuugggaagac

SEQ ID NO: 41382 - RNA, 22 nt, Artificial Sequence
  Synthetic
aggugggcgaccuugggaagac

SEQ ID NO: 41383 - RNA, 23 nt, Artificial Sequence
  Synthetic
aaggugggcgaccuugggaagac

SEQ ID NO: 41384 - RNA, 24 nt, Artificial Sequence
  Synthetic
uaaggugggcgaccuugggaagac

SEQ ID NO: 41385 - RNA, 19 nt, Artificial Sequence
  Synthetic
ugugcucuaaaaugaagac

SEQ ID NO: 41386 - RNA, 20 nt, Artificial Sequence
  Synthetic
uugugcucuaaaaugaagac

SEQ ID NO: 41387 - RNA, 21 nt, Artificial Sequence
  Synthetic
uuugugcucuaaaaugaagac

SEQ ID NO: 41388 - RNA, 22 nt, Artificial Sequence
  Synthetic
auuugugcucuaaaaugaagac

SEQ ID NO: 41389 - RNA, 23 nt, Artificial Sequence
  Synthetic
aauuugugcucuaaaaugaagac

SEQ ID NO: 41390 - RNA, 24 nt, Artificial Sequence
  Synthetic
aaauuugugcucuaaaaugaagac

SEQ ID NO: 41391 - RNA, 18 nt, Artificial Sequence
  Synthetic
aggaaaggugcugaagac

SEQ ID NO: 41392 - RNA, 19 nt, Artificial Sequence
  Synthetic
aaggaaaggugcugaagac

SEQ ID NO: 41393 - RNA, 20 nt, Artificial Sequence
  Synthetic
caaggaaaggugcugaagac

SEQ ID NO: 41394 - RNA, 21 nt, Artificial Sequence
  Synthetic
ccaaggaaaggugcugaagac

SEQ ID NO: 41395 - RNA, 23 nt, Artificial Sequence
  Synthetic
ugccaaggaaaggugcugaagac

SEQ ID NO: 41396 - RNA, 24 nt, Artificial Sequence
  Synthetic
uugccaaggaaaggugcugaagac

SEQ ID NO: 41397 - RNA, 18 nt, Artificial Sequence
  Synthetic
uacuugaugucugaagac

SEQ ID NO: 41398 - RNA, 21 nt, Artificial Sequence
  Synthetic
ugguacuugaugucugaagac

SEQ ID NO: 41399 - RNA, 22 nt, Artificial Sequence
  Synthetic
uugguacuugaugucugaagac

SEQ ID NO: 41400 - RNA, 23 nt, Artificial Sequence
  Synthetic
uuugguacuugaugucugaagac

SEQ ID NO: 41401 - RNA, 24 nt, Artificial Sequence
  Synthetic
uuuugguacuugaugucugaagac

SEQ ID NO: 41402 - RNA, 21 nt, Artificial Sequence
  Synthetic
ccaagcaaaaauauauaagac

SEQ ID NO: 41403 - RNA, 22 nt, Artificial Sequence
  Synthetic
uccaagcaaaaauauauaagac

SEQ ID NO: 41404 - RNA, 23 nt, Artificial Sequence
  Synthetic
auccaagcaaaaauauauaagac

SEQ ID NO: 41405 - RNA, 24 nt, Artificial Sequence
  Synthetic
cauccaagcaaaaauauauaagac

SEQ ID NO: 41406 - RNA, 18 nt, Artificial Sequence
  Synthetic
uauaaaauaaucuaagac

SEQ ID NO: 41407 - RNA, 19 nt, Artificial Sequence
  Synthetic
auauaaaauaaucuaagac

SEQ ID NO: 41408 - RNA, 20 nt, Artificial Sequence
  Synthetic
uauauaaaauaaucuaagac

SEQ ID NO: 41409 - RNA, 21 nt, Artificial Sequence
  Synthetic
auauauaaaauaaucuaagac

SEQ ID NO: 41410 - RNA, 22 nt, Artificial Sequence
  Synthetic
aauauauaaaauaaucuaagac

SEQ ID NO: 41411 - RNA, 23 nt, Artificial Sequence
  Synthetic
caauauauaaaauaaucuaagac

SEQ ID NO: 41412 - RNA, 21 nt, Artificial Sequence
  Synthetic
uuaauaauacucauaacagac

SEQ ID NO: 41413 - RNA, 23 nt, Artificial Sequence
  Synthetic
aguuaauaauacucauaacagac

SEQ ID NO: 41414 - RNA, 24 nt, Artificial Sequence
  Synthetic
aaguuaauaauacucauaacagac

SEQ ID NO: 41415 - RNA, 18 nt, Artificial Sequence
  Synthetic
aacuauaaucucacagac

SEQ ID NO: 41416 - RNA, 20 nt, Artificial Sequence
  Synthetic
ugaacuauaaucucacagac

SEQ ID NO: 41417 - RNA, 21 nt, Artificial Sequence
  Synthetic
augaacuauaaucucacagac

SEQ ID NO: 41418 - RNA, 22 nt, Artificial Sequence
  Synthetic
aaugaacuauaaucucacagac

SEQ ID NO: 41419 - RNA, 23 nt, Artificial Sequence
  Synthetic
aaaugaacuauaaucucacagac

SEQ ID NO: 41420 - RNA, 24 nt, Artificial Sequence
  Synthetic
aaaaugaacuauaaucucacagac

SEQ ID NO: 41421 - RNA, 18 nt, Artificial Sequence
  Synthetic
ucucucaucccagcagac

SEQ ID NO: 41422 - RNA, 19 nt, Artificial Sequence
  Synthetic
cucucucaucccagcagac

SEQ ID NO: 41423 - RNA, 20 nt, Artificial Sequence
  Synthetic
ccucucucaucccagcagac

SEQ ID NO: 41424 - RNA, 21 nt, Artificial Sequence
  Synthetic
uccucucucaucccagcagac

SEQ ID NO: 41425 - RNA, 22 nt, Artificial Sequence
  Synthetic
cuccucucucaucccagcagac

SEQ ID NO: 41426 - RNA, 23 nt, Artificial Sequence
  Synthetic
acuccucucucaucccagcagac

SEQ ID NO: 41427 - RNA, 24 nt, Artificial Sequence
  Synthetic
uacuccucucucaucccagcagac

SEQ ID NO: 41428 - RNA, 18 nt, Artificial Sequence
  Synthetic
ccaugggaaagagcagac

SEQ ID NO: 41429 - RNA, 19 nt, Artificial Sequence
  Synthetic
cccaugggaaagagcagac

SEQ ID NO: 41430 - RNA, 20 nt, Artificial Sequence
  Synthetic
ccccaugggaaagagcagac

SEQ ID NO: 41431 - RNA, 21 nt, Artificial Sequence
  Synthetic
accccaugggaaagagcagac

SEQ ID NO: 41432 - RNA, 22 nt, Artificial Sequence
  Synthetic
caccccaugggaaagagcagac

SEQ ID NO: 41433 - RNA, 23 nt, Artificial Sequence
  Synthetic
ucaccccaugggaaagagcagac

SEQ ID NO: 41434 - RNA, 22 nt, Artificial Sequence
  Synthetic
agaaauagcaaauauagcagac

SEQ ID NO: 41435 - RNA, 18 nt, Artificial Sequence
  Synthetic
cauaguguaccugcagac

SEQ ID NO: 41436 - RNA, 20 nt, Artificial Sequence
  Synthetic
agcauaguguaccugcagac

SEQ ID NO: 41437 - RNA, 21 nt, Artificial Sequence
  Synthetic
cagcauaguguaccugcagac

SEQ ID NO: 41438 - RNA, 24 nt, Artificial Sequence
  Synthetic
uggcagcauaguguaccugcagac

SEQ ID NO: 41439 - RNA, 22 nt, Artificial Sequence
  Synthetic
ugucacaagaaaaguaucagac

SEQ ID NO: 41440 - RNA, 23 nt, Artificial Sequence
  Synthetic
augucacaagaaaaguaucagac

SEQ ID NO: 41441 - RNA, 24 nt, Artificial Sequence
  Synthetic
aaugucacaagaaaaguaucagac

SEQ ID NO: 41442 - RNA, 21 nt, Artificial Sequence
  Synthetic
agcugaguccagcucucagac

SEQ ID NO: 41443 - RNA, 22 nt, Artificial Sequence
  Synthetic
uagcugaguccagcucucagac

SEQ ID NO: 41444 - RNA, 23 nt, Artificial Sequence
  Synthetic
uuagcugaguccagcucucagac

SEQ ID NO: 41445 - RNA, 24 nt, Artificial Sequence
  Synthetic
uuuagcugaguccagcucucagac

SEQ ID NO: 41446 - RNA, 18 nt, Artificial Sequence
  Synthetic
aucagaggugguucagac

SEQ ID NO: 41447 - RNA, 19 nt, Artificial Sequence
  Synthetic
caucagaggugguucagac

SEQ ID NO: 41448 - RNA, 20 nt, Artificial Sequence
  Synthetic
acaucagaggugguucagac

SEQ ID NO: 41449 - RNA, 21 nt, Artificial Sequence
  Synthetic
cacaucagaggugguucagac

SEQ ID NO: 41450 - RNA, 22 nt, Artificial Sequence
  Synthetic
ccacaucagaggugguucagac

SEQ ID NO: 41451 - RNA, 23 nt, Artificial Sequence
  Synthetic
uccacaucagaggugguucagac

SEQ ID NO: 41452 - RNA, 23 nt, Artificial Sequence
  Synthetic
ugguuuaucagagacacagagac

SEQ ID NO: 41453 - RNA, 18 nt, Artificial Sequence
  Synthetic
cauagagaguugagagac

SEQ ID NO: 41454 - RNA, 19 nt, Artificial Sequence
  Synthetic
ccauagagaguugagagac

SEQ ID NO: 41455 - RNA, 20 nt, Artificial Sequence
  Synthetic
accauagagaguugagagac

SEQ ID NO: 41456 - RNA, 22 nt, Artificial Sequence
  Synthetic
agaccauagagaguugagagac

SEQ ID NO: 41457 - RNA, 24 nt, Artificial Sequence
  Synthetic
agagaccauagagaguugagagac

SEQ ID NO: 41458 - RNA, 18 nt, Artificial Sequence
  Synthetic
ccccaaauagaaugagac

SEQ ID NO: 41459 - RNA, 19 nt, Artificial Sequence
  Synthetic
accccaaauagaaugagac

SEQ ID NO: 41460 - RNA, 21 nt, Artificial Sequence
  Synthetic
ugaccccaaauagaaugagac

SEQ ID NO: 41461 - RNA, 23 nt, Artificial Sequence
  Synthetic
ugugaccccaaauagaaugagac

SEQ ID NO: 41462 - RNA, 24 nt, Artificial Sequence
  Synthetic
cugugaccccaaauagaaugagac

SEQ ID NO: 41463 - RNA, 22 nt, Artificial Sequence
  Synthetic
agaagaugaugcugacugagac

SEQ ID NO: 41464 - RNA, 24 nt, Artificial Sequence
  Synthetic
ugagaagaugaugcugacugagac

SEQ ID NO: 41465 - RNA, 18 nt, Artificial Sequence
  Synthetic
auaagcaaauccugagac

SEQ ID NO: 41466 - RNA, 19 nt, Artificial Sequence
  Synthetic
cauaagcaaauccugagac

SEQ ID NO: 41467 - RNA, 20 nt, Artificial Sequence
  Synthetic
acauaagcaaauccugagac

SEQ ID NO: 41468 - RNA, 21 nt, Artificial Sequence
  Synthetic
uacauaagcaaauccugagac

SEQ ID NO: 41469 - RNA, 22 nt, Artificial Sequence
  Synthetic
uuacauaagcaaauccugagac

SEQ ID NO: 41470 - RNA, 23 nt, Artificial Sequence
  Synthetic
cuuacauaagcaaauccugagac

SEQ ID NO: 41471 - RNA, 24 nt, Artificial Sequence
  Synthetic
ucuuacauaagcaaauccugagac

SEQ ID NO: 41472 - RNA, 20 nt, Artificial Sequence
  Synthetic
uggcauuuuaucucugagac

SEQ ID NO: 41473 - RNA, 21 nt, Artificial Sequence
  Synthetic
cuggcauuuuaucucugagac

SEQ ID NO: 41474 - RNA, 22 nt, Artificial Sequence
  Synthetic
ccuggcauuuuaucucugagac

SEQ ID NO: 41475 - RNA, 23 nt, Artificial Sequence
  Synthetic
uccuggcauuuuaucucugagac

SEQ ID NO: 41476 - RNA, 24 nt, Artificial Sequence
  Synthetic
uuccuggcauuuuaucucugagac

SEQ ID NO: 41477 - RNA, 18 nt, Artificial Sequence
  Synthetic
uagagcaaauucugagac

SEQ ID NO: 41478 - RNA, 19 nt, Artificial Sequence
  Synthetic
uuagagcaaauucugagac

SEQ ID NO: 41479 - RNA, 20 nt, Artificial Sequence
  Synthetic
cuuagagcaaauucugagac

SEQ ID NO: 41480 - RNA, 23 nt, Artificial Sequence
  Synthetic
aggcuuagagcaaauucugagac

SEQ ID NO: 41481 - RNA, 24 nt, Artificial Sequence
  Synthetic
caggcuuagagcaaauucugagac

SEQ ID NO: 41482 - RNA, 18 nt, Artificial Sequence
  Synthetic
agagaaugcacaauagac

SEQ ID NO: 41483 - RNA, 20 nt, Artificial Sequence
  Synthetic
ugagagaaugcacaauagac

SEQ ID NO: 41484 - RNA, 21 nt, Artificial Sequence
  Synthetic
augagagaaugcacaauagac

SEQ ID NO: 41485 - RNA, 22 nt, Artificial Sequence
  Synthetic
caugagagaaugcacaauagac

SEQ ID NO: 41486 - RNA, 23 nt, Artificial Sequence
  Synthetic
ucaugagagaaugcacaauagac

SEQ ID NO: 41487 - RNA, 24 nt, Artificial Sequence
  Synthetic
cucaugagagaaugcacaauagac

SEQ ID NO: 41488 - RNA, 19 nt, Artificial Sequence
  Synthetic
uggcaaaauuuguauagac

SEQ ID NO: 41489 - RNA, 21 nt, Artificial Sequence
  Synthetic
uguggcaaaauuuguauagac

SEQ ID NO: 41490 - RNA, 22 nt, Artificial Sequence
  Synthetic
uuguggcaaaauuuguauagac

SEQ ID NO: 41491 - RNA, 23 nt, Artificial Sequence
  Synthetic
uuuguggcaaaauuuguauagac

SEQ ID NO: 41492 - RNA, 19 nt, Artificial Sequence
  Synthetic
agcugugcuacuuauagac

SEQ ID NO: 41493 - RNA, 20 nt, Artificial Sequence
  Synthetic
uagcugugcuacuuauagac

SEQ ID NO: 41494 - RNA, 21 nt, Artificial Sequence
  Synthetic
auagcugugcuacuuauagac

SEQ ID NO: 41495 - RNA, 22 nt, Artificial Sequence
  Synthetic
cauagcugugcuacuuauagac

SEQ ID NO: 41496 - RNA, 23 nt, Artificial Sequence
  Synthetic
acauagcugugcuacuuauagac

SEQ ID NO: 41497 - RNA, 18 nt, Artificial Sequence
  Synthetic
agauaguucaugguagac

SEQ ID NO: 41498 - RNA, 19 nt, Artificial Sequence
  Synthetic
uagauaguucaugguagac

SEQ ID NO: 41499 - RNA, 20 nt, Artificial Sequence
  Synthetic
cuagauaguucaugguagac

SEQ ID NO: 41500 - RNA, 21 nt, Artificial Sequence
  Synthetic
ccuagauaguucaugguagac

SEQ ID NO: 41501 - RNA, 22 nt, Artificial Sequence
  Synthetic
cccuagauaguucaugguagac

SEQ ID NO: 41502 - RNA, 23 nt, Artificial Sequence
  Synthetic
ucccuagauaguucaugguagac

SEQ ID NO: 41503 - RNA, 24 nt, Artificial Sequence
  Synthetic
cucccuagauaguucaugguagac

SEQ ID NO: 41504 - RNA, 19 nt, Artificial Sequence
  Synthetic
ugucuaccaaccuguagac

SEQ ID NO: 41505 - RNA, 20 nt, Artificial Sequence
  Synthetic
cugucuaccaaccuguagac

SEQ ID NO: 41506 - RNA, 21 nt, Artificial Sequence
  Synthetic
acugucuaccaaccuguagac

SEQ ID NO: 41507 - RNA, 23 nt, Artificial Sequence
  Synthetic
ugacugucuaccaaccuguagac

SEQ ID NO: 41508 - RNA, 24 nt, Artificial Sequence
  Synthetic
cugacugucuaccaaccuguagac

SEQ ID NO: 41509 - RNA, 18 nt, Artificial Sequence
  Synthetic
ccaccagagaguguagac

SEQ ID NO: 41510 - RNA, 20 nt, Artificial Sequence
  Synthetic
agccaccagagaguguagac

SEQ ID NO: 41511 - RNA, 21 nt, Artificial Sequence
  Synthetic
uagccaccagagaguguagac

SEQ ID NO: 41512 - RNA, 22 nt, Artificial Sequence
  Synthetic
uuagccaccagagaguguagac

SEQ ID NO: 41513 - RNA, 23 nt, Artificial Sequence
  Synthetic
uuuagccaccagagaguguagac

SEQ ID NO: 41514 - RNA, 24 nt, Artificial Sequence
  Synthetic
uuuuagccaccagagaguguagac

SEQ ID NO: 41515 - RNA, 18 nt, Artificial Sequence
  Synthetic
aaaauuagucccuuagac

SEQ ID NO: 41516 - RNA, 21 nt, Artificial Sequence
  Synthetic
aggaaaauuagucccuuagac

SEQ ID NO: 41517 - RNA, 22 nt, Artificial Sequence
  Synthetic
uaggaaaauuagucccuuagac

SEQ ID NO: 41518 - RNA, 23 nt, Artificial Sequence
  Synthetic
uuaggaaaauuagucccuuagac

SEQ ID NO: 41519 - RNA, 18 nt, Artificial Sequence
  Synthetic
aauuagcauuuguuagac

SEQ ID NO: 41520 - RNA, 19 nt, Artificial Sequence
  Synthetic
aaauuagcauuuguuagac

SEQ ID NO: 41521 - RNA, 21 nt, Artificial Sequence
  Synthetic
agaaauuagcauuuguuagac

SEQ ID NO: 41522 - RNA, 23 nt, Artificial Sequence
  Synthetic
ugagaaauuagcauuuguuagac

SEQ ID NO: 41523 - RNA, 24 nt, Artificial Sequence
  Synthetic
uugagaaauuagcauuuguuagac

SEQ ID NO: 41524 - RNA, 18 nt, Artificial Sequence
  Synthetic
aaauguacaaggaccgac

SEQ ID NO: 41525 - RNA, 19 nt, Artificial Sequence
  Synthetic
aaaauguacaaggaccgac

SEQ ID NO: 41526 - RNA, 20 nt, Artificial Sequence
  Synthetic
caaaauguacaaggaccgac

SEQ ID NO: 41527 - RNA, 21 nt, Artificial Sequence
  Synthetic
acaaaauguacaaggaccgac

SEQ ID NO: 41528 - RNA, 22 nt, Artificial Sequence
  Synthetic
aacaaaauguacaaggaccgac

SEQ ID NO: 41529 - RNA, 23 nt, Artificial Sequence
  Synthetic
uaacaaaauguacaaggaccgac

SEQ ID NO: 41530 - RNA, 24 nt, Artificial Sequence
  Synthetic
uuaacaaaauguacaaggaccgac

SEQ ID NO: 41531 - RNA, 18 nt, Artificial Sequence
  Synthetic
cauagaggcaacagcgac

SEQ ID NO: 41532 - RNA, 19 nt, Artificial Sequence
  Synthetic
ccauagaggcaacagcgac

SEQ ID NO: 41533 - RNA, 20 nt, Artificial Sequence
  Synthetic
accauagaggcaacagcgac

SEQ ID NO: 41534 - RNA, 21 nt, Artificial Sequence
  Synthetic
caccauagaggcaacagcgac

SEQ ID NO: 41535 - RNA, 22 nt, Artificial Sequence
  Synthetic
acaccauagaggcaacagcgac

SEQ ID NO: 41536 - RNA, 24 nt, Artificial Sequence
  Synthetic
agacaccauagaggcaacagcgac

SEQ ID NO: 41537 - RNA, 18 nt, Artificial Sequence
  Synthetic
ugcguuuuccaaugcgac

SEQ ID NO: 41538 - RNA, 19 nt, Artificial Sequence
  Synthetic
cugcguuuuccaaugcgac

SEQ ID NO: 41539 - RNA, 20 nt, Artificial Sequence
  Synthetic
ucugcguuuuccaaugcgac

SEQ ID NO: 41540 - RNA, 21 nt, Artificial Sequence
  Synthetic
aucugcguuuuccaaugcgac

SEQ ID NO: 41541 - RNA, 22 nt, Artificial Sequence
  Synthetic
uaucugcguuuuccaaugcgac

SEQ ID NO: 41542 - RNA, 23 nt, Artificial Sequence
  Synthetic
auaucugcguuuuccaaugcgac

SEQ ID NO: 41543 - RNA, 24 nt, Artificial Sequence
  Synthetic
aauaucugcguuuuccaaugcgac

SEQ ID NO: 41544 - RNA, 19 nt, Artificial Sequence
  Synthetic
agauaugauuuguaucgac

SEQ ID NO: 41545 - RNA, 20 nt, Artificial Sequence
  Synthetic
aagauaugauuuguaucgac

SEQ ID NO: 41546 - RNA, 21 nt, Artificial Sequence
  Synthetic
caagauaugauuuguaucgac

SEQ ID NO: 41547 - RNA, 22 nt, Artificial Sequence
  Synthetic
ucaagauaugauuuguaucgac

SEQ ID NO: 41548 - RNA, 23 nt, Artificial Sequence
  Synthetic
aucaagauaugauuuguaucgac

SEQ ID NO: 41549 - RNA, 24 nt, Artificial Sequence
  Synthetic
aaucaagauaugauuuguaucgac

SEQ ID NO: 41550 - RNA, 19 nt, Artificial Sequence
  Synthetic
cgauccuugaaccaaggac

SEQ ID NO: 41551 - RNA, 20 nt, Artificial Sequence
  Synthetic
ucgauccuugaaccaaggac

SEQ ID NO: 41552 - RNA, 21 nt, Artificial Sequence
  Synthetic
uucgauccuugaaccaaggac

SEQ ID NO: 41553 - RNA, 23 nt, Artificial Sequence
  Synthetic
uguucgauccuugaaccaaggac

SEQ ID NO: 41554 - RNA, 21 nt, Artificial Sequence
  Synthetic
cuauuuuaaaauauuaaggac

SEQ ID NO: 41555 - RNA, 22 nt, Artificial Sequence
  Synthetic
ccuauuuuaaaauauuaaggac

SEQ ID NO: 41556 - RNA, 23 nt, Artificial Sequence
  Synthetic
uccuauuuuaaaauauuaaggac

SEQ ID NO: 41557 - RNA, 24 nt, Artificial Sequence
  Synthetic
auccuauuuuaaaauauuaaggac

SEQ ID NO: 41558 - RNA, 19 nt, Artificial Sequence
  Synthetic
ugugcagugccuugaggac

SEQ ID NO: 41559 - RNA, 21 nt, Artificial Sequence
  Synthetic
ugugugcagugccuugaggac

SEQ ID NO: 41560 - RNA, 22 nt, Artificial Sequence
  Synthetic
cugugugcagugccuugaggac

SEQ ID NO: 41561 - RNA, 23 nt, Artificial Sequence
  Synthetic
ucugugugcagugccuugaggac

SEQ ID NO: 41562 - RNA, 24 nt, Artificial Sequence
  Synthetic
uucugugugcagugccuugaggac

SEQ ID NO: 41563 - RNA, 18 nt, Artificial Sequence
  Synthetic
uaaucuugguuuuaggac

SEQ ID NO: 41564 - RNA, 19 nt, Artificial Sequence
  Synthetic
cuaaucuugguuuuaggac

SEQ ID NO: 41565 - RNA, 20 nt, Artificial Sequence
  Synthetic
ccuaaucuugguuuuaggac

SEQ ID NO: 41566 - RNA, 22 nt, Artificial Sequence
  Synthetic
ugccuaaucuugguuuuaggac

SEQ ID NO: 41567 - RNA, 23 nt, Artificial Sequence
  Synthetic
uugccuaaucuugguuuuaggac

SEQ ID NO: 41568 - RNA, 24 nt, Artificial Sequence
  Synthetic
uuugccuaaucuugguuuuaggac

SEQ ID NO: 41569 - RNA, 18 nt, Artificial Sequence
  Synthetic
ccuagucccuauagggac

SEQ ID NO: 41570 - RNA, 19 nt, Artificial Sequence
  Synthetic
accuagucccuauagggac

SEQ ID NO: 41571 - RNA, 20 nt, Artificial Sequence
  Synthetic
aaccuagucccuauagggac

SEQ ID NO: 41572 - RNA, 21 nt, Artificial Sequence
  Synthetic
caaccuagucccuauagggac

SEQ ID NO: 41573 - RNA, 22 nt, Artificial Sequence
  Synthetic
acaaccuagucccuauagggac

SEQ ID NO: 41574 - RNA, 23 nt, Artificial Sequence
  Synthetic
uacaaccuagucccuauagggac

SEQ ID NO: 41575 - RNA, 24 nt, Artificial Sequence
  Synthetic
uuacaaccuagucccuauagggac

SEQ ID NO: 41576 - RNA, 18 nt, Artificial Sequence
  Synthetic
aaaauacuuuguagggac

SEQ ID NO: 41577 - RNA, 21 nt, Artificial Sequence
  Synthetic
aggaaaauacuuuguagggac

SEQ ID NO: 41578 - RNA, 22 nt, Artificial Sequence
  Synthetic
aaggaaaauacuuuguagggac

SEQ ID NO: 41579 - RNA, 23 nt, Artificial Sequence
  Synthetic
aaaggaaaauacuuuguagggac

SEQ ID NO: 41580 - RNA, 24 nt, Artificial Sequence
  Synthetic
aaaaggaaaauacuuuguagggac

SEQ ID NO: 41581 - RNA, 18 nt, Artificial Sequence
  Synthetic
aaugggcaaaaacgggac

SEQ ID NO: 41582 - RNA, 19 nt, Artificial Sequence
  Synthetic
caaugggcaaaaacgggac

SEQ ID NO: 41583 - RNA, 20 nt, Artificial Sequence
  Synthetic
ucaaugggcaaaaacgggac

SEQ ID NO: 41584 - RNA, 21 nt, Artificial Sequence
  Synthetic
cucaaugggcaaaaacgggac

SEQ ID NO: 41585 - RNA, 23 nt, Artificial Sequence
  Synthetic
ugcucaaugggcaaaaacgggac

SEQ ID NO: 41586 - RNA, 24 nt, Artificial Sequence
  Synthetic
cugcucaaugggcaaaaacgggac

SEQ ID NO: 41587 - RNA, 18 nt, Artificial Sequence
  Synthetic
ccaacuuucuggggggac

SEQ ID NO: 41588 - RNA, 19 nt, Artificial Sequence
  Synthetic
uccaacuuucuggggggac

SEQ ID NO: 41589 - RNA, 20 nt, Artificial Sequence
  Synthetic
cuccaacuuucuggggggac

SEQ ID NO: 41590 - RNA, 21 nt, Artificial Sequence
  Synthetic
acuccaacuuucuggggggac

SEQ ID NO: 41591 - RNA, 23 nt, Artificial Sequence
  Synthetic
ugacuccaacuuucuggggggac

SEQ ID NO: 41592 - RNA, 18 nt, Artificial Sequence
  Synthetic
agggggcacugcugggac

SEQ ID NO: 41593 - RNA, 20 nt, Artificial Sequence
  Synthetic
agagggggcacugcugggac

SEQ ID NO: 41594 - RNA, 21 nt, Artificial Sequence
  Synthetic
aagagggggcacugcugggac

SEQ ID NO: 41595 - RNA, 22 nt, Artificial Sequence
  Synthetic
uaagagggggcacugcugggac

SEQ ID NO: 41596 - RNA, 23 nt, Artificial Sequence
  Synthetic
cuaagagggggcacugcugggac

SEQ ID NO: 41597 - RNA, 24 nt, Artificial Sequence
  Synthetic
ucuaagagggggcacugcugggac

SEQ ID NO: 41598 - RNA, 18 nt, Artificial Sequence
  Synthetic
uguuuuuuucguugggac

SEQ ID NO: 41599 - RNA, 19 nt, Artificial Sequence
  Synthetic
uuguuuuuuucguugggac

SEQ ID NO: 41600 - RNA, 21 nt, Artificial Sequence
  Synthetic
uguuguuuuuuucguugggac

SEQ ID NO: 41601 - RNA, 22 nt, Artificial Sequence
  Synthetic
cuguuguuuuuuucguugggac

SEQ ID NO: 41602 - RNA, 23 nt, Artificial Sequence
  Synthetic
ccuguuguuuuuuucguugggac

SEQ ID NO: 41603 - RNA, 24 nt, Artificial Sequence
  Synthetic
cccuguuguuuuuuucguugggac

SEQ ID NO: 41604 - RNA, 18 nt, Artificial Sequence
  Synthetic
uacuuagugcugauggac

SEQ ID NO: 41605 - RNA, 19 nt, Artificial Sequence
  Synthetic
uuacuuagugcugauggac

SEQ ID NO: 41606 - RNA, 20 nt, Artificial Sequence
  Synthetic
uuuacuuagugcugauggac

SEQ ID NO: 41607 - RNA, 21 nt, Artificial Sequence
  Synthetic
auuuacuuagugcugauggac

SEQ ID NO: 41608 - RNA, 22 nt, Artificial Sequence
  Synthetic
aauuuacuuagugcugauggac

SEQ ID NO: 41609 - RNA, 23 nt, Artificial Sequence
  Synthetic
caauuuacuuagugcugauggac

SEQ ID NO: 41610 - RNA, 24 nt, Artificial Sequence
  Synthetic
ucaauuuacuuagugcugauggac

SEQ ID NO: 41611 - RNA, 22 nt, Artificial Sequence
  Synthetic
agaaggaaaugauuacuuggac

SEQ ID NO: 41612 - RNA, 23 nt, Artificial Sequence
  Synthetic
cagaaggaaaugauuacuuggac

SEQ ID NO: 41613 - RNA, 24 nt, Artificial Sequence
  Synthetic
ucagaaggaaaugauuacuuggac

SEQ ID NO: 41614 - RNA, 19 nt, Artificial Sequence
  Synthetic
agugauguuacuuuuggac

SEQ ID NO: 41615 - RNA, 22 nt, Artificial Sequence
  Synthetic
aggagugauguuacuuuuggac

SEQ ID NO: 41616 - RNA, 23 nt, Artificial Sequence
  Synthetic
caggagugauguuacuuuuggac

SEQ ID NO: 41617 - RNA, 19 nt, Artificial Sequence
  Synthetic
agauauguagagaaaugac

SEQ ID NO: 41618 - RNA, 20 nt, Artificial Sequence
  Synthetic
cagauauguagagaaaugac

SEQ ID NO: 41619 - RNA, 21 nt, Artificial Sequence
  Synthetic
acagauauguagagaaaugac

SEQ ID NO: 41620 - RNA, 22 nt, Artificial Sequence
  Synthetic
uacagauauguagagaaaugac

SEQ ID NO: 41621 - RNA, 23 nt, Artificial Sequence
  Synthetic
auacagauauguagagaaaugac

SEQ ID NO: 41622 - RNA, 24 nt, Artificial Sequence
  Synthetic
aauacagauauguagagaaaugac

SEQ ID NO: 41623 - RNA, 19 nt, Artificial Sequence
  Synthetic
aguuagcucaggaaaugac

SEQ ID NO: 41624 - RNA, 20 nt, Artificial Sequence
  Synthetic
aaguuagcucaggaaaugac

SEQ ID NO: 41625 - RNA, 22 nt, Artificial Sequence
  Synthetic
agaaguuagcucaggaaaugac

SEQ ID NO: 41626 - RNA, 23 nt, Artificial Sequence
  Synthetic
cagaaguuagcucaggaaaugac

SEQ ID NO: 41627 - RNA, 24 nt, Artificial Sequence
  Synthetic
acagaaguuagcucaggaaaugac

SEQ ID NO: 41628 - RNA, 21 nt, Artificial Sequence
  Synthetic
ugggaguauacacuaaaugac

SEQ ID NO: 41629 - RNA, 22 nt, Artificial Sequence
  Synthetic
augggaguauacacuaaaugac

SEQ ID NO: 41630 - RNA, 23 nt, Artificial Sequence
  Synthetic
uaugggaguauacacuaaaugac

SEQ ID NO: 41631 - RNA, 24 nt, Artificial Sequence
  Synthetic
uuaugggaguauacacuaaaugac

SEQ ID NO: 41632 - RNA, 18 nt, Artificial Sequence
  Synthetic
cuaaccaaauuacaugac

SEQ ID NO: 41633 - RNA, 20 nt, Artificial Sequence
  Synthetic
ugcuaaccaaauuacaugac

SEQ ID NO: 41634 - RNA, 21 nt, Artificial Sequence
  Synthetic
uugcuaaccaaauuacaugac

SEQ ID NO: 41635 - RNA, 22 nt, Artificial Sequence
  Synthetic
uuugcuaaccaaauuacaugac

SEQ ID NO: 41636 - RNA, 23 nt, Artificial Sequence
  Synthetic
uuuugcuaaccaaauuacaugac

SEQ ID NO: 41637 - RNA, 24 nt, Artificial Sequence
  Synthetic
cuuuugcuaaccaaauuacaugac

SEQ ID NO: 41638 - RNA, 18 nt, Artificial Sequence
  Synthetic
ucccaugucacagaugac

SEQ ID NO: 41639 - RNA, 19 nt, Artificial Sequence
  Synthetic
uucccaugucacagaugac

SEQ ID NO: 41640 - RNA, 20 nt, Artificial Sequence
  Synthetic
cuucccaugucacagaugac

SEQ ID NO: 41641 - RNA, 22 nt, Artificial Sequence
  Synthetic
agcuucccaugucacagaugac

SEQ ID NO: 41642 - RNA, 23 nt, Artificial Sequence
  Synthetic
cagcuucccaugucacagaugac

SEQ ID NO: 41643 - RNA, 24 nt, Artificial Sequence
  Synthetic
ucagcuucccaugucacagaugac

SEQ ID NO: 41644 - RNA, 18 nt, Artificial Sequence
  Synthetic
uguucuuccagugaugac

SEQ ID NO: 41645 - RNA, 19 nt, Artificial Sequence
  Synthetic
auguucuuccagugaugac

SEQ ID NO: 41646 - RNA, 20 nt, Artificial Sequence
  Synthetic
cauguucuuccagugaugac

SEQ ID NO: 41647 - RNA, 21 nt, Artificial Sequence
  Synthetic
ccauguucuuccagugaugac

SEQ ID NO: 41648 - RNA, 22 nt, Artificial Sequence
  Synthetic
uccauguucuuccagugaugac

SEQ ID NO: 41649 - RNA, 23 nt, Artificial Sequence
  Synthetic
auccauguucuuccagugaugac

SEQ ID NO: 41650 - RNA, 24 nt, Artificial Sequence
  Synthetic
aauccauguucuuccagugaugac

SEQ ID NO: 41651 - RNA, 18 nt, Artificial Sequence
  Synthetic
cuuauauuauacuaugac

SEQ ID NO: 41652 - RNA, 19 nt, Artificial Sequence
  Synthetic
ccuuauauuauacuaugac

SEQ ID NO: 41653 - RNA, 20 nt, Artificial Sequence
  Synthetic
accuuauauuauacuaugac

SEQ ID NO: 41654 - RNA, 21 nt, Artificial Sequence
  Synthetic
uaccuuauauuauacuaugac

SEQ ID NO: 41655 - RNA, 22 nt, Artificial Sequence
  Synthetic
cuaccuuauauuauacuaugac

SEQ ID NO: 41656 - RNA, 24 nt, Artificial Sequence
  Synthetic
agcuaccuuauauuauacuaugac

SEQ ID NO: 41657 - RNA, 18 nt, Artificial Sequence
  Synthetic
uauccauucaucuaugac

SEQ ID NO: 41658 - RNA, 19 nt, Artificial Sequence
  Synthetic
auauccauucaucuaugac

SEQ ID NO: 41659 - RNA, 20 nt, Artificial Sequence
  Synthetic
cauauccauucaucuaugac

SEQ ID NO: 41660 - RNA, 21 nt, Artificial Sequence
  Synthetic
ucauauccauucaucuaugac

SEQ ID NO: 41661 - RNA, 22 nt, Artificial Sequence
  Synthetic
uucauauccauucaucuaugac

SEQ ID NO: 41662 - RNA, 23 nt, Artificial Sequence
  Synthetic
auucauauccauucaucuaugac

SEQ ID NO: 41663 - RNA, 19 nt, Artificial Sequence
  Synthetic
uguuuggaauuagacugac

SEQ ID NO: 41664 - RNA, 20 nt, Artificial Sequence
  Synthetic
auguuuggaauuagacugac

SEQ ID NO: 41665 - RNA, 21 nt, Artificial Sequence
  Synthetic
uauguuuggaauuagacugac

SEQ ID NO: 41666 - RNA, 22 nt, Artificial Sequence
  Synthetic
cuauguuuggaauuagacugac

SEQ ID NO: 41667 - RNA, 23 nt, Artificial Sequence
  Synthetic
ucuauguuuggaauuagacugac

SEQ ID NO: 41668 - RNA, 24 nt, Artificial Sequence
  Synthetic
aucuauguuuggaauuagacugac

SEQ ID NO: 41669 - RNA, 18 nt, Artificial Sequence
  Synthetic
ugauucucuguaccugac

SEQ ID NO: 41670 - RNA, 19 nt, Artificial Sequence
  Synthetic
cugauucucuguaccugac

SEQ ID NO: 41671 - RNA, 20 nt, Artificial Sequence
  Synthetic
ccugauucucuguaccugac

SEQ ID NO: 41672 - RNA, 21 nt, Artificial Sequence
  Synthetic
accugauucucuguaccugac

SEQ ID NO: 41673 - RNA, 22 nt, Artificial Sequence
  Synthetic
uaccugauucucuguaccugac

SEQ ID NO: 41674 - RNA, 23 nt, Artificial Sequence
  Synthetic
uuaccugauucucuguaccugac

SEQ ID NO: 41675 - RNA, 18 nt, Artificial Sequence
  Synthetic
uguucuccuuccccugac

SEQ ID NO: 41676 - RNA, 19 nt, Artificial Sequence
  Synthetic
cuguucuccuuccccugac

SEQ ID NO: 41677 - RNA, 20 nt, Artificial Sequence
  Synthetic
ucuguucuccuuccccugac

SEQ ID NO: 41678 - RNA, 21 nt, Artificial Sequence
  Synthetic
aucuguucuccuuccccugac

SEQ ID NO: 41679 - RNA, 22 nt, Artificial Sequence
  Synthetic
caucuguucuccuuccccugac

SEQ ID NO: 41680 - RNA, 23 nt, Artificial Sequence
  Synthetic
ucaucuguucuccuuccccugac

SEQ ID NO: 41681 - RNA, 19 nt, Artificial Sequence
  Synthetic
agagcaggagcccucugac

SEQ ID NO: 41682 - RNA, 20 nt, Artificial Sequence
  Synthetic
uagagcaggagcccucugac

SEQ ID NO: 41683 - RNA, 21 nt, Artificial Sequence
  Synthetic
auagagcaggagcccucugac

SEQ ID NO: 41684 - RNA, 22 nt, Artificial Sequence
  Synthetic
aauagagcaggagcccucugac

SEQ ID NO: 41685 - RNA, 23 nt, Artificial Sequence
  Synthetic
aaauagagcaggagcccucugac

SEQ ID NO: 41686 - RNA, 24 nt, Artificial Sequence
  Synthetic
aaaauagagcaggagcccucugac

SEQ ID NO: 41687 - RNA, 18 nt, Artificial Sequence
  Synthetic
aaaaaagacuucucugac

SEQ ID NO: 41688 - RNA, 19 nt, Artificial Sequence
  Synthetic
aaaaaaagacuucucugac

SEQ ID NO: 41689 - RNA, 20 nt, Artificial Sequence
  Synthetic
aaaaaaaagacuucucugac

SEQ ID NO: 41690 - RNA, 21 nt, Artificial Sequence
  Synthetic
aaaaaaaaagacuucucugac

SEQ ID NO: 41691 - RNA, 22 nt, Artificial Sequence
  Synthetic
aaaaaaaaaagacuucucugac

SEQ ID NO: 41692 - RNA, 23 nt, Artificial Sequence
  Synthetic
aaaaaaaaaaagacuucucugac

SEQ ID NO: 41693 - RNA, 24 nt, Artificial Sequence
  Synthetic
aaaaaaaaaaaagacuucucugac

SEQ ID NO: 41694 - RNA, 18 nt, Artificial Sequence
  Synthetic
ucaaaccaguucucugac

SEQ ID NO: 41695 - RNA, 19 nt, Artificial Sequence
  Synthetic
cucaaaccaguucucugac

SEQ ID NO: 41696 - RNA, 21 nt, Artificial Sequence
  Synthetic
ugcucaaaccaguucucugac

SEQ ID NO: 41697 - RNA, 22 nt, Artificial Sequence
  Synthetic
uugcucaaaccaguucucugac

SEQ ID NO: 41698 - RNA, 23 nt, Artificial Sequence
  Synthetic
uuugcucaaaccaguucucugac

SEQ ID NO: 41699 - RNA, 18 nt, Artificial Sequence
  Synthetic
ccaguguguuauucugac

SEQ ID NO: 41700 - RNA, 19 nt, Artificial Sequence
  Synthetic
accaguguguuauucugac

SEQ ID NO: 41701 - RNA, 20 nt, Artificial Sequence
  Synthetic
caccaguguguuauucugac

SEQ ID NO: 41702 - RNA, 21 nt, Artificial Sequence
  Synthetic
acaccaguguguuauucugac

SEQ ID NO: 41703 - RNA, 22 nt, Artificial Sequence
  Synthetic
aacaccaguguguuauucugac

SEQ ID NO: 41704 - RNA, 23 nt, Artificial Sequence
  Synthetic
aaacaccaguguguuauucugac

SEQ ID NO: 41705 - RNA, 19 nt, Artificial Sequence
  Synthetic
ugagcagccaaggagugac

SEQ ID NO: 41706 - RNA, 20 nt, Artificial Sequence
  Synthetic
uugagcagccaaggagugac

SEQ ID NO: 41707 - RNA, 21 nt, Artificial Sequence
  Synthetic
auugagcagccaaggagugac

SEQ ID NO: 41708 - RNA, 22 nt, Artificial Sequence
  Synthetic
uauugagcagccaaggagugac

SEQ ID NO: 41709 - RNA, 23 nt, Artificial Sequence
  Synthetic
auauugagcagccaaggagugac

SEQ ID NO: 41710 - RNA, 24 nt, Artificial Sequence
  Synthetic
uauauugagcagccaaggagugac

SEQ ID NO: 41711 - RNA, 18 nt, Artificial Sequence
  Synthetic
uucagcuuuguuagugac

SEQ ID NO: 41712 - RNA, 19 nt, Artificial Sequence
  Synthetic
cuucagcuuuguuagugac

SEQ ID NO: 41713 - RNA, 20 nt, Artificial Sequence
  Synthetic
ccuucagcuuuguuagugac

SEQ ID NO: 41714 - RNA, 21 nt, Artificial Sequence
  Synthetic
uccuucagcuuuguuagugac

SEQ ID NO: 41715 - RNA, 22 nt, Artificial Sequence
  Synthetic
uuccuucagcuuuguuagugac

SEQ ID NO: 41716 - RNA, 23 nt, Artificial Sequence
  Synthetic
cuuccuucagcuuuguuagugac

SEQ ID NO: 41717 - RNA, 24 nt, Artificial Sequence
  Synthetic
ucuuccuucagcuuuguuagugac

SEQ ID NO: 41718 - RNA, 18 nt, Artificial Sequence
  Synthetic
cuucaaaaaauucgugac

SEQ ID NO: 41719 - RNA, 19 nt, Artificial Sequence
  Synthetic
ccuucaaaaaauucgugac

SEQ ID NO: 41720 - RNA, 20 nt, Artificial Sequence
  Synthetic
uccuucaaaaaauucgugac

SEQ ID NO: 41721 - RNA, 21 nt, Artificial Sequence
  Synthetic
auccuucaaaaaauucgugac

SEQ ID NO: 41722 - RNA, 23 nt, Artificial Sequence
  Synthetic
ugauccuucaaaaaauucgugac

SEQ ID NO: 41723 - RNA, 24 nt, Artificial Sequence
  Synthetic
uugauccuucaaaaaauucgugac

SEQ ID NO: 41724 - RNA, 19 nt, Artificial Sequence
  Synthetic
ugaagacagauacugugac

SEQ ID NO: 41725 - RNA, 20 nt, Artificial Sequence
  Synthetic
cugaagacagauacugugac

SEQ ID NO: 41726 - RNA, 22 nt, Artificial Sequence
  Synthetic
agcugaagacagauacugugac

SEQ ID NO: 41727 - RNA, 23 nt, Artificial Sequence
  Synthetic
aagcugaagacagauacugugac

SEQ ID NO: 41728 - RNA, 20 nt, Artificial Sequence
  Synthetic
ugggucauaguuacugugac

SEQ ID NO: 41729 - RNA, 22 nt, Artificial Sequence
  Synthetic
agugggucauaguuacugugac

SEQ ID NO: 41730 - RNA, 23 nt, Artificial Sequence
  Synthetic
uagugggucauaguuacugugac

SEQ ID NO: 41731 - RNA, 24 nt, Artificial Sequence
  Synthetic
cuagugggucauaguuacugugac

SEQ ID NO: 41732 - RNA, 18 nt, Artificial Sequence
  Synthetic
aucuaccaaaguugugac

SEQ ID NO: 41733 - RNA, 19 nt, Artificial Sequence
  Synthetic
caucuaccaaaguugugac

SEQ ID NO: 41734 - RNA, 20 nt, Artificial Sequence
  Synthetic
acaucuaccaaaguugugac

SEQ ID NO: 41735 - RNA, 22 nt, Artificial Sequence
  Synthetic
ugacaucuaccaaaguugugac

SEQ ID NO: 41736 - RNA, 23 nt, Artificial Sequence
  Synthetic
uugacaucuaccaaaguugugac

SEQ ID NO: 41737 - RNA, 24 nt, Artificial Sequence
  Synthetic
uuugacaucuaccaaaguugugac

SEQ ID NO: 41738 - RNA, 22 nt, Artificial Sequence
  Synthetic
aggauccauuucugguugugac

SEQ ID NO: 41739 - RNA, 23 nt, Artificial Sequence
  Synthetic
aaggauccauuucugguugugac

SEQ ID NO: 41740 - RNA, 24 nt, Artificial Sequence
  Synthetic
uaaggauccauuucugguugugac

SEQ ID NO: 41741 - RNA, 18 nt, Artificial Sequence
  Synthetic
augaauuuaguaauugac

SEQ ID NO: 41742 - RNA, 19 nt, Artificial Sequence
  Synthetic
aaugaauuuaguaauugac

SEQ ID NO: 41743 - RNA, 20 nt, Artificial Sequence
  Synthetic
uaaugaauuuaguaauugac

SEQ ID NO: 41744 - RNA, 21 nt, Artificial Sequence
  Synthetic
uuaaugaauuuaguaauugac

SEQ ID NO: 41745 - RNA, 22 nt, Artificial Sequence
  Synthetic
uuuaaugaauuuaguaauugac

SEQ ID NO: 41746 - RNA, 23 nt, Artificial Sequence
  Synthetic
uuuuaaugaauuuaguaauugac

SEQ ID NO: 41747 - RNA, 24 nt, Artificial Sequence
  Synthetic
uuuuuaaugaauuuaguaauugac

SEQ ID NO: 41748 - RNA, 18 nt, Artificial Sequence
  Synthetic
acaggagacguaauugac

SEQ ID NO: 41749 - RNA, 19 nt, Artificial Sequence
  Synthetic
uacaggagacguaauugac

SEQ ID NO: 41750 - RNA, 20 nt, Artificial Sequence
  Synthetic
auacaggagacguaauugac

SEQ ID NO: 41751 - RNA, 21 nt, Artificial Sequence
  Synthetic
aauacaggagacguaauugac

SEQ ID NO: 41752 - RNA, 22 nt, Artificial Sequence
  Synthetic
aaauacaggagacguaauugac

SEQ ID NO: 41753 - RNA, 23 nt, Artificial Sequence
  Synthetic
aaaauacaggagacguaauugac

SEQ ID NO: 41754 - RNA, 24 nt, Artificial Sequence
  Synthetic
aaaaauacaggagacguaauugac

SEQ ID NO: 41755 - RNA, 18 nt, Artificial Sequence
  Synthetic
auugguaggaucauugac

SEQ ID NO: 41756 - RNA, 19 nt, Artificial Sequence
  Synthetic
cauugguaggaucauugac

SEQ ID NO: 41757 - RNA, 20 nt, Artificial Sequence
  Synthetic
acauugguaggaucauugac

SEQ ID NO: 41758 - RNA, 21 nt, Artificial Sequence
  Synthetic
cacauugguaggaucauugac

SEQ ID NO: 41759 - RNA, 22 nt, Artificial Sequence
  Synthetic
ucacauugguaggaucauugac

SEQ ID NO: 41760 - RNA, 23 nt, Artificial Sequence
  Synthetic
cucacauugguaggaucauugac

SEQ ID NO: 41761 - RNA, 21 nt, Artificial Sequence
  Synthetic
uggcuuuggaauuagauugac

SEQ ID NO: 41762 - RNA, 22 nt, Artificial Sequence
  Synthetic
uuggcuuuggaauuagauugac

SEQ ID NO: 41763 - RNA, 23 nt, Artificial Sequence
  Synthetic
cuuggcuuuggaauuagauugac

SEQ ID NO: 41764 - RNA, 18 nt, Artificial Sequence
  Synthetic
uacugcacuacacuugac

SEQ ID NO: 41765 - RNA, 19 nt, Artificial Sequence
  Synthetic
uuacugcacuacacuugac

SEQ ID NO: 41766 - RNA, 20 nt, Artificial Sequence
  Synthetic
uuuacugcacuacacuugac

SEQ ID NO: 41767 - RNA, 21 nt, Artificial Sequence
  Synthetic
uuuuacugcacuacacuugac

SEQ ID NO: 41768 - RNA, 23 nt, Artificial Sequence
  Synthetic
uguuuuacugcacuacacuugac

SEQ ID NO: 41769 - RNA, 24 nt, Artificial Sequence
  Synthetic
uuguuuuacugcacuacacuugac

SEQ ID NO: 41770 - RNA, 19 nt, Artificial Sequence
  Synthetic
ugaaacaacaauauuugac

SEQ ID NO: 41771 - RNA, 20 nt, Artificial Sequence
  Synthetic
cugaaacaacaauauuugac

SEQ ID NO: 41772 - RNA, 21 nt, Artificial Sequence
  Synthetic
ucugaaacaacaauauuugac

SEQ ID NO: 41773 - RNA, 22 nt, Artificial Sequence
  Synthetic
cucugaaacaacaauauuugac

SEQ ID NO: 41774 - RNA, 24 nt, Artificial Sequence
  Synthetic
ugcucugaaacaacaauauuugac

SEQ ID NO: 41775 - RNA, 18 nt, Artificial Sequence
  Synthetic
aacaaacauuuguuugac

SEQ ID NO: 41776 - RNA, 19 nt, Artificial Sequence
  Synthetic
uaacaaacauuuguuugac

SEQ ID NO: 41777 - RNA, 20 nt, Artificial Sequence
  Synthetic
uuaacaaacauuuguuugac

SEQ ID NO: 41778 - RNA, 23 nt, Artificial Sequence
  Synthetic
ugguuaacaaacauuuguuugac

SEQ ID NO: 41779 - RNA, 24 nt, Artificial Sequence
  Synthetic
uugguuaacaaacauuuguuugac

SEQ ID NO: 41780 - RNA, 18 nt, Artificial Sequence
  Synthetic
aacaaggaaggaaaauac

SEQ ID NO: 41781 - RNA, 21 nt, Artificial Sequence
  Synthetic
uggaacaaggaaggaaaauac

SEQ ID NO: 41782 - RNA, 22 nt, Artificial Sequence
  Synthetic
cuggaacaaggaaggaaaauac

SEQ ID NO: 41783 - RNA, 23 nt, Artificial Sequence
  Synthetic
acuggaacaaggaaggaaaauac

SEQ ID NO: 41784 - RNA, 24 nt, Artificial Sequence
  Synthetic
aacuggaacaaggaaggaaaauac

SEQ ID NO: 41785 - RNA, 18 nt, Artificial Sequence
  Synthetic
uugaacgacauaaaauac

SEQ ID NO: 41786 - RNA, 19 nt, Artificial Sequence
  Synthetic
cuugaacgacauaaaauac

SEQ ID NO: 41787 - RNA, 20 nt, Artificial Sequence
  Synthetic
ucuugaacgacauaaaauac

SEQ ID NO: 41788 - RNA, 21 nt, Artificial Sequence
  Synthetic
uucuugaacgacauaaaauac

SEQ ID NO: 41789 - RNA, 22 nt, Artificial Sequence
  Synthetic
uuucuugaacgacauaaaauac

SEQ ID NO: 41790 - RNA, 23 nt, Artificial Sequence
  Synthetic
auuucuugaacgacauaaaauac

SEQ ID NO: 41791 - RNA, 24 nt, Artificial Sequence
  Synthetic
aauuucuugaacgacauaaaauac

SEQ ID NO: 41792 - RNA, 21 nt, Artificial Sequence
  Synthetic
cagagaauacauauaaaauac

SEQ ID NO: 41793 - RNA, 22 nt, Artificial Sequence
  Synthetic
ucagagaauacauauaaaauac

SEQ ID NO: 41794 - RNA, 24 nt, Artificial Sequence
  Synthetic
ugucagagaauacauauaaaauac

SEQ ID NO: 41795 - RNA, 18 nt, Artificial Sequence
  Synthetic
acuguacgugacaaauac

SEQ ID NO: 41796 - RNA, 19 nt, Artificial Sequence
  Synthetic
aacuguacgugacaaauac

SEQ ID NO: 41797 - RNA, 20 nt, Artificial Sequence
  Synthetic
uaacuguacgugacaaauac

SEQ ID NO: 41798 - RNA, 21 nt, Artificial Sequence
  Synthetic
auaacuguacgugacaaauac

SEQ ID NO: 41799 - RNA, 22 nt, Artificial Sequence
  Synthetic
aauaacuguacgugacaaauac

SEQ ID NO: 41800 - RNA, 23 nt, Artificial Sequence
  Synthetic
aaauaacuguacgugacaaauac

SEQ ID NO: 41801 - RNA, 24 nt, Artificial Sequence
  Synthetic
uaaauaacuguacgugacaaauac

SEQ ID NO: 41802 - RNA, 18 nt, Artificial Sequence
  Synthetic
auaaucacauugaaauac

SEQ ID NO: 41803 - RNA, 19 nt, Artificial Sequence
  Synthetic
cauaaucacauugaaauac

SEQ ID NO: 41804 - RNA, 20 nt, Artificial Sequence
  Synthetic
ucauaaucacauugaaauac

SEQ ID NO: 41805 - RNA, 21 nt, Artificial Sequence
  Synthetic
cucauaaucacauugaaauac

SEQ ID NO: 41806 - RNA, 22 nt, Artificial Sequence
  Synthetic
ccucauaaucacauugaaauac

SEQ ID NO: 41807 - RNA, 18 nt, Artificial Sequence
  Synthetic
uuacacuuaaaacaauac

SEQ ID NO: 41808 - RNA, 19 nt, Artificial Sequence
  Synthetic
auuacacuuaaaacaauac

SEQ ID NO: 41809 - RNA, 20 nt, Artificial Sequence
  Synthetic
aauuacacuuaaaacaauac

SEQ ID NO: 41810 - RNA, 21 nt, Artificial Sequence
  Synthetic
uaauuacacuuaaaacaauac

SEQ ID NO: 41811 - RNA, 22 nt, Artificial Sequence
  Synthetic
auaauuacacuuaaaacaauac

SEQ ID NO: 41812 - RNA, 23 nt, Artificial Sequence
  Synthetic
uauaauuacacuuaaaacaauac

SEQ ID NO: 41813 - RNA, 24 nt, Artificial Sequence
  Synthetic
auauaauuacacuuaaaacaauac

SEQ ID NO: 41814 - RNA, 19 nt, Artificial Sequence
  Synthetic
ugaaccaucucugcaauac

SEQ ID NO: 41815 - RNA, 20 nt, Artificial Sequence
  Synthetic
augaaccaucucugcaauac

SEQ ID NO: 41816 - RNA, 21 nt, Artificial Sequence
  Synthetic
aaugaaccaucucugcaauac

SEQ ID NO: 41817 - RNA, 22 nt, Artificial Sequence
  Synthetic
uaaugaaccaucucugcaauac

SEQ ID NO: 41818 - RNA, 23 nt, Artificial Sequence
  Synthetic
auaaugaaccaucucugcaauac

SEQ ID NO: 41819 - RNA, 24 nt, Artificial Sequence
  Synthetic
aauaaugaaccaucucugcaauac

SEQ ID NO: 41820 - RNA, 18 nt, Artificial Sequence
  Synthetic
acugcaaauggucaauac

SEQ ID NO: 41821 - RNA, 19 nt, Artificial Sequence
  Synthetic
uacugcaaauggucaauac

SEQ ID NO: 41822 - RNA, 20 nt, Artificial Sequence
  Synthetic
auacugcaaauggucaauac

SEQ ID NO: 41823 - RNA, 21 nt, Artificial Sequence
  Synthetic
uauacugcaaauggucaauac

SEQ ID NO: 41824 - RNA, 22 nt, Artificial Sequence
  Synthetic
auauacugcaaauggucaauac

SEQ ID NO: 41825 - RNA, 23 nt, Artificial Sequence
  Synthetic
aauauacugcaaauggucaauac

SEQ ID NO: 41826 - RNA, 18 nt, Artificial Sequence
  Synthetic
acugaaauuuaagaauac

SEQ ID NO: 41827 - RNA, 20 nt, Artificial Sequence
  Synthetic
agacugaaauuuaagaauac

SEQ ID NO: 41828 - RNA, 21 nt, Artificial Sequence
  Synthetic
uagacugaaauuuaagaauac

SEQ ID NO: 41829 - RNA, 22 nt, Artificial Sequence
  Synthetic
uuagacugaaauuuaagaauac

SEQ ID NO: 41830 - RNA, 23 nt, Artificial Sequence
  Synthetic
auuagacugaaauuuaagaauac

SEQ ID NO: 41831 - RNA, 24 nt, Artificial Sequence
  Synthetic
uauuagacugaaauuuaagaauac

SEQ ID NO: 41832 - RNA, 18 nt, Artificial Sequence
  Synthetic
uuauuuagaaucuaauac

SEQ ID NO: 41833 - RNA, 19 nt, Artificial Sequence
  Synthetic
uuuauuuagaaucuaauac

SEQ ID NO: 41834 - RNA, 20 nt, Artificial Sequence
  Synthetic
auuuauuuagaaucuaauac

SEQ ID NO: 41835 - RNA, 21 nt, Artificial Sequence
  Synthetic
uauuuauuuagaaucuaauac

SEQ ID NO: 41836 - RNA, 23 nt, Artificial Sequence
  Synthetic
aguauuuauuuagaaucuaauac

SEQ ID NO: 41837 - RNA, 24 nt, Artificial Sequence
  Synthetic
aaguauuuauuuagaaucuaauac

SEQ ID NO: 41838 - RNA, 19 nt, Artificial Sequence
  Synthetic
cgggaaaaucaucuaauac

SEQ ID NO: 41839 - RNA, 20 nt, Artificial Sequence
  Synthetic
ucgggaaaaucaucuaauac

SEQ ID NO: 41840 - RNA, 21 nt, Artificial Sequence
  Synthetic
cucgggaaaaucaucuaauac

SEQ ID NO: 41841 - RNA, 22 nt, Artificial Sequence
  Synthetic
acucgggaaaaucaucuaauac

SEQ ID NO: 41842 - RNA, 24 nt, Artificial Sequence
  Synthetic
agacucgggaaaaucaucuaauac

SEQ ID NO: 41843 - RNA, 18 nt, Artificial Sequence
  Synthetic
uuucuguaagucuaauac

SEQ ID NO: 41844 - RNA, 19 nt, Artificial Sequence
  Synthetic
uuuucuguaagucuaauac

SEQ ID NO: 41845 - RNA, 20 nt, Artificial Sequence
  Synthetic
auuuucuguaagucuaauac

SEQ ID NO: 41846 - RNA, 21 nt, Artificial Sequence
  Synthetic
aauuuucuguaagucuaauac

SEQ ID NO: 41847 - RNA, 22 nt, Artificial Sequence
  Synthetic
caauuuucuguaagucuaauac

SEQ ID NO: 41848 - RNA, 23 nt, Artificial Sequence
  Synthetic
acaauuuucuguaagucuaauac

SEQ ID NO: 41849 - RNA, 24 nt, Artificial Sequence
  Synthetic
cacaauuuucuguaagucuaauac

SEQ ID NO: 41850 - RNA, 19 nt, Artificial Sequence
  Synthetic
agauuuuaaacaguaauac

SEQ ID NO: 41851 - RNA, 20 nt, Artificial Sequence
  Synthetic
uagauuuuaaacaguaauac

SEQ ID NO: 41852 - RNA, 22 nt, Artificial Sequence
  Synthetic
aguagauuuuaaacaguaauac

SEQ ID NO: 41853 - RNA, 23 nt, Artificial Sequence
  Synthetic
uaguagauuuuaaacaguaauac

SEQ ID NO: 41854 - RNA, 24 nt, Artificial Sequence
  Synthetic
cuaguagauuuuaaacaguaauac

SEQ ID NO: 41855 - RNA, 19 nt, Artificial Sequence
  Synthetic
cgguccccagcaguaauac

SEQ ID NO: 41856 - RNA, 20 nt, Artificial Sequence
  Synthetic
acgguccccagcaguaauac

SEQ ID NO: 41857 - RNA, 21 nt, Artificial Sequence
  Synthetic
aacgguccccagcaguaauac

SEQ ID NO: 41858 - RNA, 22 nt, Artificial Sequence
  Synthetic
uaacgguccccagcaguaauac

SEQ ID NO: 41859 - RNA, 23 nt, Artificial Sequence
  Synthetic
auaacgguccccagcaguaauac

SEQ ID NO: 41860 - RNA, 21 nt, Artificial Sequence
  Synthetic
caaaaauauuugauuuaauac

SEQ ID NO: 41861 - RNA, 22 nt, Artificial Sequence
  Synthetic
ccaaaaauauuugauuuaauac

SEQ ID NO: 41862 - RNA, 23 nt, Artificial Sequence
  Synthetic
cccaaaaauauuugauuuaauac

SEQ ID NO: 41863 - RNA, 24 nt, Artificial Sequence
  Synthetic
acccaaaaauauuugauuuaauac

SEQ ID NO: 41864 - RNA, 18 nt, Artificial Sequence
  Synthetic
aaagcagacaauacauac

SEQ ID NO: 41865 - RNA, 20 nt, Artificial Sequence
  Synthetic
ugaaagcagacaauacauac

SEQ ID NO: 41866 - RNA, 21 nt, Artificial Sequence
  Synthetic
augaaagcagacaauacauac

SEQ ID NO: 41867 - RNA, 22 nt, Artificial Sequence
  Synthetic
uaugaaagcagacaauacauac

SEQ ID NO: 41868 - RNA, 24 nt, Artificial Sequence
  Synthetic
aguaugaaagcagacaauacauac

SEQ ID NO: 41869 - RNA, 18 nt, Artificial Sequence
  Synthetic
uggggcuagaaaccauac

SEQ ID NO: 41870 - RNA, 19 nt, Artificial Sequence
  Synthetic
cuggggcuagaaaccauac

SEQ ID NO: 41871 - RNA, 20 nt, Artificial Sequence
  Synthetic
ucuggggcuagaaaccauac

SEQ ID NO: 41872 - RNA, 21 nt, Artificial Sequence
  Synthetic
uucuggggcuagaaaccauac

SEQ ID NO: 41873 - RNA, 22 nt, Artificial Sequence
  Synthetic
cuucuggggcuagaaaccauac

SEQ ID NO: 41874 - RNA, 23 nt, Artificial Sequence
  Synthetic
ccuucuggggcuagaaaccauac

SEQ ID NO: 41875 - RNA, 18 nt, Artificial Sequence
  Synthetic
acaauggcaccaccauac

SEQ ID NO: 41876 - RNA, 20 nt, Artificial Sequence
  Synthetic
agacaauggcaccaccauac

SEQ ID NO: 41877 - RNA, 21 nt, Artificial Sequence
  Synthetic
cagacaauggcaccaccauac

SEQ ID NO: 41878 - RNA, 22 nt, Artificial Sequence
  Synthetic
ucagacaauggcaccaccauac

SEQ ID NO: 41879 - RNA, 23 nt, Artificial Sequence
  Synthetic
uucagacaauggcaccaccauac

SEQ ID NO: 41880 - RNA, 24 nt, Artificial Sequence
  Synthetic
uuucagacaauggcaccaccauac

SEQ ID NO: 41881 - RNA, 19 nt, Artificial Sequence
  Synthetic
agcucacgucugaccauac

SEQ ID NO: 41882 - RNA, 20 nt, Artificial Sequence
  Synthetic
uagcucacgucugaccauac

SEQ ID NO: 41883 - RNA, 21 nt, Artificial Sequence
  Synthetic
auagcucacgucugaccauac

SEQ ID NO: 41884 - RNA, 22 nt, Artificial Sequence
  Synthetic
aauagcucacgucugaccauac

SEQ ID NO: 41885 - RNA, 24 nt, Artificial Sequence
  Synthetic
ugaauagcucacgucugaccauac

SEQ ID NO: 41886 - RNA, 18 nt, Artificial Sequence
  Synthetic
acagauauaccugcauac

SEQ ID NO: 41887 - RNA, 19 nt, Artificial Sequence
  Synthetic
cacagauauaccugcauac

SEQ ID NO: 41888 - RNA, 20 nt, Artificial Sequence
  Synthetic
acacagauauaccugcauac

SEQ ID NO: 41889 - RNA, 21 nt, Artificial Sequence
  Synthetic
aacacagauauaccugcauac

SEQ ID NO: 41890 - RNA, 22 nt, Artificial Sequence
  Synthetic
caacacagauauaccugcauac

SEQ ID NO: 41891 - RNA, 23 nt, Artificial Sequence
  Synthetic
acaacacagauauaccugcauac

SEQ ID NO: 41892 - RNA, 24 nt, Artificial Sequence
  Synthetic
aacaacacagauauaccugcauac

SEQ ID NO: 41893 - RNA, 21 nt, Artificial Sequence
  Synthetic
uaugccagguacuugggauac

SEQ ID NO: 41894 - RNA, 22 nt, Artificial Sequence
  Synthetic
auaugccagguacuugggauac

SEQ ID NO: 41895 - RNA, 23 nt, Artificial Sequence
  Synthetic
uauaugccagguacuugggauac

SEQ ID NO: 41896 - RNA, 24 nt, Artificial Sequence
  Synthetic
auauaugccagguacuugggauac

SEQ ID NO: 41897 - RNA, 18 nt, Artificial Sequence
  Synthetic
uuuucagaaacuggauac

SEQ ID NO: 41898 - RNA, 19 nt, Artificial Sequence
  Synthetic
cuuuucagaaacuggauac

SEQ ID NO: 41899 - RNA, 20 nt, Artificial Sequence
  Synthetic
ccuuuucagaaacuggauac

SEQ ID NO: 41900 - RNA, 21 nt, Artificial Sequence
  Synthetic
accuuuucagaaacuggauac

SEQ ID NO: 41901 - RNA, 22 nt, Artificial Sequence
  Synthetic
uaccuuuucagaaacuggauac

SEQ ID NO: 41902 - RNA, 23 nt, Artificial Sequence
  Synthetic
cuaccuuuucagaaacuggauac

SEQ ID NO: 41903 - RNA, 24 nt, Artificial Sequence
  Synthetic
acuaccuuuucagaaacuggauac

SEQ ID NO: 41904 - RNA, 18 nt, Artificial Sequence
  Synthetic
cugacgcccacuggauac

SEQ ID NO: 41905 - RNA, 20 nt, Artificial Sequence
  Synthetic
ugcugacgcccacuggauac

SEQ ID NO: 41906 - RNA, 21 nt, Artificial Sequence
  Synthetic
cugcugacgcccacuggauac

SEQ ID NO: 41907 - RNA, 22 nt, Artificial Sequence
  Synthetic
ucugcugacgcccacuggauac

SEQ ID NO: 41908 - RNA, 23 nt, Artificial Sequence
  Synthetic
cucugcugacgcccacuggauac

SEQ ID NO: 41909 - RNA, 19 nt, Artificial Sequence
  Synthetic
aggagaacugaacugauac

SEQ ID NO: 41910 - RNA, 20 nt, Artificial Sequence
  Synthetic
caggagaacugaacugauac

SEQ ID NO: 41911 - RNA, 21 nt, Artificial Sequence
  Synthetic
ccaggagaacugaacugauac

SEQ ID NO: 41912 - RNA, 22 nt, Artificial Sequence
  Synthetic
uccaggagaacugaacugauac

SEQ ID NO: 41913 - RNA, 23 nt, Artificial Sequence
  Synthetic
uuccaggagaacugaacugauac

SEQ ID NO: 41914 - RNA, 24 nt, Artificial Sequence
  Synthetic
uuuccaggagaacugaacugauac

SEQ ID NO: 41915 - RNA, 18 nt, Artificial Sequence
  Synthetic
uucacaaacccaauauac

SEQ ID NO: 41916 - RNA, 19 nt, Artificial Sequence
  Synthetic
uuucacaaacccaauauac

SEQ ID NO: 41917 - RNA, 20 nt, Artificial Sequence
  Synthetic
cuuucacaaacccaauauac

SEQ ID NO: 41918 - RNA, 21 nt, Artificial Sequence
  Synthetic
acuuucacaaacccaauauac

SEQ ID NO: 41919 - RNA, 23 nt, Artificial Sequence
  Synthetic
agacuuucacaaacccaauauac

SEQ ID NO: 41920 - RNA, 24 nt, Artificial Sequence
  Synthetic
uagacuuucacaaacccaauauac

SEQ ID NO: 41921 - RNA, 19 nt, Artificial Sequence
  Synthetic
ugcaagauaaucaauauac

SEQ ID NO: 41922 - RNA, 20 nt, Artificial Sequence
  Synthetic
uugcaagauaaucaauauac

SEQ ID NO: 41923 - RNA, 21 nt, Artificial Sequence
  Synthetic
cuugcaagauaaucaauauac

SEQ ID NO: 41924 - RNA, 23 nt, Artificial Sequence
  Synthetic
agcuugcaagauaaucaauauac

SEQ ID NO: 41925 - RNA, 24 nt, Artificial Sequence
  Synthetic
aagcuugcaagauaaucaauauac

SEQ ID NO: 41926 - RNA, 18 nt, Artificial Sequence
  Synthetic
cuacaugggagaauauac

SEQ ID NO: 41927 - RNA, 19 nt, Artificial Sequence
  Synthetic
ucuacaugggagaauauac

SEQ ID NO: 41928 - RNA, 21 nt, Artificial Sequence
  Synthetic
ugucuacaugggagaauauac

SEQ ID NO: 41929 - RNA, 22 nt, Artificial Sequence
  Synthetic
augucuacaugggagaauauac

SEQ ID NO: 41930 - RNA, 23 nt, Artificial Sequence
  Synthetic
uaugucuacaugggagaauauac

SEQ ID NO: 41931 - RNA, 18 nt, Artificial Sequence
  Synthetic
aaggcaauaaucauauac

SEQ ID NO: 41932 - RNA, 19 nt, Artificial Sequence
  Synthetic
uaaggcaauaaucauauac

SEQ ID NO: 41933 - RNA, 20 nt, Artificial Sequence
  Synthetic
uuaaggcaauaaucauauac

SEQ ID NO: 41934 - RNA, 21 nt, Artificial Sequence
  Synthetic
uuuaaggcaauaaucauauac

SEQ ID NO: 41935 - RNA, 22 nt, Artificial Sequence
  Synthetic
uuuuaaggcaauaaucauauac

SEQ ID NO: 41936 - RNA, 23 nt, Artificial Sequence
  Synthetic
auuuuaaggcaauaaucauauac

SEQ ID NO: 41937 - RNA, 24 nt, Artificial Sequence
  Synthetic
uauuuuaaggcaauaaucauauac

SEQ ID NO: 41938 - RNA, 18 nt, Artificial Sequence
  Synthetic
uuccagagauuuauauac

SEQ ID NO: 41939 - RNA, 19 nt, Artificial Sequence
  Synthetic
cuuccagagauuuauauac

SEQ ID NO: 41940 - RNA, 20 nt, Artificial Sequence
  Synthetic
ucuuccagagauuuauauac

SEQ ID NO: 41941 - RNA, 21 nt, Artificial Sequence
  Synthetic
cucuuccagagauuuauauac

SEQ ID NO: 41942 - RNA, 22 nt, Artificial Sequence
  Synthetic
ucucuuccagagauuuauauac

SEQ ID NO: 41943 - RNA, 23 nt, Artificial Sequence
  Synthetic
cucucuuccagagauuuauauac

SEQ ID NO: 41944 - RNA, 18 nt, Artificial Sequence
  Synthetic
aggaccugugaccuauac

SEQ ID NO: 41945 - RNA, 19 nt, Artificial Sequence
  Synthetic
caggaccugugaccuauac

SEQ ID NO: 41946 - RNA, 20 nt, Artificial Sequence
  Synthetic
acaggaccugugaccuauac

SEQ ID NO: 41947 - RNA, 21 nt, Artificial Sequence
  Synthetic
aacaggaccugugaccuauac

SEQ ID NO: 41948 - RNA, 22 nt, Artificial Sequence
  Synthetic
uaacaggaccugugaccuauac

SEQ ID NO: 41949 - RNA, 23 nt, Artificial Sequence
  Synthetic
auaacaggaccugugaccuauac

SEQ ID NO: 41950 - RNA, 24 nt, Artificial Sequence
  Synthetic
cauaacaggaccugugaccuauac

SEQ ID NO: 41951 - RNA, 19 nt, Artificial Sequence
  Synthetic
ugacuuagagcugcuauac

SEQ ID NO: 41952 - RNA, 20 nt, Artificial Sequence
  Synthetic
uugacuuagagcugcuauac

SEQ ID NO: 41953 - RNA, 21 nt, Artificial Sequence
  Synthetic
uuugacuuagagcugcuauac

SEQ ID NO: 41954 - RNA, 22 nt, Artificial Sequence
  Synthetic
cuuugacuuagagcugcuauac

SEQ ID NO: 41955 - RNA, 23 nt, Artificial Sequence
  Synthetic
ucuuugacuuagagcugcuauac

SEQ ID NO: 41956 - RNA, 24 nt, Artificial Sequence
  Synthetic
uucuuugacuuagagcugcuauac

SEQ ID NO: 41957 - RNA, 18 nt, Artificial Sequence
  Synthetic
cagcuaaggcuucuauac

SEQ ID NO: 41958 - RNA, 19 nt, Artificial Sequence
  Synthetic
ccagcuaaggcuucuauac

SEQ ID NO: 41959 - RNA, 20 nt, Artificial Sequence
  Synthetic
uccagcuaaggcuucuauac

SEQ ID NO: 41960 - RNA, 21 nt, Artificial Sequence
  Synthetic
auccagcuaaggcuucuauac

SEQ ID NO: 41961 - RNA, 22 nt, Artificial Sequence
  Synthetic
cauccagcuaaggcuucuauac

SEQ ID NO: 41962 - RNA, 23 nt, Artificial Sequence
  Synthetic
ucauccagcuaaggcuucuauac

SEQ ID NO: 41963 - RNA, 24 nt, Artificial Sequence
  Synthetic
cucauccagcuaaggcuucuauac

SEQ ID NO: 41964 - RNA, 20 nt, Artificial Sequence
  Synthetic
cgggaagggucaacuuauac

SEQ ID NO: 41965 - RNA, 21 nt, Artificial Sequence
  Synthetic
ucgggaagggucaacuuauac

SEQ ID NO: 41966 - RNA, 22 nt, Artificial Sequence
  Synthetic
cucgggaagggucaacuuauac

SEQ ID NO: 41967 - RNA, 23 nt, Artificial Sequence
  Synthetic
ccucgggaagggucaacuuauac

SEQ ID NO: 41968 - RNA, 24 nt, Artificial Sequence
  Synthetic
cccucgggaagggucaacuuauac

SEQ ID NO: 41969 - RNA, 18 nt, Artificial Sequence
  Synthetic
ucuuuuaauuccuuauac

SEQ ID NO: 41970 - RNA, 20 nt, Artificial Sequence
  Synthetic
ugucuuuuaauuccuuauac

SEQ ID NO: 41971 - RNA, 21 nt, Artificial Sequence
  Synthetic
augucuuuuaauuccuuauac

SEQ ID NO: 41972 - RNA, 22 nt, Artificial Sequence
  Synthetic
uaugucuuuuaauuccuuauac

SEQ ID NO: 41973 - RNA, 23 nt, Artificial Sequence
  Synthetic
auaugucuuuuaauuccuuauac

SEQ ID NO: 41974 - RNA, 24 nt, Artificial Sequence
  Synthetic
aauaugucuuuuaauuccuuauac

SEQ ID NO: 41975 - RNA, 20 nt, Artificial Sequence
  Synthetic
uggcuuuagauauguuauac

SEQ ID NO: 41976 - RNA, 21 nt, Artificial Sequence
  Synthetic
auggcuuuagauauguuauac

SEQ ID NO: 41977 - RNA, 23 nt, Artificial Sequence
  Synthetic
ugauggcuuuagauauguuauac

SEQ ID NO: 41978 - RNA, 24 nt, Artificial Sequence
  Synthetic
cugauggcuuuagauauguuauac

SEQ ID NO: 41979 - RNA, 18 nt, Artificial Sequence
  Synthetic
agaugacuuauguuauac

SEQ ID NO: 41980 - RNA, 19 nt, Artificial Sequence
  Synthetic
uagaugacuuauguuauac

SEQ ID NO: 41981 - RNA, 20 nt, Artificial Sequence
  Synthetic
cuagaugacuuauguuauac

SEQ ID NO: 41982 - RNA, 21 nt, Artificial Sequence
  Synthetic
acuagaugacuuauguuauac

SEQ ID NO: 41983 - RNA, 23 nt, Artificial Sequence
  Synthetic
agacuagaugacuuauguuauac

SEQ ID NO: 41984 - RNA, 18 nt, Artificial Sequence
  Synthetic
cagugagagcagaacuac

SEQ ID NO: 41985 - RNA, 19 nt, Artificial Sequence
  Synthetic
acagugagagcagaacuac

SEQ ID NO: 41986 - RNA, 20 nt, Artificial Sequence
  Synthetic
aacagugagagcagaacuac

SEQ ID NO: 41987 - RNA, 21 nt, Artificial Sequence
  Synthetic
uaacagugagagcagaacuac

SEQ ID NO: 41988 - RNA, 22 nt, Artificial Sequence
  Synthetic
uuaacagugagagcagaacuac

SEQ ID NO: 41989 - RNA, 23 nt, Artificial Sequence
  Synthetic
auuaacagugagagcagaacuac

SEQ ID NO: 41990 - RNA, 24 nt, Artificial Sequence
  Synthetic
uauuaacagugagagcagaacuac

SEQ ID NO: 41991 - RNA, 18 nt, Artificial Sequence
  Synthetic
uauaaacugaugaacuac

SEQ ID NO: 41992 - RNA, 19 nt, Artificial Sequence
  Synthetic
uuauaaacugaugaacuac

SEQ ID NO: 41993 - RNA, 20 nt, Artificial Sequence
  Synthetic
uuuauaaacugaugaacuac

SEQ ID NO: 41994 - RNA, 21 nt, Artificial Sequence
  Synthetic
uuuuauaaacugaugaacuac

SEQ ID NO: 41995 - RNA, 23 nt, Artificial Sequence
  Synthetic
aguuuuauaaacugaugaacuac

SEQ ID NO: 41996 - RNA, 24 nt, Artificial Sequence
  Synthetic
uaguuuuauaaacugaugaacuac

SEQ ID NO: 41997 - RNA, 20 nt, Artificial Sequence
  Synthetic
aggggauauaggaccacuac

SEQ ID NO: 41998 - RNA, 21 nt, Artificial Sequence
  Synthetic
aaggggauauaggaccacuac

SEQ ID NO: 41999 - RNA, 22 nt, Artificial Sequence
  Synthetic
uaaggggauauaggaccacuac

SEQ ID NO: 42000 - RNA, 23 nt, Artificial Sequence
  Synthetic
uuaaggggauauaggaccacuac

SEQ ID NO: 42001 - RNA, 19 nt, Artificial Sequence
  Synthetic
aguuccuccaugggacuac

SEQ ID NO: 42002 - RNA, 21 nt, Artificial Sequence
  Synthetic
cgaguuccuccaugggacuac

SEQ ID NO: 42003 - RNA, 22 nt, Artificial Sequence
  Synthetic
acgaguuccuccaugggacuac

SEQ ID NO: 42004 - RNA, 23 nt, Artificial Sequence
  Synthetic
aacgaguuccuccaugggacuac

SEQ ID NO: 42005 - RNA, 24 nt, Artificial Sequence
  Synthetic
aaacgaguuccuccaugggacuac

SEQ ID NO: 42006 - RNA, 18 nt, Artificial Sequence
  Synthetic
aaccuguacguauacuac

SEQ ID NO: 42007 - RNA, 19 nt, Artificial Sequence
  Synthetic
aaaccuguacguauacuac

SEQ ID NO: 42008 - RNA, 20 nt, Artificial Sequence
  Synthetic
caaaccuguacguauacuac

SEQ ID NO: 42009 - RNA, 21 nt, Artificial Sequence
  Synthetic
acaaaccuguacguauacuac

SEQ ID NO: 42010 - RNA, 22 nt, Artificial Sequence
  Synthetic
aacaaaccuguacguauacuac

SEQ ID NO: 42011 - RNA, 23 nt, Artificial Sequence
  Synthetic
uaacaaaccuguacguauacuac

SEQ ID NO: 42012 - RNA, 18 nt, Artificial Sequence
  Synthetic
acucagaaccucaccuac

SEQ ID NO: 42013 - RNA, 19 nt, Artificial Sequence
  Synthetic
cacucagaaccucaccuac

SEQ ID NO: 42014 - RNA, 21 nt, Artificial Sequence
  Synthetic
ugcacucagaaccucaccuac

SEQ ID NO: 42015 - RNA, 22 nt, Artificial Sequence
  Synthetic
augcacucagaaccucaccuac

SEQ ID NO: 42016 - RNA, 24 nt, Artificial Sequence
  Synthetic
agaugcacucagaaccucaccuac

SEQ ID NO: 42017 - RNA, 18 nt, Artificial Sequence
  Synthetic
ucaccaugauguaccuac

SEQ ID NO: 42018 - RNA, 19 nt, Artificial Sequence
  Synthetic
cucaccaugauguaccuac

SEQ ID NO: 42019 - RNA, 20 nt, Artificial Sequence
  Synthetic
ucucaccaugauguaccuac

SEQ ID NO: 42020 - RNA, 21 nt, Artificial Sequence
  Synthetic
cucucaccaugauguaccuac

SEQ ID NO: 42021 - RNA, 22 nt, Artificial Sequence
  Synthetic
ccucucaccaugauguaccuac

SEQ ID NO: 42022 - RNA, 24 nt, Artificial Sequence
  Synthetic
ugccucucaccaugauguaccuac

SEQ ID NO: 42023 - RNA, 18 nt, Artificial Sequence
  Synthetic
ucucaugcaauugccuac

SEQ ID NO: 42024 - RNA, 19 nt, Artificial Sequence
  Synthetic
cucucaugcaauugccuac

SEQ ID NO: 42025 - RNA, 20 nt, Artificial Sequence
  Synthetic
acucucaugcaauugccuac

SEQ ID NO: 42026 - RNA, 21 nt, Artificial Sequence
  Synthetic
aacucucaugcaauugccuac

SEQ ID NO: 42027 - RNA, 24 nt, Artificial Sequence
  Synthetic
aggaacucucaugcaauugccuac

SEQ ID NO: 42028 - RNA, 22 nt, Artificial Sequence
  Synthetic
cgcugaugaaacauuuuccuac

SEQ ID NO: 42029 - RNA, 23 nt, Artificial Sequence
  Synthetic
acgcugaugaaacauuuuccuac

SEQ ID NO: 42030 - RNA, 24 nt, Artificial Sequence
  Synthetic
aacgcugaugaaacauuuuccuac

SEQ ID NO: 42031 - RNA, 18 nt, Artificial Sequence
  Synthetic
uuuuucugaggaagcuac

SEQ ID NO: 42032 - RNA, 19 nt, Artificial Sequence
  Synthetic
auuuuucugaggaagcuac

SEQ ID NO: 42033 - RNA, 20 nt, Artificial Sequence
  Synthetic
cauuuuucugaggaagcuac

SEQ ID NO: 42034 - RNA, 21 nt, Artificial Sequence
  Synthetic
ucauuuuucugaggaagcuac

SEQ ID NO: 42035 - RNA, 22 nt, Artificial Sequence
  Synthetic
aucauuuuucugaggaagcuac

SEQ ID NO: 42036 - RNA, 23 nt, Artificial Sequence
  Synthetic
aaucauuuuucugaggaagcuac

SEQ ID NO: 42037 - RNA, 24 nt, Artificial Sequence
  Synthetic
aaaucauuuuucugaggaagcuac

SEQ ID NO: 42038 - RNA, 18 nt, Artificial Sequence
  Synthetic
cuuuccugagauagcuac

SEQ ID NO: 42039 - RNA, 19 nt, Artificial Sequence
  Synthetic
ucuuuccugagauagcuac

SEQ ID NO: 42040 - RNA, 20 nt, Artificial Sequence
  Synthetic
uucuuuccugagauagcuac

SEQ ID NO: 42041 - RNA, 22 nt, Artificial Sequence
  Synthetic
uguucuuuccugagauagcuac

SEQ ID NO: 42042 - RNA, 23 nt, Artificial Sequence
  Synthetic
uuguucuuuccugagauagcuac

SEQ ID NO: 42043 - RNA, 24 nt, Artificial Sequence
  Synthetic
auuguucuuuccugagauagcuac

SEQ ID NO: 42044 - RNA, 18 nt, Artificial Sequence
  Synthetic
uagagacuagcuggcuac

SEQ ID NO: 42045 - RNA, 19 nt, Artificial Sequence
  Synthetic
auagagacuagcuggcuac

SEQ ID NO: 42046 - RNA, 20 nt, Artificial Sequence
  Synthetic
aauagagacuagcuggcuac

SEQ ID NO: 42047 - RNA, 21 nt, Artificial Sequence
  Synthetic
aaauagagacuagcuggcuac

SEQ ID NO: 42048 - RNA, 22 nt, Artificial Sequence
  Synthetic
aaaauagagacuagcuggcuac

SEQ ID NO: 42049 - RNA, 23 nt, Artificial Sequence
  Synthetic
uaaaauagagacuagcuggcuac

SEQ ID NO: 42050 - RNA, 24 nt, Artificial Sequence
  Synthetic
auaaaauagagacuagcuggcuac

SEQ ID NO: 42051 - RNA, 18 nt, Artificial Sequence
  Synthetic
ugaccuucccgcugcuac

SEQ ID NO: 42052 - RNA, 19 nt, Artificial Sequence
  Synthetic
augaccuucccgcugcuac

SEQ ID NO: 42053 - RNA, 20 nt, Artificial Sequence
  Synthetic
uaugaccuucccgcugcuac

SEQ ID NO: 42054 - RNA, 21 nt, Artificial Sequence
  Synthetic
auaugaccuucccgcugcuac

SEQ ID NO: 42055 - RNA, 22 nt, Artificial Sequence
  Synthetic
cauaugaccuucccgcugcuac

SEQ ID NO: 42056 - RNA, 23 nt, Artificial Sequence
  Synthetic
ccauaugaccuucccgcugcuac

SEQ ID NO: 42057 - RNA, 24 nt, Artificial Sequence
  Synthetic
accauaugaccuucccgcugcuac

SEQ ID NO: 42058 - RNA, 18 nt, Artificial Sequence
  Synthetic
uuugcucuuuugugcuac

SEQ ID NO: 42059 - RNA, 19 nt, Artificial Sequence
  Synthetic
uuuugcucuuuugugcuac

SEQ ID NO: 42060 - RNA, 20 nt, Artificial Sequence
  Synthetic
cuuuugcucuuuugugcuac

SEQ ID NO: 42061 - RNA, 21 nt, Artificial Sequence
  Synthetic
ucuuuugcucuuuugugcuac

SEQ ID NO: 42062 - RNA, 22 nt, Artificial Sequence
  Synthetic
aucuuuugcucuuuugugcuac

SEQ ID NO: 42063 - RNA, 23 nt, Artificial Sequence
  Synthetic
aaucuuuugcucuuuugugcuac

SEQ ID NO: 42064 - RNA, 24 nt, Artificial Sequence
  Synthetic
caaucuuuugcucuuuugugcuac

SEQ ID NO: 42065 - RNA, 20 nt, Artificial Sequence
  Synthetic
uggauaugucagaagucuac

SEQ ID NO: 42066 - RNA, 21 nt, Artificial Sequence
  Synthetic
auggauaugucagaagucuac

SEQ ID NO: 42067 - RNA, 22 nt, Artificial Sequence
  Synthetic
aauggauaugucagaagucuac

SEQ ID NO: 42068 - RNA, 23 nt, Artificial Sequence
  Synthetic
caauggauaugucagaagucuac

SEQ ID NO: 42069 - RNA, 24 nt, Artificial Sequence
  Synthetic
acaauggauaugucagaagucuac

SEQ ID NO: 42070 - RNA, 18 nt, Artificial Sequence
  Synthetic
uuuaucugaagagucuac

SEQ ID NO: 42071 - RNA, 19 nt, Artificial Sequence
  Synthetic
cuuuaucugaagagucuac

SEQ ID NO: 42072 - RNA, 20 nt, Artificial Sequence
  Synthetic
acuuuaucugaagagucuac

SEQ ID NO: 42073 - RNA, 21 nt, Artificial Sequence
  Synthetic
uacuuuaucugaagagucuac

SEQ ID NO: 42074 - RNA, 22 nt, Artificial Sequence
  Synthetic
uuacuuuaucugaagagucuac

SEQ ID NO: 42075 - RNA, 23 nt, Artificial Sequence
  Synthetic
uuuacuuuaucugaagagucuac

SEQ ID NO: 42076 - RNA, 24 nt, Artificial Sequence
  Synthetic
uuuuacuuuaucugaagagucuac

SEQ ID NO: 42077 - RNA, 18 nt, Artificial Sequence
  Synthetic
ccaaguuuacucuucuac

SEQ ID NO: 42078 - RNA, 19 nt, Artificial Sequence
  Synthetic
uccaaguuuacucuucuac

SEQ ID NO: 42079 - RNA, 20 nt, Artificial Sequence
  Synthetic
uuccaaguuuacucuucuac

SEQ ID NO: 42080 - RNA, 21 nt, Artificial Sequence
  Synthetic
uuuccaaguuuacucuucuac

SEQ ID NO: 42081 - RNA, 22 nt, Artificial Sequence
  Synthetic
cuuuccaaguuuacucuucuac

SEQ ID NO: 42082 - RNA, 23 nt, Artificial Sequence
  Synthetic
ccuuuccaaguuuacucuucuac

SEQ ID NO: 42083 - RNA, 18 nt, Artificial Sequence
  Synthetic
aaaauuaaggcuuucuac

SEQ ID NO: 42084 - RNA, 19 nt, Artificial Sequence
  Synthetic
uaaaauuaaggcuuucuac

SEQ ID NO: 42085 - RNA, 20 nt, Artificial Sequence
  Synthetic
uuaaaauuaaggcuuucuac

SEQ ID NO: 42086 - RNA, 21 nt, Artificial Sequence
  Synthetic
auuaaaauuaaggcuuucuac

SEQ ID NO: 42087 - RNA, 22 nt, Artificial Sequence
  Synthetic
aauuaaaauuaaggcuuucuac

SEQ ID NO: 42088 - RNA, 23 nt, Artificial Sequence
  Synthetic
aaauuaaaauuaaggcuuucuac

SEQ ID NO: 42089 - RNA, 24 nt, Artificial Sequence
  Synthetic
uaaauuaaaauuaaggcuuucuac

SEQ ID NO: 42090 - RNA, 18 nt, Artificial Sequence
  Synthetic
caauauaugccgaaguac

SEQ ID NO: 42091 - RNA, 21 nt, Artificial Sequence
  Synthetic
uggcaauauaugccgaaguac

SEQ ID NO: 42092 - RNA, 22 nt, Artificial Sequence
  Synthetic
uuggcaauauaugccgaaguac

SEQ ID NO: 42093 - RNA, 23 nt, Artificial Sequence
  Synthetic
auuggcaauauaugccgaaguac

SEQ ID NO: 42094 - RNA, 24 nt, Artificial Sequence
  Synthetic
uauuggcaauauaugccgaaguac

SEQ ID NO: 42095 - RNA, 22 nt, Artificial Sequence
  Synthetic
aguaaaagacaaaauuaaguac

SEQ ID NO: 42096 - RNA, 23 nt, Artificial Sequence
  Synthetic
aaguaaaagacaaaauuaaguac

SEQ ID NO: 42097 - RNA, 24 nt, Artificial Sequence
  Synthetic
caaguaaaagacaaaauuaaguac

SEQ ID NO: 42098 - RNA, 19 nt, Artificial Sequence
  Synthetic
uguauauuaucugcaguac

SEQ ID NO: 42099 - RNA, 20 nt, Artificial Sequence
  Synthetic
cuguauauuaucugcaguac

SEQ ID NO: 42100 - RNA, 21 nt, Artificial Sequence
  Synthetic
ccuguauauuaucugcaguac

SEQ ID NO: 42101 - RNA, 22 nt, Artificial Sequence
  Synthetic
cccuguauauuaucugcaguac

SEQ ID NO: 42102 - RNA, 23 nt, Artificial Sequence
  Synthetic
ccccuguauauuaucugcaguac

SEQ ID NO: 42103 - RNA, 24 nt, Artificial Sequence
  Synthetic
accccuguauauuaucugcaguac

SEQ ID NO: 42104 - RNA, 18 nt, Artificial Sequence
  Synthetic
auuaaguucauucaguac

SEQ ID NO: 42105 - RNA, 19 nt, Artificial Sequence
  Synthetic
aauuaaguucauucaguac

SEQ ID NO: 42106 - RNA, 20 nt, Artificial Sequence
  Synthetic
aaauuaaguucauucaguac

SEQ ID NO: 42107 - RNA, 22 nt, Artificial Sequence
  Synthetic
agaaauuaaguucauucaguac

SEQ ID NO: 42108 - RNA, 23 nt, Artificial Sequence
  Synthetic
aagaaauuaaguucauucaguac

SEQ ID NO: 42109 - RNA, 24 nt, Artificial Sequence
  Synthetic
aaagaaauuaaguucauucaguac

SEQ ID NO: 42110 - RNA, 18 nt, Artificial Sequence
  Synthetic
uggcugagcuaagaguac

SEQ ID NO: 42111 - RNA, 19 nt, Artificial Sequence
  Synthetic
uuggcugagcuaagaguac

SEQ ID NO: 42112 - RNA, 20 nt, Artificial Sequence
  Synthetic
cuuggcugagcuaagaguac

SEQ ID NO: 42113 - RNA, 22 nt, Artificial Sequence
  Synthetic
ugcuuggcugagcuaagaguac

SEQ ID NO: 42114 - RNA, 24 nt, Artificial Sequence
  Synthetic
ugugcuuggcugagcuaagaguac

SEQ ID NO: 42115 - RNA, 18 nt, Artificial Sequence
  Synthetic
cugugaagauuagaguac

SEQ ID NO: 42116 - RNA, 19 nt, Artificial Sequence
  Synthetic
acugugaagauuagaguac

SEQ ID NO: 42117 - RNA, 21 nt, Artificial Sequence
  Synthetic
agacugugaagauuagaguac

SEQ ID NO: 42118 - RNA, 22 nt, Artificial Sequence
  Synthetic
cagacugugaagauuagaguac

SEQ ID NO: 42119 - RNA, 24 nt, Artificial Sequence
  Synthetic
agcagacugugaagauuagaguac

SEQ ID NO: 42120 - RNA, 18 nt, Artificial Sequence
  Synthetic
auuaaucugaaugaguac

SEQ ID NO: 42121 - RNA, 21 nt, Artificial Sequence
  Synthetic
aggauuaaucugaaugaguac

SEQ ID NO: 42122 - RNA, 22 nt, Artificial Sequence
  Synthetic
aaggauuaaucugaaugaguac

SEQ ID NO: 42123 - RNA, 23 nt, Artificial Sequence
  Synthetic
aaaggauuaaucugaaugaguac

SEQ ID NO: 42124 - RNA, 24 nt, Artificial Sequence
  Synthetic
aaaaggauuaaucugaaugaguac

SEQ ID NO: 42125 - RNA, 18 nt, Artificial Sequence
  Synthetic
uuauuguuuaaugaguac

SEQ ID NO: 42126 - RNA, 19 nt, Artificial Sequence
  Synthetic
cuuauuguuuaaugaguac

SEQ ID NO: 42127 - RNA, 23 nt, Artificial Sequence
  Synthetic
agggcuuauuguuuaaugaguac

SEQ ID NO: 42128 - RNA, 18 nt, Artificial Sequence
  Synthetic
uucagucauacauaguac

SEQ ID NO: 42129 - RNA, 19 nt, Artificial Sequence
  Synthetic
uuucagucauacauaguac

SEQ ID NO: 42130 - RNA, 20 nt, Artificial Sequence
  Synthetic
uuuucagucauacauaguac

SEQ ID NO: 42131 - RNA, 22 nt, Artificial Sequence
  Synthetic
uguuuucagucauacauaguac

SEQ ID NO: 42132 - RNA, 23 nt, Artificial Sequence
  Synthetic
auguuuucagucauacauaguac

SEQ ID NO: 42133 - RNA, 24 nt, Artificial Sequence
  Synthetic
uauguuuucagucauacauaguac

SEQ ID NO: 42134 - RNA, 18 nt, Artificial Sequence
  Synthetic
aacaaaggacgguaguac

SEQ ID NO: 42135 - RNA, 19 nt, Artificial Sequence
  Synthetic
caacaaaggacgguaguac

SEQ ID NO: 42136 - RNA, 21 nt, Artificial Sequence
  Synthetic
ugcaacaaaggacgguaguac

SEQ ID NO: 42137 - RNA, 22 nt, Artificial Sequence
  Synthetic
uugcaacaaaggacgguaguac

SEQ ID NO: 42138 - RNA, 23 nt, Artificial Sequence
  Synthetic
auugcaacaaaggacgguaguac

SEQ ID NO: 42139 - RNA, 18 nt, Artificial Sequence
  Synthetic
auuuagcuucuguaguac

SEQ ID NO: 42140 - RNA, 19 nt, Artificial Sequence
  Synthetic
aauuuagcuucuguaguac

SEQ ID NO: 42141 - RNA, 23 nt, Artificial Sequence
  Synthetic
agggaauuuagcuucuguaguac

SEQ ID NO: 42142 - RNA, 24 nt, Artificial Sequence
  Synthetic
aagggaauuuagcuucuguaguac

SEQ ID NO: 42143 - RNA, 19 nt, Artificial Sequence
  Synthetic
ugaaaacaaugagagguac

SEQ ID NO: 42144 - RNA, 21 nt, Artificial Sequence
  Synthetic
agugaaaacaaugagagguac

SEQ ID NO: 42145 - RNA, 22 nt, Artificial Sequence
  Synthetic
cagugaaaacaaugagagguac

SEQ ID NO: 42146 - RNA, 23 nt, Artificial Sequence
  Synthetic
ucagugaaaacaaugagagguac

SEQ ID NO: 42147 - RNA, 24 nt, Artificial Sequence
  Synthetic
uucagugaaaacaaugagagguac

SEQ ID NO: 42148 - RNA, 19 nt, Artificial Sequence
  Synthetic
uggagccucuaaaugguac

SEQ ID NO: 42149 - RNA, 20 nt, Artificial Sequence
  Synthetic
cuggagccucuaaaugguac

SEQ ID NO: 42150 - RNA, 21 nt, Artificial Sequence
  Synthetic
ccuggagccucuaaaugguac

SEQ ID NO: 42151 - RNA, 23 nt, Artificial Sequence
  Synthetic
ugccuggagccucuaaaugguac

SEQ ID NO: 42152 - RNA, 24 nt, Artificial Sequence
  Synthetic
augccuggagccucuaaaugguac

SEQ ID NO: 42153 - RNA, 18 nt, Artificial Sequence
  Synthetic
caaagacaagcaugguac

SEQ ID NO: 42154 - RNA, 19 nt, Artificial Sequence
  Synthetic
ucaaagacaagcaugguac

SEQ ID NO: 42155 - RNA, 20 nt, Artificial Sequence
  Synthetic
aucaaagacaagcaugguac

SEQ ID NO: 42156 - RNA, 21 nt, Artificial Sequence
  Synthetic
caucaaagacaagcaugguac

SEQ ID NO: 42157 - RNA, 23 nt, Artificial Sequence
  Synthetic
agcaucaaagacaagcaugguac

SEQ ID NO: 42158 - RNA, 24 nt, Artificial Sequence
  Synthetic
cagcaucaaagacaagcaugguac

SEQ ID NO: 42159 - RNA, 18 nt, Artificial Sequence
  Synthetic
ccuugcgacucaugguac

SEQ ID NO: 42160 - RNA, 20 nt, Artificial Sequence
  Synthetic
agccuugcgacucaugguac

SEQ ID NO: 42161 - RNA, 21 nt, Artificial Sequence
  Synthetic
uagccuugcgacucaugguac

SEQ ID NO: 42162 - RNA, 22 nt, Artificial Sequence
  Synthetic
auagccuugcgacucaugguac

SEQ ID NO: 42163 - RNA, 23 nt, Artificial Sequence
  Synthetic
aauagccuugcgacucaugguac

SEQ ID NO: 42164 - RNA, 24 nt, Artificial Sequence
  Synthetic
uaauagccuugcgacucaugguac

SEQ ID NO: 42165 - RNA, 18 nt, Artificial Sequence
  Synthetic
auuaagucaaugugguac

SEQ ID NO: 42166 - RNA, 19 nt, Artificial Sequence
  Synthetic
uauuaagucaaugugguac

SEQ ID NO: 42167 - RNA, 20 nt, Artificial Sequence
  Synthetic
uuauuaagucaaugugguac

SEQ ID NO: 42168 - RNA, 21 nt, Artificial Sequence
  Synthetic
auuauuaagucaaugugguac

SEQ ID NO: 42169 - RNA, 22 nt, Artificial Sequence
  Synthetic
aauuauuaagucaaugugguac

SEQ ID NO: 42170 - RNA, 23 nt, Artificial Sequence
  Synthetic
caauuauuaagucaaugugguac

SEQ ID NO: 42171 - RNA, 24 nt, Artificial Sequence
  Synthetic
acaauuauuaagucaaugugguac

SEQ ID NO: 42172 - RNA, 18 nt, Artificial Sequence
  Synthetic
cauuuaggaagcauguac

SEQ ID NO: 42173 - RNA, 19 nt, Artificial Sequence
  Synthetic
ucauuuaggaagcauguac

SEQ ID NO: 42174 - RNA, 20 nt, Artificial Sequence
  Synthetic
uucauuuaggaagcauguac

SEQ ID NO: 42175 - RNA, 21 nt, Artificial Sequence
  Synthetic
cuucauuuaggaagcauguac

SEQ ID NO: 42176 - RNA, 22 nt, Artificial Sequence
  Synthetic
ccuucauuuaggaagcauguac

SEQ ID NO: 42177 - RNA, 23 nt, Artificial Sequence
  Synthetic
uccuucauuuaggaagcauguac

SEQ ID NO: 42178 - RNA, 24 nt, Artificial Sequence
  Synthetic
uuccuucauuuaggaagcauguac

SEQ ID NO: 42179 - RNA, 18 nt, Artificial Sequence
  Synthetic
uacuuguucaucauguac

SEQ ID NO: 42180 - RNA, 19 nt, Artificial Sequence
  Synthetic
auacuuguucaucauguac

SEQ ID NO: 42181 - RNA, 21 nt, Artificial Sequence
  Synthetic
agauacuuguucaucauguac

SEQ ID NO: 42182 - RNA, 22 nt, Artificial Sequence
  Synthetic
cagauacuuguucaucauguac

SEQ ID NO: 42183 - RNA, 23 nt, Artificial Sequence
  Synthetic
ucagauacuuguucaucauguac

SEQ ID NO: 42184 - RNA, 24 nt, Artificial Sequence
  Synthetic
cucagauacuuguucaucauguac

SEQ ID NO: 42185 - RNA, 18 nt, Artificial Sequence
  Synthetic
cacacaaaauuuauguac

SEQ ID NO: 42186 - RNA, 19 nt, Artificial Sequence
  Synthetic
ccacacaaaauuuauguac

SEQ ID NO: 42187 - RNA, 20 nt, Artificial Sequence
  Synthetic
uccacacaaaauuuauguac

SEQ ID NO: 42188 - RNA, 21 nt, Artificial Sequence
  Synthetic
uuccacacaaaauuuauguac

SEQ ID NO: 42189 - RNA, 22 nt, Artificial Sequence
  Synthetic
uuuccacacaaaauuuauguac

SEQ ID NO: 42190 - RNA, 23 nt, Artificial Sequence
  Synthetic
cuuuccacacaaaauuuauguac

SEQ ID NO: 42191 - RNA, 24 nt, Artificial Sequence
  Synthetic
ccuuuccacacaaaauuuauguac

SEQ ID NO: 42192 - RNA, 21 nt, Artificial Sequence
  Synthetic
cugcagugaacauccuuguac

SEQ ID NO: 42193 - RNA, 22 nt, Artificial Sequence
  Synthetic
acugcagugaacauccuuguac

SEQ ID NO: 42194 - RNA, 23 nt, Artificial Sequence
  Synthetic
cacugcagugaacauccuuguac

SEQ ID NO: 42195 - RNA, 24 nt, Artificial Sequence
  Synthetic
ucacugcagugaacauccuuguac

SEQ ID NO: 42196 - RNA, 18 nt, Artificial Sequence
  Synthetic
uagcuauaguauuuguac

SEQ ID NO: 42197 - RNA, 19 nt, Artificial Sequence
  Synthetic
uuagcuauaguauuuguac

SEQ ID NO: 42198 - RNA, 21 nt, Artificial Sequence
  Synthetic
aguuagcuauaguauuuguac

SEQ ID NO: 42199 - RNA, 22 nt, Artificial Sequence
  Synthetic
uaguuagcuauaguauuuguac

SEQ ID NO: 42200 - RNA, 23 nt, Artificial Sequence
  Synthetic
uuaguuagcuauaguauuuguac

SEQ ID NO: 42201 - RNA, 24 nt, Artificial Sequence
  Synthetic
cuuaguuagcuauaguauuuguac

SEQ ID NO: 42202 - RNA, 18 nt, Artificial Sequence
  Synthetic
uuccuuagaguuuuguac

SEQ ID NO: 42203 - RNA, 19 nt, Artificial Sequence
  Synthetic
auuccuuagaguuuuguac

SEQ ID NO: 42204 - RNA, 20 nt, Artificial Sequence
  Synthetic
aauuccuuagaguuuuguac

SEQ ID NO: 42205 - RNA, 21 nt, Artificial Sequence
  Synthetic
aaauuccuuagaguuuuguac

SEQ ID NO: 42206 - RNA, 22 nt, Artificial Sequence
  Synthetic
uaaauuccuuagaguuuuguac

SEQ ID NO: 42207 - RNA, 23 nt, Artificial Sequence
  Synthetic
auaaauuccuuagaguuuuguac

SEQ ID NO: 42208 - RNA, 24 nt, Artificial Sequence
  Synthetic
aauaaauuccuuagaguuuuguac

SEQ ID NO: 42209 - RNA, 18 nt, Artificial Sequence
  Synthetic
aagcaaugcuaaaauuac

SEQ ID NO: 42210 - RNA, 19 nt, Artificial Sequence
  Synthetic
caagcaaugcuaaaauuac

SEQ ID NO: 42211 - RNA, 21 nt, Artificial Sequence
  Synthetic
agcaagcaaugcuaaaauuac

SEQ ID NO: 42212 - RNA, 24 nt, Artificial Sequence
  Synthetic
aggagcaagcaaugcuaaaauuac

SEQ ID NO: 42213 - RNA, 21 nt, Artificial Sequence
  Synthetic
ugggagaauaauuucaauuac

SEQ ID NO: 42214 - RNA, 22 nt, Artificial Sequence
  Synthetic
uugggagaauaauuucaauuac

SEQ ID NO: 42215 - RNA, 23 nt, Artificial Sequence
  Synthetic
auugggagaauaauuucaauuac

SEQ ID NO: 42216 - RNA, 24 nt, Artificial Sequence
  Synthetic
uauugggagaauaauuucaauuac

SEQ ID NO: 42217 - RNA, 19 nt, Artificial Sequence
  Synthetic
agaauaaacaaggaauuac

SEQ ID NO: 42218 - RNA, 20 nt, Artificial Sequence
  Synthetic
uagaauaaacaaggaauuac

SEQ ID NO: 42219 - RNA, 22 nt, Artificial Sequence
  Synthetic
aguagaauaaacaaggaauuac

SEQ ID NO: 42220 - RNA, 23 nt, Artificial Sequence
  Synthetic
aaguagaauaaacaaggaauuac

SEQ ID NO: 42221 - RNA, 24 nt, Artificial Sequence
  Synthetic
aaaguagaauaaacaaggaauuac

SEQ ID NO: 42222 - RNA, 18 nt, Artificial Sequence
  Synthetic
uuucuauuaaggaauuac

SEQ ID NO: 42223 - RNA, 21 nt, Artificial Sequence
  Synthetic
agguuucuauuaaggaauuac

SEQ ID NO: 42224 - RNA, 22 nt, Artificial Sequence
  Synthetic
uagguuucuauuaaggaauuac

SEQ ID NO: 42225 - RNA, 23 nt, Artificial Sequence
  Synthetic
uuagguuucuauuaaggaauuac

SEQ ID NO: 42226 - RNA, 24 nt, Artificial Sequence
  Synthetic
cuuagguuucuauuaaggaauuac

SEQ ID NO: 42227 - RNA, 18 nt, Artificial Sequence
  Synthetic
uuucaaacuaugaauuac

SEQ ID NO: 42228 - RNA, 20 nt, Artificial Sequence
  Synthetic
uguuucaaacuaugaauuac

SEQ ID NO: 42229 - RNA, 22 nt, Artificial Sequence
  Synthetic
cguguuucaaacuaugaauuac

SEQ ID NO: 42230 - RNA, 24 nt, Artificial Sequence
  Synthetic
ugcguguuucaaacuaugaauuac

SEQ ID NO: 42231 - RNA, 18 nt, Artificial Sequence
  Synthetic
uucuaggugcugaauuac

SEQ ID NO: 42232 - RNA, 19 nt, Artificial Sequence
  Synthetic
uuucuaggugcugaauuac

SEQ ID NO: 42233 - RNA, 20 nt, Artificial Sequence
  Synthetic
uuuucuaggugcugaauuac

SEQ ID NO: 42234 - RNA, 21 nt, Artificial Sequence
  Synthetic
uuuuucuaggugcugaauuac

SEQ ID NO: 42235 - RNA, 23 nt, Artificial Sequence
  Synthetic
uguuuuucuaggugcugaauuac

SEQ ID NO: 42236 - RNA, 24 nt, Artificial Sequence
  Synthetic
auguuuuucuaggugcugaauuac

SEQ ID NO: 42237 - RNA, 18 nt, Artificial Sequence
  Synthetic
uaaaugggacauaauuac

SEQ ID NO: 42238 - RNA, 19 nt, Artificial Sequence
  Synthetic
uuaaaugggacauaauuac

SEQ ID NO: 42239 - RNA, 20 nt, Artificial Sequence
  Synthetic
uuuaaaugggacauaauuac

SEQ ID NO: 42240 - RNA, 21 nt, Artificial Sequence
  Synthetic
auuuaaaugggacauaauuac

SEQ ID NO: 42241 - RNA, 22 nt, Artificial Sequence
  Synthetic
uauuuaaaugggacauaauuac

SEQ ID NO: 42242 - RNA, 23 nt, Artificial Sequence
  Synthetic
auauuuaaaugggacauaauuac

SEQ ID NO: 42243 - RNA, 24 nt, Artificial Sequence
  Synthetic
uauauuuaaaugggacauaauuac

SEQ ID NO: 42244 - RNA, 18 nt, Artificial Sequence
  Synthetic
auugauugaauuaauuac

SEQ ID NO: 42245 - RNA, 19 nt, Artificial Sequence
  Synthetic
uauugauugaauuaauuac

SEQ ID NO: 42246 - RNA, 20 nt, Artificial Sequence
  Synthetic
auauugauugaauuaauuac

SEQ ID NO: 42247 - RNA, 21 nt, Artificial Sequence
  Synthetic
aauauugauugaauuaauuac

SEQ ID NO: 42248 - RNA, 22 nt, Artificial Sequence
  Synthetic
aaauauugauugaauuaauuac

SEQ ID NO: 42249 - RNA, 23 nt, Artificial Sequence
  Synthetic
uaaauauugauugaauuaauuac

SEQ ID NO: 42250 - RNA, 18 nt, Artificial Sequence
  Synthetic
uaugccaggaaugauuac

SEQ ID NO: 42251 - RNA, 19 nt, Artificial Sequence
  Synthetic
auaugccaggaaugauuac

SEQ ID NO: 42252 - RNA, 20 nt, Artificial Sequence
  Synthetic
aauaugccaggaaugauuac

SEQ ID NO: 42253 - RNA, 21 nt, Artificial Sequence
  Synthetic
aaauaugccaggaaugauuac

SEQ ID NO: 42254 - RNA, 23 nt, Artificial Sequence
  Synthetic
agaaauaugccaggaaugauuac

SEQ ID NO: 42255 - RNA, 24 nt, Artificial Sequence
  Synthetic
cagaaauaugccaggaaugauuac

SEQ ID NO: 42256 - RNA, 18 nt, Artificial Sequence
  Synthetic
aauucuuucuaugauuac

SEQ ID NO: 42257 - RNA, 23 nt, Artificial Sequence
  Synthetic
uggggaauucuuucuaugauuac

SEQ ID NO: 42258 - RNA, 24 nt, Artificial Sequence
  Synthetic
auggggaauucuuucuaugauuac

SEQ ID NO: 42259 - RNA, 21 nt, Artificial Sequence
  Synthetic
uucaucuuuuuaaaauauuac

SEQ ID NO: 42260 - RNA, 22 nt, Artificial Sequence
  Synthetic
uuucaucuuuuuaaaauauuac

SEQ ID NO: 42261 - RNA, 24 nt, Artificial Sequence
  Synthetic
uguuucaucuuuuuaaaauauuac

SEQ ID NO: 42262 - RNA, 21 nt, Artificial Sequence
  Synthetic
auuuuguaauuaacauauuac

SEQ ID NO: 42263 - RNA, 22 nt, Artificial Sequence
  Synthetic
aauuuuguaauuaacauauuac

SEQ ID NO: 42264 - RNA, 23 nt, Artificial Sequence
  Synthetic
caauuuuguaauuaacauauuac

SEQ ID NO: 42265 - RNA, 24 nt, Artificial Sequence
  Synthetic
ucaauuuuguaauuaacauauuac

SEQ ID NO: 42266 - RNA, 19 nt, Artificial Sequence
  Synthetic
agaaagcaucacguauuac

SEQ ID NO: 42267 - RNA, 21 nt, Artificial Sequence
  Synthetic
agagaaagcaucacguauuac

SEQ ID NO: 42268 - RNA, 24 nt, Artificial Sequence
  Synthetic
aggagagaaagcaucacguauuac

SEQ ID NO: 42269 - RNA, 18 nt, Artificial Sequence
  Synthetic
cccuauauaucuuauuac

SEQ ID NO: 42270 - RNA, 19 nt, Artificial Sequence
  Synthetic
ccccuauauaucuuauuac

SEQ ID NO: 42271 - RNA, 20 nt, Artificial Sequence
  Synthetic
accccuauauaucuuauuac

SEQ ID NO: 42272 - RNA, 21 nt, Artificial Sequence
  Synthetic
uaccccuauauaucuuauuac

SEQ ID NO: 42273 - RNA, 18 nt, Artificial Sequence
  Synthetic
caggucuaaguaacuuac

SEQ ID NO: 42274 - RNA, 19 nt, Artificial Sequence
  Synthetic
acaggucuaaguaacuuac

SEQ ID NO: 42275 - RNA, 21 nt, Artificial Sequence
  Synthetic
ugacaggucuaaguaacuuac

SEQ ID NO: 42276 - RNA, 22 nt, Artificial Sequence
  Synthetic
augacaggucuaaguaacuuac

SEQ ID NO: 42277 - RNA, 23 nt, Artificial Sequence
  Synthetic
aaugacaggucuaaguaacuuac

SEQ ID NO: 42278 - RNA, 24 nt, Artificial Sequence
  Synthetic
aaaugacaggucuaaguaacuuac

SEQ ID NO: 42279 - RNA, 20 nt, Artificial Sequence
  Synthetic
uggguaggaaggacacuuac

SEQ ID NO: 42280 - RNA, 21 nt, Artificial Sequence
  Synthetic
auggguaggaaggacacuuac

SEQ ID NO: 42281 - RNA, 22 nt, Artificial Sequence
  Synthetic
cauggguaggaaggacacuuac

SEQ ID NO: 42282 - RNA, 18 nt, Artificial Sequence
  Synthetic
aaaaagcagaaaccuuac

SEQ ID NO: 42283 - RNA, 19 nt, Artificial Sequence
  Synthetic
aaaaaagcagaaaccuuac

SEQ ID NO: 42284 - RNA, 20 nt, Artificial Sequence
  Synthetic
aaaaaaagcagaaaccuuac

SEQ ID NO: 42285 - RNA, 18 nt, Artificial Sequence
  Synthetic
cuagacuguagaccuuac

SEQ ID NO: 42286 - RNA, 19 nt, Artificial Sequence
  Synthetic
acuagacuguagaccuuac

SEQ ID NO: 42287 - RNA, 20 nt, Artificial Sequence
  Synthetic
aacuagacuguagaccuuac

SEQ ID NO: 42288 - RNA, 21 nt, Artificial Sequence
  Synthetic
caacuagacuguagaccuuac

SEQ ID NO: 42289 - RNA, 22 nt, Artificial Sequence
  Synthetic
ucaacuagacuguagaccuuac

SEQ ID NO: 42290 - RNA, 23 nt, Artificial Sequence
  Synthetic
aucaacuagacuguagaccuuac

SEQ ID NO: 42291 - RNA, 24 nt, Artificial Sequence
  Synthetic
aaucaacuagacuguagaccuuac

SEQ ID NO: 42292 - RNA, 18 nt, Artificial Sequence
  Synthetic
cccagucagacuccuuac

SEQ ID NO: 42293 - RNA, 19 nt, Artificial Sequence
  Synthetic
ccccagucagacuccuuac

SEQ ID NO: 42294 - RNA, 21 nt, Artificial Sequence
  Synthetic
ugccccagucagacuccuuac

SEQ ID NO: 42295 - RNA, 22 nt, Artificial Sequence
  Synthetic
augccccagucagacuccuuac

SEQ ID NO: 42296 - RNA, 23 nt, Artificial Sequence
  Synthetic
caugccccagucagacuccuuac

SEQ ID NO: 42297 - RNA, 24 nt, Artificial Sequence
  Synthetic
acaugccccagucagacuccuuac

SEQ ID NO: 42298 - RNA, 18 nt, Artificial Sequence
  Synthetic
uaauucuuguguccuuac

SEQ ID NO: 42299 - RNA, 21 nt, Artificial Sequence
  Synthetic
ugguaauucuuguguccuuac

SEQ ID NO: 42300 - RNA, 22 nt, Artificial Sequence
  Synthetic
uugguaauucuuguguccuuac

SEQ ID NO: 42301 - RNA, 23 nt, Artificial Sequence
  Synthetic
uuugguaauucuuguguccuuac

SEQ ID NO: 42302 - RNA, 24 nt, Artificial Sequence
  Synthetic
uuuugguaauucuuguguccuuac

SEQ ID NO: 42303 - RNA, 19 nt, Artificial Sequence
  Synthetic
ugccuuacaccuugcuuac

SEQ ID NO: 42304 - RNA, 20 nt, Artificial Sequence
  Synthetic
cugccuuacaccuugcuuac

SEQ ID NO: 42305 - RNA, 21 nt, Artificial Sequence
  Synthetic
acugccuuacaccuugcuuac

SEQ ID NO: 42306 - RNA, 22 nt, Artificial Sequence
  Synthetic
aacugccuuacaccuugcuuac

SEQ ID NO: 42307 - RNA, 23 nt, Artificial Sequence
  Synthetic
uaacugccuuacaccuugcuuac

SEQ ID NO: 42308 - RNA, 18 nt, Artificial Sequence
  Synthetic
caucucaccgugaguuac

SEQ ID NO: 42309 - RNA, 19 nt, Artificial Sequence
  Synthetic
ucaucucaccgugaguuac

SEQ ID NO: 42310 - RNA, 20 nt, Artificial Sequence
  Synthetic
aucaucucaccgugaguuac

SEQ ID NO: 42311 - RNA, 21 nt, Artificial Sequence
  Synthetic
aaucaucucaccgugaguuac

SEQ ID NO: 42312 - RNA, 22 nt, Artificial Sequence
  Synthetic
aaaucaucucaccgugaguuac

SEQ ID NO: 42313 - RNA, 21 nt, Artificial Sequence
  Synthetic
cuccauuucuaucauaguuac

SEQ ID NO: 42314 - RNA, 22 nt, Artificial Sequence
  Synthetic
acuccauuucuaucauaguuac

SEQ ID NO: 42315 - RNA, 23 nt, Artificial Sequence
  Synthetic
cacuccauuucuaucauaguuac

SEQ ID NO: 42316 - RNA, 24 nt, Artificial Sequence
  Synthetic
acacuccauuucuaucauaguuac

SEQ ID NO: 42317 - RNA, 18 nt, Artificial Sequence
  Synthetic
aaggacaugcuuaguuac

SEQ ID NO: 42318 - RNA, 19 nt, Artificial Sequence
  Synthetic
aaaggacaugcuuaguuac

SEQ ID NO: 42319 - RNA, 20 nt, Artificial Sequence
  Synthetic
aaaaggacaugcuuaguuac

SEQ ID NO: 42320 - RNA, 21 nt, Artificial Sequence
  Synthetic
aaaaaggacaugcuuaguuac

SEQ ID NO: 42321 - RNA, 22 nt, Artificial Sequence
  Synthetic
caaaaaggacaugcuuaguuac

SEQ ID NO: 42322 - RNA, 23 nt, Artificial Sequence
  Synthetic
ucaaaaaggacaugcuuaguuac

SEQ ID NO: 42323 - RNA, 24 nt, Artificial Sequence
  Synthetic
cucaaaaaggacaugcuuaguuac

SEQ ID NO: 42324 - RNA, 18 nt, Artificial Sequence
  Synthetic
uaucaauguagauguuac

SEQ ID NO: 42325 - RNA, 19 nt, Artificial Sequence
  Synthetic
auaucaauguagauguuac

SEQ ID NO: 42326 - RNA, 20 nt, Artificial Sequence
  Synthetic
cauaucaauguagauguuac

SEQ ID NO: 42327 - RNA, 22 nt, Artificial Sequence
  Synthetic
agcauaucaauguagauguuac

SEQ ID NO: 42328 - RNA, 24 nt, Artificial Sequence
  Synthetic
ugagcauaucaauguagauguuac

SEQ ID NO: 42329 - RNA, 18 nt, Artificial Sequence
  Synthetic
ucauuaaacuuauguuac

SEQ ID NO: 42330 - RNA, 19 nt, Artificial Sequence
  Synthetic
uucauuaaacuuauguuac

SEQ ID NO: 42331 - RNA, 20 nt, Artificial Sequence
  Synthetic
cuucauuaaacuuauguuac

SEQ ID NO: 42332 - RNA, 21 nt, Artificial Sequence
  Synthetic
ucuucauuaaacuuauguuac

SEQ ID NO: 42333 - RNA, 24 nt, Artificial Sequence
  Synthetic
aggucuucauuaaacuuauguuac

SEQ ID NO: 42334 - RNA, 18 nt, Artificial Sequence
  Synthetic
caagggaauuuguguuac

SEQ ID NO: 42335 - RNA, 19 nt, Artificial Sequence
  Synthetic
ccaagggaauuuguguuac

SEQ ID NO: 42336 - RNA, 20 nt, Artificial Sequence
  Synthetic
accaagggaauuuguguuac

SEQ ID NO: 42337 - RNA, 21 nt, Artificial Sequence
  Synthetic
aaccaagggaauuuguguuac

SEQ ID NO: 42338 - RNA, 22 nt, Artificial Sequence
  Synthetic
uaaccaagggaauuuguguuac

SEQ ID NO: 42339 - RNA, 23 nt, Artificial Sequence
  Synthetic
cuaaccaagggaauuuguguuac

SEQ ID NO: 42340 - RNA, 18 nt, Artificial Sequence
  Synthetic
aauuugugaaguuguuac

SEQ ID NO: 42341 - RNA, 19 nt, Artificial Sequence
  Synthetic
uaauuugugaaguuguuac

SEQ ID NO: 42342 - RNA, 20 nt, Artificial Sequence
  Synthetic
auaauuugugaaguuguuac

SEQ ID NO: 42343 - RNA, 21 nt, Artificial Sequence
  Synthetic
uauaauuugugaaguuguuac

SEQ ID NO: 42344 - RNA, 22 nt, Artificial Sequence
  Synthetic
cuauaauuugugaaguuguuac

SEQ ID NO: 42345 - RNA, 23 nt, Artificial Sequence
  Synthetic
ucuauaauuugugaaguuguuac

SEQ ID NO: 42346 - RNA, 18 nt, Artificial Sequence
  Synthetic
ugauguuuuauuuguuac

SEQ ID NO: 42347 - RNA, 19 nt, Artificial Sequence
  Synthetic
uugauguuuuauuuguuac

SEQ ID NO: 42348 - RNA, 20 nt, Artificial Sequence
  Synthetic
cuugauguuuuauuuguuac

SEQ ID NO: 42349 - RNA, 21 nt, Artificial Sequence
  Synthetic
ccuugauguuuuauuuguuac

SEQ ID NO: 42350 - RNA, 22 nt, Artificial Sequence
  Synthetic
accuugauguuuuauuuguuac

SEQ ID NO: 42351 - RNA, 23 nt, Artificial Sequence
  Synthetic
caccuugauguuuuauuuguuac

SEQ ID NO: 42352 - RNA, 24 nt, Artificial Sequence
  Synthetic
acaccuugauguuuuauuuguuac

SEQ ID NO: 42353 - RNA, 18 nt, Artificial Sequence
  Synthetic
auuaagcuguuuuguuac

SEQ ID NO: 42354 - RNA, 19 nt, Artificial Sequence
  Synthetic
uauuaagcuguuuuguuac

SEQ ID NO: 42355 - RNA, 21 nt, Artificial Sequence
  Synthetic
uguauuaagcuguuuuguuac

SEQ ID NO: 42356 - RNA, 22 nt, Artificial Sequence
  Synthetic
uuguauuaagcuguuuuguuac

SEQ ID NO: 42357 - RNA, 23 nt, Artificial Sequence
  Synthetic
uuuguauuaagcuguuuuguuac

SEQ ID NO: 42358 - RNA, 24 nt, Artificial Sequence
  Synthetic
uuuuguauuaagcuguuuuguuac

SEQ ID NO: 42359 - RNA, 18 nt, Artificial Sequence
  Synthetic
aaugaaugcucaauuuac

SEQ ID NO: 42360 - RNA, 19 nt, Artificial Sequence
  Synthetic
caaugaaugcucaauuuac

SEQ ID NO: 42361 - RNA, 21 nt, Artificial Sequence
  Synthetic
ugcaaugaaugcucaauuuac

SEQ ID NO: 42362 - RNA, 22 nt, Artificial Sequence
  Synthetic
cugcaaugaaugcucaauuuac

SEQ ID NO: 42363 - RNA, 24 nt, Artificial Sequence
  Synthetic
ugcugcaaugaaugcucaauuuac

SEQ ID NO: 42364 - RNA, 21 nt, Artificial Sequence
  Synthetic
cuaggcaaaaugauaauuuac

SEQ ID NO: 42365 - RNA, 22 nt, Artificial Sequence
  Synthetic
acuaggcaaaaugauaauuuac

SEQ ID NO: 42366 - RNA, 23 nt, Artificial Sequence
  Synthetic
aacuaggcaaaaugauaauuuac

SEQ ID NO: 42367 - RNA, 24 nt, Artificial Sequence
  Synthetic
aaacuaggcaaaaugauaauuuac

SEQ ID NO: 42368 - RNA, 18 nt, Artificial Sequence
  Synthetic
uuacucuguuuaauuuac

SEQ ID NO: 42369 - RNA, 19 nt, Artificial Sequence
  Synthetic
auuacucuguuuaauuuac

SEQ ID NO: 42370 - RNA, 20 nt, Artificial Sequence
  Synthetic
cauuacucuguuuaauuuac

SEQ ID NO: 42371 - RNA, 21 nt, Artificial Sequence
  Synthetic
acauuacucuguuuaauuuac

SEQ ID NO: 42372 - RNA, 22 nt, Artificial Sequence
  Synthetic
aacauuacucuguuuaauuuac

SEQ ID NO: 42373 - RNA, 23 nt, Artificial Sequence
  Synthetic
aaacauuacucuguuuaauuuac

SEQ ID NO: 42374 - RNA, 24 nt, Artificial Sequence
  Synthetic
aaaacauuacucuguuuaauuuac

SEQ ID NO: 42375 - RNA, 21 nt, Artificial Sequence
  Synthetic
uauguaaaaauacauauuuac

SEQ ID NO: 42376 - RNA, 23 nt, Artificial Sequence
  Synthetic
aguauguaaaaauacauauuuac

SEQ ID NO: 42377 - RNA, 24 nt, Artificial Sequence
  Synthetic
uaguauguaaaaauacauauuuac

SEQ ID NO: 42378 - RNA, 18 nt, Artificial Sequence
  Synthetic
cugauccaggauauuuac

SEQ ID NO: 42379 - RNA, 19 nt, Artificial Sequence
  Synthetic
acugauccaggauauuuac

SEQ ID NO: 42380 - RNA, 20 nt, Artificial Sequence
  Synthetic
aacugauccaggauauuuac

SEQ ID NO: 42381 - RNA, 21 nt, Artificial Sequence
  Synthetic
aaacugauccaggauauuuac

SEQ ID NO: 42382 - RNA, 22 nt, Artificial Sequence
  Synthetic
aaaacugauccaggauauuuac

SEQ ID NO: 42383 - RNA, 23 nt, Artificial Sequence
  Synthetic
caaaacugauccaggauauuuac

SEQ ID NO: 42384 - RNA, 18 nt, Artificial Sequence
  Synthetic
uuucucuuaacuauuuac

SEQ ID NO: 42385 - RNA, 19 nt, Artificial Sequence
  Synthetic
auuucucuuaacuauuuac

SEQ ID NO: 42386 - RNA, 20 nt, Artificial Sequence
  Synthetic
aauuucucuuaacuauuuac

SEQ ID NO: 42387 - RNA, 22 nt, Artificial Sequence
  Synthetic
ugaauuucucuuaacuauuuac

SEQ ID NO: 42388 - RNA, 24 nt, Artificial Sequence
  Synthetic
ugugaauuucucuuaacuauuuac

SEQ ID NO: 42389 - RNA, 18 nt, Artificial Sequence
  Synthetic
uauucccuucuuauuuac

SEQ ID NO: 42390 - RNA, 21 nt, Artificial Sequence
  Synthetic
ugguauucccuucuuauuuac

SEQ ID NO: 42391 - RNA, 23 nt, Artificial Sequence
  Synthetic
agugguauucccuucuuauuuac

SEQ ID NO: 42392 - RNA, 19 nt, Artificial Sequence
  Synthetic
aguacaaaaucaacuuuac

SEQ ID NO: 42393 - RNA, 20 nt, Artificial Sequence
  Synthetic
uaguacaaaaucaacuuuac

SEQ ID NO: 42394 - RNA, 21 nt, Artificial Sequence
  Synthetic
auaguacaaaaucaacuuuac

SEQ ID NO: 42395 - RNA, 22 nt, Artificial Sequence
  Synthetic
aauaguacaaaaucaacuuuac

SEQ ID NO: 42396 - RNA, 23 nt, Artificial Sequence
  Synthetic
aaauaguacaaaaucaacuuuac

SEQ ID NO: 42397 - RNA, 24 nt, Artificial Sequence
  Synthetic
aaaauaguacaaaaucaacuuuac

SEQ ID NO: 42398 - RNA, 19 nt, Artificial Sequence
  Synthetic
ugaacagucauuucuuuac

SEQ ID NO: 42399 - RNA, 20 nt, Artificial Sequence
  Synthetic
uugaacagucauuucuuuac

SEQ ID NO: 42400 - RNA, 21 nt, Artificial Sequence
  Synthetic
uuugaacagucauuucuuuac

SEQ ID NO: 42401 - RNA, 22 nt, Artificial Sequence
  Synthetic
auuugaacagucauuucuuuac

SEQ ID NO: 42402 - RNA, 23 nt, Artificial Sequence
  Synthetic
cauuugaacagucauuucuuuac

SEQ ID NO: 42403 - RNA, 24 nt, Artificial Sequence
  Synthetic
ucauuugaacagucauuucuuuac

SEQ ID NO: 42404 - RNA, 21 nt, Artificial Sequence
  Synthetic
cucauugcagacaaaguuuac

SEQ ID NO: 42405 - RNA, 22 nt, Artificial Sequence
  Synthetic
ccucauugcagacaaaguuuac

SEQ ID NO: 42406 - RNA, 23 nt, Artificial Sequence
  Synthetic
uccucauugcagacaaaguuuac

SEQ ID NO: 42407 - RNA, 24 nt, Artificial Sequence
  Synthetic
uuccucauugcagacaaaguuuac

SEQ ID NO: 42408 - RNA, 18 nt, Artificial Sequence
  Synthetic
ccaaauaugaaaguuuac

SEQ ID NO: 42409 - RNA, 19 nt, Artificial Sequence
  Synthetic
cccaaauaugaaaguuuac

SEQ ID NO: 42410 - RNA, 21 nt, Artificial Sequence
  Synthetic
ugcccaaauaugaaaguuuac

SEQ ID NO: 42411 - RNA, 22 nt, Artificial Sequence
  Synthetic
augcccaaauaugaaaguuuac

SEQ ID NO: 42412 - RNA, 23 nt, Artificial Sequence
  Synthetic
caugcccaaauaugaaaguuuac

SEQ ID NO: 42413 - RNA, 24 nt, Artificial Sequence
  Synthetic
ucaugcccaaauaugaaaguuuac

SEQ ID NO: 42414 - RNA, 21 nt, Artificial Sequence
  Synthetic
auacugaugucagcaguuuac

SEQ ID NO: 42415 - RNA, 23 nt, Artificial Sequence
  Synthetic
ugauacugaugucagcaguuuac

SEQ ID NO: 42416 - RNA, 24 nt, Artificial Sequence
  Synthetic
augauacugaugucagcaguuuac

SEQ ID NO: 42417 - RNA, 18 nt, Artificial Sequence
  Synthetic
aagaagauaaugguuuac

SEQ ID NO: 42418 - RNA, 19 nt, Artificial Sequence
  Synthetic
aaagaagauaaugguuuac

SEQ ID NO: 42419 - RNA, 20 nt, Artificial Sequence
  Synthetic
aaaagaagauaaugguuuac

SEQ ID NO: 42420 - RNA, 21 nt, Artificial Sequence
  Synthetic
caaaagaagauaaugguuuac

SEQ ID NO: 42421 - RNA, 22 nt, Artificial Sequence
  Synthetic
ccaaaagaagauaaugguuuac

SEQ ID NO: 42422 - RNA, 23 nt, Artificial Sequence
  Synthetic
uccaaaagaagauaaugguuuac

SEQ ID NO: 42423 - RNA, 24 nt, Artificial Sequence
  Synthetic
auccaaaagaagauaaugguuuac

SEQ ID NO: 42424 - RNA, 18 nt, Artificial Sequence
  Synthetic
agaauuucugaauuuuac

SEQ ID NO: 42425 - RNA, 19 nt, Artificial Sequence
  Synthetic
aagaauuucugaauuuuac

SEQ ID NO: 42426 - RNA, 20 nt, Artificial Sequence
  Synthetic
uaagaauuucugaauuuuac

SEQ ID NO: 42427 - RNA, 23 nt, Artificial Sequence
  Synthetic
cgguaagaauuucugaauuuuac

SEQ ID NO: 42428 - RNA, 24 nt, Artificial Sequence
  Synthetic
ucgguaagaauuucugaauuuuac

SEQ ID NO: 42429 - RNA, 21 nt, Artificial Sequence
  Synthetic
uuuuaacauccuucauuuuac

SEQ ID NO: 42430 - RNA, 22 nt, Artificial Sequence
  Synthetic
uuuuuaacauccuucauuuuac

SEQ ID NO: 42431 - RNA, 23 nt, Artificial Sequence
  Synthetic
auuuuuaacauccuucauuuuac

SEQ ID NO: 42432 - RNA, 24 nt, Artificial Sequence
  Synthetic
uauuuuuaacauccuucauuuuac

SEQ ID NO: 42433 - RNA, 18 nt, Artificial Sequence
  Synthetic
caucccagauuauuuuac

SEQ ID NO: 42434 - RNA, 19 nt, Artificial Sequence
  Synthetic
acaucccagauuauuuuac

SEQ ID NO: 42435 - RNA, 20 nt, Artificial Sequence
  Synthetic
cacaucccagauuauuuuac

SEQ ID NO: 42436 - RNA, 21 nt, Artificial Sequence
  Synthetic
ccacaucccagauuauuuuac

SEQ ID NO: 42437 - RNA, 22 nt, Artificial Sequence
  Synthetic
accacaucccagauuauuuuac

SEQ ID NO: 42438 - RNA, 23 nt, Artificial Sequence
  Synthetic
uaccacaucccagauuauuuuac

SEQ ID NO: 42439 - RNA, 24 nt, Artificial Sequence
  Synthetic
uuaccacaucccagauuauuuuac

SEQ ID NO: 42440 - RNA, 18 nt, Artificial Sequence
  Synthetic
aaggauaguuucuuuuac

SEQ ID NO: 42441 - RNA, 19 nt, Artificial Sequence
  Synthetic
aaaggauaguuucuuuuac

SEQ ID NO: 42442 - RNA, 20 nt, Artificial Sequence
  Synthetic
uaaaggauaguuucuuuuac

SEQ ID NO: 42443 - RNA, 23 nt, Artificial Sequence
  Synthetic
agguaaaggauaguuucuuuuac

SEQ ID NO: 42444 - RNA, 24 nt, Artificial Sequence
  Synthetic
uagguaaaggauaguuucuuuuac

SEQ ID NO: 42445 - RNA, 19 nt, Artificial Sequence
  Synthetic
aguaaaccaugcaaaaacc

SEQ ID NO: 42446 - RNA, 21 nt, Artificial Sequence
  Synthetic
ugaguaaaccaugcaaaaacc

SEQ ID NO: 42447 - RNA, 23 nt, Artificial Sequence
  Synthetic
agugaguaaaccaugcaaaaacc

SEQ ID NO: 42448 - RNA, 18 nt, Artificial Sequence
  Synthetic
uacaaaugagucaaaacc

SEQ ID NO: 42449 - RNA, 19 nt, Artificial Sequence
  Synthetic
uuacaaaugagucaaaacc

SEQ ID NO: 42450 - RNA, 20 nt, Artificial Sequence
  Synthetic
uuuacaaaugagucaaaacc

SEQ ID NO: 42451 - RNA, 21 nt, Artificial Sequence
  Synthetic
auuuacaaaugagucaaaacc

SEQ ID NO: 42452 - RNA, 22 nt, Artificial Sequence
  Synthetic
cauuuacaaaugagucaaaacc

SEQ ID NO: 42453 - RNA, 18 nt, Artificial Sequence
  Synthetic
cuuuuauaacagaaaacc

SEQ ID NO: 42454 - RNA, 19 nt, Artificial Sequence
  Synthetic
ucuuuuauaacagaaaacc

SEQ ID NO: 42455 - RNA, 20 nt, Artificial Sequence
  Synthetic
uucuuuuauaacagaaaacc

SEQ ID NO: 42456 - RNA, 21 nt, Artificial Sequence
  Synthetic
auucuuuuauaacagaaaacc

SEQ ID NO: 42457 - RNA, 22 nt, Artificial Sequence
  Synthetic
cauucuuuuauaacagaaaacc

SEQ ID NO: 42458 - RNA, 23 nt, Artificial Sequence
  Synthetic
ucauucuuuuauaacagaaaacc

SEQ ID NO: 42459 - RNA, 24 nt, Artificial Sequence
  Synthetic
aucauucuuuuauaacagaaaacc

SEQ ID NO: 42460 - RNA, 18 nt, Artificial Sequence
  Synthetic
acagugaauuagaaaacc

SEQ ID NO: 42461 - RNA, 19 nt, Artificial Sequence
  Synthetic
cacagugaauuagaaaacc

SEQ ID NO: 42462 - RNA, 21 nt, Artificial Sequence
  Synthetic
ugcacagugaauuagaaaacc

SEQ ID NO: 42463 - RNA, 22 nt, Artificial Sequence
  Synthetic
uugcacagugaauuagaaaacc

SEQ ID NO: 42464 - RNA, 23 nt, Artificial Sequence
  Synthetic
cuugcacagugaauuagaaaacc

SEQ ID NO: 42465 - RNA, 24 nt, Artificial Sequence
  Synthetic
ucuugcacagugaauuagaaaacc

SEQ ID NO: 42466 - RNA, 19 nt, Artificial Sequence
  Synthetic
agcauaguacuugaaaacc

SEQ ID NO: 42467 - RNA, 20 nt, Artificial Sequence
  Synthetic
uagcauaguacuugaaaacc

SEQ ID NO: 42468 - RNA, 21 nt, Artificial Sequence
  Synthetic
auagcauaguacuugaaaacc

SEQ ID NO: 42469 - RNA, 22 nt, Artificial Sequence
  Synthetic
uauagcauaguacuugaaaacc

SEQ ID NO: 42470 - RNA, 23 nt, Artificial Sequence
  Synthetic
uuauagcauaguacuugaaaacc

SEQ ID NO: 42471 - RNA, 24 nt, Artificial Sequence
  Synthetic
auuauagcauaguacuugaaaacc

SEQ ID NO: 42472 - RNA, 18 nt, Artificial Sequence
  Synthetic
aaguacuaccauaaaacc

SEQ ID NO: 42473 - RNA, 19 nt, Artificial Sequence
  Synthetic
aaaguacuaccauaaaacc

SEQ ID NO: 42474 - RNA, 20 nt, Artificial Sequence
  Synthetic
caaaguacuaccauaaaacc

SEQ ID NO: 42475 - RNA, 21 nt, Artificial Sequence
  Synthetic
ucaaaguacuaccauaaaacc

SEQ ID NO: 42476 - RNA, 22 nt, Artificial Sequence
  Synthetic
uucaaaguacuaccauaaaacc

SEQ ID NO: 42477 - RNA, 18 nt, Artificial Sequence
  Synthetic
uaggaaaaacagcaaacc

SEQ ID NO: 42478 - RNA, 22 nt, Artificial Sequence
  Synthetic
uggguaggaaaaacagcaaacc

SEQ ID NO: 42479 - RNA, 23 nt, Artificial Sequence
  Synthetic
uuggguaggaaaaacagcaaacc

SEQ ID NO: 42480 - RNA, 24 nt, Artificial Sequence
  Synthetic
auuggguaggaaaaacagcaaacc

SEQ ID NO: 42481 - RNA, 18 nt, Artificial Sequence
  Synthetic
ccaucucauugagaaacc

SEQ ID NO: 42482 - RNA, 19 nt, Artificial Sequence
  Synthetic
accaucucauugagaaacc

SEQ ID NO: 42483 - RNA, 20 nt, Artificial Sequence
  Synthetic
uaccaucucauugagaaacc

SEQ ID NO: 42484 - RNA, 21 nt, Artificial Sequence
  Synthetic
auaccaucucauugagaaacc

SEQ ID NO: 42485 - RNA, 22 nt, Artificial Sequence
  Synthetic
aauaccaucucauugagaaacc

SEQ ID NO: 42486 - RNA, 23 nt, Artificial Sequence
  Synthetic
uaauaccaucucauugagaaacc

SEQ ID NO: 42487 - RNA, 24 nt, Artificial Sequence
  Synthetic
uuaauaccaucucauugagaaacc

SEQ ID NO: 42488 - RNA, 18 nt, Artificial Sequence
  Synthetic
ugagcuugaauugaaacc

SEQ ID NO: 42489 - RNA, 19 nt, Artificial Sequence
  Synthetic
uugagcuugaauugaaacc

SEQ ID NO: 42490 - RNA, 20 nt, Artificial Sequence
  Synthetic
uuugagcuugaauugaaacc

SEQ ID NO: 42491 - RNA, 21 nt, Artificial Sequence
  Synthetic
cuuugagcuugaauugaaacc

SEQ ID NO: 42492 - RNA, 22 nt, Artificial Sequence
  Synthetic
ccuuugagcuugaauugaaacc

SEQ ID NO: 42493 - RNA, 24 nt, Artificial Sequence
  Synthetic
ugccuuugagcuugaauugaaacc

SEQ ID NO: 42494 - RNA, 18 nt, Artificial Sequence
  Synthetic
auaugucaggaauaaacc

SEQ ID NO: 42495 - RNA, 19 nt, Artificial Sequence
  Synthetic
aauaugucaggaauaaacc

SEQ ID NO: 42496 - RNA, 20 nt, Artificial Sequence
  Synthetic
caauaugucaggaauaaacc

SEQ ID NO: 42497 - RNA, 21 nt, Artificial Sequence
  Synthetic
ucaauaugucaggaauaaacc

SEQ ID NO: 42498 - RNA, 22 nt, Artificial Sequence
  Synthetic
uucaauaugucaggaauaaacc

SEQ ID NO: 42499 - RNA, 23 nt, Artificial Sequence
  Synthetic
auucaauaugucaggaauaaacc

SEQ ID NO: 42500 - RNA, 24 nt, Artificial Sequence
  Synthetic
uauucaauaugucaggaauaaacc

SEQ ID NO: 42501 - RNA, 18 nt, Artificial Sequence
  Synthetic
auugggaauuaauaaacc

SEQ ID NO: 42502 - RNA, 21 nt, Artificial Sequence
  Synthetic
uggauugggaauuaauaaacc

SEQ ID NO: 42503 - RNA, 22 nt, Artificial Sequence
  Synthetic
cuggauugggaauuaauaaacc

SEQ ID NO: 42504 - RNA, 23 nt, Artificial Sequence
  Synthetic
acuggauugggaauuaauaaacc

SEQ ID NO: 42505 - RNA, 24 nt, Artificial Sequence
  Synthetic
cacuggauugggaauuaauaaacc

SEQ ID NO: 42506 - RNA, 18 nt, Artificial Sequence
  Synthetic
ugacauauugaguaaacc

SEQ ID NO: 42507 - RNA, 19 nt, Artificial Sequence
  Synthetic
cugacauauugaguaaacc

SEQ ID NO: 42508 - RNA, 20 nt, Artificial Sequence
  Synthetic
acugacauauugaguaaacc

SEQ ID NO: 42509 - RNA, 22 nt, Artificial Sequence
  Synthetic
agacugacauauugaguaaacc

SEQ ID NO: 42510 - RNA, 23 nt, Artificial Sequence
  Synthetic
aagacugacauauugaguaaacc

SEQ ID NO: 42511 - RNA, 18 nt, Artificial Sequence
  Synthetic
auugcugcuugguaaacc

SEQ ID NO: 42512 - RNA, 21 nt, Artificial Sequence
  Synthetic
aggauugcugcuugguaaacc

SEQ ID NO: 42513 - RNA, 23 nt, Artificial Sequence
  Synthetic
agaggauugcugcuugguaaacc

SEQ ID NO: 42514 - RNA, 18 nt, Artificial Sequence
  Synthetic
ugaugccucuguuaaacc

SEQ ID NO: 42515 - RNA, 19 nt, Artificial Sequence
  Synthetic
uugaugccucuguuaaacc

SEQ ID NO: 42516 - RNA, 21 nt, Artificial Sequence
  Synthetic
aguugaugccucuguuaaacc

SEQ ID NO: 42517 - RNA, 22 nt, Artificial Sequence
  Synthetic
aaguugaugccucuguuaaacc

SEQ ID NO: 42518 - RNA, 23 nt, Artificial Sequence
  Synthetic
aaaguugaugccucuguuaaacc

SEQ ID NO: 42519 - RNA, 24 nt, Artificial Sequence
  Synthetic
aaaaguugaugccucuguuaaacc

SEQ ID NO: 42520 - RNA, 19 nt, Artificial Sequence
  Synthetic
aguagaauuauuuuaaacc

SEQ ID NO: 42521 - RNA, 21 nt, Artificial Sequence
  Synthetic
agaguagaauuauuuuaaacc

SEQ ID NO: 42522 - RNA, 22 nt, Artificial Sequence
  Synthetic
aagaguagaauuauuuuaaacc

SEQ ID NO: 42523 - RNA, 23 nt, Artificial Sequence
  Synthetic
aaagaguagaauuauuuuaaacc

SEQ ID NO: 42524 - RNA, 24 nt, Artificial Sequence
  Synthetic
aaaagaguagaauuauuuuaaacc

SEQ ID NO: 42525 - RNA, 19 nt, Artificial Sequence
  Synthetic
aguagaaguguuuuaaacc

SEQ ID NO: 42526 - RNA, 20 nt, Artificial Sequence
  Synthetic
aaguagaaguguuuuaaacc

SEQ ID NO: 42527 - RNA, 21 nt, Artificial Sequence
  Synthetic
uaaguagaaguguuuuaaacc

SEQ ID NO: 42528 - RNA, 22 nt, Artificial Sequence
  Synthetic
auaaguagaaguguuuuaaacc

SEQ ID NO: 42529 - RNA, 23 nt, Artificial Sequence
  Synthetic
uauaaguagaaguguuuuaaacc

SEQ ID NO: 42530 - RNA, 24 nt, Artificial Sequence
  Synthetic
uuauaaguagaaguguuuuaaacc

SEQ ID NO: 42531 - RNA, 18 nt, Artificial Sequence
  Synthetic
augcagccauccacaacc

SEQ ID NO: 42532 - RNA, 19 nt, Artificial Sequence
  Synthetic
caugcagccauccacaacc

SEQ ID NO: 42533 - RNA, 20 nt, Artificial Sequence
  Synthetic
ccaugcagccauccacaacc

SEQ ID NO: 42534 - RNA, 21 nt, Artificial Sequence
  Synthetic
accaugcagccauccacaacc

SEQ ID NO: 42535 - RNA, 22 nt, Artificial Sequence
  Synthetic
caccaugcagccauccacaacc

SEQ ID NO: 42536 - RNA, 24 nt, Artificial Sequence
  Synthetic
ugcaccaugcagccauccacaacc

SEQ ID NO: 42537 - RNA, 21 nt, Artificial Sequence
  Synthetic
cauaauaaugguugcacaacc

SEQ ID NO: 42538 - RNA, 22 nt, Artificial Sequence
  Synthetic
ucauaauaaugguugcacaacc

SEQ ID NO: 42539 - RNA, 23 nt, Artificial Sequence
  Synthetic
aucauaauaaugguugcacaacc

SEQ ID NO: 42540 - RNA, 18 nt, Artificial Sequence
  Synthetic
uuacagucagucacaacc

SEQ ID NO: 42541 - RNA, 19 nt, Artificial Sequence
  Synthetic
auuacagucagucacaacc

SEQ ID NO: 42542 - RNA, 20 nt, Artificial Sequence
  Synthetic
aauuacagucagucacaacc

SEQ ID NO: 42543 - RNA, 21 nt, Artificial Sequence
  Synthetic
caauuacagucagucacaacc

SEQ ID NO: 42544 - RNA, 22 nt, Artificial Sequence
  Synthetic
ucaauuacagucagucacaacc

SEQ ID NO: 42545 - RNA, 23 nt, Artificial Sequence
  Synthetic
uucaauuacagucagucacaacc

SEQ ID NO: 42546 - RNA, 24 nt, Artificial Sequence
  Synthetic
uuucaauuacagucagucacaacc

SEQ ID NO: 42547 - RNA, 18 nt, Artificial Sequence
  Synthetic
uuucacaauuccccaacc

SEQ ID NO: 42548 - RNA, 20 nt, Artificial Sequence
  Synthetic
uguuucacaauuccccaacc

SEQ ID NO: 42549 - RNA, 21 nt, Artificial Sequence
  Synthetic
uuguuucacaauuccccaacc

SEQ ID NO: 42550 - RNA, 24 nt, Artificial Sequence
  Synthetic
agguuguuucacaauuccccaacc

SEQ ID NO: 42551 - RNA, 20 nt, Artificial Sequence
  Synthetic
agggauaggcauggccaacc

SEQ ID NO: 42552 - RNA, 21 nt, Artificial Sequence
  Synthetic
cagggauaggcauggccaacc

SEQ ID NO: 42553 - RNA, 22 nt, Artificial Sequence
  Synthetic
ucagggauaggcauggccaacc

SEQ ID NO: 42554 - RNA, 23 nt, Artificial Sequence
  Synthetic
cucagggauaggcauggccaacc

SEQ ID NO: 42555 - RNA, 24 nt, Artificial Sequence
  Synthetic
acucagggauaggcauggccaacc

SEQ ID NO: 42556 - RNA, 18 nt, Artificial Sequence
  Synthetic
aacacaaaauugccaacc

SEQ ID NO: 42557 - RNA, 20 nt, Artificial Sequence
  Synthetic
agaacacaaaauugccaacc

SEQ ID NO: 42558 - RNA, 22 nt, Artificial Sequence
  Synthetic
agagaacacaaaauugccaacc

SEQ ID NO: 42559 - RNA, 23 nt, Artificial Sequence
  Synthetic
cagagaacacaaaauugccaacc

SEQ ID NO: 42560 - RNA, 24 nt, Artificial Sequence
  Synthetic
ucagagaacacaaaauugccaacc

SEQ ID NO: 42561 - RNA, 20 nt, Artificial Sequence
  Synthetic
ugggcacggaggaugcaacc

SEQ ID NO: 42562 - RNA, 21 nt, Artificial Sequence
  Synthetic
cugggcacggaggaugcaacc

SEQ ID NO: 42563 - RNA, 22 nt, Artificial Sequence
  Synthetic
ucugggcacggaggaugcaacc

SEQ ID NO: 42564 - RNA, 23 nt, Artificial Sequence
  Synthetic
uucugggcacggaggaugcaacc

SEQ ID NO: 42565 - RNA, 24 nt, Artificial Sequence
  Synthetic
cuucugggcacggaggaugcaacc

SEQ ID NO: 42566 - RNA, 18 nt, Artificial Sequence
  Synthetic
auuuaguggcgugcaacc

SEQ ID NO: 42567 - RNA, 19 nt, Artificial Sequence
  Synthetic
uauuuaguggcgugcaacc

SEQ ID NO: 42568 - RNA, 21 nt, Artificial Sequence
  Synthetic
aguauuuaguggcgugcaacc

SEQ ID NO: 42569 - RNA, 22 nt, Artificial Sequence
  Synthetic
caguauuuaguggcgugcaacc

SEQ ID NO: 42570 - RNA, 18 nt, Artificial Sequence
  Synthetic
uacacaaagaaaucaacc

SEQ ID NO: 42571 - RNA, 19 nt, Artificial Sequence
  Synthetic
uuacacaaagaaaucaacc

SEQ ID NO: 42572 - RNA, 20 nt, Artificial Sequence
  Synthetic
uuuacacaaagaaaucaacc

SEQ ID NO: 42573 - RNA, 21 nt, Artificial Sequence
  Synthetic
auuuacacaaagaaaucaacc

SEQ ID NO: 42574 - RNA, 22 nt, Artificial Sequence
  Synthetic
aauuuacacaaagaaaucaacc

SEQ ID NO: 42575 - RNA, 23 nt, Artificial Sequence
  Synthetic
uaauuuacacaaagaaaucaacc

SEQ ID NO: 42576 - RNA, 24 nt, Artificial Sequence
  Synthetic
cuaauuuacacaaagaaaucaacc

SEQ ID NO: 42577 - RNA, 18 nt, Artificial Sequence
  Synthetic
auaagggaauuuucaacc

SEQ ID NO: 42578 - RNA, 19 nt, Artificial Sequence
  Synthetic
aauaagggaauuuucaacc

SEQ ID NO: 42579 - RNA, 20 nt, Artificial Sequence
  Synthetic
caauaagggaauuuucaacc

SEQ ID NO: 42580 - RNA, 18 nt, Artificial Sequence
  Synthetic
caccauggcaacagaacc

SEQ ID NO: 42581 - RNA, 19 nt, Artificial Sequence
  Synthetic
ccaccauggcaacagaacc

SEQ ID NO: 42582 - RNA, 20 nt, Artificial Sequence
  Synthetic
cccaccauggcaacagaacc

SEQ ID NO: 42583 - RNA, 21 nt, Artificial Sequence
  Synthetic
ucccaccauggcaacagaacc

SEQ ID NO: 42584 - RNA, 22 nt, Artificial Sequence
  Synthetic
aucccaccauggcaacagaacc

SEQ ID NO: 42585 - RNA, 23 nt, Artificial Sequence
  Synthetic
aaucccaccauggcaacagaacc

SEQ ID NO: 42586 - RNA, 24 nt, Artificial Sequence
  Synthetic
uaaucccaccauggcaacagaacc

SEQ ID NO: 42587 - RNA, 18 nt, Artificial Sequence
  Synthetic
augggauaggauagaacc

SEQ ID NO: 42588 - RNA, 19 nt, Artificial Sequence
  Synthetic
aaugggauaggauagaacc

SEQ ID NO: 42589 - RNA, 20 nt, Artificial Sequence
  Synthetic
aaaugggauaggauagaacc

SEQ ID NO: 42590 - RNA, 23 nt, Artificial Sequence
  Synthetic
aggaaaugggauaggauagaacc

SEQ ID NO: 42591 - RNA, 24 nt, Artificial Sequence
  Synthetic
caggaaaugggauaggauagaacc

SEQ ID NO: 42592 - RNA, 18 nt, Artificial Sequence
  Synthetic
ucauagagugaaggaacc

SEQ ID NO: 42593 - RNA, 19 nt, Artificial Sequence
  Synthetic
cucauagagugaaggaacc

SEQ ID NO: 42594 - RNA, 20 nt, Artificial Sequence
  Synthetic
ccucauagagugaaggaacc

SEQ ID NO: 42595 - RNA, 21 nt, Artificial Sequence
  Synthetic
cccucauagagugaaggaacc

SEQ ID NO: 42596 - RNA, 22 nt, Artificial Sequence
  Synthetic
ucccucauagagugaaggaacc

SEQ ID NO: 42597 - RNA, 23 nt, Artificial Sequence
  Synthetic
cucccucauagagugaaggaacc

SEQ ID NO: 42598 - RNA, 24 nt, Artificial Sequence
  Synthetic
ccucccucauagagugaaggaacc

SEQ ID NO: 42599 - RNA, 18 nt, Artificial Sequence
  Synthetic
aacauccacguaggaacc

SEQ ID NO: 42600 - RNA, 20 nt, Artificial Sequence
  Synthetic
agaacauccacguaggaacc

SEQ ID NO: 42601 - RNA, 21 nt, Artificial Sequence
  Synthetic
aagaacauccacguaggaacc

SEQ ID NO: 42602 - RNA, 22 nt, Artificial Sequence
  Synthetic
aaagaacauccacguaggaacc

SEQ ID NO: 42603 - RNA, 24 nt, Artificial Sequence
  Synthetic
ugaaagaacauccacguaggaacc

SEQ ID NO: 42604 - RNA, 18 nt, Artificial Sequence
  Synthetic
uuuuucaauaacugaacc

SEQ ID NO: 42605 - RNA, 20 nt, Artificial Sequence
  Synthetic
aguuuuucaauaacugaacc

SEQ ID NO: 42606 - RNA, 21 nt, Artificial Sequence
  Synthetic
aaguuuuucaauaacugaacc

SEQ ID NO: 42607 - RNA, 22 nt, Artificial Sequence
  Synthetic
aaaguuuuucaauaacugaacc

SEQ ID NO: 42608 - RNA, 23 nt, Artificial Sequence
  Synthetic
aaaaguuuuucaauaacugaacc

SEQ ID NO: 42609 - RNA, 24 nt, Artificial Sequence
  Synthetic
caaaaguuuuucaauaacugaacc

SEQ ID NO: 42610 - RNA, 18 nt, Artificial Sequence
  Synthetic
uaugguggggcuauaacc

SEQ ID NO: 42611 - RNA, 19 nt, Artificial Sequence
  Synthetic
cuaugguggggcuauaacc

SEQ ID NO: 42612 - RNA, 20 nt, Artificial Sequence
  Synthetic
ccuaugguggggcuauaacc

SEQ ID NO: 42613 - RNA, 21 nt, Artificial Sequence
  Synthetic
uccuaugguggggcuauaacc

SEQ ID NO: 42614 - RNA, 22 nt, Artificial Sequence
  Synthetic
uuccuaugguggggcuauaacc

SEQ ID NO: 42615 - RNA, 21 nt, Artificial Sequence
  Synthetic
uccuccucccuuccucuaacc

SEQ ID NO: 42616 - RNA, 22 nt, Artificial Sequence
  Synthetic
cuccuccucccuuccucuaacc

SEQ ID NO: 42617 - RNA, 23 nt, Artificial Sequence
  Synthetic
ucuccuccucccuuccucuaacc

SEQ ID NO: 42618 - RNA, 24 nt, Artificial Sequence
  Synthetic
uucuccuccucccuuccucuaacc

SEQ ID NO: 42619 - RNA, 18 nt, Artificial Sequence
  Synthetic
ccaucucuaagucuaacc

SEQ ID NO: 42620 - RNA, 19 nt, Artificial Sequence
  Synthetic
accaucucuaagucuaacc

SEQ ID NO: 42621 - RNA, 20 nt, Artificial Sequence
  Synthetic
uaccaucucuaagucuaacc

SEQ ID NO: 42622 - RNA, 21 nt, Artificial Sequence
  Synthetic
uuaccaucucuaagucuaacc

SEQ ID NO: 42623 - RNA, 22 nt, Artificial Sequence
  Synthetic
auuaccaucucuaagucuaacc

SEQ ID NO: 42624 - RNA, 23 nt, Artificial Sequence
  Synthetic
uauuaccaucucuaagucuaacc

SEQ ID NO: 42625 - RNA, 24 nt, Artificial Sequence
  Synthetic
uuauuaccaucucuaagucuaacc

SEQ ID NO: 42626 - RNA, 19 nt, Artificial Sequence
  Synthetic
agaggcagcccgaguaacc

SEQ ID NO: 42627 - RNA, 20 nt, Artificial Sequence
  Synthetic
uagaggcagcccgaguaacc

SEQ ID NO: 42628 - RNA, 21 nt, Artificial Sequence
  Synthetic
uuagaggcagcccgaguaacc

SEQ ID NO: 42629 - RNA, 22 nt, Artificial Sequence
  Synthetic
auuagaggcagcccgaguaacc

SEQ ID NO: 42630 - RNA, 24 nt, Artificial Sequence
  Synthetic
agauuagaggcagcccgaguaacc

SEQ ID NO: 42631 - RNA, 18 nt, Artificial Sequence
  Synthetic
uccgcagaagaaaacacc

SEQ ID NO: 42632 - RNA, 19 nt, Artificial Sequence
  Synthetic
uuccgcagaagaaaacacc

SEQ ID NO: 42633 - RNA, 20 nt, Artificial Sequence
  Synthetic
uuuccgcagaagaaaacacc

SEQ ID NO: 42634 - RNA, 21 nt, Artificial Sequence
  Synthetic
cuuuccgcagaagaaaacacc

SEQ ID NO: 42635 - RNA, 23 nt, Artificial Sequence
  Synthetic
ugcuuuccgcagaagaaaacacc

SEQ ID NO: 42636 - RNA, 24 nt, Artificial Sequence
  Synthetic
uugcuuuccgcagaagaaaacacc

SEQ ID NO: 42637 - RNA, 18 nt, Artificial Sequence
  Synthetic
uuauuacuuaugaacacc

SEQ ID NO: 42638 - RNA, 19 nt, Artificial Sequence
  Synthetic
auuauuacuuaugaacacc

SEQ ID NO: 42639 - RNA, 20 nt, Artificial Sequence
  Synthetic
uauuauuacuuaugaacacc

SEQ ID NO: 42640 - RNA, 22 nt, Artificial Sequence
  Synthetic
uguauuauuacuuaugaacacc

SEQ ID NO: 42641 - RNA, 23 nt, Artificial Sequence
  Synthetic
uuguauuauuacuuaugaacacc

SEQ ID NO: 42642 - RNA, 18 nt, Artificial Sequence
  Synthetic
agacaguaccaagacacc

SEQ ID NO: 42643 - RNA, 19 nt, Artificial Sequence
  Synthetic
aagacaguaccaagacacc

SEQ ID NO: 42644 - RNA, 20 nt, Artificial Sequence
  Synthetic
aaagacaguaccaagacacc

SEQ ID NO: 42645 - RNA, 21 nt, Artificial Sequence
  Synthetic
uaaagacaguaccaagacacc

SEQ ID NO: 42646 - RNA, 22 nt, Artificial Sequence
  Synthetic
auaaagacaguaccaagacacc

SEQ ID NO: 42647 - RNA, 23 nt, Artificial Sequence
  Synthetic
aauaaagacaguaccaagacacc

SEQ ID NO: 42648 - RNA, 19 nt, Artificial Sequence
  Synthetic
agugcaggaauaguacacc

SEQ ID NO: 42649 - RNA, 20 nt, Artificial Sequence
  Synthetic
cagugcaggaauaguacacc

SEQ ID NO: 42650 - RNA, 22 nt, Artificial Sequence
  Synthetic
agcagugcaggaauaguacacc

SEQ ID NO: 42651 - RNA, 23 nt, Artificial Sequence
  Synthetic
aagcagugcaggaauaguacacc

SEQ ID NO: 42652 - RNA, 18 nt, Artificial Sequence
  Synthetic
uucucucuuaaaaccacc

SEQ ID NO: 42653 - RNA, 19 nt, Artificial Sequence
  Synthetic
cuucucucuuaaaaccacc

SEQ ID NO: 42654 - RNA, 20 nt, Artificial Sequence
  Synthetic
ccuucucucuuaaaaccacc

SEQ ID NO: 42655 - RNA, 21 nt, Artificial Sequence
  Synthetic
accuucucucuuaaaaccacc

SEQ ID NO: 42656 - RNA, 22 nt, Artificial Sequence
  Synthetic
caccuucucucuuaaaaccacc

SEQ ID NO: 42657 - RNA, 23 nt, Artificial Sequence
  Synthetic
acaccuucucucuuaaaaccacc

SEQ ID NO: 42658 - RNA, 24 nt, Artificial Sequence
  Synthetic
cacaccuucucucuuaaaaccacc

SEQ ID NO: 42659 - RNA, 18 nt, Artificial Sequence
  Synthetic
aaaagaugaagaaccacc

SEQ ID NO: 42660 - RNA, 19 nt, Artificial Sequence
  Synthetic
caaaagaugaagaaccacc

SEQ ID NO: 42661 - RNA, 20 nt, Artificial Sequence
  Synthetic
ccaaaagaugaagaaccacc

SEQ ID NO: 42662 - RNA, 21 nt, Artificial Sequence
  Synthetic
accaaaagaugaagaaccacc

SEQ ID NO: 42663 - RNA, 22 nt, Artificial Sequence
  Synthetic
aaccaaaagaugaagaaccacc

SEQ ID NO: 42664 - RNA, 23 nt, Artificial Sequence
  Synthetic
aaaccaaaagaugaagaaccacc

SEQ ID NO: 42665 - RNA, 24 nt, Artificial Sequence
  Synthetic
uaaaccaaaagaugaagaaccacc

SEQ ID NO: 42666 - RNA, 18 nt, Artificial Sequence
  Synthetic
aaugaacuggaccccacc

SEQ ID NO: 42667 - RNA, 19 nt, Artificial Sequence
  Synthetic
uaaugaacuggaccccacc

SEQ ID NO: 42668 - RNA, 20 nt, Artificial Sequence
  Synthetic
auaaugaacuggaccccacc

SEQ ID NO: 42669 - RNA, 21 nt, Artificial Sequence
  Synthetic
aauaaugaacuggaccccacc

SEQ ID NO: 42670 - RNA, 22 nt, Artificial Sequence
  Synthetic
aaauaaugaacuggaccccacc

SEQ ID NO: 42671 - RNA, 24 nt, Artificial Sequence
  Synthetic
ugaaauaaugaacuggaccccacc

SEQ ID NO: 42672 - RNA, 18 nt, Artificial Sequence
  Synthetic
uuuuagagucuucccacc

SEQ ID NO: 42673 - RNA, 19 nt, Artificial Sequence
  Synthetic
auuuuagagucuucccacc

SEQ ID NO: 42674 - RNA, 20 nt, Artificial Sequence
  Synthetic
cauuuuagagucuucccacc

SEQ ID NO: 42675 - RNA, 21 nt, Artificial Sequence
  Synthetic
ccauuuuagagucuucccacc

SEQ ID NO: 42676 - RNA, 23 nt, Artificial Sequence
  Synthetic
ugccauuuuagagucuucccacc

SEQ ID NO: 42677 - RNA, 18 nt, Artificial Sequence
  Synthetic
cuuuggagauauuccacc

SEQ ID NO: 42678 - RNA, 19 nt, Artificial Sequence
  Synthetic
acuuuggagauauuccacc

SEQ ID NO: 42679 - RNA, 20 nt, Artificial Sequence
  Synthetic
aacuuuggagauauuccacc

SEQ ID NO: 42680 - RNA, 22 nt, Artificial Sequence
  Synthetic
ugaacuuuggagauauuccacc

SEQ ID NO: 42681 - RNA, 23 nt, Artificial Sequence
  Synthetic
augaacuuuggagauauuccacc

SEQ ID NO: 42682 - RNA, 18 nt, Artificial Sequence
  Synthetic
aaacaaguucugagcacc

SEQ ID NO: 42683 - RNA, 19 nt, Artificial Sequence
  Synthetic
uaaacaaguucugagcacc

SEQ ID NO: 42684 - RNA, 20 nt, Artificial Sequence
  Synthetic
auaaacaaguucugagcacc

SEQ ID NO: 42685 - RNA, 21 nt, Artificial Sequence
  Synthetic
cauaaacaaguucugagcacc

SEQ ID NO: 42686 - RNA, 22 nt, Artificial Sequence
  Synthetic
ucauaaacaaguucugagcacc

SEQ ID NO: 42687 - RNA, 23 nt, Artificial Sequence
  Synthetic
uucauaaacaaguucugagcacc

SEQ ID NO: 42688 - RNA, 24 nt, Artificial Sequence
  Synthetic
uuucauaaacaaguucugagcacc

SEQ ID NO: 42689 - RNA, 21 nt, Artificial Sequence
  Synthetic
ccuuuauuuuguuaaugcacc

SEQ ID NO: 42690 - RNA, 22 nt, Artificial Sequence
  Synthetic
accuuuauuuuguuaaugcacc

SEQ ID NO: 42691 - RNA, 24 nt, Artificial Sequence
  Synthetic
ugaccuuuauuuuguuaaugcacc

SEQ ID NO: 42692 - RNA, 18 nt, Artificial Sequence
  Synthetic
uucugaugucccaucacc

SEQ ID NO: 42693 - RNA, 19 nt, Artificial Sequence
  Synthetic
cuucugaugucccaucacc

SEQ ID NO: 42694 - RNA, 22 nt, Artificial Sequence
  Synthetic
uggcuucugaugucccaucacc

SEQ ID NO: 42695 - RNA, 24 nt, Artificial Sequence
  Synthetic
cguggcuucugaugucccaucacc

SEQ ID NO: 42696 - RNA, 18 nt, Artificial Sequence
  Synthetic
accccugcccuccucacc

SEQ ID NO: 42697 - RNA, 19 nt, Artificial Sequence
  Synthetic
aaccccugcccuccucacc

SEQ ID NO: 42698 - RNA, 20 nt, Artificial Sequence
  Synthetic
caaccccugcccuccucacc

SEQ ID NO: 42699 - RNA, 21 nt, Artificial Sequence
  Synthetic
ucaaccccugcccuccucacc

SEQ ID NO: 42700 - RNA, 22 nt, Artificial Sequence
  Synthetic
cucaaccccugcccuccucacc

SEQ ID NO: 42701 - RNA, 24 nt, Artificial Sequence
  Synthetic
ugcucaaccccugcccuccucacc

SEQ ID NO: 42702 - RNA, 18 nt, Artificial Sequence
  Synthetic
aagggaaaucaucucacc

SEQ ID NO: 42703 - RNA, 20 nt, Artificial Sequence
  Synthetic
ugaagggaaaucaucucacc

SEQ ID NO: 42704 - RNA, 21 nt, Artificial Sequence
  Synthetic
cugaagggaaaucaucucacc

SEQ ID NO: 42705 - RNA, 22 nt, Artificial Sequence
  Synthetic
acugaagggaaaucaucucacc

SEQ ID NO: 42706 - RNA, 23 nt, Artificial Sequence
  Synthetic
cacugaagggaaaucaucucacc

SEQ ID NO: 42707 - RNA, 24 nt, Artificial Sequence
  Synthetic
ccacugaagggaaaucaucucacc

SEQ ID NO: 42708 - RNA, 18 nt, Artificial Sequence
  Synthetic
uuacuaacaguagucacc

SEQ ID NO: 42709 - RNA, 20 nt, Artificial Sequence
  Synthetic
uguuacuaacaguagucacc

SEQ ID NO: 42710 - RNA, 21 nt, Artificial Sequence
  Synthetic
uuguuacuaacaguagucacc

SEQ ID NO: 42711 - RNA, 22 nt, Artificial Sequence
  Synthetic
auuguuacuaacaguagucacc

SEQ ID NO: 42712 - RNA, 23 nt, Artificial Sequence
  Synthetic
uauuguuacuaacaguagucacc

SEQ ID NO: 42713 - RNA, 24 nt, Artificial Sequence
  Synthetic
uuauuguuacuaacaguagucacc

SEQ ID NO: 42714 - RNA, 20 nt, Artificial Sequence
  Synthetic
uggucugggugauggucacc

SEQ ID NO: 42715 - RNA, 21 nt, Artificial Sequence
  Synthetic
uuggucugggugauggucacc

SEQ ID NO: 42716 - RNA, 22 nt, Artificial Sequence
  Synthetic
cuuggucugggugauggucacc

SEQ ID NO: 42717 - RNA, 23 nt, Artificial Sequence
  Synthetic
ucuuggucugggugauggucacc

SEQ ID NO: 42718 - RNA, 24 nt, Artificial Sequence
  Synthetic
uucuuggucugggugauggucacc

SEQ ID NO: 42719 - RNA, 19 nt, Artificial Sequence
  Synthetic
cgaggucuugagauucacc

SEQ ID NO: 42720 - RNA, 20 nt, Artificial Sequence
  Synthetic
acgaggucuugagauucacc

SEQ ID NO: 42721 - RNA, 21 nt, Artificial Sequence
  Synthetic
aacgaggucuugagauucacc

SEQ ID NO: 42722 - RNA, 22 nt, Artificial Sequence
  Synthetic
aaacgaggucuugagauucacc

SEQ ID NO: 42723 - RNA, 23 nt, Artificial Sequence
  Synthetic
uaaacgaggucuugagauucacc

SEQ ID NO: 42724 - RNA, 24 nt, Artificial Sequence
  Synthetic
auaaacgaggucuugagauucacc

SEQ ID NO: 42725 - RNA, 18 nt, Artificial Sequence
  Synthetic
aauggaauauuuuucacc

SEQ ID NO: 42726 - RNA, 19 nt, Artificial Sequence
  Synthetic
uaauggaauauuuuucacc

SEQ ID NO: 42727 - RNA, 20 nt, Artificial Sequence
  Synthetic
cuaauggaauauuuuucacc

SEQ ID NO: 42728 - RNA, 21 nt, Artificial Sequence
  Synthetic
ucuaauggaauauuuuucacc

SEQ ID NO: 42729 - RNA, 22 nt, Artificial Sequence
  Synthetic
uucuaauggaauauuuuucacc

SEQ ID NO: 42730 - RNA, 23 nt, Artificial Sequence
  Synthetic
uuucuaauggaauauuuuucacc

SEQ ID NO: 42731 - RNA, 24 nt, Artificial Sequence
  Synthetic
uuuucuaauggaauauuuuucacc

SEQ ID NO: 42732 - RNA, 18 nt, Artificial Sequence
  Synthetic
cuggaacaugaguagacc

SEQ ID NO: 42733 - RNA, 19 nt, Artificial Sequence
  Synthetic
ucuggaacaugaguagacc

SEQ ID NO: 42734 - RNA, 20 nt, Artificial Sequence
  Synthetic
aucuggaacaugaguagacc

SEQ ID NO: 42735 - RNA, 23 nt, Artificial Sequence
  Synthetic
uggaucuggaacaugaguagacc

SEQ ID NO: 42736 - RNA, 24 nt, Artificial Sequence
  Synthetic
uuggaucuggaacaugaguagacc

SEQ ID NO: 42737 - RNA, 18 nt, Artificial Sequence
  Synthetic
uuucucuguucuuagacc

SEQ ID NO: 42738 - RNA, 20 nt, Artificial Sequence
  Synthetic
uguuucucuguucuuagacc

SEQ ID NO: 42739 - RNA, 22 nt, Artificial Sequence
  Synthetic
cguguuucucuguucuuagacc

SEQ ID NO: 42740 - RNA, 23 nt, Artificial Sequence
  Synthetic
acguguuucucuguucuuagacc

SEQ ID NO: 42741 - RNA, 24 nt, Artificial Sequence
  Synthetic
cacguguuucucuguucuuagacc

SEQ ID NO: 42742 - RNA, 18 nt, Artificial Sequence
  Synthetic
uuugucacuccaacgacc

SEQ ID NO: 42743 - RNA, 19 nt, Artificial Sequence
  Synthetic
uuuugucacuccaacgacc

SEQ ID NO: 42744 - RNA, 20 nt, Artificial Sequence
  Synthetic
auuuugucacuccaacgacc

SEQ ID NO: 42745 - RNA, 23 nt, Artificial Sequence
  Synthetic
aggauuuugucacuccaacgacc

SEQ ID NO: 42746 - RNA, 24 nt, Artificial Sequence
  Synthetic
aaggauuuugucacuccaacgacc

SEQ ID NO: 42747 - RNA, 19 nt, Artificial Sequence
  Synthetic
ugaguugcagcaagggacc

SEQ ID NO: 42748 - RNA, 20 nt, Artificial Sequence
  Synthetic
cugaguugcagcaagggacc

SEQ ID NO: 42749 - RNA, 21 nt, Artificial Sequence
  Synthetic
ccugaguugcagcaagggacc

SEQ ID NO: 42750 - RNA, 22 nt, Artificial Sequence
  Synthetic
uccugaguugcagcaagggacc

SEQ ID NO: 42751 - RNA, 24 nt, Artificial Sequence
  Synthetic
uguccugaguugcagcaagggacc

SEQ ID NO: 42752 - RNA, 18 nt, Artificial Sequence
  Synthetic
uaugggucacgugggacc

SEQ ID NO: 42753 - RNA, 19 nt, Artificial Sequence
  Synthetic
auaugggucacgugggacc

SEQ ID NO: 42754 - RNA, 20 nt, Artificial Sequence
  Synthetic
aauaugggucacgugggacc

SEQ ID NO: 42755 - RNA, 22 nt, Artificial Sequence
  Synthetic
cgaauaugggucacgugggacc

SEQ ID NO: 42756 - RNA, 23 nt, Artificial Sequence
  Synthetic
acgaauaugggucacgugggacc

SEQ ID NO: 42757 - RNA, 24 nt, Artificial Sequence
  Synthetic
aacgaauaugggucacgugggacc

SEQ ID NO: 42758 - RNA, 18 nt, Artificial Sequence
  Synthetic
auuuuccauuuugggacc

SEQ ID NO: 42759 - RNA, 19 nt, Artificial Sequence
  Synthetic
uauuuuccauuuugggacc

SEQ ID NO: 42760 - RNA, 20 nt, Artificial Sequence
  Synthetic
uuauuuuccauuuugggacc

SEQ ID NO: 42761 - RNA, 21 nt, Artificial Sequence
  Synthetic
auuauuuuccauuuugggacc

SEQ ID NO: 42762 - RNA, 22 nt, Artificial Sequence
  Synthetic
uauuauuuuccauuuugggacc

SEQ ID NO: 42763 - RNA, 23 nt, Artificial Sequence
  Synthetic
uuauuauuuuccauuuugggacc

SEQ ID NO: 42764 - RNA, 24 nt, Artificial Sequence
  Synthetic
uuuauuauuuuccauuuugggacc

SEQ ID NO: 42765 - RNA, 18 nt, Artificial Sequence
  Synthetic
uauuucuaggaauggacc

SEQ ID NO: 42766 - RNA, 20 nt, Artificial Sequence
  Synthetic
uguauuucuaggaauggacc

SEQ ID NO: 42767 - RNA, 21 nt, Artificial Sequence
  Synthetic
cuguauuucuaggaauggacc

SEQ ID NO: 42768 - RNA, 22 nt, Artificial Sequence
  Synthetic
acuguauuucuaggaauggacc

SEQ ID NO: 42769 - RNA, 23 nt, Artificial Sequence
  Synthetic
aacuguauuucuaggaauggacc

SEQ ID NO: 42770 - RNA, 24 nt, Artificial Sequence
  Synthetic
uaacuguauuucuaggaauggacc

SEQ ID NO: 42771 - RNA, 18 nt, Artificial Sequence
  Synthetic
caguugagcugaaugacc

SEQ ID NO: 42772 - RNA, 19 nt, Artificial Sequence
  Synthetic
ucaguugagcugaaugacc

SEQ ID NO: 42773 - RNA, 20 nt, Artificial Sequence
  Synthetic
uucaguugagcugaaugacc

SEQ ID NO: 42774 - RNA, 21 nt, Artificial Sequence
  Synthetic
uuucaguugagcugaaugacc

SEQ ID NO: 42775 - RNA, 23 nt, Artificial Sequence
  Synthetic
aguuucaguugagcugaaugacc

SEQ ID NO: 42776 - RNA, 24 nt, Artificial Sequence
  Synthetic
caguuucaguugagcugaaugacc

SEQ ID NO: 42777 - RNA, 18 nt, Artificial Sequence
  Synthetic
aucaucaucuccaugacc

SEQ ID NO: 42778 - RNA, 19 nt, Artificial Sequence
  Synthetic
caucaucaucuccaugacc

SEQ ID NO: 42779 - RNA, 20 nt, Artificial Sequence
  Synthetic
ccaucaucaucuccaugacc

SEQ ID NO: 42780 - RNA, 22 nt, Artificial Sequence
  Synthetic
ugccaucaucaucuccaugacc

SEQ ID NO: 42781 - RNA, 23 nt, Artificial Sequence
  Synthetic
cugccaucaucaucuccaugacc

SEQ ID NO: 42782 - RNA, 18 nt, Artificial Sequence
  Synthetic
agaaaacaucuuaugacc

SEQ ID NO: 42783 - RNA, 21 nt, Artificial Sequence
  Synthetic
uggagaaaacaucuuaugacc

SEQ ID NO: 42784 - RNA, 22 nt, Artificial Sequence
  Synthetic
cuggagaaaacaucuuaugacc

SEQ ID NO: 42785 - RNA, 23 nt, Artificial Sequence
  Synthetic
acuggagaaaacaucuuaugacc

SEQ ID NO: 42786 - RNA, 24 nt, Artificial Sequence
  Synthetic
cacuggagaaaacaucuuaugacc

SEQ ID NO: 42787 - RNA, 18 nt, Artificial Sequence
  Synthetic
acacuguguacacugacc

SEQ ID NO: 42788 - RNA, 19 nt, Artificial Sequence
  Synthetic
uacacuguguacacugacc

SEQ ID NO: 42789 - RNA, 21 nt, Artificial Sequence
  Synthetic
uguacacuguguacacugacc

SEQ ID NO: 42790 - RNA, 22 nt, Artificial Sequence
  Synthetic
auguacacuguguacacugacc

SEQ ID NO: 42791 - RNA, 23 nt, Artificial Sequence
  Synthetic
aauguacacuguguacacugacc

SEQ ID NO: 42792 - RNA, 24 nt, Artificial Sequence
  Synthetic
aaauguacacuguguacacugacc

SEQ ID NO: 42793 - RNA, 19 nt, Artificial Sequence
  Synthetic
agaaauguauucagugacc

SEQ ID NO: 42794 - RNA, 20 nt, Artificial Sequence
  Synthetic
uagaaauguauucagugacc

SEQ ID NO: 42795 - RNA, 23 nt, Artificial Sequence
  Synthetic
ugguagaaauguauucagugacc

SEQ ID NO: 42796 - RNA, 21 nt, Artificial Sequence
  Synthetic
uggcucccaagcugugugacc

SEQ ID NO: 42797 - RNA, 22 nt, Artificial Sequence
  Synthetic
uuggcucccaagcugugugacc

SEQ ID NO: 42798 - RNA, 23 nt, Artificial Sequence
  Synthetic
cuuggcucccaagcugugugacc

SEQ ID NO: 42799 - RNA, 18 nt, Artificial Sequence
  Synthetic
aauuagauuuuugugacc

SEQ ID NO: 42800 - RNA, 19 nt, Artificial Sequence
  Synthetic
caauuagauuuuugugacc

SEQ ID NO: 42801 - RNA, 20 nt, Artificial Sequence
  Synthetic
ucaauuagauuuuugugacc

SEQ ID NO: 42802 - RNA, 21 nt, Artificial Sequence
  Synthetic
uucaauuagauuuuugugacc

SEQ ID NO: 42803 - RNA, 22 nt, Artificial Sequence
  Synthetic
auucaauuagauuuuugugacc

SEQ ID NO: 42804 - RNA, 23 nt, Artificial Sequence
  Synthetic
uauucaauuagauuuuugugacc

SEQ ID NO: 42805 - RNA, 24 nt, Artificial Sequence
  Synthetic
cuauucaauuagauuuuugugacc

SEQ ID NO: 42806 - RNA, 19 nt, Artificial Sequence
  Synthetic
agagagaaggagaaauacc

SEQ ID NO: 42807 - RNA, 20 nt, Artificial Sequence
  Synthetic
cagagagaaggagaaauacc

SEQ ID NO: 42808 - RNA, 22 nt, Artificial Sequence
  Synthetic
agcagagagaaggagaaauacc

SEQ ID NO: 42809 - RNA, 24 nt, Artificial Sequence
  Synthetic
agagcagagagaaggagaaauacc

SEQ ID NO: 42810 - RNA, 18 nt, Artificial Sequence
  Synthetic
cauccaauauagaauacc

SEQ ID NO: 42811 - RNA, 19 nt, Artificial Sequence
  Synthetic
acauccaauauagaauacc

SEQ ID NO: 42812 - RNA, 23 nt, Artificial Sequence
  Synthetic
agggacauccaauauagaauacc

SEQ ID NO: 42813 - RNA, 18 nt, Artificial Sequence
  Synthetic
cugguucuuaaugauacc

SEQ ID NO: 42814 - RNA, 19 nt, Artificial Sequence
  Synthetic
ccugguucuuaaugauacc

SEQ ID NO: 42815 - RNA, 20 nt, Artificial Sequence
  Synthetic
uccugguucuuaaugauacc

SEQ ID NO: 42816 - RNA, 21 nt, Artificial Sequence
  Synthetic
auccugguucuuaaugauacc

SEQ ID NO: 42817 - RNA, 22 nt, Artificial Sequence
  Synthetic
cauccugguucuuaaugauacc

SEQ ID NO: 42818 - RNA, 23 nt, Artificial Sequence
  Synthetic
ucauccugguucuuaaugauacc

SEQ ID NO: 42819 - RNA, 24 nt, Artificial Sequence
  Synthetic
uucauccugguucuuaaugauacc

SEQ ID NO: 42820 - RNA, 19 nt, Artificial Sequence
  Synthetic
agugcuuacuuuugauacc

SEQ ID NO: 42821 - RNA, 20 nt, Artificial Sequence
  Synthetic
aagugcuuacuuuugauacc

SEQ ID NO: 42822 - RNA, 21 nt, Artificial Sequence
  Synthetic
caagugcuuacuuuugauacc

SEQ ID NO: 42823 - RNA, 22 nt, Artificial Sequence
  Synthetic
ucaagugcuuacuuuugauacc

SEQ ID NO: 42824 - RNA, 23 nt, Artificial Sequence
  Synthetic
uucaagugcuuacuuuugauacc

SEQ ID NO: 42825 - RNA, 24 nt, Artificial Sequence
  Synthetic
cuucaagugcuuacuuuugauacc

SEQ ID NO: 42826 - RNA, 18 nt, Artificial Sequence
  Synthetic
ccuacccuccacccuacc

SEQ ID NO: 42827 - RNA, 19 nt, Artificial Sequence
  Synthetic
accuacccuccacccuacc

SEQ ID NO: 42828 - RNA, 20 nt, Artificial Sequence
  Synthetic
caccuacccuccacccuacc

SEQ ID NO: 42829 - RNA, 21 nt, Artificial Sequence
  Synthetic
ccaccuacccuccacccuacc

SEQ ID NO: 42830 - RNA, 22 nt, Artificial Sequence
  Synthetic
uccaccuacccuccacccuacc

SEQ ID NO: 42831 - RNA, 23 nt, Artificial Sequence
  Synthetic
auccaccuacccuccacccuacc

SEQ ID NO: 42832 - RNA, 24 nt, Artificial Sequence
  Synthetic
aauccaccuacccuccacccuacc

SEQ ID NO: 42833 - RNA, 18 nt, Artificial Sequence
  Synthetic
caaaguagauugccuacc

SEQ ID NO: 42834 - RNA, 19 nt, Artificial Sequence
  Synthetic
ccaaaguagauugccuacc

SEQ ID NO: 42835 - RNA, 20 nt, Artificial Sequence
  Synthetic
accaaaguagauugccuacc

SEQ ID NO: 42836 - RNA, 21 nt, Artificial Sequence
  Synthetic
aaccaaaguagauugccuacc

SEQ ID NO: 42837 - RNA, 22 nt, Artificial Sequence
  Synthetic
uaaccaaaguagauugccuacc

SEQ ID NO: 42838 - RNA, 23 nt, Artificial Sequence
  Synthetic
uuaaccaaaguagauugccuacc

SEQ ID NO: 42839 - RNA, 24 nt, Artificial Sequence
  Synthetic
auuaaccaaaguagauugccuacc

SEQ ID NO: 42840 - RNA, 19 nt, Artificial Sequence
  Synthetic
ugcauugcacguaucuacc

SEQ ID NO: 42841 - RNA, 20 nt, Artificial Sequence
  Synthetic
augcauugcacguaucuacc

SEQ ID NO: 42842 - RNA, 21 nt, Artificial Sequence
  Synthetic
aaugcauugcacguaucuacc

SEQ ID NO: 42843 - RNA, 22 nt, Artificial Sequence
  Synthetic
aaaugcauugcacguaucuacc

SEQ ID NO: 42844 - RNA, 23 nt, Artificial Sequence
  Synthetic
caaaugcauugcacguaucuacc

SEQ ID NO: 42845 - RNA, 24 nt, Artificial Sequence
  Synthetic
ucaaaugcauugcacguaucuacc

SEQ ID NO: 42846 - RNA, 18 nt, Artificial Sequence
  Synthetic
augcauuuuuucucuacc

SEQ ID NO: 42847 - RNA, 19 nt, Artificial Sequence
  Synthetic
uaugcauuuuuucucuacc

SEQ ID NO: 42848 - RNA, 20 nt, Artificial Sequence
  Synthetic
auaugcauuuuuucucuacc

SEQ ID NO: 42849 - RNA, 21 nt, Artificial Sequence
  Synthetic
aauaugcauuuuuucucuacc

SEQ ID NO: 42850 - RNA, 22 nt, Artificial Sequence
  Synthetic
aaauaugcauuuuuucucuacc

SEQ ID NO: 42851 - RNA, 23 nt, Artificial Sequence
  Synthetic
uaaauaugcauuuuuucucuacc

SEQ ID NO: 42852 - RNA, 24 nt, Artificial Sequence
  Synthetic
cuaaauaugcauuuuuucucuacc

SEQ ID NO: 42853 - RNA, 18 nt, Artificial Sequence
  Synthetic
aguagcacaauuaguacc

SEQ ID NO: 42854 - RNA, 19 nt, Artificial Sequence
  Synthetic
uaguagcacaauuaguacc

SEQ ID NO: 42855 - RNA, 20 nt, Artificial Sequence
  Synthetic
uuaguagcacaauuaguacc

SEQ ID NO: 42856 - RNA, 21 nt, Artificial Sequence
  Synthetic
cuuaguagcacaauuaguacc

SEQ ID NO: 42857 - RNA, 22 nt, Artificial Sequence
  Synthetic
ucuuaguagcacaauuaguacc

SEQ ID NO: 42858 - RNA, 23 nt, Artificial Sequence
  Synthetic
aucuuaguagcacaauuaguacc

SEQ ID NO: 42859 - RNA, 24 nt, Artificial Sequence
  Synthetic
aaucuuaguagcacaauuaguacc

SEQ ID NO: 42860 - RNA, 19 nt, Artificial Sequence
  Synthetic
aggaacagcgcuuaguacc

SEQ ID NO: 42861 - RNA, 20 nt, Artificial Sequence
  Synthetic
caggaacagcgcuuaguacc

SEQ ID NO: 42862 - RNA, 21 nt, Artificial Sequence
  Synthetic
ccaggaacagcgcuuaguacc

SEQ ID NO: 42863 - RNA, 22 nt, Artificial Sequence
  Synthetic
accaggaacagcgcuuaguacc

SEQ ID NO: 42864 - RNA, 23 nt, Artificial Sequence
  Synthetic
uaccaggaacagcgcuuaguacc

SEQ ID NO: 42865 - RNA, 21 nt, Artificial Sequence
  Synthetic
uacugagggugaucagguacc

SEQ ID NO: 42866 - RNA, 22 nt, Artificial Sequence
  Synthetic
auacugagggugaucagguacc

SEQ ID NO: 42867 - RNA, 23 nt, Artificial Sequence
  Synthetic
aauacugagggugaucagguacc

SEQ ID NO: 42868 - RNA, 18 nt, Artificial Sequence
  Synthetic
uggguauuugaugguacc

SEQ ID NO: 42869 - RNA, 19 nt, Artificial Sequence
  Synthetic
auggguauuugaugguacc

SEQ ID NO: 42870 - RNA, 22 nt, Artificial Sequence
  Synthetic
uggauggguauuugaugguacc

SEQ ID NO: 42871 - RNA, 23 nt, Artificial Sequence
  Synthetic
auggauggguauuugaugguacc

SEQ ID NO: 42872 - RNA, 18 nt, Artificial Sequence
  Synthetic
aggaaaggaugcuguacc

SEQ ID NO: 42873 - RNA, 19 nt, Artificial Sequence
  Synthetic
uaggaaaggaugcuguacc

SEQ ID NO: 42874 - RNA, 20 nt, Artificial Sequence
  Synthetic
auaggaaaggaugcuguacc

SEQ ID NO: 42875 - RNA, 21 nt, Artificial Sequence
  Synthetic
aauaggaaaggaugcuguacc

SEQ ID NO: 42876 - RNA, 22 nt, Artificial Sequence
  Synthetic
aaauaggaaaggaugcuguacc

SEQ ID NO: 42877 - RNA, 23 nt, Artificial Sequence
  Synthetic
aaaauaggaaaggaugcuguacc

SEQ ID NO: 42878 - RNA, 19 nt, Artificial Sequence
  Synthetic
ugcuguuuuaaaaauuacc

SEQ ID NO: 42879 - RNA, 20 nt, Artificial Sequence
  Synthetic
augcuguuuuaaaaauuacc

SEQ ID NO: 42880 - RNA, 21 nt, Artificial Sequence
  Synthetic
caugcuguuuuaaaaauuacc

SEQ ID NO: 42881 - RNA, 23 nt, Artificial Sequence
  Synthetic
ugcaugcuguuuuaaaaauuacc

SEQ ID NO: 42882 - RNA, 24 nt, Artificial Sequence
  Synthetic
uugcaugcuguuuuaaaaauuacc

SEQ ID NO: 42883 - RNA, 21 nt, Artificial Sequence
  Synthetic
auacaaaaaauucaaauuacc

SEQ ID NO: 42884 - RNA, 22 nt, Artificial Sequence
  Synthetic
aauacaaaaaauucaaauuacc

SEQ ID NO: 42885 - RNA, 23 nt, Artificial Sequence
  Synthetic
uaauacaaaaaauucaaauuacc

SEQ ID NO: 42886 - RNA, 24 nt, Artificial Sequence
  Synthetic
auaauacaaaaaauucaaauuacc

SEQ ID NO: 42887 - RNA, 18 nt, Artificial Sequence
  Synthetic
caaauccucaagcuuacc

SEQ ID NO: 42888 - RNA, 19 nt, Artificial Sequence
  Synthetic
ucaaauccucaagcuuacc

SEQ ID NO: 42889 - RNA, 20 nt, Artificial Sequence
  Synthetic
aucaaauccucaagcuuacc

SEQ ID NO: 42890 - RNA, 21 nt, Artificial Sequence
  Synthetic
aaucaaauccucaagcuuacc

SEQ ID NO: 42891 - RNA, 22 nt, Artificial Sequence
  Synthetic
aaaucaaauccucaagcuuacc

SEQ ID NO: 42892 - RNA, 23 nt, Artificial Sequence
  Synthetic
uaaaucaaauccucaagcuuacc

SEQ ID NO: 42893 - RNA, 24 nt, Artificial Sequence
  Synthetic
cuaaaucaaauccucaagcuuacc

SEQ ID NO: 42894 - RNA, 18 nt, Artificial Sequence
  Synthetic
aagaauucaaaaguuacc

SEQ ID NO: 42895 - RNA, 19 nt, Artificial Sequence
  Synthetic
caagaauucaaaaguuacc

SEQ ID NO: 42896 - RNA, 20 nt, Artificial Sequence
  Synthetic
acaagaauucaaaaguuacc

SEQ ID NO: 42897 - RNA, 23 nt, Artificial Sequence
  Synthetic
uggacaagaauucaaaaguuacc

SEQ ID NO: 42898 - RNA, 24 nt, Artificial Sequence
  Synthetic
uuggacaagaauucaaaaguuacc

SEQ ID NO: 42899 - RNA, 18 nt, Artificial Sequence
  Synthetic
uuaucaguauuuguuacc

SEQ ID NO: 42900 - RNA, 21 nt, Artificial Sequence
  Synthetic
agguuaucaguauuuguuacc

SEQ ID NO: 42901 - RNA, 22 nt, Artificial Sequence
  Synthetic
uagguuaucaguauuuguuacc

SEQ ID NO: 42902 - RNA, 23 nt, Artificial Sequence
  Synthetic
cuagguuaucaguauuuguuacc

SEQ ID NO: 42903 - RNA, 24 nt, Artificial Sequence
  Synthetic
acuagguuaucaguauuuguuacc

SEQ ID NO: 42904 - RNA, 18 nt, Artificial Sequence
  Synthetic
cugcauacgguauuuacc

SEQ ID NO: 42905 - RNA, 20 nt, Artificial Sequence
  Synthetic
agcugcauacgguauuuacc

SEQ ID NO: 42906 - RNA, 21 nt, Artificial Sequence
  Synthetic
cagcugcauacgguauuuacc

SEQ ID NO: 42907 - RNA, 22 nt, Artificial Sequence
  Synthetic
acagcugcauacgguauuuacc

SEQ ID NO: 42908 - RNA, 23 nt, Artificial Sequence
  Synthetic
uacagcugcauacgguauuuacc

SEQ ID NO: 42909 - RNA, 18 nt, Artificial Sequence
  Synthetic
accaucuuuuccuuuacc

SEQ ID NO: 42910 - RNA, 19 nt, Artificial Sequence
  Synthetic
uaccaucuuuuccuuuacc

SEQ ID NO: 42911 - RNA, 20 nt, Artificial Sequence
  Synthetic
uuaccaucuuuuccuuuacc

SEQ ID NO: 42912 - RNA, 21 nt, Artificial Sequence
  Synthetic
auuaccaucuuuuccuuuacc

SEQ ID NO: 42913 - RNA, 22 nt, Artificial Sequence
  Synthetic
aauuaccaucuuuuccuuuacc

SEQ ID NO: 42914 - RNA, 23 nt, Artificial Sequence
  Synthetic
uaauuaccaucuuuuccuuuacc

SEQ ID NO: 42915 - RNA, 24 nt, Artificial Sequence
  Synthetic
uuaauuaccaucuuuuccuuuacc

SEQ ID NO: 42916 - RNA, 18 nt, Artificial Sequence
  Synthetic
caugcuauucuuuuuacc

SEQ ID NO: 42917 - RNA, 19 nt, Artificial Sequence
  Synthetic
ccaugcuauucuuuuuacc

SEQ ID NO: 42918 - RNA, 20 nt, Artificial Sequence
  Synthetic
cccaugcuauucuuuuuacc

SEQ ID NO: 42919 - RNA, 21 nt, Artificial Sequence
  Synthetic
ucccaugcuauucuuuuuacc

SEQ ID NO: 42920 - RNA, 22 nt, Artificial Sequence
  Synthetic
uucccaugcuauucuuuuuacc

SEQ ID NO: 42921 - RNA, 23 nt, Artificial Sequence
  Synthetic
auucccaugcuauucuuuuuacc

SEQ ID NO: 42922 - RNA, 24 nt, Artificial Sequence
  Synthetic
cauucccaugcuauucuuuuuacc

SEQ ID NO: 42923 - RNA, 18 nt, Artificial Sequence
  Synthetic
ucuauucuuggaaaaccc

SEQ ID NO: 42924 - RNA, 19 nt, Artificial Sequence
  Synthetic
uucuauucuuggaaaaccc

SEQ ID NO: 42925 - RNA, 20 nt, Artificial Sequence
  Synthetic
uuucuauucuuggaaaaccc

SEQ ID NO: 42926 - RNA, 21 nt, Artificial Sequence
  Synthetic
auuucuauucuuggaaaaccc

SEQ ID NO: 42927 - RNA, 23 nt, Artificial Sequence
  Synthetic
agauuucuauucuuggaaaaccc

SEQ ID NO: 42928 - RNA, 24 nt, Artificial Sequence
  Synthetic
cagauuucuauucuuggaaaaccc

SEQ ID NO: 42929 - RNA, 18 nt, Artificial Sequence
  Synthetic
aaaagaucaaaacaaccc

SEQ ID NO: 42930 - RNA, 20 nt, Artificial Sequence
  Synthetic
agaaaagaucaaaacaaccc

SEQ ID NO: 42931 - RNA, 22 nt, Artificial Sequence
  Synthetic
cgagaaaagaucaaaacaaccc

SEQ ID NO: 42932 - RNA, 23 nt, Artificial Sequence
  Synthetic
acgagaaaagaucaaaacaaccc

SEQ ID NO: 42933 - RNA, 24 nt, Artificial Sequence
  Synthetic
aacgagaaaagaucaaaacaaccc

SEQ ID NO: 42934 - RNA, 21 nt, Artificial Sequence
  Synthetic
uagauuacugggcuucaaccc

SEQ ID NO: 42935 - RNA, 22 nt, Artificial Sequence
  Synthetic
auagauuacugggcuucaaccc

SEQ ID NO: 42936 - RNA, 23 nt, Artificial Sequence
  Synthetic
uauagauuacugggcuucaaccc

SEQ ID NO: 42937 - RNA, 18 nt, Artificial Sequence
  Synthetic
acuguaguuagugaaccc

SEQ ID NO: 42938 - RNA, 20 nt, Artificial Sequence
  Synthetic
ugacuguaguuagugaaccc

SEQ ID NO: 42939 - RNA, 21 nt, Artificial Sequence
  Synthetic
augacuguaguuagugaaccc

SEQ ID NO: 42940 - RNA, 22 nt, Artificial Sequence
  Synthetic
uaugacuguaguuagugaaccc

SEQ ID NO: 42941 - RNA, 23 nt, Artificial Sequence
  Synthetic
uuaugacuguaguuagugaaccc

SEQ ID NO: 42942 - RNA, 18 nt, Artificial Sequence
  Synthetic
uagacuacucuugaaccc

SEQ ID NO: 42943 - RNA, 20 nt, Artificial Sequence
  Synthetic
aguagacuacucuugaaccc

SEQ ID NO: 42944 - RNA, 21 nt, Artificial Sequence
  Synthetic
aaguagacuacucuugaaccc

SEQ ID NO: 42945 - RNA, 22 nt, Artificial Sequence
  Synthetic
uaaguagacuacucuugaaccc

SEQ ID NO: 42946 - RNA, 23 nt, Artificial Sequence
  Synthetic
cuaaguagacuacucuugaaccc

SEQ ID NO: 42947 - RNA, 24 nt, Artificial Sequence
  Synthetic
ucuaaguagacuacucuugaaccc

SEQ ID NO: 42948 - RNA, 18 nt, Artificial Sequence
  Synthetic
uuagguaucaaguaaccc

SEQ ID NO: 42949 - RNA, 19 nt, Artificial Sequence
  Synthetic
cuuagguaucaaguaaccc

SEQ ID NO: 42950 - RNA, 20 nt, Artificial Sequence
  Synthetic
ccuuagguaucaaguaaccc

SEQ ID NO: 42951 - RNA, 21 nt, Artificial Sequence
  Synthetic
cccuuagguaucaaguaaccc

SEQ ID NO: 42952 - RNA, 23 nt, Artificial Sequence
  Synthetic
agcccuuagguaucaaguaaccc

SEQ ID NO: 42953 - RNA, 24 nt, Artificial Sequence
  Synthetic
uagcccuuagguaucaaguaaccc

SEQ ID NO: 42954 - RNA, 18 nt, Artificial Sequence
  Synthetic
ucacucuagcauuaaccc

SEQ ID NO: 42955 - RNA, 19 nt, Artificial Sequence
  Synthetic
cucacucuagcauuaaccc

SEQ ID NO: 42956 - RNA, 20 nt, Artificial Sequence
  Synthetic
acucacucuagcauuaaccc

SEQ ID NO: 42957 - RNA, 18 nt, Artificial Sequence
  Synthetic
uuuuuacucuucucaccc

SEQ ID NO: 42958 - RNA, 19 nt, Artificial Sequence
  Synthetic
uuuuuuacucuucucaccc

SEQ ID NO: 42959 - RNA, 20 nt, Artificial Sequence
  Synthetic
cuuuuuuacucuucucaccc

SEQ ID NO: 42960 - RNA, 21 nt, Artificial Sequence
  Synthetic
ucuuuuuuacucuucucaccc

SEQ ID NO: 42961 - RNA, 22 nt, Artificial Sequence
  Synthetic
aucuuuuuuacucuucucaccc

SEQ ID NO: 42962 - RNA, 23 nt, Artificial Sequence
  Synthetic
aaucuuuuuuacucuucucaccc

SEQ ID NO: 42963 - RNA, 24 nt, Artificial Sequence
  Synthetic
aaaucuuuuuuacucuucucaccc

SEQ ID NO: 42964 - RNA, 18 nt, Artificial Sequence
  Synthetic
ugucuauuucauucaccc

SEQ ID NO: 42965 - RNA, 19 nt, Artificial Sequence
  Synthetic
cugucuauuucauucaccc

SEQ ID NO: 42966 - RNA, 20 nt, Artificial Sequence
  Synthetic
ucugucuauuucauucaccc

SEQ ID NO: 42967 - RNA, 21 nt, Artificial Sequence
  Synthetic
cucugucuauuucauucaccc

SEQ ID NO: 42968 - RNA, 24 nt, Artificial Sequence
  Synthetic
aggcucugucuauuucauucaccc

SEQ ID NO: 42969 - RNA, 18 nt, Artificial Sequence
  Synthetic
uguucaccuccaagaccc

SEQ ID NO: 42970 - RNA, 19 nt, Artificial Sequence
  Synthetic
uuguucaccuccaagaccc

SEQ ID NO: 42971 - RNA, 20 nt, Artificial Sequence
  Synthetic
cuuguucaccuccaagaccc

SEQ ID NO: 42972 - RNA, 21 nt, Artificial Sequence
  Synthetic
ucuuguucaccuccaagaccc

SEQ ID NO: 42973 - RNA, 23 nt, Artificial Sequence
  Synthetic
ugucuuguucaccuccaagaccc

SEQ ID NO: 42974 - RNA, 24 nt, Artificial Sequence
  Synthetic
uugucuuguucaccuccaagaccc

SEQ ID NO: 42975 - RNA, 19 nt, Artificial Sequence
  Synthetic
agaacaugaaagaagaccc

SEQ ID NO: 42976 - RNA, 21 nt, Artificial Sequence
  Synthetic
agagaacaugaaagaagaccc

SEQ ID NO: 42977 - RNA, 22 nt, Artificial Sequence
  Synthetic
aagagaacaugaaagaagaccc

SEQ ID NO: 42978 - RNA, 21 nt, Artificial Sequence
  Synthetic
cacauuuuauaaaggagaccc

SEQ ID NO: 42979 - RNA, 22 nt, Artificial Sequence
  Synthetic
ucacauuuuauaaaggagaccc

SEQ ID NO: 42980 - RNA, 23 nt, Artificial Sequence
  Synthetic
cucacauuuuauaaaggagaccc

SEQ ID NO: 42981 - RNA, 18 nt, Artificial Sequence
  Synthetic
cauccucaucugagaccc

SEQ ID NO: 42982 - RNA, 21 nt, Artificial Sequence
  Synthetic
aggcauccucaucugagaccc

SEQ ID NO: 42983 - RNA, 22 nt, Artificial Sequence
  Synthetic
caggcauccucaucugagaccc

SEQ ID NO: 42984 - RNA, 23 nt, Artificial Sequence
  Synthetic
ccaggcauccucaucugagaccc

SEQ ID NO: 42985 - RNA, 24 nt, Artificial Sequence
  Synthetic
accaggcauccucaucugagaccc

SEQ ID NO: 42986 - RNA, 18 nt, Artificial Sequence
  Synthetic
uaucacuauuuuggaccc

SEQ ID NO: 42987 - RNA, 19 nt, Artificial Sequence
  Synthetic
auaucacuauuuuggaccc

SEQ ID NO: 42988 - RNA, 20 nt, Artificial Sequence
  Synthetic
cauaucacuauuuuggaccc

SEQ ID NO: 42989 - RNA, 21 nt, Artificial Sequence
  Synthetic
ucauaucacuauuuuggaccc

SEQ ID NO: 42990 - RNA, 22 nt, Artificial Sequence
  Synthetic
cucauaucacuauuuuggaccc

SEQ ID NO: 42991 - RNA, 23 nt, Artificial Sequence
  Synthetic
ucucauaucacuauuuuggaccc

SEQ ID NO: 42992 - RNA, 24 nt, Artificial Sequence
  Synthetic
cucucauaucacuauuuuggaccc

SEQ ID NO: 42993 - RNA, 19 nt, Artificial Sequence
  Synthetic
agcauagcauguccuaccc

SEQ ID NO: 42994 - RNA, 21 nt, Artificial Sequence
  Synthetic
ugagcauagcauguccuaccc

SEQ ID NO: 42995 - RNA, 22 nt, Artificial Sequence
  Synthetic
uugagcauagcauguccuaccc

SEQ ID NO: 42996 - RNA, 23 nt, Artificial Sequence
  Synthetic
auugagcauagcauguccuaccc

SEQ ID NO: 42997 - RNA, 24 nt, Artificial Sequence
  Synthetic
aauugagcauagcauguccuaccc

SEQ ID NO: 42998 - RNA, 18 nt, Artificial Sequence
  Synthetic
acguagcauguucuaccc

SEQ ID NO: 42999 - RNA, 19 nt, Artificial Sequence
  Synthetic
aacguagcauguucuaccc

SEQ ID NO: 43000 - RNA, 21 nt, Artificial Sequence
  Synthetic
ugaacguagcauguucuaccc

SEQ ID NO: 43001 - RNA, 22 nt, Artificial Sequence
  Synthetic
uugaacguagcauguucuaccc

SEQ ID NO: 43002 - RNA, 23 nt, Artificial Sequence
  Synthetic
auugaacguagcauguucuaccc

SEQ ID NO: 43003 - RNA, 24 nt, Artificial Sequence
  Synthetic
aauugaacguagcauguucuaccc

SEQ ID NO: 43004 - RNA, 18 nt, Artificial Sequence
  Synthetic
acaucaaccagaguaccc

SEQ ID NO: 43005 - RNA, 21 nt, Artificial Sequence
  Synthetic
aggacaucaaccagaguaccc

SEQ ID NO: 43006 - RNA, 22 nt, Artificial Sequence
  Synthetic
uaggacaucaaccagaguaccc

SEQ ID NO: 43007 - RNA, 24 nt, Artificial Sequence
  Synthetic
uguaggacaucaaccagaguaccc

SEQ ID NO: 43008 - RNA, 18 nt, Artificial Sequence
  Synthetic
agugguaauuuuguaccc

SEQ ID NO: 43009 - RNA, 19 nt, Artificial Sequence
  Synthetic
aagugguaauuuuguaccc

SEQ ID NO: 43010 - RNA, 21 nt, Artificial Sequence
  Synthetic
agaagugguaauuuuguaccc

SEQ ID NO: 43011 - RNA, 22 nt, Artificial Sequence
  Synthetic
aagaagugguaauuuuguaccc

SEQ ID NO: 43012 - RNA, 23 nt, Artificial Sequence
  Synthetic
aaagaagugguaauuuuguaccc

SEQ ID NO: 43013 - RNA, 18 nt, Artificial Sequence
  Synthetic
cuuuaaauagucuuaccc

SEQ ID NO: 43014 - RNA, 19 nt, Artificial Sequence
  Synthetic
ccuuuaaauagucuuaccc

SEQ ID NO: 43015 - RNA, 21 nt, Artificial Sequence
  Synthetic
ugccuuuaaauagucuuaccc

SEQ ID NO: 43016 - RNA, 23 nt, Artificial Sequence
  Synthetic
agugccuuuaaauagucuuaccc

SEQ ID NO: 43017 - RNA, 24 nt, Artificial Sequence
  Synthetic
cagugccuuuaaauagucuuaccc

SEQ ID NO: 43018 - RNA, 18 nt, Artificial Sequence
  Synthetic
acauagaugagaaacccc

SEQ ID NO: 43019 - RNA, 19 nt, Artificial Sequence
  Synthetic
uacauagaugagaaacccc

SEQ ID NO: 43020 - RNA, 20 nt, Artificial Sequence
  Synthetic
uuacauagaugagaaacccc

SEQ ID NO: 43021 - RNA, 22 nt, Artificial Sequence
  Synthetic
uguuacauagaugagaaacccc

SEQ ID NO: 43022 - RNA, 24 nt, Artificial Sequence
  Synthetic
aguguuacauagaugagaaacccc

SEQ ID NO: 43023 - RNA, 18 nt, Artificial Sequence
  Synthetic
cuagaaucugauaacccc

SEQ ID NO: 43024 - RNA, 19 nt, Artificial Sequence
  Synthetic
acuagaaucugauaacccc

SEQ ID NO: 43025 - RNA, 22 nt, Artificial Sequence
  Synthetic
aggacuagaaucugauaacccc

SEQ ID NO: 43026 - RNA, 23 nt, Artificial Sequence
  Synthetic
caggacuagaaucugauaacccc

SEQ ID NO: 43027 - RNA, 24 nt, Artificial Sequence
  Synthetic
acaggacuagaaucugauaacccc

SEQ ID NO: 43028 - RNA, 18 nt, Artificial Sequence
  Synthetic
ucuugcuuggaccacccc

SEQ ID NO: 43029 - RNA, 19 nt, Artificial Sequence
  Synthetic
aucuugcuuggaccacccc

SEQ ID NO: 43030 - RNA, 20 nt, Artificial Sequence
  Synthetic
caucuugcuuggaccacccc

SEQ ID NO: 43031 - RNA, 21 nt, Artificial Sequence
  Synthetic
ucaucuugcuuggaccacccc

SEQ ID NO: 43032 - RNA, 23 nt, Artificial Sequence
  Synthetic
ugucaucuugcuuggaccacccc

SEQ ID NO: 43033 - RNA, 24 nt, Artificial Sequence
  Synthetic
cugucaucuugcuuggaccacccc

SEQ ID NO: 43034 - RNA, 18 nt, Artificial Sequence
  Synthetic
cccaaaucaccccacccc

SEQ ID NO: 43035 - RNA, 19 nt, Artificial Sequence
  Synthetic
ucccaaaucaccccacccc

SEQ ID NO: 43036 - RNA, 20 nt, Artificial Sequence
  Synthetic
cucccaaaucaccccacccc

SEQ ID NO: 43037 - RNA, 21 nt, Artificial Sequence
  Synthetic
ucucccaaaucaccccacccc

SEQ ID NO: 43038 - RNA, 22 nt, Artificial Sequence
  Synthetic
aucucccaaaucaccccacccc

SEQ ID NO: 43039 - RNA, 23 nt, Artificial Sequence
  Synthetic
uaucucccaaaucaccccacccc

SEQ ID NO: 43040 - RNA, 24 nt, Artificial Sequence
  Synthetic
auaucucccaaaucaccccacccc

SEQ ID NO: 43041 - RNA, 18 nt, Artificial Sequence
  Synthetic
agugcacguuaugacccc

SEQ ID NO: 43042 - RNA, 19 nt, Artificial Sequence
  Synthetic
aagugcacguuaugacccc

SEQ ID NO: 43043 - RNA, 20 nt, Artificial Sequence
  Synthetic
aaagugcacguuaugacccc

SEQ ID NO: 43044 - RNA, 21 nt, Artificial Sequence
  Synthetic
aaaagugcacguuaugacccc

SEQ ID NO: 43045 - RNA, 22 nt, Artificial Sequence
  Synthetic
uaaaagugcacguuaugacccc

SEQ ID NO: 43046 - RNA, 23 nt, Artificial Sequence
  Synthetic
cuaaaagugcacguuaugacccc

SEQ ID NO: 43047 - RNA, 24 nt, Artificial Sequence
  Synthetic
acuaaaagugcacguuaugacccc

SEQ ID NO: 43048 - RNA, 19 nt, Artificial Sequence
  Synthetic
agauaccacuacaaccccc

SEQ ID NO: 43049 - RNA, 20 nt, Artificial Sequence
  Synthetic
aagauaccacuacaaccccc

SEQ ID NO: 43050 - RNA, 22 nt, Artificial Sequence
  Synthetic
ugaagauaccacuacaaccccc

SEQ ID NO: 43051 - RNA, 23 nt, Artificial Sequence
  Synthetic
augaagauaccacuacaaccccc

SEQ ID NO: 43052 - RNA, 24 nt, Artificial Sequence
  Synthetic
aaugaagauaccacuacaaccccc

SEQ ID NO: 43053 - RNA, 18 nt, Artificial Sequence
  Synthetic
ucucuccgugcuaccccc

SEQ ID NO: 43054 - RNA, 20 nt, Artificial Sequence
  Synthetic
agucucuccgugcuaccccc

SEQ ID NO: 43055 - RNA, 21 nt, Artificial Sequence
  Synthetic
cagucucuccgugcuaccccc

SEQ ID NO: 43056 - RNA, 22 nt, Artificial Sequence
  Synthetic
ucagucucuccgugcuaccccc

SEQ ID NO: 43057 - RNA, 23 nt, Artificial Sequence
  Synthetic
uucagucucuccgugcuaccccc

SEQ ID NO: 43058 - RNA, 24 nt, Artificial Sequence
  Synthetic
uuucagucucuccgugcuaccccc

SEQ ID NO: 43059 - RNA, 19 nt, Artificial Sequence
  Synthetic
ugucccagucugugccccc

SEQ ID NO: 43060 - RNA, 20 nt, Artificial Sequence
  Synthetic
uugucccagucugugccccc

SEQ ID NO: 43061 - RNA, 21 nt, Artificial Sequence
  Synthetic
uuugucccagucugugccccc

SEQ ID NO: 43062 - RNA, 22 nt, Artificial Sequence
  Synthetic
uuuugucccagucugugccccc

SEQ ID NO: 43063 - RNA, 23 nt, Artificial Sequence
  Synthetic
cuuuugucccagucugugccccc

SEQ ID NO: 43064 - RNA, 24 nt, Artificial Sequence
  Synthetic
acuuuugucccagucugugccccc

SEQ ID NO: 43065 - RNA, 18 nt, Artificial Sequence
  Synthetic
ugagagagaaucuccccc

SEQ ID NO: 43066 - RNA, 19 nt, Artificial Sequence
  Synthetic
augagagagaaucuccccc

SEQ ID NO: 43067 - RNA, 20 nt, Artificial Sequence
  Synthetic
aaugagagagaaucuccccc

SEQ ID NO: 43068 - RNA, 21 nt, Artificial Sequence
  Synthetic
uaaugagagagaaucuccccc

SEQ ID NO: 43069 - RNA, 22 nt, Artificial Sequence
  Synthetic
auaaugagagagaaucuccccc

SEQ ID NO: 43070 - RNA, 23 nt, Artificial Sequence
  Synthetic
uauaaugagagagaaucuccccc

SEQ ID NO: 43071 - RNA, 24 nt, Artificial Sequence
  Synthetic
auauaaugagagagaaucuccccc

SEQ ID NO: 43072 - RNA, 18 nt, Artificial Sequence
  Synthetic
caucccgaucacagcccc

SEQ ID NO: 43073 - RNA, 19 nt, Artificial Sequence
  Synthetic
ucaucccgaucacagcccc

SEQ ID NO: 43074 - RNA, 20 nt, Artificial Sequence
  Synthetic
aucaucccgaucacagcccc

SEQ ID NO: 43075 - RNA, 21 nt, Artificial Sequence
  Synthetic
aaucaucccgaucacagcccc

SEQ ID NO: 43076 - RNA, 22 nt, Artificial Sequence
  Synthetic
caaucaucccgaucacagcccc

SEQ ID NO: 43077 - RNA, 23 nt, Artificial Sequence
  Synthetic
ucaaucaucccgaucacagcccc

SEQ ID NO: 43078 - RNA, 24 nt, Artificial Sequence
  Synthetic
cucaaucaucccgaucacagcccc

SEQ ID NO: 43079 - RNA, 18 nt, Artificial Sequence
  Synthetic
uuaauucaacuuagcccc

SEQ ID NO: 43080 - RNA, 19 nt, Artificial Sequence
  Synthetic
auuaauucaacuuagcccc

SEQ ID NO: 43081 - RNA, 20 nt, Artificial Sequence
  Synthetic
aauuaauucaacuuagcccc

SEQ ID NO: 43082 - RNA, 18 nt, Artificial Sequence
  Synthetic
acauucacauuuugcccc

SEQ ID NO: 43083 - RNA, 19 nt, Artificial Sequence
  Synthetic
cacauucacauuuugcccc

SEQ ID NO: 43084 - RNA, 20 nt, Artificial Sequence
  Synthetic
acacauucacauuuugcccc

SEQ ID NO: 43085 - RNA, 21 nt, Artificial Sequence
  Synthetic
cacacauucacauuuugcccc

SEQ ID NO: 43086 - RNA, 22 nt, Artificial Sequence
  Synthetic
ucacacauucacauuuugcccc

SEQ ID NO: 43087 - RNA, 23 nt, Artificial Sequence
  Synthetic
cucacacauucacauuuugcccc

SEQ ID NO: 43088 - RNA, 18 nt, Artificial Sequence
  Synthetic
agcucgauaaaucucccc

SEQ ID NO: 43089 - RNA, 19 nt, Artificial Sequence
  Synthetic
uagcucgauaaaucucccc

SEQ ID NO: 43090 - RNA, 21 nt, Artificial Sequence
  Synthetic
aguagcucgauaaaucucccc

SEQ ID NO: 43091 - RNA, 23 nt, Artificial Sequence
  Synthetic
ugaguagcucgauaaaucucccc

SEQ ID NO: 43092 - RNA, 18 nt, Artificial Sequence
  Synthetic
ucccaccuucuucucccc

SEQ ID NO: 43093 - RNA, 19 nt, Artificial Sequence
  Synthetic
aucccaccuucuucucccc

SEQ ID NO: 43094 - RNA, 20 nt, Artificial Sequence
  Synthetic
uaucccaccuucuucucccc

SEQ ID NO: 43095 - RNA, 21 nt, Artificial Sequence
  Synthetic
auaucccaccuucuucucccc

SEQ ID NO: 43096 - RNA, 22 nt, Artificial Sequence
  Synthetic
aauaucccaccuucuucucccc

SEQ ID NO: 43097 - RNA, 23 nt, Artificial Sequence
  Synthetic
aaauaucccaccuucuucucccc

SEQ ID NO: 43098 - RNA, 24 nt, Artificial Sequence
  Synthetic
uaaauaucccaccuucuucucccc

SEQ ID NO: 43099 - RNA, 19 nt, Artificial Sequence
  Synthetic
aguuggaagcugcuucccc

SEQ ID NO: 43100 - RNA, 20 nt, Artificial Sequence
  Synthetic
caguuggaagcugcuucccc

SEQ ID NO: 43101 - RNA, 21 nt, Artificial Sequence
  Synthetic
acaguuggaagcugcuucccc

SEQ ID NO: 43102 - RNA, 18 nt, Artificial Sequence
  Synthetic
uuuauaguuaauuucccc

SEQ ID NO: 43103 - RNA, 20 nt, Artificial Sequence
  Synthetic
uguuuauaguuaauuucccc

SEQ ID NO: 43104 - RNA, 21 nt, Artificial Sequence
  Synthetic
uuguuuauaguuaauuucccc

SEQ ID NO: 43105 - RNA, 22 nt, Artificial Sequence
  Synthetic
cuuguuuauaguuaauuucccc

SEQ ID NO: 43106 - RNA, 23 nt, Artificial Sequence
  Synthetic
ccuuguuuauaguuaauuucccc

SEQ ID NO: 43107 - RNA, 24 nt, Artificial Sequence
  Synthetic
accuuguuuauaguuaauuucccc

SEQ ID NO: 43108 - RNA, 18 nt, Artificial Sequence
  Synthetic
uuauuauaagaaaagccc

SEQ ID NO: 43109 - RNA, 19 nt, Artificial Sequence
  Synthetic
cuuauuauaagaaaagccc

SEQ ID NO: 43110 - RNA, 20 nt, Artificial Sequence
  Synthetic
acuuauuauaagaaaagccc

SEQ ID NO: 43111 - RNA, 21 nt, Artificial Sequence
  Synthetic
cacuuauuauaagaaaagccc

SEQ ID NO: 43112 - RNA, 22 nt, Artificial Sequence
  Synthetic
ccacuuauuauaagaaaagccc

SEQ ID NO: 43113 - RNA, 23 nt, Artificial Sequence
  Synthetic
cccacuuauuauaagaaaagccc

SEQ ID NO: 43114 - RNA, 24 nt, Artificial Sequence
  Synthetic
acccacuuauuauaagaaaagccc

SEQ ID NO: 43115 - RNA, 19 nt, Artificial Sequence
  Synthetic
agaaaauaaauacaagccc

SEQ ID NO: 43116 - RNA, 20 nt, Artificial Sequence
  Synthetic
uagaaaauaaauacaagccc

SEQ ID NO: 43117 - RNA, 21 nt, Artificial Sequence
  Synthetic
auagaaaauaaauacaagccc

SEQ ID NO: 43118 - RNA, 22 nt, Artificial Sequence
  Synthetic
aauagaaaauaaauacaagccc

SEQ ID NO: 43119 - RNA, 23 nt, Artificial Sequence
  Synthetic
uaauagaaaauaaauacaagccc

SEQ ID NO: 43120 - RNA, 24 nt, Artificial Sequence
  Synthetic
auaauagaaaauaaauacaagccc

SEQ ID NO: 43121 - RNA, 18 nt, Artificial Sequence
  Synthetic
uagcccugucuccagccc

SEQ ID NO: 43122 - RNA, 19 nt, Artificial Sequence
  Synthetic
cuagcccugucuccagccc

SEQ ID NO: 43123 - RNA, 20 nt, Artificial Sequence
  Synthetic
ccuagcccugucuccagccc

SEQ ID NO: 43124 - RNA, 21 nt, Artificial Sequence
  Synthetic
accuagcccugucuccagccc

SEQ ID NO: 43125 - RNA, 22 nt, Artificial Sequence
  Synthetic
uaccuagcccugucuccagccc

SEQ ID NO: 43126 - RNA, 23 nt, Artificial Sequence
  Synthetic
auaccuagcccugucuccagccc

SEQ ID NO: 43127 - RNA, 24 nt, Artificial Sequence
  Synthetic
aauaccuagcccugucuccagccc

SEQ ID NO: 43128 - RNA, 18 nt, Artificial Sequence
  Synthetic
aguuugggaaaagagccc

SEQ ID NO: 43129 - RNA, 20 nt, Artificial Sequence
  Synthetic
agaguuugggaaaagagccc

SEQ ID NO: 43130 - RNA, 23 nt, Artificial Sequence
  Synthetic
aggagaguuugggaaaagagccc

SEQ ID NO: 43131 - RNA, 18 nt, Artificial Sequence
  Synthetic
aaccacgaggaagagccc

SEQ ID NO: 43132 - RNA, 20 nt, Artificial Sequence
  Synthetic
ugaaccacgaggaagagccc

SEQ ID NO: 43133 - RNA, 21 nt, Artificial Sequence
  Synthetic
cugaaccacgaggaagagccc

SEQ ID NO: 43134 - RNA, 22 nt, Artificial Sequence
  Synthetic
ccugaaccacgaggaagagccc

SEQ ID NO: 43135 - RNA, 23 nt, Artificial Sequence
  Synthetic
cccugaaccacgaggaagagccc

SEQ ID NO: 43136 - RNA, 24 nt, Artificial Sequence
  Synthetic
ucccugaaccacgaggaagagccc

SEQ ID NO: 43137 - RNA, 18 nt, Artificial Sequence
  Synthetic
caauggagaugggagccc

SEQ ID NO: 43138 - RNA, 19 nt, Artificial Sequence
  Synthetic
ccaauggagaugggagccc

SEQ ID NO: 43139 - RNA, 20 nt, Artificial Sequence
  Synthetic
accaauggagaugggagccc

SEQ ID NO: 43140 - RNA, 21 nt, Artificial Sequence
  Synthetic
aaccaauggagaugggagccc

SEQ ID NO: 43141 - RNA, 22 nt, Artificial Sequence
  Synthetic
caaccaauggagaugggagccc

SEQ ID NO: 43142 - RNA, 23 nt, Artificial Sequence
  Synthetic
ucaaccaauggagaugggagccc

SEQ ID NO: 43143 - RNA, 24 nt, Artificial Sequence
  Synthetic
uucaaccaauggagaugggagccc

SEQ ID NO: 43144 - RNA, 18 nt, Artificial Sequence
  Synthetic
cccuguuaccuggagccc

SEQ ID NO: 43145 - RNA, 19 nt, Artificial Sequence
  Synthetic
ucccuguuaccuggagccc

SEQ ID NO: 43146 - RNA, 20 nt, Artificial Sequence
  Synthetic
aucccuguuaccuggagccc

SEQ ID NO: 43147 - RNA, 21 nt, Artificial Sequence
  Synthetic
uaucccuguuaccuggagccc

SEQ ID NO: 43148 - RNA, 22 nt, Artificial Sequence
  Synthetic
uuaucccuguuaccuggagccc

SEQ ID NO: 43149 - RNA, 23 nt, Artificial Sequence
  Synthetic
auuaucccuguuaccuggagccc

SEQ ID NO: 43150 - RNA, 24 nt, Artificial Sequence
  Synthetic
cauuaucccuguuaccuggagccc

SEQ ID NO: 43151 - RNA, 18 nt, Artificial Sequence
  Synthetic
uuuucuuuacccuagccc

SEQ ID NO: 43152 - RNA, 19 nt, Artificial Sequence
  Synthetic
cuuuucuuuacccuagccc

SEQ ID NO: 43153 - RNA, 20 nt, Artificial Sequence
  Synthetic
ucuuuucuuuacccuagccc

SEQ ID NO: 43154 - RNA, 21 nt, Artificial Sequence
  Synthetic
cucuuuucuuuacccuagccc

SEQ ID NO: 43155 - RNA, 23 nt, Artificial Sequence
  Synthetic
ugcucuuuucuuuacccuagccc

SEQ ID NO: 43156 - RNA, 24 nt, Artificial Sequence
  Synthetic
uugcucuuuucuuuacccuagccc

SEQ ID NO: 43157 - RNA, 18 nt, Artificial Sequence
  Synthetic
uucucuaaucaguagccc

SEQ ID NO: 43158 - RNA, 19 nt, Artificial Sequence
  Synthetic
uuucucuaaucaguagccc

SEQ ID NO: 43159 - RNA, 20 nt, Artificial Sequence
  Synthetic
uuuucucuaaucaguagccc

SEQ ID NO: 43160 - RNA, 21 nt, Artificial Sequence
  Synthetic
uuuuucucuaaucaguagccc

SEQ ID NO: 43161 - RNA, 22 nt, Artificial Sequence
  Synthetic
auuuuucucuaaucaguagccc

SEQ ID NO: 43162 - RNA, 23 nt, Artificial Sequence
  Synthetic
cauuuuucucuaaucaguagccc

SEQ ID NO: 43163 - RNA, 18 nt, Artificial Sequence
  Synthetic
ugcacguguauguagccc

SEQ ID NO: 43164 - RNA, 19 nt, Artificial Sequence
  Synthetic
cugcacguguauguagccc

SEQ ID NO: 43165 - RNA, 20 nt, Artificial Sequence
  Synthetic
ucugcacguguauguagccc

SEQ ID NO: 43166 - RNA, 21 nt, Artificial Sequence
  Synthetic
cucugcacguguauguagccc

SEQ ID NO: 43167 - RNA, 22 nt, Artificial Sequence
  Synthetic
ucucugcacguguauguagccc

SEQ ID NO: 43168 - RNA, 23 nt, Artificial Sequence
  Synthetic
uucucugcacguguauguagccc

SEQ ID NO: 43169 - RNA, 24 nt, Artificial Sequence
  Synthetic
uuucucugcacguguauguagccc

SEQ ID NO: 43170 - RNA, 18 nt, Artificial Sequence
  Synthetic
uucccaauucuuacgccc

SEQ ID NO: 43171 - RNA, 19 nt, Artificial Sequence
  Synthetic
uuucccaauucuuacgccc

SEQ ID NO: 43172 - RNA, 20 nt, Artificial Sequence
  Synthetic
cuuucccaauucuuacgccc

SEQ ID NO: 43173 - RNA, 21 nt, Artificial Sequence
  Synthetic
ucuuucccaauucuuacgccc

SEQ ID NO: 43174 - RNA, 22 nt, Artificial Sequence
  Synthetic
aucuuucccaauucuuacgccc

SEQ ID NO: 43175 - RNA, 23 nt, Artificial Sequence
  Synthetic
uaucuuucccaauucuuacgccc

SEQ ID NO: 43176 - RNA, 24 nt, Artificial Sequence
  Synthetic
uuaucuuucccaauucuuacgccc

SEQ ID NO: 43177 - RNA, 18 nt, Artificial Sequence
  Synthetic
ucagcucaggcaaggccc

SEQ ID NO: 43178 - RNA, 19 nt, Artificial Sequence
  Synthetic
uucagcucaggcaaggccc

SEQ ID NO: 43179 - RNA, 20 nt, Artificial Sequence
  Synthetic
cuucagcucaggcaaggccc

SEQ ID NO: 43180 - RNA, 22 nt, Artificial Sequence
  Synthetic
agcuucagcucaggcaaggccc

SEQ ID NO: 43181 - RNA, 23 nt, Artificial Sequence
  Synthetic
uagcuucagcucaggcaaggccc

SEQ ID NO: 43182 - RNA, 24 nt, Artificial Sequence
  Synthetic
cuagcuucagcucaggcaaggccc

SEQ ID NO: 43183 - RNA, 21 nt, Artificial Sequence
  Synthetic
aaggauacucagggaaggccc

SEQ ID NO: 43184 - RNA, 22 nt, Artificial Sequence
  Synthetic
caaggauacucagggaaggccc

SEQ ID NO: 43185 - RNA, 23 nt, Artificial Sequence
  Synthetic
ccaaggauacucagggaaggccc

SEQ ID NO: 43186 - RNA, 24 nt, Artificial Sequence
  Synthetic
uccaaggauacucagggaaggccc

SEQ ID NO: 43187 - RNA, 18 nt, Artificial Sequence
  Synthetic
aggggauguugccggccc

SEQ ID NO: 43188 - RNA, 19 nt, Artificial Sequence
  Synthetic
caggggauguugccggccc

SEQ ID NO: 43189 - RNA, 20 nt, Artificial Sequence
  Synthetic
ucaggggauguugccggccc

SEQ ID NO: 43190 - RNA, 21 nt, Artificial Sequence
  Synthetic
uuagcauaaucuuaagggccc

SEQ ID NO: 43191 - RNA, 22 nt, Artificial Sequence
  Synthetic
auuagcauaaucuuaagggccc

SEQ ID NO: 43192 - RNA, 23 nt, Artificial Sequence
  Synthetic
uauuagcauaaucuuaagggccc

SEQ ID NO: 43193 - RNA, 24 nt, Artificial Sequence
  Synthetic
cuauuagcauaaucuuaagggccc

SEQ ID NO: 43194 - RNA, 18 nt, Artificial Sequence
  Synthetic
augaaaccauaugggccc

SEQ ID NO: 43195 - RNA, 20 nt, Artificial Sequence
  Synthetic
agaugaaaccauaugggccc

SEQ ID NO: 43196 - RNA, 21 nt, Artificial Sequence
  Synthetic
uagaugaaaccauaugggccc

SEQ ID NO: 43197 - RNA, 23 nt, Artificial Sequence
  Synthetic
uguagaugaaaccauaugggccc

SEQ ID NO: 43198 - RNA, 24 nt, Artificial Sequence
  Synthetic
auguagaugaaaccauaugggccc

SEQ ID NO: 43199 - RNA, 18 nt, Artificial Sequence
  Synthetic
uuucaggcuaccaugccc

SEQ ID NO: 43200 - RNA, 19 nt, Artificial Sequence
  Synthetic
auuucaggcuaccaugccc

SEQ ID NO: 43201 - RNA, 20 nt, Artificial Sequence
  Synthetic
uauuucaggcuaccaugccc

SEQ ID NO: 43202 - RNA, 21 nt, Artificial Sequence
  Synthetic
cuauuucaggcuaccaugccc

SEQ ID NO: 43203 - RNA, 22 nt, Artificial Sequence
  Synthetic
ccuauuucaggcuaccaugccc

SEQ ID NO: 43204 - RNA, 23 nt, Artificial Sequence
  Synthetic
cccuauuucaggcuaccaugccc

SEQ ID NO: 43205 - RNA, 24 nt, Artificial Sequence
  Synthetic
ccccuauuucaggcuaccaugccc

SEQ ID NO: 43206 - RNA, 18 nt, Artificial Sequence
  Synthetic
aaguguuaaaguaugccc

SEQ ID NO: 43207 - RNA, 19 nt, Artificial Sequence
  Synthetic
aaaguguuaaaguaugccc

SEQ ID NO: 43208 - RNA, 21 nt, Artificial Sequence
  Synthetic
cgaaaguguuaaaguaugccc

SEQ ID NO: 43209 - RNA, 22 nt, Artificial Sequence
  Synthetic
ccgaaaguguuaaaguaugccc

SEQ ID NO: 43210 - RNA, 23 nt, Artificial Sequence
  Synthetic
cccgaaaguguuaaaguaugccc

SEQ ID NO: 43211 - RNA, 18 nt, Artificial Sequence
  Synthetic
aucuucccuuugcugccc

SEQ ID NO: 43212 - RNA, 19 nt, Artificial Sequence
  Synthetic
uaucuucccuuugcugccc

SEQ ID NO: 43213 - RNA, 20 nt, Artificial Sequence
  Synthetic
uuaucuucccuuugcugccc

SEQ ID NO: 43214 - RNA, 21 nt, Artificial Sequence
  Synthetic
uuuaucuucccuuugcugccc

SEQ ID NO: 43215 - RNA, 22 nt, Artificial Sequence
  Synthetic
auuuaucuucccuuugcugccc

SEQ ID NO: 43216 - RNA, 23 nt, Artificial Sequence
  Synthetic
uauuuaucuucccuuugcugccc

SEQ ID NO: 43217 - RNA, 24 nt, Artificial Sequence
  Synthetic
uuauuuaucuucccuuugcugccc

SEQ ID NO: 43218 - RNA, 18 nt, Artificial Sequence
  Synthetic
acucuugagcaucugccc

SEQ ID NO: 43219 - RNA, 19 nt, Artificial Sequence
  Synthetic
uacucuugagcaucugccc

SEQ ID NO: 43220 - RNA, 20 nt, Artificial Sequence
  Synthetic
uuacucuugagcaucugccc

SEQ ID NO: 43221 - RNA, 21 nt, Artificial Sequence
  Synthetic
uuuacucuugagcaucugccc

SEQ ID NO: 43222 - RNA, 22 nt, Artificial Sequence
  Synthetic
cuuuacucuugagcaucugccc

SEQ ID NO: 43223 - RNA, 23 nt, Artificial Sequence
  Synthetic
ucuuuacucuugagcaucugccc

SEQ ID NO: 43224 - RNA, 19 nt, Artificial Sequence
  Synthetic
agaaaacucugcucugccc

SEQ ID NO: 43225 - RNA, 20 nt, Artificial Sequence
  Synthetic
aagaaaacucugcucugccc

SEQ ID NO: 43226 - RNA, 21 nt, Artificial Sequence
  Synthetic
aaagaaaacucugcucugccc

SEQ ID NO: 43227 - RNA, 22 nt, Artificial Sequence
  Synthetic
uaaagaaaacucugcucugccc

SEQ ID NO: 43228 - RNA, 23 nt, Artificial Sequence
  Synthetic
cuaaagaaaacucugcucugccc

SEQ ID NO: 43229 - RNA, 24 nt, Artificial Sequence
  Synthetic
ucuaaagaaaacucugcucugccc

SEQ ID NO: 43230 - RNA, 18 nt, Artificial Sequence
  Synthetic
cauccaggugaagugccc

SEQ ID NO: 43231 - RNA, 19 nt, Artificial Sequence
  Synthetic
ucauccaggugaagugccc

SEQ ID NO: 43232 - RNA, 21 nt, Artificial Sequence
  Synthetic
ugucauccaggugaagugccc

SEQ ID NO: 43233 - RNA, 22 nt, Artificial Sequence
  Synthetic
cugucauccaggugaagugccc

SEQ ID NO: 43234 - RNA, 23 nt, Artificial Sequence
  Synthetic
ucugucauccaggugaagugccc

SEQ ID NO: 43235 - RNA, 24 nt, Artificial Sequence
  Synthetic
cucugucauccaggugaagugccc

SEQ ID NO: 43236 - RNA, 19 nt, Artificial Sequence
  Synthetic
uggcucuccacaauugccc

SEQ ID NO: 43237 - RNA, 20 nt, Artificial Sequence
  Synthetic
cuggcucuccacaauugccc

SEQ ID NO: 43238 - RNA, 21 nt, Artificial Sequence
  Synthetic
ccuggcucuccacaauugccc

SEQ ID NO: 43239 - RNA, 22 nt, Artificial Sequence
  Synthetic
accuggcucuccacaauugccc

SEQ ID NO: 43240 - RNA, 23 nt, Artificial Sequence
  Synthetic
caccuggcucuccacaauugccc

SEQ ID NO: 43241 - RNA, 24 nt, Artificial Sequence
  Synthetic
ucaccuggcucuccacaauugccc

SEQ ID NO: 43242 - RNA, 18 nt, Artificial Sequence
  Synthetic
augguauuucaauugccc

SEQ ID NO: 43243 - RNA, 19 nt, Artificial Sequence
  Synthetic
uaugguauuucaauugccc

SEQ ID NO: 43244 - RNA, 20 nt, Artificial Sequence
  Synthetic
auaugguauuucaauugccc

SEQ ID NO: 43245 - RNA, 21 nt, Artificial Sequence
  Synthetic
cauaugguauuucaauugccc

SEQ ID NO: 43246 - RNA, 22 nt, Artificial Sequence
  Synthetic
ccauaugguauuucaauugccc

SEQ ID NO: 43247 - RNA, 24 nt, Artificial Sequence
  Synthetic
ugccauaugguauuucaauugccc

SEQ ID NO: 43248 - RNA, 18 nt, Artificial Sequence
  Synthetic
cuggaagaaaggaauccc

SEQ ID NO: 43249 - RNA, 19 nt, Artificial Sequence
  Synthetic
acuggaagaaaggaauccc

SEQ ID NO: 43250 - RNA, 21 nt, Artificial Sequence
  Synthetic
ugacuggaagaaaggaauccc

SEQ ID NO: 43251 - RNA, 22 nt, Artificial Sequence
  Synthetic
cugacuggaagaaaggaauccc

SEQ ID NO: 43252 - RNA, 23 nt, Artificial Sequence
  Synthetic
acugacuggaagaaaggaauccc

SEQ ID NO: 43253 - RNA, 24 nt, Artificial Sequence
  Synthetic
uacugacuggaagaaaggaauccc

SEQ ID NO: 43254 - RNA, 19 nt, Artificial Sequence
  Synthetic
ugcagaaauuggacauccc

SEQ ID NO: 43255 - RNA, 20 nt, Artificial Sequence
  Synthetic
cugcagaaauuggacauccc

SEQ ID NO: 43256 - RNA, 21 nt, Artificial Sequence
  Synthetic
ccugcagaaauuggacauccc

SEQ ID NO: 43257 - RNA, 22 nt, Artificial Sequence
  Synthetic
uccugcagaaauuggacauccc

SEQ ID NO: 43258 - RNA, 21 nt, Artificial Sequence
  Synthetic
uagcuggcugggccccauccc

SEQ ID NO: 43259 - RNA, 23 nt, Artificial Sequence
  Synthetic
cguagcuggcugggccccauccc

SEQ ID NO: 43260 - RNA, 24 nt, Artificial Sequence
  Synthetic
acguagcuggcugggccccauccc

SEQ ID NO: 43261 - RNA, 18 nt, Artificial Sequence
  Synthetic
agucauaacuaggauccc

SEQ ID NO: 43262 - RNA, 19 nt, Artificial Sequence
  Synthetic
cagucauaacuaggauccc

SEQ ID NO: 43263 - RNA, 20 nt, Artificial Sequence
  Synthetic
ccagucauaacuaggauccc

SEQ ID NO: 43264 - RNA, 21 nt, Artificial Sequence
  Synthetic
uccagucauaacuaggauccc

SEQ ID NO: 43265 - RNA, 22 nt, Artificial Sequence
  Synthetic
uuccagucauaacuaggauccc

SEQ ID NO: 43266 - RNA, 23 nt, Artificial Sequence
  Synthetic
auuccagucauaacuaggauccc

SEQ ID NO: 43267 - RNA, 24 nt, Artificial Sequence
  Synthetic
cauuccagucauaacuaggauccc

SEQ ID NO: 43268 - RNA, 18 nt, Artificial Sequence
  Synthetic
uuguuuuaucaugauccc

SEQ ID NO: 43269 - RNA, 19 nt, Artificial Sequence
  Synthetic
cuuguuuuaucaugauccc

SEQ ID NO: 43270 - RNA, 20 nt, Artificial Sequence
  Synthetic
ucuuguuuuaucaugauccc

SEQ ID NO: 43271 - RNA, 22 nt, Artificial Sequence
  Synthetic
ugucuuguuuuaucaugauccc

SEQ ID NO: 43272 - RNA, 23 nt, Artificial Sequence
  Synthetic
cugucuuguuuuaucaugauccc

SEQ ID NO: 43273 - RNA, 24 nt, Artificial Sequence
  Synthetic
ccugucuuguuuuaucaugauccc

SEQ ID NO: 43274 - RNA, 18 nt, Artificial Sequence
  Synthetic
uguuuuucucuugauccc

SEQ ID NO: 43275 - RNA, 19 nt, Artificial Sequence
  Synthetic
uuguuuuucucuugauccc

SEQ ID NO: 43276 - RNA, 20 nt, Artificial Sequence
  Synthetic
uuuguuuuucucuugauccc

SEQ ID NO: 43277 - RNA, 21 nt, Artificial Sequence
  Synthetic
uuuuguuuuucucuugauccc

SEQ ID NO: 43278 - RNA, 22 nt, Artificial Sequence
  Synthetic
auuuuguuuuucucuugauccc

SEQ ID NO: 43279 - RNA, 23 nt, Artificial Sequence
  Synthetic
cauuuuguuuuucucuugauccc

SEQ ID NO: 43280 - RNA, 24 nt, Artificial Sequence
  Synthetic
ucauuuuguuuuucucuugauccc

SEQ ID NO: 43281 - RNA, 18 nt, Artificial Sequence
  Synthetic
cucccaugacagacuccc

SEQ ID NO: 43282 - RNA, 19 nt, Artificial Sequence
  Synthetic
ucucccaugacagacuccc

SEQ ID NO: 43283 - RNA, 20 nt, Artificial Sequence
  Synthetic
cucucccaugacagacuccc

SEQ ID NO: 43284 - RNA, 21 nt, Artificial Sequence
  Synthetic
ucucucccaugacagacuccc

SEQ ID NO: 43285 - RNA, 22 nt, Artificial Sequence
  Synthetic
uucucucccaugacagacuccc

SEQ ID NO: 43286 - RNA, 23 nt, Artificial Sequence
  Synthetic
uuucucucccaugacagacuccc

SEQ ID NO: 43287 - RNA, 24 nt, Artificial Sequence
  Synthetic
uuuucucucccaugacagacuccc

SEQ ID NO: 43288 - RNA, 18 nt, Artificial Sequence
  Synthetic
ugggucucagggacuccc

SEQ ID NO: 43289 - RNA, 19 nt, Artificial Sequence
  Synthetic
augggucucagggacuccc

SEQ ID NO: 43290 - RNA, 20 nt, Artificial Sequence
  Synthetic
caugggucucagggacuccc

SEQ ID NO: 43291 - RNA, 22 nt, Artificial Sequence
  Synthetic
ugcaugggucucagggacuccc

SEQ ID NO: 43292 - RNA, 23 nt, Artificial Sequence
  Synthetic
cugcaugggucucagggacuccc

SEQ ID NO: 43293 - RNA, 24 nt, Artificial Sequence
  Synthetic
acugcaugggucucagggacuccc

SEQ ID NO: 43294 - RNA, 21 nt, Artificial Sequence
  Synthetic
uugaccuaucuugcagcuccc

SEQ ID NO: 43295 - RNA, 22 nt, Artificial Sequence
  Synthetic
uuugaccuaucuugcagcuccc

SEQ ID NO: 43296 - RNA, 24 nt, Artificial Sequence
  Synthetic
uguuugaccuaucuugcagcuccc

SEQ ID NO: 43297 - RNA, 19 nt, Artificial Sequence
  Synthetic
ugcgcuggguucugcuccc

SEQ ID NO: 43298 - RNA, 20 nt, Artificial Sequence
  Synthetic
uugcgcuggguucugcuccc

SEQ ID NO: 43299 - RNA, 21 nt, Artificial Sequence
  Synthetic
cuugcgcuggguucugcuccc

SEQ ID NO: 43300 - RNA, 23 nt, Artificial Sequence
  Synthetic
ugcuugcgcuggguucugcuccc

SEQ ID NO: 43301 - RNA, 24 nt, Artificial Sequence
  Synthetic
uugcuugcgcuggguucugcuccc

SEQ ID NO: 43302 - RNA, 18 nt, Artificial Sequence
  Synthetic
augcuccccccaucuccc

SEQ ID NO: 43303 - RNA, 19 nt, Artificial Sequence
  Synthetic
aaugcuccccccaucuccc

SEQ ID NO: 43304 - RNA, 21 nt, Artificial Sequence
  Synthetic
agaaugcuccccccaucuccc

SEQ ID NO: 43305 - RNA, 22 nt, Artificial Sequence
  Synthetic
cagaaugcuccccccaucuccc

SEQ ID NO: 43306 - RNA, 23 nt, Artificial Sequence
  Synthetic
ccagaaugcuccccccaucuccc

SEQ ID NO: 43307 - RNA, 24 nt, Artificial Sequence
  Synthetic
uccagaaugcuccccccaucuccc

SEQ ID NO: 43308 - RNA, 18 nt, Artificial Sequence
  Synthetic
ugcaaucauuagucuccc

SEQ ID NO: 43309 - RNA, 19 nt, Artificial Sequence
  Synthetic
uugcaaucauuagucuccc

SEQ ID NO: 43310 - RNA, 20 nt, Artificial Sequence
  Synthetic
uuugcaaucauuagucuccc

SEQ ID NO: 43311 - RNA, 21 nt, Artificial Sequence
  Synthetic
cuuugcaaucauuagucuccc

SEQ ID NO: 43312 - RNA, 22 nt, Artificial Sequence
  Synthetic
ucuuugcaaucauuagucuccc

SEQ ID NO: 43313 - RNA, 23 nt, Artificial Sequence
  Synthetic
cucuuugcaaucauuagucuccc

SEQ ID NO: 43314 - RNA, 24 nt, Artificial Sequence
  Synthetic
ccucuuugcaaucauuagucuccc

SEQ ID NO: 43315 - RNA, 18 nt, Artificial Sequence
  Synthetic
ugucuucccauuucuccc

SEQ ID NO: 43316 - RNA, 19 nt, Artificial Sequence
  Synthetic
cugucuucccauuucuccc

SEQ ID NO: 43317 - RNA, 20 nt, Artificial Sequence
  Synthetic
ccugucuucccauuucuccc

SEQ ID NO: 43318 - RNA, 21 nt, Artificial Sequence
  Synthetic
uccugucuucccauuucuccc

SEQ ID NO: 43319 - RNA, 22 nt, Artificial Sequence
  Synthetic
uuccugucuucccauuucuccc

SEQ ID NO: 43320 - RNA, 23 nt, Artificial Sequence
  Synthetic
auuccugucuucccauuucuccc

SEQ ID NO: 43321 - RNA, 24 nt, Artificial Sequence
  Synthetic
uauuccugucuucccauuucuccc

SEQ ID NO: 43322 - RNA, 18 nt, Artificial Sequence
  Synthetic
ugccacaugcauaguccc

SEQ ID NO: 43323 - RNA, 19 nt, Artificial Sequence
  Synthetic
cugccacaugcauaguccc

SEQ ID NO: 43324 - RNA, 20 nt, Artificial Sequence
  Synthetic
acugccacaugcauaguccc

SEQ ID NO: 43325 - RNA, 21 nt, Artificial Sequence
  Synthetic
cacugccacaugcauaguccc

SEQ ID NO: 43326 - RNA, 22 nt, Artificial Sequence
  Synthetic
ccacugccacaugcauaguccc

SEQ ID NO: 43327 - RNA, 23 nt, Artificial Sequence
  Synthetic
uccacugccacaugcauaguccc

SEQ ID NO: 43328 - RNA, 18 nt, Artificial Sequence
  Synthetic
uaauccauuguauguccc

SEQ ID NO: 43329 - RNA, 19 nt, Artificial Sequence
  Synthetic
uuaauccauuguauguccc

SEQ ID NO: 43330 - RNA, 20 nt, Artificial Sequence
  Synthetic
auuaauccauuguauguccc

SEQ ID NO: 43331 - RNA, 21 nt, Artificial Sequence
  Synthetic
cauuaauccauuguauguccc

SEQ ID NO: 43332 - RNA, 22 nt, Artificial Sequence
  Synthetic
ucauuaauccauuguauguccc

SEQ ID NO: 43333 - RNA, 23 nt, Artificial Sequence
  Synthetic
uucauuaauccauuguauguccc

SEQ ID NO: 43334 - RNA, 24 nt, Artificial Sequence
  Synthetic
cuucauuaauccauuguauguccc

SEQ ID NO: 43335 - RNA, 18 nt, Artificial Sequence
  Synthetic
cccugcucccaguguccc

SEQ ID NO: 43336 - RNA, 19 nt, Artificial Sequence
  Synthetic
acccugcucccaguguccc

SEQ ID NO: 43337 - RNA, 21 nt, Artificial Sequence
  Synthetic
agacccugcucccaguguccc

SEQ ID NO: 43338 - RNA, 22 nt, Artificial Sequence
  Synthetic
cagacccugcucccaguguccc

SEQ ID NO: 43339 - RNA, 23 nt, Artificial Sequence
  Synthetic
acagacccugcucccaguguccc

SEQ ID NO: 43340 - RNA, 24 nt, Artificial Sequence
  Synthetic
aacagacccugcucccaguguccc

SEQ ID NO: 43341 - RNA, 18 nt, Artificial Sequence
  Synthetic
ccaucacauuguuguccc

SEQ ID NO: 43342 - RNA, 21 nt, Artificial Sequence
  Synthetic
uggccaucacauuguuguccc

SEQ ID NO: 43343 - RNA, 22 nt, Artificial Sequence
  Synthetic
auggccaucacauuguuguccc

SEQ ID NO: 43344 - RNA, 23 nt, Artificial Sequence
  Synthetic
aauggccaucacauuguuguccc

SEQ ID NO: 43345 - RNA, 24 nt, Artificial Sequence
  Synthetic
caauggccaucacauuguuguccc

SEQ ID NO: 43346 - RNA, 18 nt, Artificial Sequence
  Synthetic
cuaagcaucaccauuccc

SEQ ID NO: 43347 - RNA, 19 nt, Artificial Sequence
  Synthetic
ucuaagcaucaccauuccc

SEQ ID NO: 43348 - RNA, 20 nt, Artificial Sequence
  Synthetic
uucuaagcaucaccauuccc

SEQ ID NO: 43349 - RNA, 21 nt, Artificial Sequence
  Synthetic
uuucuaagcaucaccauuccc

SEQ ID NO: 43350 - RNA, 22 nt, Artificial Sequence
  Synthetic
cuuucuaagcaucaccauuccc

SEQ ID NO: 43351 - RNA, 23 nt, Artificial Sequence
  Synthetic
ccuuucuaagcaucaccauuccc

SEQ ID NO: 43352 - RNA, 24 nt, Artificial Sequence
  Synthetic
accuuucuaagcaucaccauuccc

SEQ ID NO: 43353 - RNA, 22 nt, Artificial Sequence
  Synthetic
aguauuaucacccacccuuccc

SEQ ID NO: 43354 - RNA, 23 nt, Artificial Sequence
  Synthetic
caguauuaucacccacccuuccc

SEQ ID NO: 43355 - RNA, 24 nt, Artificial Sequence
  Synthetic
ccaguauuaucacccacccuuccc

SEQ ID NO: 43356 - RNA, 20 nt, Artificial Sequence
  Synthetic
agguuggugaaccccuuccc

SEQ ID NO: 43357 - RNA, 21 nt, Artificial Sequence
  Synthetic
cagguuggugaaccccuuccc

SEQ ID NO: 43358 - RNA, 22 nt, Artificial Sequence
  Synthetic
ucagguuggugaaccccuuccc

SEQ ID NO: 43359 - RNA, 23 nt, Artificial Sequence
  Synthetic
cucagguuggugaaccccuuccc

SEQ ID NO: 43360 - RNA, 24 nt, Artificial Sequence
  Synthetic
acucagguuggugaaccccuuccc

SEQ ID NO: 43361 - RNA, 18 nt, Artificial Sequence
  Synthetic
accuuaauucaucuuccc

SEQ ID NO: 43362 - RNA, 20 nt, Artificial Sequence
  Synthetic
agaccuuaauucaucuuccc

SEQ ID NO: 43363 - RNA, 21 nt, Artificial Sequence
  Synthetic
aagaccuuaauucaucuuccc

SEQ ID NO: 43364 - RNA, 23 nt, Artificial Sequence
  Synthetic
ugaagaccuuaauucaucuuccc

SEQ ID NO: 43365 - RNA, 24 nt, Artificial Sequence
  Synthetic
augaagaccuuaauucaucuuccc

SEQ ID NO: 43366 - RNA, 18 nt, Artificial Sequence
  Synthetic
uaauacacuuaucuuccc

SEQ ID NO: 43367 - RNA, 19 nt, Artificial Sequence
  Synthetic
cuaauacacuuaucuuccc

SEQ ID NO: 43368 - RNA, 20 nt, Artificial Sequence
  Synthetic
ucuaauacacuuaucuuccc

SEQ ID NO: 43369 - RNA, 21 nt, Artificial Sequence
  Synthetic
uucuaauacacuuaucuuccc

SEQ ID NO: 43370 - RNA, 22 nt, Artificial Sequence
  Synthetic
uuucuaauacacuuaucuuccc

SEQ ID NO: 43371 - RNA, 24 nt, Artificial Sequence
  Synthetic
aguuucuaauacacuuaucuuccc

SEQ ID NO: 43372 - RNA, 19 nt, Artificial Sequence
  Synthetic
agauccuuuaucucuuccc

SEQ ID NO: 43373 - RNA, 20 nt, Artificial Sequence
  Synthetic
aagauccuuuaucucuuccc

SEQ ID NO: 43374 - RNA, 18 nt, Artificial Sequence
  Synthetic
ucccuucuuacuguuccc

SEQ ID NO: 43375 - RNA, 19 nt, Artificial Sequence
  Synthetic
aucccuucuuacuguuccc

SEQ ID NO: 43376 - RNA, 20 nt, Artificial Sequence
  Synthetic
caucccuucuuacuguuccc

SEQ ID NO: 43377 - RNA, 21 nt, Artificial Sequence
  Synthetic
acaucccuucuuacuguuccc

SEQ ID NO: 43378 - RNA, 22 nt, Artificial Sequence
  Synthetic
cacaucccuucuuacuguuccc

SEQ ID NO: 43379 - RNA, 23 nt, Artificial Sequence
  Synthetic
ucacaucccuucuuacuguuccc

SEQ ID NO: 43380 - RNA, 24 nt, Artificial Sequence
  Synthetic
uucacaucccuucuuacuguuccc

SEQ ID NO: 43381 - RNA, 18 nt, Artificial Sequence
  Synthetic
caaguucucucauuuccc

SEQ ID NO: 43382 - RNA, 20 nt, Artificial Sequence
  Synthetic
cgcaaguucucucauuuccc

SEQ ID NO: 43383 - RNA, 22 nt, Artificial Sequence
  Synthetic
ugcgcaaguucucucauuuccc

SEQ ID NO: 43384 - RNA, 23 nt, Artificial Sequence
  Synthetic
uugcgcaaguucucucauuuccc

SEQ ID NO: 43385 - RNA, 24 nt, Artificial Sequence
  Synthetic
auugcgcaaguucucucauuuccc

SEQ ID NO: 43386 - RNA, 18 nt, Artificial Sequence
  Synthetic
cauuggcuuugauuuccc

SEQ ID NO: 43387 - RNA, 19 nt, Artificial Sequence
  Synthetic
ucauuggcuuugauuuccc

SEQ ID NO: 43388 - RNA, 20 nt, Artificial Sequence
  Synthetic
uucauuggcuuugauuuccc

SEQ ID NO: 43389 - RNA, 21 nt, Artificial Sequence
  Synthetic
uuucauuggcuuugauuuccc

SEQ ID NO: 43390 - RNA, 23 nt, Artificial Sequence
  Synthetic
cguuucauuggcuuugauuuccc

SEQ ID NO: 43391 - RNA, 24 nt, Artificial Sequence
  Synthetic
acguuucauuggcuuugauuuccc

SEQ ID NO: 43392 - RNA, 18 nt, Artificial Sequence
  Synthetic
uguuuuccauccuuuccc

SEQ ID NO: 43393 - RNA, 21 nt, Artificial Sequence
  Synthetic
ugguguuuuccauccuuuccc

SEQ ID NO: 43394 - RNA, 23 nt, Artificial Sequence
  Synthetic
ugugguguuuuccauccuuuccc

SEQ ID NO: 43395 - RNA, 24 nt, Artificial Sequence
  Synthetic
cugugguguuuuccauccuuuccc

SEQ ID NO: 43396 - RNA, 18 nt, Artificial Sequence
  Synthetic
aacacuuaaucaaaagcc

SEQ ID NO: 43397 - RNA, 19 nt, Artificial Sequence
  Synthetic
aaacacuuaaucaaaagcc

SEQ ID NO: 43398 - RNA, 20 nt, Artificial Sequence
  Synthetic
aaaacacuuaaucaaaagcc

SEQ ID NO: 43399 - RNA, 21 nt, Artificial Sequence
  Synthetic
uaaaacacuuaaucaaaagcc

SEQ ID NO: 43400 - RNA, 22 nt, Artificial Sequence
  Synthetic
auaaaacacuuaaucaaaagcc

SEQ ID NO: 43401 - RNA, 23 nt, Artificial Sequence
  Synthetic
aauaaaacacuuaaucaaaagcc

SEQ ID NO: 43402 - RNA, 24 nt, Artificial Sequence
  Synthetic
aaauaaaacacuuaaucaaaagcc

SEQ ID NO: 43403 - RNA, 21 nt, Artificial Sequence
  Synthetic
caagaaaauaaguuaaaagcc

SEQ ID NO: 43404 - RNA, 22 nt, Artificial Sequence
  Synthetic
ccaagaaaauaaguuaaaagcc

SEQ ID NO: 43405 - RNA, 23 nt, Artificial Sequence
  Synthetic
accaagaaaauaaguuaaaagcc

SEQ ID NO: 43406 - RNA, 21 nt, Artificial Sequence
  Synthetic
uaaaguucuugaggcaaagcc

SEQ ID NO: 43407 - RNA, 22 nt, Artificial Sequence
  Synthetic
cuaaaguucuugaggcaaagcc

SEQ ID NO: 43408 - RNA, 23 nt, Artificial Sequence
  Synthetic
acuaaaguucuugaggcaaagcc

SEQ ID NO: 43409 - RNA, 24 nt, Artificial Sequence
  Synthetic
aacuaaaguucuugaggcaaagcc

SEQ ID NO: 43410 - RNA, 18 nt, Artificial Sequence
  Synthetic
aguauuaccugcaaagcc

SEQ ID NO: 43411 - RNA, 19 nt, Artificial Sequence
  Synthetic
uaguauuaccugcaaagcc

SEQ ID NO: 43412 - RNA, 20 nt, Artificial Sequence
  Synthetic
uuaguauuaccugcaaagcc

SEQ ID NO: 43413 - RNA, 21 nt, Artificial Sequence
  Synthetic
auuaguauuaccugcaaagcc

SEQ ID NO: 43414 - RNA, 22 nt, Artificial Sequence
  Synthetic
cauuaguauuaccugcaaagcc

SEQ ID NO: 43415 - RNA, 24 nt, Artificial Sequence
  Synthetic
agcauuaguauuaccugcaaagcc

SEQ ID NO: 43416 - RNA, 18 nt, Artificial Sequence
  Synthetic
auuucggaauuuaaagcc

SEQ ID NO: 43417 - RNA, 19 nt, Artificial Sequence
  Synthetic
uauuucggaauuuaaagcc

SEQ ID NO: 43418 - RNA, 20 nt, Artificial Sequence
  Synthetic
auauuucggaauuuaaagcc

SEQ ID NO: 43419 - RNA, 21 nt, Artificial Sequence
  Synthetic
aauauuucggaauuuaaagcc

SEQ ID NO: 43420 - RNA, 22 nt, Artificial Sequence
  Synthetic
aaauauuucggaauuuaaagcc

SEQ ID NO: 43421 - RNA, 23 nt, Artificial Sequence
  Synthetic
uaaauauuucggaauuuaaagcc

SEQ ID NO: 43422 - RNA, 24 nt, Artificial Sequence
  Synthetic
cuaaauauuucggaauuuaaagcc

SEQ ID NO: 43423 - RNA, 18 nt, Artificial Sequence
  Synthetic
cuguuugacuuuaaagcc

SEQ ID NO: 43424 - RNA, 19 nt, Artificial Sequence
  Synthetic
ucuguuugacuuuaaagcc

SEQ ID NO: 43425 - RNA, 21 nt, Artificial Sequence
  Synthetic
ugucuguuugacuuuaaagcc

SEQ ID NO: 43426 - RNA, 22 nt, Artificial Sequence
  Synthetic
augucuguuugacuuuaaagcc

SEQ ID NO: 43427 - RNA, 23 nt, Artificial Sequence
  Synthetic
caugucuguuugacuuuaaagcc

SEQ ID NO: 43428 - RNA, 24 nt, Artificial Sequence
  Synthetic
ccaugucuguuugacuuuaaagcc

SEQ ID NO: 43429 - RNA, 18 nt, Artificial Sequence
  Synthetic
augcagagucaccaagcc

SEQ ID NO: 43430 - RNA, 19 nt, Artificial Sequence
  Synthetic
aaugcagagucaccaagcc

SEQ ID NO: 43431 - RNA, 20 nt, Artificial Sequence
  Synthetic
uaaugcagagucaccaagcc

SEQ ID NO: 43432 - RNA, 21 nt, Artificial Sequence
  Synthetic
uuaaugcagagucaccaagcc

SEQ ID NO: 43433 - RNA, 22 nt, Artificial Sequence
  Synthetic
uuuaaugcagagucaccaagcc

SEQ ID NO: 43434 - RNA, 23 nt, Artificial Sequence
  Synthetic
auuuaaugcagagucaccaagcc

SEQ ID NO: 43435 - RNA, 24 nt, Artificial Sequence
  Synthetic
uauuuaaugcagagucaccaagcc

SEQ ID NO: 43436 - RNA, 18 nt, Artificial Sequence
  Synthetic
aaaacaacaguggaagcc

SEQ ID NO: 43437 - RNA, 19 nt, Artificial Sequence
  Synthetic
caaaacaacaguggaagcc

SEQ ID NO: 43438 - RNA, 20 nt, Artificial Sequence
  Synthetic
acaaaacaacaguggaagcc

SEQ ID NO: 43439 - RNA, 21 nt, Artificial Sequence
  Synthetic
cacaaaacaacaguggaagcc

SEQ ID NO: 43440 - RNA, 22 nt, Artificial Sequence
  Synthetic
ccacaaaacaacaguggaagcc

SEQ ID NO: 43441 - RNA, 23 nt, Artificial Sequence
  Synthetic
accacaaaacaacaguggaagcc

SEQ ID NO: 43442 - RNA, 24 nt, Artificial Sequence
  Synthetic
aaccacaaaacaacaguggaagcc

SEQ ID NO: 43443 - RNA, 18 nt, Artificial Sequence
  Synthetic
uuuagauaaaacuaagcc

SEQ ID NO: 43444 - RNA, 19 nt, Artificial Sequence
  Synthetic
uuuuagauaaaacuaagcc

SEQ ID NO: 43445 - RNA, 20 nt, Artificial Sequence
  Synthetic
auuuuagauaaaacuaagcc

SEQ ID NO: 43446 - RNA, 21 nt, Artificial Sequence
  Synthetic
cauuuuagauaaaacuaagcc

SEQ ID NO: 43447 - RNA, 23 nt, Artificial Sequence
  Synthetic
ugcauuuuagauaaaacuaagcc

SEQ ID NO: 43448 - RNA, 24 nt, Artificial Sequence
  Synthetic
augcauuuuagauaaaacuaagcc

SEQ ID NO: 43449 - RNA, 18 nt, Artificial Sequence
  Synthetic
acucuuggauaaacagcc

SEQ ID NO: 43450 - RNA, 19 nt, Artificial Sequence
  Synthetic
aacucuuggauaaacagcc

SEQ ID NO: 43451 - RNA, 20 nt, Artificial Sequence
  Synthetic
uaacucuuggauaaacagcc

SEQ ID NO: 43452 - RNA, 21 nt, Artificial Sequence
  Synthetic
uuaacucuuggauaaacagcc

SEQ ID NO: 43453 - RNA, 22 nt, Artificial Sequence
  Synthetic
auuaacucuuggauaaacagcc

SEQ ID NO: 43454 - RNA, 23 nt, Artificial Sequence
  Synthetic
aauuaacucuuggauaaacagcc

SEQ ID NO: 43455 - RNA, 24 nt, Artificial Sequence
  Synthetic
aaauuaacucuuggauaaacagcc

SEQ ID NO: 43456 - RNA, 18 nt, Artificial Sequence
  Synthetic
uugacauucacaacagcc

SEQ ID NO: 43457 - RNA, 19 nt, Artificial Sequence
  Synthetic
uuugacauucacaacagcc

SEQ ID NO: 43458 - RNA, 20 nt, Artificial Sequence
  Synthetic
auuugacauucacaacagcc

SEQ ID NO: 43459 - RNA, 21 nt, Artificial Sequence
  Synthetic
cauuugacauucacaacagcc

SEQ ID NO: 43460 - RNA, 22 nt, Artificial Sequence
  Synthetic
ucauuugacauucacaacagcc

SEQ ID NO: 43461 - RNA, 23 nt, Artificial Sequence
  Synthetic
cucauuugacauucacaacagcc

SEQ ID NO: 43462 - RNA, 18 nt, Artificial Sequence
  Synthetic
uuuaccugcaacacagcc

SEQ ID NO: 43463 - RNA, 19 nt, Artificial Sequence
  Synthetic
auuuaccugcaacacagcc

SEQ ID NO: 43464 - RNA, 20 nt, Artificial Sequence
  Synthetic
aauuuaccugcaacacagcc

SEQ ID NO: 43465 - RNA, 21 nt, Artificial Sequence
  Synthetic
uaauuuaccugcaacacagcc

SEQ ID NO: 43466 - RNA, 22 nt, Artificial Sequence
  Synthetic
uuaauuuaccugcaacacagcc

SEQ ID NO: 43467 - RNA, 23 nt, Artificial Sequence
  Synthetic
uuuaauuuaccugcaacacagcc

SEQ ID NO: 43468 - RNA, 24 nt, Artificial Sequence
  Synthetic
uuuuaauuuaccugcaacacagcc

SEQ ID NO: 43469 - RNA, 18 nt, Artificial Sequence
  Synthetic
uugacucuccauccagcc

SEQ ID NO: 43470 - RNA, 19 nt, Artificial Sequence
  Synthetic
cuugacucuccauccagcc

SEQ ID NO: 43471 - RNA, 20 nt, Artificial Sequence
  Synthetic
ccuugacucuccauccagcc

SEQ ID NO: 43472 - RNA, 21 nt, Artificial Sequence
  Synthetic
accuugacucuccauccagcc

SEQ ID NO: 43473 - RNA, 23 nt, Artificial Sequence
  Synthetic
agaccuugacucuccauccagcc

SEQ ID NO: 43474 - RNA, 24 nt, Artificial Sequence
  Synthetic
uagaccuugacucuccauccagcc

SEQ ID NO: 43475 - RNA, 18 nt, Artificial Sequence
  Synthetic
uaauugggagaagcagcc

SEQ ID NO: 43476 - RNA, 19 nt, Artificial Sequence
  Synthetic
cuaauugggagaagcagcc

SEQ ID NO: 43477 - RNA, 21 nt, Artificial Sequence
  Synthetic
agcuaauugggagaagcagcc

SEQ ID NO: 43478 - RNA, 22 nt, Artificial Sequence
  Synthetic
cagcuaauugggagaagcagcc

SEQ ID NO: 43479 - RNA, 23 nt, Artificial Sequence
  Synthetic
ucagcuaauugggagaagcagcc

SEQ ID NO: 43480 - RNA, 24 nt, Artificial Sequence
  Synthetic
uucagcuaauugggagaagcagcc

SEQ ID NO: 43481 - RNA, 20 nt, Artificial Sequence
  Synthetic
aggagauaauagcugcagcc

SEQ ID NO: 43482 - RNA, 21 nt, Artificial Sequence
  Synthetic
caggagauaauagcugcagcc

SEQ ID NO: 43483 - RNA, 22 nt, Artificial Sequence
  Synthetic
acaggagauaauagcugcagcc

SEQ ID NO: 43484 - RNA, 23 nt, Artificial Sequence
  Synthetic
aacaggagauaauagcugcagcc

SEQ ID NO: 43485 - RNA, 24 nt, Artificial Sequence
  Synthetic
aaacaggagauaauagcugcagcc

SEQ ID NO: 43486 - RNA, 18 nt, Artificial Sequence
  Synthetic
uaucauacacacucagcc

SEQ ID NO: 43487 - RNA, 19 nt, Artificial Sequence
  Synthetic
auaucauacacacucagcc

SEQ ID NO: 43488 - RNA, 20 nt, Artificial Sequence
  Synthetic
cauaucauacacacucagcc

SEQ ID NO: 43489 - RNA, 21 nt, Artificial Sequence
  Synthetic
ucauaucauacacacucagcc

SEQ ID NO: 43490 - RNA, 22 nt, Artificial Sequence
  Synthetic
cucauaucauacacacucagcc

SEQ ID NO: 43491 - RNA, 23 nt, Artificial Sequence
  Synthetic
acucauaucauacacacucagcc

SEQ ID NO: 43492 - RNA, 24 nt, Artificial Sequence
  Synthetic
cacucauaucauacacacucagcc

SEQ ID NO: 43493 - RNA, 18 nt, Artificial Sequence
  Synthetic
uccagcagaguuucagcc

SEQ ID NO: 43494 - RNA, 19 nt, Artificial Sequence
  Synthetic
auccagcagaguuucagcc

SEQ ID NO: 43495 - RNA, 21 nt, Artificial Sequence
  Synthetic
ugauccagcagaguuucagcc

SEQ ID NO: 43496 - RNA, 22 nt, Artificial Sequence
  Synthetic
augauccagcagaguuucagcc

SEQ ID NO: 43497 - RNA, 23 nt, Artificial Sequence
  Synthetic
caugauccagcagaguuucagcc

SEQ ID NO: 43498 - RNA, 24 nt, Artificial Sequence
  Synthetic
ccaugauccagcagaguuucagcc

SEQ ID NO: 43499 - RNA, 18 nt, Artificial Sequence
  Synthetic
uguagcaaaaaaagagcc

SEQ ID NO: 43500 - RNA, 19 nt, Artificial Sequence
  Synthetic
uuguagcaaaaaaagagcc

SEQ ID NO: 43501 - RNA, 20 nt, Artificial Sequence
  Synthetic
auuguagcaaaaaaagagcc

SEQ ID NO: 43502 - RNA, 21 nt, Artificial Sequence
  Synthetic
aauuguagcaaaaaaagagcc

SEQ ID NO: 43503 - RNA, 22 nt, Artificial Sequence
  Synthetic
uaauuguagcaaaaaaagagcc

SEQ ID NO: 43504 - RNA, 23 nt, Artificial Sequence
  Synthetic
auaauuguagcaaaaaaagagcc

SEQ ID NO: 43505 - RNA, 24 nt, Artificial Sequence
  Synthetic
aauaauuguagcaaaaaaagagcc

SEQ ID NO: 43506 - RNA, 18 nt, Artificial Sequence
  Synthetic
agcuuuugaaagagagcc

SEQ ID NO: 43507 - RNA, 19 nt, Artificial Sequence
  Synthetic
cagcuuuugaaagagagcc

SEQ ID NO: 43508 - RNA, 20 nt, Artificial Sequence
  Synthetic
ccagcuuuugaaagagagcc

SEQ ID NO: 43509 - RNA, 22 nt, Artificial Sequence
  Synthetic
ugccagcuuuugaaagagagcc

SEQ ID NO: 43510 - RNA, 23 nt, Artificial Sequence
  Synthetic
augccagcuuuugaaagagagcc

SEQ ID NO: 43511 - RNA, 24 nt, Artificial Sequence
  Synthetic
caugccagcuuuugaaagagagcc

SEQ ID NO: 43512 - RNA, 18 nt, Artificial Sequence
  Synthetic
ccuccugaggagagagcc

SEQ ID NO: 43513 - RNA, 20 nt, Artificial Sequence
  Synthetic
ugccuccugaggagagagcc

SEQ ID NO: 43514 - RNA, 21 nt, Artificial Sequence
  Synthetic
cugccuccugaggagagagcc

SEQ ID NO: 43515 - RNA, 23 nt, Artificial Sequence
  Synthetic
agcugccuccugaggagagagcc

SEQ ID NO: 43516 - RNA, 18 nt, Artificial Sequence
  Synthetic
cccuuggccucuagagcc

SEQ ID NO: 43517 - RNA, 19 nt, Artificial Sequence
  Synthetic
acccuuggccucuagagcc

SEQ ID NO: 43518 - RNA, 20 nt, Artificial Sequence
  Synthetic
aacccuuggccucuagagcc

SEQ ID NO: 43519 - RNA, 21 nt, Artificial Sequence
  Synthetic
aaacccuuggccucuagagcc

SEQ ID NO: 43520 - RNA, 22 nt, Artificial Sequence
  Synthetic
aaaacccuuggccucuagagcc

SEQ ID NO: 43521 - RNA, 23 nt, Artificial Sequence
  Synthetic
uaaaacccuuggccucuagagcc

SEQ ID NO: 43522 - RNA, 24 nt, Artificial Sequence
  Synthetic
auaaaacccuuggccucuagagcc

SEQ ID NO: 43523 - RNA, 18 nt, Artificial Sequence
  Synthetic
aacagugcugugggagcc

SEQ ID NO: 43524 - RNA, 19 nt, Artificial Sequence
  Synthetic
aaacagugcugugggagcc

SEQ ID NO: 43525 - RNA, 22 nt, Artificial Sequence
  Synthetic
aggaaacagugcugugggagcc

SEQ ID NO: 43526 - RNA, 23 nt, Artificial Sequence
  Synthetic
aaggaaacagugcugugggagcc

SEQ ID NO: 43527 - RNA, 24 nt, Artificial Sequence
  Synthetic
caaggaaacagugcugugggagcc

SEQ ID NO: 43528 - RNA, 20 nt, Artificial Sequence
  Synthetic
ugguauguccuucuugagcc

SEQ ID NO: 43529 - RNA, 22 nt, Artificial Sequence
  Synthetic
agugguauguccuucuugagcc

SEQ ID NO: 43530 - RNA, 23 nt, Artificial Sequence
  Synthetic
aagugguauguccuucuugagcc

SEQ ID NO: 43531 - RNA, 24 nt, Artificial Sequence
  Synthetic
aaagugguauguccuucuugagcc

SEQ ID NO: 43532 - RNA, 18 nt, Artificial Sequence
  Synthetic
ccuuugaagaucauagcc

SEQ ID NO: 43533 - RNA, 19 nt, Artificial Sequence
  Synthetic
cccuuugaagaucauagcc

SEQ ID NO: 43534 - RNA, 21 nt, Artificial Sequence
  Synthetic
agcccuuugaagaucauagcc

SEQ ID NO: 43535 - RNA, 22 nt, Artificial Sequence
  Synthetic
aagcccuuugaagaucauagcc

SEQ ID NO: 43536 - RNA, 24 nt, Artificial Sequence
  Synthetic
agaagcccuuugaagaucauagcc

SEQ ID NO: 43537 - RNA, 18 nt, Artificial Sequence
  Synthetic
ugucagacugguauagcc

SEQ ID NO: 43538 - RNA, 19 nt, Artificial Sequence
  Synthetic
augucagacugguauagcc

SEQ ID NO: 43539 - RNA, 20 nt, Artificial Sequence
  Synthetic
caugucagacugguauagcc

SEQ ID NO: 43540 - RNA, 21 nt, Artificial Sequence
  Synthetic
ucaugucagacugguauagcc

SEQ ID NO: 43541 - RNA, 22 nt, Artificial Sequence
  Synthetic
aucaugucagacugguauagcc

SEQ ID NO: 43542 - RNA, 23 nt, Artificial Sequence
  Synthetic
aaucaugucagacugguauagcc

SEQ ID NO: 43543 - RNA, 24 nt, Artificial Sequence
  Synthetic
aaaucaugucagacugguauagcc

SEQ ID NO: 43544 - RNA, 18 nt, Artificial Sequence
  Synthetic
ugcagaaaacugcuagcc

SEQ ID NO: 43545 - RNA, 19 nt, Artificial Sequence
  Synthetic
uugcagaaaacugcuagcc

SEQ ID NO: 43546 - RNA, 21 nt, Artificial Sequence
  Synthetic
aguugcagaaaacugcuagcc

SEQ ID NO: 43547 - RNA, 22 nt, Artificial Sequence
  Synthetic
aaguugcagaaaacugcuagcc

SEQ ID NO: 43548 - RNA, 23 nt, Artificial Sequence
  Synthetic
uaaguugcagaaaacugcuagcc

SEQ ID NO: 43549 - RNA, 18 nt, Artificial Sequence
  Synthetic
uaaauuucuccuuuagcc

SEQ ID NO: 43550 - RNA, 19 nt, Artificial Sequence
  Synthetic
auaaauuucuccuuuagcc

SEQ ID NO: 43551 - RNA, 21 nt, Artificial Sequence
  Synthetic
ugauaaauuucuccuuuagcc

SEQ ID NO: 43552 - RNA, 22 nt, Artificial Sequence
  Synthetic
uugauaaauuucuccuuuagcc

SEQ ID NO: 43553 - RNA, 23 nt, Artificial Sequence
  Synthetic
cuugauaaauuucuccuuuagcc

SEQ ID NO: 43554 - RNA, 24 nt, Artificial Sequence
  Synthetic
ccuugauaaauuucuccuuuagcc

SEQ ID NO: 43555 - RNA, 18 nt, Artificial Sequence
  Synthetic
aauuaggaugaugacgcc

SEQ ID NO: 43556 - RNA, 19 nt, Artificial Sequence
  Synthetic
caauuaggaugaugacgcc

SEQ ID NO: 43557 - RNA, 20 nt, Artificial Sequence
  Synthetic
ccaauuaggaugaugacgcc

SEQ ID NO: 43558 - RNA, 21 nt, Artificial Sequence
  Synthetic
accaauuaggaugaugacgcc

SEQ ID NO: 43559 - RNA, 22 nt, Artificial Sequence
  Synthetic
aaccaauuaggaugaugacgcc

SEQ ID NO: 43560 - RNA, 23 nt, Artificial Sequence
  Synthetic
aaaccaauuaggaugaugacgcc

SEQ ID NO: 43561 - RNA, 24 nt, Artificial Sequence
  Synthetic
uaaaccaauuaggaugaugacgcc

SEQ ID NO: 43562 - RNA, 18 nt, Artificial Sequence
  Synthetic
ucugucucucuucccgcc

SEQ ID NO: 43563 - RNA, 19 nt, Artificial Sequence
  Synthetic
cucugucucucuucccgcc

SEQ ID NO: 43564 - RNA, 20 nt, Artificial Sequence
  Synthetic
acucugucucucuucccgcc

SEQ ID NO: 43565 - RNA, 21 nt, Artificial Sequence
  Synthetic
cacucugucucucuucccgcc

SEQ ID NO: 43566 - RNA, 22 nt, Artificial Sequence
  Synthetic
ccacucugucucucuucccgcc

SEQ ID NO: 43567 - RNA, 23 nt, Artificial Sequence
  Synthetic
accacucugucucucuucccgcc

SEQ ID NO: 43568 - RNA, 24 nt, Artificial Sequence
  Synthetic
uaccacucugucucucuucccgcc

SEQ ID NO: 43569 - RNA, 18 nt, Artificial Sequence
  Synthetic
cucgauuuauugagcgcc

SEQ ID NO: 43570 - RNA, 20 nt, Artificial Sequence
  Synthetic
agcucgauuuauugagcgcc

SEQ ID NO: 43571 - RNA, 21 nt, Artificial Sequence
  Synthetic
aagcucgauuuauugagcgcc

SEQ ID NO: 43572 - RNA, 22 nt, Artificial Sequence
  Synthetic
uaagcucgauuuauugagcgcc

SEQ ID NO: 43573 - RNA, 23 nt, Artificial Sequence
  Synthetic
uuaagcucgauuuauugagcgcc

SEQ ID NO: 43574 - RNA, 24 nt, Artificial Sequence
  Synthetic
auuaagcucgauuuauugagcgcc

SEQ ID NO: 43575 - RNA, 18 nt, Artificial Sequence
  Synthetic
agaggacauuuguucgcc

SEQ ID NO: 43576 - RNA, 19 nt, Artificial Sequence
  Synthetic
cagaggacauuuguucgcc

SEQ ID NO: 43577 - RNA, 20 nt, Artificial Sequence
  Synthetic
ucagaggacauuuguucgcc

SEQ ID NO: 43578 - RNA, 21 nt, Artificial Sequence
  Synthetic
uucagaggacauuuguucgcc

SEQ ID NO: 43579 - RNA, 22 nt, Artificial Sequence
  Synthetic
auucagaggacauuuguucgcc

SEQ ID NO: 43580 - RNA, 23 nt, Artificial Sequence
  Synthetic
aauucagaggacauuuguucgcc

SEQ ID NO: 43581 - RNA, 24 nt, Artificial Sequence
  Synthetic
aaauucagaggacauuuguucgcc

SEQ ID NO: 43582 - RNA, 18 nt, Artificial Sequence
  Synthetic
aauggaaguaaaaaggcc

SEQ ID NO: 43583 - RNA, 19 nt, Artificial Sequence
  Synthetic
aaauggaaguaaaaaggcc

SEQ ID NO: 43584 - RNA, 20 nt, Artificial Sequence
  Synthetic
caaauggaaguaaaaaggcc

SEQ ID NO: 43585 - RNA, 21 nt, Artificial Sequence
  Synthetic
ccaaauggaaguaaaaaggcc

SEQ ID NO: 43586 - RNA, 22 nt, Artificial Sequence
  Synthetic
uccaaauggaaguaaaaaggcc

SEQ ID NO: 43587 - RNA, 23 nt, Artificial Sequence
  Synthetic
cuccaaauggaaguaaaaaggcc

SEQ ID NO: 43588 - RNA, 24 nt, Artificial Sequence
  Synthetic
ccuccaaauggaaguaaaaaggcc

SEQ ID NO: 43589 - RNA, 18 nt, Artificial Sequence
  Synthetic
cccagugugagcaaggcc

SEQ ID NO: 43590 - RNA, 19 nt, Artificial Sequence
  Synthetic
acccagugugagcaaggcc

SEQ ID NO: 43591 - RNA, 20 nt, Artificial Sequence
  Synthetic
aacccagugugagcaaggcc

SEQ ID NO: 43592 - RNA, 21 nt, Artificial Sequence
  Synthetic
aaacccagugugagcaaggcc

SEQ ID NO: 43593 - RNA, 22 nt, Artificial Sequence
  Synthetic
aaaacccagugugagcaaggcc

SEQ ID NO: 43594 - RNA, 23 nt, Artificial Sequence
  Synthetic
uaaaacccagugugagcaaggcc

SEQ ID NO: 43595 - RNA, 19 nt, Artificial Sequence
  Synthetic
ugaguuuuguauuaaggcc

SEQ ID NO: 43596 - RNA, 20 nt, Artificial Sequence
  Synthetic
uugaguuuuguauuaaggcc

SEQ ID NO: 43597 - RNA, 21 nt, Artificial Sequence
  Synthetic
auugaguuuuguauuaaggcc

SEQ ID NO: 43598 - RNA, 22 nt, Artificial Sequence
  Synthetic
uauugaguuuuguauuaaggcc

SEQ ID NO: 43599 - RNA, 23 nt, Artificial Sequence
  Synthetic
auauugaguuuuguauuaaggcc

SEQ ID NO: 43600 - RNA, 24 nt, Artificial Sequence
  Synthetic
aauauugaguuuuguauuaaggcc

SEQ ID NO: 43601 - RNA, 18 nt, Artificial Sequence
  Synthetic
caguguguucaacaggcc

SEQ ID NO: 43602 - RNA, 19 nt, Artificial Sequence
  Synthetic
ccaguguguucaacaggcc

SEQ ID NO: 43603 - RNA, 20 nt, Artificial Sequence
  Synthetic
uccaguguguucaacaggcc

SEQ ID NO: 43604 - RNA, 21 nt, Artificial Sequence
  Synthetic
auccaguguguucaacaggcc

SEQ ID NO: 43605 - RNA, 22 nt, Artificial Sequence
  Synthetic
uauccaguguguucaacaggcc

SEQ ID NO: 43606 - RNA, 18 nt, Artificial Sequence
  Synthetic
auaucuuauuuggaggcc

SEQ ID NO: 43607 - RNA, 19 nt, Artificial Sequence
  Synthetic
cauaucuuauuuggaggcc

SEQ ID NO: 43608 - RNA, 20 nt, Artificial Sequence
  Synthetic
ucauaucuuauuuggaggcc

SEQ ID NO: 43609 - RNA, 21 nt, Artificial Sequence
  Synthetic
uucauaucuuauuuggaggcc

SEQ ID NO: 43610 - RNA, 22 nt, Artificial Sequence
  Synthetic
uuucauaucuuauuuggaggcc

SEQ ID NO: 43611 - RNA, 23 nt, Artificial Sequence
  Synthetic
cuuucauaucuuauuuggaggcc

SEQ ID NO: 43612 - RNA, 24 nt, Artificial Sequence
  Synthetic
ucuuucauaucuuauuuggaggcc

SEQ ID NO: 43613 - RNA, 18 nt, Artificial Sequence
  Synthetic
uuuucucauauguaggcc

SEQ ID NO: 43614 - RNA, 20 nt, Artificial Sequence
  Synthetic
uguuuucucauauguaggcc

SEQ ID NO: 43615 - RNA, 21 nt, Artificial Sequence
  Synthetic
uuguuuucucauauguaggcc

SEQ ID NO: 43616 - RNA, 22 nt, Artificial Sequence
  Synthetic
cuuguuuucucauauguaggcc

SEQ ID NO: 43617 - RNA, 23 nt, Artificial Sequence
  Synthetic
ccuuguuuucucauauguaggcc

SEQ ID NO: 43618 - RNA, 24 nt, Artificial Sequence
  Synthetic
uccuuguuuucucauauguaggcc

SEQ ID NO: 43619 - RNA, 18 nt, Artificial Sequence
  Synthetic
uuuauuggaaggauggcc

SEQ ID NO: 43620 - RNA, 19 nt, Artificial Sequence
  Synthetic
auuuauuggaaggauggcc

SEQ ID NO: 43621 - RNA, 20 nt, Artificial Sequence
  Synthetic
aauuuauuggaaggauggcc

SEQ ID NO: 43622 - RNA, 21 nt, Artificial Sequence
  Synthetic
uaauuuauuggaaggauggcc

SEQ ID NO: 43623 - RNA, 18 nt, Artificial Sequence
  Synthetic
cuuuacucugcccuggcc

SEQ ID NO: 43624 - RNA, 19 nt, Artificial Sequence
  Synthetic
ucuuuacucugcccuggcc

SEQ ID NO: 43625 - RNA, 20 nt, Artificial Sequence
  Synthetic
uucuuuacucugcccuggcc

SEQ ID NO: 43626 - RNA, 21 nt, Artificial Sequence
  Synthetic
uuucuuuacucugcccuggcc

SEQ ID NO: 43627 - RNA, 22 nt, Artificial Sequence
  Synthetic
cuuucuuuacucugcccuggcc

SEQ ID NO: 43628 - RNA, 23 nt, Artificial Sequence
  Synthetic
ucuuucuuuacucugcccuggcc

SEQ ID NO: 43629 - RNA, 24 nt, Artificial Sequence
  Synthetic
aucuuucuuuacucugcccuggcc

SEQ ID NO: 43630 - RNA, 18 nt, Artificial Sequence
  Synthetic
caaauuauuugccuggcc

SEQ ID NO: 43631 - RNA, 19 nt, Artificial Sequence
  Synthetic
ucaaauuauuugccuggcc

SEQ ID NO: 43632 - RNA, 21 nt, Artificial Sequence
  Synthetic
agucaaauuauuugccuggcc

SEQ ID NO: 43633 - RNA, 22 nt, Artificial Sequence
  Synthetic
cagucaaauuauuugccuggcc

SEQ ID NO: 43634 - RNA, 23 nt, Artificial Sequence
  Synthetic
acagucaaauuauuugccuggcc

SEQ ID NO: 43635 - RNA, 24 nt, Artificial Sequence
  Synthetic
aacagucaaauuauuugccuggcc

SEQ ID NO: 43636 - RNA, 18 nt, Artificial Sequence
  Synthetic
uuuggcaaaaagcuggcc

SEQ ID NO: 43637 - RNA, 19 nt, Artificial Sequence
  Synthetic
cuuuggcaaaaagcuggcc

SEQ ID NO: 43638 - RNA, 20 nt, Artificial Sequence
  Synthetic
ucuuuggcaaaaagcuggcc

SEQ ID NO: 43639 - RNA, 21 nt, Artificial Sequence
  Synthetic
uucuuuggcaaaaagcuggcc

SEQ ID NO: 43640 - RNA, 22 nt, Artificial Sequence
  Synthetic
uuucuuuggcaaaaagcuggcc

SEQ ID NO: 43641 - RNA, 23 nt, Artificial Sequence
  Synthetic
auuucuuuggcaaaaagcuggcc

SEQ ID NO: 43642 - RNA, 24 nt, Artificial Sequence
  Synthetic
uauuucuuuggcaaaaagcuggcc

SEQ ID NO: 43643 - RNA, 18 nt, Artificial Sequence
  Synthetic
aacaggacuuagguggcc

SEQ ID NO: 43644 - RNA, 19 nt, Artificial Sequence
  Synthetic
uaacaggacuuagguggcc

SEQ ID NO: 43645 - RNA, 21 nt, Artificial Sequence
  Synthetic
uguaacaggacuuagguggcc

SEQ ID NO: 43646 - RNA, 22 nt, Artificial Sequence
  Synthetic
cuguaacaggacuuagguggcc

SEQ ID NO: 43647 - RNA, 23 nt, Artificial Sequence
  Synthetic
ucuguaacaggacuuagguggcc

SEQ ID NO: 43648 - RNA, 24 nt, Artificial Sequence
  Synthetic
uucuguaacaggacuuagguggcc

SEQ ID NO: 43649 - RNA, 18 nt, Artificial Sequence
  Synthetic
aaaucagucccaaaugcc

SEQ ID NO: 43650 - RNA, 20 nt, Artificial Sequence
  Synthetic
agaaaucagucccaaaugcc

SEQ ID NO: 43651 - RNA, 21 nt, Artificial Sequence
  Synthetic
uagaaaucagucccaaaugcc

SEQ ID NO: 43652 - RNA, 22 nt, Artificial Sequence
  Synthetic
cuagaaaucagucccaaaugcc

SEQ ID NO: 43653 - RNA, 23 nt, Artificial Sequence
  Synthetic
ucuagaaaucagucccaaaugcc

SEQ ID NO: 43654 - RNA, 24 nt, Artificial Sequence
  Synthetic
uucuagaaaucagucccaaaugcc

SEQ ID NO: 43655 - RNA, 18 nt, Artificial Sequence
  Synthetic
uaccauauaggcaaugcc

SEQ ID NO: 43656 - RNA, 19 nt, Artificial Sequence
  Synthetic
auaccauauaggcaaugcc

SEQ ID NO: 43657 - RNA, 20 nt, Artificial Sequence
  Synthetic
aauaccauauaggcaaugcc

SEQ ID NO: 43658 - RNA, 21 nt, Artificial Sequence
  Synthetic
uaauaccauauaggcaaugcc

SEQ ID NO: 43659 - RNA, 22 nt, Artificial Sequence
  Synthetic
auaauaccauauaggcaaugcc

SEQ ID NO: 43660 - RNA, 23 nt, Artificial Sequence
  Synthetic
uauaauaccauauaggcaaugcc

SEQ ID NO: 43661 - RNA, 24 nt, Artificial Sequence
  Synthetic
cuauaauaccauauaggcaaugcc

SEQ ID NO: 43662 - RNA, 18 nt, Artificial Sequence
  Synthetic
aaagggaagaguaaugcc

SEQ ID NO: 43663 - RNA, 19 nt, Artificial Sequence
  Synthetic
aaaagggaagaguaaugcc

SEQ ID NO: 43664 - RNA, 21 nt, Artificial Sequence
  Synthetic
agaaaagggaagaguaaugcc

SEQ ID NO: 43665 - RNA, 22 nt, Artificial Sequence
  Synthetic
aagaaaagggaagaguaaugcc

SEQ ID NO: 43666 - RNA, 23 nt, Artificial Sequence
  Synthetic
aaagaaaagggaagaguaaugcc

SEQ ID NO: 43667 - RNA, 24 nt, Artificial Sequence
  Synthetic
uaaagaaaagggaagaguaaugcc

SEQ ID NO: 43668 - RNA, 18 nt, Artificial Sequence
  Synthetic
auugaauggucccaugcc

SEQ ID NO: 43669 - RNA, 20 nt, Artificial Sequence
  Synthetic
agauugaauggucccaugcc

SEQ ID NO: 43670 - RNA, 21 nt, Artificial Sequence
  Synthetic
cagauugaauggucccaugcc

SEQ ID NO: 43671 - RNA, 22 nt, Artificial Sequence
  Synthetic
acagauugaauggucccaugcc

SEQ ID NO: 43672 - RNA, 23 nt, Artificial Sequence
  Synthetic
uacagauugaauggucccaugcc

SEQ ID NO: 43673 - RNA, 24 nt, Artificial Sequence
  Synthetic
auacagauugaauggucccaugcc

SEQ ID NO: 43674 - RNA, 18 nt, Artificial Sequence
  Synthetic
ugacuuuucucagaugcc

SEQ ID NO: 43675 - RNA, 19 nt, Artificial Sequence
  Synthetic
cugacuuuucucagaugcc

SEQ ID NO: 43676 - RNA, 20 nt, Artificial Sequence
  Synthetic
acugacuuuucucagaugcc

SEQ ID NO: 43677 - RNA, 21 nt, Artificial Sequence
  Synthetic
aacugacuuuucucagaugcc

SEQ ID NO: 43678 - RNA, 22 nt, Artificial Sequence
  Synthetic
caacugacuuuucucagaugcc

SEQ ID NO: 43679 - RNA, 23 nt, Artificial Sequence
  Synthetic
ucaacugacuuuucucagaugcc

SEQ ID NO: 43680 - RNA, 24 nt, Artificial Sequence
  Synthetic
cucaacugacuuuucucagaugcc

SEQ ID NO: 43681 - RNA, 18 nt, Artificial Sequence
  Synthetic
uucaaacagaaauaugcc

SEQ ID NO: 43682 - RNA, 19 nt, Artificial Sequence
  Synthetic
uuucaaacagaaauaugcc

SEQ ID NO: 43683 - RNA, 20 nt, Artificial Sequence
  Synthetic
auuucaaacagaaauaugcc

SEQ ID NO: 43684 - RNA, 21 nt, Artificial Sequence
  Synthetic
aauuucaaacagaaauaugcc

SEQ ID NO: 43685 - RNA, 23 nt, Artificial Sequence
  Synthetic
ugaauuucaaacagaaauaugcc

SEQ ID NO: 43686 - RNA, 24 nt, Artificial Sequence
  Synthetic
cugaauuucaaacagaaauaugcc

SEQ ID NO: 43687 - RNA, 18 nt, Artificial Sequence
  Synthetic
cugugcuuagcauaugcc

SEQ ID NO: 43688 - RNA, 20 nt, Artificial Sequence
  Synthetic
ugcugugcuuagcauaugcc

SEQ ID NO: 43689 - RNA, 23 nt, Artificial Sequence
  Synthetic
uggugcugugcuuagcauaugcc

SEQ ID NO: 43690 - RNA, 24 nt, Artificial Sequence
  Synthetic
cuggugcugugcuuagcauaugcc

SEQ ID NO: 43691 - RNA, 18 nt, Artificial Sequence
  Synthetic
caugucauuaccuaugcc

SEQ ID NO: 43692 - RNA, 19 nt, Artificial Sequence
  Synthetic
ucaugucauuaccuaugcc

SEQ ID NO: 43693 - RNA, 21 nt, Artificial Sequence
  Synthetic
ugucaugucauuaccuaugcc

SEQ ID NO: 43694 - RNA, 22 nt, Artificial Sequence
  Synthetic
cugucaugucauuaccuaugcc

SEQ ID NO: 43695 - RNA, 23 nt, Artificial Sequence
  Synthetic
ccugucaugucauuaccuaugcc

SEQ ID NO: 43696 - RNA, 24 nt, Artificial Sequence
  Synthetic
cccugucaugucauuaccuaugcc

SEQ ID NO: 43697 - RNA, 18 nt, Artificial Sequence
  Synthetic
cucugcuacucuuaugcc

SEQ ID NO: 43698 - RNA, 20 nt, Artificial Sequence
  Synthetic
ugcucugcuacucuuaugcc

SEQ ID NO: 43699 - RNA, 21 nt, Artificial Sequence
  Synthetic
augcucugcuacucuuaugcc

SEQ ID NO: 43700 - RNA, 22 nt, Artificial Sequence
  Synthetic
aaugcucugcuacucuuaugcc

SEQ ID NO: 43701 - RNA, 23 nt, Artificial Sequence
  Synthetic
aaaugcucugcuacucuuaugcc

SEQ ID NO: 43702 - RNA, 24 nt, Artificial Sequence
  Synthetic
uaaaugcucugcuacucuuaugcc

SEQ ID NO: 43703 - RNA, 18 nt, Artificial Sequence
  Synthetic
uucuccuauaaaacugcc

SEQ ID NO: 43704 - RNA, 19 nt, Artificial Sequence
  Synthetic
uuucuccuauaaaacugcc

SEQ ID NO: 43705 - RNA, 21 nt, Artificial Sequence
  Synthetic
cguuucuccuauaaaacugcc

SEQ ID NO: 43706 - RNA, 22 nt, Artificial Sequence
  Synthetic
ucguuucuccuauaaaacugcc

SEQ ID NO: 43707 - RNA, 24 nt, Artificial Sequence
  Synthetic
agucguuucuccuauaaaacugcc

SEQ ID NO: 43708 - RNA, 18 nt, Artificial Sequence
  Synthetic
uuacaauacuugccugcc

SEQ ID NO: 43709 - RNA, 19 nt, Artificial Sequence
  Synthetic
uuuacaauacuugccugcc

SEQ ID NO: 43710 - RNA, 20 nt, Artificial Sequence
  Synthetic
auuuacaauacuugccugcc

SEQ ID NO: 43711 - RNA, 21 nt, Artificial Sequence
  Synthetic
aauuuacaauacuugccugcc

SEQ ID NO: 43712 - RNA, 22 nt, Artificial Sequence
  Synthetic
caauuuacaauacuugccugcc

SEQ ID NO: 43713 - RNA, 23 nt, Artificial Sequence
  Synthetic
ucaauuuacaauacuugccugcc

SEQ ID NO: 43714 - RNA, 24 nt, Artificial Sequence
  Synthetic
cucaauuuacaauacuugccugcc

SEQ ID NO: 43715 - RNA, 18 nt, Artificial Sequence
  Synthetic
accaacugauguccugcc

SEQ ID NO: 43716 - RNA, 19 nt, Artificial Sequence
  Synthetic
caccaacugauguccugcc

SEQ ID NO: 43717 - RNA, 20 nt, Artificial Sequence
  Synthetic
ucaccaacugauguccugcc

SEQ ID NO: 43718 - RNA, 21 nt, Artificial Sequence
  Synthetic
cucaccaacugauguccugcc

SEQ ID NO: 43719 - RNA, 23 nt, Artificial Sequence
  Synthetic
ugcucaccaacugauguccugcc

SEQ ID NO: 43720 - RNA, 24 nt, Artificial Sequence
  Synthetic
augcucaccaacugauguccugcc

SEQ ID NO: 43721 - RNA, 18 nt, Artificial Sequence
  Synthetic
ucaauggaaaaggcugcc

SEQ ID NO: 43722 - RNA, 19 nt, Artificial Sequence
  Synthetic
cucaauggaaaaggcugcc

SEQ ID NO: 43723 - RNA, 20 nt, Artificial Sequence
  Synthetic
acucaauggaaaaggcugcc

SEQ ID NO: 43724 - RNA, 21 nt, Artificial Sequence
  Synthetic
aacucaauggaaaaggcugcc

SEQ ID NO: 43725 - RNA, 23 nt, Artificial Sequence
  Synthetic
agaacucaauggaaaaggcugcc

SEQ ID NO: 43726 - RNA, 24 nt, Artificial Sequence
  Synthetic
aagaacucaauggaaaaggcugcc

SEQ ID NO: 43727 - RNA, 18 nt, Artificial Sequence
  Synthetic
acacagggaaaggcugcc

SEQ ID NO: 43728 - RNA, 19 nt, Artificial Sequence
  Synthetic
cacacagggaaaggcugcc

SEQ ID NO: 43729 - RNA, 20 nt, Artificial Sequence
  Synthetic
ccacacagggaaaggcugcc

SEQ ID NO: 43730 - RNA, 21 nt, Artificial Sequence
  Synthetic
cccacacagggaaaggcugcc

SEQ ID NO: 43731 - RNA, 22 nt, Artificial Sequence
  Synthetic
acccacacagggaaaggcugcc

SEQ ID NO: 43732 - RNA, 23 nt, Artificial Sequence
  Synthetic
cacccacacagggaaaggcugcc

SEQ ID NO: 43733 - RNA, 24 nt, Artificial Sequence
  Synthetic
ucacccacacagggaaaggcugcc

SEQ ID NO: 43734 - RNA, 18 nt, Artificial Sequence
  Synthetic
agauugacuucggcugcc

SEQ ID NO: 43735 - RNA, 19 nt, Artificial Sequence
  Synthetic
uagauugacuucggcugcc

SEQ ID NO: 43736 - RNA, 21 nt, Artificial Sequence
  Synthetic
uguagauugacuucggcugcc

SEQ ID NO: 43737 - RNA, 22 nt, Artificial Sequence
  Synthetic
uuguagauugacuucggcugcc

SEQ ID NO: 43738 - RNA, 23 nt, Artificial Sequence
  Synthetic
uuuguagauugacuucggcugcc

SEQ ID NO: 43739 - RNA, 24 nt, Artificial Sequence
  Synthetic
auuuguagauugacuucggcugcc

SEQ ID NO: 43740 - RNA, 19 nt, Artificial Sequence
  Synthetic
agcugucuguuuaucugcc

SEQ ID NO: 43741 - RNA, 20 nt, Artificial Sequence
  Synthetic
cagcugucuguuuaucugcc

SEQ ID NO: 43742 - RNA, 21 nt, Artificial Sequence
  Synthetic
ccagcugucuguuuaucugcc

SEQ ID NO: 43743 - RNA, 23 nt, Artificial Sequence
  Synthetic
agccagcugucuguuuaucugcc

SEQ ID NO: 43744 - RNA, 24 nt, Artificial Sequence
  Synthetic
uagccagcugucuguuuaucugcc

SEQ ID NO: 43745 - RNA, 21 nt, Artificial Sequence
  Synthetic
uugagguuugcaaccucugcc

SEQ ID NO: 43746 - RNA, 22 nt, Artificial Sequence
  Synthetic
auugagguuugcaaccucugcc

SEQ ID NO: 43747 - RNA, 23 nt, Artificial Sequence
  Synthetic
aauugagguuugcaaccucugcc

SEQ ID NO: 43748 - RNA, 18 nt, Artificial Sequence
  Synthetic
uuuacaaugaucucugcc

SEQ ID NO: 43749 - RNA, 20 nt, Artificial Sequence
  Synthetic
cguuuacaaugaucucugcc

SEQ ID NO: 43750 - RNA, 21 nt, Artificial Sequence
  Synthetic
ucguuuacaaugaucucugcc

SEQ ID NO: 43751 - RNA, 22 nt, Artificial Sequence
  Synthetic
cucguuuacaaugaucucugcc

SEQ ID NO: 43752 - RNA, 23 nt, Artificial Sequence
  Synthetic
acucguuuacaaugaucucugcc

SEQ ID NO: 43753 - RNA, 20 nt, Artificial Sequence
  Synthetic
ugggacacaccaacagugcc

SEQ ID NO: 43754 - RNA, 23 nt, Artificial Sequence
  Synthetic
aggugggacacaccaacagugcc

SEQ ID NO: 43755 - RNA, 24 nt, Artificial Sequence
  Synthetic
uaggugggacacaccaacagugcc

SEQ ID NO: 43756 - RNA, 21 nt, Artificial Sequence
  Synthetic
uaccacuguacucccagugcc

SEQ ID NO: 43757 - RNA, 22 nt, Artificial Sequence
  Synthetic
uuaccacuguacucccagugcc

SEQ ID NO: 43758 - RNA, 23 nt, Artificial Sequence
  Synthetic
uuuaccacuguacucccagugcc

SEQ ID NO: 43759 - RNA, 24 nt, Artificial Sequence
  Synthetic
auuuaccacuguacucccagugcc

SEQ ID NO: 43760 - RNA, 18 nt, Artificial Sequence
  Synthetic
uaugacgacaauagugcc

SEQ ID NO: 43761 - RNA, 19 nt, Artificial Sequence
  Synthetic
auaugacgacaauagugcc

SEQ ID NO: 43762 - RNA, 20 nt, Artificial Sequence
  Synthetic
aauaugacgacaauagugcc

SEQ ID NO: 43763 - RNA, 21 nt, Artificial Sequence
  Synthetic
aaauaugacgacaauagugcc

SEQ ID NO: 43764 - RNA, 22 nt, Artificial Sequence
  Synthetic
aaaauaugacgacaauagugcc

SEQ ID NO: 43765 - RNA, 23 nt, Artificial Sequence
  Synthetic
caaaauaugacgacaauagugcc

SEQ ID NO: 43766 - RNA, 24 nt, Artificial Sequence
  Synthetic
ccaaaauaugacgacaauagugcc

SEQ ID NO: 43767 - RNA, 18 nt, Artificial Sequence
  Synthetic
acagauuccccuggugcc

SEQ ID NO: 43768 - RNA, 19 nt, Artificial Sequence
  Synthetic
aacagauuccccuggugcc

SEQ ID NO: 43769 - RNA, 20 nt, Artificial Sequence
  Synthetic
uaacagauuccccuggugcc

SEQ ID NO: 43770 - RNA, 22 nt, Artificial Sequence
  Synthetic
uguaacagauuccccuggugcc

SEQ ID NO: 43771 - RNA, 23 nt, Artificial Sequence
  Synthetic
uuguaacagauuccccuggugcc

SEQ ID NO: 43772 - RNA, 24 nt, Artificial Sequence
  Synthetic
auuguaacagauuccccuggugcc

SEQ ID NO: 43773 - RNA, 18 nt, Artificial Sequence
  Synthetic
uugcucuguaaaugugcc

SEQ ID NO: 43774 - RNA, 19 nt, Artificial Sequence
  Synthetic
auugcucuguaaaugugcc

SEQ ID NO: 43775 - RNA, 20 nt, Artificial Sequence
  Synthetic
aauugcucuguaaaugugcc

SEQ ID NO: 43776 - RNA, 21 nt, Artificial Sequence
  Synthetic
aaauugcucuguaaaugugcc

SEQ ID NO: 43777 - RNA, 24 nt, Artificial Sequence
  Synthetic
uggaaauugcucuguaaaugugcc

SEQ ID NO: 43778 - RNA, 18 nt, Artificial Sequence
  Synthetic
caugaaggaaugugugcc

SEQ ID NO: 43779 - RNA, 19 nt, Artificial Sequence
  Synthetic
acaugaaggaaugugugcc

SEQ ID NO: 43780 - RNA, 20 nt, Artificial Sequence
  Synthetic
aacaugaaggaaugugugcc

SEQ ID NO: 43781 - RNA, 22 nt, Artificial Sequence
  Synthetic
ugaacaugaaggaaugugugcc

SEQ ID NO: 43782 - RNA, 23 nt, Artificial Sequence
  Synthetic
uugaacaugaaggaaugugugcc

SEQ ID NO: 43783 - RNA, 24 nt, Artificial Sequence
  Synthetic
auugaacaugaaggaaugugugcc

SEQ ID NO: 43784 - RNA, 18 nt, Artificial Sequence
  Synthetic
cucuucccucugugugcc

SEQ ID NO: 43785 - RNA, 19 nt, Artificial Sequence
  Synthetic
ucucuucccucugugugcc

SEQ ID NO: 43786 - RNA, 20 nt, Artificial Sequence
  Synthetic
cucucuucccucugugugcc

SEQ ID NO: 43787 - RNA, 21 nt, Artificial Sequence
  Synthetic
ccucucuucccucugugugcc

SEQ ID NO: 43788 - RNA, 22 nt, Artificial Sequence
  Synthetic
accucucuucccucugugugcc

SEQ ID NO: 43789 - RNA, 23 nt, Artificial Sequence
  Synthetic
aaccucucuucccucugugugcc

SEQ ID NO: 43790 - RNA, 21 nt, Artificial Sequence
  Synthetic
auuuuuccugguaccauugcc

SEQ ID NO: 43791 - RNA, 22 nt, Artificial Sequence
  Synthetic
cauuuuuccugguaccauugcc

SEQ ID NO: 43792 - RNA, 23 nt, Artificial Sequence
  Synthetic
ucauuuuuccugguaccauugcc

SEQ ID NO: 43793 - RNA, 18 nt, Artificial Sequence
  Synthetic
ucguucuucaaaguugcc

SEQ ID NO: 43794 - RNA, 20 nt, Artificial Sequence
  Synthetic
cgucguucuucaaaguugcc

SEQ ID NO: 43795 - RNA, 21 nt, Artificial Sequence
  Synthetic
ucgucguucuucaaaguugcc

SEQ ID NO: 43796 - RNA, 22 nt, Artificial Sequence
  Synthetic
uucgucguucuucaaaguugcc

SEQ ID NO: 43797 - RNA, 23 nt, Artificial Sequence
  Synthetic
cuucgucguucuucaaaguugcc

SEQ ID NO: 43798 - RNA, 24 nt, Artificial Sequence
  Synthetic
acuucgucguucuucaaaguugcc

SEQ ID NO: 43799 - RNA, 19 nt, Artificial Sequence
  Synthetic
ugagauuucuacuguugcc

SEQ ID NO: 43800 - RNA, 20 nt, Artificial Sequence
  Synthetic
augagauuucuacuguugcc

SEQ ID NO: 43801 - RNA, 22 nt, Artificial Sequence
  Synthetic
ugaugagauuucuacuguugcc

SEQ ID NO: 43802 - RNA, 23 nt, Artificial Sequence
  Synthetic
cugaugagauuucuacuguugcc

SEQ ID NO: 43803 - RNA, 24 nt, Artificial Sequence
  Synthetic
acugaugagauuucuacuguugcc

SEQ ID NO: 43804 - RNA, 18 nt, Artificial Sequence
  Synthetic
uacccccauugauuugcc

SEQ ID NO: 43805 - RNA, 19 nt, Artificial Sequence
  Synthetic
uuacccccauugauuugcc

SEQ ID NO: 43806 - RNA, 22 nt, Artificial Sequence
  Synthetic
ugguuacccccauugauuugcc

SEQ ID NO: 43807 - RNA, 24 nt, Artificial Sequence
  Synthetic
agugguuacccccauugauuugcc

SEQ ID NO: 43808 - RNA, 18 nt, Artificial Sequence
  Synthetic
ugauauuacauauuugcc

SEQ ID NO: 43809 - RNA, 19 nt, Artificial Sequence
  Synthetic
uugauauuacauauuugcc

SEQ ID NO: 43810 - RNA, 20 nt, Artificial Sequence
  Synthetic
auugauauuacauauuugcc

SEQ ID NO: 43811 - RNA, 21 nt, Artificial Sequence
  Synthetic
uauugauauuacauauuugcc

SEQ ID NO: 43812 - RNA, 22 nt, Artificial Sequence
  Synthetic
uuauugauauuacauauuugcc

SEQ ID NO: 43813 - RNA, 23 nt, Artificial Sequence
  Synthetic
auuauugauauuacauauuugcc

SEQ ID NO: 43814 - RNA, 24 nt, Artificial Sequence
  Synthetic
cauuauugauauuacauauuugcc

SEQ ID NO: 43815 - RNA, 18 nt, Artificial Sequence
  Synthetic
ucuguggguguauuugcc

SEQ ID NO: 43816 - RNA, 19 nt, Artificial Sequence
  Synthetic
cucuguggguguauuugcc

SEQ ID NO: 43817 - RNA, 20 nt, Artificial Sequence
  Synthetic
acucuguggguguauuugcc

SEQ ID NO: 43818 - RNA, 21 nt, Artificial Sequence
  Synthetic
cacucuguggguguauuugcc

SEQ ID NO: 43819 - RNA, 22 nt, Artificial Sequence
  Synthetic
ucacucuguggguguauuugcc

SEQ ID NO: 43820 - RNA, 23 nt, Artificial Sequence
  Synthetic
cucacucuguggguguauuugcc

SEQ ID NO: 43821 - RNA, 24 nt, Artificial Sequence
  Synthetic
ccucacucuguggguguauuugcc

SEQ ID NO: 43822 - RNA, 18 nt, Artificial Sequence
  Synthetic
auuuaacugcacuuugcc

SEQ ID NO: 43823 - RNA, 19 nt, Artificial Sequence
  Synthetic
uauuuaacugcacuuugcc

SEQ ID NO: 43824 - RNA, 20 nt, Artificial Sequence
  Synthetic
cuauuuaacugcacuuugcc

SEQ ID NO: 43825 - RNA, 21 nt, Artificial Sequence
  Synthetic
ucuauuuaacugcacuuugcc

SEQ ID NO: 43826 - RNA, 23 nt, Artificial Sequence
  Synthetic
ugucuauuuaacugcacuuugcc

SEQ ID NO: 43827 - RNA, 24 nt, Artificial Sequence
  Synthetic
augucuauuuaacugcacuuugcc

SEQ ID NO: 43828 - RNA, 19 nt, Artificial Sequence
  Synthetic
ugcuagcuuugaguuugcc

SEQ ID NO: 43829 - RNA, 20 nt, Artificial Sequence
  Synthetic
uugcuagcuuugaguuugcc

SEQ ID NO: 43830 - RNA, 21 nt, Artificial Sequence
  Synthetic
auugcuagcuuugaguuugcc

SEQ ID NO: 43831 - RNA, 23 nt, Artificial Sequence
  Synthetic
ugauugcuagcuuugaguuugcc

SEQ ID NO: 43832 - RNA, 24 nt, Artificial Sequence
  Synthetic
augauugcuagcuuugaguuugcc

SEQ ID NO: 43833 - RNA, 18 nt, Artificial Sequence
  Synthetic
caaccuaugaguuuugcc

SEQ ID NO: 43834 - RNA, 20 nt, Artificial Sequence
  Synthetic
agcaaccuaugaguuuugcc

SEQ ID NO: 43835 - RNA, 21 nt, Artificial Sequence
  Synthetic
aagcaaccuaugaguuuugcc

SEQ ID NO: 43836 - RNA, 22 nt, Artificial Sequence
  Synthetic
caagcaaccuaugaguuuugcc

SEQ ID NO: 43837 - RNA, 23 nt, Artificial Sequence
  Synthetic
acaagcaaccuaugaguuuugcc

SEQ ID NO: 43838 - RNA, 18 nt, Artificial Sequence
  Synthetic
aguacaggagagaaaucc

SEQ ID NO: 43839 - RNA, 19 nt, Artificial Sequence
  Synthetic
uaguacaggagagaaaucc

SEQ ID NO: 43840 - RNA, 21 nt, Artificial Sequence
  Synthetic
uguaguacaggagagaaaucc

SEQ ID NO: 43841 - RNA, 22 nt, Artificial Sequence
  Synthetic
uuguaguacaggagagaaaucc

SEQ ID NO: 43842 - RNA, 19 nt, Artificial Sequence
  Synthetic
ugaaaaaucaucccaaucc

SEQ ID NO: 43843 - RNA, 20 nt, Artificial Sequence
  Synthetic
cugaaaaaucaucccaaucc

SEQ ID NO: 43844 - RNA, 21 nt, Artificial Sequence
  Synthetic
acugaaaaaucaucccaaucc

SEQ ID NO: 43845 - RNA, 23 nt, Artificial Sequence
  Synthetic
agacugaaaaaucaucccaaucc

SEQ ID NO: 43846 - RNA, 24 nt, Artificial Sequence
  Synthetic
uagacugaaaaaucaucccaaucc

SEQ ID NO: 43847 - RNA, 19 nt, Artificial Sequence
  Synthetic
ugaauuuuacuugcaaucc

SEQ ID NO: 43848 - RNA, 20 nt, Artificial Sequence
  Synthetic
uugaauuuuacuugcaaucc

SEQ ID NO: 43849 - RNA, 22 nt, Artificial Sequence
  Synthetic
aguugaauuuuacuugcaaucc

SEQ ID NO: 43850 - RNA, 23 nt, Artificial Sequence
  Synthetic
uaguugaauuuuacuugcaaucc

SEQ ID NO: 43851 - RNA, 24 nt, Artificial Sequence
  Synthetic
auaguugaauuuuacuugcaaucc

SEQ ID NO: 43852 - RNA, 18 nt, Artificial Sequence
  Synthetic
agacuauaccuucaaucc

SEQ ID NO: 43853 - RNA, 20 nt, Artificial Sequence
  Synthetic
ugagacuauaccuucaaucc

SEQ ID NO: 43854 - RNA, 21 nt, Artificial Sequence
  Synthetic
uugagacuauaccuucaaucc

SEQ ID NO: 43855 - RNA, 22 nt, Artificial Sequence
  Synthetic
uuugagacuauaccuucaaucc

SEQ ID NO: 43856 - RNA, 24 nt, Artificial Sequence
  Synthetic
aguuugagacuauaccuucaaucc

SEQ ID NO: 43857 - RNA, 18 nt, Artificial Sequence
  Synthetic
aaugguuaucaugaaucc

SEQ ID NO: 43858 - RNA, 19 nt, Artificial Sequence
  Synthetic
aaaugguuaucaugaaucc

SEQ ID NO: 43859 - RNA, 20 nt, Artificial Sequence
  Synthetic
caaaugguuaucaugaaucc

SEQ ID NO: 43860 - RNA, 21 nt, Artificial Sequence
  Synthetic
acaaaugguuaucaugaaucc

SEQ ID NO: 43861 - RNA, 22 nt, Artificial Sequence
  Synthetic
uacaaaugguuaucaugaaucc

SEQ ID NO: 43862 - RNA, 23 nt, Artificial Sequence
  Synthetic
auacaaaugguuaucaugaaucc

SEQ ID NO: 43863 - RNA, 24 nt, Artificial Sequence
  Synthetic
aauacaaaugguuaucaugaaucc

SEQ ID NO: 43864 - RNA, 21 nt, Artificial Sequence
  Synthetic
aaaagagcagaccaauaaucc

SEQ ID NO: 43865 - RNA, 22 nt, Artificial Sequence
  Synthetic
caaaagagcagaccaauaaucc

SEQ ID NO: 43866 - RNA, 23 nt, Artificial Sequence
  Synthetic
ucaaaagagcagaccaauaaucc

SEQ ID NO: 43867 - RNA, 24 nt, Artificial Sequence
  Synthetic
uucaaaagagcagaccaauaaucc

SEQ ID NO: 43868 - RNA, 18 nt, Artificial Sequence
  Synthetic
uuuaguggugacuaaucc

SEQ ID NO: 43869 - RNA, 19 nt, Artificial Sequence
  Synthetic
auuuaguggugacuaaucc

SEQ ID NO: 43870 - RNA, 20 nt, Artificial Sequence
  Synthetic
uauuuaguggugacuaaucc

SEQ ID NO: 43871 - RNA, 21 nt, Artificial Sequence
  Synthetic
auauuuaguggugacuaaucc

SEQ ID NO: 43872 - RNA, 22 nt, Artificial Sequence
  Synthetic
uauauuuaguggugacuaaucc

SEQ ID NO: 43873 - RNA, 23 nt, Artificial Sequence
  Synthetic
cuauauuuaguggugacuaaucc

SEQ ID NO: 43874 - RNA, 18 nt, Artificial Sequence
  Synthetic
cacaguggugagccaucc

SEQ ID NO: 43875 - RNA, 19 nt, Artificial Sequence
  Synthetic
ccacaguggugagccaucc

SEQ ID NO: 43876 - RNA, 20 nt, Artificial Sequence
  Synthetic
cccacaguggugagccaucc

SEQ ID NO: 43877 - RNA, 19 nt, Artificial Sequence
  Synthetic
ugcagcuugcuugccaucc

SEQ ID NO: 43878 - RNA, 21 nt, Artificial Sequence
  Synthetic
agugcagcuugcuugccaucc

SEQ ID NO: 43879 - RNA, 22 nt, Artificial Sequence
  Synthetic
cagugcagcuugcuugccaucc

SEQ ID NO: 43880 - RNA, 23 nt, Artificial Sequence
  Synthetic
ccagugcagcuugcuugccaucc

SEQ ID NO: 43881 - RNA, 24 nt, Artificial Sequence
  Synthetic
cccagugcagcuugcuugccaucc

SEQ ID NO: 43882 - RNA, 19 nt, Artificial Sequence
  Synthetic
agagcuaaucugagcaucc

SEQ ID NO: 43883 - RNA, 20 nt, Artificial Sequence
  Synthetic
uagagcuaaucugagcaucc

SEQ ID NO: 43884 - RNA, 22 nt, Artificial Sequence
  Synthetic
aguagagcuaaucugagcaucc

SEQ ID NO: 43885 - RNA, 23 nt, Artificial Sequence
  Synthetic
caguagagcuaaucugagcaucc

SEQ ID NO: 43886 - RNA, 24 nt, Artificial Sequence
  Synthetic
ccaguagagcuaaucugagcaucc

SEQ ID NO: 43887 - RNA, 18 nt, Artificial Sequence
  Synthetic
ccaauauuccuagcaucc

SEQ ID NO: 43888 - RNA, 19 nt, Artificial Sequence
  Synthetic
accaauauuccuagcaucc

SEQ ID NO: 43889 - RNA, 20 nt, Artificial Sequence
  Synthetic
aaccaauauuccuagcaucc

SEQ ID NO: 43890 - RNA, 21 nt, Artificial Sequence
  Synthetic
caaccaauauuccuagcaucc

SEQ ID NO: 43891 - RNA, 22 nt, Artificial Sequence
  Synthetic
acaaccaauauuccuagcaucc

SEQ ID NO: 43892 - RNA, 23 nt, Artificial Sequence
  Synthetic
aacaaccaauauuccuagcaucc

SEQ ID NO: 43893 - RNA, 24 nt, Artificial Sequence
  Synthetic
uaacaaccaauauuccuagcaucc

SEQ ID NO: 43894 - RNA, 19 nt, Artificial Sequence
  Synthetic
uggaauuauuugggcaucc

SEQ ID NO: 43895 - RNA, 20 nt, Artificial Sequence
  Synthetic
auggaauuauuugggcaucc

SEQ ID NO: 43896 - RNA, 21 nt, Artificial Sequence
  Synthetic
uauggaauuauuugggcaucc

SEQ ID NO: 43897 - RNA, 22 nt, Artificial Sequence
  Synthetic
uuauggaauuauuugggcaucc

SEQ ID NO: 43898 - RNA, 24 nt, Artificial Sequence
  Synthetic
uguuauggaauuauuugggcaucc

SEQ ID NO: 43899 - RNA, 22 nt, Artificial Sequence
  Synthetic
uggggauggagaaccaucaucc

SEQ ID NO: 43900 - RNA, 24 nt, Artificial Sequence
  Synthetic
uguggggauggagaaccaucaucc

SEQ ID NO: 43901 - RNA, 18 nt, Artificial Sequence
  Synthetic
ugucccauucuaagaucc

SEQ ID NO: 43902 - RNA, 19 nt, Artificial Sequence
  Synthetic
augucccauucuaagaucc

SEQ ID NO: 43903 - RNA, 20 nt, Artificial Sequence
  Synthetic
uaugucccauucuaagaucc

SEQ ID NO: 43904 - RNA, 21 nt, Artificial Sequence
  Synthetic
cuaugucccauucuaagaucc

SEQ ID NO: 43905 - RNA, 22 nt, Artificial Sequence
  Synthetic
acuaugucccauucuaagaucc

SEQ ID NO: 43906 - RNA, 23 nt, Artificial Sequence
  Synthetic
cacuaugucccauucuaagaucc

SEQ ID NO: 43907 - RNA, 24 nt, Artificial Sequence
  Synthetic
ccacuaugucccauucuaagaucc

SEQ ID NO: 43908 - RNA, 21 nt, Artificial Sequence
  Synthetic
uguauuuuuuuuuuaagaucc

SEQ ID NO: 43909 - RNA, 24 nt, Artificial Sequence
  Synthetic
ugguguauuuuuuuuuuaagaucc

SEQ ID NO: 43910 - RNA, 19 nt, Artificial Sequence
  Synthetic
aguauguggaggaggaucc

SEQ ID NO: 43911 - RNA, 23 nt, Artificial Sequence
  Synthetic
agggaguauguggaggaggaucc

SEQ ID NO: 43912 - RNA, 19 nt, Artificial Sequence
  Synthetic
cgaaguuuggacuggaucc

SEQ ID NO: 43913 - RNA, 20 nt, Artificial Sequence
  Synthetic
acgaaguuuggacuggaucc

SEQ ID NO: 43914 - RNA, 21 nt, Artificial Sequence
  Synthetic
uacgaaguuuggacuggaucc

SEQ ID NO: 43915 - RNA, 22 nt, Artificial Sequence
  Synthetic
auacgaaguuuggacuggaucc

SEQ ID NO: 43916 - RNA, 23 nt, Artificial Sequence
  Synthetic
aauacgaaguuuggacuggaucc

SEQ ID NO: 43917 - RNA, 24 nt, Artificial Sequence
  Synthetic
aaauacgaaguuuggacuggaucc

SEQ ID NO: 43918 - RNA, 18 nt, Artificial Sequence
  Synthetic
auauuucuugaaugaucc

SEQ ID NO: 43919 - RNA, 19 nt, Artificial Sequence
  Synthetic
aauauuucuugaaugaucc

SEQ ID NO: 43920 - RNA, 20 nt, Artificial Sequence
  Synthetic
aaauauuucuugaaugaucc

SEQ ID NO: 43921 - RNA, 21 nt, Artificial Sequence
  Synthetic
aaaauauuucuugaaugaucc

SEQ ID NO: 43922 - RNA, 22 nt, Artificial Sequence
  Synthetic
uaaaauauuucuugaaugaucc

SEQ ID NO: 43923 - RNA, 23 nt, Artificial Sequence
  Synthetic
uuaaaauauuucuugaaugaucc

SEQ ID NO: 43924 - RNA, 24 nt, Artificial Sequence
  Synthetic
uuuaaaauauuucuugaaugaucc

SEQ ID NO: 43925 - RNA, 18 nt, Artificial Sequence
  Synthetic
auccgggugagaugaucc

SEQ ID NO: 43926 - RNA, 21 nt, Artificial Sequence
  Synthetic
aggauccgggugagaugaucc

SEQ ID NO: 43927 - RNA, 22 nt, Artificial Sequence
  Synthetic
aaggauccgggugagaugaucc

SEQ ID NO: 43928 - RNA, 18 nt, Artificial Sequence
  Synthetic
uucaaguuacuuugaucc

SEQ ID NO: 43929 - RNA, 19 nt, Artificial Sequence
  Synthetic
uuucaaguuacuuugaucc

SEQ ID NO: 43930 - RNA, 20 nt, Artificial Sequence
  Synthetic
auuucaaguuacuuugaucc

SEQ ID NO: 43931 - RNA, 21 nt, Artificial Sequence
  Synthetic
uauuucaaguuacuuugaucc

SEQ ID NO: 43932 - RNA, 22 nt, Artificial Sequence
  Synthetic
uuauuucaaguuacuuugaucc

SEQ ID NO: 43933 - RNA, 23 nt, Artificial Sequence
  Synthetic
auuauuucaaguuacuuugaucc

SEQ ID NO: 43934 - RNA, 24 nt, Artificial Sequence
  Synthetic
uauuauuucaaguuacuuugaucc

SEQ ID NO: 43935 - RNA, 18 nt, Artificial Sequence
  Synthetic
auacguauagugauaucc

SEQ ID NO: 43936 - RNA, 19 nt, Artificial Sequence
  Synthetic
uauacguauagugauaucc

SEQ ID NO: 43937 - RNA, 20 nt, Artificial Sequence
  Synthetic
auauacguauagugauaucc

SEQ ID NO: 43938 - RNA, 23 nt, Artificial Sequence
  Synthetic
aggauauacguauagugauaucc

SEQ ID NO: 43939 - RNA, 24 nt, Artificial Sequence
  Synthetic
aaggauauacguauagugauaucc

SEQ ID NO: 43940 - RNA, 18 nt, Artificial Sequence
  Synthetic
aaccguggucguauaucc

SEQ ID NO: 43941 - RNA, 19 nt, Artificial Sequence
  Synthetic
uaaccguggucguauaucc

SEQ ID NO: 43942 - RNA, 20 nt, Artificial Sequence
  Synthetic
uuaaccguggucguauaucc

SEQ ID NO: 43943 - RNA, 21 nt, Artificial Sequence
  Synthetic
auuaaccguggucguauaucc

SEQ ID NO: 43944 - RNA, 24 nt, Artificial Sequence
  Synthetic
aggauuaaccguggucguauaucc

SEQ ID NO: 43945 - RNA, 18 nt, Artificial Sequence
  Synthetic
agagagauggaucuaucc

SEQ ID NO: 43946 - RNA, 20 nt, Artificial Sequence
  Synthetic
agagagagauggaucuaucc

SEQ ID NO: 43947 - RNA, 21 nt, Artificial Sequence
  Synthetic
aagagagagauggaucuaucc

SEQ ID NO: 43948 - RNA, 22 nt, Artificial Sequence
  Synthetic
aaagagagagauggaucuaucc

SEQ ID NO: 43949 - RNA, 23 nt, Artificial Sequence
  Synthetic
uaaagagagagauggaucuaucc

SEQ ID NO: 43950 - RNA, 18 nt, Artificial Sequence
  Synthetic
uuuuacuuuaauguaucc

SEQ ID NO: 43951 - RNA, 19 nt, Artificial Sequence
  Synthetic
cuuuuacuuuaauguaucc

SEQ ID NO: 43952 - RNA, 21 nt, Artificial Sequence
  Synthetic
agcuuuuacuuuaauguaucc

SEQ ID NO: 43953 - RNA, 23 nt, Artificial Sequence
  Synthetic
agagcuuuuacuuuaauguaucc

SEQ ID NO: 43954 - RNA, 24 nt, Artificial Sequence
  Synthetic
cagagcuuuuacuuuaauguaucc

SEQ ID NO: 43955 - RNA, 18 nt, Artificial Sequence
  Synthetic
uaaacuuuucccuuaucc

SEQ ID NO: 43956 - RNA, 19 nt, Artificial Sequence
  Synthetic
uuaaacuuuucccuuaucc

SEQ ID NO: 43957 - RNA, 20 nt, Artificial Sequence
  Synthetic
cuuaaacuuuucccuuaucc

SEQ ID NO: 43958 - RNA, 21 nt, Artificial Sequence
  Synthetic
acuuaaacuuuucccuuaucc

SEQ ID NO: 43959 - RNA, 22 nt, Artificial Sequence
  Synthetic
aacuuaaacuuuucccuuaucc

SEQ ID NO: 43960 - RNA, 23 nt, Artificial Sequence
  Synthetic
aaacuuaaacuuuucccuuaucc

SEQ ID NO: 43961 - RNA, 18 nt, Artificial Sequence
  Synthetic
auuaguuuuaguuuaucc

SEQ ID NO: 43962 - RNA, 19 nt, Artificial Sequence
  Synthetic
uauuaguuuuaguuuaucc

SEQ ID NO: 43963 - RNA, 20 nt, Artificial Sequence
  Synthetic
auauuaguuuuaguuuaucc

SEQ ID NO: 43964 - RNA, 21 nt, Artificial Sequence
  Synthetic
cauauuaguuuuaguuuaucc

SEQ ID NO: 43965 - RNA, 22 nt, Artificial Sequence
  Synthetic
ucauauuaguuuuaguuuaucc

SEQ ID NO: 43966 - RNA, 23 nt, Artificial Sequence
  Synthetic
uucauauuaguuuuaguuuaucc

SEQ ID NO: 43967 - RNA, 24 nt, Artificial Sequence
  Synthetic
uuucauauuaguuuuaguuuaucc

SEQ ID NO: 43968 - RNA, 21 nt, Artificial Sequence
  Synthetic
cauuuuucaaacauuuuaucc

SEQ ID NO: 43969 - RNA, 22 nt, Artificial Sequence
  Synthetic
acauuuuucaaacauuuuaucc

SEQ ID NO: 43970 - RNA, 23 nt, Artificial Sequence
  Synthetic
cacauuuuucaaacauuuuaucc

SEQ ID NO: 43971 - RNA, 24 nt, Artificial Sequence
  Synthetic
acacauuuuucaaacauuuuaucc

SEQ ID NO: 43972 - RNA, 18 nt, Artificial Sequence
  Synthetic
ucuugagauuuuaacucc

SEQ ID NO: 43973 - RNA, 19 nt, Artificial Sequence
  Synthetic
aucuugagauuuuaacucc

SEQ ID NO: 43974 - RNA, 20 nt, Artificial Sequence
  Synthetic
uaucuugagauuuuaacucc

SEQ ID NO: 43975 - RNA, 21 nt, Artificial Sequence
  Synthetic
cuaucuugagauuuuaacucc

SEQ ID NO: 43976 - RNA, 22 nt, Artificial Sequence
  Synthetic
ccuaucuugagauuuuaacucc

SEQ ID NO: 43977 - RNA, 24 nt, Artificial Sequence
  Synthetic
agccuaucuugagauuuuaacucc

SEQ ID NO: 43978 - RNA, 18 nt, Artificial Sequence
  Synthetic
cuggcugugguccacucc

SEQ ID NO: 43979 - RNA, 19 nt, Artificial Sequence
  Synthetic
acuggcugugguccacucc

SEQ ID NO: 43980 - RNA, 20 nt, Artificial Sequence
  Synthetic
cacuggcugugguccacucc

SEQ ID NO: 43981 - RNA, 21 nt, Artificial Sequence
  Synthetic
ccacuggcugugguccacucc

SEQ ID NO: 43982 - RNA, 22 nt, Artificial Sequence
  Synthetic
accacuggcugugguccacucc

SEQ ID NO: 43983 - RNA, 23 nt, Artificial Sequence
  Synthetic
caccacuggcugugguccacucc

SEQ ID NO: 43984 - RNA, 24 nt, Artificial Sequence
  Synthetic
acaccacuggcugugguccacucc

SEQ ID NO: 43985 - RNA, 18 nt, Artificial Sequence
  Synthetic
ccagaucaaguagacucc

SEQ ID NO: 43986 - RNA, 19 nt, Artificial Sequence
  Synthetic
cccagaucaaguagacucc

SEQ ID NO: 43987 - RNA, 21 nt, Artificial Sequence
  Synthetic
ugcccagaucaaguagacucc

SEQ ID NO: 43988 - RNA, 24 nt, Artificial Sequence
  Synthetic
uggugcccagaucaaguagacucc

SEQ ID NO: 43989 - RNA, 18 nt, Artificial Sequence
  Synthetic
aauguaauaauauacucc

SEQ ID NO: 43990 - RNA, 19 nt, Artificial Sequence
  Synthetic
aaauguaauaauauacucc

SEQ ID NO: 43991 - RNA, 20 nt, Artificial Sequence
  Synthetic
aaaauguaauaauauacucc

SEQ ID NO: 43992 - RNA, 18 nt, Artificial Sequence
  Synthetic
cacuuuacuagcaccucc

SEQ ID NO: 43993 - RNA, 19 nt, Artificial Sequence
  Synthetic
acacuuuacuagcaccucc

SEQ ID NO: 43994 - RNA, 20 nt, Artificial Sequence
  Synthetic
cacacuuuacuagcaccucc

SEQ ID NO: 43995 - RNA, 21 nt, Artificial Sequence
  Synthetic
acacacuuuacuagcaccucc

SEQ ID NO: 43996 - RNA, 22 nt, Artificial Sequence
  Synthetic
cacacacuuuacuagcaccucc

SEQ ID NO: 43997 - RNA, 23 nt, Artificial Sequence
  Synthetic
acacacacuuuacuagcaccucc

SEQ ID NO: 43998 - RNA, 24 nt, Artificial Sequence
  Synthetic
uacacacacuuuacuagcaccucc

SEQ ID NO: 43999 - RNA, 18 nt, Artificial Sequence
  Synthetic
ccacuucagccugccucc

SEQ ID NO: 44000 - RNA, 19 nt, Artificial Sequence
  Synthetic
accacuucagccugccucc

SEQ ID NO: 44001 - RNA, 20 nt, Artificial Sequence
  Synthetic
caccacuucagccugccucc

SEQ ID NO: 44002 - RNA, 21 nt, Artificial Sequence
  Synthetic
ucaccacuucagccugccucc

SEQ ID NO: 44003 - RNA, 22 nt, Artificial Sequence
  Synthetic
uucaccacuucagccugccucc

SEQ ID NO: 44004 - RNA, 23 nt, Artificial Sequence
  Synthetic
uuucaccacuucagccugccucc

SEQ ID NO: 44005 - RNA, 24 nt, Artificial Sequence
  Synthetic
uuuucaccacuucagccugccucc

SEQ ID NO: 44006 - RNA, 19 nt, Artificial Sequence
  Synthetic
cgguuugacaguuuccucc

SEQ ID NO: 44007 - RNA, 22 nt, Artificial Sequence
  Synthetic
aggcgguuugacaguuuccucc

SEQ ID NO: 44008 - RNA, 23 nt, Artificial Sequence
  Synthetic
aaggcgguuugacaguuuccucc

SEQ ID NO: 44009 - RNA, 24 nt, Artificial Sequence
  Synthetic
uaaggcgguuugacaguuuccucc

SEQ ID NO: 44010 - RNA, 18 nt, Artificial Sequence
  Synthetic
ccagcccuuaggagcucc

SEQ ID NO: 44011 - RNA, 19 nt, Artificial Sequence
  Synthetic
cccagcccuuaggagcucc

SEQ ID NO: 44012 - RNA, 20 nt, Artificial Sequence
  Synthetic
ucccagcccuuaggagcucc

SEQ ID NO: 44013 - RNA, 23 nt, Artificial Sequence
  Synthetic
uggucccagcccuuaggagcucc

SEQ ID NO: 44014 - RNA, 24 nt, Artificial Sequence
  Synthetic
auggucccagcccuuaggagcucc

SEQ ID NO: 44015 - RNA, 18 nt, Artificial Sequence
  Synthetic
agaagaaaauagugcucc

SEQ ID NO: 44016 - RNA, 21 nt, Artificial Sequence
  Synthetic
uggagaagaaaauagugcucc

SEQ ID NO: 44017 - RNA, 22 nt, Artificial Sequence
  Synthetic
uuggagaagaaaauagugcucc

SEQ ID NO: 44018 - RNA, 23 nt, Artificial Sequence
  Synthetic
auuggagaagaaaauagugcucc

SEQ ID NO: 44019 - RNA, 21 nt, Artificial Sequence
  Synthetic
uuuuaaaauauaaaaaucucc

SEQ ID NO: 44020 - RNA, 22 nt, Artificial Sequence
  Synthetic
uuuuuaaaauauaaaaaucucc

SEQ ID NO: 44021 - RNA, 23 nt, Artificial Sequence
  Synthetic
cuuuuuaaaauauaaaaaucucc

SEQ ID NO: 44022 - RNA, 24 nt, Artificial Sequence
  Synthetic
ucuuuuuaaaauauaaaaaucucc

SEQ ID NO: 44023 - RNA, 18 nt, Artificial Sequence
  Synthetic
aucuuuuauuaaaucucc

SEQ ID NO: 44024 - RNA, 19 nt, Artificial Sequence
  Synthetic
aaucuuuuauuaaaucucc

SEQ ID NO: 44025 - RNA, 20 nt, Artificial Sequence
  Synthetic
aaaucuuuuauuaaaucucc

SEQ ID NO: 44026 - RNA, 21 nt, Artificial Sequence
  Synthetic
uaaaucuuuuauuaaaucucc

SEQ ID NO: 44027 - RNA, 22 nt, Artificial Sequence
  Synthetic
cuaaaucuuuuauuaaaucucc

SEQ ID NO: 44028 - RNA, 23 nt, Artificial Sequence
  Synthetic
ucuaaaucuuuuauuaaaucucc

SEQ ID NO: 44029 - RNA, 24 nt, Artificial Sequence
  Synthetic
aucuaaaucuuuuauuaaaucucc

SEQ ID NO: 44030 - RNA, 18 nt, Artificial Sequence
  Synthetic
agagcugaaaacaucucc

SEQ ID NO: 44031 - RNA, 19 nt, Artificial Sequence
  Synthetic
uagagcugaaaacaucucc

SEQ ID NO: 44032 - RNA, 20 nt, Artificial Sequence
  Synthetic
uuagagcugaaaacaucucc

SEQ ID NO: 44033 - RNA, 22 nt, Artificial Sequence
  Synthetic
uguuagagcugaaaacaucucc

SEQ ID NO: 44034 - RNA, 23 nt, Artificial Sequence
  Synthetic
cuguuagagcugaaaacaucucc

SEQ ID NO: 44035 - RNA, 24 nt, Artificial Sequence
  Synthetic
acuguuagagcugaaaacaucucc

SEQ ID NO: 44036 - RNA, 18 nt, Artificial Sequence
  Synthetic
uuaaauuuccucaucucc

SEQ ID NO: 44037 - RNA, 20 nt, Artificial Sequence
  Synthetic
uguuaaauuuccucaucucc

SEQ ID NO: 44038 - RNA, 21 nt, Artificial Sequence
  Synthetic
cuguuaaauuuccucaucucc

SEQ ID NO: 44039 - RNA, 24 nt, Artificial Sequence
  Synthetic
uggcuguuaaauuuccucaucucc

SEQ ID NO: 44040 - RNA, 18 nt, Artificial Sequence
  Synthetic
ccauuucuuccacucucc

SEQ ID NO: 44041 - RNA, 19 nt, Artificial Sequence
  Synthetic
cccauuucuuccacucucc

SEQ ID NO: 44042 - RNA, 20 nt, Artificial Sequence
  Synthetic
ccccauuucuuccacucucc

SEQ ID NO: 44043 - RNA, 23 nt, Artificial Sequence
  Synthetic
aggccccauuucuuccacucucc

SEQ ID NO: 44044 - RNA, 24 nt, Artificial Sequence
  Synthetic
aaggccccauuucuuccacucucc

SEQ ID NO: 44045 - RNA, 18 nt, Artificial Sequence
  Synthetic
ucuaaucauauccucucc

SEQ ID NO: 44046 - RNA, 19 nt, Artificial Sequence
  Synthetic
uucuaaucauauccucucc

SEQ ID NO: 44047 - RNA, 20 nt, Artificial Sequence
  Synthetic
uuucuaaucauauccucucc

SEQ ID NO: 44048 - RNA, 21 nt, Artificial Sequence
  Synthetic
cuuucuaaucauauccucucc

SEQ ID NO: 44049 - RNA, 22 nt, Artificial Sequence
  Synthetic
ucuuucuaaucauauccucucc

SEQ ID NO: 44050 - RNA, 24 nt, Artificial Sequence
  Synthetic
ugucuuucuaaucauauccucucc

SEQ ID NO: 44051 - RNA, 18 nt, Artificial Sequence
  Synthetic
aauacauguggagucucc

SEQ ID NO: 44052 - RNA, 19 nt, Artificial Sequence
  Synthetic
caauacauguggagucucc

SEQ ID NO: 44053 - RNA, 21 nt, Artificial Sequence
  Synthetic
ugcaauacauguggagucucc

SEQ ID NO: 44054 - RNA, 22 nt, Artificial Sequence
  Synthetic
cugcaauacauguggagucucc

SEQ ID NO: 44055 - RNA, 23 nt, Artificial Sequence
  Synthetic
ucugcaauacauguggagucucc

SEQ ID NO: 44056 - RNA, 24 nt, Artificial Sequence
  Synthetic
aucugcaauacauguggagucucc

SEQ ID NO: 44057 - RNA, 18 nt, Artificial Sequence
  Synthetic
auggcauauugagucucc

SEQ ID NO: 44058 - RNA, 19 nt, Artificial Sequence
  Synthetic
cauggcauauugagucucc

SEQ ID NO: 44059 - RNA, 20 nt, Artificial Sequence
  Synthetic
acauggcauauugagucucc

SEQ ID NO: 44060 - RNA, 21 nt, Artificial Sequence
  Synthetic
uacauggcauauugagucucc

SEQ ID NO: 44061 - RNA, 22 nt, Artificial Sequence
  Synthetic
uuacauggcauauugagucucc

SEQ ID NO: 44062 - RNA, 23 nt, Artificial Sequence
  Synthetic
auuacauggcauauugagucucc

SEQ ID NO: 44063 - RNA, 24 nt, Artificial Sequence
  Synthetic
cauuacauggcauauugagucucc

SEQ ID NO: 44064 - RNA, 18 nt, Artificial Sequence
  Synthetic
caaaauauuuaggucucc

SEQ ID NO: 44065 - RNA, 19 nt, Artificial Sequence
  Synthetic
ccaaaauauuuaggucucc

SEQ ID NO: 44066 - RNA, 20 nt, Artificial Sequence
  Synthetic
uccaaaauauuuaggucucc

SEQ ID NO: 44067 - RNA, 21 nt, Artificial Sequence
  Synthetic
uuccaaaauauuuaggucucc

SEQ ID NO: 44068 - RNA, 22 nt, Artificial Sequence
  Synthetic
auuccaaaauauuuaggucucc

SEQ ID NO: 44069 - RNA, 23 nt, Artificial Sequence
  Synthetic
uauuccaaaauauuuaggucucc

SEQ ID NO: 44070 - RNA, 24 nt, Artificial Sequence
  Synthetic
cuauuccaaaauauuuaggucucc

SEQ ID NO: 44071 - RNA, 21 nt, Artificial Sequence
  Synthetic
ugaauagcuaacagcuucucc

SEQ ID NO: 44072 - RNA, 22 nt, Artificial Sequence
  Synthetic
augaauagcuaacagcuucucc

SEQ ID NO: 44073 - RNA, 23 nt, Artificial Sequence
  Synthetic
uaugaauagcuaacagcuucucc

SEQ ID NO: 44074 - RNA, 24 nt, Artificial Sequence
  Synthetic
auaugaauagcuaacagcuucucc

SEQ ID NO: 44075 - RNA, 18 nt, Artificial Sequence
  Synthetic
ccuuuguaaauguucucc

SEQ ID NO: 44076 - RNA, 19 nt, Artificial Sequence
  Synthetic
accuuuguaaauguucucc

SEQ ID NO: 44077 - RNA, 20 nt, Artificial Sequence
  Synthetic
caccuuuguaaauguucucc

SEQ ID NO: 44078 - RNA, 23 nt, Artificial Sequence
  Synthetic
aggcaccuuuguaaauguucucc

SEQ ID NO: 44079 - RNA, 24 nt, Artificial Sequence
  Synthetic
caggcaccuuuguaaauguucucc

SEQ ID NO: 44080 - RNA, 18 nt, Artificial Sequence
  Synthetic
uuuucccaucuuuucucc

SEQ ID NO: 44081 - RNA, 20 nt, Artificial Sequence
  Synthetic
cguuuucccaucuuuucucc

SEQ ID NO: 44082 - RNA, 21 nt, Artificial Sequence
  Synthetic
ccguuuucccaucuuuucucc

SEQ ID NO: 44083 - RNA, 23 nt, Artificial Sequence
  Synthetic
ugccguuuucccaucuuuucucc

SEQ ID NO: 44084 - RNA, 24 nt, Artificial Sequence
  Synthetic
augccguuuucccaucuuuucucc

SEQ ID NO: 44085 - RNA, 18 nt, Artificial Sequence
  Synthetic
ccuugaauguuuuucucc

SEQ ID NO: 44086 - RNA, 19 nt, Artificial Sequence
  Synthetic
cccuugaauguuuuucucc

SEQ ID NO: 44087 - RNA, 20 nt, Artificial Sequence
  Synthetic
ucccuugaauguuuuucucc

SEQ ID NO: 44088 - RNA, 21 nt, Artificial Sequence
  Synthetic
uucccuugaauguuuuucucc

SEQ ID NO: 44089 - RNA, 22 nt, Artificial Sequence
  Synthetic
cuucccuugaauguuuuucucc

SEQ ID NO: 44090 - RNA, 23 nt, Artificial Sequence
  Synthetic
ucuucccuugaauguuuuucucc

SEQ ID NO: 44091 - RNA, 24 nt, Artificial Sequence
  Synthetic
cucuucccuugaauguuuuucucc

SEQ ID NO: 44092 - RNA, 18 nt, Artificial Sequence
  Synthetic
uggaaggacucagagucc

SEQ ID NO: 44093 - RNA, 19 nt, Artificial Sequence
  Synthetic
auggaaggacucagagucc

SEQ ID NO: 44094 - RNA, 20 nt, Artificial Sequence
  Synthetic
aauggaaggacucagagucc

SEQ ID NO: 44095 - RNA, 21 nt, Artificial Sequence
  Synthetic
aaauggaaggacucagagucc

SEQ ID NO: 44096 - RNA, 22 nt, Artificial Sequence
  Synthetic
aaaauggaaggacucagagucc

SEQ ID NO: 44097 - RNA, 23 nt, Artificial Sequence
  Synthetic
uaaaauggaaggacucagagucc

SEQ ID NO: 44098 - RNA, 24 nt, Artificial Sequence
  Synthetic
cuaaaauggaaggacucagagucc

SEQ ID NO: 44099 - RNA, 18 nt, Artificial Sequence
  Synthetic
uuucuucauguuuagucc

SEQ ID NO: 44100 - RNA, 19 nt, Artificial Sequence
  Synthetic
auuucuucauguuuagucc

SEQ ID NO: 44101 - RNA, 20 nt, Artificial Sequence
  Synthetic
aauuucuucauguuuagucc

SEQ ID NO: 44102 - RNA, 22 nt, Artificial Sequence
  Synthetic
ugaauuucuucauguuuagucc

SEQ ID NO: 44103 - RNA, 23 nt, Artificial Sequence
  Synthetic
cugaauuucuucauguuuagucc

SEQ ID NO: 44104 - RNA, 24 nt, Artificial Sequence
  Synthetic
ucugaauuucuucauguuuagucc

SEQ ID NO: 44105 - RNA, 19 nt, Artificial Sequence
  Synthetic
agucuuuaagcaagcgucc

SEQ ID NO: 44106 - RNA, 20 nt, Artificial Sequence
  Synthetic
aagucuuuaagcaagcgucc

SEQ ID NO: 44107 - RNA, 21 nt, Artificial Sequence
  Synthetic
caagucuuuaagcaagcgucc

SEQ ID NO: 44108 - RNA, 22 nt, Artificial Sequence
  Synthetic
acaagucuuuaagcaagcgucc

SEQ ID NO: 44109 - RNA, 23 nt, Artificial Sequence
  Synthetic
uacaagucuuuaagcaagcgucc

SEQ ID NO: 44110 - RNA, 21 nt, Artificial Sequence
  Synthetic
uauguggcuuuaccaaggucc

SEQ ID NO: 44111 - RNA, 22 nt, Artificial Sequence
  Synthetic
uuauguggcuuuaccaaggucc

SEQ ID NO: 44112 - RNA, 18 nt, Artificial Sequence
  Synthetic
uuaauguacggcaggucc

SEQ ID NO: 44113 - RNA, 19 nt, Artificial Sequence
  Synthetic
uuuaauguacggcaggucc

SEQ ID NO: 44114 - RNA, 20 nt, Artificial Sequence
  Synthetic
cuuuaauguacggcaggucc

SEQ ID NO: 44115 - RNA, 21 nt, Artificial Sequence
  Synthetic
acuuuaauguacggcaggucc

SEQ ID NO: 44116 - RNA, 22 nt, Artificial Sequence
  Synthetic
aacuuuaauguacggcaggucc

SEQ ID NO: 44117 - RNA, 23 nt, Artificial Sequence
  Synthetic
aaacuuuaauguacggcaggucc

SEQ ID NO: 44118 - RNA, 24 nt, Artificial Sequence
  Synthetic
caaacuuuaauguacggcaggucc

SEQ ID NO: 44119 - RNA, 19 nt, Artificial Sequence
  Synthetic
cguuaggucuuuuaggucc

SEQ ID NO: 44120 - RNA, 20 nt, Artificial Sequence
  Synthetic
ccguuaggucuuuuaggucc

SEQ ID NO: 44121 - RNA, 21 nt, Artificial Sequence
  Synthetic
accguuaggucuuuuaggucc

SEQ ID NO: 44122 - RNA, 22 nt, Artificial Sequence
  Synthetic
caccguuaggucuuuuaggucc

SEQ ID NO: 44123 - RNA, 23 nt, Artificial Sequence
  Synthetic
acaccguuaggucuuuuaggucc

SEQ ID NO: 44124 - RNA, 24 nt, Artificial Sequence
  Synthetic
cacaccguuaggucuuuuaggucc

SEQ ID NO: 44125 - RNA, 18 nt, Artificial Sequence
  Synthetic
uacaaagaaauauggucc

SEQ ID NO: 44126 - RNA, 19 nt, Artificial Sequence
  Synthetic
uuacaaagaaauauggucc

SEQ ID NO: 44127 - RNA, 20 nt, Artificial Sequence
  Synthetic
uuuacaaagaaauauggucc

SEQ ID NO: 44128 - RNA, 22 nt, Artificial Sequence
  Synthetic
aguuuacaaagaaauauggucc

SEQ ID NO: 44129 - RNA, 23 nt, Artificial Sequence
  Synthetic
caguuuacaaagaaauauggucc

SEQ ID NO: 44130 - RNA, 24 nt, Artificial Sequence
  Synthetic
acaguuuacaaagaaauauggucc

SEQ ID NO: 44131 - RNA, 18 nt, Artificial Sequence
  Synthetic
uuuuauuauauauggucc

SEQ ID NO: 44132 - RNA, 19 nt, Artificial Sequence
  Synthetic
cuuuuauuauauauggucc

SEQ ID NO: 44133 - RNA, 20 nt, Artificial Sequence
  Synthetic
ccuuuuauuauauauggucc

SEQ ID NO: 44134 - RNA, 21 nt, Artificial Sequence
  Synthetic
accuuuuauuauauauggucc

SEQ ID NO: 44135 - RNA, 24 nt, Artificial Sequence
  Synthetic
aggaccuuuuauuauauauggucc

SEQ ID NO: 44136 - RNA, 18 nt, Artificial Sequence
  Synthetic
cccuauaugugaaugucc

SEQ ID NO: 44137 - RNA, 19 nt, Artificial Sequence
  Synthetic
acccuauaugugaaugucc

SEQ ID NO: 44138 - RNA, 20 nt, Artificial Sequence
  Synthetic
cacccuauaugugaaugucc

SEQ ID NO: 44139 - RNA, 21 nt, Artificial Sequence
  Synthetic
ccacccuauaugugaaugucc

SEQ ID NO: 44140 - RNA, 24 nt, Artificial Sequence
  Synthetic
uggccacccuauaugugaaugucc

SEQ ID NO: 44141 - RNA, 18 nt, Artificial Sequence
  Synthetic
aguuaaauggguaugucc

SEQ ID NO: 44142 - RNA, 19 nt, Artificial Sequence
  Synthetic
aaguuaaauggguaugucc

SEQ ID NO: 44143 - RNA, 21 nt, Artificial Sequence
  Synthetic
agaaguuaaauggguaugucc

SEQ ID NO: 44144 - RNA, 24 nt, Artificial Sequence
  Synthetic
aggagaaguuaaauggguaugucc

SEQ ID NO: 44145 - RNA, 19 nt, Artificial Sequence
  Synthetic
cgccucuuccaugcugucc

SEQ ID NO: 44146 - RNA, 20 nt, Artificial Sequence
  Synthetic
acgccucuuccaugcugucc

SEQ ID NO: 44147 - RNA, 21 nt, Artificial Sequence
  Synthetic
cacgccucuuccaugcugucc

SEQ ID NO: 44148 - RNA, 22 nt, Artificial Sequence
  Synthetic
ucacgccucuuccaugcugucc

SEQ ID NO: 44149 - RNA, 23 nt, Artificial Sequence
  Synthetic
cucacgccucuuccaugcugucc

SEQ ID NO: 44150 - RNA, 24 nt, Artificial Sequence
  Synthetic
ucucacgccucuuccaugcugucc

SEQ ID NO: 44151 - RNA, 18 nt, Artificial Sequence
  Synthetic
ucagaauauaaucugucc

SEQ ID NO: 44152 - RNA, 19 nt, Artificial Sequence
  Synthetic
uucagaauauaaucugucc

SEQ ID NO: 44153 - RNA, 20 nt, Artificial Sequence
  Synthetic
auucagaauauaaucugucc

SEQ ID NO: 44154 - RNA, 22 nt, Artificial Sequence
  Synthetic
ugauucagaauauaaucugucc

SEQ ID NO: 44155 - RNA, 23 nt, Artificial Sequence
  Synthetic
cugauucagaauauaaucugucc

SEQ ID NO: 44156 - RNA, 24 nt, Artificial Sequence
  Synthetic
acugauucagaauauaaucugucc

SEQ ID NO: 44157 - RNA, 18 nt, Artificial Sequence
  Synthetic
cacccuguugaugugucc

SEQ ID NO: 44158 - RNA, 19 nt, Artificial Sequence
  Synthetic
ucacccuguugaugugucc

SEQ ID NO: 44159 - RNA, 20 nt, Artificial Sequence
  Synthetic
cucacccuguugaugugucc

SEQ ID NO: 44160 - RNA, 21 nt, Artificial Sequence
  Synthetic
ucucacccuguugaugugucc

SEQ ID NO: 44161 - RNA, 22 nt, Artificial Sequence
  Synthetic
uucucacccuguugaugugucc

SEQ ID NO: 44162 - RNA, 23 nt, Artificial Sequence
  Synthetic
cuucucacccuguugaugugucc

SEQ ID NO: 44163 - RNA, 24 nt, Artificial Sequence
  Synthetic
ucuucucacccuguugaugugucc

SEQ ID NO: 44164 - RNA, 18 nt, Artificial Sequence
  Synthetic
caucagaagucugugucc

SEQ ID NO: 44165 - RNA, 21 nt, Artificial Sequence
  Synthetic
uggcaucagaagucugugucc

SEQ ID NO: 44166 - RNA, 22 nt, Artificial Sequence
  Synthetic
auggcaucagaagucugugucc

SEQ ID NO: 44167 - RNA, 23 nt, Artificial Sequence
  Synthetic
aauggcaucagaagucugugucc

SEQ ID NO: 44168 - RNA, 24 nt, Artificial Sequence
  Synthetic
caauggcaucagaagucugugucc

SEQ ID NO: 44169 - RNA, 18 nt, Artificial Sequence
  Synthetic
auaauauacuucuugucc

SEQ ID NO: 44170 - RNA, 19 nt, Artificial Sequence
  Synthetic
aauaauauacuucuugucc

SEQ ID NO: 44171 - RNA, 20 nt, Artificial Sequence
  Synthetic
aaauaauauacuucuugucc

SEQ ID NO: 44172 - RNA, 21 nt, Artificial Sequence
  Synthetic
aaaauaauauacuucuugucc

SEQ ID NO: 44173 - RNA, 22 nt, Artificial Sequence
  Synthetic
uaaaauaauauacuucuugucc

SEQ ID NO: 44174 - RNA, 23 nt, Artificial Sequence
  Synthetic
auaaaauaauauacuucuugucc

SEQ ID NO: 44175 - RNA, 24 nt, Artificial Sequence
  Synthetic
aauaaaauaauauacuucuugucc

SEQ ID NO: 44176 - RNA, 18 nt, Artificial Sequence
  Synthetic
agguuaagagauuugucc

SEQ ID NO: 44177 - RNA, 20 nt, Artificial Sequence
  Synthetic
ugagguuaagagauuugucc

SEQ ID NO: 44178 - RNA, 21 nt, Artificial Sequence
  Synthetic
augagguuaagagauuugucc

SEQ ID NO: 44179 - RNA, 22 nt, Artificial Sequence
  Synthetic
aaugagguuaagagauuugucc

SEQ ID NO: 44180 - RNA, 23 nt, Artificial Sequence
  Synthetic
aaaugagguuaagagauuugucc

SEQ ID NO: 44181 - RNA, 24 nt, Artificial Sequence
  Synthetic
uaaaugagguuaagagauuugucc

SEQ ID NO: 44182 - RNA, 18 nt, Artificial Sequence
  Synthetic
aauuggacaauaaauucc

SEQ ID NO: 44183 - RNA, 19 nt, Artificial Sequence
  Synthetic
aaauuggacaauaaauucc

SEQ ID NO: 44184 - RNA, 20 nt, Artificial Sequence
  Synthetic
aaaauuggacaauaaauucc

SEQ ID NO: 44185 - RNA, 21 nt, Artificial Sequence
  Synthetic
uaaaauuggacaauaaauucc

SEQ ID NO: 44186 - RNA, 22 nt, Artificial Sequence
  Synthetic
uuaaaauuggacaauaaauucc

SEQ ID NO: 44187 - RNA, 23 nt, Artificial Sequence
  Synthetic
auuaaaauuggacaauaaauucc

SEQ ID NO: 44188 - RNA, 24 nt, Artificial Sequence
  Synthetic
aauuaaaauuggacaauaaauucc

SEQ ID NO: 44189 - RNA, 18 nt, Artificial Sequence
  Synthetic
aaaggucuguacaauucc

SEQ ID NO: 44190 - RNA, 19 nt, Artificial Sequence
  Synthetic
aaaaggucuguacaauucc

SEQ ID NO: 44191 - RNA, 20 nt, Artificial Sequence
  Synthetic
aaaaaggucuguacaauucc

SEQ ID NO: 44192 - RNA, 23 nt, Artificial Sequence
  Synthetic
aggaaaaaggucuguacaauucc

SEQ ID NO: 44193 - RNA, 24 nt, Artificial Sequence
  Synthetic
aaggaaaaaggucuguacaauucc

SEQ ID NO: 44194 - RNA, 18 nt, Artificial Sequence
  Synthetic
uaaacaaaccagaauucc

SEQ ID NO: 44195 - RNA, 20 nt, Artificial Sequence
  Synthetic
aguaaacaaaccagaauucc

SEQ ID NO: 44196 - RNA, 21 nt, Artificial Sequence
  Synthetic
caguaaacaaaccagaauucc

SEQ ID NO: 44197 - RNA, 22 nt, Artificial Sequence
  Synthetic
ccaguaaacaaaccagaauucc

SEQ ID NO: 44198 - RNA, 23 nt, Artificial Sequence
  Synthetic
accaguaaacaaaccagaauucc

SEQ ID NO: 44199 - RNA, 24 nt, Artificial Sequence
  Synthetic
aaccaguaaacaaaccagaauucc

SEQ ID NO: 44200 - RNA, 18 nt, Artificial Sequence
  Synthetic
uaccauaacucagauucc

SEQ ID NO: 44201 - RNA, 19 nt, Artificial Sequence
  Synthetic
auaccauaacucagauucc

SEQ ID NO: 44202 - RNA, 20 nt, Artificial Sequence
  Synthetic
uauaccauaacucagauucc

SEQ ID NO: 44203 - RNA, 21 nt, Artificial Sequence
  Synthetic
uuauaccauaacucagauucc

SEQ ID NO: 44204 - RNA, 22 nt, Artificial Sequence
  Synthetic
auuauaccauaacucagauucc

SEQ ID NO: 44205 - RNA, 23 nt, Artificial Sequence
  Synthetic
aauuauaccauaacucagauucc

SEQ ID NO: 44206 - RNA, 24 nt, Artificial Sequence
  Synthetic
aaauuauaccauaacucagauucc

SEQ ID NO: 44207 - RNA, 21 nt, Artificial Sequence
  Synthetic
auuuucauaauuaaaacuucc

SEQ ID NO: 44208 - RNA, 22 nt, Artificial Sequence
  Synthetic
cauuuucauaauuaaaacuucc

SEQ ID NO: 44209 - RNA, 24 nt, Artificial Sequence
  Synthetic
ugcauuuucauaauuaaaacuucc

SEQ ID NO: 44210 - RNA, 18 nt, Artificial Sequence
  Synthetic
uacaaaugugaaacuucc

SEQ ID NO: 44211 - RNA, 19 nt, Artificial Sequence
  Synthetic
cuacaaaugugaaacuucc

SEQ ID NO: 44212 - RNA, 20 nt, Artificial Sequence
  Synthetic
ucuacaaaugugaaacuucc

SEQ ID NO: 44213 - RNA, 22 nt, Artificial Sequence
  Synthetic
agucuacaaaugugaaacuucc

SEQ ID NO: 44214 - RNA, 23 nt, Artificial Sequence
  Synthetic
aagucuacaaaugugaaacuucc

SEQ ID NO: 44215 - RNA, 18 nt, Artificial Sequence
  Synthetic
uuuuguguuaacacuucc

SEQ ID NO: 44216 - RNA, 19 nt, Artificial Sequence
  Synthetic
auuuuguguuaacacuucc

SEQ ID NO: 44217 - RNA, 20 nt, Artificial Sequence
  Synthetic
uauuuuguguuaacacuucc

SEQ ID NO: 44218 - RNA, 21 nt, Artificial Sequence
  Synthetic
auauuuuguguuaacacuucc

SEQ ID NO: 44219 - RNA, 22 nt, Artificial Sequence
  Synthetic
aauauuuuguguuaacacuucc

SEQ ID NO: 44220 - RNA, 23 nt, Artificial Sequence
  Synthetic
aaauauuuuguguuaacacuucc

SEQ ID NO: 44221 - RNA, 24 nt, Artificial Sequence
  Synthetic
aaaauauuuuguguuaacacuucc

SEQ ID NO: 44222 - RNA, 18 nt, Artificial Sequence
  Synthetic
ccgugagugaugacuucc

SEQ ID NO: 44223 - RNA, 19 nt, Artificial Sequence
  Synthetic
uccgugagugaugacuucc

SEQ ID NO: 44224 - RNA, 20 nt, Artificial Sequence
  Synthetic
uuccgugagugaugacuucc

SEQ ID NO: 44225 - RNA, 21 nt, Artificial Sequence
  Synthetic
cuuccgugagugaugacuucc

SEQ ID NO: 44226 - RNA, 22 nt, Artificial Sequence
  Synthetic
ucuuccgugagugaugacuucc

SEQ ID NO: 44227 - RNA, 23 nt, Artificial Sequence
  Synthetic
aucuuccgugagugaugacuucc

SEQ ID NO: 44228 - RNA, 24 nt, Artificial Sequence
  Synthetic
uaucuuccgugagugaugacuucc

SEQ ID NO: 44229 - RNA, 18 nt, Artificial Sequence
  Synthetic
ugcucucucucaccuucc

SEQ ID NO: 44230 - RNA, 19 nt, Artificial Sequence
  Synthetic
augcucucucucaccuucc

SEQ ID NO: 44231 - RNA, 20 nt, Artificial Sequence
  Synthetic
aaugcucucucucaccuucc

SEQ ID NO: 44232 - RNA, 21 nt, Artificial Sequence
  Synthetic
aaaugcucucucucaccuucc

SEQ ID NO: 44233 - RNA, 22 nt, Artificial Sequence
  Synthetic
caaaugcucucucucaccuucc

SEQ ID NO: 44234 - RNA, 18 nt, Artificial Sequence
  Synthetic
uuuccuggguagccuucc

SEQ ID NO: 44235 - RNA, 20 nt, Artificial Sequence
  Synthetic
aguuuccuggguagccuucc

SEQ ID NO: 44236 - RNA, 21 nt, Artificial Sequence
  Synthetic
caguuuccuggguagccuucc

SEQ ID NO: 44237 - RNA, 22 nt, Artificial Sequence
  Synthetic
ucaguuuccuggguagccuucc

SEQ ID NO: 44238 - RNA, 23 nt, Artificial Sequence
  Synthetic
uucaguuuccuggguagccuucc

SEQ ID NO: 44239 - RNA, 24 nt, Artificial Sequence
  Synthetic
uuucaguuuccuggguagccuucc

SEQ ID NO: 44240 - RNA, 18 nt, Artificial Sequence
  Synthetic
aagucaaguucagcuucc

SEQ ID NO: 44241 - RNA, 19 nt, Artificial Sequence
  Synthetic
aaagucaaguucagcuucc

SEQ ID NO: 44242 - RNA, 20 nt, Artificial Sequence
  Synthetic
aaaagucaaguucagcuucc

SEQ ID NO: 44243 - RNA, 21 nt, Artificial Sequence
  Synthetic
aaaaagucaaguucagcuucc

SEQ ID NO: 44244 - RNA, 22 nt, Artificial Sequence
  Synthetic
uaaaaagucaaguucagcuucc

SEQ ID NO: 44245 - RNA, 23 nt, Artificial Sequence
  Synthetic
uuaaaaagucaaguucagcuucc

SEQ ID NO: 44246 - RNA, 24 nt, Artificial Sequence
  Synthetic
uuuaaaaagucaaguucagcuucc

SEQ ID NO: 44247 - RNA, 19 nt, Artificial Sequence
  Synthetic
ugaaagcuauuaaucuucc

SEQ ID NO: 44248 - RNA, 20 nt, Artificial Sequence
  Synthetic
uugaaagcuauuaaucuucc

SEQ ID NO: 44249 - RNA, 21 nt, Artificial Sequence
  Synthetic
auugaaagcuauuaaucuucc

SEQ ID NO: 44250 - RNA, 22 nt, Artificial Sequence
  Synthetic
aauugaaagcuauuaaucuucc

SEQ ID NO: 44251 - RNA, 24 nt, Artificial Sequence
  Synthetic
ugaauugaaagcuauuaaucuucc

SEQ ID NO: 44252 - RNA, 20 nt, Artificial Sequence
  Synthetic
aggacaggaaaauaucuucc

SEQ ID NO: 44253 - RNA, 21 nt, Artificial Sequence
  Synthetic
caggacaggaaaauaucuucc

SEQ ID NO: 44254 - RNA, 22 nt, Artificial Sequence
  Synthetic
ucaggacaggaaaauaucuucc

SEQ ID NO: 44255 - RNA, 24 nt, Artificial Sequence
  Synthetic
ugucaggacaggaaaauaucuucc

SEQ ID NO: 44256 - RNA, 18 nt, Artificial Sequence
  Synthetic
ucucuagcauacucuucc

SEQ ID NO: 44257 - RNA, 19 nt, Artificial Sequence
  Synthetic
uucucuagcauacucuucc

SEQ ID NO: 44258 - RNA, 21 nt, Artificial Sequence
  Synthetic
uguucucuagcauacucuucc

SEQ ID NO: 44259 - RNA, 22 nt, Artificial Sequence
  Synthetic
auguucucuagcauacucuucc

SEQ ID NO: 44260 - RNA, 23 nt, Artificial Sequence
  Synthetic
aauguucucuagcauacucuucc

SEQ ID NO: 44261 - RNA, 22 nt, Artificial Sequence
  Synthetic
cguacaugccauuccgucuucc

SEQ ID NO: 44262 - RNA, 23 nt, Artificial Sequence
  Synthetic
ucguacaugccauuccgucuucc

SEQ ID NO: 44263 - RNA, 24 nt, Artificial Sequence
  Synthetic
aucguacaugccauuccgucuucc

SEQ ID NO: 44264 - RNA, 18 nt, Artificial Sequence
  Synthetic
aauguaauaaugucuucc

SEQ ID NO: 44265 - RNA, 19 nt, Artificial Sequence
  Synthetic
uaauguaauaaugucuucc

SEQ ID NO: 44266 - RNA, 20 nt, Artificial Sequence
  Synthetic
auaauguaauaaugucuucc

SEQ ID NO: 44267 - RNA, 18 nt, Artificial Sequence
  Synthetic
auucuuauuuguucuucc

SEQ ID NO: 44268 - RNA, 19 nt, Artificial Sequence
  Synthetic
aauucuuauuuguucuucc

SEQ ID NO: 44269 - RNA, 20 nt, Artificial Sequence
  Synthetic
uaauucuuauuuguucuucc

SEQ ID NO: 44270 - RNA, 22 nt, Artificial Sequence
  Synthetic
aguaauucuuauuuguucuucc

SEQ ID NO: 44271 - RNA, 23 nt, Artificial Sequence
  Synthetic
caguaauucuuauuuguucuucc

SEQ ID NO: 44272 - RNA, 24 nt, Artificial Sequence
  Synthetic
ucaguaauucuuauuuguucuucc

SEQ ID NO: 44273 - RNA, 18 nt, Artificial Sequence
  Synthetic
aggccuaaauuuucuucc

SEQ ID NO: 44274 - RNA, 19 nt, Artificial Sequence
  Synthetic
aaggccuaaauuuucuucc

SEQ ID NO: 44275 - RNA, 20 nt, Artificial Sequence
  Synthetic
aaaggccuaaauuuucuucc

SEQ ID NO: 44276 - RNA, 21 nt, Artificial Sequence
  Synthetic
caaaggccuaaauuuucuucc

SEQ ID NO: 44277 - RNA, 23 nt, Artificial Sequence
  Synthetic
ugcaaaggccuaaauuuucuucc

SEQ ID NO: 44278 - RNA, 24 nt, Artificial Sequence
  Synthetic
uugcaaaggccuaaauuuucuucc

SEQ ID NO: 44279 - RNA, 19 nt, Artificial Sequence
  Synthetic
ugguaagguuaaaaguucc

SEQ ID NO: 44280 - RNA, 20 nt, Artificial Sequence
  Synthetic
uugguaagguuaaaaguucc

SEQ ID NO: 44281 - RNA, 22 nt, Artificial Sequence
  Synthetic
uguugguaagguuaaaaguucc

SEQ ID NO: 44282 - RNA, 23 nt, Artificial Sequence
  Synthetic
uuguugguaagguuaaaaguucc

SEQ ID NO: 44283 - RNA, 24 nt, Artificial Sequence
  Synthetic
cuuguugguaagguuaaaaguucc

SEQ ID NO: 44284 - RNA, 18 nt, Artificial Sequence
  Synthetic
uaucaaauggcaaguucc

SEQ ID NO: 44285 - RNA, 19 nt, Artificial Sequence
  Synthetic
auaucaaauggcaaguucc

SEQ ID NO: 44286 - RNA, 20 nt, Artificial Sequence
  Synthetic
aauaucaaauggcaaguucc

SEQ ID NO: 44287 - RNA, 21 nt, Artificial Sequence
  Synthetic
caauaucaaauggcaaguucc

SEQ ID NO: 44288 - RNA, 22 nt, Artificial Sequence
  Synthetic
ucaauaucaaauggcaaguucc

SEQ ID NO: 44289 - RNA, 23 nt, Artificial Sequence
  Synthetic
uucaauaucaaauggcaaguucc

SEQ ID NO: 44290 - RNA, 24 nt, Artificial Sequence
  Synthetic
uuucaauaucaaauggcaaguucc

SEQ ID NO: 44291 - RNA, 18 nt, Artificial Sequence
  Synthetic
uagagggggagaaguucc

SEQ ID NO: 44292 - RNA, 19 nt, Artificial Sequence
  Synthetic
auagagggggagaaguucc

SEQ ID NO: 44293 - RNA, 20 nt, Artificial Sequence
  Synthetic
cauagagggggagaaguucc

SEQ ID NO: 44294 - RNA, 21 nt, Artificial Sequence
  Synthetic
acauagagggggagaaguucc

SEQ ID NO: 44295 - RNA, 22 nt, Artificial Sequence
  Synthetic
cacauagagggggagaaguucc

SEQ ID NO: 44296 - RNA, 23 nt, Artificial Sequence
  Synthetic
ccacauagagggggagaaguucc

SEQ ID NO: 44297 - RNA, 18 nt, Artificial Sequence
  Synthetic
ucugcauuuuucaguucc

SEQ ID NO: 44298 - RNA, 20 nt, Artificial Sequence
  Synthetic
ugucugcauuuuucaguucc

SEQ ID NO: 44299 - RNA, 21 nt, Artificial Sequence
  Synthetic
augucugcauuuuucaguucc

SEQ ID NO: 44300 - RNA, 22 nt, Artificial Sequence
  Synthetic
aaugucugcauuuuucaguucc

SEQ ID NO: 44301 - RNA, 23 nt, Artificial Sequence
  Synthetic
aaaugucugcauuuuucaguucc

SEQ ID NO: 44302 - RNA, 24 nt, Artificial Sequence
  Synthetic
caaaugucugcauuuuucaguucc

SEQ ID NO: 44303 - RNA, 18 nt, Artificial Sequence
  Synthetic
uucucugcuuuccguucc

SEQ ID NO: 44304 - RNA, 19 nt, Artificial Sequence
  Synthetic
uuucucugcuuuccguucc

SEQ ID NO: 44305 - RNA, 20 nt, Artificial Sequence
  Synthetic
cuuucucugcuuuccguucc

SEQ ID NO: 44306 - RNA, 21 nt, Artificial Sequence
  Synthetic
ccuuucucugcuuuccguucc

SEQ ID NO: 44307 - RNA, 24 nt, Artificial Sequence
  Synthetic
uggccuuucucugcuuuccguucc

SEQ ID NO: 44308 - RNA, 18 nt, Artificial Sequence
  Synthetic
ucagcggguacauguucc

SEQ ID NO: 44309 - RNA, 19 nt, Artificial Sequence
  Synthetic
uucagcggguacauguucc

SEQ ID NO: 44310 - RNA, 20 nt, Artificial Sequence
  Synthetic
auucagcggguacauguucc

SEQ ID NO: 44311 - RNA, 22 nt, Artificial Sequence
  Synthetic
agauucagcggguacauguucc

SEQ ID NO: 44312 - RNA, 23 nt, Artificial Sequence
  Synthetic
uagauucagcggguacauguucc

SEQ ID NO: 44313 - RNA, 24 nt, Artificial Sequence
  Synthetic
uuagauucagcggguacauguucc

SEQ ID NO: 44314 - RNA, 18 nt, Artificial Sequence
  Synthetic
cuuaaaauuuacuguucc

SEQ ID NO: 44315 - RNA, 19 nt, Artificial Sequence
  Synthetic
ccuuaaaauuuacuguucc

SEQ ID NO: 44316 - RNA, 20 nt, Artificial Sequence
  Synthetic
uccuuaaaauuuacuguucc

SEQ ID NO: 44317 - RNA, 21 nt, Artificial Sequence
  Synthetic
uuccuuaaaauuuacuguucc

SEQ ID NO: 44318 - RNA, 22 nt, Artificial Sequence
  Synthetic
uuuccuuaaaauuuacuguucc

SEQ ID NO: 44319 - RNA, 23 nt, Artificial Sequence
  Synthetic
uuuuccuuaaaauuuacuguucc

SEQ ID NO: 44320 - RNA, 24 nt, Artificial Sequence
  Synthetic
cuuuuccuuaaaauuuacuguucc

SEQ ID NO: 44321 - RNA, 18 nt, Artificial Sequence
  Synthetic
cauuugcgcaauuguucc

SEQ ID NO: 44322 - RNA, 20 nt, Artificial Sequence
  Synthetic
agcauuugcgcaauuguucc

SEQ ID NO: 44323 - RNA, 22 nt, Artificial Sequence
  Synthetic
agagcauuugcgcaauuguucc

SEQ ID NO: 44324 - RNA, 18 nt, Artificial Sequence
  Synthetic
uuuguuaguauaauuucc

SEQ ID NO: 44325 - RNA, 19 nt, Artificial Sequence
  Synthetic
cuuuguuaguauaauuucc

SEQ ID NO: 44326 - RNA, 20 nt, Artificial Sequence
  Synthetic
ucuuuguuaguauaauuucc

SEQ ID NO: 44327 - RNA, 21 nt, Artificial Sequence
  Synthetic
uucuuuguuaguauaauuucc

SEQ ID NO: 44328 - RNA, 22 nt, Artificial Sequence
  Synthetic
uuucuuuguuaguauaauuucc

SEQ ID NO: 44329 - RNA, 23 nt, Artificial Sequence
  Synthetic
auuucuuuguuaguauaauuucc

SEQ ID NO: 44330 - RNA, 24 nt, Artificial Sequence
  Synthetic
aauuucuuuguuaguauaauuucc

SEQ ID NO: 44331 - RNA, 21 nt, Artificial Sequence
  Synthetic
uuaucauguuaucacauuucc

SEQ ID NO: 44332 - RNA, 22 nt, Artificial Sequence
  Synthetic
uuuaucauguuaucacauuucc

SEQ ID NO: 44333 - RNA, 23 nt, Artificial Sequence
  Synthetic
uuuuaucauguuaucacauuucc

SEQ ID NO: 44334 - RNA, 24 nt, Artificial Sequence
  Synthetic
uuuuuaucauguuaucacauuucc

SEQ ID NO: 44335 - RNA, 18 nt, Artificial Sequence
  Synthetic
acauagauacuccuuucc

SEQ ID NO: 44336 - RNA, 19 nt, Artificial Sequence
  Synthetic
uacauagauacuccuuucc

SEQ ID NO: 44337 - RNA, 20 nt, Artificial Sequence
  Synthetic
auacauagauacuccuuucc

SEQ ID NO: 44338 - RNA, 21 nt, Artificial Sequence
  Synthetic
uauacauagauacuccuuucc

SEQ ID NO: 44339 - RNA, 22 nt, Artificial Sequence
  Synthetic
auauacauagauacuccuuucc

SEQ ID NO: 44340 - RNA, 23 nt, Artificial Sequence
  Synthetic
aauauacauagauacuccuuucc

SEQ ID NO: 44341 - RNA, 24 nt, Artificial Sequence
  Synthetic
uaauauacauagauacuccuuucc

SEQ ID NO: 44342 - RNA, 20 nt, Artificial Sequence
  Synthetic
uggauauuuagcuccuuucc

SEQ ID NO: 44343 - RNA, 21 nt, Artificial Sequence
  Synthetic
cuggauauuuagcuccuuucc

SEQ ID NO: 44344 - RNA, 22 nt, Artificial Sequence
  Synthetic
ucuggauauuuagcuccuuucc

SEQ ID NO: 44345 - RNA, 23 nt, Artificial Sequence
  Synthetic
cucuggauauuuagcuccuuucc

SEQ ID NO: 44346 - RNA, 24 nt, Artificial Sequence
  Synthetic
ucucuggauauuuagcuccuuucc

SEQ ID NO: 44347 - RNA, 18 nt, Artificial Sequence
  Synthetic
agcuauguuuaucuuucc

SEQ ID NO: 44348 - RNA, 19 nt, Artificial Sequence
  Synthetic
aagcuauguuuaucuuucc

SEQ ID NO: 44349 - RNA, 20 nt, Artificial Sequence
  Synthetic
uaagcuauguuuaucuuucc

SEQ ID NO: 44350 - RNA, 21 nt, Artificial Sequence
  Synthetic
uuaagcuauguuuaucuuucc

SEQ ID NO: 44351 - RNA, 22 nt, Artificial Sequence
  Synthetic
auuaagcuauguuuaucuuucc

SEQ ID NO: 44352 - RNA, 23 nt, Artificial Sequence
  Synthetic
aauuaagcuauguuuaucuuucc

SEQ ID NO: 44353 - RNA, 24 nt, Artificial Sequence
  Synthetic
aaauuaagcuauguuuaucuuucc

SEQ ID NO: 44354 - RNA, 19 nt, Artificial Sequence
  Synthetic
ugccuaagucacaguuucc

SEQ ID NO: 44355 - RNA, 20 nt, Artificial Sequence
  Synthetic
uugccuaagucacaguuucc

SEQ ID NO: 44356 - RNA, 21 nt, Artificial Sequence
  Synthetic
uuugccuaagucacaguuucc

SEQ ID NO: 44357 - RNA, 22 nt, Artificial Sequence
  Synthetic
uuuugccuaagucacaguuucc

SEQ ID NO: 44358 - RNA, 23 nt, Artificial Sequence
  Synthetic
auuuugccuaagucacaguuucc

SEQ ID NO: 44359 - RNA, 24 nt, Artificial Sequence
  Synthetic
cauuuugccuaagucacaguuucc

SEQ ID NO: 44360 - RNA, 18 nt, Artificial Sequence
  Synthetic
uaugugaaauauguuucc

SEQ ID NO: 44361 - RNA, 19 nt, Artificial Sequence
  Synthetic
uuaugugaaauauguuucc

SEQ ID NO: 44362 - RNA, 20 nt, Artificial Sequence
  Synthetic
auuaugugaaauauguuucc

SEQ ID NO: 44363 - RNA, 21 nt, Artificial Sequence
  Synthetic
aauuaugugaaauauguuucc

SEQ ID NO: 44364 - RNA, 22 nt, Artificial Sequence
  Synthetic
aaauuaugugaaauauguuucc

SEQ ID NO: 44365 - RNA, 24 nt, Artificial Sequence
  Synthetic
agaaauuaugugaaauauguuucc

SEQ ID NO: 44366 - RNA, 19 nt, Artificial Sequence
  Synthetic
uguucccuacaguguuucc

SEQ ID NO: 44367 - RNA, 20 nt, Artificial Sequence
  Synthetic
cuguucccuacaguguuucc

SEQ ID NO: 44368 - RNA, 21 nt, Artificial Sequence
  Synthetic
ccuguucccuacaguguuucc

SEQ ID NO: 44369 - RNA, 22 nt, Artificial Sequence
  Synthetic
uccuguucccuacaguguuucc

SEQ ID NO: 44370 - RNA, 23 nt, Artificial Sequence
  Synthetic
uuccuguucccuacaguguuucc

SEQ ID NO: 44371 - RNA, 24 nt, Artificial Sequence
  Synthetic
uuuccuguucccuacaguguuucc

SEQ ID NO: 44372 - RNA, 23 nt, Artificial Sequence
  Synthetic
aggcaaaaauuauauuuguuucc

SEQ ID NO: 44373 - RNA, 24 nt, Artificial Sequence
  Synthetic
aaggcaaaaauuauauuuguuucc

SEQ ID NO: 44374 - RNA, 18 nt, Artificial Sequence
  Synthetic
uugaacauuuuuguuucc

SEQ ID NO: 44375 - RNA, 19 nt, Artificial Sequence
  Synthetic
auugaacauuuuuguuucc

SEQ ID NO: 44376 - RNA, 20 nt, Artificial Sequence
  Synthetic
aauugaacauuuuuguuucc

SEQ ID NO: 44377 - RNA, 21 nt, Artificial Sequence
  Synthetic
uaauugaacauuuuuguuucc

SEQ ID NO: 44378 - RNA, 23 nt, Artificial Sequence
  Synthetic
aguaauugaacauuuuuguuucc

SEQ ID NO: 44379 - RNA, 24 nt, Artificial Sequence
  Synthetic
aaguaauugaacauuuuuguuucc

SEQ ID NO: 44380 - RNA, 18 nt, Artificial Sequence
  Synthetic
ugacccaucucauuuucc

SEQ ID NO: 44381 - RNA, 20 nt, Artificial Sequence
  Synthetic
agugacccaucucauuuucc

SEQ ID NO: 44382 - RNA, 21 nt, Artificial Sequence
  Synthetic
uagugacccaucucauuuucc

SEQ ID NO: 44383 - RNA, 22 nt, Artificial Sequence
  Synthetic
uuagugacccaucucauuuucc

SEQ ID NO: 44384 - RNA, 23 nt, Artificial Sequence
  Synthetic
cuuagugacccaucucauuuucc

SEQ ID NO: 44385 - RNA, 24 nt, Artificial Sequence
  Synthetic
ucuuagugacccaucucauuuucc

SEQ ID NO: 44386 - RNA, 18 nt, Artificial Sequence
  Synthetic
auacugauaagauuuucc

SEQ ID NO: 44387 - RNA, 19 nt, Artificial Sequence
  Synthetic
cauacugauaagauuuucc

SEQ ID NO: 44388 - RNA, 21 nt, Artificial Sequence
  Synthetic
agcauacugauaagauuuucc

SEQ ID NO: 44389 - RNA, 22 nt, Artificial Sequence
  Synthetic
uagcauacugauaagauuuucc

SEQ ID NO: 44390 - RNA, 23 nt, Artificial Sequence
  Synthetic
uuagcauacugauaagauuuucc

SEQ ID NO: 44391 - RNA, 24 nt, Artificial Sequence
  Synthetic
auuagcauacugauaagauuuucc

SEQ ID NO: 44392 - RNA, 18 nt, Artificial Sequence
  Synthetic
aagcagaauauauuuucc

SEQ ID NO: 44393 - RNA, 19 nt, Artificial Sequence
  Synthetic
caagcagaauauauuuucc

SEQ ID NO: 44394 - RNA, 20 nt, Artificial Sequence
  Synthetic
ccaagcagaauauauuuucc

SEQ ID NO: 44395 - RNA, 21 nt, Artificial Sequence
  Synthetic
accaagcagaauauauuuucc

SEQ ID NO: 44396 - RNA, 22 nt, Artificial Sequence
  Synthetic
caccaagcagaauauauuuucc

SEQ ID NO: 44397 - RNA, 23 nt, Artificial Sequence
  Synthetic
ccaccaagcagaauauauuuucc

SEQ ID NO: 44398 - RNA, 24 nt, Artificial Sequence
  Synthetic
accaccaagcagaauauauuuucc

SEQ ID NO: 44399 - RNA, 18 nt, Artificial Sequence
  Synthetic
uuuuacguuguauuuucc

SEQ ID NO: 44400 - RNA, 19 nt, Artificial Sequence
  Synthetic
uuuuuacguuguauuuucc

SEQ ID NO: 44401 - RNA, 20 nt, Artificial Sequence
  Synthetic
cuuuuuacguuguauuuucc

SEQ ID NO: 44402 - RNA, 21 nt, Artificial Sequence
  Synthetic
ucuuuuuacguuguauuuucc

SEQ ID NO: 44403 - RNA, 22 nt, Artificial Sequence
  Synthetic
uucuuuuuacguuguauuuucc

SEQ ID NO: 44404 - RNA, 23 nt, Artificial Sequence
  Synthetic
auucuuuuuacguuguauuuucc

SEQ ID NO: 44405 - RNA, 24 nt, Artificial Sequence
  Synthetic
uauucuuuuuacguuguauuuucc

SEQ ID NO: 44406 - RNA, 18 nt, Artificial Sequence
  Synthetic
cagauuuguagcuuuucc

SEQ ID NO: 44407 - RNA, 19 nt, Artificial Sequence
  Synthetic
ccagauuuguagcuuuucc

SEQ ID NO: 44408 - RNA, 21 nt, Artificial Sequence
  Synthetic
agccagauuuguagcuuuucc

SEQ ID NO: 44409 - RNA, 22 nt, Artificial Sequence
  Synthetic
aagccagauuuguagcuuuucc

SEQ ID NO: 44410 - RNA, 23 nt, Artificial Sequence
  Synthetic
aaagccagauuuguagcuuuucc

SEQ ID NO: 44411 - RNA, 18 nt, Artificial Sequence
  Synthetic
aucaugacuuaguuuucc

SEQ ID NO: 44412 - RNA, 20 nt, Artificial Sequence
  Synthetic
agaucaugacuuaguuuucc

SEQ ID NO: 44413 - RNA, 21 nt, Artificial Sequence
  Synthetic
cagaucaugacuuaguuuucc

SEQ ID NO: 44414 - RNA, 22 nt, Artificial Sequence
  Synthetic
acagaucaugacuuaguuuucc

SEQ ID NO: 44415 - RNA, 23 nt, Artificial Sequence
  Synthetic
uacagaucaugacuuaguuuucc

SEQ ID NO: 44416 - RNA, 18 nt, Artificial Sequence
  Synthetic
cuuuuuaggcuguuuucc

SEQ ID NO: 44417 - RNA, 19 nt, Artificial Sequence
  Synthetic
ucuuuuuaggcuguuuucc

SEQ ID NO: 44418 - RNA, 20 nt, Artificial Sequence
  Synthetic
cucuuuuuaggcuguuuucc

SEQ ID NO: 44419 - RNA, 21 nt, Artificial Sequence
  Synthetic
ccucuuuuuaggcuguuuucc

SEQ ID NO: 44420 - RNA, 22 nt, Artificial Sequence
  Synthetic
uccucuuuuuaggcuguuuucc

SEQ ID NO: 44421 - RNA, 23 nt, Artificial Sequence
  Synthetic
cuccucuuuuuaggcuguuuucc

SEQ ID NO: 44422 - RNA, 24 nt, Artificial Sequence
  Synthetic
ccuccucuuuuuaggcuguuuucc

SEQ ID NO: 44423 - RNA, 21 nt, Artificial Sequence
  Synthetic
cuaacagaguuaaauuuuucc

SEQ ID NO: 44424 - RNA, 23 nt, Artificial Sequence
  Synthetic
agcuaacagaguuaaauuuuucc

SEQ ID NO: 44425 - RNA, 24 nt, Artificial Sequence
  Synthetic
uagcuaacagaguuaaauuuuucc

SEQ ID NO: 44426 - RNA, 18 nt, Artificial Sequence
  Synthetic
ucucuuguucguuuuucc

SEQ ID NO: 44427 - RNA, 19 nt, Artificial Sequence
  Synthetic
uucucuuguucguuuuucc

SEQ ID NO: 44428 - RNA, 20 nt, Artificial Sequence
  Synthetic
cuucucuuguucguuuuucc

SEQ ID NO: 44429 - RNA, 21 nt, Artificial Sequence
  Synthetic
acuucucuuguucguuuuucc

SEQ ID NO: 44430 - RNA, 22 nt, Artificial Sequence
  Synthetic
uacuucucuuguucguuuuucc

SEQ ID NO: 44431 - RNA, 23 nt, Artificial Sequence
  Synthetic
cuacuucucuuguucguuuuucc

SEQ ID NO: 44432 - RNA, 24 nt, Artificial Sequence
  Synthetic
ucuacuucucuuguucguuuuucc

SEQ ID NO: 44433 - RNA, 18 nt, Artificial Sequence
  Synthetic
cuauuucuacacaaaagc

SEQ ID NO: 44434 - RNA, 19 nt, Artificial Sequence
  Synthetic
ucuauuucuacacaaaagc

SEQ ID NO: 44435 - RNA, 20 nt, Artificial Sequence
  Synthetic
aucuauuucuacacaaaagc

SEQ ID NO: 44436 - RNA, 21 nt, Artificial Sequence
  Synthetic
aaucuauuucuacacaaaagc

SEQ ID NO: 44437 - RNA, 22 nt, Artificial Sequence
  Synthetic
caaucuauuucuacacaaaagc

SEQ ID NO: 44438 - RNA, 23 nt, Artificial Sequence
  Synthetic
ccaaucuauuucuacacaaaagc

SEQ ID NO: 44439 - RNA, 24 nt, Artificial Sequence
  Synthetic
uccaaucuauuucuacacaaaagc

SEQ ID NO: 44440 - RNA, 21 nt, Artificial Sequence
  Synthetic
ugggggaaguaggggaaaagc

SEQ ID NO: 44441 - RNA, 22 nt, Artificial Sequence
  Synthetic
augggggaaguaggggaaaagc

SEQ ID NO: 44442 - RNA, 23 nt, Artificial Sequence
  Synthetic
aaugggggaaguaggggaaaagc

SEQ ID NO: 44443 - RNA, 18 nt, Artificial Sequence
  Synthetic
aaggccugcccuaaaagc

SEQ ID NO: 44444 - RNA, 19 nt, Artificial Sequence
  Synthetic
caaggccugcccuaaaagc

SEQ ID NO: 44445 - RNA, 20 nt, Artificial Sequence
  Synthetic
ucaaggccugcccuaaaagc

SEQ ID NO: 44446 - RNA, 21 nt, Artificial Sequence
  Synthetic
cucaaggccugcccuaaaagc

SEQ ID NO: 44447 - RNA, 22 nt, Artificial Sequence
  Synthetic
ucucaaggccugcccuaaaagc

SEQ ID NO: 44448 - RNA, 23 nt, Artificial Sequence
  Synthetic
uucucaaggccugcccuaaaagc

SEQ ID NO: 44449 - RNA, 24 nt, Artificial Sequence
  Synthetic
cuucucaaggccugcccuaaaagc

SEQ ID NO: 44450 - RNA, 18 nt, Artificial Sequence
  Synthetic
cauuguguuuuuaaaagc

SEQ ID NO: 44451 - RNA, 19 nt, Artificial Sequence
  Synthetic
ucauuguguuuuuaaaagc

SEQ ID NO: 44452 - RNA, 20 nt, Artificial Sequence
  Synthetic
cucauuguguuuuuaaaagc

SEQ ID NO: 44453 - RNA, 21 nt, Artificial Sequence
  Synthetic
ugaagagaaaauaaacaaagc

SEQ ID NO: 44454 - RNA, 22 nt, Artificial Sequence
  Synthetic
augaagagaaaauaaacaaagc

SEQ ID NO: 44455 - RNA, 23 nt, Artificial Sequence
  Synthetic
uaugaagagaaaauaaacaaagc

SEQ ID NO: 44456 - RNA, 24 nt, Artificial Sequence
  Synthetic
cuaugaagagaaaauaaacaaagc

SEQ ID NO: 44457 - RNA, 19 nt, Artificial Sequence
  Synthetic
aguuaaaaugccccaaagc

SEQ ID NO: 44458 - RNA, 20 nt, Artificial Sequence
  Synthetic
aaguuaaaaugccccaaagc

SEQ ID NO: 44459 - RNA, 21 nt, Artificial Sequence
  Synthetic
uaaguuaaaaugccccaaagc

SEQ ID NO: 44460 - RNA, 22 nt, Artificial Sequence
  Synthetic
auaaguuaaaaugccccaaagc

SEQ ID NO: 44461 - RNA, 23 nt, Artificial Sequence
  Synthetic
aauaaguuaaaaugccccaaagc

SEQ ID NO: 44462 - RNA, 24 nt, Artificial Sequence
  Synthetic
uaauaaguuaaaaugccccaaagc

SEQ ID NO: 44463 - RNA, 18 nt, Artificial Sequence
  Synthetic
cauuuauucuuccaaagc

SEQ ID NO: 44464 - RNA, 19 nt, Artificial Sequence
  Synthetic
ucauuuauucuuccaaagc

SEQ ID NO: 44465 - RNA, 20 nt, Artificial Sequence
  Synthetic
aucauuuauucuuccaaagc

SEQ ID NO: 44466 - RNA, 21 nt, Artificial Sequence
  Synthetic
aaucauuuauucuuccaaagc

SEQ ID NO: 44467 - RNA, 22 nt, Artificial Sequence
  Synthetic
aaaucauuuauucuuccaaagc

SEQ ID NO: 44468 - RNA, 23 nt, Artificial Sequence
  Synthetic
aaaaucauuuauucuuccaaagc

SEQ ID NO: 44469 - RNA, 18 nt, Artificial Sequence
  Synthetic
aaagaagaugugcaaagc

SEQ ID NO: 44470 - RNA, 19 nt, Artificial Sequence
  Synthetic
uaaagaagaugugcaaagc

SEQ ID NO: 44471 - RNA, 21 nt, Artificial Sequence
  Synthetic
uguaaagaagaugugcaaagc

SEQ ID NO: 44472 - RNA, 22 nt, Artificial Sequence
  Synthetic
uuguaaagaagaugugcaaagc

SEQ ID NO: 44473 - RNA, 23 nt, Artificial Sequence
  Synthetic
auuguaaagaagaugugcaaagc

SEQ ID NO: 44474 - RNA, 24 nt, Artificial Sequence
  Synthetic
cauuguaaagaagaugugcaaagc

SEQ ID NO: 44475 - RNA, 18 nt, Artificial Sequence
  Synthetic
aauaucccuagagaaagc

SEQ ID NO: 44476 - RNA, 19 nt, Artificial Sequence
  Synthetic
aaauaucccuagagaaagc

SEQ ID NO: 44477 - RNA, 21 nt, Artificial Sequence
  Synthetic
ugaaauaucccuagagaaagc

SEQ ID NO: 44478 - RNA, 22 nt, Artificial Sequence
  Synthetic
uugaaauaucccuagagaaagc

SEQ ID NO: 44479 - RNA, 23 nt, Artificial Sequence
  Synthetic
cuugaaauaucccuagagaaagc

SEQ ID NO: 44480 - RNA, 24 nt, Artificial Sequence
  Synthetic
ucuugaaauaucccuagagaaagc

SEQ ID NO: 44481 - RNA, 18 nt, Artificial Sequence
  Synthetic
agcuuguugggagaaagc

SEQ ID NO: 44482 - RNA, 19 nt, Artificial Sequence
  Synthetic
cagcuuguugggagaaagc

SEQ ID NO: 44483 - RNA, 20 nt, Artificial Sequence
  Synthetic
acagcuuguugggagaaagc

SEQ ID NO: 44484 - RNA, 21 nt, Artificial Sequence
  Synthetic
aacagcuuguugggagaaagc

SEQ ID NO: 44485 - RNA, 22 nt, Artificial Sequence
  Synthetic
uaacagcuuguugggagaaagc

SEQ ID NO: 44486 - RNA, 23 nt, Artificial Sequence
  Synthetic
auaacagcuuguugggagaaagc

SEQ ID NO: 44487 - RNA, 18 nt, Artificial Sequence
  Synthetic
acccccaaucuugaaagc

SEQ ID NO: 44488 - RNA, 19 nt, Artificial Sequence
  Synthetic
aacccccaaucuugaaagc

SEQ ID NO: 44489 - RNA, 20 nt, Artificial Sequence
  Synthetic
caacccccaaucuugaaagc

SEQ ID NO: 44490 - RNA, 21 nt, Artificial Sequence
  Synthetic
ccaacccccaaucuugaaagc

SEQ ID NO: 44491 - RNA, 22 nt, Artificial Sequence
  Synthetic
accaacccccaaucuugaaagc

SEQ ID NO: 44492 - RNA, 23 nt, Artificial Sequence
  Synthetic
caccaacccccaaucuugaaagc

SEQ ID NO: 44493 - RNA, 24 nt, Artificial Sequence
  Synthetic
ccaccaacccccaaucuugaaagc

SEQ ID NO: 44494 - RNA, 18 nt, Artificial Sequence
  Synthetic
uuuugugcaccauaaagc

SEQ ID NO: 44495 - RNA, 19 nt, Artificial Sequence
  Synthetic
uuuuugugcaccauaaagc

SEQ ID NO: 44496 - RNA, 20 nt, Artificial Sequence
  Synthetic
auuuuugugcaccauaaagc

SEQ ID NO: 44497 - RNA, 21 nt, Artificial Sequence
  Synthetic
uauuuuugugcaccauaaagc

SEQ ID NO: 44498 - RNA, 22 nt, Artificial Sequence
  Synthetic
cuauuuuugugcaccauaaagc

SEQ ID NO: 44499 - RNA, 24 nt, Artificial Sequence
  Synthetic
agcuauuuuugugcaccauaaagc

SEQ ID NO: 44500 - RNA, 18 nt, Artificial Sequence
  Synthetic
cagcuuagaaacuaaagc

SEQ ID NO: 44501 - RNA, 19 nt, Artificial Sequence
  Synthetic
acagcuuagaaacuaaagc

SEQ ID NO: 44502 - RNA, 20 nt, Artificial Sequence
  Synthetic
uacagcuuagaaacuaaagc

SEQ ID NO: 44503 - RNA, 21 nt, Artificial Sequence
  Synthetic
auacagcuuagaaacuaaagc

SEQ ID NO: 44504 - RNA, 22 nt, Artificial Sequence
  Synthetic
aauacagcuuagaaacuaaagc

SEQ ID NO: 44505 - RNA, 23 nt, Artificial Sequence
  Synthetic
uaauacagcuuagaaacuaaagc

SEQ ID NO: 44506 - RNA, 24 nt, Artificial Sequence
  Synthetic
uuaauacagcuuagaaacuaaagc

SEQ ID NO: 44507 - RNA, 18 nt, Artificial Sequence
  Synthetic
acuguaauauccuaaagc

SEQ ID NO: 44508 - RNA, 19 nt, Artificial Sequence
  Synthetic
cacuguaauauccuaaagc

SEQ ID NO: 44509 - RNA, 20 nt, Artificial Sequence
  Synthetic
acacuguaauauccuaaagc

SEQ ID NO: 44510 - RNA, 21 nt, Artificial Sequence
  Synthetic
aacacuguaauauccuaaagc

SEQ ID NO: 44511 - RNA, 22 nt, Artificial Sequence
  Synthetic
caacacuguaauauccuaaagc

SEQ ID NO: 44512 - RNA, 23 nt, Artificial Sequence
  Synthetic
acaacacuguaauauccuaaagc

SEQ ID NO: 44513 - RNA, 24 nt, Artificial Sequence
  Synthetic
aacaacacuguaauauccuaaagc

SEQ ID NO: 44514 - RNA, 18 nt, Artificial Sequence
  Synthetic
cgugcuuucuccuaaagc

SEQ ID NO: 44515 - RNA, 19 nt, Artificial Sequence
  Synthetic
acgugcuuucuccuaaagc

SEQ ID NO: 44516 - RNA, 20 nt, Artificial Sequence
  Synthetic
uacgugcuuucuccuaaagc

SEQ ID NO: 44517 - RNA, 22 nt, Artificial Sequence
  Synthetic
uguacgugcuuucuccuaaagc

SEQ ID NO: 44518 - RNA, 23 nt, Artificial Sequence
  Synthetic
uuguacgugcuuucuccuaaagc

SEQ ID NO: 44519 - RNA, 24 nt, Artificial Sequence
  Synthetic
cuuguacgugcuuucuccuaaagc

SEQ ID NO: 44520 - RNA, 18 nt, Artificial Sequence
  Synthetic
ugacaagguagcuaaagc

SEQ ID NO: 44521 - RNA, 20 nt, Artificial Sequence
  Synthetic
agugacaagguagcuaaagc

SEQ ID NO: 44522 - RNA, 22 nt, Artificial Sequence
  Synthetic
ugagugacaagguagcuaaagc

SEQ ID NO: 44523 - RNA, 23 nt, Artificial Sequence
  Synthetic
uugagugacaagguagcuaaagc

SEQ ID NO: 44524 - RNA, 24 nt, Artificial Sequence
  Synthetic
uuugagugacaagguagcuaaagc

SEQ ID NO: 44525 - RNA, 18 nt, Artificial Sequence
  Synthetic
ccuguguagcuguaaagc

SEQ ID NO: 44526 - RNA, 19 nt, Artificial Sequence
  Synthetic
uccuguguagcuguaaagc

SEQ ID NO: 44527 - RNA, 20 nt, Artificial Sequence
  Synthetic
uuccuguguagcuguaaagc

SEQ ID NO: 44528 - RNA, 21 nt, Artificial Sequence
  Synthetic
cuuccuguguagcuguaaagc

SEQ ID NO: 44529 - RNA, 22 nt, Artificial Sequence
  Synthetic
ccuuccuguguagcuguaaagc

SEQ ID NO: 44530 - RNA, 23 nt, Artificial Sequence
  Synthetic
uccuuccuguguagcuguaaagc

SEQ ID NO: 44531 - RNA, 24 nt, Artificial Sequence
  Synthetic
cuccuuccuguguagcuguaaagc

SEQ ID NO: 44532 - RNA, 18 nt, Artificial Sequence
  Synthetic
ccuaaguacaauuaaagc

SEQ ID NO: 44533 - RNA, 19 nt, Artificial Sequence
  Synthetic
cccuaaguacaauuaaagc

SEQ ID NO: 44534 - RNA, 20 nt, Artificial Sequence
  Synthetic
ucccuaaguacaauuaaagc

SEQ ID NO: 44535 - RNA, 21 nt, Artificial Sequence
  Synthetic
uucccuaaguacaauuaaagc

SEQ ID NO: 44536 - RNA, 22 nt, Artificial Sequence
  Synthetic
auucccuaaguacaauuaaagc

SEQ ID NO: 44537 - RNA, 23 nt, Artificial Sequence
  Synthetic
aauucccuaaguacaauuaaagc

SEQ ID NO: 44538 - RNA, 24 nt, Artificial Sequence
  Synthetic
uaauucccuaaguacaauuaaagc

SEQ ID NO: 44539 - RNA, 18 nt, Artificial Sequence
  Synthetic
cuugccuauucaacaagc

SEQ ID NO: 44540 - RNA, 19 nt, Artificial Sequence
  Synthetic
ccuugccuauucaacaagc

SEQ ID NO: 44541 - RNA, 20 nt, Artificial Sequence
  Synthetic
cccuugccuauucaacaagc

SEQ ID NO: 44542 - RNA, 22 nt, Artificial Sequence
  Synthetic
agcccuugccuauucaacaagc

SEQ ID NO: 44543 - RNA, 23 nt, Artificial Sequence
  Synthetic
aagcccuugccuauucaacaagc

SEQ ID NO: 44544 - RNA, 18 nt, Artificial Sequence
  Synthetic
uuggacuggcagccaagc

SEQ ID NO: 44545 - RNA, 19 nt, Artificial Sequence
  Synthetic
auuggacuggcagccaagc

SEQ ID NO: 44546 - RNA, 20 nt, Artificial Sequence
  Synthetic
cauuggacuggcagccaagc

SEQ ID NO: 44547 - RNA, 21 nt, Artificial Sequence
  Synthetic
ccauuggacuggcagccaagc

SEQ ID NO: 44548 - RNA, 23 nt, Artificial Sequence
  Synthetic
ugccauuggacuggcagccaagc

SEQ ID NO: 44549 - RNA, 24 nt, Artificial Sequence
  Synthetic
uugccauuggacuggcagccaagc

SEQ ID NO: 44550 - RNA, 21 nt, Artificial Sequence
  Synthetic
acagcuagaaagcaagcaagc

SEQ ID NO: 44551 - RNA, 22 nt, Artificial Sequence
  Synthetic
cacagcuagaaagcaagcaagc

SEQ ID NO: 44552 - RNA, 23 nt, Artificial Sequence
  Synthetic
acacagcuagaaagcaagcaagc

SEQ ID NO: 44553 - RNA, 24 nt, Artificial Sequence
  Synthetic
cacacagcuagaaagcaagcaagc

SEQ ID NO: 44554 - RNA, 22 nt, Artificial Sequence
  Synthetic
ugucucauucuggggcucaagc

SEQ ID NO: 44555 - RNA, 24 nt, Artificial Sequence
  Synthetic
ugugucucauucuggggcucaagc

SEQ ID NO: 44556 - RNA, 20 nt, Artificial Sequence
  Synthetic
aggcuucaaacaaaagaagc

SEQ ID NO: 44557 - RNA, 21 nt, Artificial Sequence
  Synthetic
aaggcuucaaacaaaagaagc

SEQ ID NO: 44558 - RNA, 22 nt, Artificial Sequence
  Synthetic
uaaggcuucaaacaaaagaagc

SEQ ID NO: 44559 - RNA, 23 nt, Artificial Sequence
  Synthetic
cuaaggcuucaaacaaaagaagc

SEQ ID NO: 44560 - RNA, 24 nt, Artificial Sequence
  Synthetic
acuaaggcuucaaacaaaagaagc

SEQ ID NO: 44561 - RNA, 18 nt, Artificial Sequence
  Synthetic
uuuaggggauacagaagc

SEQ ID NO: 44562 - RNA, 19 nt, Artificial Sequence
  Synthetic
uuuuaggggauacagaagc

SEQ ID NO: 44563 - RNA, 20 nt, Artificial Sequence
  Synthetic
uuuuuaggggauacagaagc

SEQ ID NO: 44564 - RNA, 21 nt, Artificial Sequence
  Synthetic
cuuuuuaggggauacagaagc

SEQ ID NO: 44565 - RNA, 22 nt, Artificial Sequence
  Synthetic
ucuuuuuaggggauacagaagc

SEQ ID NO: 44566 - RNA, 24 nt, Artificial Sequence
  Synthetic
agucuuuuuaggggauacagaagc

SEQ ID NO: 44567 - RNA, 18 nt, Artificial Sequence
  Synthetic
ugagaccugaagagaagc

SEQ ID NO: 44568 - RNA, 19 nt, Artificial Sequence
  Synthetic
cugagaccugaagagaagc

SEQ ID NO: 44569 - RNA, 21 nt, Artificial Sequence
  Synthetic
agcugagaccugaagagaagc

SEQ ID NO: 44570 - RNA, 22 nt, Artificial Sequence
  Synthetic
cagcugagaccugaagagaagc

SEQ ID NO: 44571 - RNA, 23 nt, Artificial Sequence
  Synthetic
ucagcugagaccugaagagaagc

SEQ ID NO: 44572 - RNA, 24 nt, Artificial Sequence
  Synthetic
cucagcugagaccugaagagaagc

SEQ ID NO: 44573 - RNA, 18 nt, Artificial Sequence
  Synthetic
ucaguaaaucagagaagc

SEQ ID NO: 44574 - RNA, 21 nt, Artificial Sequence
  Synthetic
aggucaguaaaucagagaagc

SEQ ID NO: 44575 - RNA, 22 nt, Artificial Sequence
  Synthetic
caggucaguaaaucagagaagc

SEQ ID NO: 44576 - RNA, 23 nt, Artificial Sequence
  Synthetic
acaggucaguaaaucagagaagc

SEQ ID NO: 44577 - RNA, 19 nt, Artificial Sequence
  Synthetic
agcuuaacagaugagaagc

SEQ ID NO: 44578 - RNA, 20 nt, Artificial Sequence
  Synthetic
aagcuuaacagaugagaagc

SEQ ID NO: 44579 - RNA, 22 nt, Artificial Sequence
  Synthetic
agaagcuuaacagaugagaagc

SEQ ID NO: 44580 - RNA, 24 nt, Artificial Sequence
  Synthetic
agagaagcuuaacagaugagaagc

SEQ ID NO: 44581 - RNA, 18 nt, Artificial Sequence
  Synthetic
augcuuagacuuagaagc

SEQ ID NO: 44582 - RNA, 19 nt, Artificial Sequence
  Synthetic
uaugcuuagacuuagaagc

SEQ ID NO: 44583 - RNA, 20 nt, Artificial Sequence
  Synthetic
auaugcuuagacuuagaagc

SEQ ID NO: 44584 - RNA, 21 nt, Artificial Sequence
  Synthetic
uauaugcuuagacuuagaagc

SEQ ID NO: 44585 - RNA, 22 nt, Artificial Sequence
  Synthetic
auauaugcuuagacuuagaagc

SEQ ID NO: 44586 - RNA, 23 nt, Artificial Sequence
  Synthetic
uauauaugcuuagacuuagaagc

SEQ ID NO: 44587 - RNA, 24 nt, Artificial Sequence
  Synthetic
auauauaugcuuagacuuagaagc

SEQ ID NO: 44588 - RNA, 18 nt, Artificial Sequence
  Synthetic
cauagcagucuucgaagc

SEQ ID NO: 44589 - RNA, 19 nt, Artificial Sequence
  Synthetic
acauagcagucuucgaagc

SEQ ID NO: 44590 - RNA, 20 nt, Artificial Sequence
  Synthetic
uacauagcagucuucgaagc

SEQ ID NO: 44591 - RNA, 21 nt, Artificial Sequence
  Synthetic
auacauagcagucuucgaagc

SEQ ID NO: 44592 - RNA, 22 nt, Artificial Sequence
  Synthetic
aauacauagcagucuucgaagc

SEQ ID NO: 44593 - RNA, 23 nt, Artificial Sequence
  Synthetic
caauacauagcagucuucgaagc

SEQ ID NO: 44594 - RNA, 24 nt, Artificial Sequence
  Synthetic
ucaauacauagcagucuucgaagc

SEQ ID NO: 44595 - RNA, 18 nt, Artificial Sequence
  Synthetic
uguuugcauauaggaagc

SEQ ID NO: 44596 - RNA, 19 nt, Artificial Sequence
  Synthetic
auguuugcauauaggaagc

SEQ ID NO: 44597 - RNA, 20 nt, Artificial Sequence
  Synthetic
uauguuugcauauaggaagc

SEQ ID NO: 44598 - RNA, 21 nt, Artificial Sequence
  Synthetic
cuauguuugcauauaggaagc

SEQ ID NO: 44599 - RNA, 22 nt, Artificial Sequence
  Synthetic
acuauguuugcauauaggaagc

SEQ ID NO: 44600 - RNA, 23 nt, Artificial Sequence
  Synthetic
cacuauguuugcauauaggaagc

SEQ ID NO: 44601 - RNA, 24 nt, Artificial Sequence
  Synthetic
ucacuauguuugcauauaggaagc

SEQ ID NO: 44602 - RNA, 18 nt, Artificial Sequence
  Synthetic
aagcuaagacuuggaagc

SEQ ID NO: 44603 - RNA, 19 nt, Artificial Sequence
  Synthetic
aaagcuaagacuuggaagc

SEQ ID NO: 44604 - RNA, 21 nt, Artificial Sequence
  Synthetic
ugaaagcuaagacuuggaagc

SEQ ID NO: 44605 - RNA, 22 nt, Artificial Sequence
  Synthetic
augaaagcuaagacuuggaagc

SEQ ID NO: 44606 - RNA, 23 nt, Artificial Sequence
  Synthetic
aaugaaagcuaagacuuggaagc

SEQ ID NO: 44607 - RNA, 24 nt, Artificial Sequence
  Synthetic
aaaugaaagcuaagacuuggaagc

SEQ ID NO: 44608 - RNA, 18 nt, Artificial Sequence
  Synthetic
aggugauuauuaugaagc

SEQ ID NO: 44609 - RNA, 19 nt, Artificial Sequence
  Synthetic
caggugauuauuaugaagc

SEQ ID NO: 44610 - RNA, 20 nt, Artificial Sequence
  Synthetic
ucaggugauuauuaugaagc

SEQ ID NO: 44611 - RNA, 21 nt, Artificial Sequence
  Synthetic
aucaggugauuauuaugaagc

SEQ ID NO: 44612 - RNA, 23 nt, Artificial Sequence
  Synthetic
agaucaggugauuauuaugaagc

SEQ ID NO: 44613 - RNA, 19 nt, Artificial Sequence
  Synthetic
ugucuaauugcacugaagc

SEQ ID NO: 44614 - RNA, 20 nt, Artificial Sequence
  Synthetic
uugucuaauugcacugaagc

SEQ ID NO: 44615 - RNA, 22 nt, Artificial Sequence
  Synthetic
aguugucuaauugcacugaagc

SEQ ID NO: 44616 - RNA, 24 nt, Artificial Sequence
  Synthetic
ugaguugucuaauugcacugaagc

SEQ ID NO: 44617 - RNA, 19 nt, Artificial Sequence
  Synthetic
agggcagaaaucuugaagc

SEQ ID NO: 44618 - RNA, 20 nt, Artificial Sequence
  Synthetic
aagggcagaaaucuugaagc

SEQ ID NO: 44619 - RNA, 21 nt, Artificial Sequence
  Synthetic
caagggcagaaaucuugaagc

SEQ ID NO: 44620 - RNA, 23 nt, Artificial Sequence
  Synthetic
agcaagggcagaaaucuugaagc

SEQ ID NO: 44621 - RNA, 24 nt, Artificial Sequence
  Synthetic
cagcaagggcagaaaucuugaagc

SEQ ID NO: 44622 - RNA, 21 nt, Artificial Sequence
  Synthetic
acuacuaaauggaaaauaagc

SEQ ID NO: 44623 - RNA, 22 nt, Artificial Sequence
  Synthetic
aacuacuaaauggaaaauaagc

SEQ ID NO: 44624 - RNA, 24 nt, Artificial Sequence
  Synthetic
agaacuacuaaauggaaaauaagc

SEQ ID NO: 44625 - RNA, 18 nt, Artificial Sequence
  Synthetic
cuuacacuuaaaauaagc

SEQ ID NO: 44626 - RNA, 19 nt, Artificial Sequence
  Synthetic
acuuacacuuaaaauaagc

SEQ ID NO: 44627 - RNA, 20 nt, Artificial Sequence
  Synthetic
aacuuacacuuaaaauaagc

SEQ ID NO: 44628 - RNA, 21 nt, Artificial Sequence
  Synthetic
uaacuuacacuuaaaauaagc

SEQ ID NO: 44629 - RNA, 22 nt, Artificial Sequence
  Synthetic
auaacuuacacuuaaaauaagc

SEQ ID NO: 44630 - RNA, 23 nt, Artificial Sequence
  Synthetic
uauaacuuacacuuaaaauaagc

SEQ ID NO: 44631 - RNA, 24 nt, Artificial Sequence
  Synthetic
auauaacuuacacuuaaaauaagc

SEQ ID NO: 44632 - RNA, 18 nt, Artificial Sequence
  Synthetic
agucauaauuucauaagc

SEQ ID NO: 44633 - RNA, 19 nt, Artificial Sequence
  Synthetic
aagucauaauuucauaagc

SEQ ID NO: 44634 - RNA, 20 nt, Artificial Sequence
  Synthetic
uaagucauaauuucauaagc

SEQ ID NO: 44635 - RNA, 22 nt, Artificial Sequence
  Synthetic
uguaagucauaauuucauaagc

SEQ ID NO: 44636 - RNA, 23 nt, Artificial Sequence
  Synthetic
cuguaagucauaauuucauaagc

SEQ ID NO: 44637 - RNA, 18 nt, Artificial Sequence
  Synthetic
cuuaugauuuggcuaagc

SEQ ID NO: 44638 - RNA, 19 nt, Artificial Sequence
  Synthetic
ccuuaugauuuggcuaagc

SEQ ID NO: 44639 - RNA, 20 nt, Artificial Sequence
  Synthetic
uccuuaugauuuggcuaagc

SEQ ID NO: 44640 - RNA, 21 nt, Artificial Sequence
  Synthetic
uuccuuaugauuuggcuaagc

SEQ ID NO: 44641 - RNA, 22 nt, Artificial Sequence
  Synthetic
uuuccuuaugauuuggcuaagc

SEQ ID NO: 44642 - RNA, 24 nt, Artificial Sequence
  Synthetic
aguuuccuuaugauuuggcuaagc

SEQ ID NO: 44643 - RNA, 18 nt, Artificial Sequence
  Synthetic
cuuauuaagagucuaagc

SEQ ID NO: 44644 - RNA, 20 nt, Artificial Sequence
  Synthetic
cgcuuauuaagagucuaagc

SEQ ID NO: 44645 - RNA, 22 nt, Artificial Sequence
  Synthetic
agcgcuuauuaagagucuaagc

SEQ ID NO: 44646 - RNA, 23 nt, Artificial Sequence
  Synthetic
uagcgcuuauuaagagucuaagc

SEQ ID NO: 44647 - RNA, 24 nt, Artificial Sequence
  Synthetic
auagcgcuuauuaagagucuaagc

SEQ ID NO: 44648 - RNA, 18 nt, Artificial Sequence
  Synthetic
acuguaauuuuaguaagc

SEQ ID NO: 44649 - RNA, 19 nt, Artificial Sequence
  Synthetic
aacuguaauuuuaguaagc

SEQ ID NO: 44650 - RNA, 20 nt, Artificial Sequence
  Synthetic
aaacuguaauuuuaguaagc

SEQ ID NO: 44651 - RNA, 22 nt, Artificial Sequence
  Synthetic
ugaaacuguaauuuuaguaagc

SEQ ID NO: 44652 - RNA, 23 nt, Artificial Sequence
  Synthetic
augaaacuguaauuuuaguaagc

SEQ ID NO: 44653 - RNA, 24 nt, Artificial Sequence
  Synthetic
caugaaacuguaauuuuaguaagc

SEQ ID NO: 44654 - RNA, 18 nt, Artificial Sequence
  Synthetic
cuuuuaagugaauuaagc

SEQ ID NO: 44655 - RNA, 19 nt, Artificial Sequence
  Synthetic
ccuuuuaagugaauuaagc

SEQ ID NO: 44656 - RNA, 20 nt, Artificial Sequence
  Synthetic
accuuuuaagugaauuaagc

SEQ ID NO: 44657 - RNA, 21 nt, Artificial Sequence
  Synthetic
uaccuuuuaagugaauuaagc

SEQ ID NO: 44658 - RNA, 22 nt, Artificial Sequence
  Synthetic
auaccuuuuaagugaauuaagc

SEQ ID NO: 44659 - RNA, 23 nt, Artificial Sequence
  Synthetic
aauaccuuuuaagugaauuaagc

SEQ ID NO: 44660 - RNA, 24 nt, Artificial Sequence
  Synthetic
uaauaccuuuuaagugaauuaagc

SEQ ID NO: 44661 - RNA, 18 nt, Artificial Sequence
  Synthetic
uucagggaguucuuaagc

SEQ ID NO: 44662 - RNA, 20 nt, Artificial Sequence
  Synthetic
cguucagggaguucuuaagc

SEQ ID NO: 44663 - RNA, 21 nt, Artificial Sequence
  Synthetic
ccguucagggaguucuuaagc

SEQ ID NO: 44664 - RNA, 22 nt, Artificial Sequence
  Synthetic
accguucagggaguucuuaagc

SEQ ID NO: 44665 - RNA, 24 nt, Artificial Sequence
  Synthetic
ugaccguucagggaguucuuaagc

SEQ ID NO: 44666 - RNA, 18 nt, Artificial Sequence
  Synthetic
uggcuuacauaaaacagc

SEQ ID NO: 44667 - RNA, 19 nt, Artificial Sequence
  Synthetic
auggcuuacauaaaacagc

SEQ ID NO: 44668 - RNA, 20 nt, Artificial Sequence
  Synthetic
uauggcuuacauaaaacagc

SEQ ID NO: 44669 - RNA, 21 nt, Artificial Sequence
  Synthetic
cuauggcuuacauaaaacagc

SEQ ID NO: 44670 - RNA, 22 nt, Artificial Sequence
  Synthetic
acuauggcuuacauaaaacagc

SEQ ID NO: 44671 - RNA, 18 nt, Artificial Sequence
  Synthetic
agaaguguggacaacagc

SEQ ID NO: 44672 - RNA, 19 nt, Artificial Sequence
  Synthetic
cagaaguguggacaacagc

SEQ ID NO: 44673 - RNA, 20 nt, Artificial Sequence
  Synthetic
ucagaaguguggacaacagc

SEQ ID NO: 44674 - RNA, 21 nt, Artificial Sequence
  Synthetic
aucagaaguguggacaacagc

SEQ ID NO: 44675 - RNA, 22 nt, Artificial Sequence
  Synthetic
caucagaaguguggacaacagc

SEQ ID NO: 44676 - RNA, 23 nt, Artificial Sequence
  Synthetic
acaucagaaguguggacaacagc

SEQ ID NO: 44677 - RNA, 24 nt, Artificial Sequence
  Synthetic
aacaucagaaguguggacaacagc

SEQ ID NO: 44678 - RNA, 18 nt, Artificial Sequence
  Synthetic
aacuggaagaaucacagc

SEQ ID NO: 44679 - RNA, 20 nt, Artificial Sequence
  Synthetic
ugaacuggaagaaucacagc

SEQ ID NO: 44680 - RNA, 21 nt, Artificial Sequence
  Synthetic
cugaacuggaagaaucacagc

SEQ ID NO: 44681 - RNA, 22 nt, Artificial Sequence
  Synthetic
acugaacuggaagaaucacagc

SEQ ID NO: 44682 - RNA, 23 nt, Artificial Sequence
  Synthetic
uacugaacuggaagaaucacagc

SEQ ID NO: 44683 - RNA, 24 nt, Artificial Sequence
  Synthetic
auacugaacuggaagaaucacagc

SEQ ID NO: 44684 - RNA, 21 nt, Artificial Sequence
  Synthetic
uauccuuuuguuuaugacagc

SEQ ID NO: 44685 - RNA, 22 nt, Artificial Sequence
  Synthetic
auauccuuuuguuuaugacagc

SEQ ID NO: 44686 - RNA, 23 nt, Artificial Sequence
  Synthetic
aauauccuuuuguuuaugacagc

SEQ ID NO: 44687 - RNA, 19 nt, Artificial Sequence
  Synthetic
agucaaugguucugacagc

SEQ ID NO: 44688 - RNA, 20 nt, Artificial Sequence
  Synthetic
aagucaaugguucugacagc

SEQ ID NO: 44689 - RNA, 21 nt, Artificial Sequence
  Synthetic
aaagucaaugguucugacagc

SEQ ID NO: 44690 - RNA, 22 nt, Artificial Sequence
  Synthetic
uaaagucaaugguucugacagc

SEQ ID NO: 44691 - RNA, 23 nt, Artificial Sequence
  Synthetic
uuaaagucaaugguucugacagc

SEQ ID NO: 44692 - RNA, 24 nt, Artificial Sequence
  Synthetic
cuuaaagucaaugguucugacagc

SEQ ID NO: 44693 - RNA, 18 nt, Artificial Sequence
  Synthetic
aacauaugaguauacagc

SEQ ID NO: 44694 - RNA, 19 nt, Artificial Sequence
  Synthetic
aaacauaugaguauacagc

SEQ ID NO: 44695 - RNA, 20 nt, Artificial Sequence
  Synthetic
caaacauaugaguauacagc

SEQ ID NO: 44696 - RNA, 18 nt, Artificial Sequence
  Synthetic
cuauuaaaauauuacagc

SEQ ID NO: 44697 - RNA, 19 nt, Artificial Sequence
  Synthetic
acuauuaaaauauuacagc

SEQ ID NO: 44698 - RNA, 20 nt, Artificial Sequence
  Synthetic
uacuauuaaaauauuacagc

SEQ ID NO: 44699 - RNA, 21 nt, Artificial Sequence
  Synthetic
uuacuauuaaaauauuacagc

SEQ ID NO: 44700 - RNA, 22 nt, Artificial Sequence
  Synthetic
auuacuauuaaaauauuacagc

SEQ ID NO: 44701 - RNA, 23 nt, Artificial Sequence
  Synthetic
uauuacuauuaaaauauuacagc

SEQ ID NO: 44702 - RNA, 24 nt, Artificial Sequence
  Synthetic
auauuacuauuaaaauauuacagc

SEQ ID NO: 44703 - RNA, 18 nt, Artificial Sequence
  Synthetic
uuacaaaaugcacccagc

SEQ ID NO: 44704 - RNA, 19 nt, Artificial Sequence
  Synthetic
cuuacaaaaugcacccagc

SEQ ID NO: 44705 - RNA, 20 nt, Artificial Sequence
  Synthetic
ucuuacaaaaugcacccagc

SEQ ID NO: 44706 - RNA, 22 nt, Artificial Sequence
  Synthetic
agucuuacaaaaugcacccagc

SEQ ID NO: 44707 - RNA, 23 nt, Artificial Sequence
  Synthetic
cagucuuacaaaaugcacccagc

SEQ ID NO: 44708 - RNA, 24 nt, Artificial Sequence
  Synthetic
ccagucuuacaaaaugcacccagc

SEQ ID NO: 44709 - RNA, 18 nt, Artificial Sequence
  Synthetic
ccuucuaggcugcccagc

SEQ ID NO: 44710 - RNA, 19 nt, Artificial Sequence
  Synthetic
cccuucuaggcugcccagc

SEQ ID NO: 44711 - RNA, 20 nt, Artificial Sequence
  Synthetic
acccuucuaggcugcccagc

SEQ ID NO: 44712 - RNA, 21 nt, Artificial Sequence
  Synthetic
uacccuucuaggcugcccagc

SEQ ID NO: 44713 - RNA, 22 nt, Artificial Sequence
  Synthetic
cuacccuucuaggcugcccagc

SEQ ID NO: 44714 - RNA, 23 nt, Artificial Sequence
  Synthetic
ucuacccuucuaggcugcccagc

SEQ ID NO: 44715 - RNA, 24 nt, Artificial Sequence
  Synthetic
uucuacccuucuaggcugcccagc

SEQ ID NO: 44716 - RNA, 19 nt, Artificial Sequence
  Synthetic
ugacagacauaaucccagc

SEQ ID NO: 44717 - RNA, 20 nt, Artificial Sequence
  Synthetic
augacagacauaaucccagc

SEQ ID NO: 44718 - RNA, 21 nt, Artificial Sequence
  Synthetic
caugacagacauaaucccagc

SEQ ID NO: 44719 - RNA, 22 nt, Artificial Sequence
  Synthetic
acaugacagacauaaucccagc

SEQ ID NO: 44720 - RNA, 23 nt, Artificial Sequence
  Synthetic
aacaugacagacauaaucccagc

SEQ ID NO: 44721 - RNA, 21 nt, Artificial Sequence
  Synthetic
uuaaaaaaaaaacaggccagc

SEQ ID NO: 44722 - RNA, 22 nt, Artificial Sequence
  Synthetic
auuaaaaaaaaaacaggccagc

SEQ ID NO: 44723 - RNA, 23 nt, Artificial Sequence
  Synthetic
aauuaaaaaaaaaacaggccagc

SEQ ID NO: 44724 - RNA, 24 nt, Artificial Sequence
  Synthetic
aaauuaaaaaaaaaacaggccagc

SEQ ID NO: 44725 - RNA, 18 nt, Artificial Sequence
  Synthetic
uuguuuuggauauccagc

SEQ ID NO: 44726 - RNA, 19 nt, Artificial Sequence
  Synthetic
uuuguuuuggauauccagc

SEQ ID NO: 44727 - RNA, 21 nt, Artificial Sequence
  Synthetic
uguuuguuuuggauauccagc

SEQ ID NO: 44728 - RNA, 23 nt, Artificial Sequence
  Synthetic
aguguuuguuuuggauauccagc

SEQ ID NO: 44729 - RNA, 24 nt, Artificial Sequence
  Synthetic
caguguuuguuuuggauauccagc

SEQ ID NO: 44730 - RNA, 21 nt, Artificial Sequence
  Synthetic
caaagcaccaucaucuccagc

SEQ ID NO: 44731 - RNA, 22 nt, Artificial Sequence
  Synthetic
ccaaagcaccaucaucuccagc

SEQ ID NO: 44732 - RNA, 23 nt, Artificial Sequence
  Synthetic
uccaaagcaccaucaucuccagc

SEQ ID NO: 44733 - RNA, 24 nt, Artificial Sequence
  Synthetic
auccaaagcaccaucaucuccagc

SEQ ID NO: 44734 - RNA, 22 nt, Artificial Sequence
  Synthetic
agucuaaucuuaauacagcagc

SEQ ID NO: 44735 - RNA, 23 nt, Artificial Sequence
  Synthetic
aagucuaaucuuaauacagcagc

SEQ ID NO: 44736 - RNA, 24 nt, Artificial Sequence
  Synthetic
aaagucuaaucuuaauacagcagc

SEQ ID NO: 44737 - RNA, 18 nt, Artificial Sequence
  Synthetic
aauugggauuugagcagc

SEQ ID NO: 44738 - RNA, 19 nt, Artificial Sequence
  Synthetic
caauugggauuugagcagc

SEQ ID NO: 44739 - RNA, 21 nt, Artificial Sequence
  Synthetic
ugcaauugggauuugagcagc

SEQ ID NO: 44740 - RNA, 22 nt, Artificial Sequence
  Synthetic
uugcaauugggauuugagcagc

SEQ ID NO: 44741 - RNA, 18 nt, Artificial Sequence
  Synthetic
acagcaugauguagcagc

SEQ ID NO: 44742 - RNA, 20 nt, Artificial Sequence
  Synthetic
agacagcaugauguagcagc

SEQ ID NO: 44743 - RNA, 21 nt, Artificial Sequence
  Synthetic
aagacagcaugauguagcagc

SEQ ID NO: 44744 - RNA, 22 nt, Artificial Sequence
  Synthetic
aaagacagcaugauguagcagc

SEQ ID NO: 44745 - RNA, 18 nt, Artificial Sequence
  Synthetic
aucuagcauaagcgcagc

SEQ ID NO: 44746 - RNA, 19 nt, Artificial Sequence
  Synthetic
uaucuagcauaagcgcagc

SEQ ID NO: 44747 - RNA, 20 nt, Artificial Sequence
  Synthetic
uuaucuagcauaagcgcagc

SEQ ID NO: 44748 - RNA, 21 nt, Artificial Sequence
  Synthetic
cuuaucuagcauaagcgcagc

SEQ ID NO: 44749 - RNA, 24 nt, Artificial Sequence
  Synthetic
uggcuuaucuagcauaagcgcagc

SEQ ID NO: 44750 - RNA, 18 nt, Artificial Sequence
  Synthetic
ugguagauuagaggcagc

SEQ ID NO: 44751 - RNA, 19 nt, Artificial Sequence
  Synthetic
uugguagauuagaggcagc

SEQ ID NO: 44752 - RNA, 20 nt, Artificial Sequence
  Synthetic
cuugguagauuagaggcagc

SEQ ID NO: 44753 - RNA, 23 nt, Artificial Sequence
  Synthetic
uggcuugguagauuagaggcagc

SEQ ID NO: 44754 - RNA, 24 nt, Artificial Sequence
  Synthetic
cuggcuugguagauuagaggcagc

SEQ ID NO: 44755 - RNA, 18 nt, Artificial Sequence
  Synthetic
aagucgucuggaggcagc

SEQ ID NO: 44756 - RNA, 20 nt, Artificial Sequence
  Synthetic
ugaagucgucuggaggcagc

SEQ ID NO: 44757 - RNA, 21 nt, Artificial Sequence
  Synthetic
uugaagucgucuggaggcagc

SEQ ID NO: 44758 - RNA, 22 nt, Artificial Sequence
  Synthetic
uuugaagucgucuggaggcagc

SEQ ID NO: 44759 - RNA, 23 nt, Artificial Sequence
  Synthetic
auuugaagucgucuggaggcagc

SEQ ID NO: 44760 - RNA, 24 nt, Artificial Sequence
  Synthetic
aauuugaagucgucuggaggcagc

SEQ ID NO: 44761 - RNA, 19 nt, Artificial Sequence
  Synthetic
ugaaugugcucuaggcagc

SEQ ID NO: 44762 - RNA, 20 nt, Artificial Sequence
  Synthetic
cugaaugugcucuaggcagc

SEQ ID NO: 44763 - RNA, 21 nt, Artificial Sequence
  Synthetic
ucugaaugugcucuaggcagc

SEQ ID NO: 44764 - RNA, 22 nt, Artificial Sequence
  Synthetic
cucugaaugugcucuaggcagc

SEQ ID NO: 44765 - RNA, 23 nt, Artificial Sequence
  Synthetic
ucucugaaugugcucuaggcagc

SEQ ID NO: 44766 - RNA, 24 nt, Artificial Sequence
  Synthetic
uucucugaaugugcucuaggcagc

SEQ ID NO: 44767 - RNA, 18 nt, Artificial Sequence
  Synthetic
uacaugccuuccugcagc

SEQ ID NO: 44768 - RNA, 20 nt, Artificial Sequence
  Synthetic
aguacaugccuuccugcagc

SEQ ID NO: 44769 - RNA, 21 nt, Artificial Sequence
  Synthetic
uaguacaugccuuccugcagc

SEQ ID NO: 44770 - RNA, 23 nt, Artificial Sequence
  Synthetic
aguaguacaugccuuccugcagc

SEQ ID NO: 44771 - RNA, 24 nt, Artificial Sequence
  Synthetic
uaguaguacaugccuuccugcagc

SEQ ID NO: 44772 - RNA, 18 nt, Artificial Sequence
  Synthetic
auucguuagaaaaucagc

SEQ ID NO: 44773 - RNA, 19 nt, Artificial Sequence
  Synthetic
aauucguuagaaaaucagc

SEQ ID NO: 44774 - RNA, 20 nt, Artificial Sequence
  Synthetic
aaauucguuagaaaaucagc

SEQ ID NO: 44775 - RNA, 21 nt, Artificial Sequence
  Synthetic
aaaauucguuagaaaaucagc

SEQ ID NO: 44776 - RNA, 22 nt, Artificial Sequence
  Synthetic
caaaauucguuagaaaaucagc

SEQ ID NO: 44777 - RNA, 23 nt, Artificial Sequence
  Synthetic
ccaaaauucguuagaaaaucagc

SEQ ID NO: 44778 - RNA, 24 nt, Artificial Sequence
  Synthetic
accaaaauucguuagaaaaucagc

SEQ ID NO: 44779 - RNA, 18 nt, Artificial Sequence
  Synthetic
uagcaucacuuccucagc

SEQ ID NO: 44780 - RNA, 19 nt, Artificial Sequence
  Synthetic
cuagcaucacuuccucagc

SEQ ID NO: 44781 - RNA, 20 nt, Artificial Sequence
  Synthetic
ucuagcaucacuuccucagc

SEQ ID NO: 44782 - RNA, 21 nt, Artificial Sequence
  Synthetic
aucuagcaucacuuccucagc

SEQ ID NO: 44783 - RNA, 22 nt, Artificial Sequence
  Synthetic
caucuagcaucacuuccucagc

SEQ ID NO: 44784 - RNA, 24 nt, Artificial Sequence
  Synthetic
ugcaucuagcaucacuuccucagc

SEQ ID NO: 44785 - RNA, 18 nt, Artificial Sequence
  Synthetic
cacuggaaggcucucagc

SEQ ID NO: 44786 - RNA, 19 nt, Artificial Sequence
  Synthetic
ucacuggaaggcucucagc

SEQ ID NO: 44787 - RNA, 20 nt, Artificial Sequence
  Synthetic
aucacuggaaggcucucagc

SEQ ID NO: 44788 - RNA, 21 nt, Artificial Sequence
  Synthetic
caucacuggaaggcucucagc

SEQ ID NO: 44789 - RNA, 22 nt, Artificial Sequence
  Synthetic
acaucacuggaaggcucucagc

SEQ ID NO: 44790 - RNA, 23 nt, Artificial Sequence
  Synthetic
aacaucacuggaaggcucucagc

SEQ ID NO: 44791 - RNA, 24 nt, Artificial Sequence
  Synthetic
aaacaucacuggaaggcucucagc

SEQ ID NO: 44792 - RNA, 18 nt, Artificial Sequence
  Synthetic
aucagccuuucauucagc

SEQ ID NO: 44793 - RNA, 19 nt, Artificial Sequence
  Synthetic
aaucagccuuucauucagc

SEQ ID NO: 44794 - RNA, 20 nt, Artificial Sequence
  Synthetic
uaaucagccuuucauucagc

SEQ ID NO: 44795 - RNA, 22 nt, Artificial Sequence
  Synthetic
aguaaucagccuuucauucagc

SEQ ID NO: 44796 - RNA, 23 nt, Artificial Sequence
  Synthetic
aaguaaucagccuuucauucagc

SEQ ID NO: 44797 - RNA, 24 nt, Artificial Sequence
  Synthetic
uaaguaaucagccuuucauucagc

SEQ ID NO: 44798 - RNA, 18 nt, Artificial Sequence
  Synthetic
cauuuaaaaauuuucagc

SEQ ID NO: 44799 - RNA, 19 nt, Artificial Sequence
  Synthetic
ccauuuaaaaauuuucagc

SEQ ID NO: 44800 - RNA, 20 nt, Artificial Sequence
  Synthetic
cccauuuaaaaauuuucagc

SEQ ID NO: 44801 - RNA, 21 nt, Artificial Sequence
  Synthetic
ucccauuuaaaaauuuucagc

SEQ ID NO: 44802 - RNA, 22 nt, Artificial Sequence
  Synthetic
aucccauuuaaaaauuuucagc

SEQ ID NO: 44803 - RNA, 23 nt, Artificial Sequence
  Synthetic
aaucccauuuaaaaauuuucagc

SEQ ID NO: 44804 - RNA, 24 nt, Artificial Sequence
  Synthetic
caaucccauuuaaaaauuuucagc

SEQ ID NO: 44805 - RNA, 18 nt, Artificial Sequence
  Synthetic
cuuucaugaauuuucagc

SEQ ID NO: 44806 - RNA, 19 nt, Artificial Sequence
  Synthetic
ccuuucaugaauuuucagc

SEQ ID NO: 44807 - RNA, 21 nt, Artificial Sequence
  Synthetic
ugccuuucaugaauuuucagc

SEQ ID NO: 44808 - RNA, 22 nt, Artificial Sequence
  Synthetic
uugccuuucaugaauuuucagc

SEQ ID NO: 44809 - RNA, 23 nt, Artificial Sequence
  Synthetic
auugccuuucaugaauuuucagc

SEQ ID NO: 44810 - RNA, 24 nt, Artificial Sequence
  Synthetic
uauugccuuucaugaauuuucagc

SEQ ID NO: 44811 - RNA, 22 nt, Artificial Sequence
  Synthetic
aggggcucuggagucaaagagc

SEQ ID NO: 44812 - RNA, 23 nt, Artificial Sequence
  Synthetic
caggggcucuggagucaaagagc

SEQ ID NO: 44813 - RNA, 18 nt, Artificial Sequence
  Synthetic
agugaaguugcuaagagc

SEQ ID NO: 44814 - RNA, 19 nt, Artificial Sequence
  Synthetic
aagugaaguugcuaagagc

SEQ ID NO: 44815 - RNA, 20 nt, Artificial Sequence
  Synthetic
aaagugaaguugcuaagagc

SEQ ID NO: 44816 - RNA, 22 nt, Artificial Sequence
  Synthetic
agaaagugaaguugcuaagagc

SEQ ID NO: 44817 - RNA, 24 nt, Artificial Sequence
  Synthetic
agagaaagugaaguugcuaagagc

SEQ ID NO: 44818 - RNA, 18 nt, Artificial Sequence
  Synthetic
auucuauagcuacagagc

SEQ ID NO: 44819 - RNA, 20 nt, Artificial Sequence
  Synthetic
agauucuauagcuacagagc

SEQ ID NO: 44820 - RNA, 21 nt, Artificial Sequence
  Synthetic
aagauucuauagcuacagagc

SEQ ID NO: 44821 - RNA, 24 nt, Artificial Sequence
  Synthetic
uggaagauucuauagcuacagagc

SEQ ID NO: 44822 - RNA, 21 nt, Artificial Sequence
  Synthetic
uugugcagugacgcccagagc

SEQ ID NO: 44823 - RNA, 22 nt, Artificial Sequence
  Synthetic
auugugcagugacgcccagagc

SEQ ID NO: 44824 - RNA, 24 nt, Artificial Sequence
  Synthetic
agauugugcagugacgcccagagc

SEQ ID NO: 44825 - RNA, 19 nt, Artificial Sequence
  Synthetic
aggaaagaaccagcagagc

SEQ ID NO: 44826 - RNA, 22 nt, Artificial Sequence
  Synthetic
aggaggaaagaaccagcagagc

SEQ ID NO: 44827 - RNA, 24 nt, Artificial Sequence
  Synthetic
ugaggaggaaagaaccagcagagc

SEQ ID NO: 44828 - RNA, 19 nt, Artificial Sequence
  Synthetic
agaauucacuuuggagagc

SEQ ID NO: 44829 - RNA, 20 nt, Artificial Sequence
  Synthetic
aagaauucacuuuggagagc

SEQ ID NO: 44830 - RNA, 21 nt, Artificial Sequence
  Synthetic
aaagaauucacuuuggagagc

SEQ ID NO: 44831 - RNA, 22 nt, Artificial Sequence
  Synthetic
uaaagaauucacuuuggagagc

SEQ ID NO: 44832 - RNA, 23 nt, Artificial Sequence
  Synthetic
uuaaagaauucacuuuggagagc

SEQ ID NO: 44833 - RNA, 24 nt, Artificial Sequence
  Synthetic
uuuaaagaauucacuuuggagagc

SEQ ID NO: 44834 - RNA, 19 nt, Artificial Sequence
  Synthetic
agaauucuggucugagagc

SEQ ID NO: 44835 - RNA, 20 nt, Artificial Sequence
  Synthetic
cagaauucuggucugagagc

SEQ ID NO: 44836 - RNA, 21 nt, Artificial Sequence
  Synthetic
acagaauucuggucugagagc

SEQ ID NO: 44837 - RNA, 22 nt, Artificial Sequence
  Synthetic
cacagaauucuggucugagagc

SEQ ID NO: 44838 - RNA, 23 nt, Artificial Sequence
  Synthetic
acacagaauucuggucugagagc

SEQ ID NO: 44839 - RNA, 18 nt, Artificial Sequence
  Synthetic
cuuuuaacacuauagagc

SEQ ID NO: 44840 - RNA, 21 nt, Artificial Sequence
  Synthetic
uggcuuuuaacacuauagagc

SEQ ID NO: 44841 - RNA, 22 nt, Artificial Sequence
  Synthetic
uuggcuuuuaacacuauagagc

SEQ ID NO: 44842 - RNA, 23 nt, Artificial Sequence
  Synthetic
uuuggcuuuuaacacuauagagc

SEQ ID NO: 44843 - RNA, 24 nt, Artificial Sequence
  Synthetic
cuuuggcuuuuaacacuauagagc

SEQ ID NO: 44844 - RNA, 18 nt, Artificial Sequence
  Synthetic
uuaugacaaaaaaggagc

SEQ ID NO: 44845 - RNA, 20 nt, Artificial Sequence
  Synthetic
uguuaugacaaaaaaggagc

SEQ ID NO: 44846 - RNA, 21 nt, Artificial Sequence
  Synthetic
uuguuaugacaaaaaaggagc

SEQ ID NO: 44847 - RNA, 22 nt, Artificial Sequence
  Synthetic
uuuguuaugacaaaaaaggagc

SEQ ID NO: 44848 - RNA, 23 nt, Artificial Sequence
  Synthetic
auuuguuaugacaaaaaaggagc

SEQ ID NO: 44849 - RNA, 24 nt, Artificial Sequence
  Synthetic
uauuuguuaugacaaaaaaggagc

SEQ ID NO: 44850 - RNA, 18 nt, Artificial Sequence
  Synthetic
ugugauaaaagaaggagc

SEQ ID NO: 44851 - RNA, 19 nt, Artificial Sequence
  Synthetic
cugugauaaaagaaggagc

SEQ ID NO: 44852 - RNA, 20 nt, Artificial Sequence
  Synthetic
acugugauaaaagaaggagc

SEQ ID NO: 44853 - RNA, 23 nt, Artificial Sequence
  Synthetic
uggacugugauaaaagaaggagc

SEQ ID NO: 44854 - RNA, 24 nt, Artificial Sequence
  Synthetic
auggacugugauaaaagaaggagc

SEQ ID NO: 44855 - RNA, 18 nt, Artificial Sequence
  Synthetic
uuuaauagcuagaggagc

SEQ ID NO: 44856 - RNA, 21 nt, Artificial Sequence
  Synthetic
ugguuuaauagcuagaggagc

SEQ ID NO: 44857 - RNA, 22 nt, Artificial Sequence
  Synthetic
uugguuuaauagcuagaggagc

SEQ ID NO: 44858 - RNA, 23 nt, Artificial Sequence
  Synthetic
cuugguuuaauagcuagaggagc

SEQ ID NO: 44859 - RNA, 24 nt, Artificial Sequence
  Synthetic
ccuugguuuaauagcuagaggagc

SEQ ID NO: 44860 - RNA, 18 nt, Artificial Sequence
  Synthetic
cagaaugucuagaggagc

SEQ ID NO: 44861 - RNA, 19 nt, Artificial Sequence
  Synthetic
ccagaaugucuagaggagc

SEQ ID NO: 44862 - RNA, 20 nt, Artificial Sequence
  Synthetic
accagaaugucuagaggagc

SEQ ID NO: 44863 - RNA, 21 nt, Artificial Sequence
  Synthetic
uaccagaaugucuagaggagc

SEQ ID NO: 44864 - RNA, 22 nt, Artificial Sequence
  Synthetic
auaccagaaugucuagaggagc

SEQ ID NO: 44865 - RNA, 23 nt, Artificial Sequence
  Synthetic
uauaccagaaugucuagaggagc

SEQ ID NO: 44866 - RNA, 24 nt, Artificial Sequence
  Synthetic
auauaccagaaugucuagaggagc

SEQ ID NO: 44867 - RNA, 19 nt, Artificial Sequence
  Synthetic
aguuguuagccugaggagc

SEQ ID NO: 44868 - RNA, 21 nt, Artificial Sequence
  Synthetic
ugaguuguuagccugaggagc

SEQ ID NO: 44869 - RNA, 22 nt, Artificial Sequence
  Synthetic
augaguuguuagccugaggagc

SEQ ID NO: 44870 - RNA, 18 nt, Artificial Sequence
  Synthetic
ucaaaggggcaagggagc

SEQ ID NO: 44871 - RNA, 19 nt, Artificial Sequence
  Synthetic
uucaaaggggcaagggagc

SEQ ID NO: 44872 - RNA, 20 nt, Artificial Sequence
  Synthetic
uuucaaaggggcaagggagc

SEQ ID NO: 44873 - RNA, 21 nt, Artificial Sequence
  Synthetic
cuuucaaaggggcaagggagc

SEQ ID NO: 44874 - RNA, 22 nt, Artificial Sequence
  Synthetic
ucuuucaaaggggcaagggagc

SEQ ID NO: 44875 - RNA, 23 nt, Artificial Sequence
  Synthetic
uucuuucaaaggggcaagggagc

SEQ ID NO: 44876 - RNA, 24 nt, Artificial Sequence
  Synthetic
auucuuucaaaggggcaagggagc

SEQ ID NO: 44877 - RNA, 19 nt, Artificial Sequence
  Synthetic
agcaccaagcugagggagc

SEQ ID NO: 44878 - RNA, 20 nt, Artificial Sequence
  Synthetic
uagcaccaagcugagggagc

SEQ ID NO: 44879 - RNA, 21 nt, Artificial Sequence
  Synthetic
uuagcaccaagcugagggagc

SEQ ID NO: 44880 - RNA, 22 nt, Artificial Sequence
  Synthetic
uuuagcaccaagcugagggagc

SEQ ID NO: 44881 - RNA, 23 nt, Artificial Sequence
  Synthetic
auuuagcaccaagcugagggagc

SEQ ID NO: 44882 - RNA, 24 nt, Artificial Sequence
  Synthetic
uauuuagcaccaagcugagggagc

SEQ ID NO: 44883 - RNA, 21 nt, Artificial Sequence
  Synthetic
caucugaagcauuuggggagc

SEQ ID NO: 44884 - RNA, 22 nt, Artificial Sequence
  Synthetic
ccaucugaagcauuuggggagc

SEQ ID NO: 44885 - RNA, 23 nt, Artificial Sequence
  Synthetic
uccaucugaagcauuuggggagc

SEQ ID NO: 44886 - RNA, 24 nt, Artificial Sequence
  Synthetic
auccaucugaagcauuuggggagc

SEQ ID NO: 44887 - RNA, 19 nt, Artificial Sequence
  Synthetic
agauucucugguauggagc

SEQ ID NO: 44888 - RNA, 20 nt, Artificial Sequence
  Synthetic
uagauucucugguauggagc

SEQ ID NO: 44889 - RNA, 21 nt, Artificial Sequence
  Synthetic
uuagauucucugguauggagc

SEQ ID NO: 44890 - RNA, 22 nt, Artificial Sequence
  Synthetic
auuagauucucugguauggagc

SEQ ID NO: 44891 - RNA, 23 nt, Artificial Sequence
  Synthetic
aauuagauucucugguauggagc

SEQ ID NO: 44892 - RNA, 18 nt, Artificial Sequence
  Synthetic
ugacagggacacuggagc

SEQ ID NO: 44893 - RNA, 20 nt, Artificial Sequence
  Synthetic
ugugacagggacacuggagc

SEQ ID NO: 44894 - RNA, 21 nt, Artificial Sequence
  Synthetic
augugacagggacacuggagc

SEQ ID NO: 44895 - RNA, 22 nt, Artificial Sequence
  Synthetic
caugugacagggacacuggagc

SEQ ID NO: 44896 - RNA, 23 nt, Artificial Sequence
  Synthetic
ccaugugacagggacacuggagc

SEQ ID NO: 44897 - RNA, 24 nt, Artificial Sequence
  Synthetic
cccaugugacagggacacuggagc

SEQ ID NO: 44898 - RNA, 21 nt, Artificial Sequence
  Synthetic
augugaggccauggcuggagc

SEQ ID NO: 44899 - RNA, 22 nt, Artificial Sequence
  Synthetic
uaugugaggccauggcuggagc

SEQ ID NO: 44900 - RNA, 23 nt, Artificial Sequence
  Synthetic
cuaugugaggccauggcuggagc

SEQ ID NO: 44901 - RNA, 24 nt, Artificial Sequence
  Synthetic
ccuaugugaggccauggcuggagc

SEQ ID NO: 44902 - RNA, 18 nt, Artificial Sequence
  Synthetic
ugagacauaagguggagc

SEQ ID NO: 44903 - RNA, 19 nt, Artificial Sequence
  Synthetic
uugagacauaagguggagc

SEQ ID NO: 44904 - RNA, 20 nt, Artificial Sequence
  Synthetic
auugagacauaagguggagc

SEQ ID NO: 44905 - RNA, 21 nt, Artificial Sequence
  Synthetic
aauugagacauaagguggagc

SEQ ID NO: 44906 - RNA, 22 nt, Artificial Sequence
  Synthetic
aaauugagacauaagguggagc

SEQ ID NO: 44907 - RNA, 24 nt, Artificial Sequence
  Synthetic
ugaaauugagacauaagguggagc

SEQ ID NO: 44908 - RNA, 21 nt, Artificial Sequence
  Synthetic
uuuagcaaaugguaaaugagc

SEQ ID NO: 44909 - RNA, 22 nt, Artificial Sequence
  Synthetic
cuuuagcaaaugguaaaugagc

SEQ ID NO: 44910 - RNA, 24 nt, Artificial Sequence
  Synthetic
ugcuuuagcaaaugguaaaugagc

SEQ ID NO: 44911 - RNA, 18 nt, Artificial Sequence
  Synthetic
ucuuucucucuccugagc

SEQ ID NO: 44912 - RNA, 21 nt, Artificial Sequence
  Synthetic
aggucuuucucucuccugagc

SEQ ID NO: 44913 - RNA, 23 nt, Artificial Sequence
  Synthetic
ugaggucuuucucucuccugagc

SEQ ID NO: 44914 - RNA, 24 nt, Artificial Sequence
  Synthetic
uugaggucuuucucucuccugagc

SEQ ID NO: 44915 - RNA, 18 nt, Artificial Sequence
  Synthetic
cauauugugauggugagc

SEQ ID NO: 44916 - RNA, 19 nt, Artificial Sequence
  Synthetic
ucauauugugauggugagc

SEQ ID NO: 44917 - RNA, 20 nt, Artificial Sequence
  Synthetic
cucauauugugauggugagc

SEQ ID NO: 44918 - RNA, 21 nt, Artificial Sequence
  Synthetic
acucauauugugauggugagc

SEQ ID NO: 44919 - RNA, 22 nt, Artificial Sequence
  Synthetic
uacucauauugugauggugagc

SEQ ID NO: 44920 - RNA, 23 nt, Artificial Sequence
  Synthetic
auacucauauugugauggugagc

SEQ ID NO: 44921 - RNA, 24 nt, Artificial Sequence
  Synthetic
aauacucauauugugauggugagc

SEQ ID NO: 44922 - RNA, 18 nt, Artificial Sequence
  Synthetic
aggagcucgugauugagc

SEQ ID NO: 44923 - RNA, 19 nt, Artificial Sequence
  Synthetic
aaggagcucgugauugagc

SEQ ID NO: 44924 - RNA, 20 nt, Artificial Sequence
  Synthetic
uaaggagcucgugauugagc

SEQ ID NO: 44925 - RNA, 21 nt, Artificial Sequence
  Synthetic
uuaaggagcucgugauugagc

SEQ ID NO: 44926 - RNA, 22 nt, Artificial Sequence
  Synthetic
cuuaaggagcucgugauugagc

SEQ ID NO: 44927 - RNA, 23 nt, Artificial Sequence
  Synthetic
ccuuaaggagcucgugauugagc

SEQ ID NO: 44928 - RNA, 24 nt, Artificial Sequence
  Synthetic
accuuaaggagcucgugauugagc

SEQ ID NO: 44929 - RNA, 18 nt, Artificial Sequence
  Synthetic
auauuuggguuauugagc

SEQ ID NO: 44930 - RNA, 19 nt, Artificial Sequence
  Synthetic
aauauuuggguuauugagc

SEQ ID NO: 44931 - RNA, 20 nt, Artificial Sequence
  Synthetic
uaauauuuggguuauugagc

SEQ ID NO: 44932 - RNA, 21 nt, Artificial Sequence
  Synthetic
auaauauuuggguuauugagc

SEQ ID NO: 44933 - RNA, 22 nt, Artificial Sequence
  Synthetic
aauaauauuuggguuauugagc

SEQ ID NO: 44934 - RNA, 23 nt, Artificial Sequence
  Synthetic
aaauaauauuuggguuauugagc

SEQ ID NO: 44935 - RNA, 18 nt, Artificial Sequence
  Synthetic
cauuuaaaggccuugagc

SEQ ID NO: 44936 - RNA, 20 nt, Artificial Sequence
  Synthetic
ugcauuuaaaggccuugagc

SEQ ID NO: 44937 - RNA, 21 nt, Artificial Sequence
  Synthetic
cugcauuuaaaggccuugagc

SEQ ID NO: 44938 - RNA, 22 nt, Artificial Sequence
  Synthetic
ccugcauuuaaaggccuugagc

SEQ ID NO: 44939 - RNA, 23 nt, Artificial Sequence
  Synthetic
accugcauuuaaaggccuugagc

SEQ ID NO: 44940 - RNA, 24 nt, Artificial Sequence
  Synthetic
aaccugcauuuaaaggccuugagc

SEQ ID NO: 44941 - RNA, 21 nt, Artificial Sequence
  Synthetic
caucuuuuccugccuuugagc

SEQ ID NO: 44942 - RNA, 22 nt, Artificial Sequence
  Synthetic
ccaucuuuuccugccuuugagc

SEQ ID NO: 44943 - RNA, 23 nt, Artificial Sequence
  Synthetic
cccaucuuuuccugccuuugagc

SEQ ID NO: 44944 - RNA, 24 nt, Artificial Sequence
  Synthetic
acccaucuuuuccugccuuugagc

SEQ ID NO: 44945 - RNA, 18 nt, Artificial Sequence
  Synthetic
accuagccaacaaauagc

SEQ ID NO: 44946 - RNA, 20 nt, Artificial Sequence
  Synthetic
ugaccuagccaacaaauagc

SEQ ID NO: 44947 - RNA, 21 nt, Artificial Sequence
  Synthetic
uugaccuagccaacaaauagc

SEQ ID NO: 44948 - RNA, 22 nt, Artificial Sequence
  Synthetic
cuugaccuagccaacaaauagc

SEQ ID NO: 44949 - RNA, 23 nt, Artificial Sequence
  Synthetic
acuugaccuagccaacaaauagc

SEQ ID NO: 44950 - RNA, 18 nt, Artificial Sequence
  Synthetic
cguacuaggaagaauagc

SEQ ID NO: 44951 - RNA, 19 nt, Artificial Sequence
  Synthetic
ucguacuaggaagaauagc

SEQ ID NO: 44952 - RNA, 20 nt, Artificial Sequence
  Synthetic
uucguacuaggaagaauagc

SEQ ID NO: 44953 - RNA, 21 nt, Artificial Sequence
  Synthetic
auucguacuaggaagaauagc

SEQ ID NO: 44954 - RNA, 22 nt, Artificial Sequence
  Synthetic
aauucguacuaggaagaauagc

SEQ ID NO: 44955 - RNA, 23 nt, Artificial Sequence
  Synthetic
aaauucguacuaggaagaauagc

SEQ ID NO: 44956 - RNA, 24 nt, Artificial Sequence
  Synthetic
aaaauucguacuaggaagaauagc

SEQ ID NO: 44957 - RNA, 18 nt, Artificial Sequence
  Synthetic
cgcacccagccgcauagc

SEQ ID NO: 44958 - RNA, 19 nt, Artificial Sequence
  Synthetic
ccgcacccagccgcauagc

SEQ ID NO: 44959 - RNA, 20 nt, Artificial Sequence
  Synthetic
accgcacccagccgcauagc

SEQ ID NO: 44960 - RNA, 18 nt, Artificial Sequence
  Synthetic
cucuuuguuagucauagc

SEQ ID NO: 44961 - RNA, 19 nt, Artificial Sequence
  Synthetic
ucucuuuguuagucauagc

SEQ ID NO: 44962 - RNA, 21 nt, Artificial Sequence
  Synthetic
agucucuuuguuagucauagc

SEQ ID NO: 44963 - RNA, 22 nt, Artificial Sequence
  Synthetic
cagucucuuuguuagucauagc

SEQ ID NO: 44964 - RNA, 23 nt, Artificial Sequence
  Synthetic
ccagucucuuuguuagucauagc

SEQ ID NO: 44965 - RNA, 18 nt, Artificial Sequence
  Synthetic
uugacacggagagauagc

SEQ ID NO: 44966 - RNA, 19 nt, Artificial Sequence
  Synthetic
cuugacacggagagauagc

SEQ ID NO: 44967 - RNA, 20 nt, Artificial Sequence
  Synthetic
ucuugacacggagagauagc

SEQ ID NO: 44968 - RNA, 21 nt, Artificial Sequence
  Synthetic
aucuugacacggagagauagc

SEQ ID NO: 44969 - RNA, 22 nt, Artificial Sequence
  Synthetic
aaucuugacacggagagauagc

SEQ ID NO: 44970 - RNA, 23 nt, Artificial Sequence
  Synthetic
aaaucuugacacggagagauagc

SEQ ID NO: 44971 - RNA, 24 nt, Artificial Sequence
  Synthetic
aaaaucuugacacggagagauagc

SEQ ID NO: 44972 - RNA, 19 nt, Artificial Sequence
  Synthetic
agagucucccuggacuagc

SEQ ID NO: 44973 - RNA, 20 nt, Artificial Sequence
  Synthetic
cagagucucccuggacuagc

SEQ ID NO: 44974 - RNA, 22 nt, Artificial Sequence
  Synthetic
ugcagagucucccuggacuagc

SEQ ID NO: 44975 - RNA, 23 nt, Artificial Sequence
  Synthetic
uugcagagucucccuggacuagc

SEQ ID NO: 44976 - RNA, 24 nt, Artificial Sequence
  Synthetic
uuugcagagucucccuggacuagc

SEQ ID NO: 44977 - RNA, 18 nt, Artificial Sequence
  Synthetic
aagaauuccaguacuagc

SEQ ID NO: 44978 - RNA, 19 nt, Artificial Sequence
  Synthetic
aaagaauuccaguacuagc

SEQ ID NO: 44979 - RNA, 20 nt, Artificial Sequence
  Synthetic
aaaagaauuccaguacuagc

SEQ ID NO: 44980 - RNA, 21 nt, Artificial Sequence
  Synthetic
aaaaagaauuccaguacuagc

SEQ ID NO: 44981 - RNA, 22 nt, Artificial Sequence
  Synthetic
caaaaagaauuccaguacuagc

SEQ ID NO: 44982 - RNA, 22 nt, Artificial Sequence
  Synthetic
aguuacaacaccagaugcuagc

SEQ ID NO: 44983 - RNA, 23 nt, Artificial Sequence
  Synthetic
uaguuacaacaccagaugcuagc

SEQ ID NO: 44984 - RNA, 19 nt, Artificial Sequence
  Synthetic
agaugcguuuauugcuagc

SEQ ID NO: 44985 - RNA, 20 nt, Artificial Sequence
  Synthetic
uagaugcguuuauugcuagc

SEQ ID NO: 44986 - RNA, 21 nt, Artificial Sequence
  Synthetic
auagaugcguuuauugcuagc

SEQ ID NO: 44987 - RNA, 22 nt, Artificial Sequence
  Synthetic
cauagaugcguuuauugcuagc

SEQ ID NO: 44988 - RNA, 23 nt, Artificial Sequence
  Synthetic
acauagaugcguuuauugcuagc

SEQ ID NO: 44989 - RNA, 24 nt, Artificial Sequence
  Synthetic
aacauagaugcguuuauugcuagc

SEQ ID NO: 44990 - RNA, 18 nt, Artificial Sequence
  Synthetic
acauaacaaucaucuagc

SEQ ID NO: 44991 - RNA, 19 nt, Artificial Sequence
  Synthetic
uacauaacaaucaucuagc

SEQ ID NO: 44992 - RNA, 20 nt, Artificial Sequence
  Synthetic
auacauaacaaucaucuagc

SEQ ID NO: 44993 - RNA, 21 nt, Artificial Sequence
  Synthetic
aauacauaacaaucaucuagc

SEQ ID NO: 44994 - RNA, 22 nt, Artificial Sequence
  Synthetic
aaauacauaacaaucaucuagc

SEQ ID NO: 44995 - RNA, 23 nt, Artificial Sequence
  Synthetic
aaaauacauaacaaucaucuagc

SEQ ID NO: 44996 - RNA, 24 nt, Artificial Sequence
  Synthetic
aaaaauacauaacaaucaucuagc

SEQ ID NO: 44997 - RNA, 19 nt, Artificial Sequence
  Synthetic
aguuugugugggcucuagc

SEQ ID NO: 44998 - RNA, 20 nt, Artificial Sequence
  Synthetic
caguuugugugggcucuagc

SEQ ID NO: 44999 - RNA, 22 nt, Artificial Sequence
  Synthetic
ugcaguuugugugggcucuagc

SEQ ID NO: 45000 - RNA, 23 nt, Artificial Sequence
  Synthetic
uugcaguuugugugggcucuagc

SEQ ID NO: 45001 - RNA, 24 nt, Artificial Sequence
  Synthetic
auugcaguuugugugggcucuagc

SEQ ID NO: 45002 - RNA, 18 nt, Artificial Sequence
  Synthetic
ucuucacauguuucuagc

SEQ ID NO: 45003 - RNA, 21 nt, Artificial Sequence
  Synthetic
uggucuucacauguuucuagc

SEQ ID NO: 45004 - RNA, 22 nt, Artificial Sequence
  Synthetic
uuggucuucacauguuucuagc

SEQ ID NO: 45005 - RNA, 23 nt, Artificial Sequence
  Synthetic
uuuggucuucacauguuucuagc

SEQ ID NO: 45006 - RNA, 24 nt, Artificial Sequence
  Synthetic
uuuuggucuucacauguuucuagc

SEQ ID NO: 45007 - RNA, 18 nt, Artificial Sequence
  Synthetic
aaguccuaagacaguagc

SEQ ID NO: 45008 - RNA, 19 nt, Artificial Sequence
  Synthetic
caaguccuaagacaguagc

SEQ ID NO: 45009 - RNA, 20 nt, Artificial Sequence
  Synthetic
acaaguccuaagacaguagc

SEQ ID NO: 45010 - RNA, 21 nt, Artificial Sequence
  Synthetic
cacaaguccuaagacaguagc

SEQ ID NO: 45011 - RNA, 22 nt, Artificial Sequence
  Synthetic
ucacaaguccuaagacaguagc

SEQ ID NO: 45012 - RNA, 23 nt, Artificial Sequence
  Synthetic
uucacaaguccuaagacaguagc

SEQ ID NO: 45013 - RNA, 24 nt, Artificial Sequence
  Synthetic
auucacaaguccuaagacaguagc

SEQ ID NO: 45014 - RNA, 18 nt, Artificial Sequence
  Synthetic
aaacaucugaagauuagc

SEQ ID NO: 45015 - RNA, 21 nt, Artificial Sequence
  Synthetic
uggaaacaucugaagauuagc

SEQ ID NO: 45016 - RNA, 22 nt, Artificial Sequence
  Synthetic
uuggaaacaucugaagauuagc

SEQ ID NO: 45017 - RNA, 23 nt, Artificial Sequence
  Synthetic
cuuggaaacaucugaagauuagc

SEQ ID NO: 45018 - RNA, 24 nt, Artificial Sequence
  Synthetic
ccuuggaaacaucugaagauuagc

SEQ ID NO: 45019 - RNA, 18 nt, Artificial Sequence
  Synthetic
augacuuacagacuuagc

SEQ ID NO: 45020 - RNA, 19 nt, Artificial Sequence
  Synthetic
caugacuuacagacuuagc

SEQ ID NO: 45021 - RNA, 20 nt, Artificial Sequence
  Synthetic
acaugacuuacagacuuagc

SEQ ID NO: 45022 - RNA, 21 nt, Artificial Sequence
  Synthetic
uacaugacuuacagacuuagc

SEQ ID NO: 45023 - RNA, 22 nt, Artificial Sequence
  Synthetic
auacaugacuuacagacuuagc

SEQ ID NO: 45024 - RNA, 23 nt, Artificial Sequence
  Synthetic
aauacaugacuuacagacuuagc

SEQ ID NO: 45025 - RNA, 18 nt, Artificial Sequence
  Synthetic
aucagcacaugucuuagc

SEQ ID NO: 45026 - RNA, 19 nt, Artificial Sequence
  Synthetic
uaucagcacaugucuuagc

SEQ ID NO: 45027 - RNA, 20 nt, Artificial Sequence
  Synthetic
uuaucagcacaugucuuagc

SEQ ID NO: 45028 - RNA, 23 nt, Artificial Sequence
  Synthetic
agguuaucagcacaugucuuagc

SEQ ID NO: 45029 - RNA, 24 nt, Artificial Sequence
  Synthetic
uagguuaucagcacaugucuuagc

SEQ ID NO: 45030 - RNA, 21 nt, Artificial Sequence
  Synthetic
cuuuaaauuuaaaaaguuagc

SEQ ID NO: 45031 - RNA, 23 nt, Artificial Sequence
  Synthetic
ugcuuuaaauuuaaaaaguuagc

SEQ ID NO: 45032 - RNA, 21 nt, Artificial Sequence
  Synthetic
aaaauuuuaaauaugguuagc

SEQ ID NO: 45033 - RNA, 22 nt, Artificial Sequence
  Synthetic
uaaaauuuuaaauaugguuagc

SEQ ID NO: 45034 - RNA, 23 nt, Artificial Sequence
  Synthetic
auaaaauuuuaaauaugguuagc

SEQ ID NO: 45035 - RNA, 24 nt, Artificial Sequence
  Synthetic
uauaaaauuuuaaauaugguuagc

SEQ ID NO: 45036 - RNA, 18 nt, Artificial Sequence
  Synthetic
ucagaaaugcucuuuagc

SEQ ID NO: 45037 - RNA, 19 nt, Artificial Sequence
  Synthetic
uucagaaaugcucuuuagc

SEQ ID NO: 45038 - RNA, 20 nt, Artificial Sequence
  Synthetic
auucagaaaugcucuuuagc

SEQ ID NO: 45039 - RNA, 21 nt, Artificial Sequence
  Synthetic
cauucagaaaugcucuuuagc

SEQ ID NO: 45040 - RNA, 22 nt, Artificial Sequence
  Synthetic
ucauucagaaaugcucuuuagc

SEQ ID NO: 45041 - RNA, 23 nt, Artificial Sequence
  Synthetic
aucauucagaaaugcucuuuagc

SEQ ID NO: 45042 - RNA, 24 nt, Artificial Sequence
  Synthetic
caucauucagaaaugcucuuuagc

SEQ ID NO: 45043 - RNA, 19 nt, Artificial Sequence
  Synthetic
agggaagcaguauuuuagc

SEQ ID NO: 45044 - RNA, 20 nt, Artificial Sequence
  Synthetic
aagggaagcaguauuuuagc

SEQ ID NO: 45045 - RNA, 21 nt, Artificial Sequence
  Synthetic
aaagggaagcaguauuuuagc

SEQ ID NO: 45046 - RNA, 22 nt, Artificial Sequence
  Synthetic
aaaagggaagcaguauuuuagc

SEQ ID NO: 45047 - RNA, 23 nt, Artificial Sequence
  Synthetic
aaaaagggaagcaguauuuuagc

SEQ ID NO: 45048 - RNA, 18 nt, Artificial Sequence
  Synthetic
uaugauacauuauaacgc

SEQ ID NO: 45049 - RNA, 19 nt, Artificial Sequence
  Synthetic
auaugauacauuauaacgc

SEQ ID NO: 45050 - RNA, 20 nt, Artificial Sequence
  Synthetic
aauaugauacauuauaacgc

SEQ ID NO: 45051 - RNA, 21 nt, Artificial Sequence
  Synthetic
uaauaugauacauuauaacgc

SEQ ID NO: 45052 - RNA, 22 nt, Artificial Sequence
  Synthetic
auaauaugauacauuauaacgc

SEQ ID NO: 45053 - RNA, 24 nt, Artificial Sequence
  Synthetic
ugauaauaugauacauuauaacgc

SEQ ID NO: 45054 - RNA, 19 nt, Artificial Sequence
  Synthetic
ugccacuaagcgaucacgc

SEQ ID NO: 45055 - RNA, 20 nt, Artificial Sequence
  Synthetic
uugccacuaagcgaucacgc

SEQ ID NO: 45056 - RNA, 21 nt, Artificial Sequence
  Synthetic
uuugccacuaagcgaucacgc

SEQ ID NO: 45057 - RNA, 22 nt, Artificial Sequence
  Synthetic
auuugccacuaagcgaucacgc

SEQ ID NO: 45058 - RNA, 23 nt, Artificial Sequence
  Synthetic
cauuugccacuaagcgaucacgc

SEQ ID NO: 45059 - RNA, 24 nt, Artificial Sequence
  Synthetic
ccauuugccacuaagcgaucacgc

SEQ ID NO: 45060 - RNA, 18 nt, Artificial Sequence
  Synthetic
auaauacuagagauacgc

SEQ ID NO: 45061 - RNA, 19 nt, Artificial Sequence
  Synthetic
aauaauacuagagauacgc

SEQ ID NO: 45062 - RNA, 20 nt, Artificial Sequence
  Synthetic
aaauaauacuagagauacgc

SEQ ID NO: 45063 - RNA, 22 nt, Artificial Sequence
  Synthetic
agaaauaauacuagagauacgc

SEQ ID NO: 45064 - RNA, 23 nt, Artificial Sequence
  Synthetic
aagaaauaauacuagagauacgc

SEQ ID NO: 45065 - RNA, 24 nt, Artificial Sequence
  Synthetic
aaagaaauaauacuagagauacgc

SEQ ID NO: 45066 - RNA, 18 nt, Artificial Sequence
  Synthetic
aauuuccuuuugacccgc

SEQ ID NO: 45067 - RNA, 19 nt, Artificial Sequence
  Synthetic
uaauuuccuuuugacccgc

SEQ ID NO: 45068 - RNA, 20 nt, Artificial Sequence
  Synthetic
uuaauuuccuuuugacccgc

SEQ ID NO: 45069 - RNA, 21 nt, Artificial Sequence
  Synthetic
auuaauuuccuuuugacccgc

SEQ ID NO: 45070 - RNA, 22 nt, Artificial Sequence
  Synthetic
cauuaauuuccuuuugacccgc

SEQ ID NO: 45071 - RNA, 23 nt, Artificial Sequence
  Synthetic
ucauuaauuuccuuuugacccgc

SEQ ID NO: 45072 - RNA, 24 nt, Artificial Sequence
  Synthetic
cucauuaauuuccuuuugacccgc

SEQ ID NO: 45073 - RNA, 18 nt, Artificial Sequence
  Synthetic
uugccuccaaucugccgc

SEQ ID NO: 45074 - RNA, 19 nt, Artificial Sequence
  Synthetic
cuugccuccaaucugccgc

SEQ ID NO: 45075 - RNA, 20 nt, Artificial Sequence
  Synthetic
ucuugccuccaaucugccgc

SEQ ID NO: 45076 - RNA, 21 nt, Artificial Sequence
  Synthetic
aucuugccuccaaucugccgc

SEQ ID NO: 45077 - RNA, 22 nt, Artificial Sequence
  Synthetic
aaucuugccuccaaucugccgc

SEQ ID NO: 45078 - RNA, 23 nt, Artificial Sequence
  Synthetic
aaaucuugccuccaaucugccgc

SEQ ID NO: 45079 - RNA, 24 nt, Artificial Sequence
  Synthetic
aaaaucuugccuccaaucugccgc

SEQ ID NO: 45080 - RNA, 18 nt, Artificial Sequence
  Synthetic
ucugcccaugacuggcgc

SEQ ID NO: 45081 - RNA, 19 nt, Artificial Sequence
  Synthetic
aucugcccaugacuggcgc

SEQ ID NO: 45082 - RNA, 20 nt, Artificial Sequence
  Synthetic
uaucugcccaugacuggcgc

SEQ ID NO: 45083 - RNA, 21 nt, Artificial Sequence
  Synthetic
uuaucugcccaugacuggcgc

SEQ ID NO: 45084 - RNA, 22 nt, Artificial Sequence
  Synthetic
auuaucugcccaugacuggcgc

SEQ ID NO: 45085 - RNA, 24 nt, Artificial Sequence
  Synthetic
agauuaucugcccaugacuggcgc

SEQ ID NO: 45086 - RNA, 18 nt, Artificial Sequence
  Synthetic
ccuuuuuccaccuggcgc

SEQ ID NO: 45087 - RNA, 19 nt, Artificial Sequence
  Synthetic
cccuuuuuccaccuggcgc

SEQ ID NO: 45088 - RNA, 21 nt, Artificial Sequence
  Synthetic
ugcccuuuuuccaccuggcgc

SEQ ID NO: 45089 - RNA, 22 nt, Artificial Sequence
  Synthetic
augcccuuuuuccaccuggcgc

SEQ ID NO: 45090 - RNA, 23 nt, Artificial Sequence
  Synthetic
aaugcccuuuuuccaccuggcgc

SEQ ID NO: 45091 - RNA, 24 nt, Artificial Sequence
  Synthetic
aaaugcccuuuuuccaccuggcgc

SEQ ID NO: 45092 - RNA, 18 nt, Artificial Sequence
  Synthetic
ucaccaaaauuuuggcgc

SEQ ID NO: 45093 - RNA, 19 nt, Artificial Sequence
  Synthetic
cucaccaaaauuuuggcgc

SEQ ID NO: 45094 - RNA, 20 nt, Artificial Sequence
  Synthetic
ucucaccaaaauuuuggcgc

SEQ ID NO: 45095 - RNA, 21 nt, Artificial Sequence
  Synthetic
uucucaccaaaauuuuggcgc

SEQ ID NO: 45096 - RNA, 22 nt, Artificial Sequence
  Synthetic
uuucucaccaaaauuuuggcgc

SEQ ID NO: 45097 - RNA, 24 nt, Artificial Sequence
  Synthetic
aguuucucaccaaaauuuuggcgc

SEQ ID NO: 45098 - RNA, 18 nt, Artificial Sequence
  Synthetic
ugcaugggcacuucucgc

SEQ ID NO: 45099 - RNA, 20 nt, Artificial Sequence
  Synthetic
agugcaugggcacuucucgc

SEQ ID NO: 45100 - RNA, 21 nt, Artificial Sequence
  Synthetic
cagugcaugggcacuucucgc

SEQ ID NO: 45101 - RNA, 22 nt, Artificial Sequence
  Synthetic
ucagugcaugggcacuucucgc

SEQ ID NO: 45102 - RNA, 23 nt, Artificial Sequence
  Synthetic
aucagugcaugggcacuucucgc

SEQ ID NO: 45103 - RNA, 24 nt, Artificial Sequence
  Synthetic
uaucagugcaugggcacuucucgc

SEQ ID NO: 45104 - RNA, 18 nt, Artificial Sequence
  Synthetic
uucguuucacuuuuucgc

SEQ ID NO: 45105 - RNA, 19 nt, Artificial Sequence
  Synthetic
uuucguuucacuuuuucgc

SEQ ID NO: 45106 - RNA, 20 nt, Artificial Sequence
  Synthetic
auuucguuucacuuuuucgc

SEQ ID NO: 45107 - RNA, 22 nt, Artificial Sequence
  Synthetic
agauuucguuucacuuuuucgc

SEQ ID NO: 45108 - RNA, 19 nt, Artificial Sequence
  Synthetic
uguugacaaaugaaaaggc

SEQ ID NO: 45109 - RNA, 20 nt, Artificial Sequence
  Synthetic
cuguugacaaaugaaaaggc

SEQ ID NO: 45110 - RNA, 22 nt, Artificial Sequence
  Synthetic
ugcuguugacaaaugaaaaggc

SEQ ID NO: 45111 - RNA, 23 nt, Artificial Sequence
  Synthetic
augcuguugacaaaugaaaaggc

SEQ ID NO: 45112 - RNA, 22 nt, Artificial Sequence
  Synthetic
ugagaagggacuacacaaaggc

SEQ ID NO: 45113 - RNA, 23 nt, Artificial Sequence
  Synthetic
augagaagggacuacacaaaggc

SEQ ID NO: 45114 - RNA, 24 nt, Artificial Sequence
  Synthetic
aaugagaagggacuacacaaaggc

SEQ ID NO: 45115 - RNA, 18 nt, Artificial Sequence
  Synthetic
auguaauuaauuaaaggc

SEQ ID NO: 45116 - RNA, 19 nt, Artificial Sequence
  Synthetic
cauguaauuaauuaaaggc

SEQ ID NO: 45117 - RNA, 20 nt, Artificial Sequence
  Synthetic
ucauguaauuaauuaaaggc

SEQ ID NO: 45118 - RNA, 21 nt, Artificial Sequence
  Synthetic
uucauguaauuaauuaaaggc

SEQ ID NO: 45119 - RNA, 22 nt, Artificial Sequence
  Synthetic
cuucauguaauuaauuaaaggc

SEQ ID NO: 45120 - RNA, 23 nt, Artificial Sequence
  Synthetic
acuucauguaauuaauuaaaggc

SEQ ID NO: 45121 - RNA, 18 nt, Artificial Sequence
  Synthetic
aggcacuuaagggaaggc

SEQ ID NO: 45122 - RNA, 19 nt, Artificial Sequence
  Synthetic
caggcacuuaagggaaggc

SEQ ID NO: 45123 - RNA, 21 nt, Artificial Sequence
  Synthetic
agcaggcacuuaagggaaggc

SEQ ID NO: 45124 - RNA, 22 nt, Artificial Sequence
  Synthetic
aagcaggcacuuaagggaaggc

SEQ ID NO: 45125 - RNA, 23 nt, Artificial Sequence
  Synthetic
caagcaggcacuuaagggaaggc

SEQ ID NO: 45126 - RNA, 24 nt, Artificial Sequence
  Synthetic
ucaagcaggcacuuaagggaaggc

SEQ ID NO: 45127 - RNA, 19 nt, Artificial Sequence
  Synthetic
ugaaugcaguaaugaaggc

SEQ ID NO: 45128 - RNA, 21 nt, Artificial Sequence
  Synthetic
agugaaugcaguaaugaaggc

SEQ ID NO: 45129 - RNA, 22 nt, Artificial Sequence
  Synthetic
cagugaaugcaguaaugaaggc

SEQ ID NO: 45130 - RNA, 23 nt, Artificial Sequence
  Synthetic
acagugaaugcaguaaugaaggc

SEQ ID NO: 45131 - RNA, 24 nt, Artificial Sequence
  Synthetic
uacagugaaugcaguaaugaaggc

SEQ ID NO: 45132 - RNA, 22 nt, Artificial Sequence
  Synthetic
ugacaggugaauucaugaaggc

SEQ ID NO: 45133 - RNA, 23 nt, Artificial Sequence
  Synthetic
uugacaggugaauucaugaaggc

SEQ ID NO: 45134 - RNA, 24 nt, Artificial Sequence
  Synthetic
uuugacaggugaauucaugaaggc

SEQ ID NO: 45135 - RNA, 18 nt, Artificial Sequence
  Synthetic
ucaauacacucaacaggc

SEQ ID NO: 45136 - RNA, 19 nt, Artificial Sequence
  Synthetic
cucaauacacucaacaggc

SEQ ID NO: 45137 - RNA, 20 nt, Artificial Sequence
  Synthetic
ucucaauacacucaacaggc

SEQ ID NO: 45138 - RNA, 21 nt, Artificial Sequence
  Synthetic
aucucaauacacucaacaggc

SEQ ID NO: 45139 - RNA, 22 nt, Artificial Sequence
  Synthetic
aaucucaauacacucaacaggc

SEQ ID NO: 45140 - RNA, 23 nt, Artificial Sequence
  Synthetic
aaaucucaauacacucaacaggc

SEQ ID NO: 45141 - RNA, 24 nt, Artificial Sequence
  Synthetic
caaaucucaauacacucaacaggc

SEQ ID NO: 45142 - RNA, 21 nt, Artificial Sequence
  Synthetic
cucuguggaaacauaacaggc

SEQ ID NO: 45143 - RNA, 22 nt, Artificial Sequence
  Synthetic
ucucuguggaaacauaacaggc

SEQ ID NO: 45144 - RNA, 23 nt, Artificial Sequence
  Synthetic
uucucuguggaaacauaacaggc

SEQ ID NO: 45145 - RNA, 20 nt, Artificial Sequence
  Synthetic
uggccaaugacuucacaggc

SEQ ID NO: 45146 - RNA, 21 nt, Artificial Sequence
  Synthetic
cuggccaaugacuucacaggc

SEQ ID NO: 45147 - RNA, 22 nt, Artificial Sequence
  Synthetic
acuggccaaugacuucacaggc

SEQ ID NO: 45148 - RNA, 23 nt, Artificial Sequence
  Synthetic
uacuggccaaugacuucacaggc

SEQ ID NO: 45149 - RNA, 24 nt, Artificial Sequence
  Synthetic
auacuggccaaugacuucacaggc

SEQ ID NO: 45150 - RNA, 18 nt, Artificial Sequence
  Synthetic
cacaccuaugugccaggc

SEQ ID NO: 45151 - RNA, 21 nt, Artificial Sequence
  Synthetic
aggcacaccuaugugccaggc

SEQ ID NO: 45152 - RNA, 22 nt, Artificial Sequence
  Synthetic
uaggcacaccuaugugccaggc

SEQ ID NO: 45153 - RNA, 23 nt, Artificial Sequence
  Synthetic
uuaggcacaccuaugugccaggc

SEQ ID NO: 45154 - RNA, 24 nt, Artificial Sequence
  Synthetic
uuuaggcacaccuaugugccaggc

SEQ ID NO: 45155 - RNA, 18 nt, Artificial Sequence
  Synthetic
ccaaggcagauggcaggc

SEQ ID NO: 45156 - RNA, 19 nt, Artificial Sequence
  Synthetic
accaaggcagauggcaggc

SEQ ID NO: 45157 - RNA, 20 nt, Artificial Sequence
  Synthetic
uaccaaggcagauggcaggc

SEQ ID NO: 45158 - RNA, 21 nt, Artificial Sequence
  Synthetic
uuaccaaggcagauggcaggc

SEQ ID NO: 45159 - RNA, 22 nt, Artificial Sequence
  Synthetic
uuuaccaaggcagauggcaggc

SEQ ID NO: 45160 - RNA, 23 nt, Artificial Sequence
  Synthetic
auuuaccaaggcagauggcaggc

SEQ ID NO: 45161 - RNA, 24 nt, Artificial Sequence
  Synthetic
uauuuaccaaggcagauggcaggc

SEQ ID NO: 45162 - RNA, 18 nt, Artificial Sequence
  Synthetic
cgaacuccuuuggcaggc

SEQ ID NO: 45163 - RNA, 19 nt, Artificial Sequence
  Synthetic
acgaacuccuuuggcaggc

SEQ ID NO: 45164 - RNA, 20 nt, Artificial Sequence
  Synthetic
uacgaacuccuuuggcaggc

SEQ ID NO: 45165 - RNA, 22 nt, Artificial Sequence
  Synthetic
uguacgaacuccuuuggcaggc

SEQ ID NO: 45166 - RNA, 23 nt, Artificial Sequence
  Synthetic
uuguacgaacuccuuuggcaggc

SEQ ID NO: 45167 - RNA, 24 nt, Artificial Sequence
  Synthetic
uuuguacgaacuccuuuggcaggc

SEQ ID NO: 45168 - RNA, 18 nt, Artificial Sequence
  Synthetic
ucaguuaauguugcaggc

SEQ ID NO: 45169 - RNA, 19 nt, Artificial Sequence
  Synthetic
cucaguuaauguugcaggc

SEQ ID NO: 45170 - RNA, 20 nt, Artificial Sequence
  Synthetic
ucucaguuaauguugcaggc

SEQ ID NO: 45171 - RNA, 21 nt, Artificial Sequence
  Synthetic
uucucaguuaauguugcaggc

SEQ ID NO: 45172 - RNA, 22 nt, Artificial Sequence
  Synthetic
uuucucaguuaauguugcaggc

SEQ ID NO: 45173 - RNA, 19 nt, Artificial Sequence
  Synthetic
aggaaaaaacacaucaggc

SEQ ID NO: 45174 - RNA, 20 nt, Artificial Sequence
  Synthetic
aaggaaaaaacacaucaggc

SEQ ID NO: 45175 - RNA, 21 nt, Artificial Sequence
  Synthetic
aaaggaaaaaacacaucaggc

SEQ ID NO: 45176 - RNA, 22 nt, Artificial Sequence
  Synthetic
aaaaggaaaaaacacaucaggc

SEQ ID NO: 45177 - RNA, 23 nt, Artificial Sequence
  Synthetic
uaaaaggaaaaaacacaucaggc

SEQ ID NO: 45178 - RNA, 24 nt, Artificial Sequence
  Synthetic
auaaaaggaaaaaacacaucaggc

SEQ ID NO: 45179 - RNA, 18 nt, Artificial Sequence
  Synthetic
auuuuacagggaucaggc

SEQ ID NO: 45180 - RNA, 19 nt, Artificial Sequence
  Synthetic
aauuuuacagggaucaggc

SEQ ID NO: 45181 - RNA, 21 nt, Artificial Sequence
  Synthetic
ugaauuuuacagggaucaggc

SEQ ID NO: 45182 - RNA, 22 nt, Artificial Sequence
  Synthetic
cugaauuuuacagggaucaggc

SEQ ID NO: 45183 - RNA, 23 nt, Artificial Sequence
  Synthetic
ucugaauuuuacagggaucaggc

SEQ ID NO: 45184 - RNA, 24 nt, Artificial Sequence
  Synthetic
uucugaauuuuacagggaucaggc

SEQ ID NO: 45185 - RNA, 18 nt, Artificial Sequence
  Synthetic
agagaauuuucaagaggc

SEQ ID NO: 45186 - RNA, 19 nt, Artificial Sequence
  Synthetic
uagagaauuuucaagaggc

SEQ ID NO: 45187 - RNA, 20 nt, Artificial Sequence
  Synthetic
cuagagaauuuucaagaggc

SEQ ID NO: 45188 - RNA, 21 nt, Artificial Sequence
  Synthetic
ccuagagaauuuucaagaggc

SEQ ID NO: 45189 - RNA, 18 nt, Artificial Sequence
  Synthetic
auugcauuagagagaggc

SEQ ID NO: 45190 - RNA, 19 nt, Artificial Sequence
  Synthetic
cauugcauuagagagaggc

SEQ ID NO: 45191 - RNA, 20 nt, Artificial Sequence
  Synthetic
acauugcauuagagagaggc

SEQ ID NO: 45192 - RNA, 22 nt, Artificial Sequence
  Synthetic
ugacauugcauuagagagaggc

SEQ ID NO: 45193 - RNA, 23 nt, Artificial Sequence
  Synthetic
cugacauugcauuagagagaggc

SEQ ID NO: 45194 - RNA, 24 nt, Artificial Sequence
  Synthetic
ucugacauugcauuagagagaggc

SEQ ID NO: 45195 - RNA, 18 nt, Artificial Sequence
  Synthetic
auugagcuggagagaggc

SEQ ID NO: 45196 - RNA, 19 nt, Artificial Sequence
  Synthetic
aauugagcuggagagaggc

SEQ ID NO: 45197 - RNA, 20 nt, Artificial Sequence
  Synthetic
aaauugagcuggagagaggc

SEQ ID NO: 45198 - RNA, 21 nt, Artificial Sequence
  Synthetic
uaaauugagcuggagagaggc

SEQ ID NO: 45199 - RNA, 22 nt, Artificial Sequence
  Synthetic
cuaaauugagcuggagagaggc

SEQ ID NO: 45200 - RNA, 23 nt, Artificial Sequence
  Synthetic
ccuaaauugagcuggagagaggc

SEQ ID NO: 45201 - RNA, 24 nt, Artificial Sequence
  Synthetic
uccuaaauugagcuggagagaggc

SEQ ID NO: 45202 - RNA, 21 nt, Artificial Sequence
  Synthetic
cggauguaagguccaugaggc

SEQ ID NO: 45203 - RNA, 22 nt, Artificial Sequence
  Synthetic
ucggauguaagguccaugaggc

SEQ ID NO: 45204 - RNA, 23 nt, Artificial Sequence
  Synthetic
aucggauguaagguccaugaggc

SEQ ID NO: 45205 - RNA, 24 nt, Artificial Sequence
  Synthetic
aaucggauguaagguccaugaggc

SEQ ID NO: 45206 - RNA, 18 nt, Artificial Sequence
  Synthetic
uuuugacugaaaauaggc

SEQ ID NO: 45207 - RNA, 19 nt, Artificial Sequence
  Synthetic
auuuugacugaaaauaggc

SEQ ID NO: 45208 - RNA, 20 nt, Artificial Sequence
  Synthetic
aauuuugacugaaaauaggc

SEQ ID NO: 45209 - RNA, 21 nt, Artificial Sequence
  Synthetic
caauuuugacugaaaauaggc

SEQ ID NO: 45210 - RNA, 22 nt, Artificial Sequence
  Synthetic
ccaauuuugacugaaaauaggc

SEQ ID NO: 45211 - RNA, 23 nt, Artificial Sequence
  Synthetic
cccaauuuugacugaaaauaggc

SEQ ID NO: 45212 - RNA, 24 nt, Artificial Sequence
  Synthetic
ucccaauuuugacugaaaauaggc

SEQ ID NO: 45213 - RNA, 19 nt, Artificial Sequence
  Synthetic
aguggugguuaagauaggc

SEQ ID NO: 45214 - RNA, 23 nt, Artificial Sequence
  Synthetic
agggaguggugguuaagauaggc

SEQ ID NO: 45215 - RNA, 24 nt, Artificial Sequence
  Synthetic
aagggaguggugguuaagauaggc

SEQ ID NO: 45216 - RNA, 19 nt, Artificial Sequence
  Synthetic
uguaugcuagguacuaggc

SEQ ID NO: 45217 - RNA, 20 nt, Artificial Sequence
  Synthetic
cuguaugcuagguacuaggc

SEQ ID NO: 45218 - RNA, 21 nt, Artificial Sequence
  Synthetic
acuguaugcuagguacuaggc

SEQ ID NO: 45219 - RNA, 22 nt, Artificial Sequence
  Synthetic
uacuguaugcuagguacuaggc

SEQ ID NO: 45220 - RNA, 23 nt, Artificial Sequence
  Synthetic
auacuguaugcuagguacuaggc

SEQ ID NO: 45221 - RNA, 24 nt, Artificial Sequence
  Synthetic
cauacuguaugcuagguacuaggc

SEQ ID NO: 45222 - RNA, 18 nt, Artificial Sequence
  Synthetic
augagaauucuccuaggc

SEQ ID NO: 45223 - RNA, 19 nt, Artificial Sequence
  Synthetic
aaugagaauucuccuaggc

SEQ ID NO: 45224 - RNA, 21 nt, Artificial Sequence
  Synthetic
ugaaugagaauucuccuaggc

SEQ ID NO: 45225 - RNA, 22 nt, Artificial Sequence
  Synthetic
augaaugagaauucuccuaggc

SEQ ID NO: 45226 - RNA, 23 nt, Artificial Sequence
  Synthetic
aaugaaugagaauucuccuaggc

SEQ ID NO: 45227 - RNA, 18 nt, Artificial Sequence
  Synthetic
aggaacaguauucuaggc

SEQ ID NO: 45228 - RNA, 19 nt, Artificial Sequence
  Synthetic
aaggaacaguauucuaggc

SEQ ID NO: 45229 - RNA, 20 nt, Artificial Sequence
  Synthetic
aaaggaacaguauucuaggc

SEQ ID NO: 45230 - RNA, 21 nt, Artificial Sequence
  Synthetic
aaaaggaacaguauucuaggc

SEQ ID NO: 45231 - RNA, 22 nt, Artificial Sequence
  Synthetic
caaaaggaacaguauucuaggc

SEQ ID NO: 45232 - RNA, 23 nt, Artificial Sequence
  Synthetic
ucaaaaggaacaguauucuaggc

SEQ ID NO: 45233 - RNA, 24 nt, Artificial Sequence
  Synthetic
aucaaaaggaacaguauucuaggc

SEQ ID NO: 45234 - RNA, 19 nt, Artificial Sequence
  Synthetic
aggcacgcacucuguaggc

SEQ ID NO: 45235 - RNA, 20 nt, Artificial Sequence
  Synthetic
uaggcacgcacucuguaggc

SEQ ID NO: 45236 - RNA, 21 nt, Artificial Sequence
  Synthetic
cuaggcacgcacucuguaggc

SEQ ID NO: 45237 - RNA, 22 nt, Artificial Sequence
  Synthetic
ccuaggcacgcacucuguaggc

SEQ ID NO: 45238 - RNA, 23 nt, Artificial Sequence
  Synthetic
accuaggcacgcacucuguaggc

SEQ ID NO: 45239 - RNA, 24 nt, Artificial Sequence
  Synthetic
aaccuaggcacgcacucuguaggc

SEQ ID NO: 45240 - RNA, 18 nt, Artificial Sequence
  Synthetic
acagcgagggaauuaggc

SEQ ID NO: 45241 - RNA, 19 nt, Artificial Sequence
  Synthetic
uacagcgagggaauuaggc

SEQ ID NO: 45242 - RNA, 21 nt, Artificial Sequence
  Synthetic
aguacagcgagggaauuaggc

SEQ ID NO: 45243 - RNA, 23 nt, Artificial Sequence
  Synthetic
ugaguacagcgagggaauuaggc

SEQ ID NO: 45244 - RNA, 24 nt, Artificial Sequence
  Synthetic
uugaguacagcgagggaauuaggc

SEQ ID NO: 45245 - RNA, 18 nt, Artificial Sequence
  Synthetic
cacuuuuacaguuuaggc

SEQ ID NO: 45246 - RNA, 19 nt, Artificial Sequence
  Synthetic
ucacuuuuacaguuuaggc

SEQ ID NO: 45247 - RNA, 20 nt, Artificial Sequence
  Synthetic
uucacuuuuacaguuuaggc

SEQ ID NO: 45248 - RNA, 21 nt, Artificial Sequence
  Synthetic
uuucacuuuuacaguuuaggc

SEQ ID NO: 45249 - RNA, 22 nt, Artificial Sequence
  Synthetic
uuuucacuuuuacaguuuaggc

SEQ ID NO: 45250 - RNA, 23 nt, Artificial Sequence
  Synthetic
auuuucacuuuuacaguuuaggc

SEQ ID NO: 45251 - RNA, 18 nt, Artificial Sequence
  Synthetic
ugcugccgcuggcucggc

SEQ ID NO: 45252 - RNA, 19 nt, Artificial Sequence
  Synthetic
uugcugccgcuggcucggc

SEQ ID NO: 45253 - RNA, 20 nt, Artificial Sequence
  Synthetic
uuugcugccgcuggcucggc

SEQ ID NO: 45254 - RNA, 21 nt, Artificial Sequence
  Synthetic
cuuugcugccgcuggcucggc

SEQ ID NO: 45255 - RNA, 18 nt, Artificial Sequence
  Synthetic
aguuacuuagcaaagggc

SEQ ID NO: 45256 - RNA, 20 nt, Artificial Sequence
  Synthetic
agaguuacuuagcaaagggc

SEQ ID NO: 45257 - RNA, 21 nt, Artificial Sequence
  Synthetic
cagaguuacuuagcaaagggc

SEQ ID NO: 45258 - RNA, 22 nt, Artificial Sequence
  Synthetic
ucagaguuacuuagcaaagggc

SEQ ID NO: 45259 - RNA, 23 nt, Artificial Sequence
  Synthetic
uucagaguuacuuagcaaagggc

SEQ ID NO: 45260 - RNA, 24 nt, Artificial Sequence
  Synthetic
uuucagaguuacuuagcaaagggc

SEQ ID NO: 45261 - RNA, 18 nt, Artificial Sequence
  Synthetic
cuagguguuggccagggc

SEQ ID NO: 45262 - RNA, 19 nt, Artificial Sequence
  Synthetic
acuagguguuggccagggc

SEQ ID NO: 45263 - RNA, 20 nt, Artificial Sequence
  Synthetic
cacuagguguuggccagggc

SEQ ID NO: 45264 - RNA, 21 nt, Artificial Sequence
  Synthetic
acacuagguguuggccagggc

SEQ ID NO: 45265 - RNA, 22 nt, Artificial Sequence
  Synthetic
cacacuagguguuggccagggc

SEQ ID NO: 45266 - RNA, 24 nt, Artificial Sequence
  Synthetic
ugcacacuagguguuggccagggc

SEQ ID NO: 45267 - RNA, 18 nt, Artificial Sequence
  Synthetic
acugugaaaagucagggc

SEQ ID NO: 45268 - RNA, 19 nt, Artificial Sequence
  Synthetic
uacugugaaaagucagggc

SEQ ID NO: 45269 - RNA, 20 nt, Artificial Sequence
  Synthetic
uuacugugaaaagucagggc

SEQ ID NO: 45270 - RNA, 21 nt, Artificial Sequence
  Synthetic
cuuacugugaaaagucagggc

SEQ ID NO: 45271 - RNA, 22 nt, Artificial Sequence
  Synthetic
ucuuacugugaaaagucagggc

SEQ ID NO: 45272 - RNA, 23 nt, Artificial Sequence
  Synthetic
uucuuacugugaaaagucagggc

SEQ ID NO: 45273 - RNA, 24 nt, Artificial Sequence
  Synthetic
uuucuuacugugaaaagucagggc

SEQ ID NO: 45274 - RNA, 18 nt, Artificial Sequence
  Synthetic
auaaaaagcagggagggc

SEQ ID NO: 45275 - RNA, 20 nt, Artificial Sequence
  Synthetic
ugauaaaaagcagggagggc

SEQ ID NO: 45276 - RNA, 24 nt, Artificial Sequence
  Synthetic
ugggugauaaaaagcagggagggc

SEQ ID NO: 45277 - RNA, 19 nt, Artificial Sequence
  Synthetic
ugaucacuaacuguagggc

SEQ ID NO: 45278 - RNA, 20 nt, Artificial Sequence
  Synthetic
cugaucacuaacuguagggc

SEQ ID NO: 45279 - RNA, 21 nt, Artificial Sequence
  Synthetic
acugaucacuaacuguagggc

SEQ ID NO: 45280 - RNA, 22 nt, Artificial Sequence
  Synthetic
uacugaucacuaacuguagggc

SEQ ID NO: 45281 - RNA, 23 nt, Artificial Sequence
  Synthetic
auacugaucacuaacuguagggc

SEQ ID NO: 45282 - RNA, 24 nt, Artificial Sequence
  Synthetic
aauacugaucacuaacuguagggc

SEQ ID NO: 45283 - RNA, 19 nt, Artificial Sequence
  Synthetic
aggcagcaaaucuuagggc

SEQ ID NO: 45284 - RNA, 20 nt, Artificial Sequence
  Synthetic
aaggcagcaaaucuuagggc

SEQ ID NO: 45285 - RNA, 21 nt, Artificial Sequence
  Synthetic
aaaggcagcaaaucuuagggc

SEQ ID NO: 45286 - RNA, 23 nt, Artificial Sequence
  Synthetic
ugaaaggcagcaaaucuuagggc

SEQ ID NO: 45287 - RNA, 24 nt, Artificial Sequence
  Synthetic
uugaaaggcagcaaaucuuagggc

SEQ ID NO: 45288 - RNA, 18 nt, Artificial Sequence
  Synthetic
caaauggugaauccgggc

SEQ ID NO: 45289 - RNA, 19 nt, Artificial Sequence
  Synthetic
acaaauggugaauccgggc

SEQ ID NO: 45290 - RNA, 20 nt, Artificial Sequence
  Synthetic
aacaaauggugaauccgggc

SEQ ID NO: 45291 - RNA, 21 nt, Artificial Sequence
  Synthetic
uaacaaauggugaauccgggc

SEQ ID NO: 45292 - RNA, 22 nt, Artificial Sequence
  Synthetic
uuaacaaauggugaauccgggc

SEQ ID NO: 45293 - RNA, 24 nt, Artificial Sequence
  Synthetic
uguuaacaaauggugaauccgggc

SEQ ID NO: 45294 - RNA, 23 nt, Artificial Sequence
  Synthetic
aggggaagagauaaggaaggggc

SEQ ID NO: 45295 - RNA, 24 nt, Artificial Sequence
  Synthetic
uaggggaagagauaaggaaggggc

SEQ ID NO: 45296 - RNA, 18 nt, Artificial Sequence
  Synthetic
agaagaggguuagggggc

SEQ ID NO: 45297 - RNA, 19 nt, Artificial Sequence
  Synthetic
cagaagaggguuagggggc

SEQ ID NO: 45298 - RNA, 21 nt, Artificial Sequence
  Synthetic
agcagaagaggguuagggggc

SEQ ID NO: 45299 - RNA, 22 nt, Artificial Sequence
  Synthetic
cagcagaagaggguuagggggc

SEQ ID NO: 45300 - RNA, 23 nt, Artificial Sequence
  Synthetic
acagcagaagaggguuagggggc

SEQ ID NO: 45301 - RNA, 19 nt, Artificial Sequence
  Synthetic
ugguugucacauugggggc

SEQ ID NO: 45302 - RNA, 20 nt, Artificial Sequence
  Synthetic
uugguugucacauugggggc

SEQ ID NO: 45303 - RNA, 21 nt, Artificial Sequence
  Synthetic
cuugguugucacauugggggc

SEQ ID NO: 45304 - RNA, 22 nt, Artificial Sequence
  Synthetic
ucuugguugucacauugggggc

SEQ ID NO: 45305 - RNA, 23 nt, Artificial Sequence
  Synthetic
uucuugguugucacauugggggc

SEQ ID NO: 45306 - RNA, 24 nt, Artificial Sequence
  Synthetic
auucuugguugucacauugggggc

SEQ ID NO: 45307 - RNA, 18 nt, Artificial Sequence
  Synthetic
aguuucgggaagaugggc

SEQ ID NO: 45308 - RNA, 19 nt, Artificial Sequence
  Synthetic
aaguuucgggaagaugggc

SEQ ID NO: 45309 - RNA, 20 nt, Artificial Sequence
  Synthetic
aaaguuucgggaagaugggc

SEQ ID NO: 45310 - RNA, 21 nt, Artificial Sequence
  Synthetic
aaaaguuucgggaagaugggc

SEQ ID NO: 45311 - RNA, 22 nt, Artificial Sequence
  Synthetic
uaaaaguuucgggaagaugggc

SEQ ID NO: 45312 - RNA, 24 nt, Artificial Sequence
  Synthetic
aguaaaaguuucgggaagaugggc

SEQ ID NO: 45313 - RNA, 18 nt, Artificial Sequence
  Synthetic
acugggaaacuacugggc

SEQ ID NO: 45314 - RNA, 19 nt, Artificial Sequence
  Synthetic
uacugggaaacuacugggc

SEQ ID NO: 45315 - RNA, 21 nt, Artificial Sequence
  Synthetic
uguacugggaaacuacugggc

SEQ ID NO: 45316 - RNA, 22 nt, Artificial Sequence
  Synthetic
auguacugggaaacuacugggc

SEQ ID NO: 45317 - RNA, 23 nt, Artificial Sequence
  Synthetic
cauguacugggaaacuacugggc

SEQ ID NO: 45318 - RNA, 24 nt, Artificial Sequence
  Synthetic
ucauguacugggaaacuacugggc

SEQ ID NO: 45319 - RNA, 18 nt, Artificial Sequence
  Synthetic
uuuagguugccucugggc

SEQ ID NO: 45320 - RNA, 20 nt, Artificial Sequence
  Synthetic
aguuuagguugccucugggc

SEQ ID NO: 45321 - RNA, 22 nt, Artificial Sequence
  Synthetic
ugaguuuagguugccucugggc

SEQ ID NO: 45322 - RNA, 23 nt, Artificial Sequence
  Synthetic
cugaguuuagguugccucugggc

SEQ ID NO: 45323 - RNA, 24 nt, Artificial Sequence
  Synthetic
ccugaguuuagguugccucugggc

SEQ ID NO: 45324 - RNA, 21 nt, Artificial Sequence
  Synthetic
auugaaaagguauguuugggc

SEQ ID NO: 45325 - RNA, 22 nt, Artificial Sequence
  Synthetic
cauugaaaagguauguuugggc

SEQ ID NO: 45326 - RNA, 23 nt, Artificial Sequence
  Synthetic
acauugaaaagguauguuugggc

SEQ ID NO: 45327 - RNA, 18 nt, Artificial Sequence
  Synthetic
aaggauaauacaaauggc

SEQ ID NO: 45328 - RNA, 19 nt, Artificial Sequence
  Synthetic
aaaggauaauacaaauggc

SEQ ID NO: 45329 - RNA, 20 nt, Artificial Sequence
  Synthetic
uaaaggauaauacaaauggc

SEQ ID NO: 45330 - RNA, 21 nt, Artificial Sequence
  Synthetic
auaaaggauaauacaaauggc

SEQ ID NO: 45331 - RNA, 22 nt, Artificial Sequence
  Synthetic
cauaaaggauaauacaaauggc

SEQ ID NO: 45332 - RNA, 23 nt, Artificial Sequence
  Synthetic
ucauaaaggauaauacaaauggc

SEQ ID NO: 45333 - RNA, 24 nt, Artificial Sequence
  Synthetic
uucauaaaggauaauacaaauggc

SEQ ID NO: 45334 - RNA, 19 nt, Artificial Sequence
  Synthetic
agcucaaaacaacaauggc

SEQ ID NO: 45335 - RNA, 21 nt, Artificial Sequence
  Synthetic
ugagcucaaaacaacaauggc

SEQ ID NO: 45336 - RNA, 23 nt, Artificial Sequence
  Synthetic
agugagcucaaaacaacaauggc

SEQ ID NO: 45337 - RNA, 18 nt, Artificial Sequence
  Synthetic
uaaaaaaaugggcauggc

SEQ ID NO: 45338 - RNA, 19 nt, Artificial Sequence
  Synthetic
auaaaaaaaugggcauggc

SEQ ID NO: 45339 - RNA, 20 nt, Artificial Sequence
  Synthetic
cauaaaaaaaugggcauggc

SEQ ID NO: 45340 - RNA, 23 nt, Artificial Sequence
  Synthetic
uggcauaaaaaaaugggcauggc

SEQ ID NO: 45341 - RNA, 18 nt, Artificial Sequence
  Synthetic
cauuauuuuucucauggc

SEQ ID NO: 45342 - RNA, 19 nt, Artificial Sequence
  Synthetic
ccauuauuuuucucauggc

SEQ ID NO: 45343 - RNA, 20 nt, Artificial Sequence
  Synthetic
accauuauuuuucucauggc

SEQ ID NO: 45344 - RNA, 21 nt, Artificial Sequence
  Synthetic
aaccauuauuuuucucauggc

SEQ ID NO: 45345 - RNA, 22 nt, Artificial Sequence
  Synthetic
uaaccauuauuuuucucauggc

SEQ ID NO: 45346 - RNA, 24 nt, Artificial Sequence
  Synthetic
aguaaccauuauuuuucucauggc

SEQ ID NO: 45347 - RNA, 18 nt, Artificial Sequence
  Synthetic
cucccuguuugagauggc

SEQ ID NO: 45348 - RNA, 19 nt, Artificial Sequence
  Synthetic
ccucccuguuugagauggc

SEQ ID NO: 45349 - RNA, 20 nt, Artificial Sequence
  Synthetic
cccucccuguuugagauggc

SEQ ID NO: 45350 - RNA, 21 nt, Artificial Sequence
  Synthetic
acccucccuguuugagauggc

SEQ ID NO: 45351 - RNA, 22 nt, Artificial Sequence
  Synthetic
aacccucccuguuugagauggc

SEQ ID NO: 45352 - RNA, 23 nt, Artificial Sequence
  Synthetic
aaacccucccuguuugagauggc

SEQ ID NO: 45353 - RNA, 24 nt, Artificial Sequence
  Synthetic
uaaacccucccuguuugagauggc

SEQ ID NO: 45354 - RNA, 18 nt, Artificial Sequence
  Synthetic
aguagcgguugauauggc

SEQ ID NO: 45355 - RNA, 20 nt, Artificial Sequence
  Synthetic
ugaguagcgguugauauggc

SEQ ID NO: 45356 - RNA, 21 nt, Artificial Sequence
  Synthetic
augaguagcgguugauauggc

SEQ ID NO: 45357 - RNA, 22 nt, Artificial Sequence
  Synthetic
uaugaguagcgguugauauggc

SEQ ID NO: 45358 - RNA, 23 nt, Artificial Sequence
  Synthetic
cuaugaguagcgguugauauggc

SEQ ID NO: 45359 - RNA, 24 nt, Artificial Sequence
  Synthetic
ucuaugaguagcgguugauauggc

SEQ ID NO: 45360 - RNA, 19 nt, Artificial Sequence
  Synthetic
ugcucugaaacugacuggc

SEQ ID NO: 45361 - RNA, 20 nt, Artificial Sequence
  Synthetic
cugcucugaaacugacuggc

SEQ ID NO: 45362 - RNA, 21 nt, Artificial Sequence
  Synthetic
acugcucugaaacugacuggc

SEQ ID NO: 45363 - RNA, 23 nt, Artificial Sequence
  Synthetic
agacugcucugaaacugacuggc

SEQ ID NO: 45364 - RNA, 24 nt, Artificial Sequence
  Synthetic
aagacugcucugaaacugacuggc

SEQ ID NO: 45365 - RNA, 18 nt, Artificial Sequence
  Synthetic
uacaaaauauuuacuggc

SEQ ID NO: 45366 - RNA, 20 nt, Artificial Sequence
  Synthetic
uguacaaaauauuuacuggc

SEQ ID NO: 45367 - RNA, 21 nt, Artificial Sequence
  Synthetic
auguacaaaauauuuacuggc

SEQ ID NO: 45368 - RNA, 24 nt, Artificial Sequence
  Synthetic
aggauguacaaaauauuuacuggc

SEQ ID NO: 45369 - RNA, 18 nt, Artificial Sequence
  Synthetic
uaacaaaagccuccuggc

SEQ ID NO: 45370 - RNA, 19 nt, Artificial Sequence
  Synthetic
uuaacaaaagccuccuggc

SEQ ID NO: 45371 - RNA, 20 nt, Artificial Sequence
  Synthetic
uuuaacaaaagccuccuggc

SEQ ID NO: 45372 - RNA, 21 nt, Artificial Sequence
  Synthetic
uuuuaacaaaagccuccuggc

SEQ ID NO: 45373 - RNA, 22 nt, Artificial Sequence
  Synthetic
cuuuuaacaaaagccuccuggc

SEQ ID NO: 45374 - RNA, 23 nt, Artificial Sequence
  Synthetic
ucuuuuaacaaaagccuccuggc

SEQ ID NO: 45375 - RNA, 24 nt, Artificial Sequence
  Synthetic
aucuuuuaacaaaagccuccuggc

SEQ ID NO: 45376 - RNA, 18 nt, Artificial Sequence
  Synthetic
uuacacagguuaucuggc

SEQ ID NO: 45377 - RNA, 19 nt, Artificial Sequence
  Synthetic
auuacacagguuaucuggc

SEQ ID NO: 45378 - RNA, 20 nt, Artificial Sequence
  Synthetic
cauuacacagguuaucuggc

SEQ ID NO: 45379 - RNA, 21 nt, Artificial Sequence
  Synthetic
ccauuacacagguuaucuggc

SEQ ID NO: 45380 - RNA, 22 nt, Artificial Sequence
  Synthetic
uccauuacacagguuaucuggc

SEQ ID NO: 45381 - RNA, 18 nt, Artificial Sequence
  Synthetic
ccagcagcaagaaguggc

SEQ ID NO: 45382 - RNA, 19 nt, Artificial Sequence
  Synthetic
accagcagcaagaaguggc

SEQ ID NO: 45383 - RNA, 20 nt, Artificial Sequence
  Synthetic
caccagcagcaagaaguggc

SEQ ID NO: 45384 - RNA, 21 nt, Artificial Sequence
  Synthetic
ccaccagcagcaagaaguggc

SEQ ID NO: 45385 - RNA, 22 nt, Artificial Sequence
  Synthetic
uccaccagcagcaagaaguggc

SEQ ID NO: 45386 - RNA, 23 nt, Artificial Sequence
  Synthetic
uuccaccagcagcaagaaguggc

SEQ ID NO: 45387 - RNA, 24 nt, Artificial Sequence
  Synthetic
uuuccaccagcagcaagaaguggc

SEQ ID NO: 45388 - RNA, 19 nt, Artificial Sequence
  Synthetic
ugaugggugcugaaguggc

SEQ ID NO: 45389 - RNA, 20 nt, Artificial Sequence
  Synthetic
cugaugggugcugaaguggc

SEQ ID NO: 45390 - RNA, 23 nt, Artificial Sequence
  Synthetic
aggcugaugggugcugaaguggc

SEQ ID NO: 45391 - RNA, 24 nt, Artificial Sequence
  Synthetic
caggcugaugggugcugaaguggc

SEQ ID NO: 45392 - RNA, 18 nt, Artificial Sequence
  Synthetic
aauauuuucaucaguggc

SEQ ID NO: 45393 - RNA, 19 nt, Artificial Sequence
  Synthetic
caauauuuucaucaguggc

SEQ ID NO: 45394 - RNA, 20 nt, Artificial Sequence
  Synthetic
ucaauauuuucaucaguggc

SEQ ID NO: 45395 - RNA, 21 nt, Artificial Sequence
  Synthetic
uucaauauuuucaucaguggc

SEQ ID NO: 45396 - RNA, 22 nt, Artificial Sequence
  Synthetic
uuucaauauuuucaucaguggc

SEQ ID NO: 45397 - RNA, 23 nt, Artificial Sequence
  Synthetic
uuuucaauauuuucaucaguggc

SEQ ID NO: 45398 - RNA, 24 nt, Artificial Sequence
  Synthetic
cuuuucaauauuuucaucaguggc

SEQ ID NO: 45399 - RNA, 18 nt, Artificial Sequence
  Synthetic
caugaauuggagaguggc

SEQ ID NO: 45400 - RNA, 19 nt, Artificial Sequence
  Synthetic
ucaugaauuggagaguggc

SEQ ID NO: 45401 - RNA, 20 nt, Artificial Sequence
  Synthetic
uucaugaauuggagaguggc

SEQ ID NO: 45402 - RNA, 21 nt, Artificial Sequence
  Synthetic
uuucaugaauuggagaguggc

SEQ ID NO: 45403 - RNA, 22 nt, Artificial Sequence
  Synthetic
uuuucaugaauuggagaguggc

SEQ ID NO: 45404 - RNA, 23 nt, Artificial Sequence
  Synthetic
auuuucaugaauuggagaguggc

SEQ ID NO: 45405 - RNA, 18 nt, Artificial Sequence
  Synthetic
cuuggucaucauaguggc

SEQ ID NO: 45406 - RNA, 19 nt, Artificial Sequence
  Synthetic
acuuggucaucauaguggc

SEQ ID NO: 45407 - RNA, 20 nt, Artificial Sequence
  Synthetic
aacuuggucaucauaguggc

SEQ ID NO: 45408 - RNA, 21 nt, Artificial Sequence
  Synthetic
caacuuggucaucauaguggc

SEQ ID NO: 45409 - RNA, 23 nt, Artificial Sequence
  Synthetic
agcaacuuggucaucauaguggc

SEQ ID NO: 45410 - RNA, 24 nt, Artificial Sequence
  Synthetic
aagcaacuuggucaucauaguggc

SEQ ID NO: 45411 - RNA, 18 nt, Artificial Sequence
  Synthetic
auuccugguugggguggc

SEQ ID NO: 45412 - RNA, 19 nt, Artificial Sequence
  Synthetic
cauuccugguugggguggc

SEQ ID NO: 45413 - RNA, 20 nt, Artificial Sequence
  Synthetic
acauuccugguugggguggc

SEQ ID NO: 45414 - RNA, 18 nt, Artificial Sequence
  Synthetic
ucaagagaugacuguggc

SEQ ID NO: 45415 - RNA, 20 nt, Artificial Sequence
  Synthetic
agucaagagaugacuguggc

SEQ ID NO: 45416 - RNA, 21 nt, Artificial Sequence
  Synthetic
cagucaagagaugacuguggc

SEQ ID NO: 45417 - RNA, 22 nt, Artificial Sequence
  Synthetic
ucagucaagagaugacuguggc

SEQ ID NO: 45418 - RNA, 23 nt, Artificial Sequence
  Synthetic
uucagucaagagaugacuguggc

SEQ ID NO: 45419 - RNA, 24 nt, Artificial Sequence
  Synthetic
auucagucaagagaugacuguggc

SEQ ID NO: 45420 - RNA, 19 nt, Artificial Sequence
  Synthetic
ugguuaucugcaguguggc

SEQ ID NO: 45421 - RNA, 20 nt, Artificial Sequence
  Synthetic
cugguuaucugcaguguggc

SEQ ID NO: 45422 - RNA, 21 nt, Artificial Sequence
  Synthetic
accaugguguguguguguggc

SEQ ID NO: 45423 - RNA, 22 nt, Artificial Sequence
  Synthetic
uaccaugguguguguguguggc

SEQ ID NO: 45424 - RNA, 23 nt, Artificial Sequence
  Synthetic
auaccaugguguguguguguggc

SEQ ID NO: 45425 - RNA, 24 nt, Artificial Sequence
  Synthetic
aauaccaugguguguguguguggc

SEQ ID NO: 45426 - RNA, 18 nt, Artificial Sequence
  Synthetic
uguagauguuuuuguggc

SEQ ID NO: 45427 - RNA, 19 nt, Artificial Sequence
  Synthetic
auguagauguuuuuguggc

SEQ ID NO: 45428 - RNA, 20 nt, Artificial Sequence
  Synthetic
aauguagauguuuuuguggc

SEQ ID NO: 45429 - RNA, 21 nt, Artificial Sequence
  Synthetic
uaauguagauguuuuuguggc

SEQ ID NO: 45430 - RNA, 22 nt, Artificial Sequence
  Synthetic
uuaauguagauguuuuuguggc

SEQ ID NO: 45431 - RNA, 23 nt, Artificial Sequence
  Synthetic
auuaauguagauguuuuuguggc

SEQ ID NO: 45432 - RNA, 24 nt, Artificial Sequence
  Synthetic
aauuaauguagauguuuuuguggc

SEQ ID NO: 45433 - RNA, 18 nt, Artificial Sequence
  Synthetic
aauacuuccaaaauuggc

SEQ ID NO: 45434 - RNA, 19 nt, Artificial Sequence
  Synthetic
aaauacuuccaaaauuggc

SEQ ID NO: 45435 - RNA, 21 nt, Artificial Sequence
  Synthetic
agaaauacuuccaaaauuggc

SEQ ID NO: 45436 - RNA, 22 nt, Artificial Sequence
  Synthetic
uagaaauacuuccaaaauuggc

SEQ ID NO: 45437 - RNA, 23 nt, Artificial Sequence
  Synthetic
uuagaaauacuuccaaaauuggc

SEQ ID NO: 45438 - RNA, 24 nt, Artificial Sequence
  Synthetic
auuagaaauacuuccaaaauuggc

SEQ ID NO: 45439 - RNA, 18 nt, Artificial Sequence
  Synthetic
cccuuuccccccauuggc

SEQ ID NO: 45440 - RNA, 19 nt, Artificial Sequence
  Synthetic
acccuuuccccccauuggc

SEQ ID NO: 45441 - RNA, 20 nt, Artificial Sequence
  Synthetic
uacccuuuccccccauuggc

SEQ ID NO: 45442 - RNA, 22 nt, Artificial Sequence
  Synthetic
uguacccuuuccccccauuggc

SEQ ID NO: 45443 - RNA, 23 nt, Artificial Sequence
  Synthetic
cuguacccuuuccccccauuggc

SEQ ID NO: 45444 - RNA, 24 nt, Artificial Sequence
  Synthetic
ccuguacccuuuccccccauuggc

SEQ ID NO: 45445 - RNA, 18 nt, Artificial Sequence
  Synthetic
agcuuguaugucauuggc

SEQ ID NO: 45446 - RNA, 19 nt, Artificial Sequence
  Synthetic
uagcuuguaugucauuggc

SEQ ID NO: 45447 - RNA, 20 nt, Artificial Sequence
  Synthetic
uuagcuuguaugucauuggc

SEQ ID NO: 45448 - RNA, 21 nt, Artificial Sequence
  Synthetic
uuuagcuuguaugucauuggc

SEQ ID NO: 45449 - RNA, 22 nt, Artificial Sequence
  Synthetic
cuuuagcuuguaugucauuggc

SEQ ID NO: 45450 - RNA, 23 nt, Artificial Sequence
  Synthetic
acuuuagcuuguaugucauuggc

SEQ ID NO: 45451 - RNA, 24 nt, Artificial Sequence
  Synthetic
cacuuuagcuuguaugucauuggc

SEQ ID NO: 45452 - RNA, 18 nt, Artificial Sequence
  Synthetic
ccuagccauccgauuggc

SEQ ID NO: 45453 - RNA, 19 nt, Artificial Sequence
  Synthetic
uccuagccauccgauuggc

SEQ ID NO: 45454 - RNA, 20 nt, Artificial Sequence
  Synthetic
uuccuagccauccgauuggc

SEQ ID NO: 45455 - RNA, 21 nt, Artificial Sequence
  Synthetic
cuuccuagccauccgauuggc

SEQ ID NO: 45456 - RNA, 23 nt, Artificial Sequence
  Synthetic
ugcuuccuagccauccgauuggc

SEQ ID NO: 45457 - RNA, 24 nt, Artificial Sequence
  Synthetic
cugcuuccuagccauccgauuggc

SEQ ID NO: 45458 - RNA, 18 nt, Artificial Sequence
  Synthetic
aaucugaaggaacuuggc

SEQ ID NO: 45459 - RNA, 20 nt, Artificial Sequence
  Synthetic
agaaucugaaggaacuuggc

SEQ ID NO: 45460 - RNA, 22 nt, Artificial Sequence
  Synthetic
ugagaaucugaaggaacuuggc

SEQ ID NO: 45461 - RNA, 24 nt, Artificial Sequence
  Synthetic
ugugagaaucugaaggaacuuggc

SEQ ID NO: 45462 - RNA, 18 nt, Artificial Sequence
  Synthetic
uaucuaugaagacuuggc

SEQ ID NO: 45463 - RNA, 20 nt, Artificial Sequence
  Synthetic
aguaucuaugaagacuuggc

SEQ ID NO: 45464 - RNA, 21 nt, Artificial Sequence
  Synthetic
caguaucuaugaagacuuggc

SEQ ID NO: 45465 - RNA, 22 nt, Artificial Sequence
  Synthetic
ccaguaucuaugaagacuuggc

SEQ ID NO: 45466 - RNA, 23 nt, Artificial Sequence
  Synthetic
cccaguaucuaugaagacuuggc

SEQ ID NO: 45467 - RNA, 24 nt, Artificial Sequence
  Synthetic
ucccaguaucuaugaagacuuggc

SEQ ID NO: 45468 - RNA, 18 nt, Artificial Sequence
  Synthetic
uuaagcaugcuucuuggc

SEQ ID NO: 45469 - RNA, 19 nt, Artificial Sequence
  Synthetic
cuuaagcaugcuucuuggc

SEQ ID NO: 45470 - RNA, 20 nt, Artificial Sequence
  Synthetic
acuuaagcaugcuucuuggc

SEQ ID NO: 45471 - RNA, 21 nt, Artificial Sequence
  Synthetic
cacuuaagcaugcuucuuggc

SEQ ID NO: 45472 - RNA, 22 nt, Artificial Sequence
  Synthetic
ccacuuaagcaugcuucuuggc

SEQ ID NO: 45473 - RNA, 23 nt, Artificial Sequence
  Synthetic
cccacuuaagcaugcuucuuggc

SEQ ID NO: 45474 - RNA, 24 nt, Artificial Sequence
  Synthetic
ucccacuuaagcaugcuucuuggc

SEQ ID NO: 45475 - RNA, 19 nt, Artificial Sequence
  Synthetic
ugcugccuuauaaguuggc

SEQ ID NO: 45476 - RNA, 20 nt, Artificial Sequence
  Synthetic
uugcugccuuauaaguuggc

SEQ ID NO: 45477 - RNA, 21 nt, Artificial Sequence
  Synthetic
uuugcugccuuauaaguuggc

SEQ ID NO: 45478 - RNA, 22 nt, Artificial Sequence
  Synthetic
uuuugcugccuuauaaguuggc

SEQ ID NO: 45479 - RNA, 23 nt, Artificial Sequence
  Synthetic
uuuuugcugccuuauaaguuggc

SEQ ID NO: 45480 - RNA, 24 nt, Artificial Sequence
  Synthetic
uuuuuugcugccuuauaaguuggc

SEQ ID NO: 45481 - RNA, 18 nt, Artificial Sequence
  Synthetic
uauugugaguaaguuggc

SEQ ID NO: 45482 - RNA, 19 nt, Artificial Sequence
  Synthetic
auauugugaguaaguuggc

SEQ ID NO: 45483 - RNA, 20 nt, Artificial Sequence
  Synthetic
aauauugugaguaaguuggc

SEQ ID NO: 45484 - RNA, 21 nt, Artificial Sequence
  Synthetic
uaauauugugaguaaguuggc

SEQ ID NO: 45485 - RNA, 22 nt, Artificial Sequence
  Synthetic
auaauauugugaguaaguuggc

SEQ ID NO: 45486 - RNA, 24 nt, Artificial Sequence
  Synthetic
ugauaauauugugaguaaguuggc

SEQ ID NO: 45487 - RNA, 18 nt, Artificial Sequence
  Synthetic
aacauuuuuuagguuggc

SEQ ID NO: 45488 - RNA, 22 nt, Artificial Sequence
  Synthetic
agggaacauuuuuuagguuggc

SEQ ID NO: 45489 - RNA, 18 nt, Artificial Sequence
  Synthetic
cuaaauguuuacuuuggc

SEQ ID NO: 45490 - RNA, 20 nt, Artificial Sequence
  Synthetic
agcuaaauguuuacuuuggc

SEQ ID NO: 45491 - RNA, 21 nt, Artificial Sequence
  Synthetic
uagcuaaauguuuacuuuggc

SEQ ID NO: 45492 - RNA, 22 nt, Artificial Sequence
  Synthetic
uuagcuaaauguuuacuuuggc

SEQ ID NO: 45493 - RNA, 23 nt, Artificial Sequence
  Synthetic
cuuagcuaaauguuuacuuuggc

SEQ ID NO: 45494 - RNA, 24 nt, Artificial Sequence
  Synthetic
ccuuagcuaaauguuuacuuuggc

SEQ ID NO: 45495 - RNA, 18 nt, Artificial Sequence
  Synthetic
aauuugagaugguuuggc

SEQ ID NO: 45496 - RNA, 20 nt, Artificial Sequence
  Synthetic
agaauuugagaugguuuggc

SEQ ID NO: 45497 - RNA, 21 nt, Artificial Sequence
  Synthetic
aagaauuugagaugguuuggc

SEQ ID NO: 45498 - RNA, 22 nt, Artificial Sequence
  Synthetic
aaagaauuugagaugguuuggc

SEQ ID NO: 45499 - RNA, 23 nt, Artificial Sequence
  Synthetic
aaaagaauuugagaugguuuggc

SEQ ID NO: 45500 - RNA, 24 nt, Artificial Sequence
  Synthetic
aaaaagaauuugagaugguuuggc

SEQ ID NO: 45501 - RNA, 18 nt, Artificial Sequence
  Synthetic
augucaaacauguuuggc

SEQ ID NO: 45502 - RNA, 19 nt, Artificial Sequence
  Synthetic
caugucaaacauguuuggc

SEQ ID NO: 45503 - RNA, 21 nt, Artificial Sequence
  Synthetic
ugcaugucaaacauguuuggc

SEQ ID NO: 45504 - RNA, 22 nt, Artificial Sequence
  Synthetic
augcaugucaaacauguuuggc

SEQ ID NO: 45505 - RNA, 24 nt, Artificial Sequence
  Synthetic
agaugcaugucaaacauguuuggc

SEQ ID NO: 45506 - RNA, 18 nt, Artificial Sequence
  Synthetic
ugauaggggcaaaaaugc

SEQ ID NO: 45507 - RNA, 19 nt, Artificial Sequence
  Synthetic
uugauaggggcaaaaaugc

SEQ ID NO: 45508 - RNA, 21 nt, Artificial Sequence
  Synthetic
aguugauaggggcaaaaaugc

SEQ ID NO: 45509 - RNA, 22 nt, Artificial Sequence
  Synthetic
aaguugauaggggcaaaaaugc

SEQ ID NO: 45510 - RNA, 23 nt, Artificial Sequence
  Synthetic
caaguugauaggggcaaaaaugc

SEQ ID NO: 45511 - RNA, 24 nt, Artificial Sequence
  Synthetic
ucaaguugauaggggcaaaaaugc

SEQ ID NO: 45512 - RNA, 21 nt, Artificial Sequence
  Synthetic
aaugaauuauuuuaaaaaugc

SEQ ID NO: 45513 - RNA, 23 nt, Artificial Sequence
  Synthetic
agaaugaauuauuuuaaaaaugc

SEQ ID NO: 45514 - RNA, 24 nt, Artificial Sequence
  Synthetic
uagaaugaauuauuuuaaaaaugc

SEQ ID NO: 45515 - RNA, 18 nt, Artificial Sequence
  Synthetic
uuauguugaacaaaaugc

SEQ ID NO: 45516 - RNA, 19 nt, Artificial Sequence
  Synthetic
uuuauguugaacaaaaugc

SEQ ID NO: 45517 - RNA, 20 nt, Artificial Sequence
  Synthetic
uuuuauguugaacaaaaugc

SEQ ID NO: 45518 - RNA, 21 nt, Artificial Sequence
  Synthetic
uuuuuauguugaacaaaaugc

SEQ ID NO: 45519 - RNA, 22 nt, Artificial Sequence
  Synthetic
auuuuuauguugaacaaaaugc

SEQ ID NO: 45520 - RNA, 23 nt, Artificial Sequence
  Synthetic
uauuuuuauguugaacaaaaugc

SEQ ID NO: 45521 - RNA, 24 nt, Artificial Sequence
  Synthetic
auauuuuuauguugaacaaaaugc

SEQ ID NO: 45522 - RNA, 19 nt, Artificial Sequence
  Synthetic
agugauaacauccaaaugc

SEQ ID NO: 45523 - RNA, 20 nt, Artificial Sequence
  Synthetic
cagugauaacauccaaaugc

SEQ ID NO: 45524 - RNA, 21 nt, Artificial Sequence
  Synthetic
ccagugauaacauccaaaugc

SEQ ID NO: 45525 - RNA, 22 nt, Artificial Sequence
  Synthetic
accagugauaacauccaaaugc

SEQ ID NO: 45526 - RNA, 23 nt, Artificial Sequence
  Synthetic
caccagugauaacauccaaaugc

SEQ ID NO: 45527 - RNA, 19 nt, Artificial Sequence
  Synthetic
aggggucaauuuccaaugc

SEQ ID NO: 45528 - RNA, 20 nt, Artificial Sequence
  Synthetic
aaggggucaauuuccaaugc

SEQ ID NO: 45529 - RNA, 21 nt, Artificial Sequence
  Synthetic
caaggggucaauuuccaaugc

SEQ ID NO: 45530 - RNA, 22 nt, Artificial Sequence
  Synthetic
ccaaggggucaauuuccaaugc

SEQ ID NO: 45531 - RNA, 23 nt, Artificial Sequence
  Synthetic
cccaaggggucaauuuccaaugc

SEQ ID NO: 45532 - RNA, 18 nt, Artificial Sequence
  Synthetic
ucagucugauggcaaugc

SEQ ID NO: 45533 - RNA, 19 nt, Artificial Sequence
  Synthetic
cucagucugauggcaaugc

SEQ ID NO: 45534 - RNA, 20 nt, Artificial Sequence
  Synthetic
acucagucugauggcaaugc

SEQ ID NO: 45535 - RNA, 22 nt, Artificial Sequence
  Synthetic
agacucagucugauggcaaugc

SEQ ID NO: 45536 - RNA, 23 nt, Artificial Sequence
  Synthetic
aagacucagucugauggcaaugc

SEQ ID NO: 45537 - RNA, 18 nt, Artificial Sequence
  Synthetic
cugugcauggaagaaugc

SEQ ID NO: 45538 - RNA, 20 nt, Artificial Sequence
  Synthetic
agcugugcauggaagaaugc

SEQ ID NO: 45539 - RNA, 19 nt, Artificial Sequence
  Synthetic
uggagaggcagccgaaugc

SEQ ID NO: 45540 - RNA, 20 nt, Artificial Sequence
  Synthetic
uuggagaggcagccgaaugc

SEQ ID NO: 45541 - RNA, 21 nt, Artificial Sequence
  Synthetic
uuuggagaggcagccgaaugc

SEQ ID NO: 45542 - RNA, 22 nt, Artificial Sequence
  Synthetic
auuuggagaggcagccgaaugc

SEQ ID NO: 45543 - RNA, 23 nt, Artificial Sequence
  Synthetic
uauuuggagaggcagccgaaugc

SEQ ID NO: 45544 - RNA, 24 nt, Artificial Sequence
  Synthetic
cuauuuggagaggcagccgaaugc

SEQ ID NO: 45545 - RNA, 18 nt, Artificial Sequence
  Synthetic
aaaagcacuuuggaaugc

SEQ ID NO: 45546 - RNA, 20 nt, Artificial Sequence
  Synthetic
agaaaagcacuuuggaaugc

SEQ ID NO: 45547 - RNA, 21 nt, Artificial Sequence
  Synthetic
cagaaaagcacuuuggaaugc

SEQ ID NO: 45548 - RNA, 22 nt, Artificial Sequence
  Synthetic
ucagaaaagcacuuuggaaugc

SEQ ID NO: 45549 - RNA, 23 nt, Artificial Sequence
  Synthetic
cucagaaaagcacuuuggaaugc

SEQ ID NO: 45550 - RNA, 24 nt, Artificial Sequence
  Synthetic
acucagaaaagcacuuuggaaugc

SEQ ID NO: 45551 - RNA, 18 nt, Artificial Sequence
  Synthetic
caaggaacauuugaaugc

SEQ ID NO: 45552 - RNA, 19 nt, Artificial Sequence
  Synthetic
ccaaggaacauuugaaugc

SEQ ID NO: 45553 - RNA, 20 nt, Artificial Sequence
  Synthetic
uccaaggaacauuugaaugc

SEQ ID NO: 45554 - RNA, 21 nt, Artificial Sequence
  Synthetic
cuccaaggaacauuugaaugc

SEQ ID NO: 45555 - RNA, 22 nt, Artificial Sequence
  Synthetic
acuccaaggaacauuugaaugc

SEQ ID NO: 45556 - RNA, 24 nt, Artificial Sequence
  Synthetic
ugacuccaaggaacauuugaaugc

SEQ ID NO: 45557 - RNA, 18 nt, Artificial Sequence
  Synthetic
cucccuccguaguaaugc

SEQ ID NO: 45558 - RNA, 19 nt, Artificial Sequence
  Synthetic
ccucccuccguaguaaugc

SEQ ID NO: 45559 - RNA, 20 nt, Artificial Sequence
  Synthetic
accucccuccguaguaaugc

SEQ ID NO: 45560 - RNA, 21 nt, Artificial Sequence
  Synthetic
caccucccuccguaguaaugc

SEQ ID NO: 45561 - RNA, 22 nt, Artificial Sequence
  Synthetic
ucaccucccuccguaguaaugc

SEQ ID NO: 45562 - RNA, 23 nt, Artificial Sequence
  Synthetic
uucaccucccuccguaguaaugc

SEQ ID NO: 45563 - RNA, 18 nt, Artificial Sequence
  Synthetic
agcccagguaauuaaugc

SEQ ID NO: 45564 - RNA, 19 nt, Artificial Sequence
  Synthetic
uagcccagguaauuaaugc

SEQ ID NO: 45565 - RNA, 21 nt, Artificial Sequence
  Synthetic
aguagcccagguaauuaaugc

SEQ ID NO: 45566 - RNA, 22 nt, Artificial Sequence
  Synthetic
aaguagcccagguaauuaaugc

SEQ ID NO: 45567 - RNA, 24 nt, Artificial Sequence
  Synthetic
ugaaguagcccagguaauuaaugc

SEQ ID NO: 45568 - RNA, 18 nt, Artificial Sequence
  Synthetic
agcaaaguuuuuuaaugc

SEQ ID NO: 45569 - RNA, 19 nt, Artificial Sequence
  Synthetic
aagcaaaguuuuuuaaugc

SEQ ID NO: 45570 - RNA, 20 nt, Artificial Sequence
  Synthetic
aaagcaaaguuuuuuaaugc

SEQ ID NO: 45571 - RNA, 21 nt, Artificial Sequence
  Synthetic
uaaagcaaaguuuuuuaaugc

SEQ ID NO: 45572 - RNA, 22 nt, Artificial Sequence
  Synthetic
auaaagcaaaguuuuuuaaugc

SEQ ID NO: 45573 - RNA, 23 nt, Artificial Sequence
  Synthetic
cauaaagcaaaguuuuuuaaugc

SEQ ID NO: 45574 - RNA, 24 nt, Artificial Sequence
  Synthetic
ucauaaagcaaaguuuuuuaaugc

SEQ ID NO: 45575 - RNA, 18 nt, Artificial Sequence
  Synthetic
ugaguauaacacacaugc

SEQ ID NO: 45576 - RNA, 19 nt, Artificial Sequence
  Synthetic
cugaguauaacacacaugc

SEQ ID NO: 45577 - RNA, 20 nt, Artificial Sequence
  Synthetic
acugaguauaacacacaugc

SEQ ID NO: 45578 - RNA, 21 nt, Artificial Sequence
  Synthetic
cacugaguauaacacacaugc

SEQ ID NO: 45579 - RNA, 18 nt, Artificial Sequence
  Synthetic
aaaauaaagcugacaugc

SEQ ID NO: 45580 - RNA, 19 nt, Artificial Sequence
  Synthetic
uaaaauaaagcugacaugc

SEQ ID NO: 45581 - RNA, 20 nt, Artificial Sequence
  Synthetic
auaaaauaaagcugacaugc

SEQ ID NO: 45582 - RNA, 21 nt, Artificial Sequence
  Synthetic
aauaaaauaaagcugacaugc

SEQ ID NO: 45583 - RNA, 22 nt, Artificial Sequence
  Synthetic
uaauaaaauaaagcugacaugc

SEQ ID NO: 45584 - RNA, 23 nt, Artificial Sequence
  Synthetic
uuaauaaaauaaagcugacaugc

SEQ ID NO: 45585 - RNA, 18 nt, Artificial Sequence
  Synthetic
aguccucauuagccaugc

SEQ ID NO: 45586 - RNA, 19 nt, Artificial Sequence
  Synthetic
aaguccucauuagccaugc

SEQ ID NO: 45587 - RNA, 20 nt, Artificial Sequence
  Synthetic
uaaguccucauuagccaugc

SEQ ID NO: 45588 - RNA, 21 nt, Artificial Sequence
  Synthetic
uuaaguccucauuagccaugc

SEQ ID NO: 45589 - RNA, 22 nt, Artificial Sequence
  Synthetic
uuuaaguccucauuagccaugc

SEQ ID NO: 45590 - RNA, 24 nt, Artificial Sequence
  Synthetic
uguuuaaguccucauuagccaugc

SEQ ID NO: 45591 - RNA, 19 nt, Artificial Sequence
  Synthetic
ugaagcaucgauagcaugc

SEQ ID NO: 45592 - RNA, 20 nt, Artificial Sequence
  Synthetic
cugaagcaucgauagcaugc

SEQ ID NO: 45593 - RNA, 22 nt, Artificial Sequence
  Synthetic
agcugaagcaucgauagcaugc

SEQ ID NO: 45594 - RNA, 23 nt, Artificial Sequence
  Synthetic
cagcugaagcaucgauagcaugc

SEQ ID NO: 45595 - RNA, 24 nt, Artificial Sequence
  Synthetic
ucagcugaagcaucgauagcaugc

SEQ ID NO: 45596 - RNA, 18 nt, Artificial Sequence
  Synthetic
auaagagauggcucaugc

SEQ ID NO: 45597 - RNA, 19 nt, Artificial Sequence
  Synthetic
aauaagagauggcucaugc

SEQ ID NO: 45598 - RNA, 20 nt, Artificial Sequence
  Synthetic
aaauaagagauggcucaugc

SEQ ID NO: 45599 - RNA, 21 nt, Artificial Sequence
  Synthetic
aaaauaagagauggcucaugc

SEQ ID NO: 45600 - RNA, 22 nt, Artificial Sequence
  Synthetic
uaaaauaagagauggcucaugc

SEQ ID NO: 45601 - RNA, 18 nt, Artificial Sequence
  Synthetic
auuauuuugcugucaugc

SEQ ID NO: 45602 - RNA, 19 nt, Artificial Sequence
  Synthetic
aauuauuuugcugucaugc

SEQ ID NO: 45603 - RNA, 21 nt, Artificial Sequence
  Synthetic
ugaauuauuuugcugucaugc

SEQ ID NO: 45604 - RNA, 22 nt, Artificial Sequence
  Synthetic
cugaauuauuuugcugucaugc

SEQ ID NO: 45605 - RNA, 23 nt, Artificial Sequence
  Synthetic
ucugaauuauuuugcugucaugc

SEQ ID NO: 45606 - RNA, 24 nt, Artificial Sequence
  Synthetic
aucugaauuauuuugcugucaugc

SEQ ID NO: 45607 - RNA, 20 nt, Artificial Sequence
  Synthetic
uggaaauagucaauucaugc

SEQ ID NO: 45608 - RNA, 21 nt, Artificial Sequence
  Synthetic
uuggaaauagucaauucaugc

SEQ ID NO: 45609 - RNA, 23 nt, Artificial Sequence
  Synthetic
uguuggaaauagucaauucaugc

SEQ ID NO: 45610 - RNA, 24 nt, Artificial Sequence
  Synthetic
cuguuggaaauagucaauucaugc

SEQ ID NO: 45611 - RNA, 18 nt, Artificial Sequence
  Synthetic
agagugcugguuucaugc

SEQ ID NO: 45612 - RNA, 19 nt, Artificial Sequence
  Synthetic
uagagugcugguuucaugc

SEQ ID NO: 45613 - RNA, 20 nt, Artificial Sequence
  Synthetic
cuagagugcugguuucaugc

SEQ ID NO: 45614 - RNA, 21 nt, Artificial Sequence
  Synthetic
ucuagagugcugguuucaugc

SEQ ID NO: 45615 - RNA, 22 nt, Artificial Sequence
  Synthetic
uucuagagugcugguuucaugc

SEQ ID NO: 45616 - RNA, 24 nt, Artificial Sequence
  Synthetic
uguucuagagugcugguuucaugc

SEQ ID NO: 45617 - RNA, 21 nt, Artificial Sequence
  Synthetic
uaauccauggaugaaagaugc

SEQ ID NO: 45618 - RNA, 22 nt, Artificial Sequence
  Synthetic
cuaauccauggaugaaagaugc

SEQ ID NO: 45619 - RNA, 23 nt, Artificial Sequence
  Synthetic
acuaauccauggaugaaagaugc

SEQ ID NO: 45620 - RNA, 21 nt, Artificial Sequence
  Synthetic
caauagguacggaauggaugc

SEQ ID NO: 45621 - RNA, 22 nt, Artificial Sequence
  Synthetic
acaauagguacggaauggaugc

SEQ ID NO: 45622 - RNA, 23 nt, Artificial Sequence
  Synthetic
cacaauagguacggaauggaugc

SEQ ID NO: 45623 - RNA, 24 nt, Artificial Sequence
  Synthetic
acacaauagguacggaauggaugc

SEQ ID NO: 45624 - RNA, 19 nt, Artificial Sequence
  Synthetic
aggcuaaaaauauggaugc

SEQ ID NO: 45625 - RNA, 20 nt, Artificial Sequence
  Synthetic
uaggcuaaaaauauggaugc

SEQ ID NO: 45626 - RNA, 21 nt, Artificial Sequence
  Synthetic
uuaggcuaaaaauauggaugc

SEQ ID NO: 45627 - RNA, 22 nt, Artificial Sequence
  Synthetic
uuuaggcuaaaaauauggaugc

SEQ ID NO: 45628 - RNA, 24 nt, Artificial Sequence
  Synthetic
aguuuaggcuaaaaauauggaugc

SEQ ID NO: 45629 - RNA, 19 nt, Artificial Sequence
  Synthetic
agguaucaccuauggaugc

SEQ ID NO: 45630 - RNA, 20 nt, Artificial Sequence
  Synthetic
uagguaucaccuauggaugc

SEQ ID NO: 45631 - RNA, 21 nt, Artificial Sequence
  Synthetic
auagguaucaccuauggaugc

SEQ ID NO: 45632 - RNA, 22 nt, Artificial Sequence
  Synthetic
aauagguaucaccuauggaugc

SEQ ID NO: 45633 - RNA, 21 nt, Artificial Sequence
  Synthetic
aaauaaaguaauaaaugaugc

SEQ ID NO: 45634 - RNA, 23 nt, Artificial Sequence
  Synthetic
ugaaauaaaguaauaaaugaugc

SEQ ID NO: 45635 - RNA, 24 nt, Artificial Sequence
  Synthetic
augaaauaaaguaauaaaugaugc

SEQ ID NO: 45636 - RNA, 18 nt, Artificial Sequence
  Synthetic
uuuccuugcuaaugaugc

SEQ ID NO: 45637 - RNA, 19 nt, Artificial Sequence
  Synthetic
auuuccuugcuaaugaugc

SEQ ID NO: 45638 - RNA, 20 nt, Artificial Sequence
  Synthetic
cauuuccuugcuaaugaugc

SEQ ID NO: 45639 - RNA, 22 nt, Artificial Sequence
  Synthetic
agcauuuccuugcuaaugaugc

SEQ ID NO: 45640 - RNA, 23 nt, Artificial Sequence
  Synthetic
uagcauuuccuugcuaaugaugc

SEQ ID NO: 45641 - RNA, 24 nt, Artificial Sequence
  Synthetic
auagcauuuccuugcuaaugaugc

SEQ ID NO: 45642 - RNA, 18 nt, Artificial Sequence
  Synthetic
agacuuacuugaugaugc

SEQ ID NO: 45643 - RNA, 19 nt, Artificial Sequence
  Synthetic
uagacuuacuugaugaugc

SEQ ID NO: 45644 - RNA, 20 nt, Artificial Sequence
  Synthetic
cuagacuuacuugaugaugc

SEQ ID NO: 45645 - RNA, 21 nt, Artificial Sequence
  Synthetic
ucuagacuuacuugaugaugc

SEQ ID NO: 45646 - RNA, 22 nt, Artificial Sequence
  Synthetic
aucuagacuuacuugaugaugc

SEQ ID NO: 45647 - RNA, 24 nt, Artificial Sequence
  Synthetic
ugaucuagacuuacuugaugaugc

SEQ ID NO: 45648 - RNA, 19 nt, Artificial Sequence
  Synthetic
ugucaucagaauaugaugc

SEQ ID NO: 45649 - RNA, 21 nt, Artificial Sequence
  Synthetic
agugucaucagaauaugaugc

SEQ ID NO: 45650 - RNA, 22 nt, Artificial Sequence
  Synthetic
aagugucaucagaauaugaugc

SEQ ID NO: 45651 - RNA, 23 nt, Artificial Sequence
  Synthetic
caagugucaucagaauaugaugc

SEQ ID NO: 45652 - RNA, 18 nt, Artificial Sequence
  Synthetic
uuggggagauggugaugc

SEQ ID NO: 45653 - RNA, 19 nt, Artificial Sequence
  Synthetic
cuuggggagauggugaugc

SEQ ID NO: 45654 - RNA, 20 nt, Artificial Sequence
  Synthetic
acuuggggagauggugaugc

SEQ ID NO: 45655 - RNA, 22 nt, Artificial Sequence
  Synthetic
ugacuuggggagauggugaugc

SEQ ID NO: 45656 - RNA, 23 nt, Artificial Sequence
  Synthetic
augacuuggggagauggugaugc

SEQ ID NO: 45657 - RNA, 24 nt, Artificial Sequence
  Synthetic
caugacuuggggagauggugaugc

SEQ ID NO: 45658 - RNA, 18 nt, Artificial Sequence
  Synthetic
uaaaaauaaaguugaugc

SEQ ID NO: 45659 - RNA, 19 nt, Artificial Sequence
  Synthetic
uuaaaaauaaaguugaugc

SEQ ID NO: 45660 - RNA, 20 nt, Artificial Sequence
  Synthetic
cuuaaaaauaaaguugaugc

SEQ ID NO: 45661 - RNA, 23 nt, Artificial Sequence
  Synthetic
uggcuuaaaaauaaaguugaugc

SEQ ID NO: 45662 - RNA, 24 nt, Artificial Sequence
  Synthetic
uuggcuuaaaaauaaaguugaugc

SEQ ID NO: 45663 - RNA, 18 nt, Artificial Sequence
  Synthetic
ucuuauuaauuaauaugc

SEQ ID NO: 45664 - RNA, 19 nt, Artificial Sequence
  Synthetic
uucuuauuaauuaauaugc

SEQ ID NO: 45665 - RNA, 20 nt, Artificial Sequence
  Synthetic
uuucuuauuaauuaauaugc

SEQ ID NO: 45666 - RNA, 21 nt, Artificial Sequence
  Synthetic
uuuucuuauuaauuaauaugc

SEQ ID NO: 45667 - RNA, 22 nt, Artificial Sequence
  Synthetic
auuuucuuauuaauuaauaugc

SEQ ID NO: 45668 - RNA, 23 nt, Artificial Sequence
  Synthetic
cauuuucuuauuaauuaauaugc

SEQ ID NO: 45669 - RNA, 18 nt, Artificial Sequence
  Synthetic
uauuccugacagauaugc

SEQ ID NO: 45670 - RNA, 19 nt, Artificial Sequence
  Synthetic
uuauuccugacagauaugc

SEQ ID NO: 45671 - RNA, 20 nt, Artificial Sequence
  Synthetic
uuuauuccugacagauaugc

SEQ ID NO: 45672 - RNA, 21 nt, Artificial Sequence
  Synthetic
uuuuauuccugacagauaugc

SEQ ID NO: 45673 - RNA, 22 nt, Artificial Sequence
  Synthetic
auuuuauuccugacagauaugc

SEQ ID NO: 45674 - RNA, 24 nt, Artificial Sequence
  Synthetic
ugauuuuauuccugacagauaugc

SEQ ID NO: 45675 - RNA, 18 nt, Artificial Sequence
  Synthetic
agaauuucccacuuaugc

SEQ ID NO: 45676 - RNA, 19 nt, Artificial Sequence
  Synthetic
aagaauuucccacuuaugc

SEQ ID NO: 45677 - RNA, 21 nt, Artificial Sequence
  Synthetic
ugaagaauuucccacuuaugc

SEQ ID NO: 45678 - RNA, 22 nt, Artificial Sequence
  Synthetic
uugaagaauuucccacuuaugc

SEQ ID NO: 45679 - RNA, 23 nt, Artificial Sequence
  Synthetic
uuugaagaauuucccacuuaugc

SEQ ID NO: 45680 - RNA, 24 nt, Artificial Sequence
  Synthetic
auuugaagaauuucccacuuaugc

SEQ ID NO: 45681 - RNA, 19 nt, Artificial Sequence
  Synthetic
aggugguuaccucuuaugc

SEQ ID NO: 45682 - RNA, 20 nt, Artificial Sequence
  Synthetic
aaggugguuaccucuuaugc

SEQ ID NO: 45683 - RNA, 22 nt, Artificial Sequence
  Synthetic
ugaaggugguuaccucuuaugc

SEQ ID NO: 45684 - RNA, 23 nt, Artificial Sequence
  Synthetic
cugaaggugguuaccucuuaugc

SEQ ID NO: 45685 - RNA, 24 nt, Artificial Sequence
  Synthetic
ucugaaggugguuaccucuuaugc

SEQ ID NO: 45686 - RNA, 18 nt, Artificial Sequence
  Synthetic
uuguaguugcgguuaugc

SEQ ID NO: 45687 - RNA, 19 nt, Artificial Sequence
  Synthetic
cuuguaguugcgguuaugc

SEQ ID NO: 45688 - RNA, 20 nt, Artificial Sequence
  Synthetic
ccuuguaguugcgguuaugc

SEQ ID NO: 45689 - RNA, 21 nt, Artificial Sequence
  Synthetic
uccuuguaguugcgguuaugc

SEQ ID NO: 45690 - RNA, 22 nt, Artificial Sequence
  Synthetic
uuccuuguaguugcgguuaugc

SEQ ID NO: 45691 - RNA, 23 nt, Artificial Sequence
  Synthetic
uuuccuuguaguugcgguuaugc

SEQ ID NO: 45692 - RNA, 24 nt, Artificial Sequence
  Synthetic
auuuccuuguaguugcgguuaugc

SEQ ID NO: 45693 - RNA, 18 nt, Artificial Sequence
  Synthetic
cuaauacauuguuuaugc

SEQ ID NO: 45694 - RNA, 19 nt, Artificial Sequence
  Synthetic
ucuaauacauuguuuaugc

SEQ ID NO: 45695 - RNA, 20 nt, Artificial Sequence
  Synthetic
uucuaauacauuguuuaugc

SEQ ID NO: 45696 - RNA, 22 nt, Artificial Sequence
  Synthetic
uguucuaauacauuguuuaugc

SEQ ID NO: 45697 - RNA, 24 nt, Artificial Sequence
  Synthetic
uguguucuaauacauuguuuaugc

SEQ ID NO: 45698 - RNA, 18 nt, Artificial Sequence
  Synthetic
accucacagaaccacugc

SEQ ID NO: 45699 - RNA, 21 nt, Artificial Sequence
  Synthetic
uggaccucacagaaccacugc

SEQ ID NO: 45700 - RNA, 22 nt, Artificial Sequence
  Synthetic
uuggaccucacagaaccacugc

SEQ ID NO: 45701 - RNA, 23 nt, Artificial Sequence
  Synthetic
uuuggaccucacagaaccacugc

SEQ ID NO: 45702 - RNA, 24 nt, Artificial Sequence
  Synthetic
auuuggaccucacagaaccacugc

SEQ ID NO: 45703 - RNA, 18 nt, Artificial Sequence
  Synthetic
uagcugaaacuugacugc

SEQ ID NO: 45704 - RNA, 19 nt, Artificial Sequence
  Synthetic
uuagcugaaacuugacugc

SEQ ID NO: 45705 - RNA, 20 nt, Artificial Sequence
  Synthetic
auuagcugaaacuugacugc

SEQ ID NO: 45706 - RNA, 18 nt, Artificial Sequence
  Synthetic
ugaagcuaucuuuacugc

SEQ ID NO: 45707 - RNA, 20 nt, Artificial Sequence
  Synthetic
ugugaagcuaucuuuacugc

SEQ ID NO: 45708 - RNA, 21 nt, Artificial Sequence
  Synthetic
augugaagcuaucuuuacugc

SEQ ID NO: 45709 - RNA, 23 nt, Artificial Sequence
  Synthetic
ugaugugaagcuaucuuuacugc

SEQ ID NO: 45710 - RNA, 24 nt, Artificial Sequence
  Synthetic
augaugugaagcuaucuuuacugc

SEQ ID NO: 45711 - RNA, 18 nt, Artificial Sequence
  Synthetic
uugagcacuaaaaccugc

SEQ ID NO: 45712 - RNA, 19 nt, Artificial Sequence
  Synthetic
uuugagcacuaaaaccugc

SEQ ID NO: 45713 - RNA, 20 nt, Artificial Sequence
  Synthetic
cuuugagcacuaaaaccugc

SEQ ID NO: 45714 - RNA, 21 nt, Artificial Sequence
  Synthetic
acuuugagcacuaaaaccugc

SEQ ID NO: 45715 - RNA, 22 nt, Artificial Sequence
  Synthetic
uacuuugagcacuaaaaccugc

SEQ ID NO: 45716 - RNA, 23 nt, Artificial Sequence
  Synthetic
uuacuuugagcacuaaaaccugc

SEQ ID NO: 45717 - RNA, 24 nt, Artificial Sequence
  Synthetic
uuuacuuugagcacuaaaaccugc

SEQ ID NO: 45718 - RNA, 19 nt, Artificial Sequence
  Synthetic
agcaggaguaugggccugc

SEQ ID NO: 45719 - RNA, 20 nt, Artificial Sequence
  Synthetic
cagcaggaguaugggccugc

SEQ ID NO: 45720 - RNA, 21 nt, Artificial Sequence
  Synthetic
ucagcaggaguaugggccugc

SEQ ID NO: 45721 - RNA, 22 nt, Artificial Sequence
  Synthetic
uucagcaggaguaugggccugc

SEQ ID NO: 45722 - RNA, 23 nt, Artificial Sequence
  Synthetic
uuucagcaggaguaugggccugc

SEQ ID NO: 45723 - RNA, 18 nt, Artificial Sequence
  Synthetic
ccaaaccuggcugccugc

SEQ ID NO: 45724 - RNA, 19 nt, Artificial Sequence
  Synthetic
uccaaaccuggcugccugc

SEQ ID NO: 45725 - RNA, 20 nt, Artificial Sequence
  Synthetic
uuccaaaccuggcugccugc

SEQ ID NO: 45726 - RNA, 21 nt, Artificial Sequence
  Synthetic
cuuccaaaccuggcugccugc

SEQ ID NO: 45727 - RNA, 22 nt, Artificial Sequence
  Synthetic
acuuccaaaccuggcugccugc

SEQ ID NO: 45728 - RNA, 23 nt, Artificial Sequence
  Synthetic
uacuuccaaaccuggcugccugc

SEQ ID NO: 45729 - RNA, 18 nt, Artificial Sequence
  Synthetic
aaacgcaguucuagcugc

SEQ ID NO: 45730 - RNA, 19 nt, Artificial Sequence
  Synthetic
caaacgcaguucuagcugc

SEQ ID NO: 45731 - RNA, 20 nt, Artificial Sequence
  Synthetic
ccaaacgcaguucuagcugc

SEQ ID NO: 45732 - RNA, 22 nt, Artificial Sequence
  Synthetic
ugccaaacgcaguucuagcugc

SEQ ID NO: 45733 - RNA, 24 nt, Artificial Sequence
  Synthetic
ugugccaaacgcaguucuagcugc

SEQ ID NO: 45734 - RNA, 18 nt, Artificial Sequence
  Synthetic
cagaaaauuuaaggcugc

SEQ ID NO: 45735 - RNA, 21 nt, Artificial Sequence
  Synthetic
uggcagaaaauuuaaggcugc

SEQ ID NO: 45736 - RNA, 23 nt, Artificial Sequence
  Synthetic
uguggcagaaaauuuaaggcugc

SEQ ID NO: 45737 - RNA, 24 nt, Artificial Sequence
  Synthetic
auguggcagaaaauuuaaggcugc

SEQ ID NO: 45738 - RNA, 19 nt, Artificial Sequence
  Synthetic
agcaugcccaguaugcugc

SEQ ID NO: 45739 - RNA, 20 nt, Artificial Sequence
  Synthetic
cagcaugcccaguaugcugc

SEQ ID NO: 45740 - RNA, 21 nt, Artificial Sequence
  Synthetic
acagcaugcccaguaugcugc

SEQ ID NO: 45741 - RNA, 22 nt, Artificial Sequence
  Synthetic
cacagcaugcccaguaugcugc

SEQ ID NO: 45742 - RNA, 23 nt, Artificial Sequence
  Synthetic
ccacagcaugcccaguaugcugc

SEQ ID NO: 45743 - RNA, 24 nt, Artificial Sequence
  Synthetic
uccacagcaugcccaguaugcugc

SEQ ID NO: 45744 - RNA, 18 nt, Artificial Sequence
  Synthetic
cccauccauucuugcugc

SEQ ID NO: 45745 - RNA, 20 nt, Artificial Sequence
  Synthetic
agcccauccauucuugcugc

SEQ ID NO: 45746 - RNA, 21 nt, Artificial Sequence
  Synthetic
cagcccauccauucuugcugc

SEQ ID NO: 45747 - RNA, 23 nt, Artificial Sequence
  Synthetic
agcagcccauccauucuugcugc

SEQ ID NO: 45748 - RNA, 18 nt, Artificial Sequence
  Synthetic
ugcggauuuuaaaucugc

SEQ ID NO: 45749 - RNA, 19 nt, Artificial Sequence
  Synthetic
augcggauuuuaaaucugc

SEQ ID NO: 45750 - RNA, 20 nt, Artificial Sequence
  Synthetic
aaugcggauuuuaaaucugc

SEQ ID NO: 45751 - RNA, 22 nt, Artificial Sequence
  Synthetic
cgaaugcggauuuuaaaucugc

SEQ ID NO: 45752 - RNA, 23 nt, Artificial Sequence
  Synthetic
ucgaaugcggauuuuaaaucugc

SEQ ID NO: 45753 - RNA, 24 nt, Artificial Sequence
  Synthetic
uucgaaugcggauuuuaaaucugc

SEQ ID NO: 45754 - RNA, 20 nt, Artificial Sequence
  Synthetic
agggcuguuuaaaucucugc

SEQ ID NO: 45755 - RNA, 22 nt, Artificial Sequence
  Synthetic
ugagggcuguuuaaaucucugc

SEQ ID NO: 45756 - RNA, 24 nt, Artificial Sequence
  Synthetic
ugugagggcuguuuaaaucucugc

SEQ ID NO: 45757 - RNA, 18 nt, Artificial Sequence
  Synthetic
uugguagcuuuucucugc

SEQ ID NO: 45758 - RNA, 19 nt, Artificial Sequence
  Synthetic
cuugguagcuuuucucugc

SEQ ID NO: 45759 - RNA, 20 nt, Artificial Sequence
  Synthetic
ccuugguagcuuuucucugc

SEQ ID NO: 45760 - RNA, 21 nt, Artificial Sequence
  Synthetic
cccuugguagcuuuucucugc

SEQ ID NO: 45761 - RNA, 22 nt, Artificial Sequence
  Synthetic
ucccuugguagcuuuucucugc

SEQ ID NO: 45762 - RNA, 23 nt, Artificial Sequence
  Synthetic
uucccuugguagcuuuucucugc

SEQ ID NO: 45763 - RNA, 24 nt, Artificial Sequence
  Synthetic
auucccuugguagcuuuucucugc

SEQ ID NO: 45764 - RNA, 19 nt, Artificial Sequence
  Synthetic
ugaccaaacuucguucugc

SEQ ID NO: 45765 - RNA, 20 nt, Artificial Sequence
  Synthetic
uugaccaaacuucguucugc

SEQ ID NO: 45766 - RNA, 21 nt, Artificial Sequence
  Synthetic
uuugaccaaacuucguucugc

SEQ ID NO: 45767 - RNA, 22 nt, Artificial Sequence
  Synthetic
auuugaccaaacuucguucugc

SEQ ID NO: 45768 - RNA, 23 nt, Artificial Sequence
  Synthetic
uauuugaccaaacuucguucugc

SEQ ID NO: 45769 - RNA, 24 nt, Artificial Sequence
  Synthetic
auauuugaccaaacuucguucugc

SEQ ID NO: 45770 - RNA, 20 nt, Artificial Sequence
  Synthetic
ugguacugcagccuuucugc

SEQ ID NO: 45771 - RNA, 21 nt, Artificial Sequence
  Synthetic
augguacugcagccuuucugc

SEQ ID NO: 45772 - RNA, 22 nt, Artificial Sequence
  Synthetic
aaugguacugcagccuuucugc

SEQ ID NO: 45773 - RNA, 23 nt, Artificial Sequence
  Synthetic
aaaugguacugcagccuuucugc

SEQ ID NO: 45774 - RNA, 18 nt, Artificial Sequence
  Synthetic
uacccuuugccuuucugc

SEQ ID NO: 45775 - RNA, 19 nt, Artificial Sequence
  Synthetic
auacccuuugccuuucugc

SEQ ID NO: 45776 - RNA, 20 nt, Artificial Sequence
  Synthetic
aauacccuuugccuuucugc

SEQ ID NO: 45777 - RNA, 21 nt, Artificial Sequence
  Synthetic
aaauacccuuugccuuucugc

SEQ ID NO: 45778 - RNA, 24 nt, Artificial Sequence
  Synthetic
cggaaauacccuuugccuuucugc

SEQ ID NO: 45779 - RNA, 18 nt, Artificial Sequence
  Synthetic
aggcauuucuguuucugc

SEQ ID NO: 45780 - RNA, 20 nt, Artificial Sequence
  Synthetic
ugaggcauuucuguuucugc

SEQ ID NO: 45781 - RNA, 21 nt, Artificial Sequence
  Synthetic
cugaggcauuucuguuucugc

SEQ ID NO: 45782 - RNA, 22 nt, Artificial Sequence
  Synthetic
ccugaggcauuucuguuucugc

SEQ ID NO: 45783 - RNA, 23 nt, Artificial Sequence
  Synthetic
accugaggcauuucuguuucugc

SEQ ID NO: 45784 - RNA, 24 nt, Artificial Sequence
  Synthetic
uaccugaggcauuucuguuucugc

SEQ ID NO: 45785 - RNA, 18 nt, Artificial Sequence
  Synthetic
ugauuuugaugucagugc

SEQ ID NO: 45786 - RNA, 19 nt, Artificial Sequence
  Synthetic
uugauuuugaugucagugc

SEQ ID NO: 45787 - RNA, 20 nt, Artificial Sequence
  Synthetic
auugauuuugaugucagugc

SEQ ID NO: 45788 - RNA, 21 nt, Artificial Sequence
  Synthetic
cauugauuuugaugucagugc

SEQ ID NO: 45789 - RNA, 22 nt, Artificial Sequence
  Synthetic
ucauugauuuugaugucagugc

SEQ ID NO: 45790 - RNA, 23 nt, Artificial Sequence
  Synthetic
uucauugauuuugaugucagugc

SEQ ID NO: 45791 - RNA, 24 nt, Artificial Sequence
  Synthetic
uuucauugauuuugaugucagugc

SEQ ID NO: 45792 - RNA, 18 nt, Artificial Sequence
  Synthetic
auguuuaucugugagugc

SEQ ID NO: 45793 - RNA, 20 nt, Artificial Sequence
  Synthetic
agauguuuaucugugagugc

SEQ ID NO: 45794 - RNA, 21 nt, Artificial Sequence
  Synthetic
aagauguuuaucugugagugc

SEQ ID NO: 45795 - RNA, 22 nt, Artificial Sequence
  Synthetic
caagauguuuaucugugagugc

SEQ ID NO: 45796 - RNA, 18 nt, Artificial Sequence
  Synthetic
agggcuuucaaauagugc

SEQ ID NO: 45797 - RNA, 19 nt, Artificial Sequence
  Synthetic
aagggcuuucaaauagugc

SEQ ID NO: 45798 - RNA, 21 nt, Artificial Sequence
  Synthetic
agaagggcuuucaaauagugc

SEQ ID NO: 45799 - RNA, 22 nt, Artificial Sequence
  Synthetic
cagaagggcuuucaaauagugc

SEQ ID NO: 45800 - RNA, 23 nt, Artificial Sequence
  Synthetic
ucagaagggcuuucaaauagugc

SEQ ID NO: 45801 - RNA, 24 nt, Artificial Sequence
  Synthetic
cucagaagggcuuucaaauagugc

SEQ ID NO: 45802 - RNA, 18 nt, Artificial Sequence
  Synthetic
agaaggcauaaauagugc

SEQ ID NO: 45803 - RNA, 19 nt, Artificial Sequence
  Synthetic
uagaaggcauaaauagugc

SEQ ID NO: 45804 - RNA, 20 nt, Artificial Sequence
  Synthetic
uuagaaggcauaaauagugc

SEQ ID NO: 45805 - RNA, 21 nt, Artificial Sequence
  Synthetic
auuagaaggcauaaauagugc

SEQ ID NO: 45806 - RNA, 22 nt, Artificial Sequence
  Synthetic
cauuagaaggcauaaauagugc

SEQ ID NO: 45807 - RNA, 23 nt, Artificial Sequence
  Synthetic
ucauuagaaggcauaaauagugc

SEQ ID NO: 45808 - RNA, 24 nt, Artificial Sequence
  Synthetic
uucauuagaaggcauaaauagugc

SEQ ID NO: 45809 - RNA, 18 nt, Artificial Sequence
  Synthetic
uuagucaagucuuagugc

SEQ ID NO: 45810 - RNA, 19 nt, Artificial Sequence
  Synthetic
uuuagucaagucuuagugc

SEQ ID NO: 45811 - RNA, 21 nt, Artificial Sequence
  Synthetic
aguuuagucaagucuuagugc

SEQ ID NO: 45812 - RNA, 23 nt, Artificial Sequence
  Synthetic
agaguuuagucaagucuuagugc

SEQ ID NO: 45813 - RNA, 24 nt, Artificial Sequence
  Synthetic
uagaguuuagucaagucuuagugc

SEQ ID NO: 45814 - RNA, 18 nt, Artificial Sequence
  Synthetic
uccuauguuuaaacgugc

SEQ ID NO: 45815 - RNA, 19 nt, Artificial Sequence
  Synthetic
uuccuauguuuaaacgugc

SEQ ID NO: 45816 - RNA, 20 nt, Artificial Sequence
  Synthetic
uuuccuauguuuaaacgugc

SEQ ID NO: 45817 - RNA, 21 nt, Artificial Sequence
  Synthetic
cuuuccuauguuuaaacgugc

SEQ ID NO: 45818 - RNA, 22 nt, Artificial Sequence
  Synthetic
ucuuuccuauguuuaaacgugc

SEQ ID NO: 45819 - RNA, 23 nt, Artificial Sequence
  Synthetic
uucuuuccuauguuuaaacgugc

SEQ ID NO: 45820 - RNA, 24 nt, Artificial Sequence
  Synthetic
auucuuuccuauguuuaaacgugc

SEQ ID NO: 45821 - RNA, 18 nt, Artificial Sequence
  Synthetic
auaggauauggaaggugc

SEQ ID NO: 45822 - RNA, 19 nt, Artificial Sequence
  Synthetic
uauaggauauggaaggugc

SEQ ID NO: 45823 - RNA, 20 nt, Artificial Sequence
  Synthetic
cuauaggauauggaaggugc

SEQ ID NO: 45824 - RNA, 21 nt, Artificial Sequence
  Synthetic
acuauaggauauggaaggugc

SEQ ID NO: 45825 - RNA, 23 nt, Artificial Sequence
  Synthetic
ugacuauaggauauggaaggugc

SEQ ID NO: 45826 - RNA, 20 nt, Artificial Sequence
  Synthetic
aggcagaagacuuacggugc

SEQ ID NO: 45827 - RNA, 21 nt, Artificial Sequence
  Synthetic
caggcagaagacuuacggugc

SEQ ID NO: 45828 - RNA, 22 nt, Artificial Sequence
  Synthetic
ucaggcagaagacuuacggugc

SEQ ID NO: 45829 - RNA, 23 nt, Artificial Sequence
  Synthetic
cucaggcagaagacuuacggugc

SEQ ID NO: 45830 - RNA, 24 nt, Artificial Sequence
  Synthetic
ucucaggcagaagacuuacggugc

SEQ ID NO: 45831 - RNA, 18 nt, Artificial Sequence
  Synthetic
caucuagaaaaugggugc

SEQ ID NO: 45832 - RNA, 19 nt, Artificial Sequence
  Synthetic
acaucuagaaaaugggugc

SEQ ID NO: 45833 - RNA, 20 nt, Artificial Sequence
  Synthetic
cacaucuagaaaaugggugc

SEQ ID NO: 45834 - RNA, 21 nt, Artificial Sequence
  Synthetic
ucacaucuagaaaaugggugc

SEQ ID NO: 45835 - RNA, 22 nt, Artificial Sequence
  Synthetic
uucacaucuagaaaaugggugc

SEQ ID NO: 45836 - RNA, 23 nt, Artificial Sequence
  Synthetic
uuucacaucuagaaaaugggugc

SEQ ID NO: 45837 - RNA, 24 nt, Artificial Sequence
  Synthetic
uuuucacaucuagaaaaugggugc

SEQ ID NO: 45838 - RNA, 18 nt, Artificial Sequence
  Synthetic
ucuuucacaaccuggugc

SEQ ID NO: 45839 - RNA, 20 nt, Artificial Sequence
  Synthetic
agucuuucacaaccuggugc

SEQ ID NO: 45840 - RNA, 20 nt, Artificial Sequence
  Synthetic
ugguaauaaaucuguggugc

SEQ ID NO: 45841 - RNA, 21 nt, Artificial Sequence
  Synthetic
augguaauaaaucuguggugc

SEQ ID NO: 45842 - RNA, 22 nt, Artificial Sequence
  Synthetic
caugguaauaaaucuguggugc

SEQ ID NO: 45843 - RNA, 23 nt, Artificial Sequence
  Synthetic
acaugguaauaaaucuguggugc

SEQ ID NO: 45844 - RNA, 18 nt, Artificial Sequence
  Synthetic
cacacaugaaguaugugc

SEQ ID NO: 45845 - RNA, 19 nt, Artificial Sequence
  Synthetic
ucacacaugaaguaugugc

SEQ ID NO: 45846 - RNA, 20 nt, Artificial Sequence
  Synthetic
cucacacaugaaguaugugc

SEQ ID NO: 45847 - RNA, 22 nt, Artificial Sequence
  Synthetic
agcucacacaugaaguaugugc

SEQ ID NO: 45848 - RNA, 23 nt, Artificial Sequence
  Synthetic
aagcucacacaugaaguaugugc

SEQ ID NO: 45849 - RNA, 24 nt, Artificial Sequence
  Synthetic
uaagcucacacaugaaguaugugc

SEQ ID NO: 45850 - RNA, 18 nt, Artificial Sequence
  Synthetic
aucuguuucuaauugugc

SEQ ID NO: 45851 - RNA, 19 nt, Artificial Sequence
  Synthetic
caucuguuucuaauugugc

SEQ ID NO: 45852 - RNA, 20 nt, Artificial Sequence
  Synthetic
acaucuguuucuaauugugc

SEQ ID NO: 45853 - RNA, 21 nt, Artificial Sequence
  Synthetic
uacaucuguuucuaauugugc

SEQ ID NO: 45854 - RNA, 22 nt, Artificial Sequence
  Synthetic
uuacaucuguuucuaauugugc

SEQ ID NO: 45855 - RNA, 24 nt, Artificial Sequence
  Synthetic
uguuacaucuguuucuaauugugc

SEQ ID NO: 45856 - RNA, 18 nt, Artificial Sequence
  Synthetic
agagucuauuaaaauugc

SEQ ID NO: 45857 - RNA, 19 nt, Artificial Sequence
  Synthetic
uagagucuauuaaaauugc

SEQ ID NO: 45858 - RNA, 20 nt, Artificial Sequence
  Synthetic
auagagucuauuaaaauugc

SEQ ID NO: 45859 - RNA, 21 nt, Artificial Sequence
  Synthetic
aauagagucuauuaaaauugc

SEQ ID NO: 45860 - RNA, 22 nt, Artificial Sequence
  Synthetic
caauagagucuauuaaaauugc

SEQ ID NO: 45861 - RNA, 23 nt, Artificial Sequence
  Synthetic
acaauagagucuauuaaaauugc

SEQ ID NO: 45862 - RNA, 19 nt, Artificial Sequence
  Synthetic
uguaugacaucacaauugc

SEQ ID NO: 45863 - RNA, 20 nt, Artificial Sequence
  Synthetic
uuguaugacaucacaauugc

SEQ ID NO: 45864 - RNA, 23 nt, Artificial Sequence
  Synthetic
ugguuguaugacaucacaauugc

SEQ ID NO: 45865 - RNA, 24 nt, Artificial Sequence
  Synthetic
uugguuguaugacaucacaauugc

SEQ ID NO: 45866 - RNA, 18 nt, Artificial Sequence
  Synthetic
ccuugaguuuauaauugc

SEQ ID NO: 45867 - RNA, 19 nt, Artificial Sequence
  Synthetic
cccuugaguuuauaauugc

SEQ ID NO: 45868 - RNA, 23 nt, Artificial Sequence
  Synthetic
ugggcccuugaguuuauaauugc

SEQ ID NO: 45869 - RNA, 24 nt, Artificial Sequence
  Synthetic
augggcccuugaguuuauaauugc

SEQ ID NO: 45870 - RNA, 18 nt, Artificial Sequence
  Synthetic
ugaaaacauagagauugc

SEQ ID NO: 45871 - RNA, 19 nt, Artificial Sequence
  Synthetic
uugaaaacauagagauugc

SEQ ID NO: 45872 - RNA, 22 nt, Artificial Sequence
  Synthetic
ugguugaaaacauagagauugc

SEQ ID NO: 45873 - RNA, 23 nt, Artificial Sequence
  Synthetic
augguugaaaacauagagauugc

SEQ ID NO: 45874 - RNA, 24 nt, Artificial Sequence
  Synthetic
aaugguugaaaacauagagauugc

SEQ ID NO: 45875 - RNA, 19 nt, Artificial Sequence
  Synthetic
uguucauuauuuagauugc

SEQ ID NO: 45876 - RNA, 21 nt, Artificial Sequence
  Synthetic
aguguucauuauuuagauugc

SEQ ID NO: 45877 - RNA, 22 nt, Artificial Sequence
  Synthetic
uaguguucauuauuuagauugc

SEQ ID NO: 45878 - RNA, 23 nt, Artificial Sequence
  Synthetic
uuaguguucauuauuuagauugc

SEQ ID NO: 45879 - RNA, 24 nt, Artificial Sequence
  Synthetic
auuaguguucauuauuuagauugc

SEQ ID NO: 45880 - RNA, 18 nt, Artificial Sequence
  Synthetic
aauuacccauuugauugc

SEQ ID NO: 45881 - RNA, 19 nt, Artificial Sequence
  Synthetic
caauuacccauuugauugc

SEQ ID NO: 45882 - RNA, 20 nt, Artificial Sequence
  Synthetic
ucaauuacccauuugauugc

SEQ ID NO: 45883 - RNA, 21 nt, Artificial Sequence
  Synthetic
uucaauuacccauuugauugc

SEQ ID NO: 45884 - RNA, 22 nt, Artificial Sequence
  Synthetic
auucaauuacccauuugauugc

SEQ ID NO: 45885 - RNA, 23 nt, Artificial Sequence
  Synthetic
aauucaauuacccauuugauugc

SEQ ID NO: 45886 - RNA, 24 nt, Artificial Sequence
  Synthetic
uaauucaauuacccauuugauugc

SEQ ID NO: 45887 - RNA, 18 nt, Artificial Sequence
  Synthetic
ccagguacagcauauugc

SEQ ID NO: 45888 - RNA, 19 nt, Artificial Sequence
  Synthetic
accagguacagcauauugc

SEQ ID NO: 45889 - RNA, 20 nt, Artificial Sequence
  Synthetic
aaccagguacagcauauugc

SEQ ID NO: 45890 - RNA, 21 nt, Artificial Sequence
  Synthetic
aaaccagguacagcauauugc

SEQ ID NO: 45891 - RNA, 22 nt, Artificial Sequence
  Synthetic
caaaccagguacagcauauugc

SEQ ID NO: 45892 - RNA, 24 nt, Artificial Sequence
  Synthetic
agcaaaccagguacagcauauugc

SEQ ID NO: 45893 - RNA, 18 nt, Artificial Sequence
  Synthetic
acagaaagccauuauugc

SEQ ID NO: 45894 - RNA, 21 nt, Artificial Sequence
  Synthetic
uggacagaaagccauuauugc

SEQ ID NO: 45895 - RNA, 23 nt, Artificial Sequence
  Synthetic
aguggacagaaagccauuauugc

SEQ ID NO: 45896 - RNA, 18 nt, Artificial Sequence
  Synthetic
caagguuauuuaacuugc

SEQ ID NO: 45897 - RNA, 19 nt, Artificial Sequence
  Synthetic
ccaagguuauuuaacuugc

SEQ ID NO: 45898 - RNA, 20 nt, Artificial Sequence
  Synthetic
uccaagguuauuuaacuugc

SEQ ID NO: 45899 - RNA, 21 nt, Artificial Sequence
  Synthetic
uuccaagguuauuuaacuugc

SEQ ID NO: 45900 - RNA, 22 nt, Artificial Sequence
  Synthetic
cuuccaagguuauuuaacuugc

SEQ ID NO: 45901 - RNA, 19 nt, Artificial Sequence
  Synthetic
aggcccuaccuccacuugc

SEQ ID NO: 45902 - RNA, 20 nt, Artificial Sequence
  Synthetic
aaggcccuaccuccacuugc

SEQ ID NO: 45903 - RNA, 21 nt, Artificial Sequence
  Synthetic
aaaggcccuaccuccacuugc

SEQ ID NO: 45904 - RNA, 22 nt, Artificial Sequence
  Synthetic
uaaaggcccuaccuccacuugc

SEQ ID NO: 45905 - RNA, 23 nt, Artificial Sequence
  Synthetic
uuaaaggcccuaccuccacuugc

SEQ ID NO: 45906 - RNA, 24 nt, Artificial Sequence
  Synthetic
uuuaaaggcccuaccuccacuugc

SEQ ID NO: 45907 - RNA, 18 nt, Artificial Sequence
  Synthetic
ucucaccuuuugacuugc

SEQ ID NO: 45908 - RNA, 20 nt, Artificial Sequence
  Synthetic
ugucucaccuuuugacuugc

SEQ ID NO: 45909 - RNA, 21 nt, Artificial Sequence
  Synthetic
augucucaccuuuugacuugc

SEQ ID NO: 45910 - RNA, 22 nt, Artificial Sequence
  Synthetic
aaugucucaccuuuugacuugc

SEQ ID NO: 45911 - RNA, 23 nt, Artificial Sequence
  Synthetic
aaaugucucaccuuuugacuugc

SEQ ID NO: 45912 - RNA, 24 nt, Artificial Sequence
  Synthetic
aaaaugucucaccuuuugacuugc

SEQ ID NO: 45913 - RNA, 18 nt, Artificial Sequence
  Synthetic
acguaauuaaaaccuugc

SEQ ID NO: 45914 - RNA, 19 nt, Artificial Sequence
  Synthetic
uacguaauuaaaaccuugc

SEQ ID NO: 45915 - RNA, 20 nt, Artificial Sequence
  Synthetic
auacguaauuaaaaccuugc

SEQ ID NO: 45916 - RNA, 21 nt, Artificial Sequence
  Synthetic
uauacguaauuaaaaccuugc

SEQ ID NO: 45917 - RNA, 22 nt, Artificial Sequence
  Synthetic
auauacguaauuaaaaccuugc

SEQ ID NO: 45918 - RNA, 23 nt, Artificial Sequence
  Synthetic
uauauacguaauuaaaaccuugc

SEQ ID NO: 45919 - RNA, 18 nt, Artificial Sequence
  Synthetic
agaauguuucuagcuugc

SEQ ID NO: 45920 - RNA, 19 nt, Artificial Sequence
  Synthetic
uagaauguuucuagcuugc

SEQ ID NO: 45921 - RNA, 20 nt, Artificial Sequence
  Synthetic
uuagaauguuucuagcuugc

SEQ ID NO: 45922 - RNA, 21 nt, Artificial Sequence
  Synthetic
auuagaauguuucuagcuugc

SEQ ID NO: 45923 - RNA, 22 nt, Artificial Sequence
  Synthetic
aauuagaauguuucuagcuugc

SEQ ID NO: 45924 - RNA, 23 nt, Artificial Sequence
  Synthetic
uaauuagaauguuucuagcuugc

SEQ ID NO: 45925 - RNA, 18 nt, Artificial Sequence
  Synthetic
auaguauagaguucuugc

SEQ ID NO: 45926 - RNA, 19 nt, Artificial Sequence
  Synthetic
cauaguauagaguucuugc

SEQ ID NO: 45927 - RNA, 20 nt, Artificial Sequence
  Synthetic
ucauaguauagaguucuugc

SEQ ID NO: 45928 - RNA, 21 nt, Artificial Sequence
  Synthetic
uucauaguauagaguucuugc

SEQ ID NO: 45929 - RNA, 22 nt, Artificial Sequence
  Synthetic
uuucauaguauagaguucuugc

SEQ ID NO: 45930 - RNA, 23 nt, Artificial Sequence
  Synthetic
cuuucauaguauagaguucuugc

SEQ ID NO: 45931 - RNA, 24 nt, Artificial Sequence
  Synthetic
ucuuucauaguauagaguucuugc

SEQ ID NO: 45932 - RNA, 18 nt, Artificial Sequence
  Synthetic
ucuggugcucugaguugc

SEQ ID NO: 45933 - RNA, 20 nt, Artificial Sequence
  Synthetic
ugucuggugcucugaguugc

SEQ ID NO: 45934 - RNA, 21 nt, Artificial Sequence
  Synthetic
cugucuggugcucugaguugc

SEQ ID NO: 45935 - RNA, 22 nt, Artificial Sequence
  Synthetic
ccugucuggugcucugaguugc

SEQ ID NO: 45936 - RNA, 23 nt, Artificial Sequence
  Synthetic
uccugucuggugcucugaguugc

SEQ ID NO: 45937 - RNA, 24 nt, Artificial Sequence
  Synthetic
cuccugucuggugcucugaguugc

SEQ ID NO: 45938 - RNA, 18 nt, Artificial Sequence
  Synthetic
ccagcuauacuguguugc

SEQ ID NO: 45939 - RNA, 19 nt, Artificial Sequence
  Synthetic
cccagcuauacuguguugc

SEQ ID NO: 45940 - RNA, 20 nt, Artificial Sequence
  Synthetic
ccccagcuauacuguguugc

SEQ ID NO: 45941 - RNA, 21 nt, Artificial Sequence
  Synthetic
accccagcuauacuguguugc

SEQ ID NO: 45942 - RNA, 22 nt, Artificial Sequence
  Synthetic
caccccagcuauacuguguugc

SEQ ID NO: 45943 - RNA, 23 nt, Artificial Sequence
  Synthetic
ucaccccagcuauacuguguugc

SEQ ID NO: 45944 - RNA, 24 nt, Artificial Sequence
  Synthetic
uucaccccagcuauacuguguugc

SEQ ID NO: 45945 - RNA, 18 nt, Artificial Sequence
  Synthetic
uguuaugguucuuguugc

SEQ ID NO: 45946 - RNA, 19 nt, Artificial Sequence
  Synthetic
uuguuaugguucuuguugc

SEQ ID NO: 45947 - RNA, 20 nt, Artificial Sequence
  Synthetic
uuuguuaugguucuuguugc

SEQ ID NO: 45948 - RNA, 21 nt, Artificial Sequence
  Synthetic
auuuguuaugguucuuguugc

SEQ ID NO: 45949 - RNA, 22 nt, Artificial Sequence
  Synthetic
uauuuguuaugguucuuguugc

SEQ ID NO: 45950 - RNA, 23 nt, Artificial Sequence
  Synthetic
uuauuuguuaugguucuuguugc

SEQ ID NO: 45951 - RNA, 18 nt, Artificial Sequence
  Synthetic
aucuguaucucaauuugc

SEQ ID NO: 45952 - RNA, 19 nt, Artificial Sequence
  Synthetic
uaucuguaucucaauuugc

SEQ ID NO: 45953 - RNA, 20 nt, Artificial Sequence
  Synthetic
uuaucuguaucucaauuugc

SEQ ID NO: 45954 - RNA, 21 nt, Artificial Sequence
  Synthetic
cuuaucuguaucucaauuugc

SEQ ID NO: 45955 - RNA, 22 nt, Artificial Sequence
  Synthetic
acuuaucuguaucucaauuugc

SEQ ID NO: 45956 - RNA, 23 nt, Artificial Sequence
  Synthetic
aacuuaucuguaucucaauuugc

SEQ ID NO: 45957 - RNA, 24 nt, Artificial Sequence
  Synthetic
uaacuuaucuguaucucaauuugc

SEQ ID NO: 45958 - RNA, 18 nt, Artificial Sequence
  Synthetic
ccauauugauacauuugc

SEQ ID NO: 45959 - RNA, 20 nt, Artificial Sequence
  Synthetic
ugccauauugauacauuugc

SEQ ID NO: 45960 - RNA, 21 nt, Artificial Sequence
  Synthetic
augccauauugauacauuugc

SEQ ID NO: 45961 - RNA, 22 nt, Artificial Sequence
  Synthetic
uaugccauauugauacauuugc

SEQ ID NO: 45962 - RNA, 23 nt, Artificial Sequence
  Synthetic
uuaugccauauugauacauuugc

SEQ ID NO: 45963 - RNA, 18 nt, Artificial Sequence
  Synthetic
agguagacaggacuuugc

SEQ ID NO: 45964 - RNA, 19 nt, Artificial Sequence
  Synthetic
uagguagacaggacuuugc

SEQ ID NO: 45965 - RNA, 20 nt, Artificial Sequence
  Synthetic
uuagguagacaggacuuugc

SEQ ID NO: 45966 - RNA, 21 nt, Artificial Sequence
  Synthetic
uuuagguagacaggacuuugc

SEQ ID NO: 45967 - RNA, 22 nt, Artificial Sequence
  Synthetic
auuuagguagacaggacuuugc

SEQ ID NO: 45968 - RNA, 23 nt, Artificial Sequence
  Synthetic
cauuuagguagacaggacuuugc

SEQ ID NO: 45969 - RNA, 24 nt, Artificial Sequence
  Synthetic
ucauuuagguagacaggacuuugc

SEQ ID NO: 45970 - RNA, 18 nt, Artificial Sequence
  Synthetic
aacuguuuugcccuuugc

SEQ ID NO: 45971 - RNA, 19 nt, Artificial Sequence
  Synthetic
uaacuguuuugcccuuugc

SEQ ID NO: 45972 - RNA, 20 nt, Artificial Sequence
  Synthetic
uuaacuguuuugcccuuugc

SEQ ID NO: 45973 - RNA, 21 nt, Artificial Sequence
  Synthetic
auuaacuguuuugcccuuugc

SEQ ID NO: 45974 - RNA, 22 nt, Artificial Sequence
  Synthetic
uauuaacuguuuugcccuuugc

SEQ ID NO: 45975 - RNA, 23 nt, Artificial Sequence
  Synthetic
uuauuaacuguuuugcccuuugc

SEQ ID NO: 45976 - RNA, 24 nt, Artificial Sequence
  Synthetic
uuuauuaacuguuuugcccuuugc

SEQ ID NO: 45977 - RNA, 18 nt, Artificial Sequence
  Synthetic
uucacauguacucuuugc

SEQ ID NO: 45978 - RNA, 19 nt, Artificial Sequence
  Synthetic
cuucacauguacucuuugc

SEQ ID NO: 45979 - RNA, 20 nt, Artificial Sequence
  Synthetic
acuucacauguacucuuugc

SEQ ID NO: 45980 - RNA, 21 nt, Artificial Sequence
  Synthetic
cacuucacauguacucuuugc

SEQ ID NO: 45981 - RNA, 22 nt, Artificial Sequence
  Synthetic
ucacuucacauguacucuuugc

SEQ ID NO: 45982 - RNA, 23 nt, Artificial Sequence
  Synthetic
cucacuucacauguacucuuugc

SEQ ID NO: 45983 - RNA, 24 nt, Artificial Sequence
  Synthetic
ucucacuucacauguacucuuugc

SEQ ID NO: 45984 - RNA, 18 nt, Artificial Sequence
  Synthetic
uagcuaguuuuaguuugc

SEQ ID NO: 45985 - RNA, 20 nt, Artificial Sequence
  Synthetic
aguagcuaguuuuaguuugc

SEQ ID NO: 45986 - RNA, 22 nt, Artificial Sequence
  Synthetic
agaguagcuaguuuuaguuugc

SEQ ID NO: 45987 - RNA, 23 nt, Artificial Sequence
  Synthetic
aagaguagcuaguuuuaguuugc

SEQ ID NO: 45988 - RNA, 24 nt, Artificial Sequence
  Synthetic
aaagaguagcuaguuuuaguuugc

SEQ ID NO: 45989 - RNA, 18 nt, Artificial Sequence
  Synthetic
uaugccaauccuguuugc

SEQ ID NO: 45990 - RNA, 19 nt, Artificial Sequence
  Synthetic
auaugccaauccuguuugc

SEQ ID NO: 45991 - RNA, 20 nt, Artificial Sequence
  Synthetic
aauaugccaauccuguuugc

SEQ ID NO: 45992 - RNA, 21 nt, Artificial Sequence
  Synthetic
uaauaugccaauccuguuugc

SEQ ID NO: 45993 - RNA, 22 nt, Artificial Sequence
  Synthetic
auaauaugccaauccuguuugc

SEQ ID NO: 45994 - RNA, 23 nt, Artificial Sequence
  Synthetic
uauaauaugccaauccuguuugc

SEQ ID NO: 45995 - RNA, 24 nt, Artificial Sequence
  Synthetic
cuauaauaugccaauccuguuugc

SEQ ID NO: 45996 - RNA, 18 nt, Artificial Sequence
  Synthetic
auucgaaaauaauuuugc

SEQ ID NO: 45997 - RNA, 19 nt, Artificial Sequence
  Synthetic
uauucgaaaauaauuuugc

SEQ ID NO: 45998 - RNA, 21 nt, Artificial Sequence
  Synthetic
aguauucgaaaauaauuuugc

SEQ ID NO: 45999 - RNA, 22 nt, Artificial Sequence
  Synthetic
caguauucgaaaauaauuuugc

SEQ ID NO: 46000 - RNA, 23 nt, Artificial Sequence
  Synthetic
ccaguauucgaaaauaauuuugc

SEQ ID NO: 46001 - RNA, 24 nt, Artificial Sequence
  Synthetic
uccaguauucgaaaauaauuuugc

SEQ ID NO: 46002 - RNA, 18 nt, Artificial Sequence
  Synthetic
uauuuuacacuauuuugc

SEQ ID NO: 46003 - RNA, 19 nt, Artificial Sequence
  Synthetic
uuauuuuacacuauuuugc

SEQ ID NO: 46004 - RNA, 21 nt, Artificial Sequence
  Synthetic
cguuauuuuacacuauuuugc

SEQ ID NO: 46005 - RNA, 22 nt, Artificial Sequence
  Synthetic
acguuauuuuacacuauuuugc

SEQ ID NO: 46006 - RNA, 23 nt, Artificial Sequence
  Synthetic
uacguuauuuuacacuauuuugc

SEQ ID NO: 46007 - RNA, 21 nt, Artificial Sequence
  Synthetic
aggaaaauaaaucaguuuugc

SEQ ID NO: 46008 - RNA, 22 nt, Artificial Sequence
  Synthetic
aaggaaaauaaaucaguuuugc

SEQ ID NO: 46009 - RNA, 23 nt, Artificial Sequence
  Synthetic
aaaggaaaauaaaucaguuuugc

SEQ ID NO: 46010 - RNA, 24 nt, Artificial Sequence
  Synthetic
caaaggaaaauaaaucaguuuugc

SEQ ID NO: 46011 - RNA, 18 nt, Artificial Sequence
  Synthetic
cucauagauuuaaaaauc

SEQ ID NO: 46012 - RNA, 19 nt, Artificial Sequence
  Synthetic
ccucauagauuuaaaaauc

SEQ ID NO: 46013 - RNA, 21 nt, Artificial Sequence
  Synthetic
agccucauagauuuaaaaauc

SEQ ID NO: 46014 - RNA, 22 nt, Artificial Sequence
  Synthetic
aagccucauagauuuaaaaauc

SEQ ID NO: 46015 - RNA, 23 nt, Artificial Sequence
  Synthetic
uaagccucauagauuuaaaaauc

SEQ ID NO: 46016 - RNA, 24 nt, Artificial Sequence
  Synthetic
auaagccucauagauuuaaaaauc

SEQ ID NO: 46017 - RNA, 18 nt, Artificial Sequence
  Synthetic
cuuuauaaauugaaaauc

SEQ ID NO: 46018 - RNA, 19 nt, Artificial Sequence
  Synthetic
acuuuauaaauugaaaauc

SEQ ID NO: 46019 - RNA, 21 nt, Artificial Sequence
  Synthetic
ugacuuuauaaauugaaaauc

SEQ ID NO: 46020 - RNA, 22 nt, Artificial Sequence
  Synthetic
augacuuuauaaauugaaaauc

SEQ ID NO: 46021 - RNA, 23 nt, Artificial Sequence
  Synthetic
caugacuuuauaaauugaaaauc

SEQ ID NO: 46022 - RNA, 24 nt, Artificial Sequence
  Synthetic
ccaugacuuuauaaauugaaaauc

SEQ ID NO: 46023 - RNA, 18 nt, Artificial Sequence
  Synthetic
cuaaagguaaauaaaauc

SEQ ID NO: 46024 - RNA, 19 nt, Artificial Sequence
  Synthetic
acuaaagguaaauaaaauc

SEQ ID NO: 46025 - RNA, 20 nt, Artificial Sequence
  Synthetic
uacuaaagguaaauaaaauc

SEQ ID NO: 46026 - RNA, 21 nt, Artificial Sequence
  Synthetic
auacuaaagguaaauaaaauc

SEQ ID NO: 46027 - RNA, 22 nt, Artificial Sequence
  Synthetic
aauacuaaagguaaauaaaauc

SEQ ID NO: 46028 - RNA, 23 nt, Artificial Sequence
  Synthetic
uaauacuaaagguaaauaaaauc

SEQ ID NO: 46029 - RNA, 24 nt, Artificial Sequence
  Synthetic
auaauacuaaagguaaauaaaauc

SEQ ID NO: 46030 - RNA, 21 nt, Artificial Sequence
  Synthetic
ucuuccuguucuuauaaaauc

SEQ ID NO: 46031 - RNA, 22 nt, Artificial Sequence
  Synthetic
cucuuccuguucuuauaaaauc

SEQ ID NO: 46032 - RNA, 23 nt, Artificial Sequence
  Synthetic
ucucuuccuguucuuauaaaauc

SEQ ID NO: 46033 - RNA, 24 nt, Artificial Sequence
  Synthetic
cucucuuccuguucuuauaaaauc

SEQ ID NO: 46034 - RNA, 18 nt, Artificial Sequence
  Synthetic
ccccaaaacacagaaauc

SEQ ID NO: 46035 - RNA, 19 nt, Artificial Sequence
  Synthetic
uccccaaaacacagaaauc

SEQ ID NO: 46036 - RNA, 20 nt, Artificial Sequence
  Synthetic
cuccccaaaacacagaaauc

SEQ ID NO: 46037 - RNA, 21 nt, Artificial Sequence
  Synthetic
ccuccccaaaacacagaaauc

SEQ ID NO: 46038 - RNA, 22 nt, Artificial Sequence
  Synthetic
uccuccccaaaacacagaaauc

SEQ ID NO: 46039 - RNA, 18 nt, Artificial Sequence
  Synthetic
ugguuggcuucagaaauc

SEQ ID NO: 46040 - RNA, 20 nt, Artificial Sequence
  Synthetic
ugugguuggcuucagaaauc

SEQ ID NO: 46041 - RNA, 22 nt, Artificial Sequence
  Synthetic
agugugguuggcuucagaaauc

SEQ ID NO: 46042 - RNA, 23 nt, Artificial Sequence
  Synthetic
uagugugguuggcuucagaaauc

SEQ ID NO: 46043 - RNA, 24 nt, Artificial Sequence
  Synthetic
auagugugguuggcuucagaaauc

SEQ ID NO: 46044 - RNA, 19 nt, Artificial Sequence
  Synthetic
aguggaacauauggaaauc

SEQ ID NO: 46045 - RNA, 20 nt, Artificial Sequence
  Synthetic
uaguggaacauauggaaauc

SEQ ID NO: 46046 - RNA, 21 nt, Artificial Sequence
  Synthetic
uuaguggaacauauggaaauc

SEQ ID NO: 46047 - RNA, 22 nt, Artificial Sequence
  Synthetic
cuuaguggaacauauggaaauc

SEQ ID NO: 46048 - RNA, 23 nt, Artificial Sequence
  Synthetic
acuuaguggaacauauggaaauc

SEQ ID NO: 46049 - RNA, 24 nt, Artificial Sequence
  Synthetic
uacuuaguggaacauauggaaauc

SEQ ID NO: 46050 - RNA, 18 nt, Artificial Sequence
  Synthetic
acaaggugugaugaaauc

SEQ ID NO: 46051 - RNA, 19 nt, Artificial Sequence
  Synthetic
uacaaggugugaugaaauc

SEQ ID NO: 46052 - RNA, 23 nt, Artificial Sequence
  Synthetic
aggguacaaggugugaugaaauc

SEQ ID NO: 46053 - RNA, 24 nt, Artificial Sequence
  Synthetic
uaggguacaaggugugaugaaauc

SEQ ID NO: 46054 - RNA, 19 nt, Artificial Sequence
  Synthetic
ugaagcacuaggcuaaauc

SEQ ID NO: 46055 - RNA, 21 nt, Artificial Sequence
  Synthetic
agugaagcacuaggcuaaauc

SEQ ID NO: 46056 - RNA, 22 nt, Artificial Sequence
  Synthetic
uagugaagcacuaggcuaaauc

SEQ ID NO: 46057 - RNA, 23 nt, Artificial Sequence
  Synthetic
uuagugaagcacuaggcuaaauc

SEQ ID NO: 46058 - RNA, 18 nt, Artificial Sequence
  Synthetic
ugaggucugcaaacaauc

SEQ ID NO: 46059 - RNA, 19 nt, Artificial Sequence
  Synthetic
uugaggucugcaaacaauc

SEQ ID NO: 46060 - RNA, 20 nt, Artificial Sequence
  Synthetic
auugaggucugcaaacaauc

SEQ ID NO: 46061 - RNA, 21 nt, Artificial Sequence
  Synthetic
cauugaggucugcaaacaauc

SEQ ID NO: 46062 - RNA, 22 nt, Artificial Sequence
  Synthetic
acauugaggucugcaaacaauc

SEQ ID NO: 46063 - RNA, 23 nt, Artificial Sequence
  Synthetic
uacauugaggucugcaaacaauc

SEQ ID NO: 46064 - RNA, 24 nt, Artificial Sequence
  Synthetic
uuacauugaggucugcaaacaauc

SEQ ID NO: 46065 - RNA, 18 nt, Artificial Sequence
  Synthetic
caguuuuaagagacaauc

SEQ ID NO: 46066 - RNA, 19 nt, Artificial Sequence
  Synthetic
ucaguuuuaagagacaauc

SEQ ID NO: 46067 - RNA, 20 nt, Artificial Sequence
  Synthetic
cucaguuuuaagagacaauc

SEQ ID NO: 46068 - RNA, 21 nt, Artificial Sequence
  Synthetic
ccucaguuuuaagagacaauc

SEQ ID NO: 46069 - RNA, 23 nt, Artificial Sequence
  Synthetic
ugccucaguuuuaagagacaauc

SEQ ID NO: 46070 - RNA, 24 nt, Artificial Sequence
  Synthetic
augccucaguuuuaagagacaauc

SEQ ID NO: 46071 - RNA, 18 nt, Artificial Sequence
  Synthetic
ugacuuaaauguacaauc

SEQ ID NO: 46072 - RNA, 20 nt, Artificial Sequence
  Synthetic
ugugacuuaaauguacaauc

SEQ ID NO: 46073 - RNA, 21 nt, Artificial Sequence
  Synthetic
cugugacuuaaauguacaauc

SEQ ID NO: 46074 - RNA, 22 nt, Artificial Sequence
  Synthetic
ucugugacuuaaauguacaauc

SEQ ID NO: 46075 - RNA, 23 nt, Artificial Sequence
  Synthetic
cucugugacuuaaauguacaauc

SEQ ID NO: 46076 - RNA, 24 nt, Artificial Sequence
  Synthetic
ucucugugacuuaaauguacaauc

SEQ ID NO: 46077 - RNA, 18 nt, Artificial Sequence
  Synthetic
caaggaucaaaaccaauc

SEQ ID NO: 46078 - RNA, 19 nt, Artificial Sequence
  Synthetic
ucaaggaucaaaaccaauc

SEQ ID NO: 46079 - RNA, 20 nt, Artificial Sequence
  Synthetic
uucaaggaucaaaaccaauc

SEQ ID NO: 46080 - RNA, 21 nt, Artificial Sequence
  Synthetic
cuucaaggaucaaaaccaauc

SEQ ID NO: 46081 - RNA, 22 nt, Artificial Sequence
  Synthetic
acuucaaggaucaaaaccaauc

SEQ ID NO: 46082 - RNA, 23 nt, Artificial Sequence
  Synthetic
uacuucaaggaucaaaaccaauc

SEQ ID NO: 46083 - RNA, 24 nt, Artificial Sequence
  Synthetic
cuacuucaaggaucaaaaccaauc

SEQ ID NO: 46084 - RNA, 18 nt, Artificial Sequence
  Synthetic
auaaaauuucuaccaauc

SEQ ID NO: 46085 - RNA, 19 nt, Artificial Sequence
  Synthetic
cauaaaauuucuaccaauc

SEQ ID NO: 46086 - RNA, 20 nt, Artificial Sequence
  Synthetic
ccauaaaauuucuaccaauc

SEQ ID NO: 46087 - RNA, 21 nt, Artificial Sequence
  Synthetic
accauaaaauuucuaccaauc

SEQ ID NO: 46088 - RNA, 22 nt, Artificial Sequence
  Synthetic
caccauaaaauuucuaccaauc

SEQ ID NO: 46089 - RNA, 23 nt, Artificial Sequence
  Synthetic
acaccauaaaauuucuaccaauc

SEQ ID NO: 46090 - RNA, 24 nt, Artificial Sequence
  Synthetic
uacaccauaaaauuucuaccaauc

SEQ ID NO: 46091 - RNA, 18 nt, Artificial Sequence
  Synthetic
uccaguggcuagccaauc

SEQ ID NO: 46092 - RNA, 19 nt, Artificial Sequence
  Synthetic
cuccaguggcuagccaauc

SEQ ID NO: 46093 - RNA, 20 nt, Artificial Sequence
  Synthetic
ucuccaguggcuagccaauc

SEQ ID NO: 46094 - RNA, 21 nt, Artificial Sequence
  Synthetic
aucuccaguggcuagccaauc

SEQ ID NO: 46095 - RNA, 22 nt, Artificial Sequence
  Synthetic
caucuccaguggcuagccaauc

SEQ ID NO: 46096 - RNA, 23 nt, Artificial Sequence
  Synthetic
ccaucuccaguggcuagccaauc

SEQ ID NO: 46097 - RNA, 24 nt, Artificial Sequence
  Synthetic
cccaucuccaguggcuagccaauc

SEQ ID NO: 46098 - RNA, 18 nt, Artificial Sequence
  Synthetic
cuuguuacuuugccaauc

SEQ ID NO: 46099 - RNA, 19 nt, Artificial Sequence
  Synthetic
ucuuguuacuuugccaauc

SEQ ID NO: 46100 - RNA, 20 nt, Artificial Sequence
  Synthetic
uucuuguuacuuugccaauc

SEQ ID NO: 46101 - RNA, 21 nt, Artificial Sequence
  Synthetic
uuucuuguuacuuugccaauc

SEQ ID NO: 46102 - RNA, 22 nt, Artificial Sequence
  Synthetic
uuuucuuguuacuuugccaauc

SEQ ID NO: 46103 - RNA, 23 nt, Artificial Sequence
  Synthetic
uuuuucuuguuacuuugccaauc

SEQ ID NO: 46104 - RNA, 24 nt, Artificial Sequence
  Synthetic
auuuuucuuguuacuuugccaauc

SEQ ID NO: 46105 - RNA, 18 nt, Artificial Sequence
  Synthetic
cuuuggugcagugcaauc

SEQ ID NO: 46106 - RNA, 21 nt, Artificial Sequence
  Synthetic
uggcuuuggugcagugcaauc

SEQ ID NO: 46107 - RNA, 22 nt, Artificial Sequence
  Synthetic
uuggcuuuggugcagugcaauc

SEQ ID NO: 46108 - RNA, 23 nt, Artificial Sequence
  Synthetic
cuuggcuuuggugcagugcaauc

SEQ ID NO: 46109 - RNA, 18 nt, Artificial Sequence
  Synthetic
uagugucuucacucaauc

SEQ ID NO: 46110 - RNA, 21 nt, Artificial Sequence
  Synthetic
agguagugucuucacucaauc

SEQ ID NO: 46111 - RNA, 22 nt, Artificial Sequence
  Synthetic
aagguagugucuucacucaauc

SEQ ID NO: 46112 - RNA, 24 nt, Artificial Sequence
  Synthetic
ugaagguagugucuucacucaauc

SEQ ID NO: 46113 - RNA, 18 nt, Artificial Sequence
  Synthetic
caaaguauaaugucaauc

SEQ ID NO: 46114 - RNA, 19 nt, Artificial Sequence
  Synthetic
acaaaguauaaugucaauc

SEQ ID NO: 46115 - RNA, 20 nt, Artificial Sequence
  Synthetic
uacaaaguauaaugucaauc

SEQ ID NO: 46116 - RNA, 21 nt, Artificial Sequence
  Synthetic
uuacaaaguauaaugucaauc

SEQ ID NO: 46117 - RNA, 23 nt, Artificial Sequence
  Synthetic
uguuacaaaguauaaugucaauc

SEQ ID NO: 46118 - RNA, 18 nt, Artificial Sequence
  Synthetic
uuuggugucaauucaauc

SEQ ID NO: 46119 - RNA, 19 nt, Artificial Sequence
  Synthetic
auuuggugucaauucaauc

SEQ ID NO: 46120 - RNA, 20 nt, Artificial Sequence
  Synthetic
cauuuggugucaauucaauc

SEQ ID NO: 46121 - RNA, 21 nt, Artificial Sequence
  Synthetic
ccauuuggugucaauucaauc

SEQ ID NO: 46122 - RNA, 22 nt, Artificial Sequence
  Synthetic
accauuuggugucaauucaauc

SEQ ID NO: 46123 - RNA, 23 nt, Artificial Sequence
  Synthetic
aaccauuuggugucaauucaauc

SEQ ID NO: 46124 - RNA, 24 nt, Artificial Sequence
  Synthetic
caaccauuuggugucaauucaauc

SEQ ID NO: 46125 - RNA, 19 nt, Artificial Sequence
  Synthetic
ugacgcuuaggaaagaauc

SEQ ID NO: 46126 - RNA, 23 nt, Artificial Sequence
  Synthetic
ugggugacgcuuaggaaagaauc

SEQ ID NO: 46127 - RNA, 24 nt, Artificial Sequence
  Synthetic
uugggugacgcuuaggaaagaauc

SEQ ID NO: 46128 - RNA, 19 nt, Artificial Sequence
  Synthetic
agcuaauaaaugaagaauc

SEQ ID NO: 46129 - RNA, 20 nt, Artificial Sequence
  Synthetic
aagcuaauaaaugaagaauc

SEQ ID NO: 46130 - RNA, 20 nt, Artificial Sequence
  Synthetic
uggcucuuaaugggagaauc

SEQ ID NO: 46131 - RNA, 21 nt, Artificial Sequence
  Synthetic
auggcucuuaaugggagaauc

SEQ ID NO: 46132 - RNA, 22 nt, Artificial Sequence
  Synthetic
uauggcucuuaaugggagaauc

SEQ ID NO: 46133 - RNA, 23 nt, Artificial Sequence
  Synthetic
cuauggcucuuaaugggagaauc

SEQ ID NO: 46134 - RNA, 24 nt, Artificial Sequence
  Synthetic
acuauggcucuuaaugggagaauc

SEQ ID NO: 46135 - RNA, 18 nt, Artificial Sequence
  Synthetic
acuuguuaggauggaauc

SEQ ID NO: 46136 - RNA, 19 nt, Artificial Sequence
  Synthetic
uacuuguuaggauggaauc

SEQ ID NO: 46137 - RNA, 22 nt, Artificial Sequence
  Synthetic
ugguacuuguuaggauggaauc

SEQ ID NO: 46138 - RNA, 23 nt, Artificial Sequence
  Synthetic
uugguacuuguuaggauggaauc

SEQ ID NO: 46139 - RNA, 24 nt, Artificial Sequence
  Synthetic
auugguacuuguuaggauggaauc

SEQ ID NO: 46140 - RNA, 18 nt, Artificial Sequence
  Synthetic
acuuguuguuccugaauc

SEQ ID NO: 46141 - RNA, 19 nt, Artificial Sequence
  Synthetic
aacuuguuguuccugaauc

SEQ ID NO: 46142 - RNA, 20 nt, Artificial Sequence
  Synthetic
uaacuuguuguuccugaauc

SEQ ID NO: 46143 - RNA, 21 nt, Artificial Sequence
  Synthetic
uuaacuuguuguuccugaauc

SEQ ID NO: 46144 - RNA, 22 nt, Artificial Sequence
  Synthetic
cuuaacuuguuguuccugaauc

SEQ ID NO: 46145 - RNA, 23 nt, Artificial Sequence
  Synthetic
acuuaacuuguuguuccugaauc

SEQ ID NO: 46146 - RNA, 24 nt, Artificial Sequence
  Synthetic
uacuuaacuuguuguuccugaauc

SEQ ID NO: 46147 - RNA, 19 nt, Artificial Sequence
  Synthetic
aguacccacaggcugaauc

SEQ ID NO: 46148 - RNA, 21 nt, Artificial Sequence
  Synthetic
ugaguacccacaggcugaauc

SEQ ID NO: 46149 - RNA, 22 nt, Artificial Sequence
  Synthetic
cugaguacccacaggcugaauc

SEQ ID NO: 46150 - RNA, 23 nt, Artificial Sequence
  Synthetic
acugaguacccacaggcugaauc

SEQ ID NO: 46151 - RNA, 24 nt, Artificial Sequence
  Synthetic
aacugaguacccacaggcugaauc

SEQ ID NO: 46152 - RNA, 18 nt, Artificial Sequence
  Synthetic
uuauagaguuucugaauc

SEQ ID NO: 46153 - RNA, 19 nt, Artificial Sequence
  Synthetic
uuuauagaguuucugaauc

SEQ ID NO: 46154 - RNA, 20 nt, Artificial Sequence
  Synthetic
cuuuauagaguuucugaauc

SEQ ID NO: 46155 - RNA, 21 nt, Artificial Sequence
  Synthetic
acuuuauagaguuucugaauc

SEQ ID NO: 46156 - RNA, 22 nt, Artificial Sequence
  Synthetic
uacuuuauagaguuucugaauc

SEQ ID NO: 46157 - RNA, 24 nt, Artificial Sequence
  Synthetic
aguacuuuauagaguuucugaauc

SEQ ID NO: 46158 - RNA, 18 nt, Artificial Sequence
  Synthetic
ucuauagcucaaauaauc

SEQ ID NO: 46159 - RNA, 19 nt, Artificial Sequence
  Synthetic
aucuauagcucaaauaauc

SEQ ID NO: 46160 - RNA, 20 nt, Artificial Sequence
  Synthetic
caucuauagcucaaauaauc

SEQ ID NO: 46161 - RNA, 21 nt, Artificial Sequence
  Synthetic
acaucuauagcucaaauaauc

SEQ ID NO: 46162 - RNA, 22 nt, Artificial Sequence
  Synthetic
cacaucuauagcucaaauaauc

SEQ ID NO: 46163 - RNA, 23 nt, Artificial Sequence
  Synthetic
acacaucuauagcucaaauaauc

SEQ ID NO: 46164 - RNA, 24 nt, Artificial Sequence
  Synthetic
aacacaucuauagcucaaauaauc

SEQ ID NO: 46165 - RNA, 18 nt, Artificial Sequence
  Synthetic
caauuacucuaaauaauc

SEQ ID NO: 46166 - RNA, 20 nt, Artificial Sequence
  Synthetic
ugcaauuacucuaaauaauc

SEQ ID NO: 46167 - RNA, 21 nt, Artificial Sequence
  Synthetic
uugcaauuacucuaaauaauc

SEQ ID NO: 46168 - RNA, 22 nt, Artificial Sequence
  Synthetic
auugcaauuacucuaaauaauc

SEQ ID NO: 46169 - RNA, 23 nt, Artificial Sequence
  Synthetic
cauugcaauuacucuaaauaauc

SEQ ID NO: 46170 - RNA, 24 nt, Artificial Sequence
  Synthetic
acauugcaauuacucuaaauaauc

SEQ ID NO: 46171 - RNA, 21 nt, Artificial Sequence
  Synthetic
uacauugaaaaaauaauaauc

SEQ ID NO: 46172 - RNA, 22 nt, Artificial Sequence
  Synthetic
uuacauugaaaaaauaauaauc

SEQ ID NO: 46173 - RNA, 23 nt, Artificial Sequence
  Synthetic
cuuacauugaaaaaauaauaauc

SEQ ID NO: 46174 - RNA, 24 nt, Artificial Sequence
  Synthetic
ucuuacauugaaaaaauaauaauc

SEQ ID NO: 46175 - RNA, 18 nt, Artificial Sequence
  Synthetic
uucagccuaaguauaauc

SEQ ID NO: 46176 - RNA, 19 nt, Artificial Sequence
  Synthetic
auucagccuaaguauaauc

SEQ ID NO: 46177 - RNA, 20 nt, Artificial Sequence
  Synthetic
uauucagccuaaguauaauc

SEQ ID NO: 46178 - RNA, 21 nt, Artificial Sequence
  Synthetic
cuauucagccuaaguauaauc

SEQ ID NO: 46179 - RNA, 22 nt, Artificial Sequence
  Synthetic
acuauucagccuaaguauaauc

SEQ ID NO: 46180 - RNA, 23 nt, Artificial Sequence
  Synthetic
cacuauucagccuaaguauaauc

SEQ ID NO: 46181 - RNA, 24 nt, Artificial Sequence
  Synthetic
ucacuauucagccuaaguauaauc

SEQ ID NO: 46182 - RNA, 18 nt, Artificial Sequence
  Synthetic
aucaacacugaacuaauc

SEQ ID NO: 46183 - RNA, 19 nt, Artificial Sequence
  Synthetic
caucaacacugaacuaauc

SEQ ID NO: 46184 - RNA, 20 nt, Artificial Sequence
  Synthetic
acaucaacacugaacuaauc

SEQ ID NO: 46185 - RNA, 22 nt, Artificial Sequence
  Synthetic
ugacaucaacacugaacuaauc

SEQ ID NO: 46186 - RNA, 23 nt, Artificial Sequence
  Synthetic
augacaucaacacugaacuaauc

SEQ ID NO: 46187 - RNA, 24 nt, Artificial Sequence
  Synthetic
uaugacaucaacacugaacuaauc

SEQ ID NO: 46188 - RNA, 18 nt, Artificial Sequence
  Synthetic
aaugaugaagcacuaauc

SEQ ID NO: 46189 - RNA, 19 nt, Artificial Sequence
  Synthetic
aaaugaugaagcacuaauc

SEQ ID NO: 46190 - RNA, 20 nt, Artificial Sequence
  Synthetic
caaaugaugaagcacuaauc

SEQ ID NO: 46191 - RNA, 21 nt, Artificial Sequence
  Synthetic
acaaaugaugaagcacuaauc

SEQ ID NO: 46192 - RNA, 22 nt, Artificial Sequence
  Synthetic
cacaaaugaugaagcacuaauc

SEQ ID NO: 46193 - RNA, 23 nt, Artificial Sequence
  Synthetic
acacaaaugaugaagcacuaauc

SEQ ID NO: 46194 - RNA, 24 nt, Artificial Sequence
  Synthetic
uacacaaaugaugaagcacuaauc

SEQ ID NO: 46195 - RNA, 18 nt, Artificial Sequence
  Synthetic
cuggaaucuggacuaauc

SEQ ID NO: 46196 - RNA, 19 nt, Artificial Sequence
  Synthetic
acuggaaucuggacuaauc

SEQ ID NO: 46197 - RNA, 20 nt, Artificial Sequence
  Synthetic
aacuggaaucuggacuaauc

SEQ ID NO: 46198 - RNA, 21 nt, Artificial Sequence
  Synthetic
uaacuggaaucuggacuaauc

SEQ ID NO: 46199 - RNA, 22 nt, Artificial Sequence
  Synthetic
auaacuggaaucuggacuaauc

SEQ ID NO: 46200 - RNA, 23 nt, Artificial Sequence
  Synthetic
uauaacuggaaucuggacuaauc

SEQ ID NO: 46201 - RNA, 24 nt, Artificial Sequence
  Synthetic
auauaacuggaaucuggacuaauc

SEQ ID NO: 46202 - RNA, 18 nt, Artificial Sequence
  Synthetic
acuauuucaucgcuaauc

SEQ ID NO: 46203 - RNA, 19 nt, Artificial Sequence
  Synthetic
cacuauuucaucgcuaauc

SEQ ID NO: 46204 - RNA, 20 nt, Artificial Sequence
  Synthetic
ccacuauuucaucgcuaauc

SEQ ID NO: 46205 - RNA, 21 nt, Artificial Sequence
  Synthetic
uccacuauuucaucgcuaauc

SEQ ID NO: 46206 - RNA, 22 nt, Artificial Sequence
  Synthetic
auccacuauuucaucgcuaauc

SEQ ID NO: 46207 - RNA, 23 nt, Artificial Sequence
  Synthetic
aauccacuauuucaucgcuaauc

SEQ ID NO: 46208 - RNA, 24 nt, Artificial Sequence
  Synthetic
aaauccacuauuucaucgcuaauc

SEQ ID NO: 46209 - RNA, 18 nt, Artificial Sequence
  Synthetic
aauagagcaacucuaauc

SEQ ID NO: 46210 - RNA, 23 nt, Artificial Sequence
  Synthetic
uggggaauagagcaacucuaauc

SEQ ID NO: 46211 - RNA, 24 nt, Artificial Sequence
  Synthetic
cuggggaauagagcaacucuaauc

SEQ ID NO: 46212 - RNA, 18 nt, Artificial Sequence
  Synthetic
aaauccaccgaaguaauc

SEQ ID NO: 46213 - RNA, 20 nt, Artificial Sequence
  Synthetic
agaaauccaccgaaguaauc

SEQ ID NO: 46214 - RNA, 21 nt, Artificial Sequence
  Synthetic
uagaaauccaccgaaguaauc

SEQ ID NO: 46215 - RNA, 22 nt, Artificial Sequence
  Synthetic
uuagaaauccaccgaaguaauc

SEQ ID NO: 46216 - RNA, 23 nt, Artificial Sequence
  Synthetic
uuuagaaauccaccgaaguaauc

SEQ ID NO: 46217 - RNA, 24 nt, Artificial Sequence
  Synthetic
uuuuagaaauccaccgaaguaauc

SEQ ID NO: 46218 - RNA, 18 nt, Artificial Sequence
  Synthetic
acuaaagaaccuguaauc

SEQ ID NO: 46219 - RNA, 19 nt, Artificial Sequence
  Synthetic
aacuaaagaaccuguaauc

SEQ ID NO: 46220 - RNA, 20 nt, Artificial Sequence
  Synthetic
aaacuaaagaaccuguaauc

SEQ ID NO: 46221 - RNA, 21 nt, Artificial Sequence
  Synthetic
aaaacuaaagaaccuguaauc

SEQ ID NO: 46222 - RNA, 23 nt, Artificial Sequence
  Synthetic
ugaaaacuaaagaaccuguaauc

SEQ ID NO: 46223 - RNA, 24 nt, Artificial Sequence
  Synthetic
uugaaaacuaaagaaccuguaauc

SEQ ID NO: 46224 - RNA, 18 nt, Artificial Sequence
  Synthetic
auauaugugcgauuaauc

SEQ ID NO: 46225 - RNA, 19 nt, Artificial Sequence
  Synthetic
uauauaugugcgauuaauc

SEQ ID NO: 46226 - RNA, 20 nt, Artificial Sequence
  Synthetic
cuauauaugugcgauuaauc

SEQ ID NO: 46227 - RNA, 21 nt, Artificial Sequence
  Synthetic
ccuauauaugugcgauuaauc

SEQ ID NO: 46228 - RNA, 22 nt, Artificial Sequence
  Synthetic
cccuauauaugugcgauuaauc

SEQ ID NO: 46229 - RNA, 23 nt, Artificial Sequence
  Synthetic
ucccuauauaugugcgauuaauc

SEQ ID NO: 46230 - RNA, 24 nt, Artificial Sequence
  Synthetic
uucccuauauaugugcgauuaauc

SEQ ID NO: 46231 - RNA, 18 nt, Artificial Sequence
  Synthetic
uucuuuuucccaaacauc

SEQ ID NO: 46232 - RNA, 19 nt, Artificial Sequence
  Synthetic
uuucuuuuucccaaacauc

SEQ ID NO: 46233 - RNA, 21 nt, Artificial Sequence
  Synthetic
aguuucuuuuucccaaacauc

SEQ ID NO: 46234 - RNA, 24 nt, Artificial Sequence
  Synthetic
aggaguuucuuuuucccaaacauc

SEQ ID NO: 46235 - RNA, 21 nt, Artificial Sequence
  Synthetic
caaauaaaaauaugaaacauc

SEQ ID NO: 46236 - RNA, 23 nt, Artificial Sequence
  Synthetic
agcaaauaaaaauaugaaacauc

SEQ ID NO: 46237 - RNA, 24 nt, Artificial Sequence
  Synthetic
uagcaaauaaaaauaugaaacauc

SEQ ID NO: 46238 - RNA, 18 nt, Artificial Sequence
  Synthetic
cucuuaccauucaacauc

SEQ ID NO: 46239 - RNA, 19 nt, Artificial Sequence
  Synthetic
ucucuuaccauucaacauc

SEQ ID NO: 46240 - RNA, 21 nt, Artificial Sequence
  Synthetic
ugucucuuaccauucaacauc

SEQ ID NO: 46241 - RNA, 22 nt, Artificial Sequence
  Synthetic
uugucucuuaccauucaacauc

SEQ ID NO: 46242 - RNA, 24 nt, Artificial Sequence
  Synthetic
aguugucucuuaccauucaacauc

SEQ ID NO: 46243 - RNA, 18 nt, Artificial Sequence
  Synthetic
aggccagaggcuaacauc

SEQ ID NO: 46244 - RNA, 19 nt, Artificial Sequence
  Synthetic
uaggccagaggcuaacauc

SEQ ID NO: 46245 - RNA, 20 nt, Artificial Sequence
  Synthetic
cuaggccagaggcuaacauc

SEQ ID NO: 46246 - RNA, 21 nt, Artificial Sequence
  Synthetic
ccuaggccagaggcuaacauc

SEQ ID NO: 46247 - RNA, 22 nt, Artificial Sequence
  Synthetic
uccuaggccagaggcuaacauc

SEQ ID NO: 46248 - RNA, 23 nt, Artificial Sequence
  Synthetic
cuccuaggccagaggcuaacauc

SEQ ID NO: 46249 - RNA, 24 nt, Artificial Sequence
  Synthetic
ccuccuaggccagaggcuaacauc

SEQ ID NO: 46250 - RNA, 18 nt, Artificial Sequence
  Synthetic
ugcugcccgcaccacauc

SEQ ID NO: 46251 - RNA, 19 nt, Artificial Sequence
  Synthetic
cugcugcccgcaccacauc

SEQ ID NO: 46252 - RNA, 20 nt, Artificial Sequence
  Synthetic
ccugcugcccgcaccacauc

SEQ ID NO: 46253 - RNA, 21 nt, Artificial Sequence
  Synthetic
uccugcugcccgcaccacauc

SEQ ID NO: 46254 - RNA, 22 nt, Artificial Sequence
  Synthetic
uuccugcugcccgcaccacauc

SEQ ID NO: 46255 - RNA, 23 nt, Artificial Sequence
  Synthetic
cuuccugcugcccgcaccacauc

SEQ ID NO: 46256 - RNA, 24 nt, Artificial Sequence
  Synthetic
ucuuccugcugcccgcaccacauc

SEQ ID NO: 46257 - RNA, 18 nt, Artificial Sequence
  Synthetic
ucuguguuuuaucacauc

SEQ ID NO: 46258 - RNA, 20 nt, Artificial Sequence
  Synthetic
ugucuguguuuuaucacauc

SEQ ID NO: 46259 - RNA, 21 nt, Artificial Sequence
  Synthetic
cugucuguguuuuaucacauc

SEQ ID NO: 46260 - RNA, 23 nt, Artificial Sequence
  Synthetic
ugcugucuguguuuuaucacauc

SEQ ID NO: 46261 - RNA, 24 nt, Artificial Sequence
  Synthetic
augcugucuguguuuuaucacauc

SEQ ID NO: 46262 - RNA, 18 nt, Artificial Sequence
  Synthetic
cacuucuacgucuacauc

SEQ ID NO: 46263 - RNA, 19 nt, Artificial Sequence
  Synthetic
ucacuucuacgucuacauc

SEQ ID NO: 46264 - RNA, 20 nt, Artificial Sequence
  Synthetic
aucacuucuacgucuacauc

SEQ ID NO: 46265 - RNA, 21 nt, Artificial Sequence
  Synthetic
caucacuucuacgucuacauc

SEQ ID NO: 46266 - RNA, 22 nt, Artificial Sequence
  Synthetic
ccaucacuucuacgucuacauc

SEQ ID NO: 46267 - RNA, 23 nt, Artificial Sequence
  Synthetic
cccaucacuucuacgucuacauc

SEQ ID NO: 46268 - RNA, 24 nt, Artificial Sequence
  Synthetic
acccaucacuucuacgucuacauc

SEQ ID NO: 46269 - RNA, 18 nt, Artificial Sequence
  Synthetic
cacccugccauguacauc

SEQ ID NO: 46270 - RNA, 19 nt, Artificial Sequence
  Synthetic
ccacccugccauguacauc

SEQ ID NO: 46271 - RNA, 21 nt, Artificial Sequence
  Synthetic
ugccacccugccauguacauc

SEQ ID NO: 46272 - RNA, 22 nt, Artificial Sequence
  Synthetic
uugccacccugccauguacauc

SEQ ID NO: 46273 - RNA, 23 nt, Artificial Sequence
  Synthetic
cuugccacccugccauguacauc

SEQ ID NO: 46274 - RNA, 24 nt, Artificial Sequence
  Synthetic
ucuugccacccugccauguacauc

SEQ ID NO: 46275 - RNA, 18 nt, Artificial Sequence
  Synthetic
acugcuucaagacccauc

SEQ ID NO: 46276 - RNA, 19 nt, Artificial Sequence
  Synthetic
uacugcuucaagacccauc

SEQ ID NO: 46277 - RNA, 20 nt, Artificial Sequence
  Synthetic
cuacugcuucaagacccauc

SEQ ID NO: 46278 - RNA, 21 nt, Artificial Sequence
  Synthetic
acuacugcuucaagacccauc

SEQ ID NO: 46279 - RNA, 22 nt, Artificial Sequence
  Synthetic
uacuacugcuucaagacccauc

SEQ ID NO: 46280 - RNA, 23 nt, Artificial Sequence
  Synthetic
cuacuacugcuucaagacccauc

SEQ ID NO: 46281 - RNA, 24 nt, Artificial Sequence
  Synthetic
ucuacuacugcuucaagacccauc

SEQ ID NO: 46282 - RNA, 18 nt, Artificial Sequence
  Synthetic
uugcuucaucuugccauc

SEQ ID NO: 46283 - RNA, 19 nt, Artificial Sequence
  Synthetic
cuugcuucaucuugccauc

SEQ ID NO: 46284 - RNA, 20 nt, Artificial Sequence
  Synthetic
ucuugcuucaucuugccauc

SEQ ID NO: 46285 - RNA, 21 nt, Artificial Sequence
  Synthetic
cucuugcuucaucuugccauc

SEQ ID NO: 46286 - RNA, 22 nt, Artificial Sequence
  Synthetic
acucuugcuucaucuugccauc

SEQ ID NO: 46287 - RNA, 23 nt, Artificial Sequence
  Synthetic
uacucuugcuucaucuugccauc

SEQ ID NO: 46288 - RNA, 19 nt, Artificial Sequence
  Synthetic
ugagcucuuaggguccauc

SEQ ID NO: 46289 - RNA, 20 nt, Artificial Sequence
  Synthetic
cugagcucuuaggguccauc

SEQ ID NO: 46290 - RNA, 21 nt, Artificial Sequence
  Synthetic
acugagcucuuaggguccauc

SEQ ID NO: 46291 - RNA, 22 nt, Artificial Sequence
  Synthetic
aacugagcucuuaggguccauc

SEQ ID NO: 46292 - RNA, 23 nt, Artificial Sequence
  Synthetic
uaacugagcucuuaggguccauc

SEQ ID NO: 46293 - RNA, 18 nt, Artificial Sequence
  Synthetic
ccuauuuaauaaagcauc

SEQ ID NO: 46294 - RNA, 19 nt, Artificial Sequence
  Synthetic
cccuauuuaauaaagcauc

SEQ ID NO: 46295 - RNA, 20 nt, Artificial Sequence
  Synthetic
acccuauuuaauaaagcauc

SEQ ID NO: 46296 - RNA, 21 nt, Artificial Sequence
  Synthetic
uacccuauuuaauaaagcauc

SEQ ID NO: 46297 - RNA, 22 nt, Artificial Sequence
  Synthetic
uuacccuauuuaauaaagcauc

SEQ ID NO: 46298 - RNA, 23 nt, Artificial Sequence
  Synthetic
uuuacccuauuuaauaaagcauc

SEQ ID NO: 46299 - RNA, 24 nt, Artificial Sequence
  Synthetic
auuuacccuauuuaauaaagcauc

SEQ ID NO: 46300 - RNA, 18 nt, Artificial Sequence
  Synthetic
cuaaaaugccagagcauc

SEQ ID NO: 46301 - RNA, 19 nt, Artificial Sequence
  Synthetic
ucuaaaaugccagagcauc

SEQ ID NO: 46302 - RNA, 20 nt, Artificial Sequence
  Synthetic
uucuaaaaugccagagcauc

SEQ ID NO: 46303 - RNA, 21 nt, Artificial Sequence
  Synthetic
uuucuaaaaugccagagcauc

SEQ ID NO: 46304 - RNA, 22 nt, Artificial Sequence
  Synthetic
auuucuaaaaugccagagcauc

SEQ ID NO: 46305 - RNA, 23 nt, Artificial Sequence
  Synthetic
uauuucuaaaaugccagagcauc

SEQ ID NO: 46306 - RNA, 18 nt, Artificial Sequence
  Synthetic
aagagcaggcuaggcauc

SEQ ID NO: 46307 - RNA, 21 nt, Artificial Sequence
  Synthetic
aggaagagcaggcuaggcauc

SEQ ID NO: 46308 - RNA, 22 nt, Artificial Sequence
  Synthetic
aaggaagagcaggcuaggcauc

SEQ ID NO: 46309 - RNA, 23 nt, Artificial Sequence
  Synthetic
aaaggaagagcaggcuaggcauc

SEQ ID NO: 46310 - RNA, 24 nt, Artificial Sequence
  Synthetic
uaaaggaagagcaggcuaggcauc

SEQ ID NO: 46311 - RNA, 18 nt, Artificial Sequence
  Synthetic
acacugugcaaaaucauc

SEQ ID NO: 46312 - RNA, 19 nt, Artificial Sequence
  Synthetic
aacacugugcaaaaucauc

SEQ ID NO: 46313 - RNA, 21 nt, Artificial Sequence
  Synthetic
agaacacugugcaaaaucauc

SEQ ID NO: 46314 - RNA, 22 nt, Artificial Sequence
  Synthetic
cagaacacugugcaaaaucauc

SEQ ID NO: 46315 - RNA, 23 nt, Artificial Sequence
  Synthetic
ucagaacacugugcaaaaucauc

SEQ ID NO: 46316 - RNA, 24 nt, Artificial Sequence
  Synthetic
uucagaacacugugcaaaaucauc

SEQ ID NO: 46317 - RNA, 18 nt, Artificial Sequence
  Synthetic
aaauguugccacaucauc

SEQ ID NO: 46318 - RNA, 19 nt, Artificial Sequence
  Synthetic
aaaauguugccacaucauc

SEQ ID NO: 46319 - RNA, 20 nt, Artificial Sequence
  Synthetic
uaaaauguugccacaucauc

SEQ ID NO: 46320 - RNA, 21 nt, Artificial Sequence
  Synthetic
cuaaaauguugccacaucauc

SEQ ID NO: 46321 - RNA, 22 nt, Artificial Sequence
  Synthetic
ccuaaaauguugccacaucauc

SEQ ID NO: 46322 - RNA, 24 nt, Artificial Sequence
  Synthetic
agccuaaaauguugccacaucauc

SEQ ID NO: 46323 - RNA, 18 nt, Artificial Sequence
  Synthetic
cuucacauacucaucauc

SEQ ID NO: 46324 - RNA, 19 nt, Artificial Sequence
  Synthetic
ucuucacauacucaucauc

SEQ ID NO: 46325 - RNA, 20 nt, Artificial Sequence
  Synthetic
aucuucacauacucaucauc

SEQ ID NO: 46326 - RNA, 22 nt, Artificial Sequence
  Synthetic
ugaucuucacauacucaucauc

SEQ ID NO: 46327 - RNA, 23 nt, Artificial Sequence
  Synthetic
cugaucuucacauacucaucauc

SEQ ID NO: 46328 - RNA, 24 nt, Artificial Sequence
  Synthetic
ccugaucuucacauacucaucauc

SEQ ID NO: 46329 - RNA, 18 nt, Artificial Sequence
  Synthetic
cuuacucugaagaucauc

SEQ ID NO: 46330 - RNA, 19 nt, Artificial Sequence
  Synthetic
acuuacucugaagaucauc

SEQ ID NO: 46331 - RNA, 21 nt, Artificial Sequence
  Synthetic
ugacuuacucugaagaucauc

SEQ ID NO: 46332 - RNA, 22 nt, Artificial Sequence
  Synthetic
uugacuuacucugaagaucauc

SEQ ID NO: 46333 - RNA, 23 nt, Artificial Sequence
  Synthetic
auugacuuacucugaagaucauc

SEQ ID NO: 46334 - RNA, 24 nt, Artificial Sequence
  Synthetic
aauugacuuacucugaagaucauc

SEQ ID NO: 46335 - RNA, 18 nt, Artificial Sequence
  Synthetic
uauuauuuaaugaucauc

SEQ ID NO: 46336 - RNA, 19 nt, Artificial Sequence
  Synthetic
cuauuauuuaaugaucauc

SEQ ID NO: 46337 - RNA, 20 nt, Artificial Sequence
  Synthetic
ucuauuauuuaaugaucauc

SEQ ID NO: 46338 - RNA, 21 nt, Artificial Sequence
  Synthetic
aucuauuauuuaaugaucauc

SEQ ID NO: 46339 - RNA, 22 nt, Artificial Sequence
  Synthetic
aaucuauuauuuaaugaucauc

SEQ ID NO: 46340 - RNA, 24 nt, Artificial Sequence
  Synthetic
agaaucuauuauuuaaugaucauc

SEQ ID NO: 46341 - RNA, 18 nt, Artificial Sequence
  Synthetic
uauauuugcuuucucauc

SEQ ID NO: 46342 - RNA, 19 nt, Artificial Sequence
  Synthetic
auauauuugcuuucucauc

SEQ ID NO: 46343 - RNA, 20 nt, Artificial Sequence
  Synthetic
aauauauuugcuuucucauc

SEQ ID NO: 46344 - RNA, 21 nt, Artificial Sequence
  Synthetic
uaauauauuugcuuucucauc

SEQ ID NO: 46345 - RNA, 24 nt, Artificial Sequence
  Synthetic
agguaauauauuugcuuucucauc

SEQ ID NO: 46346 - RNA, 18 nt, Artificial Sequence
  Synthetic
aaaaagcuauaugucauc

SEQ ID NO: 46347 - RNA, 19 nt, Artificial Sequence
  Synthetic
caaaaagcuauaugucauc

SEQ ID NO: 46348 - RNA, 20 nt, Artificial Sequence
  Synthetic
ccaaaaagcuauaugucauc

SEQ ID NO: 46349 - RNA, 21 nt, Artificial Sequence
  Synthetic
uccaaaaagcuauaugucauc

SEQ ID NO: 46350 - RNA, 23 nt, Artificial Sequence
  Synthetic
uguccaaaaagcuauaugucauc

SEQ ID NO: 46351 - RNA, 22 nt, Artificial Sequence
  Synthetic
ugcugggucucagucugucauc

SEQ ID NO: 46352 - RNA, 23 nt, Artificial Sequence
  Synthetic
augcugggucucagucugucauc

SEQ ID NO: 46353 - RNA, 24 nt, Artificial Sequence
  Synthetic
caugcugggucucagucugucauc

SEQ ID NO: 46354 - RNA, 18 nt, Artificial Sequence
  Synthetic
acauuaauugaauucauc

SEQ ID NO: 46355 - RNA, 19 nt, Artificial Sequence
  Synthetic
aacauuaauugaauucauc

SEQ ID NO: 46356 - RNA, 21 nt, Artificial Sequence
  Synthetic
agaacauuaauugaauucauc

SEQ ID NO: 46357 - RNA, 22 nt, Artificial Sequence
  Synthetic
aagaacauuaauugaauucauc

SEQ ID NO: 46358 - RNA, 23 nt, Artificial Sequence
  Synthetic
uaagaacauuaauugaauucauc

SEQ ID NO: 46359 - RNA, 24 nt, Artificial Sequence
  Synthetic
uuaagaacauuaauugaauucauc

SEQ ID NO: 46360 - RNA, 18 nt, Artificial Sequence
  Synthetic
uugauccacauauucauc

SEQ ID NO: 46361 - RNA, 20 nt, Artificial Sequence
  Synthetic
aguugauccacauauucauc

SEQ ID NO: 46362 - RNA, 21 nt, Artificial Sequence
  Synthetic
uaguugauccacauauucauc

SEQ ID NO: 46363 - RNA, 22 nt, Artificial Sequence
  Synthetic
cuaguugauccacauauucauc

SEQ ID NO: 46364 - RNA, 23 nt, Artificial Sequence
  Synthetic
ucuaguugauccacauauucauc

SEQ ID NO: 46365 - RNA, 24 nt, Artificial Sequence
  Synthetic
uucuaguugauccacauauucauc

SEQ ID NO: 46366 - RNA, 18 nt, Artificial Sequence
  Synthetic
uguuuacuuauauucauc

SEQ ID NO: 46367 - RNA, 19 nt, Artificial Sequence
  Synthetic
auguuuacuuauauucauc

SEQ ID NO: 46368 - RNA, 20 nt, Artificial Sequence
  Synthetic
aauguuuacuuauauucauc

SEQ ID NO: 46369 - RNA, 21 nt, Artificial Sequence
  Synthetic
caauguuuacuuauauucauc

SEQ ID NO: 46370 - RNA, 22 nt, Artificial Sequence
  Synthetic
ucaauguuuacuuauauucauc

SEQ ID NO: 46371 - RNA, 23 nt, Artificial Sequence
  Synthetic
cucaauguuuacuuauauucauc

SEQ ID NO: 46372 - RNA, 24 nt, Artificial Sequence
  Synthetic
acucaauguuuacuuauauucauc

SEQ ID NO: 46373 - RNA, 18 nt, Artificial Sequence
  Synthetic
uaugaucaccgcuucauc

SEQ ID NO: 46374 - RNA, 19 nt, Artificial Sequence
  Synthetic
uuaugaucaccgcuucauc

SEQ ID NO: 46375 - RNA, 20 nt, Artificial Sequence
  Synthetic
uuuaugaucaccgcuucauc

SEQ ID NO: 46376 - RNA, 21 nt, Artificial Sequence
  Synthetic
uuuuaugaucaccgcuucauc

SEQ ID NO: 46377 - RNA, 22 nt, Artificial Sequence
  Synthetic
uuuuuaugaucaccgcuucauc

SEQ ID NO: 46378 - RNA, 23 nt, Artificial Sequence
  Synthetic
cuuuuuaugaucaccgcuucauc

SEQ ID NO: 46379 - RNA, 18 nt, Artificial Sequence
  Synthetic
uauguaacagucuucauc

SEQ ID NO: 46380 - RNA, 19 nt, Artificial Sequence
  Synthetic
uuauguaacagucuucauc

SEQ ID NO: 46381 - RNA, 20 nt, Artificial Sequence
  Synthetic
auuauguaacagucuucauc

SEQ ID NO: 46382 - RNA, 21 nt, Artificial Sequence
  Synthetic
aauuauguaacagucuucauc

SEQ ID NO: 46383 - RNA, 22 nt, Artificial Sequence
  Synthetic
aaauuauguaacagucuucauc

SEQ ID NO: 46384 - RNA, 24 nt, Artificial Sequence
  Synthetic
agaaauuauguaacagucuucauc

SEQ ID NO: 46385 - RNA, 18 nt, Artificial Sequence
  Synthetic
cuuucugaccauuucauc

SEQ ID NO: 46386 - RNA, 20 nt, Artificial Sequence
  Synthetic
ugcuuucugaccauuucauc

SEQ ID NO: 46387 - RNA, 22 nt, Artificial Sequence
  Synthetic
agugcuuucugaccauuucauc

SEQ ID NO: 46388 - RNA, 23 nt, Artificial Sequence
  Synthetic
uagugcuuucugaccauuucauc

SEQ ID NO: 46389 - RNA, 18 nt, Artificial Sequence
  Synthetic
ccugugaauacaaagauc

SEQ ID NO: 46390 - RNA, 19 nt, Artificial Sequence
  Synthetic
uccugugaauacaaagauc

SEQ ID NO: 46391 - RNA, 21 nt, Artificial Sequence
  Synthetic
uguccugugaauacaaagauc

SEQ ID NO: 46392 - RNA, 22 nt, Artificial Sequence
  Synthetic
uuguccugugaauacaaagauc

SEQ ID NO: 46393 - RNA, 24 nt, Artificial Sequence
  Synthetic
uguuguccugugaauacaaagauc

SEQ ID NO: 46394 - RNA, 19 nt, Artificial Sequence
  Synthetic
cguggcauauccaaagauc

SEQ ID NO: 46395 - RNA, 20 nt, Artificial Sequence
  Synthetic
acguggcauauccaaagauc

SEQ ID NO: 46396 - RNA, 21 nt, Artificial Sequence
  Synthetic
cacguggcauauccaaagauc

SEQ ID NO: 46397 - RNA, 22 nt, Artificial Sequence
  Synthetic
ucacguggcauauccaaagauc

SEQ ID NO: 46398 - RNA, 24 nt, Artificial Sequence
  Synthetic
agucacguggcauauccaaagauc

SEQ ID NO: 46399 - RNA, 18 nt, Artificial Sequence
  Synthetic
uaaugauacucaaagauc

SEQ ID NO: 46400 - RNA, 19 nt, Artificial Sequence
  Synthetic
uuaaugauacucaaagauc

SEQ ID NO: 46401 - RNA, 20 nt, Artificial Sequence
  Synthetic
uuuaaugauacucaaagauc

SEQ ID NO: 46402 - RNA, 21 nt, Artificial Sequence
  Synthetic
cuuuaaugauacucaaagauc

SEQ ID NO: 46403 - RNA, 22 nt, Artificial Sequence
  Synthetic
ccuuuaaugauacucaaagauc

SEQ ID NO: 46404 - RNA, 23 nt, Artificial Sequence
  Synthetic
uccuuuaaugauacucaaagauc

SEQ ID NO: 46405 - RNA, 18 nt, Artificial Sequence
  Synthetic
aaaguauuaagaaagauc

SEQ ID NO: 46406 - RNA, 19 nt, Artificial Sequence
  Synthetic
aaaaguauuaagaaagauc

SEQ ID NO: 46407 - RNA, 20 nt, Artificial Sequence
  Synthetic
caaaaguauuaagaaagauc

SEQ ID NO: 46408 - RNA, 22 nt, Artificial Sequence
  Synthetic
ugcaaaaguauuaagaaagauc

SEQ ID NO: 46409 - RNA, 23 nt, Artificial Sequence
  Synthetic
uugcaaaaguauuaagaaagauc

SEQ ID NO: 46410 - RNA, 18 nt, Artificial Sequence
  Synthetic
aaauguaugggaaagauc

SEQ ID NO: 46411 - RNA, 20 nt, Artificial Sequence
  Synthetic
ugaaauguaugggaaagauc

SEQ ID NO: 46412 - RNA, 21 nt, Artificial Sequence
  Synthetic
cugaaauguaugggaaagauc

SEQ ID NO: 46413 - RNA, 22 nt, Artificial Sequence
  Synthetic
ucugaaauguaugggaaagauc

SEQ ID NO: 46414 - RNA, 23 nt, Artificial Sequence
  Synthetic
uucugaaauguaugggaaagauc

SEQ ID NO: 46415 - RNA, 24 nt, Artificial Sequence
  Synthetic
auucugaaauguaugggaaagauc

SEQ ID NO: 46416 - RNA, 18 nt, Artificial Sequence
  Synthetic
ugcacucccuagcagauc

SEQ ID NO: 46417 - RNA, 20 nt, Artificial Sequence
  Synthetic
ugugcacucccuagcagauc

SEQ ID NO: 46418 - RNA, 22 nt, Artificial Sequence
  Synthetic
agugugcacucccuagcagauc

SEQ ID NO: 46419 - RNA, 23 nt, Artificial Sequence
  Synthetic
uagugugcacucccuagcagauc

SEQ ID NO: 46420 - RNA, 24 nt, Artificial Sequence
  Synthetic
auagugugcacucccuagcagauc

SEQ ID NO: 46421 - RNA, 19 nt, Artificial Sequence
  Synthetic
agguacuuacaaggagauc

SEQ ID NO: 46422 - RNA, 20 nt, Artificial Sequence
  Synthetic
cagguacuuacaaggagauc

SEQ ID NO: 46423 - RNA, 21 nt, Artificial Sequence
  Synthetic
ucagguacuuacaaggagauc

SEQ ID NO: 46424 - RNA, 22 nt, Artificial Sequence
  Synthetic
cucagguacuuacaaggagauc

SEQ ID NO: 46425 - RNA, 23 nt, Artificial Sequence
  Synthetic
acucagguacuuacaaggagauc

SEQ ID NO: 46426 - RNA, 24 nt, Artificial Sequence
  Synthetic
uacucagguacuuacaaggagauc

SEQ ID NO: 46427 - RNA, 18 nt, Artificial Sequence
  Synthetic
augaaagaguaaaggauc

SEQ ID NO: 46428 - RNA, 19 nt, Artificial Sequence
  Synthetic
aaugaaagaguaaaggauc

SEQ ID NO: 46429 - RNA, 20 nt, Artificial Sequence
  Synthetic
aaaugaaagaguaaaggauc

SEQ ID NO: 46430 - RNA, 21 nt, Artificial Sequence
  Synthetic
caaaugaaagaguaaaggauc

SEQ ID NO: 46431 - RNA, 22 nt, Artificial Sequence
  Synthetic
acaaaugaaagaguaaaggauc

SEQ ID NO: 46432 - RNA, 23 nt, Artificial Sequence
  Synthetic
aacaaaugaaagaguaaaggauc

SEQ ID NO: 46433 - RNA, 24 nt, Artificial Sequence
  Synthetic
uaacaaaugaaagaguaaaggauc

SEQ ID NO: 46434 - RNA, 18 nt, Artificial Sequence
  Synthetic
uucauagacaucaggauc

SEQ ID NO: 46435 - RNA, 19 nt, Artificial Sequence
  Synthetic
uuucauagacaucaggauc

SEQ ID NO: 46436 - RNA, 20 nt, Artificial Sequence
  Synthetic
auuucauagacaucaggauc

SEQ ID NO: 46437 - RNA, 21 nt, Artificial Sequence
  Synthetic
cauuucauagacaucaggauc

SEQ ID NO: 46438 - RNA, 23 nt, Artificial Sequence
  Synthetic
ugcauuucauagacaucaggauc

SEQ ID NO: 46439 - RNA, 24 nt, Artificial Sequence
  Synthetic
uugcauuucauagacaucaggauc

SEQ ID NO: 46440 - RNA, 18 nt, Artificial Sequence
  Synthetic
ucaugguuguagaggauc

SEQ ID NO: 46441 - RNA, 19 nt, Artificial Sequence
  Synthetic
uucaugguuguagaggauc

SEQ ID NO: 46442 - RNA, 21 nt, Artificial Sequence
  Synthetic
uguucaugguuguagaggauc

SEQ ID NO: 46443 - RNA, 22 nt, Artificial Sequence
  Synthetic
auguucaugguuguagaggauc

SEQ ID NO: 46444 - RNA, 23 nt, Artificial Sequence
  Synthetic
uauguucaugguuguagaggauc

SEQ ID NO: 46445 - RNA, 24 nt, Artificial Sequence
  Synthetic
cuauguucaugguuguagaggauc

SEQ ID NO: 46446 - RNA, 18 nt, Artificial Sequence
  Synthetic
uauguacuucauaggauc

SEQ ID NO: 46447 - RNA, 19 nt, Artificial Sequence
  Synthetic
uuauguacuucauaggauc

SEQ ID NO: 46448 - RNA, 21 nt, Artificial Sequence
  Synthetic
uguuauguacuucauaggauc

SEQ ID NO: 46449 - RNA, 22 nt, Artificial Sequence
  Synthetic
auguuauguacuucauaggauc

SEQ ID NO: 46450 - RNA, 23 nt, Artificial Sequence
  Synthetic
aauguuauguacuucauaggauc

SEQ ID NO: 46451 - RNA, 24 nt, Artificial Sequence
  Synthetic
aaauguuauguacuucauaggauc

SEQ ID NO: 46452 - RNA, 20 nt, Artificial Sequence
  Synthetic
agguaaaacuucagcggauc

SEQ ID NO: 46453 - RNA, 21 nt, Artificial Sequence
  Synthetic
aagguaaaacuucagcggauc

SEQ ID NO: 46454 - RNA, 22 nt, Artificial Sequence
  Synthetic
caagguaaaacuucagcggauc

SEQ ID NO: 46455 - RNA, 23 nt, Artificial Sequence
  Synthetic
ucaagguaaaacuucagcggauc

SEQ ID NO: 46456 - RNA, 24 nt, Artificial Sequence
  Synthetic
cucaagguaaaacuucagcggauc

SEQ ID NO: 46457 - RNA, 18 nt, Artificial Sequence
  Synthetic
uauuugguucuagggauc

SEQ ID NO: 46458 - RNA, 19 nt, Artificial Sequence
  Synthetic
auauuugguucuagggauc

SEQ ID NO: 46459 - RNA, 20 nt, Artificial Sequence
  Synthetic
cauauuugguucuagggauc

SEQ ID NO: 46460 - RNA, 21 nt, Artificial Sequence
  Synthetic
ucauauuugguucuagggauc

SEQ ID NO: 46461 - RNA, 22 nt, Artificial Sequence
  Synthetic
uucauauuugguucuagggauc

SEQ ID NO: 46462 - RNA, 23 nt, Artificial Sequence
  Synthetic
auucauauuugguucuagggauc

SEQ ID NO: 46463 - RNA, 18 nt, Artificial Sequence
  Synthetic
aacaggcaguuuuggauc

SEQ ID NO: 46464 - RNA, 20 nt, Artificial Sequence
  Synthetic
ugaacaggcaguuuuggauc

SEQ ID NO: 46465 - RNA, 21 nt, Artificial Sequence
  Synthetic
augaacaggcaguuuuggauc

SEQ ID NO: 46466 - RNA, 23 nt, Artificial Sequence
  Synthetic
ugaugaacaggcaguuuuggauc

SEQ ID NO: 46467 - RNA, 24 nt, Artificial Sequence
  Synthetic
uugaugaacaggcaguuuuggauc

SEQ ID NO: 46468 - RNA, 18 nt, Artificial Sequence
  Synthetic
uuugagugcuguaugauc

SEQ ID NO: 46469 - RNA, 19 nt, Artificial Sequence
  Synthetic
cuuugagugcuguaugauc

SEQ ID NO: 46470 - RNA, 20 nt, Artificial Sequence
  Synthetic
acuuugagugcuguaugauc

SEQ ID NO: 46471 - RNA, 22 nt, Artificial Sequence
  Synthetic
ugacuuugagugcuguaugauc

SEQ ID NO: 46472 - RNA, 24 nt, Artificial Sequence
  Synthetic
agugacuuugagugcuguaugauc

SEQ ID NO: 46473 - RNA, 18 nt, Artificial Sequence
  Synthetic
uaucaagcaaaacugauc

SEQ ID NO: 46474 - RNA, 19 nt, Artificial Sequence
  Synthetic
uuaucaagcaaaacugauc

SEQ ID NO: 46475 - RNA, 20 nt, Artificial Sequence
  Synthetic
cuuaucaagcaaaacugauc

SEQ ID NO: 46476 - RNA, 21 nt, Artificial Sequence
  Synthetic
ucuuaucaagcaaaacugauc

SEQ ID NO: 46477 - RNA, 22 nt, Artificial Sequence
  Synthetic
aucuuaucaagcaaaacugauc

SEQ ID NO: 46478 - RNA, 23 nt, Artificial Sequence
  Synthetic
aaucuuaucaagcaaaacugauc

SEQ ID NO: 46479 - RNA, 24 nt, Artificial Sequence
  Synthetic
aaaucuuaucaagcaaaacugauc

SEQ ID NO: 46480 - RNA, 21 nt, Artificial Sequence
  Synthetic
ucuaaguuucuaaggcugauc

SEQ ID NO: 46481 - RNA, 22 nt, Artificial Sequence
  Synthetic
uucuaaguuucuaaggcugauc

SEQ ID NO: 46482 - RNA, 23 nt, Artificial Sequence
  Synthetic
uuucuaaguuucuaaggcugauc

SEQ ID NO: 46483 - RNA, 18 nt, Artificial Sequence
  Synthetic
aaggcucugguucugauc

SEQ ID NO: 46484 - RNA, 20 nt, Artificial Sequence
  Synthetic
ugaaggcucugguucugauc

SEQ ID NO: 46485 - RNA, 21 nt, Artificial Sequence
  Synthetic
cugaaggcucugguucugauc

SEQ ID NO: 46486 - RNA, 23 nt, Artificial Sequence
  Synthetic
agcugaaggcucugguucugauc

SEQ ID NO: 46487 - RNA, 24 nt, Artificial Sequence
  Synthetic
cagcugaaggcucugguucugauc

SEQ ID NO: 46488 - RNA, 18 nt, Artificial Sequence
  Synthetic
cucaauaggaaauugauc

SEQ ID NO: 46489 - RNA, 20 nt, Artificial Sequence
  Synthetic
ugcucaauaggaaauugauc

SEQ ID NO: 46490 - RNA, 21 nt, Artificial Sequence
  Synthetic
uugcucaauaggaaauugauc

SEQ ID NO: 46491 - RNA, 22 nt, Artificial Sequence
  Synthetic
uuugcucaauaggaaauugauc

SEQ ID NO: 46492 - RNA, 23 nt, Artificial Sequence
  Synthetic
uuuugcucaauaggaaauugauc

SEQ ID NO: 46493 - RNA, 18 nt, Artificial Sequence
  Synthetic
ugauaacaaguguugauc

SEQ ID NO: 46494 - RNA, 19 nt, Artificial Sequence
  Synthetic
augauaacaaguguugauc

SEQ ID NO: 46495 - RNA, 20 nt, Artificial Sequence
  Synthetic
aaugauaacaaguguugauc

SEQ ID NO: 46496 - RNA, 22 nt, Artificial Sequence
  Synthetic
agaaugauaacaaguguugauc

SEQ ID NO: 46497 - RNA, 23 nt, Artificial Sequence
  Synthetic
aagaaugauaacaaguguugauc

SEQ ID NO: 46498 - RNA, 18 nt, Artificial Sequence
  Synthetic
auguguauuuauuugauc

SEQ ID NO: 46499 - RNA, 19 nt, Artificial Sequence
  Synthetic
cauguguauuuauuugauc

SEQ ID NO: 46500 - RNA, 20 nt, Artificial Sequence
  Synthetic
ucauguguauuuauuugauc

SEQ ID NO: 46501 - RNA, 21 nt, Artificial Sequence
  Synthetic
cucauguguauuuauuugauc

SEQ ID NO: 46502 - RNA, 23 nt, Artificial Sequence
  Synthetic
ugcucauguguauuuauuugauc

SEQ ID NO: 46503 - RNA, 18 nt, Artificial Sequence
  Synthetic
auuugugucacaaauauc

SEQ ID NO: 46504 - RNA, 19 nt, Artificial Sequence
  Synthetic
uauuugugucacaaauauc

SEQ ID NO: 46505 - RNA, 20 nt, Artificial Sequence
  Synthetic
uuauuugugucacaaauauc

SEQ ID NO: 46506 - RNA, 22 nt, Artificial Sequence
  Synthetic
aguuauuugugucacaaauauc

SEQ ID NO: 46507 - RNA, 23 nt, Artificial Sequence
  Synthetic
aaguuauuugugucacaaauauc

SEQ ID NO: 46508 - RNA, 24 nt, Artificial Sequence
  Synthetic
uaaguuauuugugucacaaauauc

SEQ ID NO: 46509 - RNA, 18 nt, Artificial Sequence
  Synthetic
caaaggcuaggaaauauc

SEQ ID NO: 46510 - RNA, 19 nt, Artificial Sequence
  Synthetic
acaaaggcuaggaaauauc

SEQ ID NO: 46511 - RNA, 20 nt, Artificial Sequence
  Synthetic
uacaaaggcuaggaaauauc

SEQ ID NO: 46512 - RNA, 21 nt, Artificial Sequence
  Synthetic
auacaaaggcuaggaaauauc

SEQ ID NO: 46513 - RNA, 23 nt, Artificial Sequence
  Synthetic
agauacaaaggcuaggaaauauc

SEQ ID NO: 46514 - RNA, 24 nt, Artificial Sequence
  Synthetic
aagauacaaaggcuaggaaauauc

SEQ ID NO: 46515 - RNA, 21 nt, Artificial Sequence
  Synthetic
agaaagagagaaugaaauauc

SEQ ID NO: 46516 - RNA, 22 nt, Artificial Sequence
  Synthetic
uagaaagagagaaugaaauauc

SEQ ID NO: 46517 - RNA, 18 nt, Artificial Sequence
  Synthetic
acgauucuuuuaaauauc

SEQ ID NO: 46518 - RNA, 19 nt, Artificial Sequence
  Synthetic
aacgauucuuuuaaauauc

SEQ ID NO: 46519 - RNA, 20 nt, Artificial Sequence
  Synthetic
aaacgauucuuuuaaauauc

SEQ ID NO: 46520 - RNA, 21 nt, Artificial Sequence
  Synthetic
uaaacgauucuuuuaaauauc

SEQ ID NO: 46521 - RNA, 22 nt, Artificial Sequence
  Synthetic
auaaacgauucuuuuaaauauc

SEQ ID NO: 46522 - RNA, 23 nt, Artificial Sequence
  Synthetic
cauaaacgauucuuuuaaauauc

SEQ ID NO: 46523 - RNA, 24 nt, Artificial Sequence
  Synthetic
ucauaaacgauucuuuuaaauauc

SEQ ID NO: 46524 - RNA, 19 nt, Artificial Sequence
  Synthetic
agcuuuucaauagaauauc

SEQ ID NO: 46525 - RNA, 20 nt, Artificial Sequence
  Synthetic
uagcuuuucaauagaauauc

SEQ ID NO: 46526 - RNA, 22 nt, Artificial Sequence
  Synthetic
aguagcuuuucaauagaauauc

SEQ ID NO: 46527 - RNA, 23 nt, Artificial Sequence
  Synthetic
caguagcuuuucaauagaauauc

SEQ ID NO: 46528 - RNA, 24 nt, Artificial Sequence
  Synthetic
ucaguagcuuuucaauagaauauc

SEQ ID NO: 46529 - RNA, 18 nt, Artificial Sequence
  Synthetic
agaacucaguggaauauc

SEQ ID NO: 46530 - RNA, 19 nt, Artificial Sequence
  Synthetic
aagaacucaguggaauauc

SEQ ID NO: 46531 - RNA, 20 nt, Artificial Sequence
  Synthetic
uaagaacucaguggaauauc

SEQ ID NO: 46532 - RNA, 21 nt, Artificial Sequence
  Synthetic
auaagaacucaguggaauauc

SEQ ID NO: 46533 - RNA, 22 nt, Artificial Sequence
  Synthetic
aauaagaacucaguggaauauc

SEQ ID NO: 46534 - RNA, 23 nt, Artificial Sequence
  Synthetic
aaauaagaacucaguggaauauc

SEQ ID NO: 46535 - RNA, 24 nt, Artificial Sequence
  Synthetic
uaaauaagaacucaguggaauauc

SEQ ID NO: 46536 - RNA, 21 nt, Artificial Sequence
  Synthetic
aucugacggugguguaauauc

SEQ ID NO: 46537 - RNA, 22 nt, Artificial Sequence
  Synthetic
caucugacggugguguaauauc

SEQ ID NO: 46538 - RNA, 24 nt, Artificial Sequence
  Synthetic
ugcaucugacggugguguaauauc

SEQ ID NO: 46539 - RNA, 18 nt, Artificial Sequence
  Synthetic
acuaacagaaaacauauc

SEQ ID NO: 46540 - RNA, 19 nt, Artificial Sequence
  Synthetic
aacuaacagaaaacauauc

SEQ ID NO: 46541 - RNA, 20 nt, Artificial Sequence
  Synthetic
uaacuaacagaaaacauauc

SEQ ID NO: 46542 - RNA, 21 nt, Artificial Sequence
  Synthetic
cuaacuaacagaaaacauauc

SEQ ID NO: 46543 - RNA, 23 nt, Artificial Sequence
  Synthetic
agcuaacuaacagaaaacauauc

SEQ ID NO: 46544 - RNA, 24 nt, Artificial Sequence
  Synthetic
aagcuaacuaacagaaaacauauc

SEQ ID NO: 46545 - RNA, 19 nt, Artificial Sequence
  Synthetic
ugucuguauauggcauauc

SEQ ID NO: 46546 - RNA, 20 nt, Artificial Sequence
  Synthetic
augucuguauauggcauauc

SEQ ID NO: 46547 - RNA, 21 nt, Artificial Sequence
  Synthetic
caugucuguauauggcauauc

SEQ ID NO: 46548 - RNA, 23 nt, Artificial Sequence
  Synthetic
ugcaugucuguauauggcauauc

SEQ ID NO: 46549 - RNA, 24 nt, Artificial Sequence
  Synthetic
uugcaugucuguauauggcauauc

SEQ ID NO: 46550 - RNA, 18 nt, Artificial Sequence
  Synthetic
cagacuaaaauucauauc

SEQ ID NO: 46551 - RNA, 19 nt, Artificial Sequence
  Synthetic
ucagacuaaaauucauauc

SEQ ID NO: 46552 - RNA, 20 nt, Artificial Sequence
  Synthetic
aucagacuaaaauucauauc

SEQ ID NO: 46553 - RNA, 21 nt, Artificial Sequence
  Synthetic
uaucagacuaaaauucauauc

SEQ ID NO: 46554 - RNA, 22 nt, Artificial Sequence
  Synthetic
auaucagacuaaaauucauauc

SEQ ID NO: 46555 - RNA, 24 nt, Artificial Sequence
  Synthetic
agauaucagacuaaaauucauauc

SEQ ID NO: 46556 - RNA, 18 nt, Artificial Sequence
  Synthetic
aaggucguaacauauauc

SEQ ID NO: 46557 - RNA, 19 nt, Artificial Sequence
  Synthetic
caaggucguaacauauauc

SEQ ID NO: 46558 - RNA, 20 nt, Artificial Sequence
  Synthetic
ucaaggucguaacauauauc

SEQ ID NO: 46559 - RNA, 22 nt, Artificial Sequence
  Synthetic
ugucaaggucguaacauauauc

SEQ ID NO: 46560 - RNA, 23 nt, Artificial Sequence
  Synthetic
cugucaaggucguaacauauauc

SEQ ID NO: 46561 - RNA, 24 nt, Artificial Sequence
  Synthetic
ucugucaaggucguaacauauauc

SEQ ID NO: 46562 - RNA, 18 nt, Artificial Sequence
  Synthetic
ugccaguuaacauauauc

SEQ ID NO: 46563 - RNA, 19 nt, Artificial Sequence
  Synthetic
augccaguuaacauauauc

SEQ ID NO: 46564 - RNA, 20 nt, Artificial Sequence
  Synthetic
caugccaguuaacauauauc

SEQ ID NO: 46565 - RNA, 21 nt, Artificial Sequence
  Synthetic
ccaugccaguuaacauauauc

SEQ ID NO: 46566 - RNA, 23 nt, Artificial Sequence
  Synthetic
agccaugccaguuaacauauauc

SEQ ID NO: 46567 - RNA, 24 nt, Artificial Sequence
  Synthetic
uagccaugccaguuaacauauauc

SEQ ID NO: 46568 - RNA, 18 nt, Artificial Sequence
  Synthetic
aaacaauaggaaacuauc

SEQ ID NO: 46569 - RNA, 19 nt, Artificial Sequence
  Synthetic
uaaacaauaggaaacuauc

SEQ ID NO: 46570 - RNA, 20 nt, Artificial Sequence
  Synthetic
cuaaacaauaggaaacuauc

SEQ ID NO: 46571 - RNA, 21 nt, Artificial Sequence
  Synthetic
acuaaacaauaggaaacuauc

SEQ ID NO: 46572 - RNA, 22 nt, Artificial Sequence
  Synthetic
uacuaaacaauaggaaacuauc

SEQ ID NO: 46573 - RNA, 24 nt, Artificial Sequence
  Synthetic
uguacuaaacaauaggaaacuauc

SEQ ID NO: 46574 - RNA, 19 nt, Artificial Sequence
  Synthetic
ugagagggcauuaacuauc

SEQ ID NO: 46575 - RNA, 20 nt, Artificial Sequence
  Synthetic
augagagggcauuaacuauc

SEQ ID NO: 46576 - RNA, 21 nt, Artificial Sequence
  Synthetic
aaugagagggcauuaacuauc

SEQ ID NO: 46577 - RNA, 22 nt, Artificial Sequence
  Synthetic
caaugagagggcauuaacuauc

SEQ ID NO: 46578 - RNA, 23 nt, Artificial Sequence
  Synthetic
ucaaugagagggcauuaacuauc

SEQ ID NO: 46579 - RNA, 24 nt, Artificial Sequence
  Synthetic
cucaaugagagggcauuaacuauc

SEQ ID NO: 46580 - RNA, 18 nt, Artificial Sequence
  Synthetic
agguagagaguggcuauc

SEQ ID NO: 46581 - RNA, 22 nt, Artificial Sequence
  Synthetic
agggagguagagaguggcuauc

SEQ ID NO: 46582 - RNA, 23 nt, Artificial Sequence
  Synthetic
uagggagguagagaguggcuauc

SEQ ID NO: 46583 - RNA, 22 nt, Artificial Sequence
  Synthetic
aguaaagacagcuuuggcuauc

SEQ ID NO: 46584 - RNA, 23 nt, Artificial Sequence
  Synthetic
uaguaaagacagcuuuggcuauc

SEQ ID NO: 46585 - RNA, 24 nt, Artificial Sequence
  Synthetic
uuaguaaagacagcuuuggcuauc

SEQ ID NO: 46586 - RNA, 18 nt, Artificial Sequence
  Synthetic
caaagcuauucugcuauc

SEQ ID NO: 46587 - RNA, 19 nt, Artificial Sequence
  Synthetic
ccaaagcuauucugcuauc

SEQ ID NO: 46588 - RNA, 20 nt, Artificial Sequence
  Synthetic
cccaaagcuauucugcuauc

SEQ ID NO: 46589 - RNA, 21 nt, Artificial Sequence
  Synthetic
ucccaaagcuauucugcuauc

SEQ ID NO: 46590 - RNA, 22 nt, Artificial Sequence
  Synthetic
uucccaaagcuauucugcuauc

SEQ ID NO: 46591 - RNA, 23 nt, Artificial Sequence
  Synthetic
uuucccaaagcuauucugcuauc

SEQ ID NO: 46592 - RNA, 24 nt, Artificial Sequence
  Synthetic
auuucccaaagcuauucugcuauc

SEQ ID NO: 46593 - RNA, 18 nt, Artificial Sequence
  Synthetic
auuuacauaagaucuauc

SEQ ID NO: 46594 - RNA, 19 nt, Artificial Sequence
  Synthetic
aauuuacauaagaucuauc

SEQ ID NO: 46595 - RNA, 21 nt, Artificial Sequence
  Synthetic
agaauuuacauaagaucuauc

SEQ ID NO: 46596 - RNA, 22 nt, Artificial Sequence
  Synthetic
aagaauuuacauaagaucuauc

SEQ ID NO: 46597 - RNA, 23 nt, Artificial Sequence
  Synthetic
aaagaauuuacauaagaucuauc

SEQ ID NO: 46598 - RNA, 24 nt, Artificial Sequence
  Synthetic
caaagaauuuacauaagaucuauc

SEQ ID NO: 46599 - RNA, 19 nt, Artificial Sequence
  Synthetic
ugguaccuacuagucuauc

SEQ ID NO: 46600 - RNA, 20 nt, Artificial Sequence
  Synthetic
uugguaccuacuagucuauc

SEQ ID NO: 46601 - RNA, 21 nt, Artificial Sequence
  Synthetic
uuugguaccuacuagucuauc

SEQ ID NO: 46602 - RNA, 22 nt, Artificial Sequence
  Synthetic
auuugguaccuacuagucuauc

SEQ ID NO: 46603 - RNA, 18 nt, Artificial Sequence
  Synthetic
auuuguucaaaaaguauc

SEQ ID NO: 46604 - RNA, 20 nt, Artificial Sequence
  Synthetic
agauuuguucaaaaaguauc

SEQ ID NO: 46605 - RNA, 21 nt, Artificial Sequence
  Synthetic
cagauuuguucaaaaaguauc

SEQ ID NO: 46606 - RNA, 23 nt, Artificial Sequence
  Synthetic
agcagauuuguucaaaaaguauc

SEQ ID NO: 46607 - RNA, 18 nt, Artificial Sequence
  Synthetic
uagauuuucauugguauc

SEQ ID NO: 46608 - RNA, 19 nt, Artificial Sequence
  Synthetic
auagauuuucauugguauc

SEQ ID NO: 46609 - RNA, 20 nt, Artificial Sequence
  Synthetic
aauagauuuucauugguauc

SEQ ID NO: 46610 - RNA, 21 nt, Artificial Sequence
  Synthetic
aaauagauuuucauugguauc

SEQ ID NO: 46611 - RNA, 22 nt, Artificial Sequence
  Synthetic
aaaauagauuuucauugguauc

SEQ ID NO: 46612 - RNA, 24 nt, Artificial Sequence
  Synthetic
agaaaauagauuuucauugguauc

SEQ ID NO: 46613 - RNA, 21 nt, Artificial Sequence
  Synthetic
auucugccuuuacaauguauc

SEQ ID NO: 46614 - RNA, 24 nt, Artificial Sequence
  Synthetic
aggauucugccuuuacaauguauc

SEQ ID NO: 46615 - RNA, 18 nt, Artificial Sequence
  Synthetic
uacauuuucaauuguauc

SEQ ID NO: 46616 - RNA, 19 nt, Artificial Sequence
  Synthetic
uuacauuuucaauuguauc

SEQ ID NO: 46617 - RNA, 20 nt, Artificial Sequence
  Synthetic
auuacauuuucaauuguauc

SEQ ID NO: 46618 - RNA, 21 nt, Artificial Sequence
  Synthetic
aauuacauuuucaauuguauc

SEQ ID NO: 46619 - RNA, 22 nt, Artificial Sequence
  Synthetic
aaauuacauuuucaauuguauc

SEQ ID NO: 46620 - RNA, 23 nt, Artificial Sequence
  Synthetic
uaaauuacauuuucaauuguauc

SEQ ID NO: 46621 - RNA, 24 nt, Artificial Sequence
  Synthetic
uuaaauuacauuuucaauuguauc

SEQ ID NO: 46622 - RNA, 18 nt, Artificial Sequence
  Synthetic
acucuagccucuuguauc

SEQ ID NO: 46623 - RNA, 19 nt, Artificial Sequence
  Synthetic
aacucuagccucuuguauc

SEQ ID NO: 46624 - RNA, 20 nt, Artificial Sequence
  Synthetic
caacucuagccucuuguauc

SEQ ID NO: 46625 - RNA, 21 nt, Artificial Sequence
  Synthetic
ucaacucuagccucuuguauc

SEQ ID NO: 46626 - RNA, 23 nt, Artificial Sequence
  Synthetic
ugucaacucuagccucuuguauc

SEQ ID NO: 46627 - RNA, 24 nt, Artificial Sequence
  Synthetic
cugucaacucuagccucuuguauc

SEQ ID NO: 46628 - RNA, 21 nt, Artificial Sequence
  Synthetic
ugggaccuuucuuguuguauc

SEQ ID NO: 46629 - RNA, 22 nt, Artificial Sequence
  Synthetic
augggaccuuucuuguuguauc

SEQ ID NO: 46630 - RNA, 23 nt, Artificial Sequence
  Synthetic
aaugggaccuuucuuguuguauc

SEQ ID NO: 46631 - RNA, 18 nt, Artificial Sequence
  Synthetic
uuacauuaaacaauuauc

SEQ ID NO: 46632 - RNA, 19 nt, Artificial Sequence
  Synthetic
auuacauuaaacaauuauc

SEQ ID NO: 46633 - RNA, 20 nt, Artificial Sequence
  Synthetic
cauuacauuaaacaauuauc

SEQ ID NO: 46634 - RNA, 21 nt, Artificial Sequence
  Synthetic
ccauuacauuaaacaauuauc

SEQ ID NO: 46635 - RNA, 23 nt, Artificial Sequence
  Synthetic
ugccauuacauuaaacaauuauc

SEQ ID NO: 46636 - RNA, 24 nt, Artificial Sequence
  Synthetic
uugccauuacauuaaacaauuauc

SEQ ID NO: 46637 - RNA, 18 nt, Artificial Sequence
  Synthetic
ccuuuucuuucaauuauc

SEQ ID NO: 46638 - RNA, 19 nt, Artificial Sequence
  Synthetic
uccuuuucuuucaauuauc

SEQ ID NO: 46639 - RNA, 20 nt, Artificial Sequence
  Synthetic
uuccuuuucuuucaauuauc

SEQ ID NO: 46640 - RNA, 21 nt, Artificial Sequence
  Synthetic
auuccuuuucuuucaauuauc

SEQ ID NO: 46641 - RNA, 22 nt, Artificial Sequence
  Synthetic
uauuccuuuucuuucaauuauc

SEQ ID NO: 46642 - RNA, 24 nt, Artificial Sequence
  Synthetic
uguauuccuuuucuuucaauuauc

SEQ ID NO: 46643 - RNA, 18 nt, Artificial Sequence
  Synthetic
cccauuaaauacauuauc

SEQ ID NO: 46644 - RNA, 19 nt, Artificial Sequence
  Synthetic
acccauuaaauacauuauc

SEQ ID NO: 46645 - RNA, 20 nt, Artificial Sequence
  Synthetic
uacccauuaaauacauuauc

SEQ ID NO: 46646 - RNA, 21 nt, Artificial Sequence
  Synthetic
uuacccauuaaauacauuauc

SEQ ID NO: 46647 - RNA, 22 nt, Artificial Sequence
  Synthetic
uuuacccauuaaauacauuauc

SEQ ID NO: 46648 - RNA, 23 nt, Artificial Sequence
  Synthetic
cuuuacccauuaaauacauuauc

SEQ ID NO: 46649 - RNA, 24 nt, Artificial Sequence
  Synthetic
acuuuacccauuaaauacauuauc

SEQ ID NO: 46650 - RNA, 18 nt, Artificial Sequence
  Synthetic
ccaaaaguaaccauuauc

SEQ ID NO: 46651 - RNA, 20 nt, Artificial Sequence
  Synthetic
agccaaaaguaaccauuauc

SEQ ID NO: 46652 - RNA, 22 nt, Artificial Sequence
  Synthetic
agagccaaaaguaaccauuauc

SEQ ID NO: 46653 - RNA, 23 nt, Artificial Sequence
  Synthetic
cagagccaaaaguaaccauuauc

SEQ ID NO: 46654 - RNA, 24 nt, Artificial Sequence
  Synthetic
ccagagccaaaaguaaccauuauc

SEQ ID NO: 46655 - RNA, 18 nt, Artificial Sequence
  Synthetic
ucccagaaacccauuauc

SEQ ID NO: 46656 - RNA, 19 nt, Artificial Sequence
  Synthetic
uucccagaaacccauuauc

SEQ ID NO: 46657 - RNA, 21 nt, Artificial Sequence
  Synthetic
aguucccagaaacccauuauc

SEQ ID NO: 46658 - RNA, 22 nt, Artificial Sequence
  Synthetic
uaguucccagaaacccauuauc

SEQ ID NO: 46659 - RNA, 23 nt, Artificial Sequence
  Synthetic
auaguucccagaaacccauuauc

SEQ ID NO: 46660 - RNA, 18 nt, Artificial Sequence
  Synthetic
ucccagaacaauauuauc

SEQ ID NO: 46661 - RNA, 19 nt, Artificial Sequence
  Synthetic
uucccagaacaauauuauc

SEQ ID NO: 46662 - RNA, 22 nt, Artificial Sequence
  Synthetic
ugguucccagaacaauauuauc

SEQ ID NO: 46663 - RNA, 23 nt, Artificial Sequence
  Synthetic
uugguucccagaacaauauuauc

SEQ ID NO: 46664 - RNA, 24 nt, Artificial Sequence
  Synthetic
cuugguucccagaacaauauuauc

SEQ ID NO: 46665 - RNA, 18 nt, Artificial Sequence
  Synthetic
aucuuacagguuauuauc

SEQ ID NO: 46666 - RNA, 19 nt, Artificial Sequence
  Synthetic
uaucuuacagguuauuauc

SEQ ID NO: 46667 - RNA, 20 nt, Artificial Sequence
  Synthetic
uuaucuuacagguuauuauc

SEQ ID NO: 46668 - RNA, 21 nt, Artificial Sequence
  Synthetic
uuuaucuuacagguuauuauc

SEQ ID NO: 46669 - RNA, 22 nt, Artificial Sequence
  Synthetic
auuuaucuuacagguuauuauc

SEQ ID NO: 46670 - RNA, 23 nt, Artificial Sequence
  Synthetic
uauuuaucuuacagguuauuauc

SEQ ID NO: 46671 - RNA, 24 nt, Artificial Sequence
  Synthetic
cuauuuaucuuacagguuauuauc

SEQ ID NO: 46672 - RNA, 18 nt, Artificial Sequence
  Synthetic
uucuaucaaaaucuuauc

SEQ ID NO: 46673 - RNA, 19 nt, Artificial Sequence
  Synthetic
uuucuaucaaaaucuuauc

SEQ ID NO: 46674 - RNA, 21 nt, Artificial Sequence
  Synthetic
aguuucuaucaaaaucuuauc

SEQ ID NO: 46675 - RNA, 22 nt, Artificial Sequence
  Synthetic
uaguuucuaucaaaaucuuauc

SEQ ID NO: 46676 - RNA, 23 nt, Artificial Sequence
  Synthetic
uuaguuucuaucaaaaucuuauc

SEQ ID NO: 46677 - RNA, 24 nt, Artificial Sequence
  Synthetic
uuuaguuucuaucaaaaucuuauc

SEQ ID NO: 46678 - RNA, 18 nt, Artificial Sequence
  Synthetic
aacccuaaucaucuuauc

SEQ ID NO: 46679 - RNA, 19 nt, Artificial Sequence
  Synthetic
uaacccuaaucaucuuauc

SEQ ID NO: 46680 - RNA, 20 nt, Artificial Sequence
  Synthetic
auaacccuaaucaucuuauc

SEQ ID NO: 46681 - RNA, 21 nt, Artificial Sequence
  Synthetic
aauaacccuaaucaucuuauc

SEQ ID NO: 46682 - RNA, 22 nt, Artificial Sequence
  Synthetic
aaauaacccuaaucaucuuauc

SEQ ID NO: 46683 - RNA, 23 nt, Artificial Sequence
  Synthetic
aaaauaacccuaaucaucuuauc

SEQ ID NO: 46684 - RNA, 24 nt, Artificial Sequence
  Synthetic
aaaaauaacccuaaucaucuuauc

SEQ ID NO: 46685 - RNA, 18 nt, Artificial Sequence
  Synthetic
auccaacagucucuuauc

SEQ ID NO: 46686 - RNA, 19 nt, Artificial Sequence
  Synthetic
uauccaacagucucuuauc

SEQ ID NO: 46687 - RNA, 20 nt, Artificial Sequence
  Synthetic
auauccaacagucucuuauc

SEQ ID NO: 46688 - RNA, 21 nt, Artificial Sequence
  Synthetic
uauauccaacagucucuuauc

SEQ ID NO: 46689 - RNA, 22 nt, Artificial Sequence
  Synthetic
uuauauccaacagucucuuauc

SEQ ID NO: 46690 - RNA, 23 nt, Artificial Sequence
  Synthetic
uuuauauccaacagucucuuauc

SEQ ID NO: 46691 - RNA, 24 nt, Artificial Sequence
  Synthetic
uuuuauauccaacagucucuuauc

SEQ ID NO: 46692 - RNA, 19 nt, Artificial Sequence
  Synthetic
agaaauacaaaugguuauc

SEQ ID NO: 46693 - RNA, 20 nt, Artificial Sequence
  Synthetic
cagaaauacaaaugguuauc

SEQ ID NO: 46694 - RNA, 21 nt, Artificial Sequence
  Synthetic
ccagaaauacaaaugguuauc

SEQ ID NO: 46695 - RNA, 22 nt, Artificial Sequence
  Synthetic
uccagaaauacaaaugguuauc

SEQ ID NO: 46696 - RNA, 23 nt, Artificial Sequence
  Synthetic
auccagaaauacaaaugguuauc

SEQ ID NO: 46697 - RNA, 24 nt, Artificial Sequence
  Synthetic
aauccagaaauacaaaugguuauc

SEQ ID NO: 46698 - RNA, 18 nt, Artificial Sequence
  Synthetic
cucaaucuuaaauuuauc

SEQ ID NO: 46699 - RNA, 19 nt, Artificial Sequence
  Synthetic
acucaaucuuaaauuuauc

SEQ ID NO: 46700 - RNA, 20 nt, Artificial Sequence
  Synthetic
aacucaaucuuaaauuuauc

SEQ ID NO: 46701 - RNA, 21 nt, Artificial Sequence
  Synthetic
uaacucaaucuuaaauuuauc

SEQ ID NO: 46702 - RNA, 22 nt, Artificial Sequence
  Synthetic
uuaacucaaucuuaaauuuauc

SEQ ID NO: 46703 - RNA, 23 nt, Artificial Sequence
  Synthetic
uuuaacucaaucuuaaauuuauc

SEQ ID NO: 46704 - RNA, 24 nt, Artificial Sequence
  Synthetic
auuuaacucaaucuuaaauuuauc

SEQ ID NO: 46705 - RNA, 21 nt, Artificial Sequence
  Synthetic
ucaaaguauaccucauuuauc

SEQ ID NO: 46706 - RNA, 22 nt, Artificial Sequence
  Synthetic
uucaaaguauaccucauuuauc

SEQ ID NO: 46707 - RNA, 23 nt, Artificial Sequence
  Synthetic
cuucaaaguauaccucauuuauc

SEQ ID NO: 46708 - RNA, 24 nt, Artificial Sequence
  Synthetic
ccuucaaaguauaccucauuuauc

SEQ ID NO: 46709 - RNA, 19 nt, Artificial Sequence
  Synthetic
agggaaaagggucuuuauc

SEQ ID NO: 46710 - RNA, 21 nt, Artificial Sequence
  Synthetic
ugagggaaaagggucuuuauc

SEQ ID NO: 46711 - RNA, 22 nt, Artificial Sequence
  Synthetic
augagggaaaagggucuuuauc

SEQ ID NO: 46712 - RNA, 23 nt, Artificial Sequence
  Synthetic
aaugagggaaaagggucuuuauc

SEQ ID NO: 46713 - RNA, 18 nt, Artificial Sequence
  Synthetic
cucuucaauaauuuuauc

SEQ ID NO: 46714 - RNA, 19 nt, Artificial Sequence
  Synthetic
acucuucaauaauuuuauc

SEQ ID NO: 46715 - RNA, 20 nt, Artificial Sequence
  Synthetic
uacucuucaauaauuuuauc

SEQ ID NO: 46716 - RNA, 21 nt, Artificial Sequence
  Synthetic
uuacucuucaauaauuuuauc

SEQ ID NO: 46717 - RNA, 22 nt, Artificial Sequence
  Synthetic
auuacucuucaauaauuuuauc

SEQ ID NO: 46718 - RNA, 23 nt, Artificial Sequence
  Synthetic
uauuacucuucaauaauuuuauc

SEQ ID NO: 46719 - RNA, 24 nt, Artificial Sequence
  Synthetic
auauuacucuucaauaauuuuauc

SEQ ID NO: 46720 - RNA, 21 nt, Artificial Sequence
  Synthetic
aaaaaaguugucauuuuuauc

SEQ ID NO: 46721 - RNA, 22 nt, Artificial Sequence
  Synthetic
caaaaaaguugucauuuuuauc

SEQ ID NO: 46722 - RNA, 23 nt, Artificial Sequence
  Synthetic
acaaaaaaguugucauuuuuauc

SEQ ID NO: 46723 - RNA, 24 nt, Artificial Sequence
  Synthetic
uacaaaaaaguugucauuuuuauc

SEQ ID NO: 46724 - RNA, 19 nt, Artificial Sequence
  Synthetic
agaguaaguacuuuuuauc

SEQ ID NO: 46725 - RNA, 22 nt, Artificial Sequence
  Synthetic
uggagaguaaguacuuuuuauc

SEQ ID NO: 46726 - RNA, 23 nt, Artificial Sequence
  Synthetic
auggagaguaaguacuuuuuauc

SEQ ID NO: 46727 - RNA, 18 nt, Artificial Sequence
  Synthetic
aaacuguauaucaaacuc

SEQ ID NO: 46728 - RNA, 20 nt, Artificial Sequence
  Synthetic
agaaacuguauaucaaacuc

SEQ ID NO: 46729 - RNA, 21 nt, Artificial Sequence
  Synthetic
cagaaacuguauaucaaacuc

SEQ ID NO: 46730 - RNA, 22 nt, Artificial Sequence
  Synthetic
ucagaaacuguauaucaaacuc

SEQ ID NO: 46731 - RNA, 23 nt, Artificial Sequence
  Synthetic
aucagaaacuguauaucaaacuc

SEQ ID NO: 46732 - RNA, 24 nt, Artificial Sequence
  Synthetic
uaucagaaacuguauaucaaacuc

SEQ ID NO: 46733 - RNA, 18 nt, Artificial Sequence
  Synthetic
aaacauuuuaucaaacuc

SEQ ID NO: 46734 - RNA, 19 nt, Artificial Sequence
  Synthetic
uaaacauuuuaucaaacuc

SEQ ID NO: 46735 - RNA, 23 nt, Artificial Sequence
  Synthetic
uggguaaacauuuuaucaaacuc

SEQ ID NO: 46736 - RNA, 18 nt, Artificial Sequence
  Synthetic
aguuuaaaauguaaacuc

SEQ ID NO: 46737 - RNA, 19 nt, Artificial Sequence
  Synthetic
aaguuuaaaauguaaacuc

SEQ ID NO: 46738 - RNA, 20 nt, Artificial Sequence
  Synthetic
caaguuuaaaauguaaacuc

SEQ ID NO: 46739 - RNA, 21 nt, Artificial Sequence
  Synthetic
acaaguuuaaaauguaaacuc

SEQ ID NO: 46740 - RNA, 22 nt, Artificial Sequence
  Synthetic
cacaaguuuaaaauguaaacuc

SEQ ID NO: 46741 - RNA, 23 nt, Artificial Sequence
  Synthetic
ucacaaguuuaaaauguaaacuc

SEQ ID NO: 46742 - RNA, 24 nt, Artificial Sequence
  Synthetic
cucacaaguuuaaaauguaaacuc

SEQ ID NO: 46743 - RNA, 18 nt, Artificial Sequence
  Synthetic
aaggacuuuaaccaacuc

SEQ ID NO: 46744 - RNA, 19 nt, Artificial Sequence
  Synthetic
uaaggacuuuaaccaacuc

SEQ ID NO: 46745 - RNA, 20 nt, Artificial Sequence
  Synthetic
auaaggacuuuaaccaacuc

SEQ ID NO: 46746 - RNA, 21 nt, Artificial Sequence
  Synthetic
aauaaggacuuuaaccaacuc

SEQ ID NO: 46747 - RNA, 22 nt, Artificial Sequence
  Synthetic
aaauaaggacuuuaaccaacuc

SEQ ID NO: 46748 - RNA, 18 nt, Artificial Sequence
  Synthetic
uuaaucuauguucaacuc

SEQ ID NO: 46749 - RNA, 20 nt, Artificial Sequence
  Synthetic
aguuaaucuauguucaacuc

SEQ ID NO: 46750 - RNA, 21 nt, Artificial Sequence
  Synthetic
aaguuaaucuauguucaacuc

SEQ ID NO: 46751 - RNA, 22 nt, Artificial Sequence
  Synthetic
caaguuaaucuauguucaacuc

SEQ ID NO: 46752 - RNA, 23 nt, Artificial Sequence
  Synthetic
ucaaguuaaucuauguucaacuc

SEQ ID NO: 46753 - RNA, 24 nt, Artificial Sequence
  Synthetic
aucaaguuaaucuauguucaacuc

SEQ ID NO: 46754 - RNA, 19 nt, Artificial Sequence
  Synthetic
ugguaucuuacaggaacuc

SEQ ID NO: 46755 - RNA, 20 nt, Artificial Sequence
  Synthetic
uugguaucuuacaggaacuc

SEQ ID NO: 46756 - RNA, 21 nt, Artificial Sequence
  Synthetic
uuugguaucuuacaggaacuc

SEQ ID NO: 46757 - RNA, 22 nt, Artificial Sequence
  Synthetic
uuuugguaucuuacaggaacuc

SEQ ID NO: 46758 - RNA, 23 nt, Artificial Sequence
  Synthetic
uuuuugguaucuuacaggaacuc

SEQ ID NO: 46759 - RNA, 24 nt, Artificial Sequence
  Synthetic
cuuuuugguaucuuacaggaacuc

SEQ ID NO: 46760 - RNA, 18 nt, Artificial Sequence
  Synthetic
acauguuccagggaacuc

SEQ ID NO: 46761 - RNA, 19 nt, Artificial Sequence
  Synthetic
aacauguuccagggaacuc

SEQ ID NO: 46762 - RNA, 20 nt, Artificial Sequence
  Synthetic
aaacauguuccagggaacuc

SEQ ID NO: 46763 - RNA, 21 nt, Artificial Sequence
  Synthetic
aaaacauguuccagggaacuc

SEQ ID NO: 46764 - RNA, 22 nt, Artificial Sequence
  Synthetic
aaaaacauguuccagggaacuc

SEQ ID NO: 46765 - RNA, 23 nt, Artificial Sequence
  Synthetic
uaaaaacauguuccagggaacuc

SEQ ID NO: 46766 - RNA, 24 nt, Artificial Sequence
  Synthetic
cuaaaaacauguuccagggaacuc

SEQ ID NO: 46767 - RNA, 18 nt, Artificial Sequence
  Synthetic
uuguuaaacucugaacuc

SEQ ID NO: 46768 - RNA, 19 nt, Artificial Sequence
  Synthetic
uuuguuaaacucugaacuc

SEQ ID NO: 46769 - RNA, 21 nt, Artificial Sequence
  Synthetic
aguuuguuaaacucugaacuc

SEQ ID NO: 46770 - RNA, 22 nt, Artificial Sequence
  Synthetic
aaguuuguuaaacucugaacuc

SEQ ID NO: 46771 - RNA, 23 nt, Artificial Sequence
  Synthetic
uaaguuuguuaaacucugaacuc

SEQ ID NO: 46772 - RNA, 24 nt, Artificial Sequence
  Synthetic
auaaguuuguuaaacucugaacuc

SEQ ID NO: 46773 - RNA, 18 nt, Artificial Sequence
  Synthetic
auuguaucugaauaacuc

SEQ ID NO: 46774 - RNA, 19 nt, Artificial Sequence
  Synthetic
uauuguaucugaauaacuc

SEQ ID NO: 46775 - RNA, 20 nt, Artificial Sequence
  Synthetic
auauuguaucugaauaacuc

SEQ ID NO: 46776 - RNA, 21 nt, Artificial Sequence
  Synthetic
uauauuguaucugaauaacuc

SEQ ID NO: 46777 - RNA, 22 nt, Artificial Sequence
  Synthetic
auauauuguaucugaauaacuc

SEQ ID NO: 46778 - RNA, 18 nt, Artificial Sequence
  Synthetic
ucuucaaguaaguaacuc

SEQ ID NO: 46779 - RNA, 19 nt, Artificial Sequence
  Synthetic
cucuucaaguaaguaacuc

SEQ ID NO: 46780 - RNA, 21 nt, Artificial Sequence
  Synthetic
ugcucuucaaguaaguaacuc

SEQ ID NO: 46781 - RNA, 22 nt, Artificial Sequence
  Synthetic
augcucuucaaguaaguaacuc

SEQ ID NO: 46782 - RNA, 23 nt, Artificial Sequence
  Synthetic
uaugcucuucaaguaaguaacuc

SEQ ID NO: 46783 - RNA, 24 nt, Artificial Sequence
  Synthetic
auaugcucuucaaguaaguaacuc

SEQ ID NO: 46784 - RNA, 20 nt, Artificial Sequence
  Synthetic
uggucuaguaaaauuaacuc

SEQ ID NO: 46785 - RNA, 22 nt, Artificial Sequence
  Synthetic
uguggucuaguaaaauuaacuc

SEQ ID NO: 46786 - RNA, 24 nt, Artificial Sequence
  Synthetic
aguguggucuaguaaaauuaacuc

SEQ ID NO: 46787 - RNA, 18 nt, Artificial Sequence
  Synthetic
cuaucauugacuuaacuc

SEQ ID NO: 46788 - RNA, 19 nt, Artificial Sequence
  Synthetic
ucuaucauugacuuaacuc

SEQ ID NO: 46789 - RNA, 20 nt, Artificial Sequence
  Synthetic
aucuaucauugacuuaacuc

SEQ ID NO: 46790 - RNA, 21 nt, Artificial Sequence
  Synthetic
caucuaucauugacuuaacuc

SEQ ID NO: 46791 - RNA, 22 nt, Artificial Sequence
  Synthetic
ccaucuaucauugacuuaacuc

SEQ ID NO: 46792 - RNA, 21 nt, Artificial Sequence
  Synthetic
auauauauauaaaaaacacuc

SEQ ID NO: 46793 - RNA, 22 nt, Artificial Sequence
  Synthetic
cauauauauauaaaaaacacuc

SEQ ID NO: 46794 - RNA, 23 nt, Artificial Sequence
  Synthetic
acauauauauauaaaaaacacuc

SEQ ID NO: 46795 - RNA, 24 nt, Artificial Sequence
  Synthetic
cacauauauauauaaaaaacacuc

SEQ ID NO: 46796 - RNA, 19 nt, Artificial Sequence
  Synthetic
uggugagguccuuacacuc

SEQ ID NO: 46797 - RNA, 20 nt, Artificial Sequence
  Synthetic
uuggugagguccuuacacuc

SEQ ID NO: 46798 - RNA, 21 nt, Artificial Sequence
  Synthetic
uuuggugagguccuuacacuc

SEQ ID NO: 46799 - RNA, 22 nt, Artificial Sequence
  Synthetic
cuuuggugagguccuuacacuc

SEQ ID NO: 46800 - RNA, 23 nt, Artificial Sequence
  Synthetic
ccuuuggugagguccuuacacuc

SEQ ID NO: 46801 - RNA, 24 nt, Artificial Sequence
  Synthetic
uccuuuggugagguccuuacacuc

SEQ ID NO: 46802 - RNA, 18 nt, Artificial Sequence
  Synthetic
uucuaucucagcccacuc

SEQ ID NO: 46803 - RNA, 19 nt, Artificial Sequence
  Synthetic
cuucuaucucagcccacuc

SEQ ID NO: 46804 - RNA, 20 nt, Artificial Sequence
  Synthetic
ucuucuaucucagcccacuc

SEQ ID NO: 46805 - RNA, 22 nt, Artificial Sequence
  Synthetic
ugucuucuaucucagcccacuc

SEQ ID NO: 46806 - RNA, 23 nt, Artificial Sequence
  Synthetic
augucuucuaucucagcccacuc

SEQ ID NO: 46807 - RNA, 24 nt, Artificial Sequence
  Synthetic
caugucuucuaucucagcccacuc

SEQ ID NO: 46808 - RNA, 18 nt, Artificial Sequence
  Synthetic
ccauguuacaaagcacuc

SEQ ID NO: 46809 - RNA, 19 nt, Artificial Sequence
  Synthetic
cccauguuacaaagcacuc

SEQ ID NO: 46810 - RNA, 20 nt, Artificial Sequence
  Synthetic
acccauguuacaaagcacuc

SEQ ID NO: 46811 - RNA, 21 nt, Artificial Sequence
  Synthetic
aacccauguuacaaagcacuc

SEQ ID NO: 46812 - RNA, 22 nt, Artificial Sequence
  Synthetic
aaacccauguuacaaagcacuc

SEQ ID NO: 46813 - RNA, 24 nt, Artificial Sequence
  Synthetic
ugaaacccauguuacaaagcacuc

SEQ ID NO: 46814 - RNA, 18 nt, Artificial Sequence
  Synthetic
uuaucuauucucucacuc

SEQ ID NO: 46815 - RNA, 19 nt, Artificial Sequence
  Synthetic
uuuaucuauucucucacuc

SEQ ID NO: 46816 - RNA, 20 nt, Artificial Sequence
  Synthetic
uuuuaucuauucucucacuc

SEQ ID NO: 46817 - RNA, 21 nt, Artificial Sequence
  Synthetic
auuuuaucuauucucucacuc

SEQ ID NO: 46818 - RNA, 22 nt, Artificial Sequence
  Synthetic
uauuuuaucuauucucucacuc

SEQ ID NO: 46819 - RNA, 23 nt, Artificial Sequence
  Synthetic
cuauuuuaucuauucucucacuc

SEQ ID NO: 46820 - RNA, 24 nt, Artificial Sequence
  Synthetic
acuauuuuaucuauucucucacuc

SEQ ID NO: 46821 - RNA, 20 nt, Artificial Sequence
  Synthetic
uggcucuguuuuguucacuc

SEQ ID NO: 46822 - RNA, 22 nt, Artificial Sequence
  Synthetic
agagaaagagucaagaagacuc

SEQ ID NO: 46823 - RNA, 24 nt, Artificial Sequence
  Synthetic
ugagagaaagagucaagaagacuc

SEQ ID NO: 46824 - RNA, 18 nt, Artificial Sequence
  Synthetic
acccaaacaguaagacuc

SEQ ID NO: 46825 - RNA, 20 nt, Artificial Sequence
  Synthetic
agacccaaacaguaagacuc

SEQ ID NO: 46826 - RNA, 21 nt, Artificial Sequence
  Synthetic
cagacccaaacaguaagacuc

SEQ ID NO: 46827 - RNA, 22 nt, Artificial Sequence
  Synthetic
ucagacccaaacaguaagacuc

SEQ ID NO: 46828 - RNA, 23 nt, Artificial Sequence
  Synthetic
uucagacccaaacaguaagacuc

SEQ ID NO: 46829 - RNA, 24 nt, Artificial Sequence
  Synthetic
auucagacccaaacaguaagacuc

SEQ ID NO: 46830 - RNA, 19 nt, Artificial Sequence
  Synthetic
uguuuggcaauuaagacuc

SEQ ID NO: 46831 - RNA, 20 nt, Artificial Sequence
  Synthetic
uuguuuggcaauuaagacuc

SEQ ID NO: 46832 - RNA, 21 nt, Artificial Sequence
  Synthetic
auuguuuggcaauuaagacuc

SEQ ID NO: 46833 - RNA, 22 nt, Artificial Sequence
  Synthetic
aauuguuuggcaauuaagacuc

SEQ ID NO: 46834 - RNA, 23 nt, Artificial Sequence
  Synthetic
uaauuguuuggcaauuaagacuc

SEQ ID NO: 46835 - RNA, 24 nt, Artificial Sequence
  Synthetic
uuaauuguuuggcaauuaagacuc

SEQ ID NO: 46836 - RNA, 18 nt, Artificial Sequence
  Synthetic
aggauaaauaauagacuc

SEQ ID NO: 46837 - RNA, 20 nt, Artificial Sequence
  Synthetic
ugaggauaaauaauagacuc

SEQ ID NO: 46838 - RNA, 22 nt, Artificial Sequence
  Synthetic
agugaggauaaauaauagacuc

SEQ ID NO: 46839 - RNA, 23 nt, Artificial Sequence
  Synthetic
cagugaggauaaauaauagacuc

SEQ ID NO: 46840 - RNA, 24 nt, Artificial Sequence
  Synthetic
acagugaggauaaauaauagacuc

SEQ ID NO: 46841 - RNA, 18 nt, Artificial Sequence
  Synthetic
uuucuacacccuagacuc

SEQ ID NO: 46842 - RNA, 19 nt, Artificial Sequence
  Synthetic
auuucuacacccuagacuc

SEQ ID NO: 46843 - RNA, 20 nt, Artificial Sequence
  Synthetic
uauuucuacacccuagacuc

SEQ ID NO: 46844 - RNA, 21 nt, Artificial Sequence
  Synthetic
cuauuucuacacccuagacuc

SEQ ID NO: 46845 - RNA, 22 nt, Artificial Sequence
  Synthetic
ucuauuucuacacccuagacuc

SEQ ID NO: 46846 - RNA, 23 nt, Artificial Sequence
  Synthetic
aucuauuucuacacccuagacuc

SEQ ID NO: 46847 - RNA, 24 nt, Artificial Sequence
  Synthetic
aaucuauuucuacacccuagacuc

SEQ ID NO: 46848 - RNA, 18 nt, Artificial Sequence
  Synthetic
uaucucuugccuagacuc

SEQ ID NO: 46849 - RNA, 19 nt, Artificial Sequence
  Synthetic
cuaucucuugccuagacuc

SEQ ID NO: 46850 - RNA, 20 nt, Artificial Sequence
  Synthetic
acuaucucuugccuagacuc

SEQ ID NO: 46851 - RNA, 21 nt, Artificial Sequence
  Synthetic
cacuaucucuugccuagacuc

SEQ ID NO: 46852 - RNA, 22 nt, Artificial Sequence
  Synthetic
acacuaucucuugccuagacuc

SEQ ID NO: 46853 - RNA, 23 nt, Artificial Sequence
  Synthetic
aacacuaucucuugccuagacuc

SEQ ID NO: 46854 - RNA, 24 nt, Artificial Sequence
  Synthetic
aaacacuaucucuugccuagacuc

SEQ ID NO: 46855 - RNA, 19 nt, Artificial Sequence
  Synthetic
agccugggacucuagacuc

SEQ ID NO: 46856 - RNA, 20 nt, Artificial Sequence
  Synthetic
aagccugggacucuagacuc

SEQ ID NO: 46857 - RNA, 22 nt, Artificial Sequence
  Synthetic
agaagccugggacucuagacuc

SEQ ID NO: 46858 - RNA, 23 nt, Artificial Sequence
  Synthetic
aagaagccugggacucuagacuc

SEQ ID NO: 46859 - RNA, 24 nt, Artificial Sequence
  Synthetic
aaagaagccugggacucuagacuc

SEQ ID NO: 46860 - RNA, 18 nt, Artificial Sequence
  Synthetic
aguaaaaaaugaggacuc

SEQ ID NO: 46861 - RNA, 19 nt, Artificial Sequence
  Synthetic
aaguaaaaaaugaggacuc

SEQ ID NO: 46862 - RNA, 21 nt, Artificial Sequence
  Synthetic
ugaaguaaaaaaugaggacuc

SEQ ID NO: 46863 - RNA, 22 nt, Artificial Sequence
  Synthetic
augaaguaaaaaaugaggacuc

SEQ ID NO: 46864 - RNA, 23 nt, Artificial Sequence
  Synthetic
uaugaaguaaaaaaugaggacuc

SEQ ID NO: 46865 - RNA, 24 nt, Artificial Sequence
  Synthetic
auaugaaguaaaaaaugaggacuc

SEQ ID NO: 46866 - RNA, 19 nt, Artificial Sequence
  Synthetic
agcaauuacaagcggacuc

SEQ ID NO: 46867 - RNA, 20 nt, Artificial Sequence
  Synthetic
aagcaauuacaagcggacuc

SEQ ID NO: 46868 - RNA, 21 nt, Artificial Sequence
  Synthetic
aaagcaauuacaagcggacuc

SEQ ID NO: 46869 - RNA, 22 nt, Artificial Sequence
  Synthetic
aaaagcaauuacaagcggacuc

SEQ ID NO: 46870 - RNA, 23 nt, Artificial Sequence
  Synthetic
caaaagcaauuacaagcggacuc

SEQ ID NO: 46871 - RNA, 24 nt, Artificial Sequence
  Synthetic
ucaaaagcaauuacaagcggacuc

SEQ ID NO: 46872 - RNA, 18 nt, Artificial Sequence
  Synthetic
auugggaaagccugacuc

SEQ ID NO: 46873 - RNA, 19 nt, Artificial Sequence
  Synthetic
aauugggaaagccugacuc

SEQ ID NO: 46874 - RNA, 20 nt, Artificial Sequence
  Synthetic
aaauugggaaagccugacuc

SEQ ID NO: 46875 - RNA, 21 nt, Artificial Sequence
  Synthetic
caaauugggaaagccugacuc

SEQ ID NO: 46876 - RNA, 23 nt, Artificial Sequence
  Synthetic
ugcaaauugggaaagccugacuc

SEQ ID NO: 46877 - RNA, 24 nt, Artificial Sequence
  Synthetic
augcaaauugggaaagccugacuc

SEQ ID NO: 46878 - RNA, 18 nt, Artificial Sequence
  Synthetic
aaaaugcagcuaauacuc

SEQ ID NO: 46879 - RNA, 20 nt, Artificial Sequence
  Synthetic
ugaaaaugcagcuaauacuc

SEQ ID NO: 46880 - RNA, 21 nt, Artificial Sequence
  Synthetic
uugaaaaugcagcuaauacuc

SEQ ID NO: 46881 - RNA, 22 nt, Artificial Sequence
  Synthetic
uuugaaaaugcagcuaauacuc

SEQ ID NO: 46882 - RNA, 23 nt, Artificial Sequence
  Synthetic
auuugaaaaugcagcuaauacuc

SEQ ID NO: 46883 - RNA, 24 nt, Artificial Sequence
  Synthetic
cauuugaaaaugcagcuaauacuc

SEQ ID NO: 46884 - RNA, 19 nt, Artificial Sequence
  Synthetic
agucaucaugcagauacuc

SEQ ID NO: 46885 - RNA, 20 nt, Artificial Sequence
  Synthetic
uagucaucaugcagauacuc

SEQ ID NO: 46886 - RNA, 21 nt, Artificial Sequence
  Synthetic
uuagucaucaugcagauacuc

SEQ ID NO: 46887 - RNA, 22 nt, Artificial Sequence
  Synthetic
auuagucaucaugcagauacuc

SEQ ID NO: 46888 - RNA, 23 nt, Artificial Sequence
  Synthetic
aauuagucaucaugcagauacuc

SEQ ID NO: 46889 - RNA, 24 nt, Artificial Sequence
  Synthetic
aaauuagucaucaugcagauacuc

SEQ ID NO: 46890 - RNA, 18 nt, Artificial Sequence
  Synthetic
augcugauaaagcuacuc

SEQ ID NO: 46891 - RNA, 19 nt, Artificial Sequence
  Synthetic
aaugcugauaaagcuacuc

SEQ ID NO: 46892 - RNA, 20 nt, Artificial Sequence
  Synthetic
aaaugcugauaaagcuacuc

SEQ ID NO: 46893 - RNA, 21 nt, Artificial Sequence
  Synthetic
uaaaugcugauaaagcuacuc

SEQ ID NO: 46894 - RNA, 22 nt, Artificial Sequence
  Synthetic
auaaaugcugauaaagcuacuc

SEQ ID NO: 46895 - RNA, 23 nt, Artificial Sequence
  Synthetic
uauaaaugcugauaaagcuacuc

SEQ ID NO: 46896 - RNA, 24 nt, Artificial Sequence
  Synthetic
uuauaaaugcugauaaagcuacuc

SEQ ID NO: 46897 - RNA, 18 nt, Artificial Sequence
  Synthetic
uaugaucauaaaguacuc

SEQ ID NO: 46898 - RNA, 19 nt, Artificial Sequence
  Synthetic
uuaugaucauaaaguacuc

SEQ ID NO: 46899 - RNA, 20 nt, Artificial Sequence
  Synthetic
auuaugaucauaaaguacuc

SEQ ID NO: 46900 - RNA, 21 nt, Artificial Sequence
  Synthetic
uauuaugaucauaaaguacuc

SEQ ID NO: 46901 - RNA, 22 nt, Artificial Sequence
  Synthetic
uuauuaugaucauaaaguacuc

SEQ ID NO: 46902 - RNA, 23 nt, Artificial Sequence
  Synthetic
uuuauuaugaucauaaaguacuc

SEQ ID NO: 46903 - RNA, 24 nt, Artificial Sequence
  Synthetic
auuuauuaugaucauaaaguacuc

SEQ ID NO: 46904 - RNA, 18 nt, Artificial Sequence
  Synthetic
aaguaauccgagguacuc

SEQ ID NO: 46905 - RNA, 19 nt, Artificial Sequence
  Synthetic
uaaguaauccgagguacuc

SEQ ID NO: 46906 - RNA, 20 nt, Artificial Sequence
  Synthetic
uuaaguaauccgagguacuc

SEQ ID NO: 46907 - RNA, 21 nt, Artificial Sequence
  Synthetic
uuuaaguaauccgagguacuc

SEQ ID NO: 46908 - RNA, 24 nt, Artificial Sequence
  Synthetic
ugguuuaaguaauccgagguacuc

SEQ ID NO: 46909 - RNA, 18 nt, Artificial Sequence
  Synthetic
aauauauguaauguacuc

SEQ ID NO: 46910 - RNA, 19 nt, Artificial Sequence
  Synthetic
aaauauauguaauguacuc

SEQ ID NO: 46911 - RNA, 20 nt, Artificial Sequence
  Synthetic
uaaauauauguaauguacuc

SEQ ID NO: 46912 - RNA, 22 nt, Artificial Sequence
  Synthetic
aguaaauauauguaauguacuc

SEQ ID NO: 46913 - RNA, 23 nt, Artificial Sequence
  Synthetic
aaguaaauauauguaauguacuc

SEQ ID NO: 46914 - RNA, 24 nt, Artificial Sequence
  Synthetic
aaaguaaauauauguaauguacuc

SEQ ID NO: 46915 - RNA, 18 nt, Artificial Sequence
  Synthetic
uuaacgcaguccuuacuc

SEQ ID NO: 46916 - RNA, 19 nt, Artificial Sequence
  Synthetic
cuuaacgcaguccuuacuc

SEQ ID NO: 46917 - RNA, 20 nt, Artificial Sequence
  Synthetic
acuuaacgcaguccuuacuc

SEQ ID NO: 46918 - RNA, 21 nt, Artificial Sequence
  Synthetic
uacuuaacgcaguccuuacuc

SEQ ID NO: 46919 - RNA, 23 nt, Artificial Sequence
  Synthetic
uguacuuaacgcaguccuuacuc

SEQ ID NO: 46920 - RNA, 24 nt, Artificial Sequence
  Synthetic
cuguacuuaacgcaguccuuacuc

SEQ ID NO: 46921 - RNA, 18 nt, Artificial Sequence
  Synthetic
uucuccuccgcuuuacuc

SEQ ID NO: 46922 - RNA, 19 nt, Artificial Sequence
  Synthetic
uuucuccuccgcuuuacuc

SEQ ID NO: 46923 - RNA, 22 nt, Artificial Sequence
  Synthetic
agguuucuccuccgcuuuacuc

SEQ ID NO: 46924 - RNA, 24 nt, Artificial Sequence
  Synthetic
ugagguuucuccuccgcuuuacuc

SEQ ID NO: 46925 - RNA, 18 nt, Artificial Sequence
  Synthetic
ucagaaggcugaaaccuc

SEQ ID NO: 46926 - RNA, 19 nt, Artificial Sequence
  Synthetic
aucagaaggcugaaaccuc

SEQ ID NO: 46927 - RNA, 20 nt, Artificial Sequence
  Synthetic
aaucagaaggcugaaaccuc

SEQ ID NO: 46928 - RNA, 21 nt, Artificial Sequence
  Synthetic
aaaucagaaggcugaaaccuc

SEQ ID NO: 46929 - RNA, 22 nt, Artificial Sequence
  Synthetic
aaaaucagaaggcugaaaccuc

SEQ ID NO: 46930 - RNA, 23 nt, Artificial Sequence
  Synthetic
caaaaucagaaggcugaaaccuc

SEQ ID NO: 46931 - RNA, 22 nt, Artificial Sequence
  Synthetic
agaucucggcucgcugaaccuc

SEQ ID NO: 46932 - RNA, 24 nt, Artificial Sequence
  Synthetic
ugagaucucggcucgcugaaccuc

SEQ ID NO: 46933 - RNA, 18 nt, Artificial Sequence
  Synthetic
cuuugaauguauaaccuc

SEQ ID NO: 46934 - RNA, 19 nt, Artificial Sequence
  Synthetic
ucuuugaauguauaaccuc

SEQ ID NO: 46935 - RNA, 20 nt, Artificial Sequence
  Synthetic
uucuuugaauguauaaccuc

SEQ ID NO: 46936 - RNA, 21 nt, Artificial Sequence
  Synthetic
cuucuuugaauguauaaccuc

SEQ ID NO: 46937 - RNA, 22 nt, Artificial Sequence
  Synthetic
ccuucuuugaauguauaaccuc

SEQ ID NO: 46938 - RNA, 23 nt, Artificial Sequence
  Synthetic
uccuucuuugaauguauaaccuc

SEQ ID NO: 46939 - RNA, 24 nt, Artificial Sequence
  Synthetic
cuccuucuuugaauguauaaccuc

SEQ ID NO: 46940 - RNA, 18 nt, Artificial Sequence
  Synthetic
aguccuccauuacaccuc

SEQ ID NO: 46941 - RNA, 19 nt, Artificial Sequence
  Synthetic
caguccuccauuacaccuc

SEQ ID NO: 46942 - RNA, 20 nt, Artificial Sequence
  Synthetic
acaguccuccauuacaccuc

SEQ ID NO: 46943 - RNA, 22 nt, Artificial Sequence
  Synthetic
ugacaguccuccauuacaccuc

SEQ ID NO: 46944 - RNA, 23 nt, Artificial Sequence
  Synthetic
uugacaguccuccauuacaccuc

SEQ ID NO: 46945 - RNA, 24 nt, Artificial Sequence
  Synthetic
auugacaguccuccauuacaccuc

SEQ ID NO: 46946 - RNA, 18 nt, Artificial Sequence
  Synthetic
uuuauggguugggaccuc

SEQ ID NO: 46947 - RNA, 19 nt, Artificial Sequence
  Synthetic
uuuuauggguugggaccuc

SEQ ID NO: 46948 - RNA, 20 nt, Artificial Sequence
  Synthetic
uuuuuauggguugggaccuc

SEQ ID NO: 46949 - RNA, 21 nt, Artificial Sequence
  Synthetic
cuuuuuauggguugggaccuc

SEQ ID NO: 46950 - RNA, 22 nt, Artificial Sequence
  Synthetic
ucuuuuuauggguugggaccuc

SEQ ID NO: 46951 - RNA, 23 nt, Artificial Sequence
  Synthetic
cucuuuuuauggguugggaccuc

SEQ ID NO: 46952 - RNA, 24 nt, Artificial Sequence
  Synthetic
ucucuuuuuauggguugggaccuc

SEQ ID NO: 46953 - RNA, 18 nt, Artificial Sequence
  Synthetic
aagcacgauaaauaccuc

SEQ ID NO: 46954 - RNA, 19 nt, Artificial Sequence
  Synthetic
uaagcacgauaaauaccuc

SEQ ID NO: 46955 - RNA, 20 nt, Artificial Sequence
  Synthetic
uuaagcacgauaaauaccuc

SEQ ID NO: 46956 - RNA, 21 nt, Artificial Sequence
  Synthetic
cuuaagcacgauaaauaccuc

SEQ ID NO: 46957 - RNA, 22 nt, Artificial Sequence
  Synthetic
ucuuaagcacgauaaauaccuc

SEQ ID NO: 46958 - RNA, 23 nt, Artificial Sequence
  Synthetic
aucuuaagcacgauaaauaccuc

SEQ ID NO: 46959 - RNA, 24 nt, Artificial Sequence
  Synthetic
aaucuuaagcacgauaaauaccuc

SEQ ID NO: 46960 - RNA, 18 nt, Artificial Sequence
  Synthetic
uauacaacauauuaccuc

SEQ ID NO: 46961 - RNA, 19 nt, Artificial Sequence
  Synthetic
uuauacaacauauuaccuc

SEQ ID NO: 46962 - RNA, 20 nt, Artificial Sequence
  Synthetic
uuuauacaacauauuaccuc

SEQ ID NO: 46963 - RNA, 21 nt, Artificial Sequence
  Synthetic
auuuauacaacauauuaccuc

SEQ ID NO: 46964 - RNA, 23 nt, Artificial Sequence
  Synthetic
ugauuuauacaacauauuaccuc

SEQ ID NO: 46965 - RNA, 18 nt, Artificial Sequence
  Synthetic
uuugguuuucuuuaccuc

SEQ ID NO: 46966 - RNA, 19 nt, Artificial Sequence
  Synthetic
auuugguuuucuuuaccuc

SEQ ID NO: 46967 - RNA, 20 nt, Artificial Sequence
  Synthetic
aauuugguuuucuuuaccuc

SEQ ID NO: 46968 - RNA, 21 nt, Artificial Sequence
  Synthetic
uaauuugguuuucuuuaccuc

SEQ ID NO: 46969 - RNA, 22 nt, Artificial Sequence
  Synthetic
uuaauuugguuuucuuuaccuc

SEQ ID NO: 46970 - RNA, 18 nt, Artificial Sequence
  Synthetic
auaauauggaacacccuc

SEQ ID NO: 46971 - RNA, 19 nt, Artificial Sequence
  Synthetic
uauaauauggaacacccuc

SEQ ID NO: 46972 - RNA, 21 nt, Artificial Sequence
  Synthetic
aguauaauauggaacacccuc

SEQ ID NO: 46973 - RNA, 22 nt, Artificial Sequence
  Synthetic
caguauaauauggaacacccuc

SEQ ID NO: 46974 - RNA, 23 nt, Artificial Sequence
  Synthetic
acaguauaauauggaacacccuc

SEQ ID NO: 46975 - RNA, 24 nt, Artificial Sequence
  Synthetic
cacaguauaauauggaacacccuc

SEQ ID NO: 46976 - RNA, 18 nt, Artificial Sequence
  Synthetic
aacaguggucccacccuc

SEQ ID NO: 46977 - RNA, 19 nt, Artificial Sequence
  Synthetic
uaacaguggucccacccuc

SEQ ID NO: 46978 - RNA, 20 nt, Artificial Sequence
  Synthetic
cuaacaguggucccacccuc

SEQ ID NO: 46979 - RNA, 22 nt, Artificial Sequence
  Synthetic
agcuaacaguggucccacccuc

SEQ ID NO: 46980 - RNA, 23 nt, Artificial Sequence
  Synthetic
cagcuaacaguggucccacccuc

SEQ ID NO: 46981 - RNA, 18 nt, Artificial Sequence
  Synthetic
uauaaccguuugacccuc

SEQ ID NO: 46982 - RNA, 19 nt, Artificial Sequence
  Synthetic
cuauaaccguuugacccuc

SEQ ID NO: 46983 - RNA, 21 nt, Artificial Sequence
  Synthetic
agcuauaaccguuugacccuc

SEQ ID NO: 46984 - RNA, 23 nt, Artificial Sequence
  Synthetic
ugagcuauaaccguuugacccuc

SEQ ID NO: 46985 - RNA, 24 nt, Artificial Sequence
  Synthetic
cugagcuauaaccguuugacccuc

SEQ ID NO: 46986 - RNA, 18 nt, Artificial Sequence
  Synthetic
cuugcuacuuuuacccuc

SEQ ID NO: 46987 - RNA, 19 nt, Artificial Sequence
  Synthetic
acuugcuacuuuuacccuc

SEQ ID NO: 46988 - RNA, 21 nt, Artificial Sequence
  Synthetic
ugacuugcuacuuuuacccuc

SEQ ID NO: 46989 - RNA, 22 nt, Artificial Sequence
  Synthetic
cugacuugcuacuuuuacccuc

SEQ ID NO: 46990 - RNA, 23 nt, Artificial Sequence
  Synthetic
ucugacuugcuacuuuuacccuc

SEQ ID NO: 46991 - RNA, 24 nt, Artificial Sequence
  Synthetic
cucugacuugcuacuuuuacccuc

SEQ ID NO: 46992 - RNA, 21 nt, Artificial Sequence
  Synthetic
aggggguuuuuuccuccccuc

SEQ ID NO: 46993 - RNA, 18 nt, Artificial Sequence
  Synthetic
aaaauuuauuuagcccuc

SEQ ID NO: 46994 - RNA, 19 nt, Artificial Sequence
  Synthetic
caaaauuuauuuagcccuc

SEQ ID NO: 46995 - RNA, 20 nt, Artificial Sequence
  Synthetic
acaaaauuuauuuagcccuc

SEQ ID NO: 46996 - RNA, 22 nt, Artificial Sequence
  Synthetic
agacaaaauuuauuuagcccuc

SEQ ID NO: 46997 - RNA, 24 nt, Artificial Sequence
  Synthetic
agagacaaaauuuauuuagcccuc

SEQ ID NO: 46998 - RNA, 18 nt, Artificial Sequence
  Synthetic
ucugugcuuaaggcccuc

SEQ ID NO: 46999 - RNA, 19 nt, Artificial Sequence
  Synthetic
uucugugcuuaaggcccuc

SEQ ID NO: 47000 - RNA, 20 nt, Artificial Sequence
  Synthetic
uuucugugcuuaaggcccuc

SEQ ID NO: 47001 - RNA, 21 nt, Artificial Sequence
  Synthetic
auuucugugcuuaaggcccuc

SEQ ID NO: 47002 - RNA, 22 nt, Artificial Sequence
  Synthetic
cauuucugugcuuaaggcccuc

SEQ ID NO: 47003 - RNA, 18 nt, Artificial Sequence
  Synthetic
ugcaucucaugugcccuc

SEQ ID NO: 47004 - RNA, 20 nt, Artificial Sequence
  Synthetic
agugcaucucaugugcccuc

SEQ ID NO: 47005 - RNA, 21 nt, Artificial Sequence
  Synthetic
cagugcaucucaugugcccuc

SEQ ID NO: 47006 - RNA, 22 nt, Artificial Sequence
  Synthetic
acagugcaucucaugugcccuc

SEQ ID NO: 47007 - RNA, 18 nt, Artificial Sequence
  Synthetic
uacccucuaacuucccuc

SEQ ID NO: 47008 - RNA, 19 nt, Artificial Sequence
  Synthetic
uuacccucuaacuucccuc

SEQ ID NO: 47009 - RNA, 20 nt, Artificial Sequence
  Synthetic
cuuacccucuaacuucccuc

SEQ ID NO: 47010 - RNA, 21 nt, Artificial Sequence
  Synthetic
ucuuacccucuaacuucccuc

SEQ ID NO: 47011 - RNA, 23 nt, Artificial Sequence
  Synthetic
cgucuuacccucuaacuucccuc

SEQ ID NO: 47012 - RNA, 24 nt, Artificial Sequence
  Synthetic
acgucuuacccucuaacuucccuc

SEQ ID NO: 47013 - RNA, 21 nt, Artificial Sequence
  Synthetic
ugggucuuccccucuucccuc

SEQ ID NO: 47014 - RNA, 22 nt, Artificial Sequence
  Synthetic
augggucuuccccucuucccuc

SEQ ID NO: 47015 - RNA, 23 nt, Artificial Sequence
  Synthetic
caugggucuuccccucuucccuc

SEQ ID NO: 47016 - RNA, 24 nt, Artificial Sequence
  Synthetic
ccaugggucuuccccucuucccuc

SEQ ID NO: 47017 - RNA, 18 nt, Artificial Sequence
  Synthetic
agucccgcagucugccuc

SEQ ID NO: 47018 - RNA, 19 nt, Artificial Sequence
  Synthetic
cagucccgcagucugccuc

SEQ ID NO: 47019 - RNA, 21 nt, Artificial Sequence
  Synthetic
ugcagucccgcagucugccuc

SEQ ID NO: 47020 - RNA, 22 nt, Artificial Sequence
  Synthetic
augcagucccgcagucugccuc

SEQ ID NO: 47021 - RNA, 18 nt, Artificial Sequence
  Synthetic
uguccuguauggugccuc

SEQ ID NO: 47022 - RNA, 19 nt, Artificial Sequence
  Synthetic
auguccuguauggugccuc

SEQ ID NO: 47023 - RNA, 20 nt, Artificial Sequence
  Synthetic
aauguccuguauggugccuc

SEQ ID NO: 47024 - RNA, 21 nt, Artificial Sequence
  Synthetic
caauguccuguauggugccuc

SEQ ID NO: 47025 - RNA, 23 nt, Artificial Sequence
  Synthetic
agcaauguccuguauggugccuc

SEQ ID NO: 47026 - RNA, 24 nt, Artificial Sequence
  Synthetic
cagcaauguccuguauggugccuc

SEQ ID NO: 47027 - RNA, 18 nt, Artificial Sequence
  Synthetic
ugaaauucaggaauccuc

SEQ ID NO: 47028 - RNA, 19 nt, Artificial Sequence
  Synthetic
uugaaauucaggaauccuc

SEQ ID NO: 47029 - RNA, 20 nt, Artificial Sequence
  Synthetic
auugaaauucaggaauccuc

SEQ ID NO: 47030 - RNA, 22 nt, Artificial Sequence
  Synthetic
agauugaaauucaggaauccuc

SEQ ID NO: 47031 - RNA, 23 nt, Artificial Sequence
  Synthetic
uagauugaaauucaggaauccuc

SEQ ID NO: 47032 - RNA, 24 nt, Artificial Sequence
  Synthetic
cuagauugaaauucaggaauccuc

SEQ ID NO: 47033 - RNA, 21 nt, Artificial Sequence
  Synthetic
cuuuucuuuuuuuggcuccuc

SEQ ID NO: 47034 - RNA, 22 nt, Artificial Sequence
  Synthetic
ucuuuucuuuuuuuggcuccuc

SEQ ID NO: 47035 - RNA, 23 nt, Artificial Sequence
  Synthetic
uucuuuucuuuuuuuggcuccuc

SEQ ID NO: 47036 - RNA, 24 nt, Artificial Sequence
  Synthetic
uuucuuuucuuuuuuuggcuccuc

SEQ ID NO: 47037 - RNA, 20 nt, Artificial Sequence
  Synthetic
ugguuaagaucuuucuccuc

SEQ ID NO: 47038 - RNA, 21 nt, Artificial Sequence
  Synthetic
cugguuaagaucuuucuccuc

SEQ ID NO: 47039 - RNA, 22 nt, Artificial Sequence
  Synthetic
acugguuaagaucuuucuccuc

SEQ ID NO: 47040 - RNA, 23 nt, Artificial Sequence
  Synthetic
cacugguuaagaucuuucuccuc

SEQ ID NO: 47041 - RNA, 24 nt, Artificial Sequence
  Synthetic
acacugguuaagaucuuucuccuc

SEQ ID NO: 47042 - RNA, 18 nt, Artificial Sequence
  Synthetic
caggucguucaaguccuc

SEQ ID NO: 47043 - RNA, 19 nt, Artificial Sequence
  Synthetic
ccaggucguucaaguccuc

SEQ ID NO: 47044 - RNA, 21 nt, Artificial Sequence
  Synthetic
agccaggucguucaaguccuc

SEQ ID NO: 47045 - RNA, 22 nt, Artificial Sequence
  Synthetic
aagccaggucguucaaguccuc

SEQ ID NO: 47046 - RNA, 24 nt, Artificial Sequence
  Synthetic
ugaagccaggucguucaaguccuc

SEQ ID NO: 47047 - RNA, 18 nt, Artificial Sequence
  Synthetic
ccauagcaauauguccuc

SEQ ID NO: 47048 - RNA, 20 nt, Artificial Sequence
  Synthetic
ugccauagcaauauguccuc

SEQ ID NO: 47049 - RNA, 21 nt, Artificial Sequence
  Synthetic
augccauagcaauauguccuc

SEQ ID NO: 47050 - RNA, 22 nt, Artificial Sequence
  Synthetic
aaugccauagcaauauguccuc

SEQ ID NO: 47051 - RNA, 23 nt, Artificial Sequence
  Synthetic
aaaugccauagcaauauguccuc

SEQ ID NO: 47052 - RNA, 18 nt, Artificial Sequence
  Synthetic
auuaugguaggauuccuc

SEQ ID NO: 47053 - RNA, 19 nt, Artificial Sequence
  Synthetic
uauuaugguaggauuccuc

SEQ ID NO: 47054 - RNA, 20 nt, Artificial Sequence
  Synthetic
auauuaugguaggauuccuc

SEQ ID NO: 47055 - RNA, 21 nt, Artificial Sequence
  Synthetic
aauauuaugguaggauuccuc

SEQ ID NO: 47056 - RNA, 22 nt, Artificial Sequence
  Synthetic
aaauauuaugguaggauuccuc

SEQ ID NO: 47057 - RNA, 23 nt, Artificial Sequence
  Synthetic
aaaauauuaugguaggauuccuc

SEQ ID NO: 47058 - RNA, 24 nt, Artificial Sequence
  Synthetic
caaaauauuaugguaggauuccuc

SEQ ID NO: 47059 - RNA, 18 nt, Artificial Sequence
  Synthetic
cuagaaauacuauuccuc

SEQ ID NO: 47060 - RNA, 19 nt, Artificial Sequence
  Synthetic
acuagaaauacuauuccuc

SEQ ID NO: 47061 - RNA, 20 nt, Artificial Sequence
  Synthetic
aacuagaaauacuauuccuc

SEQ ID NO: 47062 - RNA, 21 nt, Artificial Sequence
  Synthetic
uaacuagaaauacuauuccuc

SEQ ID NO: 47063 - RNA, 22 nt, Artificial Sequence
  Synthetic
auaacuagaaauacuauuccuc

SEQ ID NO: 47064 - RNA, 23 nt, Artificial Sequence
  Synthetic
aauaacuagaaauacuauuccuc

SEQ ID NO: 47065 - RNA, 24 nt, Artificial Sequence
  Synthetic
uaauaacuagaaauacuauuccuc

SEQ ID NO: 47066 - RNA, 21 nt, Artificial Sequence
  Synthetic
uuuuuuuucaaaaucuuccuc

SEQ ID NO: 47067 - RNA, 23 nt, Artificial Sequence
  Synthetic
uguuuuuuuucaaaaucuuccuc

SEQ ID NO: 47068 - RNA, 24 nt, Artificial Sequence
  Synthetic
uuguuuuuuuucaaaaucuuccuc

SEQ ID NO: 47069 - RNA, 21 nt, Artificial Sequence
  Synthetic
agacuuuuaaaaaauuuccuc

SEQ ID NO: 47070 - RNA, 22 nt, Artificial Sequence
  Synthetic
aagacuuuuaaaaaauuuccuc

SEQ ID NO: 47071 - RNA, 23 nt, Artificial Sequence
  Synthetic
caagacuuuuaaaaaauuuccuc

SEQ ID NO: 47072 - RNA, 24 nt, Artificial Sequence
  Synthetic
ucaagacuuuuaaaaaauuuccuc

SEQ ID NO: 47073 - RNA, 18 nt, Artificial Sequence
  Synthetic
ccuguguuuuguuuccuc

SEQ ID NO: 47074 - RNA, 19 nt, Artificial Sequence
  Synthetic
uccuguguuuuguuuccuc

SEQ ID NO: 47075 - RNA, 20 nt, Artificial Sequence
  Synthetic
cuccuguguuuuguuuccuc

SEQ ID NO: 47076 - RNA, 21 nt, Artificial Sequence
  Synthetic
ucuccuguguuuuguuuccuc

SEQ ID NO: 47077 - RNA, 22 nt, Artificial Sequence
  Synthetic
uucuccuguguuuuguuuccuc

SEQ ID NO: 47078 - RNA, 23 nt, Artificial Sequence
  Synthetic
cuucuccuguguuuuguuuccuc

SEQ ID NO: 47079 - RNA, 24 nt, Artificial Sequence
  Synthetic
ccuucuccuguguuuuguuuccuc

SEQ ID NO: 47080 - RNA, 21 nt, Artificial Sequence
  Synthetic
uaaucaauuacuuuuuuccuc

SEQ ID NO: 47081 - RNA, 22 nt, Artificial Sequence
  Synthetic
auaaucaauuacuuuuuuccuc

SEQ ID NO: 47082 - RNA, 23 nt, Artificial Sequence
  Synthetic
uauaaucaauuacuuuuuuccuc

SEQ ID NO: 47083 - RNA, 24 nt, Artificial Sequence
  Synthetic
auauaaucaauuacuuuuuuccuc

SEQ ID NO: 47084 - RNA, 18 nt, Artificial Sequence
  Synthetic
cucuaguaaucaaagcuc

SEQ ID NO: 47085 - RNA, 19 nt, Artificial Sequence
  Synthetic
ucucuaguaaucaaagcuc

SEQ ID NO: 47086 - RNA, 20 nt, Artificial Sequence
  Synthetic
cucucuaguaaucaaagcuc

SEQ ID NO: 47087 - RNA, 21 nt, Artificial Sequence
  Synthetic
ucucucuaguaaucaaagcuc

SEQ ID NO: 47088 - RNA, 22 nt, Artificial Sequence
  Synthetic
cucucucuaguaaucaaagcuc

SEQ ID NO: 47089 - RNA, 20 nt, Artificial Sequence
  Synthetic
uggccauaugaagaaagcuc

SEQ ID NO: 47090 - RNA, 22 nt, Artificial Sequence
  Synthetic
cguggccauaugaagaaagcuc

SEQ ID NO: 47091 - RNA, 23 nt, Artificial Sequence
  Synthetic
acguggccauaugaagaaagcuc

SEQ ID NO: 47092 - RNA, 24 nt, Artificial Sequence
  Synthetic
aacguggccauaugaagaaagcuc

SEQ ID NO: 47093 - RNA, 18 nt, Artificial Sequence
  Synthetic
uaucacaauggaaagcuc

SEQ ID NO: 47094 - RNA, 19 nt, Artificial Sequence
  Synthetic
auaucacaauggaaagcuc

SEQ ID NO: 47095 - RNA, 20 nt, Artificial Sequence
  Synthetic
cauaucacaauggaaagcuc

SEQ ID NO: 47096 - RNA, 21 nt, Artificial Sequence
  Synthetic
ccauaucacaauggaaagcuc

SEQ ID NO: 47097 - RNA, 22 nt, Artificial Sequence
  Synthetic
accauaucacaauggaaagcuc

SEQ ID NO: 47098 - RNA, 23 nt, Artificial Sequence
  Synthetic
aaccauaucacaauggaaagcuc

SEQ ID NO: 47099 - RNA, 24 nt, Artificial Sequence
  Synthetic
aaaccauaucacaauggaaagcuc

SEQ ID NO: 47100 - RNA, 19 nt, Artificial Sequence
  Synthetic
aguugaauuugucaagcuc

SEQ ID NO: 47101 - RNA, 20 nt, Artificial Sequence
  Synthetic
caguugaauuugucaagcuc

SEQ ID NO: 47102 - RNA, 22 nt, Artificial Sequence
  Synthetic
agcaguugaauuugucaagcuc

SEQ ID NO: 47103 - RNA, 23 nt, Artificial Sequence
  Synthetic
cagcaguugaauuugucaagcuc

SEQ ID NO: 47104 - RNA, 24 nt, Artificial Sequence
  Synthetic
ucagcaguugaauuugucaagcuc

SEQ ID NO: 47105 - RNA, 18 nt, Artificial Sequence
  Synthetic
cucuggauguucaagcuc

SEQ ID NO: 47106 - RNA, 19 nt, Artificial Sequence
  Synthetic
acucuggauguucaagcuc

SEQ ID NO: 47107 - RNA, 20 nt, Artificial Sequence
  Synthetic
cacucuggauguucaagcuc

SEQ ID NO: 47108 - RNA, 21 nt, Artificial Sequence
  Synthetic
ccacucuggauguucaagcuc

SEQ ID NO: 47109 - RNA, 22 nt, Artificial Sequence
  Synthetic
cccacucuggauguucaagcuc

SEQ ID NO: 47110 - RNA, 23 nt, Artificial Sequence
  Synthetic
ucccacucuggauguucaagcuc

SEQ ID NO: 47111 - RNA, 18 nt, Artificial Sequence
  Synthetic
uugaagucaguuaagcuc

SEQ ID NO: 47112 - RNA, 19 nt, Artificial Sequence
  Synthetic
cuugaagucaguuaagcuc

SEQ ID NO: 47113 - RNA, 20 nt, Artificial Sequence
  Synthetic
ucuugaagucaguuaagcuc

SEQ ID NO: 47114 - RNA, 21 nt, Artificial Sequence
  Synthetic
uucuugaagucaguuaagcuc

SEQ ID NO: 47115 - RNA, 23 nt, Artificial Sequence
  Synthetic
uguucuugaagucaguuaagcuc

SEQ ID NO: 47116 - RNA, 24 nt, Artificial Sequence
  Synthetic
uuguucuugaagucaguuaagcuc

SEQ ID NO: 47117 - RNA, 18 nt, Artificial Sequence
  Synthetic
uaggaaaagcccuagcuc

SEQ ID NO: 47118 - RNA, 19 nt, Artificial Sequence
  Synthetic
cuaggaaaagcccuagcuc

SEQ ID NO: 47119 - RNA, 20 nt, Artificial Sequence
  Synthetic
ucuaggaaaagcccuagcuc

SEQ ID NO: 47120 - RNA, 21 nt, Artificial Sequence
  Synthetic
uucuaggaaaagcccuagcuc

SEQ ID NO: 47121 - RNA, 22 nt, Artificial Sequence
  Synthetic
uuucuaggaaaagcccuagcuc

SEQ ID NO: 47122 - RNA, 23 nt, Artificial Sequence
  Synthetic
cuuucuaggaaaagcccuagcuc

SEQ ID NO: 47123 - RNA, 24 nt, Artificial Sequence
  Synthetic
acuuucuaggaaaagcccuagcuc

SEQ ID NO: 47124 - RNA, 18 nt, Artificial Sequence
  Synthetic
cugagauuccuuuagcuc

SEQ ID NO: 47125 - RNA, 19 nt, Artificial Sequence
  Synthetic
ccugagauuccuuuagcuc

SEQ ID NO: 47126 - RNA, 20 nt, Artificial Sequence
  Synthetic
uccugagauuccuuuagcuc

SEQ ID NO: 47127 - RNA, 22 nt, Artificial Sequence
  Synthetic
uguccugagauuccuuuagcuc

SEQ ID NO: 47128 - RNA, 23 nt, Artificial Sequence
  Synthetic
uuguccugagauuccuuuagcuc

SEQ ID NO: 47129 - RNA, 24 nt, Artificial Sequence
  Synthetic
auuguccugagauuccuuuagcuc

SEQ ID NO: 47130 - RNA, 18 nt, Artificial Sequence
  Synthetic
caaacaacaucaucgcuc

SEQ ID NO: 47131 - RNA, 19 nt, Artificial Sequence
  Synthetic
ucaaacaacaucaucgcuc

SEQ ID NO: 47132 - RNA, 20 nt, Artificial Sequence
  Synthetic
cucaaacaacaucaucgcuc

SEQ ID NO: 47133 - RNA, 21 nt, Artificial Sequence
  Synthetic
ccucaaacaacaucaucgcuc

SEQ ID NO: 47134 - RNA, 22 nt, Artificial Sequence
  Synthetic
uccucaaacaacaucaucgcuc

SEQ ID NO: 47135 - RNA, 23 nt, Artificial Sequence
  Synthetic
uuccucaaacaacaucaucgcuc

SEQ ID NO: 47136 - RNA, 24 nt, Artificial Sequence
  Synthetic
cuuccucaaacaacaucaucgcuc

SEQ ID NO: 47137 - RNA, 20 nt, Artificial Sequence
  Synthetic
aggugagggaauaaaggcuc

SEQ ID NO: 47138 - RNA, 22 nt, Artificial Sequence
  Synthetic
ugaggugagggaauaaaggcuc

SEQ ID NO: 47139 - RNA, 23 nt, Artificial Sequence
  Synthetic
cugaggugagggaauaaaggcuc

SEQ ID NO: 47140 - RNA, 24 nt, Artificial Sequence
  Synthetic
ccugaggugagggaauaaaggcuc

SEQ ID NO: 47141 - RNA, 19 nt, Artificial Sequence
  Synthetic
ugcuuauaagcacaggcuc

SEQ ID NO: 47142 - RNA, 20 nt, Artificial Sequence
  Synthetic
uugcuuauaagcacaggcuc

SEQ ID NO: 47143 - RNA, 21 nt, Artificial Sequence
  Synthetic
auugcuuauaagcacaggcuc

SEQ ID NO: 47144 - RNA, 22 nt, Artificial Sequence
  Synthetic
aauugcuuauaagcacaggcuc

SEQ ID NO: 47145 - RNA, 23 nt, Artificial Sequence
  Synthetic
uaauugcuuauaagcacaggcuc

SEQ ID NO: 47146 - RNA, 21 nt, Artificial Sequence
  Synthetic
cacagcagugcugggaggcuc

SEQ ID NO: 47147 - RNA, 22 nt, Artificial Sequence
  Synthetic
acacagcagugcugggaggcuc

SEQ ID NO: 47148 - RNA, 23 nt, Artificial Sequence
  Synthetic
aacacagcagugcugggaggcuc

SEQ ID NO: 47149 - RNA, 24 nt, Artificial Sequence
  Synthetic
aaacacagcagugcugggaggcuc

SEQ ID NO: 47150 - RNA, 18 nt, Artificial Sequence
  Synthetic
cucaaagcauaagggcuc

SEQ ID NO: 47151 - RNA, 19 nt, Artificial Sequence
  Synthetic
ucucaaagcauaagggcuc

SEQ ID NO: 47152 - RNA, 20 nt, Artificial Sequence
  Synthetic
uucucaaagcauaagggcuc

SEQ ID NO: 47153 - RNA, 21 nt, Artificial Sequence
  Synthetic
cuucucaaagcauaagggcuc

SEQ ID NO: 47154 - RNA, 22 nt, Artificial Sequence
  Synthetic
ucuucucaaagcauaagggcuc

SEQ ID NO: 47155 - RNA, 23 nt, Artificial Sequence
  Synthetic
uucuucucaaagcauaagggcuc

SEQ ID NO: 47156 - RNA, 24 nt, Artificial Sequence
  Synthetic
uuucuucucaaagcauaagggcuc

SEQ ID NO: 47157 - RNA, 21 nt, Artificial Sequence
  Synthetic
acacuuugaguaguagggcuc

SEQ ID NO: 47158 - RNA, 22 nt, Artificial Sequence
  Synthetic
cacacuuugaguaguagggcuc

SEQ ID NO: 47159 - RNA, 24 nt, Artificial Sequence
  Synthetic
cgcacacuuugaguaguagggcuc

SEQ ID NO: 47160 - RNA, 18 nt, Artificial Sequence
  Synthetic
auuuucuugcaggggcuc

SEQ ID NO: 47161 - RNA, 19 nt, Artificial Sequence
  Synthetic
uauuuucuugcaggggcuc

SEQ ID NO: 47162 - RNA, 21 nt, Artificial Sequence
  Synthetic
uguauuuucuugcaggggcuc

SEQ ID NO: 47163 - RNA, 22 nt, Artificial Sequence
  Synthetic
uuguauuuucuugcaggggcuc

SEQ ID NO: 47164 - RNA, 24 nt, Artificial Sequence
  Synthetic
aguuguauuuucuugcaggggcuc

SEQ ID NO: 47165 - RNA, 18 nt, Artificial Sequence
  Synthetic
aguggcaauguauggcuc

SEQ ID NO: 47166 - RNA, 19 nt, Artificial Sequence
  Synthetic
caguggcaauguauggcuc

SEQ ID NO: 47167 - RNA, 20 nt, Artificial Sequence
  Synthetic
acaguggcaauguauggcuc

SEQ ID NO: 47168 - RNA, 21 nt, Artificial Sequence
  Synthetic
aacaguggcaauguauggcuc

SEQ ID NO: 47169 - RNA, 22 nt, Artificial Sequence
  Synthetic
uaacaguggcaauguauggcuc

SEQ ID NO: 47170 - RNA, 24 nt, Artificial Sequence
  Synthetic
cguaacaguggcaauguauggcuc

SEQ ID NO: 47171 - RNA, 18 nt, Artificial Sequence
  Synthetic
ccucugacuauaaugcuc

SEQ ID NO: 47172 - RNA, 19 nt, Artificial Sequence
  Synthetic
accucugacuauaaugcuc

SEQ ID NO: 47173 - RNA, 20 nt, Artificial Sequence
  Synthetic
aaccucugacuauaaugcuc

SEQ ID NO: 47174 - RNA, 22 nt, Artificial Sequence
  Synthetic
agaaccucugacuauaaugcuc

SEQ ID NO: 47175 - RNA, 24 nt, Artificial Sequence
  Synthetic
ugagaaccucugacuauaaugcuc

SEQ ID NO: 47176 - RNA, 18 nt, Artificial Sequence
  Synthetic
ucugguuauauuaugcuc

SEQ ID NO: 47177 - RNA, 19 nt, Artificial Sequence
  Synthetic
uucugguuauauuaugcuc

SEQ ID NO: 47178 - RNA, 20 nt, Artificial Sequence
  Synthetic
cuucugguuauauuaugcuc

SEQ ID NO: 47179 - RNA, 21 nt, Artificial Sequence
  Synthetic
ucuucugguuauauuaugcuc

SEQ ID NO: 47180 - RNA, 22 nt, Artificial Sequence
  Synthetic
aucuucugguuauauuaugcuc

SEQ ID NO: 47181 - RNA, 23 nt, Artificial Sequence
  Synthetic
aaucuucugguuauauuaugcuc

SEQ ID NO: 47182 - RNA, 24 nt, Artificial Sequence
  Synthetic
caaucuucugguuauauuaugcuc

SEQ ID NO: 47183 - RNA, 18 nt, Artificial Sequence
  Synthetic
auaggauuucuuaugcuc

SEQ ID NO: 47184 - RNA, 19 nt, Artificial Sequence
  Synthetic
cauaggauuucuuaugcuc

SEQ ID NO: 47185 - RNA, 20 nt, Artificial Sequence
  Synthetic
acauaggauuucuuaugcuc

SEQ ID NO: 47186 - RNA, 21 nt, Artificial Sequence
  Synthetic
cacauaggauuucuuaugcuc

SEQ ID NO: 47187 - RNA, 22 nt, Artificial Sequence
  Synthetic
ucacauaggauuucuuaugcuc

SEQ ID NO: 47188 - RNA, 23 nt, Artificial Sequence
  Synthetic
uucacauaggauuucuuaugcuc

SEQ ID NO: 47189 - RNA, 24 nt, Artificial Sequence
  Synthetic
uuucacauaggauuucuuaugcuc

SEQ ID NO: 47190 - RNA, 18 nt, Artificial Sequence
  Synthetic
cccuucaacuuuaugcuc

SEQ ID NO: 47191 - RNA, 19 nt, Artificial Sequence
  Synthetic
ucccuucaacuuuaugcuc

SEQ ID NO: 47192 - RNA, 20 nt, Artificial Sequence
  Synthetic
uucccuucaacuuuaugcuc

SEQ ID NO: 47193 - RNA, 21 nt, Artificial Sequence
  Synthetic
uuucccuucaacuuuaugcuc

SEQ ID NO: 47194 - RNA, 22 nt, Artificial Sequence
  Synthetic
uuuucccuucaacuuuaugcuc

SEQ ID NO: 47195 - RNA, 23 nt, Artificial Sequence
  Synthetic
uuuuucccuucaacuuuaugcuc

SEQ ID NO: 47196 - RNA, 24 nt, Artificial Sequence
  Synthetic
uuuuuucccuucaacuuuaugcuc

SEQ ID NO: 47197 - RNA, 20 nt, Artificial Sequence
  Synthetic
uggccuuacucuuuaugcuc

SEQ ID NO: 47198 - RNA, 21 nt, Artificial Sequence
  Synthetic
cuggccuuacucuuuaugcuc

SEQ ID NO: 47199 - RNA, 22 nt, Artificial Sequence
  Synthetic
acuggccuuacucuuuaugcuc

SEQ ID NO: 47200 - RNA, 23 nt, Artificial Sequence
  Synthetic
uacuggccuuacucuuuaugcuc

SEQ ID NO: 47201 - RNA, 24 nt, Artificial Sequence
  Synthetic
uuacuggccuuacucuuuaugcuc

SEQ ID NO: 47202 - RNA, 18 nt, Artificial Sequence
  Synthetic
auguuuuacuuacugcuc

SEQ ID NO: 47203 - RNA, 19 nt, Artificial Sequence
  Synthetic
uauguuuuacuuacugcuc

SEQ ID NO: 47204 - RNA, 20 nt, Artificial Sequence
  Synthetic
auauguuuuacuuacugcuc

SEQ ID NO: 47205 - RNA, 21 nt, Artificial Sequence
  Synthetic
aauauguuuuacuuacugcuc

SEQ ID NO: 47206 - RNA, 22 nt, Artificial Sequence
  Synthetic
uaauauguuuuacuuacugcuc

SEQ ID NO: 47207 - RNA, 24 nt, Artificial Sequence
  Synthetic
aguaauauguuuuacuuacugcuc

SEQ ID NO: 47208 - RNA, 18 nt, Artificial Sequence
  Synthetic
aauuugaaauagcugcuc

SEQ ID NO: 47209 - RNA, 19 nt, Artificial Sequence
  Synthetic
caauuugaaauagcugcuc

SEQ ID NO: 47210 - RNA, 22 nt, Artificial Sequence
  Synthetic
uggcaauuugaaauagcugcuc

SEQ ID NO: 47211 - RNA, 24 nt, Artificial Sequence
  Synthetic
aguggcaauuugaaauagcugcuc

SEQ ID NO: 47212 - RNA, 19 nt, Artificial Sequence
  Synthetic
aggauuaauaugugugcuc

SEQ ID NO: 47213 - RNA, 20 nt, Artificial Sequence
  Synthetic
caggauuaauaugugugcuc

SEQ ID NO: 47214 - RNA, 22 nt, Artificial Sequence
  Synthetic
agcaggauuaauaugugugcuc

SEQ ID NO: 47215 - RNA, 23 nt, Artificial Sequence
  Synthetic
aagcaggauuaauaugugugcuc

SEQ ID NO: 47216 - RNA, 19 nt, Artificial Sequence
  Synthetic
agggaaaguuaauuugcuc

SEQ ID NO: 47217 - RNA, 21 nt, Artificial Sequence
  Synthetic
ugagggaaaguuaauuugcuc

SEQ ID NO: 47218 - RNA, 22 nt, Artificial Sequence
  Synthetic
augagggaaaguuaauuugcuc

SEQ ID NO: 47219 - RNA, 23 nt, Artificial Sequence
  Synthetic
caugagggaaaguuaauuugcuc

SEQ ID NO: 47220 - RNA, 24 nt, Artificial Sequence
  Synthetic
ccaugagggaaaguuaauuugcuc

SEQ ID NO: 47221 - RNA, 18 nt, Artificial Sequence
  Synthetic
aauuacuuuuguuugcuc

SEQ ID NO: 47222 - RNA, 19 nt, Artificial Sequence
  Synthetic
aaauuacuuuuguuugcuc

SEQ ID NO: 47223 - RNA, 20 nt, Artificial Sequence
  Synthetic
caaauuacuuuuguuugcuc

SEQ ID NO: 47224 - RNA, 21 nt, Artificial Sequence
  Synthetic
acaaauuacuuuuguuugcuc

SEQ ID NO: 47225 - RNA, 22 nt, Artificial Sequence
  Synthetic
aacaaauuacuuuuguuugcuc

SEQ ID NO: 47226 - RNA, 23 nt, Artificial Sequence
  Synthetic
caacaaauuacuuuuguuugcuc

SEQ ID NO: 47227 - RNA, 18 nt, Artificial Sequence
  Synthetic
ugacaggugagaaaucuc

SEQ ID NO: 47228 - RNA, 19 nt, Artificial Sequence
  Synthetic
uugacaggugagaaaucuc

SEQ ID NO: 47229 - RNA, 20 nt, Artificial Sequence
  Synthetic
uuugacaggugagaaaucuc

SEQ ID NO: 47230 - RNA, 21 nt, Artificial Sequence
  Synthetic
auuugacaggugagaaaucuc

SEQ ID NO: 47231 - RNA, 22 nt, Artificial Sequence
  Synthetic
cauuugacaggugagaaaucuc

SEQ ID NO: 47232 - RNA, 23 nt, Artificial Sequence
  Synthetic
ucauuugacaggugagaaaucuc

SEQ ID NO: 47233 - RNA, 24 nt, Artificial Sequence
  Synthetic
uucauuugacaggugagaaaucuc

SEQ ID NO: 47234 - RNA, 19 nt, Artificial Sequence
  Synthetic
ugcagaucuguggaaucuc

SEQ ID NO: 47235 - RNA, 20 nt, Artificial Sequence
  Synthetic
cugcagaucuguggaaucuc

SEQ ID NO: 47236 - RNA, 21 nt, Artificial Sequence
  Synthetic
ccugcagaucuguggaaucuc

SEQ ID NO: 47237 - RNA, 24 nt, Artificial Sequence
  Synthetic
aggccugcagaucuguggaaucuc

SEQ ID NO: 47238 - RNA, 18 nt, Artificial Sequence
  Synthetic
ccaguacaauuacaucuc

SEQ ID NO: 47239 - RNA, 19 nt, Artificial Sequence
  Synthetic
accaguacaauuacaucuc

SEQ ID NO: 47240 - RNA, 20 nt, Artificial Sequence
  Synthetic
caccaguacaauuacaucuc

SEQ ID NO: 47241 - RNA, 21 nt, Artificial Sequence
  Synthetic
ucaccaguacaauuacaucuc

SEQ ID NO: 47242 - RNA, 22 nt, Artificial Sequence
  Synthetic
uucaccaguacaauuacaucuc

SEQ ID NO: 47243 - RNA, 23 nt, Artificial Sequence
  Synthetic
auucaccaguacaauuacaucuc

SEQ ID NO: 47244 - RNA, 24 nt, Artificial Sequence
  Synthetic
uauucaccaguacaauuacaucuc

SEQ ID NO: 47245 - RNA, 18 nt, Artificial Sequence
  Synthetic
auaagaaacuaccaucuc

SEQ ID NO: 47246 - RNA, 19 nt, Artificial Sequence
  Synthetic
aauaagaaacuaccaucuc

SEQ ID NO: 47247 - RNA, 20 nt, Artificial Sequence
  Synthetic
caauaagaaacuaccaucuc

SEQ ID NO: 47248 - RNA, 21 nt, Artificial Sequence
  Synthetic
ccaauaagaaacuaccaucuc

SEQ ID NO: 47249 - RNA, 22 nt, Artificial Sequence
  Synthetic
uccaauaagaaacuaccaucuc

SEQ ID NO: 47250 - RNA, 23 nt, Artificial Sequence
  Synthetic
auccaauaagaaacuaccaucuc

SEQ ID NO: 47251 - RNA, 19 nt, Artificial Sequence
  Synthetic
ugggcauuguguucaucuc

SEQ ID NO: 47252 - RNA, 20 nt, Artificial Sequence
  Synthetic
augggcauuguguucaucuc

SEQ ID NO: 47253 - RNA, 21 nt, Artificial Sequence
  Synthetic
uaugggcauuguguucaucuc

SEQ ID NO: 47254 - RNA, 22 nt, Artificial Sequence
  Synthetic
auaugggcauuguguucaucuc

SEQ ID NO: 47255 - RNA, 23 nt, Artificial Sequence
  Synthetic
uauaugggcauuguguucaucuc

SEQ ID NO: 47256 - RNA, 24 nt, Artificial Sequence
  Synthetic
auauaugggcauuguguucaucuc

SEQ ID NO: 47257 - RNA, 21 nt, Artificial Sequence
  Synthetic
cauuguuauucaacagaucuc

SEQ ID NO: 47258 - RNA, 22 nt, Artificial Sequence
  Synthetic
acauuguuauucaacagaucuc

SEQ ID NO: 47259 - RNA, 23 nt, Artificial Sequence
  Synthetic
uacauuguuauucaacagaucuc

SEQ ID NO: 47260 - RNA, 24 nt, Artificial Sequence
  Synthetic
auacauuguuauucaacagaucuc

SEQ ID NO: 47261 - RNA, 19 nt, Artificial Sequence
  Synthetic
uguuagggaacgugaucuc

SEQ ID NO: 47262 - RNA, 20 nt, Artificial Sequence
  Synthetic
uuguuagggaacgugaucuc

SEQ ID NO: 47263 - RNA, 21 nt, Artificial Sequence
  Synthetic
uuuguuagggaacgugaucuc

SEQ ID NO: 47264 - RNA, 23 nt, Artificial Sequence
  Synthetic
aguuuguuagggaacgugaucuc

SEQ ID NO: 47265 - RNA, 21 nt, Artificial Sequence
  Synthetic
uuaauuuuauuuaaauaucuc

SEQ ID NO: 47266 - RNA, 22 nt, Artificial Sequence
  Synthetic
auuaauuuuauuuaaauaucuc

SEQ ID NO: 47267 - RNA, 23 nt, Artificial Sequence
  Synthetic
aauuaauuuuauuuaaauaucuc

SEQ ID NO: 47268 - RNA, 24 nt, Artificial Sequence
  Synthetic
caauuaauuuuauuuaaauaucuc

SEQ ID NO: 47269 - RNA, 18 nt, Artificial Sequence
  Synthetic
cucacuuauaacuaucuc

SEQ ID NO: 47270 - RNA, 21 nt, Artificial Sequence
  Synthetic
aggcucacuuauaacuaucuc

SEQ ID NO: 47271 - RNA, 22 nt, Artificial Sequence
  Synthetic
uaggcucacuuauaacuaucuc

SEQ ID NO: 47272 - RNA, 23 nt, Artificial Sequence
  Synthetic
auaggcucacuuauaacuaucuc

SEQ ID NO: 47273 - RNA, 24 nt, Artificial Sequence
  Synthetic
aauaggcucacuuauaacuaucuc

SEQ ID NO: 47274 - RNA, 18 nt, Artificial Sequence
  Synthetic
aauaaucgcaaguaucuc

SEQ ID NO: 47275 - RNA, 19 nt, Artificial Sequence
  Synthetic
aaauaaucgcaaguaucuc

SEQ ID NO: 47276 - RNA, 20 nt, Artificial Sequence
  Synthetic
uaaauaaucgcaaguaucuc

SEQ ID NO: 47277 - RNA, 21 nt, Artificial Sequence
  Synthetic
auaaauaaucgcaaguaucuc

SEQ ID NO: 47278 - RNA, 22 nt, Artificial Sequence
  Synthetic
aauaaauaaucgcaaguaucuc

SEQ ID NO: 47279 - RNA, 23 nt, Artificial Sequence
  Synthetic
uaauaaauaaucgcaaguaucuc

SEQ ID NO: 47280 - RNA, 24 nt, Artificial Sequence
  Synthetic
auaauaaauaaucgcaaguaucuc

SEQ ID NO: 47281 - RNA, 18 nt, Artificial Sequence
  Synthetic
aaaagugcuauguaucuc

SEQ ID NO: 47282 - RNA, 19 nt, Artificial Sequence
  Synthetic
aaaaagugcuauguaucuc

SEQ ID NO: 47283 - RNA, 22 nt, Artificial Sequence
  Synthetic
aggaaaaagugcuauguaucuc

SEQ ID NO: 47284 - RNA, 23 nt, Artificial Sequence
  Synthetic
aaggaaaaagugcuauguaucuc

SEQ ID NO: 47285 - RNA, 24 nt, Artificial Sequence
  Synthetic
caaggaaaaagugcuauguaucuc

SEQ ID NO: 47286 - RNA, 18 nt, Artificial Sequence
  Synthetic
uggggaggagauuaucuc

SEQ ID NO: 47287 - RNA, 19 nt, Artificial Sequence
  Synthetic
cuggggaggagauuaucuc

SEQ ID NO: 47288 - RNA, 21 nt, Artificial Sequence
  Synthetic
agcuggggaggagauuaucuc

SEQ ID NO: 47289 - RNA, 22 nt, Artificial Sequence
  Synthetic
aagcuggggaggagauuaucuc

SEQ ID NO: 47290 - RNA, 18 nt, Artificial Sequence
  Synthetic
uuccgaguuucuuaucuc

SEQ ID NO: 47291 - RNA, 19 nt, Artificial Sequence
  Synthetic
auuccgaguuucuuaucuc

SEQ ID NO: 47292 - RNA, 20 nt, Artificial Sequence
  Synthetic
cauuccgaguuucuuaucuc

SEQ ID NO: 47293 - RNA, 21 nt, Artificial Sequence
  Synthetic
acauuccgaguuucuuaucuc

SEQ ID NO: 47294 - RNA, 22 nt, Artificial Sequence
  Synthetic
cacauuccgaguuucuuaucuc

SEQ ID NO: 47295 - RNA, 24 nt, Artificial Sequence
  Synthetic
agcacauuccgaguuucuuaucuc

SEQ ID NO: 47296 - RNA, 18 nt, Artificial Sequence
  Synthetic
uacuuaucaauuuaucuc

SEQ ID NO: 47297 - RNA, 20 nt, Artificial Sequence
  Synthetic
aguacuuaucaauuuaucuc

SEQ ID NO: 47298 - RNA, 22 nt, Artificial Sequence
  Synthetic
ugaguacuuaucaauuuaucuc

SEQ ID NO: 47299 - RNA, 23 nt, Artificial Sequence
  Synthetic
uugaguacuuaucaauuuaucuc

SEQ ID NO: 47300 - RNA, 24 nt, Artificial Sequence
  Synthetic
uuugaguacuuaucaauuuaucuc

SEQ ID NO: 47301 - RNA, 18 nt, Artificial Sequence
  Synthetic
aaucuacaauaaacucuc

SEQ ID NO: 47302 - RNA, 19 nt, Artificial Sequence
  Synthetic
aaaucuacaauaaacucuc

SEQ ID NO: 47303 - RNA, 20 nt, Artificial Sequence
  Synthetic
caaaucuacaauaaacucuc

SEQ ID NO: 47304 - RNA, 21 nt, Artificial Sequence
  Synthetic
ccaaaucuacaauaaacucuc

SEQ ID NO: 47305 - RNA, 22 nt, Artificial Sequence
  Synthetic
accaaaucuacaauaaacucuc

SEQ ID NO: 47306 - RNA, 23 nt, Artificial Sequence
  Synthetic
uaccaaaucuacaauaaacucuc

SEQ ID NO: 47307 - RNA, 24 nt, Artificial Sequence
  Synthetic
cuaccaaaucuacaauaaacucuc

SEQ ID NO: 47308 - RNA, 18 nt, Artificial Sequence
  Synthetic
cuuuuugaagcaacucuc

SEQ ID NO: 47309 - RNA, 19 nt, Artificial Sequence
  Synthetic
ucuuuuugaagcaacucuc

SEQ ID NO: 47310 - RNA, 20 nt, Artificial Sequence
  Synthetic
uucuuuuugaagcaacucuc

SEQ ID NO: 47311 - RNA, 21 nt, Artificial Sequence
  Synthetic
uuucuuuuugaagcaacucuc

SEQ ID NO: 47312 - RNA, 22 nt, Artificial Sequence
  Synthetic
uuuucuuuuugaagcaacucuc

SEQ ID NO: 47313 - RNA, 23 nt, Artificial Sequence
  Synthetic
uuuuucuuuuugaagcaacucuc

SEQ ID NO: 47314 - RNA, 24 nt, Artificial Sequence
  Synthetic
cuuuuucuuuuugaagcaacucuc

SEQ ID NO: 47315 - RNA, 18 nt, Artificial Sequence
  Synthetic
caaaaaguucuuacucuc

SEQ ID NO: 47316 - RNA, 20 nt, Artificial Sequence
  Synthetic
agcaaaaaguucuuacucuc

SEQ ID NO: 47317 - RNA, 21 nt, Artificial Sequence
  Synthetic
aagcaaaaaguucuuacucuc

SEQ ID NO: 47318 - RNA, 23 nt, Artificial Sequence
  Synthetic
agaagcaaaaaguucuuacucuc

SEQ ID NO: 47319 - RNA, 24 nt, Artificial Sequence
  Synthetic
cagaagcaaaaaguucuuacucuc

SEQ ID NO: 47320 - RNA, 18 nt, Artificial Sequence
  Synthetic
cuagucaagauuccucuc

SEQ ID NO: 47321 - RNA, 19 nt, Artificial Sequence
  Synthetic
ucuagucaagauuccucuc

SEQ ID NO: 47322 - RNA, 20 nt, Artificial Sequence
  Synthetic
cucuagucaagauuccucuc

SEQ ID NO: 47323 - RNA, 21 nt, Artificial Sequence
  Synthetic
ucucuagucaagauuccucuc

SEQ ID NO: 47324 - RNA, 22 nt, Artificial Sequence
  Synthetic
aucucuagucaagauuccucuc

SEQ ID NO: 47325 - RNA, 23 nt, Artificial Sequence
  Synthetic
uaucucuagucaagauuccucuc

SEQ ID NO: 47326 - RNA, 24 nt, Artificial Sequence
  Synthetic
auaucucuagucaagauuccucuc

SEQ ID NO: 47327 - RNA, 18 nt, Artificial Sequence
  Synthetic
ugcauucuuauuccucuc

SEQ ID NO: 47328 - RNA, 19 nt, Artificial Sequence
  Synthetic
uugcauucuuauuccucuc

SEQ ID NO: 47329 - RNA, 20 nt, Artificial Sequence
  Synthetic
cuugcauucuuauuccucuc

SEQ ID NO: 47330 - RNA, 21 nt, Artificial Sequence
  Synthetic
ucuugcauucuuauuccucuc

SEQ ID NO: 47331 - RNA, 22 nt, Artificial Sequence
  Synthetic
uucuugcauucuuauuccucuc

SEQ ID NO: 47332 - RNA, 24 nt, Artificial Sequence
  Synthetic
aguucuugcauucuuauuccucuc

SEQ ID NO: 47333 - RNA, 21 nt, Artificial Sequence
  Synthetic
aagauuacaguuccugcucuc

SEQ ID NO: 47334 - RNA, 22 nt, Artificial Sequence
  Synthetic
aaagauuacaguuccugcucuc

SEQ ID NO: 47335 - RNA, 23 nt, Artificial Sequence
  Synthetic
aaaagauuacaguuccugcucuc

SEQ ID NO: 47336 - RNA, 18 nt, Artificial Sequence
  Synthetic
ccuaaaaagguaucucuc

SEQ ID NO: 47337 - RNA, 20 nt, Artificial Sequence
  Synthetic
agccuaaaaagguaucucuc

SEQ ID NO: 47338 - RNA, 21 nt, Artificial Sequence
  Synthetic
aagccuaaaaagguaucucuc

SEQ ID NO: 47339 - RNA, 23 nt, Artificial Sequence
  Synthetic
agaagccuaaaaagguaucucuc

SEQ ID NO: 47340 - RNA, 24 nt, Artificial Sequence
  Synthetic
aagaagccuaaaaagguaucucuc

SEQ ID NO: 47341 - RNA, 18 nt, Artificial Sequence
  Synthetic
uuagucugugacucucuc

SEQ ID NO: 47342 - RNA, 19 nt, Artificial Sequence
  Synthetic
cuuagucugugacucucuc

SEQ ID NO: 47343 - RNA, 20 nt, Artificial Sequence
  Synthetic
ucuuagucugugacucucuc

SEQ ID NO: 47344 - RNA, 21 nt, Artificial Sequence
  Synthetic
aucuuagucugugacucucuc

SEQ ID NO: 47345 - RNA, 24 nt, Artificial Sequence
  Synthetic
aggaucuuagucugugacucucuc

SEQ ID NO: 47346 - RNA, 22 nt, Artificial Sequence
  Synthetic
ugcaaauuuaaaaaucucucuc

SEQ ID NO: 47347 - RNA, 23 nt, Artificial Sequence
  Synthetic
cugcaaauuuaaaaaucucucuc

SEQ ID NO: 47348 - RNA, 24 nt, Artificial Sequence
  Synthetic
acugcaaauuuaaaaaucucucuc

SEQ ID NO: 47349 - RNA, 18 nt, Artificial Sequence
  Synthetic
auuugcagagugucucuc

SEQ ID NO: 47350 - RNA, 19 nt, Artificial Sequence
  Synthetic
aauuugcagagugucucuc

SEQ ID NO: 47351 - RNA, 20 nt, Artificial Sequence
  Synthetic
caauuugcagagugucucuc

SEQ ID NO: 47352 - RNA, 21 nt, Artificial Sequence
  Synthetic
acaauuugcagagugucucuc

SEQ ID NO: 47353 - RNA, 22 nt, Artificial Sequence
  Synthetic
uacaauuugcagagugucucuc

SEQ ID NO: 47354 - RNA, 23 nt, Artificial Sequence
  Synthetic
auacaauuugcagagugucucuc

SEQ ID NO: 47355 - RNA, 24 nt, Artificial Sequence
  Synthetic
aauacaauuugcagagugucucuc

SEQ ID NO: 47356 - RNA, 18 nt, Artificial Sequence
  Synthetic
agucgcaaacauucucuc

SEQ ID NO: 47357 - RNA, 19 nt, Artificial Sequence
  Synthetic
cagucgcaaacauucucuc

SEQ ID NO: 47358 - RNA, 20 nt, Artificial Sequence
  Synthetic
acagucgcaaacauucucuc

SEQ ID NO: 47359 - RNA, 21 nt, Artificial Sequence
  Synthetic
aacagucgcaaacauucucuc

SEQ ID NO: 47360 - RNA, 22 nt, Artificial Sequence
  Synthetic
aaacagucgcaaacauucucuc

SEQ ID NO: 47361 - RNA, 23 nt, Artificial Sequence
  Synthetic
aaaacagucgcaaacauucucuc

SEQ ID NO: 47362 - RNA, 24 nt, Artificial Sequence
  Synthetic
aaaaacagucgcaaacauucucuc

SEQ ID NO: 47363 - RNA, 19 nt, Artificial Sequence
  Synthetic
cguucuuacauuuucucuc

SEQ ID NO: 47364 - RNA, 20 nt, Artificial Sequence
  Synthetic
acguucuuacauuuucucuc

SEQ ID NO: 47365 - RNA, 21 nt, Artificial Sequence
  Synthetic
uacguucuuacauuuucucuc

SEQ ID NO: 47366 - RNA, 22 nt, Artificial Sequence
  Synthetic
auacguucuuacauuuucucuc

SEQ ID NO: 47367 - RNA, 23 nt, Artificial Sequence
  Synthetic
aauacguucuuacauuuucucuc

SEQ ID NO: 47368 - RNA, 24 nt, Artificial Sequence
  Synthetic
aaauacguucuuacauuuucucuc

SEQ ID NO: 47369 - RNA, 18 nt, Artificial Sequence
  Synthetic
aacuuucacuuuucucuc

SEQ ID NO: 47370 - RNA, 20 nt, Artificial Sequence
  Synthetic
agaacuuucacuuuucucuc

SEQ ID NO: 47371 - RNA, 21 nt, Artificial Sequence
  Synthetic
cagaacuuucacuuuucucuc

SEQ ID NO: 47372 - RNA, 23 nt, Artificial Sequence
  Synthetic
cgcagaacuuucacuuuucucuc

SEQ ID NO: 47373 - RNA, 24 nt, Artificial Sequence
  Synthetic
ccgcagaacuuucacuuuucucuc

SEQ ID NO: 47374 - RNA, 18 nt, Artificial Sequence
  Synthetic
aaacaaagcugaagucuc

SEQ ID NO: 47375 - RNA, 19 nt, Artificial Sequence
  Synthetic
aaaacaaagcugaagucuc

SEQ ID NO: 47376 - RNA, 20 nt, Artificial Sequence
  Synthetic
uaaaacaaagcugaagucuc

SEQ ID NO: 47377 - RNA, 21 nt, Artificial Sequence
  Synthetic
auaaaacaaagcugaagucuc

SEQ ID NO: 47378 - RNA, 23 nt, Artificial Sequence
  Synthetic
ugauaaaacaaagcugaagucuc

SEQ ID NO: 47379 - RNA, 24 nt, Artificial Sequence
  Synthetic
augauaaaacaaagcugaagucuc

SEQ ID NO: 47380 - RNA, 18 nt, Artificial Sequence
  Synthetic
uuaugagcucacagucuc

SEQ ID NO: 47381 - RNA, 19 nt, Artificial Sequence
  Synthetic
uuuaugagcucacagucuc

SEQ ID NO: 47382 - RNA, 20 nt, Artificial Sequence
  Synthetic
cuuuaugagcucacagucuc

SEQ ID NO: 47383 - RNA, 21 nt, Artificial Sequence
  Synthetic
ucuuuaugagcucacagucuc

SEQ ID NO: 47384 - RNA, 22 nt, Artificial Sequence
  Synthetic
cucuuuaugagcucacagucuc

SEQ ID NO: 47385 - RNA, 23 nt, Artificial Sequence
  Synthetic
ucucuuuaugagcucacagucuc

SEQ ID NO: 47386 - RNA, 24 nt, Artificial Sequence
  Synthetic
uucucuuuaugagcucacagucuc

SEQ ID NO: 47387 - RNA, 18 nt, Artificial Sequence
  Synthetic
cuuugcuuauacagucuc

SEQ ID NO: 47388 - RNA, 19 nt, Artificial Sequence
  Synthetic
ccuuugcuuauacagucuc

SEQ ID NO: 47389 - RNA, 20 nt, Artificial Sequence
  Synthetic
uccuuugcuuauacagucuc

SEQ ID NO: 47390 - RNA, 21 nt, Artificial Sequence
  Synthetic
auccuuugcuuauacagucuc

SEQ ID NO: 47391 - RNA, 22 nt, Artificial Sequence
  Synthetic
aauccuuugcuuauacagucuc

SEQ ID NO: 47392 - RNA, 23 nt, Artificial Sequence
  Synthetic
uaauccuuugcuuauacagucuc

SEQ ID NO: 47393 - RNA, 24 nt, Artificial Sequence
  Synthetic
uuaauccuuugcuuauacagucuc

SEQ ID NO: 47394 - RNA, 18 nt, Artificial Sequence
  Synthetic
uuuugaucugucagucuc

SEQ ID NO: 47395 - RNA, 19 nt, Artificial Sequence
  Synthetic
uuuuugaucugucagucuc

SEQ ID NO: 47396 - RNA, 21 nt, Artificial Sequence
  Synthetic
uguuuuugaucugucagucuc

SEQ ID NO: 47397 - RNA, 22 nt, Artificial Sequence
  Synthetic
auguuuuugaucugucagucuc

SEQ ID NO: 47398 - RNA, 23 nt, Artificial Sequence
  Synthetic
uauguuuuugaucugucagucuc

SEQ ID NO: 47399 - RNA, 24 nt, Artificial Sequence
  Synthetic
auauguuuuugaucugucagucuc

SEQ ID NO: 47400 - RNA, 19 nt, Artificial Sequence
  Synthetic
ugaugugcucaguagucuc

SEQ ID NO: 47401 - RNA, 20 nt, Artificial Sequence
  Synthetic
uugaugugcucaguagucuc

SEQ ID NO: 47402 - RNA, 21 nt, Artificial Sequence
  Synthetic
auugaugugcucaguagucuc

SEQ ID NO: 47403 - RNA, 22 nt, Artificial Sequence
  Synthetic
cauugaugugcucaguagucuc

SEQ ID NO: 47404 - RNA, 23 nt, Artificial Sequence
  Synthetic
ccauugaugugcucaguagucuc

SEQ ID NO: 47405 - RNA, 18 nt, Artificial Sequence
  Synthetic
uccauacuaaaaugucuc

SEQ ID NO: 47406 - RNA, 19 nt, Artificial Sequence
  Synthetic
cuccauacuaaaaugucuc

SEQ ID NO: 47407 - RNA, 20 nt, Artificial Sequence
  Synthetic
ucuccauacuaaaaugucuc

SEQ ID NO: 47408 - RNA, 21 nt, Artificial Sequence
  Synthetic
cucuccauacuaaaaugucuc

SEQ ID NO: 47409 - RNA, 22 nt, Artificial Sequence
  Synthetic
acucuccauacuaaaaugucuc

SEQ ID NO: 47410 - RNA, 23 nt, Artificial Sequence
  Synthetic
aacucuccauacuaaaaugucuc

SEQ ID NO: 47411 - RNA, 24 nt, Artificial Sequence
  Synthetic
caacucuccauacuaaaaugucuc

SEQ ID NO: 47412 - RNA, 18 nt, Artificial Sequence
  Synthetic
aaaucacaaacaugucuc

SEQ ID NO: 47413 - RNA, 19 nt, Artificial Sequence
  Synthetic
aaaaucacaaacaugucuc

SEQ ID NO: 47414 - RNA, 20 nt, Artificial Sequence
  Synthetic
aaaaaucacaaacaugucuc

SEQ ID NO: 47415 - RNA, 22 nt, Artificial Sequence
  Synthetic
agaaaaaucacaaacaugucuc

SEQ ID NO: 47416 - RNA, 23 nt, Artificial Sequence
  Synthetic
cagaaaaaucacaaacaugucuc

SEQ ID NO: 47417 - RNA, 24 nt, Artificial Sequence
  Synthetic
ccagaaaaaucacaaacaugucuc

SEQ ID NO: 47418 - RNA, 19 nt, Artificial Sequence
  Synthetic
cgguuaauuauucugucuc

SEQ ID NO: 47419 - RNA, 20 nt, Artificial Sequence
  Synthetic
ccgguuaauuauucugucuc

SEQ ID NO: 47420 - RNA, 21 nt, Artificial Sequence
  Synthetic
cccgguuaauuauucugucuc

SEQ ID NO: 47421 - RNA, 22 nt, Artificial Sequence
  Synthetic
ccccgguuaauuauucugucuc

SEQ ID NO: 47422 - RNA, 24 nt, Artificial Sequence
  Synthetic
ugccccgguuaauuauucugucuc

SEQ ID NO: 47423 - RNA, 18 nt, Artificial Sequence
  Synthetic
agcauacucuaaauucuc

SEQ ID NO: 47424 - RNA, 19 nt, Artificial Sequence
  Synthetic
aagcauacucuaaauucuc

SEQ ID NO: 47425 - RNA, 20 nt, Artificial Sequence
  Synthetic
aaagcauacucuaaauucuc

SEQ ID NO: 47426 - RNA, 21 nt, Artificial Sequence
  Synthetic
aaaagcauacucuaaauucuc

SEQ ID NO: 47427 - RNA, 22 nt, Artificial Sequence
  Synthetic
caaaagcauacucuaaauucuc

SEQ ID NO: 47428 - RNA, 23 nt, Artificial Sequence
  Synthetic
acaaaagcauacucuaaauucuc

SEQ ID NO: 47429 - RNA, 24 nt, Artificial Sequence
  Synthetic
uacaaaagcauacucuaaauucuc

SEQ ID NO: 47430 - RNA, 18 nt, Artificial Sequence
  Synthetic
uagggaaaggcaauucuc

SEQ ID NO: 47431 - RNA, 19 nt, Artificial Sequence
  Synthetic
uuagggaaaggcaauucuc

SEQ ID NO: 47432 - RNA, 20 nt, Artificial Sequence
  Synthetic
auuagggaaaggcaauucuc

SEQ ID NO: 47433 - RNA, 21 nt, Artificial Sequence
  Synthetic
aauuagggaaaggcaauucuc

SEQ ID NO: 47434 - RNA, 22 nt, Artificial Sequence
  Synthetic
aaauuagggaaaggcaauucuc

SEQ ID NO: 47435 - RNA, 23 nt, Artificial Sequence
  Synthetic
aaaauuagggaaaggcaauucuc

SEQ ID NO: 47436 - RNA, 24 nt, Artificial Sequence
  Synthetic
caaaauuagggaaaggcaauucuc

SEQ ID NO: 47437 - RNA, 18 nt, Artificial Sequence
  Synthetic
aauuugaaacgcauucuc

SEQ ID NO: 47438 - RNA, 19 nt, Artificial Sequence
  Synthetic
aaauuugaaacgcauucuc

SEQ ID NO: 47439 - RNA, 21 nt, Artificial Sequence
  Synthetic
agaaauuugaaacgcauucuc

SEQ ID NO: 47440 - RNA, 22 nt, Artificial Sequence
  Synthetic
cagaaauuugaaacgcauucuc

SEQ ID NO: 47441 - RNA, 23 nt, Artificial Sequence
  Synthetic
ccagaaauuugaaacgcauucuc

SEQ ID NO: 47442 - RNA, 24 nt, Artificial Sequence
  Synthetic
uccagaaauuugaaacgcauucuc

SEQ ID NO: 47443 - RNA, 18 nt, Artificial Sequence
  Synthetic
uguacacgaaauauucuc

SEQ ID NO: 47444 - RNA, 19 nt, Artificial Sequence
  Synthetic
cuguacacgaaauauucuc

SEQ ID NO: 47445 - RNA, 20 nt, Artificial Sequence
  Synthetic
acuguacacgaaauauucuc

SEQ ID NO: 47446 - RNA, 21 nt, Artificial Sequence
  Synthetic
aucuauacucauuuacuucuc

SEQ ID NO: 47447 - RNA, 22 nt, Artificial Sequence
  Synthetic
caucuauacucauuuacuucuc

SEQ ID NO: 47448 - RNA, 23 nt, Artificial Sequence
  Synthetic
acaucuauacucauuuacuucuc

SEQ ID NO: 47449 - RNA, 24 nt, Artificial Sequence
  Synthetic
cacaucuauacucauuuacuucuc

SEQ ID NO: 47450 - RNA, 19 nt, Artificial Sequence
  Synthetic
aguuccacuaggccuucuc

SEQ ID NO: 47451 - RNA, 21 nt, Artificial Sequence
  Synthetic
agaguuccacuaggccuucuc

SEQ ID NO: 47452 - RNA, 23 nt, Artificial Sequence
  Synthetic
ugagaguuccacuaggccuucuc

SEQ ID NO: 47453 - RNA, 24 nt, Artificial Sequence
  Synthetic
uugagaguuccacuaggccuucuc

SEQ ID NO: 47454 - RNA, 18 nt, Artificial Sequence
  Synthetic
acuguccacugccuucuc

SEQ ID NO: 47455 - RNA, 19 nt, Artificial Sequence
  Synthetic
cacuguccacugccuucuc

SEQ ID NO: 47456 - RNA, 20 nt, Artificial Sequence
  Synthetic
ucacuguccacugccuucuc

SEQ ID NO: 47457 - RNA, 21 nt, Artificial Sequence
  Synthetic
uucacuguccacugccuucuc

SEQ ID NO: 47458 - RNA, 22 nt, Artificial Sequence
  Synthetic
cuucacuguccacugccuucuc

SEQ ID NO: 47459 - RNA, 24 nt, Artificial Sequence
  Synthetic
ugcuucacuguccacugccuucuc

SEQ ID NO: 47460 - RNA, 18 nt, Artificial Sequence
  Synthetic
ucagaucauuaucuucuc

SEQ ID NO: 47461 - RNA, 19 nt, Artificial Sequence
  Synthetic
cucagaucauuaucuucuc

SEQ ID NO: 47462 - RNA, 20 nt, Artificial Sequence
  Synthetic
acucagaucauuaucuucuc

SEQ ID NO: 47463 - RNA, 22 nt, Artificial Sequence
  Synthetic
agacucagaucauuaucuucuc

SEQ ID NO: 47464 - RNA, 23 nt, Artificial Sequence
  Synthetic
aagacucagaucauuaucuucuc

SEQ ID NO: 47465 - RNA, 24 nt, Artificial Sequence
  Synthetic
caagacucagaucauuaucuucuc

SEQ ID NO: 47466 - RNA, 18 nt, Artificial Sequence
  Synthetic
uuuucuucagaaguucuc

SEQ ID NO: 47467 - RNA, 19 nt, Artificial Sequence
  Synthetic
auuuucuucagaaguucuc

SEQ ID NO: 47468 - RNA, 20 nt, Artificial Sequence
  Synthetic
aauuuucuucagaaguucuc

SEQ ID NO: 47469 - RNA, 21 nt, Artificial Sequence
  Synthetic
aaauuuucuucagaaguucuc

SEQ ID NO: 47470 - RNA, 22 nt, Artificial Sequence
  Synthetic
caaauuuucuucagaaguucuc

SEQ ID NO: 47471 - RNA, 23 nt, Artificial Sequence
  Synthetic
ucaaauuuucuucagaaguucuc

SEQ ID NO: 47472 - RNA, 24 nt, Artificial Sequence
  Synthetic
uucaaauuuucuucagaaguucuc

SEQ ID NO: 47473 - RNA, 18 nt, Artificial Sequence
  Synthetic
auuuguccugaaguucuc

SEQ ID NO: 47474 - RNA, 19 nt, Artificial Sequence
  Synthetic
uauuuguccugaaguucuc

SEQ ID NO: 47475 - RNA, 20 nt, Artificial Sequence
  Synthetic
cuauuuguccugaaguucuc

SEQ ID NO: 47476 - RNA, 21 nt, Artificial Sequence
  Synthetic
ucuauuuguccugaaguucuc

SEQ ID NO: 47477 - RNA, 22 nt, Artificial Sequence
  Synthetic
uucuauuuguccugaaguucuc

SEQ ID NO: 47478 - RNA, 23 nt, Artificial Sequence
  Synthetic
uuucuauuuguccugaaguucuc

SEQ ID NO: 47479 - RNA, 24 nt, Artificial Sequence
  Synthetic
uuuucuauuuguccugaaguucuc

SEQ ID NO: 47480 - RNA, 18 nt, Artificial Sequence
  Synthetic
uguauuugugauguucuc

SEQ ID NO: 47481 - RNA, 19 nt, Artificial Sequence
  Synthetic
uuguauuugugauguucuc

SEQ ID NO: 47482 - RNA, 20 nt, Artificial Sequence
  Synthetic
uuuguauuugugauguucuc

SEQ ID NO: 47483 - RNA, 21 nt, Artificial Sequence
  Synthetic
auuuguauuugugauguucuc

SEQ ID NO: 47484 - RNA, 22 nt, Artificial Sequence
  Synthetic
cauuuguauuugugauguucuc

SEQ ID NO: 47485 - RNA, 23 nt, Artificial Sequence
  Synthetic
acauuuguauuugugauguucuc

SEQ ID NO: 47486 - RNA, 24 nt, Artificial Sequence
  Synthetic
aacauuuguauuugugauguucuc

SEQ ID NO: 47487 - RNA, 18 nt, Artificial Sequence
  Synthetic
agggucuauuauguucuc

SEQ ID NO: 47488 - RNA, 20 nt, Artificial Sequence
  Synthetic
ugagggucuauuauguucuc

SEQ ID NO: 47489 - RNA, 21 nt, Artificial Sequence
  Synthetic
cugagggucuauuauguucuc

SEQ ID NO: 47490 - RNA, 22 nt, Artificial Sequence
  Synthetic
ucugagggucuauuauguucuc

SEQ ID NO: 47491 - RNA, 23 nt, Artificial Sequence
  Synthetic
aucugagggucuauuauguucuc

SEQ ID NO: 47492 - RNA, 18 nt, Artificial Sequence
  Synthetic
ccaugaaaacaauuucuc

SEQ ID NO: 47493 - RNA, 19 nt, Artificial Sequence
  Synthetic
accaugaaaacaauuucuc

SEQ ID NO: 47494 - RNA, 21 nt, Artificial Sequence
  Synthetic
ugaccaugaaaacaauuucuc

SEQ ID NO: 47495 - RNA, 22 nt, Artificial Sequence
  Synthetic
uugaccaugaaaacaauuucuc

SEQ ID NO: 47496 - RNA, 23 nt, Artificial Sequence
  Synthetic
uuugaccaugaaaacaauuucuc

SEQ ID NO: 47497 - RNA, 18 nt, Artificial Sequence
  Synthetic
agguuggagauauuucuc

SEQ ID NO: 47498 - RNA, 19 nt, Artificial Sequence
  Synthetic
cagguuggagauauuucuc

SEQ ID NO: 47499 - RNA, 20 nt, Artificial Sequence
  Synthetic
ucagguuggagauauuucuc

SEQ ID NO: 47500 - RNA, 22 nt, Artificial Sequence
  Synthetic
agucagguuggagauauuucuc

SEQ ID NO: 47501 - RNA, 23 nt, Artificial Sequence
  Synthetic
aagucagguuggagauauuucuc

SEQ ID NO: 47502 - RNA, 24 nt, Artificial Sequence
  Synthetic
aaagucagguuggagauauuucuc

SEQ ID NO: 47503 - RNA, 18 nt, Artificial Sequence
  Synthetic
ugacuuuucugcuuucuc

SEQ ID NO: 47504 - RNA, 19 nt, Artificial Sequence
  Synthetic
uugacuuuucugcuuucuc

SEQ ID NO: 47505 - RNA, 20 nt, Artificial Sequence
  Synthetic
auugacuuuucugcuuucuc

SEQ ID NO: 47506 - RNA, 21 nt, Artificial Sequence
  Synthetic
cauugacuuuucugcuuucuc

SEQ ID NO: 47507 - RNA, 22 nt, Artificial Sequence
  Synthetic
ccauugacuuuucugcuuucuc

SEQ ID NO: 47508 - RNA, 23 nt, Artificial Sequence
  Synthetic
cccauugacuuuucugcuuucuc

SEQ ID NO: 47509 - RNA, 24 nt, Artificial Sequence
  Synthetic
ucccauugacuuuucugcuuucuc

SEQ ID NO: 47510 - RNA, 22 nt, Artificial Sequence
  Synthetic
agauuuauugaauguuuuucuc

SEQ ID NO: 47511 - RNA, 23 nt, Artificial Sequence
  Synthetic
cagauuuauugaauguuuuucuc

SEQ ID NO: 47512 - RNA, 24 nt, Artificial Sequence
  Synthetic
acagauuuauugaauguuuuucuc

SEQ ID NO: 47513 - RNA, 18 nt, Artificial Sequence
  Synthetic
uuagucacucuaaaaguc

SEQ ID NO: 47514 - RNA, 19 nt, Artificial Sequence
  Synthetic
uuuagucacucuaaaaguc

SEQ ID NO: 47515 - RNA, 22 nt, Artificial Sequence
  Synthetic
ugguuuagucacucuaaaaguc

SEQ ID NO: 47516 - RNA, 23 nt, Artificial Sequence
  Synthetic
cugguuuagucacucuaaaaguc

SEQ ID NO: 47517 - RNA, 24 nt, Artificial Sequence
  Synthetic
ucugguuuagucacucuaaaaguc

SEQ ID NO: 47518 - RNA, 21 nt, Artificial Sequence
  Synthetic
aaggaaggaaaugggaaaguc

SEQ ID NO: 47519 - RNA, 22 nt, Artificial Sequence
  Synthetic
uaaggaaggaaaugggaaaguc

SEQ ID NO: 47520 - RNA, 23 nt, Artificial Sequence
  Synthetic
auaaggaaggaaaugggaaaguc

SEQ ID NO: 47521 - RNA, 24 nt, Artificial Sequence
  Synthetic
aauaaggaaggaaaugggaaaguc

SEQ ID NO: 47522 - RNA, 21 nt, Artificial Sequence
  Synthetic
cauuuuucccuuuggaaaguc

SEQ ID NO: 47523 - RNA, 22 nt, Artificial Sequence
  Synthetic
ccauuuuucccuuuggaaaguc

SEQ ID NO: 47524 - RNA, 23 nt, Artificial Sequence
  Synthetic
uccauuuuucccuuuggaaaguc

SEQ ID NO: 47525 - RNA, 18 nt, Artificial Sequence
  Synthetic
aagagauaguauaaaguc

SEQ ID NO: 47526 - RNA, 19 nt, Artificial Sequence
  Synthetic
uaagagauaguauaaaguc

SEQ ID NO: 47527 - RNA, 20 nt, Artificial Sequence
  Synthetic
auaagagauaguauaaaguc

SEQ ID NO: 47528 - RNA, 21 nt, Artificial Sequence
  Synthetic
cauaagagauaguauaaaguc

SEQ ID NO: 47529 - RNA, 22 nt, Artificial Sequence
  Synthetic
acauaagagauaguauaaaguc

SEQ ID NO: 47530 - RNA, 24 nt, Artificial Sequence
  Synthetic
agacauaagagauaguauaaaguc

SEQ ID NO: 47531 - RNA, 21 nt, Artificial Sequence
  Synthetic
agggucauuguaacuaaaguc

SEQ ID NO: 47532 - RNA, 22 nt, Artificial Sequence
  Synthetic
cagggucauuguaacuaaaguc

SEQ ID NO: 47533 - RNA, 23 nt, Artificial Sequence
  Synthetic
acagggucauuguaacuaaaguc

SEQ ID NO: 47534 - RNA, 24 nt, Artificial Sequence
  Synthetic
uacagggucauuguaacuaaaguc

SEQ ID NO: 47535 - RNA, 18 nt, Artificial Sequence
  Synthetic
uaugggucacucgaaguc

SEQ ID NO: 47536 - RNA, 19 nt, Artificial Sequence
  Synthetic
auaugggucacucgaaguc

SEQ ID NO: 47537 - RNA, 20 nt, Artificial Sequence
  Synthetic
aauaugggucacucgaaguc

SEQ ID NO: 47538 - RNA, 21 nt, Artificial Sequence
  Synthetic
aaauaugggucacucgaaguc

SEQ ID NO: 47539 - RNA, 22 nt, Artificial Sequence
  Synthetic
aaaauaugggucacucgaaguc

SEQ ID NO: 47540 - RNA, 23 nt, Artificial Sequence
  Synthetic
aaaaauaugggucacucgaaguc

SEQ ID NO: 47541 - RNA, 24 nt, Artificial Sequence
  Synthetic
aaaaaauaugggucacucgaaguc

SEQ ID NO: 47542 - RNA, 18 nt, Artificial Sequence
  Synthetic
auaaagcuuuuugaaguc

SEQ ID NO: 47543 - RNA, 19 nt, Artificial Sequence
  Synthetic
aauaaagcuuuuugaaguc

SEQ ID NO: 47544 - RNA, 20 nt, Artificial Sequence
  Synthetic
caauaaagcuuuuugaaguc

SEQ ID NO: 47545 - RNA, 21 nt, Artificial Sequence
  Synthetic
ucaauaaagcuuuuugaaguc

SEQ ID NO: 47546 - RNA, 22 nt, Artificial Sequence
  Synthetic
uucaauaaagcuuuuugaaguc

SEQ ID NO: 47547 - RNA, 23 nt, Artificial Sequence
  Synthetic
auucaauaaagcuuuuugaaguc

SEQ ID NO: 47548 - RNA, 18 nt, Artificial Sequence
  Synthetic
aucugaagguucuaaguc

SEQ ID NO: 47549 - RNA, 19 nt, Artificial Sequence
  Synthetic
uaucugaagguucuaaguc

SEQ ID NO: 47550 - RNA, 21 nt, Artificial Sequence
  Synthetic
uguaucugaagguucuaaguc

SEQ ID NO: 47551 - RNA, 23 nt, Artificial Sequence
  Synthetic
aguguaucugaagguucuaaguc

SEQ ID NO: 47552 - RNA, 24 nt, Artificial Sequence
  Synthetic
caguguaucugaagguucuaaguc

SEQ ID NO: 47553 - RNA, 18 nt, Artificial Sequence
  Synthetic
uccccaguuuaaacaguc

SEQ ID NO: 47554 - RNA, 19 nt, Artificial Sequence
  Synthetic
cuccccaguuuaaacaguc

SEQ ID NO: 47555 - RNA, 20 nt, Artificial Sequence
  Synthetic
ccuccccaguuuaaacaguc

SEQ ID NO: 47556 - RNA, 21 nt, Artificial Sequence
  Synthetic
accuccccaguuuaaacaguc

SEQ ID NO: 47557 - RNA, 22 nt, Artificial Sequence
  Synthetic
caccuccccaguuuaaacaguc

SEQ ID NO: 47558 - RNA, 23 nt, Artificial Sequence
  Synthetic
ucaccuccccaguuuaaacaguc

SEQ ID NO: 47559 - RNA, 24 nt, Artificial Sequence
  Synthetic
cucaccuccccaguuuaaacaguc

SEQ ID NO: 47560 - RNA, 18 nt, Artificial Sequence
  Synthetic
ucagccaguggcacaguc

SEQ ID NO: 47561 - RNA, 19 nt, Artificial Sequence
  Synthetic
cucagccaguggcacaguc

SEQ ID NO: 47562 - RNA, 21 nt, Artificial Sequence
  Synthetic
ugcucagccaguggcacaguc

SEQ ID NO: 47563 - RNA, 22 nt, Artificial Sequence
  Synthetic
cugcucagccaguggcacaguc

SEQ ID NO: 47564 - RNA, 23 nt, Artificial Sequence
  Synthetic
ccugcucagccaguggcacaguc

SEQ ID NO: 47565 - RNA, 19 nt, Artificial Sequence
  Synthetic
aggauuuuucaacccaguc

SEQ ID NO: 47566 - RNA, 20 nt, Artificial Sequence
  Synthetic
aaggauuuuucaacccaguc

SEQ ID NO: 47567 - RNA, 21 nt, Artificial Sequence
  Synthetic
uaaggauuuuucaacccaguc

SEQ ID NO: 47568 - RNA, 22 nt, Artificial Sequence
  Synthetic
cuaaggauuuuucaacccaguc

SEQ ID NO: 47569 - RNA, 24 nt, Artificial Sequence
  Synthetic
agcuaaggauuuuucaacccaguc

SEQ ID NO: 47570 - RNA, 19 nt, Artificial Sequence
  Synthetic
agaaucaccucacccaguc

SEQ ID NO: 47571 - RNA, 20 nt, Artificial Sequence
  Synthetic
aagaaucaccucacccaguc

SEQ ID NO: 47572 - RNA, 23 nt, Artificial Sequence
  Synthetic
aggaagaaucaccucacccaguc

SEQ ID NO: 47573 - RNA, 24 nt, Artificial Sequence
  Synthetic
caggaagaaucaccucacccaguc

SEQ ID NO: 47574 - RNA, 18 nt, Artificial Sequence
  Synthetic
auacuuuuauuugcaguc

SEQ ID NO: 47575 - RNA, 19 nt, Artificial Sequence
  Synthetic
uauacuuuuauuugcaguc

SEQ ID NO: 47576 - RNA, 20 nt, Artificial Sequence
  Synthetic
auauacuuuuauuugcaguc

SEQ ID NO: 47577 - RNA, 21 nt, Artificial Sequence
  Synthetic
uauauacuuuuauuugcaguc

SEQ ID NO: 47578 - RNA, 22 nt, Artificial Sequence
  Synthetic
auauauacuuuuauuugcaguc

SEQ ID NO: 47579 - RNA, 23 nt, Artificial Sequence
  Synthetic
uauauauacuuuuauuugcaguc

SEQ ID NO: 47580 - RNA, 18 nt, Artificial Sequence
  Synthetic
auucccaauuaaucaguc

SEQ ID NO: 47581 - RNA, 21 nt, Artificial Sequence
  Synthetic
uggauucccaauuaaucaguc

SEQ ID NO: 47582 - RNA, 22 nt, Artificial Sequence
  Synthetic
auggauucccaauuaaucaguc

SEQ ID NO: 47583 - RNA, 23 nt, Artificial Sequence
  Synthetic
aauggauucccaauuaaucaguc

SEQ ID NO: 47584 - RNA, 24 nt, Artificial Sequence
  Synthetic
caauggauucccaauuaaucaguc

SEQ ID NO: 47585 - RNA, 18 nt, Artificial Sequence
  Synthetic
ucagauaaaauaucaguc

SEQ ID NO: 47586 - RNA, 19 nt, Artificial Sequence
  Synthetic
uucagauaaaauaucaguc

SEQ ID NO: 47587 - RNA, 20 nt, Artificial Sequence
  Synthetic
auucagauaaaauaucaguc

SEQ ID NO: 47588 - RNA, 21 nt, Artificial Sequence
  Synthetic
aauucagauaaaauaucaguc

SEQ ID NO: 47589 - RNA, 24 nt, Artificial Sequence
  Synthetic
uggaauucagauaaaauaucaguc

SEQ ID NO: 47590 - RNA, 18 nt, Artificial Sequence
  Synthetic
ugggaauuuauaucaguc

SEQ ID NO: 47591 - RNA, 20 nt, Artificial Sequence
  Synthetic
ugugggaauuuauaucaguc

SEQ ID NO: 47592 - RNA, 21 nt, Artificial Sequence
  Synthetic
uugugggaauuuauaucaguc

SEQ ID NO: 47593 - RNA, 23 nt, Artificial Sequence
  Synthetic
uguugugggaauuuauaucaguc

SEQ ID NO: 47594 - RNA, 24 nt, Artificial Sequence
  Synthetic
auguugugggaauuuauaucaguc

SEQ ID NO: 47595 - RNA, 18 nt, Artificial Sequence
  Synthetic
auccaacacaagucaguc

SEQ ID NO: 47596 - RNA, 19 nt, Artificial Sequence
  Synthetic
uauccaacacaagucaguc

SEQ ID NO: 47597 - RNA, 20 nt, Artificial Sequence
  Synthetic
auauccaacacaagucaguc

SEQ ID NO: 47598 - RNA, 21 nt, Artificial Sequence
  Synthetic
cauauccaacacaagucaguc

SEQ ID NO: 47599 - RNA, 22 nt, Artificial Sequence
  Synthetic
acauauccaacacaagucaguc

SEQ ID NO: 47600 - RNA, 23 nt, Artificial Sequence
  Synthetic
aacauauccaacacaagucaguc

SEQ ID NO: 47601 - RNA, 24 nt, Artificial Sequence
  Synthetic
caacauauccaacacaagucaguc

SEQ ID NO: 47602 - RNA, 19 nt, Artificial Sequence
  Synthetic
ugcaacacagccaagaguc

SEQ ID NO: 47603 - RNA, 20 nt, Artificial Sequence
  Synthetic
cugcaacacagccaagaguc

SEQ ID NO: 47604 - RNA, 21 nt, Artificial Sequence
  Synthetic
ccugcaacacagccaagaguc

SEQ ID NO: 47605 - RNA, 22 nt, Artificial Sequence
  Synthetic
accugcaacacagccaagaguc

SEQ ID NO: 47606 - RNA, 23 nt, Artificial Sequence
  Synthetic
uaccugcaacacagccaagaguc

SEQ ID NO: 47607 - RNA, 24 nt, Artificial Sequence
  Synthetic
uuaccugcaacacagccaagaguc

SEQ ID NO: 47608 - RNA, 18 nt, Artificial Sequence
  Synthetic
uacuauuccucaagaguc

SEQ ID NO: 47609 - RNA, 19 nt, Artificial Sequence
  Synthetic
auacuauuccucaagaguc

SEQ ID NO: 47610 - RNA, 20 nt, Artificial Sequence
  Synthetic
aauacuauuccucaagaguc

SEQ ID NO: 47611 - RNA, 21 nt, Artificial Sequence
  Synthetic
aaauacuauuccucaagaguc

SEQ ID NO: 47612 - RNA, 23 nt, Artificial Sequence
  Synthetic
agaaauacuauuccucaagaguc

SEQ ID NO: 47613 - RNA, 24 nt, Artificial Sequence
  Synthetic
uagaaauacuauuccucaagaguc

SEQ ID NO: 47614 - RNA, 18 nt, Artificial Sequence
  Synthetic
aaucuaccuugcagaguc

SEQ ID NO: 47615 - RNA, 19 nt, Artificial Sequence
  Synthetic
caaucuaccuugcagaguc

SEQ ID NO: 47616 - RNA, 20 nt, Artificial Sequence
  Synthetic
acaaucuaccuugcagaguc

SEQ ID NO: 47617 - RNA, 21 nt, Artificial Sequence
  Synthetic
aacaaucuaccuugcagaguc

SEQ ID NO: 47618 - RNA, 22 nt, Artificial Sequence
  Synthetic
aaacaaucuaccuugcagaguc

SEQ ID NO: 47619 - RNA, 18 nt, Artificial Sequence
  Synthetic
aaugggaaaguaugaguc

SEQ ID NO: 47620 - RNA, 19 nt, Artificial Sequence
  Synthetic
aaaugggaaaguaugaguc

SEQ ID NO: 47621 - RNA, 20 nt, Artificial Sequence
  Synthetic
uaaaugggaaaguaugaguc

SEQ ID NO: 47622 - RNA, 21 nt, Artificial Sequence
  Synthetic
uuaaaugggaaaguaugaguc

SEQ ID NO: 47623 - RNA, 22 nt, Artificial Sequence
  Synthetic
uuuaaaugggaaaguaugaguc

SEQ ID NO: 47624 - RNA, 23 nt, Artificial Sequence
  Synthetic
cuuuaaaugggaaaguaugaguc

SEQ ID NO: 47625 - RNA, 24 nt, Artificial Sequence
  Synthetic
acuuuaaaugggaaaguaugaguc

SEQ ID NO: 47626 - RNA, 18 nt, Artificial Sequence
  Synthetic
cauacuuggcuuugaguc

SEQ ID NO: 47627 - RNA, 20 nt, Artificial Sequence
  Synthetic
ugcauacuuggcuuugaguc

SEQ ID NO: 47628 - RNA, 21 nt, Artificial Sequence
  Synthetic
augcauacuuggcuuugaguc

SEQ ID NO: 47629 - RNA, 22 nt, Artificial Sequence
  Synthetic
uaugcauacuuggcuuugaguc

SEQ ID NO: 47630 - RNA, 23 nt, Artificial Sequence
  Synthetic
cuaugcauacuuggcuuugaguc

SEQ ID NO: 47631 - RNA, 24 nt, Artificial Sequence
  Synthetic
acuaugcauacuuggcuuugaguc

SEQ ID NO: 47632 - RNA, 18 nt, Artificial Sequence
  Synthetic
uauuagcuccauauaguc

SEQ ID NO: 47633 - RNA, 19 nt, Artificial Sequence
  Synthetic
auauuagcuccauauaguc

SEQ ID NO: 47634 - RNA, 20 nt, Artificial Sequence
  Synthetic
uauauuagcuccauauaguc

SEQ ID NO: 47635 - RNA, 21 nt, Artificial Sequence
  Synthetic
uuauauuagcuccauauaguc

SEQ ID NO: 47636 - RNA, 22 nt, Artificial Sequence
  Synthetic
cuuauauuagcuccauauaguc

SEQ ID NO: 47637 - RNA, 18 nt, Artificial Sequence
  Synthetic
aauuauggagauguaguc

SEQ ID NO: 47638 - RNA, 19 nt, Artificial Sequence
  Synthetic
aaauuauggagauguaguc

SEQ ID NO: 47639 - RNA, 20 nt, Artificial Sequence
  Synthetic
aaaauuauggagauguaguc

SEQ ID NO: 47640 - RNA, 21 nt, Artificial Sequence
  Synthetic
uaaaauuauggagauguaguc

SEQ ID NO: 47641 - RNA, 22 nt, Artificial Sequence
  Synthetic
uuaaaauuauggagauguaguc

SEQ ID NO: 47642 - RNA, 23 nt, Artificial Sequence
  Synthetic
uuuaaaauuauggagauguaguc

SEQ ID NO: 47643 - RNA, 24 nt, Artificial Sequence
  Synthetic
uuuuaaaauuauggagauguaguc

SEQ ID NO: 47644 - RNA, 18 nt, Artificial Sequence
  Synthetic
uggaaaaaccuauuaguc

SEQ ID NO: 47645 - RNA, 19 nt, Artificial Sequence
  Synthetic
auggaaaaaccuauuaguc

SEQ ID NO: 47646 - RNA, 20 nt, Artificial Sequence
  Synthetic
uauggaaaaaccuauuaguc

SEQ ID NO: 47647 - RNA, 21 nt, Artificial Sequence
  Synthetic
auauggaaaaaccuauuaguc

SEQ ID NO: 47648 - RNA, 22 nt, Artificial Sequence
  Synthetic
uauauggaaaaaccuauuaguc

SEQ ID NO: 47649 - RNA, 23 nt, Artificial Sequence
  Synthetic
auauauggaaaaaccuauuaguc

SEQ ID NO: 47650 - RNA, 24 nt, Artificial Sequence
  Synthetic
aauauauggaaaaaccuauuaguc

SEQ ID NO: 47651 - RNA, 18 nt, Artificial Sequence
  Synthetic
uaucuaucuuuauuaguc

SEQ ID NO: 47652 - RNA, 19 nt, Artificial Sequence
  Synthetic
auaucuaucuuuauuaguc

SEQ ID NO: 47653 - RNA, 20 nt, Artificial Sequence
  Synthetic
aauaucuaucuuuauuaguc

SEQ ID NO: 47654 - RNA, 21 nt, Artificial Sequence
  Synthetic
caauaucuaucuuuauuaguc

SEQ ID NO: 47655 - RNA, 23 nt, Artificial Sequence
  Synthetic
ugcaauaucuaucuuuauuaguc

SEQ ID NO: 47656 - RNA, 24 nt, Artificial Sequence
  Synthetic
augcaauaucuaucuuuauuaguc

SEQ ID NO: 47657 - RNA, 18 nt, Artificial Sequence
  Synthetic
aaguagaaugacagcguc

SEQ ID NO: 47658 - RNA, 19 nt, Artificial Sequence
  Synthetic
aaaguagaaugacagcguc

SEQ ID NO: 47659 - RNA, 20 nt, Artificial Sequence
  Synthetic
aaaaguagaaugacagcguc

SEQ ID NO: 47660 - RNA, 21 nt, Artificial Sequence
  Synthetic
aaaaaguagaaugacagcguc

SEQ ID NO: 47661 - RNA, 22 nt, Artificial Sequence
  Synthetic
caaaaaguagaaugacagcguc

SEQ ID NO: 47662 - RNA, 23 nt, Artificial Sequence
  Synthetic
ucaaaaaguagaaugacagcguc

SEQ ID NO: 47663 - RNA, 24 nt, Artificial Sequence
  Synthetic
uucaaaaaguagaaugacagcguc

SEQ ID NO: 47664 - RNA, 18 nt, Artificial Sequence
  Synthetic
uaaauuccuagaaucguc

SEQ ID NO: 47665 - RNA, 19 nt, Artificial Sequence
  Synthetic
auaaauuccuagaaucguc

SEQ ID NO: 47666 - RNA, 20 nt, Artificial Sequence
  Synthetic
aauaaauuccuagaaucguc

SEQ ID NO: 47667 - RNA, 21 nt, Artificial Sequence
  Synthetic
caauaaauuccuagaaucguc

SEQ ID NO: 47668 - RNA, 22 nt, Artificial Sequence
  Synthetic
acaauaaauuccuagaaucguc

SEQ ID NO: 47669 - RNA, 20 nt, Artificial Sequence
  Synthetic
uggcaucuugaggaaagguc

SEQ ID NO: 47670 - RNA, 23 nt, Artificial Sequence
  Synthetic
agguggcaucuugaggaaagguc

SEQ ID NO: 47671 - RNA, 24 nt, Artificial Sequence
  Synthetic
aagguggcaucuugaggaaagguc

SEQ ID NO: 47672 - RNA, 18 nt, Artificial Sequence
  Synthetic
aauguacaguugaagguc

SEQ ID NO: 47673 - RNA, 19 nt, Artificial Sequence
  Synthetic
uaauguacaguugaagguc

SEQ ID NO: 47674 - RNA, 20 nt, Artificial Sequence
  Synthetic
auaauguacaguugaagguc

SEQ ID NO: 47675 - RNA, 22 nt, Artificial Sequence
  Synthetic
ugauaauguacaguugaagguc

SEQ ID NO: 47676 - RNA, 23 nt, Artificial Sequence
  Synthetic
augauaauguacaguugaagguc

SEQ ID NO: 47677 - RNA, 24 nt, Artificial Sequence
  Synthetic
uaugauaauguacaguugaagguc

SEQ ID NO: 47678 - RNA, 19 nt, Artificial Sequence
  Synthetic
aguaacuuuggugcagguc

SEQ ID NO: 47679 - RNA, 20 nt, Artificial Sequence
  Synthetic
caguaacuuuggugcagguc

SEQ ID NO: 47680 - RNA, 21 nt, Artificial Sequence
  Synthetic
ccaguaacuuuggugcagguc

SEQ ID NO: 47681 - RNA, 22 nt, Artificial Sequence
  Synthetic
uccaguaacuuuggugcagguc

SEQ ID NO: 47682 - RNA, 18 nt, Artificial Sequence
  Synthetic
uacacuccuucugagguc

SEQ ID NO: 47683 - RNA, 19 nt, Artificial Sequence
  Synthetic
uuacacuccuucugagguc

SEQ ID NO: 47684 - RNA, 20 nt, Artificial Sequence
  Synthetic
uuuacacuccuucugagguc

SEQ ID NO: 47685 - RNA, 21 nt, Artificial Sequence
  Synthetic
auuuacacuccuucugagguc

SEQ ID NO: 47686 - RNA, 22 nt, Artificial Sequence
  Synthetic
aauuuacacuccuucugagguc

SEQ ID NO: 47687 - RNA, 24 nt, Artificial Sequence
  Synthetic
ugaauuuacacuccuucugagguc

SEQ ID NO: 47688 - RNA, 21 nt, Artificial Sequence
  Synthetic
cugaugcugauucaguagguc

SEQ ID NO: 47689 - RNA, 22 nt, Artificial Sequence
  Synthetic
acugaugcugauucaguagguc

SEQ ID NO: 47690 - RNA, 23 nt, Artificial Sequence
  Synthetic
aacugaugcugauucaguagguc

SEQ ID NO: 47691 - RNA, 24 nt, Artificial Sequence
  Synthetic
uaacugaugcugauucaguagguc

SEQ ID NO: 47692 - RNA, 18 nt, Artificial Sequence
  Synthetic
aaacagaccaggaggguc

SEQ ID NO: 47693 - RNA, 19 nt, Artificial Sequence
  Synthetic
aaaacagaccaggaggguc

SEQ ID NO: 47694 - RNA, 20 nt, Artificial Sequence
  Synthetic
aaaaacagaccaggaggguc

SEQ ID NO: 47695 - RNA, 21 nt, Artificial Sequence
  Synthetic
caaaaacagaccaggaggguc

SEQ ID NO: 47696 - RNA, 22 nt, Artificial Sequence
  Synthetic
ccaaaaacagaccaggaggguc

SEQ ID NO: 47697 - RNA, 23 nt, Artificial Sequence
  Synthetic
cccaaaaacagaccaggaggguc

SEQ ID NO: 47698 - RNA, 24 nt, Artificial Sequence
  Synthetic
ucccaaaaacagaccaggaggguc

SEQ ID NO: 47699 - RNA, 18 nt, Artificial Sequence
  Synthetic
cuucagggagacgggguc

SEQ ID NO: 47700 - RNA, 19 nt, Artificial Sequence
  Synthetic
ccuucagggagacgggguc

SEQ ID NO: 47701 - RNA, 20 nt, Artificial Sequence
  Synthetic
accuucagggagacgggguc

SEQ ID NO: 47702 - RNA, 21 nt, Artificial Sequence
  Synthetic
uaccuucagggagacgggguc

SEQ ID NO: 47703 - RNA, 22 nt, Artificial Sequence
  Synthetic
uuaccuucagggagacgggguc

SEQ ID NO: 47704 - RNA, 23 nt, Artificial Sequence
  Synthetic
uuuaccuucagggagacgggguc

SEQ ID NO: 47705 - RNA, 24 nt, Artificial Sequence
  Synthetic
uuuuaccuucagggagacgggguc

SEQ ID NO: 47706 - RNA, 18 nt, Artificial Sequence
  Synthetic
uaagauucauuugggguc

SEQ ID NO: 47707 - RNA, 19 nt, Artificial Sequence
  Synthetic
uuaagauucauuugggguc

SEQ ID NO: 47708 - RNA, 21 nt, Artificial Sequence
  Synthetic
uguuaagauucauuugggguc

SEQ ID NO: 47709 - RNA, 23 nt, Artificial Sequence
  Synthetic
uguguuaagauucauuugggguc

SEQ ID NO: 47710 - RNA, 24 nt, Artificial Sequence
  Synthetic
auguguuaagauucauuugggguc

SEQ ID NO: 47711 - RNA, 18 nt, Artificial Sequence
  Synthetic
cacauugcauuauggguc

SEQ ID NO: 47712 - RNA, 20 nt, Artificial Sequence
  Synthetic
agcacauugcauuauggguc

SEQ ID NO: 47713 - RNA, 21 nt, Artificial Sequence
  Synthetic
aagcacauugcauuauggguc

SEQ ID NO: 47714 - RNA, 24 nt, Artificial Sequence
  Synthetic
uggaagcacauugcauuauggguc

SEQ ID NO: 47715 - RNA, 19 nt, Artificial Sequence
  Synthetic
aguauauuacuauuggguc

SEQ ID NO: 47716 - RNA, 20 nt, Artificial Sequence
  Synthetic
uaguauauuacuauuggguc

SEQ ID NO: 47717 - RNA, 21 nt, Artificial Sequence
  Synthetic
auaguauauuacuauuggguc

SEQ ID NO: 47718 - RNA, 22 nt, Artificial Sequence
  Synthetic
aauaguauauuacuauuggguc

SEQ ID NO: 47719 - RNA, 23 nt, Artificial Sequence
  Synthetic
uaauaguauauuacuauuggguc

SEQ ID NO: 47720 - RNA, 24 nt, Artificial Sequence
  Synthetic
auaauaguauauuacuauuggguc

SEQ ID NO: 47721 - RNA, 18 nt, Artificial Sequence
  Synthetic
ucaguauuuuauuggguc

SEQ ID NO: 47722 - RNA, 19 nt, Artificial Sequence
  Synthetic
uucaguauuuuauuggguc

SEQ ID NO: 47723 - RNA, 20 nt, Artificial Sequence
  Synthetic
cuucaguauuuuauuggguc

SEQ ID NO: 47724 - RNA, 23 nt, Artificial Sequence
  Synthetic
aggcuucaguauuuuauuggguc

SEQ ID NO: 47725 - RNA, 18 nt, Artificial Sequence
  Synthetic
acuagagaguuaaugguc

SEQ ID NO: 47726 - RNA, 19 nt, Artificial Sequence
  Synthetic
uacuagagaguuaaugguc

SEQ ID NO: 47727 - RNA, 20 nt, Artificial Sequence
  Synthetic
auacuagagaguuaaugguc

SEQ ID NO: 47728 - RNA, 21 nt, Artificial Sequence
  Synthetic
aauacuagagaguuaaugguc

SEQ ID NO: 47729 - RNA, 22 nt, Artificial Sequence
  Synthetic
caauacuagagaguuaaugguc

SEQ ID NO: 47730 - RNA, 23 nt, Artificial Sequence
  Synthetic
ccaauacuagagaguuaaugguc

SEQ ID NO: 47731 - RNA, 24 nt, Artificial Sequence
  Synthetic
cccaauacuagagaguuaaugguc

SEQ ID NO: 47732 - RNA, 21 nt, Artificial Sequence
  Synthetic
ccauuugcaagccacaugguc

SEQ ID NO: 47733 - RNA, 23 nt, Artificial Sequence
  Synthetic
ugccauuugcaagccacaugguc

SEQ ID NO: 47734 - RNA, 24 nt, Artificial Sequence
  Synthetic
cugccauuugcaagccacaugguc

SEQ ID NO: 47735 - RNA, 20 nt, Artificial Sequence
  Synthetic
aggcugaauuugaccugguc

SEQ ID NO: 47736 - RNA, 18 nt, Artificial Sequence
  Synthetic
uuuugcucacaggugguc

SEQ ID NO: 47737 - RNA, 19 nt, Artificial Sequence
  Synthetic
uuuuugcucacaggugguc

SEQ ID NO: 47738 - RNA, 20 nt, Artificial Sequence
  Synthetic
uuuuuugcucacaggugguc

SEQ ID NO: 47739 - RNA, 21 nt, Artificial Sequence
  Synthetic
auuuuuugcucacaggugguc

SEQ ID NO: 47740 - RNA, 22 nt, Artificial Sequence
  Synthetic
cauuuuuugcucacaggugguc

SEQ ID NO: 47741 - RNA, 23 nt, Artificial Sequence
  Synthetic
acauuuuuugcucacaggugguc

SEQ ID NO: 47742 - RNA, 24 nt, Artificial Sequence
  Synthetic
aacauuuuuugcucacaggugguc

SEQ ID NO: 47743 - RNA, 18 nt, Artificial Sequence
  Synthetic
ucacuuuugaccuugguc

SEQ ID NO: 47744 - RNA, 19 nt, Artificial Sequence
  Synthetic
aucacuuuugaccuugguc

SEQ ID NO: 47745 - RNA, 20 nt, Artificial Sequence
  Synthetic
caucacuuuugaccuugguc

SEQ ID NO: 47746 - RNA, 21 nt, Artificial Sequence
  Synthetic
ccaucacuuuugaccuugguc

SEQ ID NO: 47747 - RNA, 22 nt, Artificial Sequence
  Synthetic
accaucacuuuugaccuugguc

SEQ ID NO: 47748 - RNA, 24 nt, Artificial Sequence
  Synthetic
ugaccaucacuuuugaccuugguc

SEQ ID NO: 47749 - RNA, 18 nt, Artificial Sequence
  Synthetic
auacugauuaaguugguc

SEQ ID NO: 47750 - RNA, 19 nt, Artificial Sequence
  Synthetic
aauacugauuaaguugguc

SEQ ID NO: 47751 - RNA, 20 nt, Artificial Sequence
  Synthetic
aaauacugauuaaguugguc

SEQ ID NO: 47752 - RNA, 18 nt, Artificial Sequence
  Synthetic
uauccugguuauuugguc

SEQ ID NO: 47753 - RNA, 19 nt, Artificial Sequence
  Synthetic
auauccugguuauuugguc

SEQ ID NO: 47754 - RNA, 21 nt, Artificial Sequence
  Synthetic
agauauccugguuauuugguc

SEQ ID NO: 47755 - RNA, 22 nt, Artificial Sequence
  Synthetic
uagauauccugguuauuugguc

SEQ ID NO: 47756 - RNA, 23 nt, Artificial Sequence
  Synthetic
uuagauauccugguuauuugguc

SEQ ID NO: 47757 - RNA, 24 nt, Artificial Sequence
  Synthetic
auuagauauccugguuauuugguc

SEQ ID NO: 47758 - RNA, 21 nt, Artificial Sequence
  Synthetic
caucauggauggauuuugguc

SEQ ID NO: 47759 - RNA, 22 nt, Artificial Sequence
  Synthetic
ucaucauggauggauuuugguc

SEQ ID NO: 47760 - RNA, 24 nt, Artificial Sequence
  Synthetic
ugucaucauggauggauuuugguc

SEQ ID NO: 47761 - RNA, 18 nt, Artificial Sequence
  Synthetic
ccaaaaagaaagaauguc

SEQ ID NO: 47762 - RNA, 19 nt, Artificial Sequence
  Synthetic
accaaaaagaaagaauguc

SEQ ID NO: 47763 - RNA, 20 nt, Artificial Sequence
  Synthetic
aaccaaaaagaaagaauguc

SEQ ID NO: 47764 - RNA, 19 nt, Artificial Sequence
  Synthetic
agacaucauugagaauguc

SEQ ID NO: 47765 - RNA, 20 nt, Artificial Sequence
  Synthetic
cagacaucauugagaauguc

SEQ ID NO: 47766 - RNA, 21 nt, Artificial Sequence
  Synthetic
ccagacaucauugagaauguc

SEQ ID NO: 47767 - RNA, 22 nt, Artificial Sequence
  Synthetic
uccagacaucauugagaauguc

SEQ ID NO: 47768 - RNA, 24 nt, Artificial Sequence
  Synthetic
uguccagacaucauugagaauguc

SEQ ID NO: 47769 - RNA, 18 nt, Artificial Sequence
  Synthetic
aaaaagauauauaauguc

SEQ ID NO: 47770 - RNA, 20 nt, Artificial Sequence
  Synthetic
agaaaaagauauauaauguc

SEQ ID NO: 47771 - RNA, 21 nt, Artificial Sequence
  Synthetic
uagaaaaagauauauaauguc

SEQ ID NO: 47772 - RNA, 22 nt, Artificial Sequence
  Synthetic
uuagaaaaagauauauaauguc

SEQ ID NO: 47773 - RNA, 24 nt, Artificial Sequence
  Synthetic
uguuagaaaaagauauauaauguc

SEQ ID NO: 47774 - RNA, 18 nt, Artificial Sequence
  Synthetic
aaaacaggagcuaauguc

SEQ ID NO: 47775 - RNA, 19 nt, Artificial Sequence
  Synthetic
aaaaacaggagcuaauguc

SEQ ID NO: 47776 - RNA, 20 nt, Artificial Sequence
  Synthetic
caaaaacaggagcuaauguc

SEQ ID NO: 47777 - RNA, 21 nt, Artificial Sequence
  Synthetic
acaaaaacaggagcuaauguc

SEQ ID NO: 47778 - RNA, 22 nt, Artificial Sequence
  Synthetic
aacaaaaacaggagcuaauguc

SEQ ID NO: 47779 - RNA, 23 nt, Artificial Sequence
  Synthetic
caacaaaaacaggagcuaauguc

SEQ ID NO: 47780 - RNA, 18 nt, Artificial Sequence
  Synthetic
uugcacaugacacauguc

SEQ ID NO: 47781 - RNA, 19 nt, Artificial Sequence
  Synthetic
auugcacaugacacauguc

SEQ ID NO: 47782 - RNA, 22 nt, Artificial Sequence
  Synthetic
uggauugcacaugacacauguc

SEQ ID NO: 47783 - RNA, 23 nt, Artificial Sequence
  Synthetic
uuggauugcacaugacacauguc

SEQ ID NO: 47784 - RNA, 24 nt, Artificial Sequence
  Synthetic
uuuggauugcacaugacacauguc

SEQ ID NO: 47785 - RNA, 18 nt, Artificial Sequence
  Synthetic
cacuguuuccgucauguc

SEQ ID NO: 47786 - RNA, 19 nt, Artificial Sequence
  Synthetic
ucacuguuuccgucauguc

SEQ ID NO: 47787 - RNA, 20 nt, Artificial Sequence
  Synthetic
uucacuguuuccgucauguc

SEQ ID NO: 47788 - RNA, 21 nt, Artificial Sequence
  Synthetic
uuucacuguuuccgucauguc

SEQ ID NO: 47789 - RNA, 22 nt, Artificial Sequence
  Synthetic
uuuucacuguuuccgucauguc

SEQ ID NO: 47790 - RNA, 23 nt, Artificial Sequence
  Synthetic
cuuuucacuguuuccgucauguc

SEQ ID NO: 47791 - RNA, 19 nt, Artificial Sequence
  Synthetic
ugcauauaggccagauguc

SEQ ID NO: 47792 - RNA, 20 nt, Artificial Sequence
  Synthetic
cugcauauaggccagauguc

SEQ ID NO: 47793 - RNA, 21 nt, Artificial Sequence
  Synthetic
ucugcauauaggccagauguc

SEQ ID NO: 47794 - RNA, 23 nt, Artificial Sequence
  Synthetic
ugucugcauauaggccagauguc

SEQ ID NO: 47795 - RNA, 24 nt, Artificial Sequence
  Synthetic
uugucugcauauaggccagauguc

SEQ ID NO: 47796 - RNA, 18 nt, Artificial Sequence
  Synthetic
agccaaaagauggauguc

SEQ ID NO: 47797 - RNA, 19 nt, Artificial Sequence
  Synthetic
uagccaaaagauggauguc

SEQ ID NO: 47798 - RNA, 20 nt, Artificial Sequence
  Synthetic
auagccaaaagauggauguc

SEQ ID NO: 47799 - RNA, 21 nt, Artificial Sequence
  Synthetic
uauagccaaaagauggauguc

SEQ ID NO: 47800 - RNA, 22 nt, Artificial Sequence
  Synthetic
auauagccaaaagauggauguc

SEQ ID NO: 47801 - RNA, 23 nt, Artificial Sequence
  Synthetic
cauauagccaaaagauggauguc

SEQ ID NO: 47802 - RNA, 24 nt, Artificial Sequence
  Synthetic
ccauauagccaaaagauggauguc

SEQ ID NO: 47803 - RNA, 21 nt, Artificial Sequence
  Synthetic
aaaugaagggaaaaauauguc

SEQ ID NO: 47804 - RNA, 22 nt, Artificial Sequence
  Synthetic
caaaugaagggaaaaauauguc

SEQ ID NO: 47805 - RNA, 23 nt, Artificial Sequence
  Synthetic
ucaaaugaagggaaaaauauguc

SEQ ID NO: 47806 - RNA, 24 nt, Artificial Sequence
  Synthetic
aucaaaugaagggaaaaauauguc

SEQ ID NO: 47807 - RNA, 18 nt, Artificial Sequence
  Synthetic
cuugguauucaauauguc

SEQ ID NO: 47808 - RNA, 19 nt, Artificial Sequence
  Synthetic
acuugguauucaauauguc

SEQ ID NO: 47809 - RNA, 21 nt, Artificial Sequence
  Synthetic
agacuugguauucaauauguc

SEQ ID NO: 47810 - RNA, 22 nt, Artificial Sequence
  Synthetic
cagacuugguauucaauauguc

SEQ ID NO: 47811 - RNA, 23 nt, Artificial Sequence
  Synthetic
acagacuugguauucaauauguc

SEQ ID NO: 47812 - RNA, 24 nt, Artificial Sequence
  Synthetic
uacagacuugguauucaauauguc

SEQ ID NO: 47813 - RNA, 18 nt, Artificial Sequence
  Synthetic
aaaaaauuauuuuauguc

SEQ ID NO: 47814 - RNA, 19 nt, Artificial Sequence
  Synthetic
uaaaaaauuauuuuauguc

SEQ ID NO: 47815 - RNA, 20 nt, Artificial Sequence
  Synthetic
cuaaaaaauuauuuuauguc

SEQ ID NO: 47816 - RNA, 21 nt, Artificial Sequence
  Synthetic
acuaaaaaauuauuuuauguc

SEQ ID NO: 47817 - RNA, 23 nt, Artificial Sequence
  Synthetic
ugacuaaaaaauuauuuuauguc

SEQ ID NO: 47818 - RNA, 24 nt, Artificial Sequence
  Synthetic
augacuaaaaaauuauuuuauguc

SEQ ID NO: 47819 - RNA, 18 nt, Artificial Sequence
  Synthetic
ugaggcaaggacacuguc

SEQ ID NO: 47820 - RNA, 19 nt, Artificial Sequence
  Synthetic
uugaggcaaggacacuguc

SEQ ID NO: 47821 - RNA, 20 nt, Artificial Sequence
  Synthetic
uuugaggcaaggacacuguc

SEQ ID NO: 47822 - RNA, 21 nt, Artificial Sequence
  Synthetic
cuuugaggcaaggacacuguc

SEQ ID NO: 47823 - RNA, 22 nt, Artificial Sequence
  Synthetic
ccuuugaggcaaggacacuguc

SEQ ID NO: 47824 - RNA, 24 nt, Artificial Sequence
  Synthetic
ugccuuugaggcaaggacacuguc

SEQ ID NO: 47825 - RNA, 18 nt, Artificial Sequence
  Synthetic
uaaaacgugucuacuguc

SEQ ID NO: 47826 - RNA, 19 nt, Artificial Sequence
  Synthetic
auaaaacgugucuacuguc

SEQ ID NO: 47827 - RNA, 20 nt, Artificial Sequence
  Synthetic
uauaaaacgugucuacuguc

SEQ ID NO: 47828 - RNA, 21 nt, Artificial Sequence
  Synthetic
auauaaaacgugucuacuguc

SEQ ID NO: 47829 - RNA, 22 nt, Artificial Sequence
  Synthetic
uauauaaaacgugucuacuguc

SEQ ID NO: 47830 - RNA, 24 nt, Artificial Sequence
  Synthetic
aguauauaaaacgugucuacuguc

SEQ ID NO: 47831 - RNA, 18 nt, Artificial Sequence
  Synthetic
auacuugcuuuaccuguc

SEQ ID NO: 47832 - RNA, 19 nt, Artificial Sequence
  Synthetic
uauacuugcuuuaccuguc

SEQ ID NO: 47833 - RNA, 20 nt, Artificial Sequence
  Synthetic
uuauacuugcuuuaccuguc

SEQ ID NO: 47834 - RNA, 21 nt, Artificial Sequence
  Synthetic
cuuauacuugcuuuaccuguc

SEQ ID NO: 47835 - RNA, 22 nt, Artificial Sequence
  Synthetic
ccuuauacuugcuuuaccuguc

SEQ ID NO: 47836 - RNA, 23 nt, Artificial Sequence
  Synthetic
cccuuauacuugcuuuaccuguc

SEQ ID NO: 47837 - RNA, 18 nt, Artificial Sequence
  Synthetic
uggcugugcagagcuguc

SEQ ID NO: 47838 - RNA, 19 nt, Artificial Sequence
  Synthetic
cuggcugugcagagcuguc

SEQ ID NO: 47839 - RNA, 18 nt, Artificial Sequence
  Synthetic
agcaugagccagucuguc

SEQ ID NO: 47840 - RNA, 19 nt, Artificial Sequence
  Synthetic
uagcaugagccagucuguc

SEQ ID NO: 47841 - RNA, 20 nt, Artificial Sequence
  Synthetic
auagcaugagccagucuguc

SEQ ID NO: 47842 - RNA, 21 nt, Artificial Sequence
  Synthetic
cauagcaugagccagucuguc

SEQ ID NO: 47843 - RNA, 22 nt, Artificial Sequence
  Synthetic
ucauagcaugagccagucuguc

SEQ ID NO: 47844 - RNA, 23 nt, Artificial Sequence
  Synthetic
aucauagcaugagccagucuguc

SEQ ID NO: 47845 - RNA, 24 nt, Artificial Sequence
  Synthetic
aaucauagcaugagccagucuguc

SEQ ID NO: 47846 - RNA, 19 nt, Artificial Sequence
  Synthetic
aggaagagaaaggucuguc

SEQ ID NO: 47847 - RNA, 20 nt, Artificial Sequence
  Synthetic
uaggaagagaaaggucuguc

SEQ ID NO: 47848 - RNA, 22 nt, Artificial Sequence
  Synthetic
aguaggaagagaaaggucuguc

SEQ ID NO: 47849 - RNA, 18 nt, Artificial Sequence
  Synthetic
ucugagccuuguucuguc

SEQ ID NO: 47850 - RNA, 19 nt, Artificial Sequence
  Synthetic
cucugagccuuguucuguc

SEQ ID NO: 47851 - RNA, 20 nt, Artificial Sequence
  Synthetic
ccucugagccuuguucuguc

SEQ ID NO: 47852 - RNA, 21 nt, Artificial Sequence
  Synthetic
uccucugagccuuguucuguc

SEQ ID NO: 47853 - RNA, 22 nt, Artificial Sequence
  Synthetic
cuccucugagccuuguucuguc

SEQ ID NO: 47854 - RNA, 23 nt, Artificial Sequence
  Synthetic
ucuccucugagccuuguucuguc

SEQ ID NO: 47855 - RNA, 18 nt, Artificial Sequence
  Synthetic
auuacacuguuuucuguc

SEQ ID NO: 47856 - RNA, 19 nt, Artificial Sequence
  Synthetic
cauuacacuguuuucuguc

SEQ ID NO: 47857 - RNA, 20 nt, Artificial Sequence
  Synthetic
ccauuacacuguuuucuguc

SEQ ID NO: 47858 - RNA, 21 nt, Artificial Sequence
  Synthetic
cccauuacacuguuuucuguc

SEQ ID NO: 47859 - RNA, 22 nt, Artificial Sequence
  Synthetic
acccauuacacuguuuucuguc

SEQ ID NO: 47860 - RNA, 24 nt, Artificial Sequence
  Synthetic
ugacccauuacacuguuuucuguc

SEQ ID NO: 47861 - RNA, 19 nt, Artificial Sequence
  Synthetic
ugaaagacagugaaguguc

SEQ ID NO: 47862 - RNA, 20 nt, Artificial Sequence
  Synthetic
uugaaagacagugaaguguc

SEQ ID NO: 47863 - RNA, 22 nt, Artificial Sequence
  Synthetic
aguugaaagacagugaaguguc

SEQ ID NO: 47864 - RNA, 18 nt, Artificial Sequence
  Synthetic
aagucauccugugguguc

SEQ ID NO: 47865 - RNA, 19 nt, Artificial Sequence
  Synthetic
aaagucauccugugguguc

SEQ ID NO: 47866 - RNA, 20 nt, Artificial Sequence
  Synthetic
aaaagucauccugugguguc

SEQ ID NO: 47867 - RNA, 21 nt, Artificial Sequence
  Synthetic
aaaaagucauccugugguguc

SEQ ID NO: 47868 - RNA, 22 nt, Artificial Sequence
  Synthetic
uaaaaagucauccugugguguc

SEQ ID NO: 47869 - RNA, 23 nt, Artificial Sequence
  Synthetic
uuaaaaagucauccugugguguc

SEQ ID NO: 47870 - RNA, 18 nt, Artificial Sequence
  Synthetic
aacuuacauacauguguc

SEQ ID NO: 47871 - RNA, 19 nt, Artificial Sequence
  Synthetic
uaacuuacauacauguguc

SEQ ID NO: 47872 - RNA, 20 nt, Artificial Sequence
  Synthetic
auaacuuacauacauguguc

SEQ ID NO: 47873 - RNA, 18 nt, Artificial Sequence
  Synthetic
uuaaggucauaguguguc

SEQ ID NO: 47874 - RNA, 19 nt, Artificial Sequence
  Synthetic
cuuaaggucauaguguguc

SEQ ID NO: 47875 - RNA, 20 nt, Artificial Sequence
  Synthetic
acuuaaggucauaguguguc

SEQ ID NO: 47876 - RNA, 21 nt, Artificial Sequence
  Synthetic
uacuuaaggucauaguguguc

SEQ ID NO: 47877 - RNA, 22 nt, Artificial Sequence
  Synthetic
uuacuuaaggucauaguguguc

SEQ ID NO: 47878 - RNA, 23 nt, Artificial Sequence
  Synthetic
cuuacuuaaggucauaguguguc

SEQ ID NO: 47879 - RNA, 24 nt, Artificial Sequence
  Synthetic
acuuacuuaaggucauaguguguc

SEQ ID NO: 47880 - RNA, 18 nt, Artificial Sequence
  Synthetic
auuacuagguuguguguc

SEQ ID NO: 47881 - RNA, 19 nt, Artificial Sequence
  Synthetic
uauuacuagguuguguguc

SEQ ID NO: 47882 - RNA, 20 nt, Artificial Sequence
  Synthetic
uuauuacuagguuguguguc

SEQ ID NO: 47883 - RNA, 21 nt, Artificial Sequence
  Synthetic
uuuauuacuagguuguguguc

SEQ ID NO: 47884 - RNA, 24 nt, Artificial Sequence
  Synthetic
agguuuauuacuagguuguguguc

SEQ ID NO: 47885 - RNA, 18 nt, Artificial Sequence
  Synthetic
uuuccccguacuuguguc

SEQ ID NO: 47886 - RNA, 19 nt, Artificial Sequence
  Synthetic
cuuuccccguacuuguguc

SEQ ID NO: 47887 - RNA, 20 nt, Artificial Sequence
  Synthetic
ucuuuccccguacuuguguc

SEQ ID NO: 47888 - RNA, 22 nt, Artificial Sequence
  Synthetic
agucuuuccccguacuuguguc

SEQ ID NO: 47889 - RNA, 23 nt, Artificial Sequence
  Synthetic
cagucuuuccccguacuuguguc

SEQ ID NO: 47890 - RNA, 19 nt, Artificial Sequence
  Synthetic
agaaaaauuauuuuguguc

SEQ ID NO: 47891 - RNA, 20 nt, Artificial Sequence
  Synthetic
aagaaaaauuauuuuguguc

SEQ ID NO: 47892 - RNA, 21 nt, Artificial Sequence
  Synthetic
caagaaaaauuauuuuguguc

SEQ ID NO: 47893 - RNA, 24 nt, Artificial Sequence
  Synthetic
uggcaagaaaaauuauuuuguguc

SEQ ID NO: 47894 - RNA, 18 nt, Artificial Sequence
  Synthetic
uucaguacaagaauuguc

SEQ ID NO: 47895 - RNA, 19 nt, Artificial Sequence
  Synthetic
auucaguacaagaauuguc

SEQ ID NO: 47896 - RNA, 20 nt, Artificial Sequence
  Synthetic
cauucaguacaagaauuguc

SEQ ID NO: 47897 - RNA, 21 nt, Artificial Sequence
  Synthetic
ucauucaguacaagaauuguc

SEQ ID NO: 47898 - RNA, 22 nt, Artificial Sequence
  Synthetic
uucauucaguacaagaauuguc

SEQ ID NO: 47899 - RNA, 24 nt, Artificial Sequence
  Synthetic
aguucauucaguacaagaauuguc

SEQ ID NO: 47900 - RNA, 22 nt, Artificial Sequence
  Synthetic
agaauagcccuucagaauuguc

SEQ ID NO: 47901 - RNA, 23 nt, Artificial Sequence
  Synthetic
uagaauagcccuucagaauuguc

SEQ ID NO: 47902 - RNA, 18 nt, Artificial Sequence
  Synthetic
aagauagauuagauuguc

SEQ ID NO: 47903 - RNA, 19 nt, Artificial Sequence
  Synthetic
aaagauagauuagauuguc

SEQ ID NO: 47904 - RNA, 20 nt, Artificial Sequence
  Synthetic
uaaagauagauuagauuguc

SEQ ID NO: 47905 - RNA, 23 nt, Artificial Sequence
  Synthetic
agguaaagauagauuagauuguc

SEQ ID NO: 47906 - RNA, 24 nt, Artificial Sequence
  Synthetic
cagguaaagauagauuagauuguc

SEQ ID NO: 47907 - RNA, 18 nt, Artificial Sequence
  Synthetic
auggcauaauuuauuguc

SEQ ID NO: 47908 - RNA, 19 nt, Artificial Sequence
  Synthetic
aauggcauaauuuauuguc

SEQ ID NO: 47909 - RNA, 20 nt, Artificial Sequence
  Synthetic
caauggcauaauuuauuguc

SEQ ID NO: 47910 - RNA, 21 nt, Artificial Sequence
  Synthetic
ucaauggcauaauuuauuguc

SEQ ID NO: 47911 - RNA, 22 nt, Artificial Sequence
  Synthetic
uucaauggcauaauuuauuguc

SEQ ID NO: 47912 - RNA, 23 nt, Artificial Sequence
  Synthetic
uuucaauggcauaauuuauuguc

SEQ ID NO: 47913 - RNA, 19 nt, Artificial Sequence
  Synthetic
agagcuaacguaacuuguc

SEQ ID NO: 47914 - RNA, 22 nt, Artificial Sequence
  Synthetic
cggagagcuaacguaacuuguc

SEQ ID NO: 47915 - RNA, 23 nt, Artificial Sequence
  Synthetic
ucggagagcuaacguaacuuguc

SEQ ID NO: 47916 - RNA, 24 nt, Artificial Sequence
  Synthetic
cucggagagcuaacguaacuuguc

SEQ ID NO: 47917 - RNA, 18 nt, Artificial Sequence
  Synthetic
cuuucaguucguguuguc

SEQ ID NO: 47918 - RNA, 19 nt, Artificial Sequence
  Synthetic
ucuuucaguucguguuguc

SEQ ID NO: 47919 - RNA, 20 nt, Artificial Sequence
  Synthetic
uucuuucaguucguguuguc

SEQ ID NO: 47920 - RNA, 21 nt, Artificial Sequence
  Synthetic
uuucuuucaguucguguuguc

SEQ ID NO: 47921 - RNA, 22 nt, Artificial Sequence
  Synthetic
auuucuuucaguucguguuguc

SEQ ID NO: 47922 - RNA, 24 nt, Artificial Sequence
  Synthetic
agauuucuuucaguucguguuguc

SEQ ID NO: 47923 - RNA, 19 nt, Artificial Sequence
  Synthetic
agagcuaacaguuguuguc

SEQ ID NO: 47924 - RNA, 20 nt, Artificial Sequence
  Synthetic
cagagcuaacaguuguuguc

SEQ ID NO: 47925 - RNA, 21 nt, Artificial Sequence
  Synthetic
ucagagcuaacaguuguuguc

SEQ ID NO: 47926 - RNA, 22 nt, Artificial Sequence
  Synthetic
uucagagcuaacaguuguuguc

SEQ ID NO: 47927 - RNA, 23 nt, Artificial Sequence
  Synthetic
cuucagagcuaacaguuguuguc

SEQ ID NO: 47928 - RNA, 24 nt, Artificial Sequence
  Synthetic
acuucagagcuaacaguuguuguc

SEQ ID NO: 47929 - RNA, 18 nt, Artificial Sequence
  Synthetic
auuuugauaucaaaauuc

SEQ ID NO: 47930 - RNA, 19 nt, Artificial Sequence
  Synthetic
cauuuugauaucaaaauuc

SEQ ID NO: 47931 - RNA, 18 nt, Artificial Sequence
  Synthetic
agagauuuuggaaaauuc

SEQ ID NO: 47932 - RNA, 19 nt, Artificial Sequence
  Synthetic
cagagauuuuggaaaauuc

SEQ ID NO: 47933 - RNA, 20 nt, Artificial Sequence
  Synthetic
ucagagauuuuggaaaauuc

SEQ ID NO: 47934 - RNA, 21 nt, Artificial Sequence
  Synthetic
uucagagauuuuggaaaauuc

SEQ ID NO: 47935 - RNA, 22 nt, Artificial Sequence
  Synthetic
uuucagagauuuuggaaaauuc

SEQ ID NO: 47936 - RNA, 23 nt, Artificial Sequence
  Synthetic
cuuucagagauuuuggaaaauuc

SEQ ID NO: 47937 - RNA, 24 nt, Artificial Sequence
  Synthetic
ucuuucagagauuuuggaaaauuc

SEQ ID NO: 47938 - RNA, 21 nt, Artificial Sequence
  Synthetic
uaaaaaauuguaguaaaauuc

SEQ ID NO: 47939 - RNA, 22 nt, Artificial Sequence
  Synthetic
uuaaaaaauuguaguaaaauuc

SEQ ID NO: 47940 - RNA, 23 nt, Artificial Sequence
  Synthetic
uuuaaaaaauuguaguaaaauuc

SEQ ID NO: 47941 - RNA, 24 nt, Artificial Sequence
  Synthetic
uuuuaaaaaauuguaguaaaauuc

SEQ ID NO: 47942 - RNA, 18 nt, Artificial Sequence
  Synthetic
augaaaaguagcaaauuc

SEQ ID NO: 47943 - RNA, 20 nt, Artificial Sequence
  Synthetic
agaugaaaaguagcaaauuc

SEQ ID NO: 47944 - RNA, 21 nt, Artificial Sequence
  Synthetic
aagaugaaaaguagcaaauuc

SEQ ID NO: 47945 - RNA, 22 nt, Artificial Sequence
  Synthetic
aaagaugaaaaguagcaaauuc

SEQ ID NO: 47946 - RNA, 23 nt, Artificial Sequence
  Synthetic
caaagaugaaaaguagcaaauuc

SEQ ID NO: 47947 - RNA, 18 nt, Artificial Sequence
  Synthetic
ucauaagaauagaaauuc

SEQ ID NO: 47948 - RNA, 19 nt, Artificial Sequence
  Synthetic
aucauaagaauagaaauuc

SEQ ID NO: 47949 - RNA, 20 nt, Artificial Sequence
  Synthetic
aaucauaagaauagaaauuc

SEQ ID NO: 47950 - RNA, 21 nt, Artificial Sequence
  Synthetic
aaaucauaagaauagaaauuc

SEQ ID NO: 47951 - RNA, 22 nt, Artificial Sequence
  Synthetic
caaaucauaagaauagaaauuc

SEQ ID NO: 47952 - RNA, 23 nt, Artificial Sequence
  Synthetic
acaaaucauaagaauagaaauuc

SEQ ID NO: 47953 - RNA, 24 nt, Artificial Sequence
  Synthetic
cacaaaucauaagaauagaaauuc

SEQ ID NO: 47954 - RNA, 19 nt, Artificial Sequence
  Synthetic
ugauucuagauugaaauuc

SEQ ID NO: 47955 - RNA, 21 nt, Artificial Sequence
  Synthetic
ugugauucuagauugaaauuc

SEQ ID NO: 47956 - RNA, 23 nt, Artificial Sequence
  Synthetic
ugugugauucuagauugaaauuc

SEQ ID NO: 47957 - RNA, 18 nt, Artificial Sequence
  Synthetic
auuuuacguaguaaauuc

SEQ ID NO: 47958 - RNA, 19 nt, Artificial Sequence
  Synthetic
aauuuuacguaguaaauuc

SEQ ID NO: 47959 - RNA, 20 nt, Artificial Sequence
  Synthetic
uaauuuuacguaguaaauuc

SEQ ID NO: 47960 - RNA, 22 nt, Artificial Sequence
  Synthetic
uguaauuuuacguaguaaauuc

SEQ ID NO: 47961 - RNA, 23 nt, Artificial Sequence
  Synthetic
auguaauuuuacguaguaaauuc

SEQ ID NO: 47962 - RNA, 24 nt, Artificial Sequence
  Synthetic
aauguaauuuuacguaguaaauuc

SEQ ID NO: 47963 - RNA, 18 nt, Artificial Sequence
  Synthetic
uaguguuacuuuaaauuc

SEQ ID NO: 47964 - RNA, 19 nt, Artificial Sequence
  Synthetic
cuaguguuacuuuaaauuc

SEQ ID NO: 47965 - RNA, 20 nt, Artificial Sequence
  Synthetic
ucuaguguuacuuuaaauuc

SEQ ID NO: 47966 - RNA, 21 nt, Artificial Sequence
  Synthetic
uucuaguguuacuuuaaauuc

SEQ ID NO: 47967 - RNA, 22 nt, Artificial Sequence
  Synthetic
cuucuaguguuacuuuaaauuc

SEQ ID NO: 47968 - RNA, 23 nt, Artificial Sequence
  Synthetic
acuucuaguguuacuuuaaauuc

SEQ ID NO: 47969 - RNA, 24 nt, Artificial Sequence
  Synthetic
aacuucuaguguuacuuuaaauuc

SEQ ID NO: 47970 - RNA, 18 nt, Artificial Sequence
  Synthetic
ugggcuuagacacaauuc

SEQ ID NO: 47971 - RNA, 20 nt, Artificial Sequence
  Synthetic
cgugggcuuagacacaauuc

SEQ ID NO: 47972 - RNA, 21 nt, Artificial Sequence
  Synthetic
acgugggcuuagacacaauuc

SEQ ID NO: 47973 - RNA, 22 nt, Artificial Sequence
  Synthetic
cacgugggcuuagacacaauuc

SEQ ID NO: 47974 - RNA, 24 nt, Artificial Sequence
  Synthetic
agcacgugggcuuagacacaauuc

SEQ ID NO: 47975 - RNA, 21 nt, Artificial Sequence
  Synthetic
aggggaaugaagggacaauuc

SEQ ID NO: 47976 - RNA, 23 nt, Artificial Sequence
  Synthetic
ugaggggaaugaagggacaauuc

SEQ ID NO: 47977 - RNA, 24 nt, Artificial Sequence
  Synthetic
augaggggaaugaagggacaauuc

SEQ ID NO: 47978 - RNA, 18 nt, Artificial Sequence
  Synthetic
uguaccugcugccaauuc

SEQ ID NO: 47979 - RNA, 19 nt, Artificial Sequence
  Synthetic
cuguaccugcugccaauuc

SEQ ID NO: 47980 - RNA, 23 nt, Artificial Sequence
  Synthetic
ugggcuguaccugcugccaauuc

SEQ ID NO: 47981 - RNA, 24 nt, Artificial Sequence
  Synthetic
cugggcuguaccugcugccaauuc

SEQ ID NO: 47982 - RNA, 18 nt, Artificial Sequence
  Synthetic
cuaaggugcugccaauuc

SEQ ID NO: 47983 - RNA, 19 nt, Artificial Sequence
  Synthetic
ucuaaggugcugccaauuc

SEQ ID NO: 47984 - RNA, 20 nt, Artificial Sequence
  Synthetic
aucuaaggugcugccaauuc

SEQ ID NO: 47985 - RNA, 21 nt, Artificial Sequence
  Synthetic
uaucuaaggugcugccaauuc

SEQ ID NO: 47986 - RNA, 22 nt, Artificial Sequence
  Synthetic
uuaucuaaggugcugccaauuc

SEQ ID NO: 47987 - RNA, 23 nt, Artificial Sequence
  Synthetic
cuuaucuaaggugcugccaauuc

SEQ ID NO: 47988 - RNA, 19 nt, Artificial Sequence
  Synthetic
uggaauaagaauucaauuc

SEQ ID NO: 47989 - RNA, 21 nt, Artificial Sequence
  Synthetic
uguggaauaagaauucaauuc

SEQ ID NO: 47990 - RNA, 23 nt, Artificial Sequence
  Synthetic
uguguggaauaagaauucaauuc

SEQ ID NO: 47991 - RNA, 24 nt, Artificial Sequence
  Synthetic
auguguggaauaagaauucaauuc

SEQ ID NO: 47992 - RNA, 18 nt, Artificial Sequence
  Synthetic
acagauuaaggagaauuc

SEQ ID NO: 47993 - RNA, 19 nt, Artificial Sequence
  Synthetic
aacagauuaaggagaauuc

SEQ ID NO: 47994 - RNA, 20 nt, Artificial Sequence
  Synthetic
aaacagauuaaggagaauuc

SEQ ID NO: 47995 - RNA, 21 nt, Artificial Sequence
  Synthetic
uaaacagauuaaggagaauuc

SEQ ID NO: 47996 - RNA, 22 nt, Artificial Sequence
  Synthetic
cuaaacagauuaaggagaauuc

SEQ ID NO: 47997 - RNA, 23 nt, Artificial Sequence
  Synthetic
acuaaacagauuaaggagaauuc

SEQ ID NO: 47998 - RNA, 24 nt, Artificial Sequence
  Synthetic
aacuaaacagauuaaggagaauuc

SEQ ID NO: 47999 - RNA, 18 nt, Artificial Sequence
  Synthetic
ucuaaacugaaggaauuc

SEQ ID NO: 48000 - RNA, 19 nt, Artificial Sequence
  Synthetic
cucuaaacugaaggaauuc

SEQ ID NO: 48001 - RNA, 20 nt, Artificial Sequence
  Synthetic
ccucuaaacugaaggaauuc

SEQ ID NO: 48002 - RNA, 21 nt, Artificial Sequence
  Synthetic
accucuaaacugaaggaauuc

SEQ ID NO: 48003 - RNA, 23 nt, Artificial Sequence
  Synthetic
agaccucuaaacugaaggaauuc

SEQ ID NO: 48004 - RNA, 24 nt, Artificial Sequence
  Synthetic
uagaccucuaaacugaaggaauuc

SEQ ID NO: 48005 - RNA, 18 nt, Artificial Sequence
  Synthetic
uucuaguuugaauaauuc

SEQ ID NO: 48006 - RNA, 19 nt, Artificial Sequence
  Synthetic
auucuaguuugaauaauuc

SEQ ID NO: 48007 - RNA, 20 nt, Artificial Sequence
  Synthetic
uauucuaguuugaauaauuc

SEQ ID NO: 48008 - RNA, 21 nt, Artificial Sequence
  Synthetic
auauucuaguuugaauaauuc

SEQ ID NO: 48009 - RNA, 22 nt, Artificial Sequence
  Synthetic
uauauucuaguuugaauaauuc

SEQ ID NO: 48010 - RNA, 24 nt, Artificial Sequence
  Synthetic
aguauauucuaguuugaauaauuc

SEQ ID NO: 48011 - RNA, 23 nt, Artificial Sequence
  Synthetic
uggaaucaucagagauauaauuc

SEQ ID NO: 48012 - RNA, 24 nt, Artificial Sequence
  Synthetic
uuggaaucaucagagauauaauuc

SEQ ID NO: 48013 - RNA, 18 nt, Artificial Sequence
  Synthetic
uuauacgggauguaauuc

SEQ ID NO: 48014 - RNA, 19 nt, Artificial Sequence
  Synthetic
auuauacgggauguaauuc

SEQ ID NO: 48015 - RNA, 22 nt, Artificial Sequence
  Synthetic
aggauuauacgggauguaauuc

SEQ ID NO: 48016 - RNA, 23 nt, Artificial Sequence
  Synthetic
uaggauuauacgggauguaauuc

SEQ ID NO: 48017 - RNA, 24 nt, Artificial Sequence
  Synthetic
cuaggauuauacgggauguaauuc

SEQ ID NO: 48018 - RNA, 19 nt, Artificial Sequence
  Synthetic
agaauaaauuauuuaauuc

SEQ ID NO: 48019 - RNA, 20 nt, Artificial Sequence
  Synthetic
cagaauaaauuauuuaauuc

SEQ ID NO: 48020 - RNA, 21 nt, Artificial Sequence
  Synthetic
ucagaauaaauuauuuaauuc

SEQ ID NO: 48021 - RNA, 22 nt, Artificial Sequence
  Synthetic
aucagaauaaauuauuuaauuc

SEQ ID NO: 48022 - RNA, 23 nt, Artificial Sequence
  Synthetic
aaucagaauaaauuauuuaauuc

SEQ ID NO: 48023 - RNA, 24 nt, Artificial Sequence
  Synthetic
aaaucagaauaaauuauuuaauuc

SEQ ID NO: 48024 - RNA, 18 nt, Artificial Sequence
  Synthetic
uccacuggaauaacauuc

SEQ ID NO: 48025 - RNA, 19 nt, Artificial Sequence
  Synthetic
auccacuggaauaacauuc

SEQ ID NO: 48026 - RNA, 20 nt, Artificial Sequence
  Synthetic
uauccacuggaauaacauuc

SEQ ID NO: 48027 - RNA, 21 nt, Artificial Sequence
  Synthetic
uuauccacuggaauaacauuc

SEQ ID NO: 48028 - RNA, 23 nt, Artificial Sequence
  Synthetic
aguuauccacuggaauaacauuc

SEQ ID NO: 48029 - RNA, 24 nt, Artificial Sequence
  Synthetic
caguuauccacuggaauaacauuc

SEQ ID NO: 48030 - RNA, 18 nt, Artificial Sequence
  Synthetic
ucauuuacuauaacauuc

SEQ ID NO: 48031 - RNA, 19 nt, Artificial Sequence
  Synthetic
aucauuuacuauaacauuc

SEQ ID NO: 48032 - RNA, 20 nt, Artificial Sequence
  Synthetic
aaucauuuacuauaacauuc

SEQ ID NO: 48033 - RNA, 21 nt, Artificial Sequence
  Synthetic
aaaucauuuacuauaacauuc

SEQ ID NO: 48034 - RNA, 22 nt, Artificial Sequence
  Synthetic
caaaucauuuacuauaacauuc

SEQ ID NO: 48035 - RNA, 23 nt, Artificial Sequence
  Synthetic
ucaaaucauuuacuauaacauuc

SEQ ID NO: 48036 - RNA, 24 nt, Artificial Sequence
  Synthetic
uucaaaucauuuacuauaacauuc

SEQ ID NO: 48037 - RNA, 18 nt, Artificial Sequence
  Synthetic
uuauauaucaggacauuc

SEQ ID NO: 48038 - RNA, 19 nt, Artificial Sequence
  Synthetic
cuuauauaucaggacauuc

SEQ ID NO: 48039 - RNA, 20 nt, Artificial Sequence
  Synthetic
ccuuauauaucaggacauuc

SEQ ID NO: 48040 - RNA, 21 nt, Artificial Sequence
  Synthetic
cccuuauauaucaggacauuc

SEQ ID NO: 48041 - RNA, 22 nt, Artificial Sequence
  Synthetic
ucccuuauauaucaggacauuc

SEQ ID NO: 48042 - RNA, 23 nt, Artificial Sequence
  Synthetic
cucccuuauauaucaggacauuc

SEQ ID NO: 48043 - RNA, 21 nt, Artificial Sequence
  Synthetic
aaaccagucacauggccauuc

SEQ ID NO: 48044 - RNA, 22 nt, Artificial Sequence
  Synthetic
aaaaccagucacauggccauuc

SEQ ID NO: 48045 - RNA, 23 nt, Artificial Sequence
  Synthetic
caaaaccagucacauggccauuc

SEQ ID NO: 48046 - RNA, 24 nt, Artificial Sequence
  Synthetic
acaaaaccagucacauggccauuc

SEQ ID NO: 48047 - RNA, 18 nt, Artificial Sequence
  Synthetic
uuuagaagcuaugcauuc

SEQ ID NO: 48048 - RNA, 19 nt, Artificial Sequence
  Synthetic
auuuagaagcuaugcauuc

SEQ ID NO: 48049 - RNA, 21 nt, Artificial Sequence
  Synthetic
agauuuagaagcuaugcauuc

SEQ ID NO: 48050 - RNA, 23 nt, Artificial Sequence
  Synthetic
agagauuuagaagcuaugcauuc

SEQ ID NO: 48051 - RNA, 18 nt, Artificial Sequence
  Synthetic
ucugcaauauuuucauuc

SEQ ID NO: 48052 - RNA, 19 nt, Artificial Sequence
  Synthetic
uucugcaauauuuucauuc

SEQ ID NO: 48053 - RNA, 20 nt, Artificial Sequence
  Synthetic
auucugcaauauuuucauuc

SEQ ID NO: 48054 - RNA, 21 nt, Artificial Sequence
  Synthetic
aauucugcaauauuuucauuc

SEQ ID NO: 48055 - RNA, 22 nt, Artificial Sequence
  Synthetic
caauucugcaauauuuucauuc

SEQ ID NO: 48056 - RNA, 23 nt, Artificial Sequence
  Synthetic
ccaauucugcaauauuuucauuc

SEQ ID NO: 48057 - RNA, 24 nt, Artificial Sequence
  Synthetic
uccaauucugcaauauuuucauuc

SEQ ID NO: 48058 - RNA, 19 nt, Artificial Sequence
  Synthetic
aguuaaggucuuuucauuc

SEQ ID NO: 48059 - RNA, 20 nt, Artificial Sequence
  Synthetic
aaguuaaggucuuuucauuc

SEQ ID NO: 48060 - RNA, 21 nt, Artificial Sequence
  Synthetic
caaguuaaggucuuuucauuc

SEQ ID NO: 48061 - RNA, 22 nt, Artificial Sequence
  Synthetic
ucaaguuaaggucuuuucauuc

SEQ ID NO: 48062 - RNA, 23 nt, Artificial Sequence
  Synthetic
aucaaguuaaggucuuuucauuc

SEQ ID NO: 48063 - RNA, 24 nt, Artificial Sequence
  Synthetic
aaucaaguuaaggucuuuucauuc

SEQ ID NO: 48064 - RNA, 18 nt, Artificial Sequence
  Synthetic
ccauacaaugguagauuc

SEQ ID NO: 48065 - RNA, 19 nt, Artificial Sequence
  Synthetic
cccauacaaugguagauuc

SEQ ID NO: 48066 - RNA, 20 nt, Artificial Sequence
  Synthetic
ucccauacaaugguagauuc

SEQ ID NO: 48067 - RNA, 22 nt, Artificial Sequence
  Synthetic
agucccauacaaugguagauuc

SEQ ID NO: 48068 - RNA, 23 nt, Artificial Sequence
  Synthetic
aagucccauacaaugguagauuc

SEQ ID NO: 48069 - RNA, 24 nt, Artificial Sequence
  Synthetic
uaagucccauacaaugguagauuc

SEQ ID NO: 48070 - RNA, 18 nt, Artificial Sequence
  Synthetic
uaaagccauggccgauuc

SEQ ID NO: 48071 - RNA, 19 nt, Artificial Sequence
  Synthetic
auaaagccauggccgauuc

SEQ ID NO: 48072 - RNA, 20 nt, Artificial Sequence
  Synthetic
uauaaagccauggccgauuc

SEQ ID NO: 48073 - RNA, 21 nt, Artificial Sequence
  Synthetic
cuauaaagccauggccgauuc

SEQ ID NO: 48074 - RNA, 23 nt, Artificial Sequence
  Synthetic
agcuauaaagccauggccgauuc

SEQ ID NO: 48075 - RNA, 24 nt, Artificial Sequence
  Synthetic
cagcuauaaagccauggccgauuc

SEQ ID NO: 48076 - RNA, 18 nt, Artificial Sequence
  Synthetic
uacuuuuugaauggauuc

SEQ ID NO: 48077 - RNA, 20 nt, Artificial Sequence
  Synthetic
uguacuuuuugaauggauuc

SEQ ID NO: 48078 - RNA, 21 nt, Artificial Sequence
  Synthetic
auguacuuuuugaauggauuc

SEQ ID NO: 48079 - RNA, 22 nt, Artificial Sequence
  Synthetic
aauguacuuuuugaauggauuc

SEQ ID NO: 48080 - RNA, 23 nt, Artificial Sequence
  Synthetic
aaauguacuuuuugaauggauuc

SEQ ID NO: 48081 - RNA, 24 nt, Artificial Sequence
  Synthetic
aaaauguacuuuuugaauggauuc

SEQ ID NO: 48082 - RNA, 18 nt, Artificial Sequence
  Synthetic
uuuccaaugcuuggauuc

SEQ ID NO: 48083 - RNA, 19 nt, Artificial Sequence
  Synthetic
auuuccaaugcuuggauuc

SEQ ID NO: 48084 - RNA, 20 nt, Artificial Sequence
  Synthetic
aauuuccaaugcuuggauuc

SEQ ID NO: 48085 - RNA, 21 nt, Artificial Sequence
  Synthetic
caauuuccaaugcuuggauuc

SEQ ID NO: 48086 - RNA, 22 nt, Artificial Sequence
  Synthetic
ucaauuuccaaugcuuggauuc

SEQ ID NO: 48087 - RNA, 18 nt, Artificial Sequence
  Synthetic
ccagguaaaacaugauuc

SEQ ID NO: 48088 - RNA, 19 nt, Artificial Sequence
  Synthetic
accagguaaaacaugauuc

SEQ ID NO: 48089 - RNA, 20 nt, Artificial Sequence
  Synthetic
uaccagguaaaacaugauuc

SEQ ID NO: 48090 - RNA, 21 nt, Artificial Sequence
  Synthetic
auaccagguaaaacaugauuc

SEQ ID NO: 48091 - RNA, 22 nt, Artificial Sequence
  Synthetic
aauaccagguaaaacaugauuc

SEQ ID NO: 48092 - RNA, 23 nt, Artificial Sequence
  Synthetic
aaauaccagguaaaacaugauuc

SEQ ID NO: 48093 - RNA, 24 nt, Artificial Sequence
  Synthetic
caaauaccagguaaaacaugauuc

SEQ ID NO: 48094 - RNA, 18 nt, Artificial Sequence
  Synthetic
uuuuuucacuuaugauuc

SEQ ID NO: 48095 - RNA, 19 nt, Artificial Sequence
  Synthetic
auuuuuucacuuaugauuc

SEQ ID NO: 48096 - RNA, 20 nt, Artificial Sequence
  Synthetic
aauuuuuucacuuaugauuc

SEQ ID NO: 48097 - RNA, 21 nt, Artificial Sequence
  Synthetic
uaauuuuuucacuuaugauuc

SEQ ID NO: 48098 - RNA, 22 nt, Artificial Sequence
  Synthetic
uuaauuuuuucacuuaugauuc

SEQ ID NO: 48099 - RNA, 23 nt, Artificial Sequence
  Synthetic
auuaauuuuuucacuuaugauuc

SEQ ID NO: 48100 - RNA, 24 nt, Artificial Sequence
  Synthetic
cauuaauuuuuucacuuaugauuc

SEQ ID NO: 48101 - RNA, 19 nt, Artificial Sequence
  Synthetic
aggugaaguaaugugauuc

SEQ ID NO: 48102 - RNA, 20 nt, Artificial Sequence
  Synthetic
caggugaaguaaugugauuc

SEQ ID NO: 48103 - RNA, 21 nt, Artificial Sequence
  Synthetic
ucaggugaaguaaugugauuc

SEQ ID NO: 48104 - RNA, 22 nt, Artificial Sequence
  Synthetic
uucaggugaaguaaugugauuc

SEQ ID NO: 48105 - RNA, 23 nt, Artificial Sequence
  Synthetic
uuucaggugaaguaaugugauuc

SEQ ID NO: 48106 - RNA, 24 nt, Artificial Sequence
  Synthetic
uuuucaggugaaguaaugugauuc

SEQ ID NO: 48107 - RNA, 18 nt, Artificial Sequence
  Synthetic
auagacgaggcuugauuc

SEQ ID NO: 48108 - RNA, 20 nt, Artificial Sequence
  Synthetic
agauagacgaggcuugauuc

SEQ ID NO: 48109 - RNA, 21 nt, Artificial Sequence
  Synthetic
aagauagacgaggcuugauuc

SEQ ID NO: 48110 - RNA, 22 nt, Artificial Sequence
  Synthetic
aaagauagacgaggcuugauuc

SEQ ID NO: 48111 - RNA, 24 nt, Artificial Sequence
  Synthetic
ugaaagauagacgaggcuugauuc

SEQ ID NO: 48112 - RNA, 19 nt, Artificial Sequence
  Synthetic
uguggaaacuaguugauuc

SEQ ID NO: 48113 - RNA, 20 nt, Artificial Sequence
  Synthetic
cuguggaaacuaguugauuc

SEQ ID NO: 48114 - RNA, 21 nt, Artificial Sequence
  Synthetic
acuguggaaacuaguugauuc

SEQ ID NO: 48115 - RNA, 22 nt, Artificial Sequence
  Synthetic
uacuguggaaacuaguugauuc

SEQ ID NO: 48116 - RNA, 23 nt, Artificial Sequence
  Synthetic
uuacuguggaaacuaguugauuc

SEQ ID NO: 48117 - RNA, 24 nt, Artificial Sequence
  Synthetic
uuuacuguggaaacuaguugauuc

SEQ ID NO: 48118 - RNA, 18 nt, Artificial Sequence
  Synthetic
uauuacuugguuugauuc

SEQ ID NO: 48119 - RNA, 19 nt, Artificial Sequence
  Synthetic
cuauuacuugguuugauuc

SEQ ID NO: 48120 - RNA, 20 nt, Artificial Sequence
  Synthetic
acuauuacuugguuugauuc

SEQ ID NO: 48121 - RNA, 21 nt, Artificial Sequence
  Synthetic
uacuauuacuugguuugauuc

SEQ ID NO: 48122 - RNA, 22 nt, Artificial Sequence
  Synthetic
auacuauuacuugguuugauuc

SEQ ID NO: 48123 - RNA, 23 nt, Artificial Sequence
  Synthetic
aauacuauuacuugguuugauuc

SEQ ID NO: 48124 - RNA, 24 nt, Artificial Sequence
  Synthetic
aaauacuauuacuugguuugauuc

SEQ ID NO: 48125 - RNA, 18 nt, Artificial Sequence
  Synthetic
ugugaugaauaaauauuc

SEQ ID NO: 48126 - RNA, 19 nt, Artificial Sequence
  Synthetic
uugugaugaauaaauauuc

SEQ ID NO: 48127 - RNA, 20 nt, Artificial Sequence
  Synthetic
uuugugaugaauaaauauuc

SEQ ID NO: 48128 - RNA, 21 nt, Artificial Sequence
  Synthetic
uuuugugaugaauaaauauuc

SEQ ID NO: 48129 - RNA, 22 nt, Artificial Sequence
  Synthetic
uuuuugugaugaauaaauauuc

SEQ ID NO: 48130 - RNA, 23 nt, Artificial Sequence
  Synthetic
auuuuugugaugaauaaauauuc

SEQ ID NO: 48131 - RNA, 24 nt, Artificial Sequence
  Synthetic
cauuuuugugaugaauaaauauuc

SEQ ID NO: 48132 - RNA, 22 nt, Artificial Sequence
  Synthetic
ugauuuuacaauuucaauauuc

SEQ ID NO: 48133 - RNA, 23 nt, Artificial Sequence
  Synthetic
uugauuuuacaauuucaauauuc

SEQ ID NO: 48134 - RNA, 24 nt, Artificial Sequence
  Synthetic
cuugauuuuacaauuucaauauuc

SEQ ID NO: 48135 - RNA, 21 nt, Artificial Sequence
  Synthetic
aagggagacaugagaauauuc

SEQ ID NO: 48136 - RNA, 22 nt, Artificial Sequence
  Synthetic
caagggagacaugagaauauuc

SEQ ID NO: 48137 - RNA, 23 nt, Artificial Sequence
  Synthetic
ucaagggagacaugagaauauuc

SEQ ID NO: 48138 - RNA, 24 nt, Artificial Sequence
  Synthetic
aucaagggagacaugagaauauuc

SEQ ID NO: 48139 - RNA, 18 nt, Artificial Sequence
  Synthetic
ucaaaagcuguaauauuc

SEQ ID NO: 48140 - RNA, 19 nt, Artificial Sequence
  Synthetic
cucaaaagcuguaauauuc

SEQ ID NO: 48141 - RNA, 20 nt, Artificial Sequence
  Synthetic
acucaaaagcuguaauauuc

SEQ ID NO: 48142 - RNA, 21 nt, Artificial Sequence
  Synthetic
cacucaaaagcuguaauauuc

SEQ ID NO: 48143 - RNA, 22 nt, Artificial Sequence
  Synthetic
ucacucaaaagcuguaauauuc

SEQ ID NO: 48144 - RNA, 23 nt, Artificial Sequence
  Synthetic
cucacucaaaagcuguaauauuc

SEQ ID NO: 48145 - RNA, 24 nt, Artificial Sequence
  Synthetic
ucucacucaaaagcuguaauauuc

SEQ ID NO: 48146 - RNA, 18 nt, Artificial Sequence
  Synthetic
caaggcaggcccauauuc

SEQ ID NO: 48147 - RNA, 19 nt, Artificial Sequence
  Synthetic
acaaggcaggcccauauuc

SEQ ID NO: 48148 - RNA, 20 nt, Artificial Sequence
  Synthetic
cacaaggcaggcccauauuc

SEQ ID NO: 48149 - RNA, 21 nt, Artificial Sequence
  Synthetic
ucacaaggcaggcccauauuc

SEQ ID NO: 48150 - RNA, 22 nt, Artificial Sequence
  Synthetic
aucacaaggcaggcccauauuc

SEQ ID NO: 48151 - RNA, 23 nt, Artificial Sequence
  Synthetic
aaucacaaggcaggcccauauuc

SEQ ID NO: 48152 - RNA, 24 nt, Artificial Sequence
  Synthetic
aaaucacaaggcaggcccauauuc

SEQ ID NO: 48153 - RNA, 18 nt, Artificial Sequence
  Synthetic
caggggcucuucauauuc

SEQ ID NO: 48154 - RNA, 19 nt, Artificial Sequence
  Synthetic
acaggggcucuucauauuc

SEQ ID NO: 48155 - RNA, 20 nt, Artificial Sequence
  Synthetic
uacaggggcucuucauauuc

SEQ ID NO: 48156 - RNA, 23 nt, Artificial Sequence
  Synthetic
ugguacaggggcucuucauauuc

SEQ ID NO: 48157 - RNA, 24 nt, Artificial Sequence
  Synthetic
cugguacaggggcucuucauauuc

SEQ ID NO: 48158 - RNA, 18 nt, Artificial Sequence
  Synthetic
cccuucguauguauauuc

SEQ ID NO: 48159 - RNA, 19 nt, Artificial Sequence
  Synthetic
acccuucguauguauauuc

SEQ ID NO: 48160 - RNA, 20 nt, Artificial Sequence
  Synthetic
aacccuucguauguauauuc

SEQ ID NO: 48161 - RNA, 21 nt, Artificial Sequence
  Synthetic
aaacccuucguauguauauuc

SEQ ID NO: 48162 - RNA, 22 nt, Artificial Sequence
  Synthetic
caaacccuucguauguauauuc

SEQ ID NO: 48163 - RNA, 23 nt, Artificial Sequence
  Synthetic
ucaaacccuucguauguauauuc

SEQ ID NO: 48164 - RNA, 24 nt, Artificial Sequence
  Synthetic
uucaaacccuucguauguauauuc

SEQ ID NO: 48165 - RNA, 18 nt, Artificial Sequence
  Synthetic
aacccugcauuuauauuc

SEQ ID NO: 48166 - RNA, 19 nt, Artificial Sequence
  Synthetic
uaacccugcauuuauauuc

SEQ ID NO: 48167 - RNA, 20 nt, Artificial Sequence
  Synthetic
cuaacccugcauuuauauuc

SEQ ID NO: 48168 - RNA, 21 nt, Artificial Sequence
  Synthetic
ucuaacccugcauuuauauuc

SEQ ID NO: 48169 - RNA, 23 nt, Artificial Sequence
  Synthetic
ugucuaacccugcauuuauauuc

SEQ ID NO: 48170 - RNA, 24 nt, Artificial Sequence
  Synthetic
augucuaacccugcauuuauauuc

SEQ ID NO: 48171 - RNA, 18 nt, Artificial Sequence
  Synthetic
ucuuucaagaagcuauuc

SEQ ID NO: 48172 - RNA, 19 nt, Artificial Sequence
  Synthetic
uucuuucaagaagcuauuc

SEQ ID NO: 48173 - RNA, 20 nt, Artificial Sequence
  Synthetic
uuucuuucaagaagcuauuc

SEQ ID NO: 48174 - RNA, 21 nt, Artificial Sequence
  Synthetic
cuuucuuucaagaagcuauuc

SEQ ID NO: 48175 - RNA, 22 nt, Artificial Sequence
  Synthetic
ucuuucuuucaagaagcuauuc

SEQ ID NO: 48176 - RNA, 23 nt, Artificial Sequence
  Synthetic
aucuuucuuucaagaagcuauuc

SEQ ID NO: 48177 - RNA, 24 nt, Artificial Sequence
  Synthetic
aaucuuucuuucaagaagcuauuc

SEQ ID NO: 48178 - RNA, 18 nt, Artificial Sequence
  Synthetic
aaccuaguuucucuauuc

SEQ ID NO: 48179 - RNA, 19 nt, Artificial Sequence
  Synthetic
uaaccuaguuucucuauuc

SEQ ID NO: 48180 - RNA, 20 nt, Artificial Sequence
  Synthetic
uuaaccuaguuucucuauuc

SEQ ID NO: 48181 - RNA, 21 nt, Artificial Sequence
  Synthetic
cuuaaccuaguuucucuauuc

SEQ ID NO: 48182 - RNA, 22 nt, Artificial Sequence
  Synthetic
ucuuaaccuaguuucucuauuc

SEQ ID NO: 48183 - RNA, 23 nt, Artificial Sequence
  Synthetic
uucuuaaccuaguuucucuauuc

SEQ ID NO: 48184 - RNA, 24 nt, Artificial Sequence
  Synthetic
auucuuaaccuaguuucucuauuc

SEQ ID NO: 48185 - RNA, 18 nt, Artificial Sequence
  Synthetic
ugugaugcucuucuauuc

SEQ ID NO: 48186 - RNA, 19 nt, Artificial Sequence
  Synthetic
cugugaugcucuucuauuc

SEQ ID NO: 48187 - RNA, 20 nt, Artificial Sequence
  Synthetic
ucugugaugcucuucuauuc

SEQ ID NO: 48188 - RNA, 21 nt, Artificial Sequence
  Synthetic
uucugugaugcucuucuauuc

SEQ ID NO: 48189 - RNA, 22 nt, Artificial Sequence
  Synthetic
auucugugaugcucuucuauuc

SEQ ID NO: 48190 - RNA, 23 nt, Artificial Sequence
  Synthetic
aauucugugaugcucuucuauuc

SEQ ID NO: 48191 - RNA, 24 nt, Artificial Sequence
  Synthetic
aaauucugugaugcucuucuauuc

SEQ ID NO: 48192 - RNA, 21 nt, Artificial Sequence
  Synthetic
ugaauuuuuaaaaaaguauuc

SEQ ID NO: 48193 - RNA, 23 nt, Artificial Sequence
  Synthetic
agugaauuuuuaaaaaaguauuc

SEQ ID NO: 48194 - RNA, 18 nt, Artificial Sequence
  Synthetic
uuugcaaaugcgguauuc

SEQ ID NO: 48195 - RNA, 19 nt, Artificial Sequence
  Synthetic
uuuugcaaaugcgguauuc

SEQ ID NO: 48196 - RNA, 20 nt, Artificial Sequence
  Synthetic
uuuuugcaaaugcgguauuc

SEQ ID NO: 48197 - RNA, 21 nt, Artificial Sequence
  Synthetic
uuuuuugcaaaugcgguauuc

SEQ ID NO: 48198 - RNA, 22 nt, Artificial Sequence
  Synthetic
uuuuuuugcaaaugcgguauuc

SEQ ID NO: 48199 - RNA, 24 nt, Artificial Sequence
  Synthetic
uguuuuuuugcaaaugcgguauuc

SEQ ID NO: 48200 - RNA, 18 nt, Artificial Sequence
  Synthetic
acacccacauaauuauuc

SEQ ID NO: 48201 - RNA, 20 nt, Artificial Sequence
  Synthetic
ugacacccacauaauuauuc

SEQ ID NO: 48202 - RNA, 18 nt, Artificial Sequence
  Synthetic
uuguagauauuauuauuc

SEQ ID NO: 48203 - RNA, 19 nt, Artificial Sequence
  Synthetic
uuuguagauauuauuauuc

SEQ ID NO: 48204 - RNA, 20 nt, Artificial Sequence
  Synthetic
uuuuguagauauuauuauuc

SEQ ID NO: 48205 - RNA, 21 nt, Artificial Sequence
  Synthetic
cuuuuguagauauuauuauuc

SEQ ID NO: 48206 - RNA, 22 nt, Artificial Sequence
  Synthetic
ccuuuuguagauauuauuauuc

SEQ ID NO: 48207 - RNA, 23 nt, Artificial Sequence
  Synthetic
uccuuuuguagauauuauuauuc

SEQ ID NO: 48208 - RNA, 24 nt, Artificial Sequence
  Synthetic
auccuuuuguagauauuauuauuc

SEQ ID NO: 48209 - RNA, 20 nt, Artificial Sequence
  Synthetic
aggcuaguuguuacuuauuc

SEQ ID NO: 48210 - RNA, 22 nt, Artificial Sequence
  Synthetic
cgaggcuaguuguuacuuauuc

SEQ ID NO: 48211 - RNA, 23 nt, Artificial Sequence
  Synthetic
ccgaggcuaguuguuacuuauuc

SEQ ID NO: 48212 - RNA, 24 nt, Artificial Sequence
  Synthetic
uccgaggcuaguuguuacuuauuc

SEQ ID NO: 48213 - RNA, 18 nt, Artificial Sequence
  Synthetic
aguuuaaauucuuuauuc

SEQ ID NO: 48214 - RNA, 19 nt, Artificial Sequence
  Synthetic
aaguuuaaauucuuuauuc

SEQ ID NO: 48215 - RNA, 20 nt, Artificial Sequence
  Synthetic
caaguuuaaauucuuuauuc

SEQ ID NO: 48216 - RNA, 21 nt, Artificial Sequence
  Synthetic
acaaguuuaaauucuuuauuc

SEQ ID NO: 48217 - RNA, 22 nt, Artificial Sequence
  Synthetic
uacaaguuuaaauucuuuauuc

SEQ ID NO: 48218 - RNA, 23 nt, Artificial Sequence
  Synthetic
uuacaaguuuaaauucuuuauuc

SEQ ID NO: 48219 - RNA, 24 nt, Artificial Sequence
  Synthetic
auuacaaguuuaaauucuuuauuc

SEQ ID NO: 48220 - RNA, 18 nt, Artificial Sequence
  Synthetic
ugauggaguguuuuauuc

SEQ ID NO: 48221 - RNA, 19 nt, Artificial Sequence
  Synthetic
uugauggaguguuuuauuc

SEQ ID NO: 48222 - RNA, 20 nt, Artificial Sequence
  Synthetic
uuugauggaguguuuuauuc

SEQ ID NO: 48223 - RNA, 21 nt, Artificial Sequence
  Synthetic
auuugauggaguguuuuauuc

SEQ ID NO: 48224 - RNA, 22 nt, Artificial Sequence
  Synthetic
aauuugauggaguguuuuauuc

SEQ ID NO: 48225 - RNA, 23 nt, Artificial Sequence
  Synthetic
aaauuugauggaguguuuuauuc

SEQ ID NO: 48226 - RNA, 24 nt, Artificial Sequence
  Synthetic
aaaauuugauggaguguuuuauuc

SEQ ID NO: 48227 - RNA, 18 nt, Artificial Sequence
  Synthetic
uccacguuauuuuuauuc

SEQ ID NO: 48228 - RNA, 19 nt, Artificial Sequence
  Synthetic
uuccacguuauuuuuauuc

SEQ ID NO: 48229 - RNA, 20 nt, Artificial Sequence
  Synthetic
uuuccacguuauuuuuauuc

SEQ ID NO: 48230 - RNA, 21 nt, Artificial Sequence
  Synthetic
cuuuccacguuauuuuuauuc

SEQ ID NO: 48231 - RNA, 22 nt, Artificial Sequence
  Synthetic
acuuuccacguuauuuuuauuc

SEQ ID NO: 48232 - RNA, 23 nt, Artificial Sequence
  Synthetic
aacuuuccacguuauuuuuauuc

SEQ ID NO: 48233 - RNA, 24 nt, Artificial Sequence
  Synthetic
uaacuuuccacguuauuuuuauuc

SEQ ID NO: 48234 - RNA, 18 nt, Artificial Sequence
  Synthetic
uuaccccuucuaaacuuc

SEQ ID NO: 48235 - RNA, 19 nt, Artificial Sequence
  Synthetic
cuuaccccuucuaaacuuc

SEQ ID NO: 48236 - RNA, 20 nt, Artificial Sequence
  Synthetic
acuuaccccuucuaaacuuc

SEQ ID NO: 48237 - RNA, 21 nt, Artificial Sequence
  Synthetic
cacuuaccccuucuaaacuuc

SEQ ID NO: 48238 - RNA, 22 nt, Artificial Sequence
  Synthetic
ucacuuaccccuucuaaacuuc

SEQ ID NO: 48239 - RNA, 24 nt, Artificial Sequence
  Synthetic
ugucacuuaccccuucuaaacuuc

SEQ ID NO: 48240 - RNA, 18 nt, Artificial Sequence
  Synthetic
ucuaguguccccaacuuc

SEQ ID NO: 48241 - RNA, 19 nt, Artificial Sequence
  Synthetic
cucuaguguccccaacuuc

SEQ ID NO: 48242 - RNA, 20 nt, Artificial Sequence
  Synthetic
ucucuaguguccccaacuuc

SEQ ID NO: 48243 - RNA, 21 nt, Artificial Sequence
  Synthetic
aucucuaguguccccaacuuc

SEQ ID NO: 48244 - RNA, 22 nt, Artificial Sequence
  Synthetic
aaucucuaguguccccaacuuc

SEQ ID NO: 48245 - RNA, 23 nt, Artificial Sequence
  Synthetic
uaaucucuaguguccccaacuuc

SEQ ID NO: 48246 - RNA, 24 nt, Artificial Sequence
  Synthetic
auaaucucuaguguccccaacuuc

SEQ ID NO: 48247 - RNA, 20 nt, Artificial Sequence
  Synthetic
aggcuucaaagccuaacuuc

SEQ ID NO: 48248 - RNA, 21 nt, Artificial Sequence
  Synthetic
uaggcuucaaagccuaacuuc

SEQ ID NO: 48249 - RNA, 22 nt, Artificial Sequence
  Synthetic
auaggcuucaaagccuaacuuc

SEQ ID NO: 48250 - RNA, 18 nt, Artificial Sequence
  Synthetic
cuuuggaggucuaacuuc

SEQ ID NO: 48251 - RNA, 22 nt, Artificial Sequence
  Synthetic
ugggcuuuggaggucuaacuuc

SEQ ID NO: 48252 - RNA, 23 nt, Artificial Sequence
  Synthetic
augggcuuuggaggucuaacuuc

SEQ ID NO: 48253 - RNA, 24 nt, Artificial Sequence
  Synthetic
caugggcuuuggaggucuaacuuc

SEQ ID NO: 48254 - RNA, 18 nt, Artificial Sequence
  Synthetic
cauuucuuguguaacuuc

SEQ ID NO: 48255 - RNA, 19 nt, Artificial Sequence
  Synthetic
ucauuucuuguguaacuuc

SEQ ID NO: 48256 - RNA, 20 nt, Artificial Sequence
  Synthetic
aucauuucuuguguaacuuc

SEQ ID NO: 48257 - RNA, 21 nt, Artificial Sequence
  Synthetic
caucauuucuuguguaacuuc

SEQ ID NO: 48258 - RNA, 22 nt, Artificial Sequence
  Synthetic
ccaucauuucuuguguaacuuc

SEQ ID NO: 48259 - RNA, 23 nt, Artificial Sequence
  Synthetic
cccaucauuucuuguguaacuuc

SEQ ID NO: 48260 - RNA, 19 nt, Artificial Sequence
  Synthetic
agaauuggccuuucacuuc

SEQ ID NO: 48261 - RNA, 20 nt, Artificial Sequence
  Synthetic
aagaauuggccuuucacuuc

SEQ ID NO: 48262 - RNA, 21 nt, Artificial Sequence
  Synthetic
uaagaauuggccuuucacuuc

SEQ ID NO: 48263 - RNA, 22 nt, Artificial Sequence
  Synthetic
cuaagaauuggccuuucacuuc

SEQ ID NO: 48264 - RNA, 23 nt, Artificial Sequence
  Synthetic
acuaagaauuggccuuucacuuc

SEQ ID NO: 48265 - RNA, 24 nt, Artificial Sequence
  Synthetic
aacuaagaauuggccuuucacuuc

SEQ ID NO: 48266 - RNA, 18 nt, Artificial Sequence
  Synthetic
cucauagagcaagacuuc

SEQ ID NO: 48267 - RNA, 19 nt, Artificial Sequence
  Synthetic
ucucauagagcaagacuuc

SEQ ID NO: 48268 - RNA, 20 nt, Artificial Sequence
  Synthetic
uucucauagagcaagacuuc

SEQ ID NO: 48269 - RNA, 21 nt, Artificial Sequence
  Synthetic
uuucucauagagcaagacuuc

SEQ ID NO: 48270 - RNA, 22 nt, Artificial Sequence
  Synthetic
uuuucucauagagcaagacuuc

SEQ ID NO: 48271 - RNA, 23 nt, Artificial Sequence
  Synthetic
uuuuucucauagagcaagacuuc

SEQ ID NO: 48272 - RNA, 24 nt, Artificial Sequence
  Synthetic
cuuuuucucauagagcaagacuuc

SEQ ID NO: 48273 - RNA, 18 nt, Artificial Sequence
  Synthetic
ucauaauguuaagacuuc

SEQ ID NO: 48274 - RNA, 19 nt, Artificial Sequence
  Synthetic
uucauaauguuaagacuuc

SEQ ID NO: 48275 - RNA, 22 nt, Artificial Sequence
  Synthetic
agguucauaauguuaagacuuc

SEQ ID NO: 48276 - RNA, 24 nt, Artificial Sequence
  Synthetic
ugagguucauaauguuaagacuuc

SEQ ID NO: 48277 - RNA, 18 nt, Artificial Sequence
  Synthetic
caaaucuuaagagacuuc

SEQ ID NO: 48278 - RNA, 19 nt, Artificial Sequence
  Synthetic
ucaaaucuuaagagacuuc

SEQ ID NO: 48279 - RNA, 21 nt, Artificial Sequence
  Synthetic
agucaaaucuuaagagacuuc

SEQ ID NO: 48280 - RNA, 22 nt, Artificial Sequence
  Synthetic
cagucaaaucuuaagagacuuc

SEQ ID NO: 48281 - RNA, 23 nt, Artificial Sequence
  Synthetic
ucagucaaaucuuaagagacuuc

SEQ ID NO: 48282 - RNA, 24 nt, Artificial Sequence
  Synthetic
uucagucaaaucuuaagagacuuc

SEQ ID NO: 48283 - RNA, 18 nt, Artificial Sequence
  Synthetic
uuuggugacacauacuuc

SEQ ID NO: 48284 - RNA, 19 nt, Artificial Sequence
  Synthetic
auuuggugacacauacuuc

SEQ ID NO: 48285 - RNA, 21 nt, Artificial Sequence
  Synthetic
agauuuggugacacauacuuc

SEQ ID NO: 48286 - RNA, 23 nt, Artificial Sequence
  Synthetic
agagauuuggugacacauacuuc

SEQ ID NO: 48287 - RNA, 24 nt, Artificial Sequence
  Synthetic
uagagauuuggugacacauacuuc

SEQ ID NO: 48288 - RNA, 18 nt, Artificial Sequence
  Synthetic
cgguuugcuguauacuuc

SEQ ID NO: 48289 - RNA, 19 nt, Artificial Sequence
  Synthetic
acgguuugcuguauacuuc

SEQ ID NO: 48290 - RNA, 20 nt, Artificial Sequence
  Synthetic
uacgguuugcuguauacuuc

SEQ ID NO: 48291 - RNA, 21 nt, Artificial Sequence
  Synthetic
uuacgguuugcuguauacuuc

SEQ ID NO: 48292 - RNA, 22 nt, Artificial Sequence
  Synthetic
cuuacgguuugcuguauacuuc

SEQ ID NO: 48293 - RNA, 23 nt, Artificial Sequence
  Synthetic
acuuacgguuugcuguauacuuc

SEQ ID NO: 48294 - RNA, 24 nt, Artificial Sequence
  Synthetic
uacuuacgguuugcuguauacuuc

SEQ ID NO: 48295 - RNA, 19 nt, Artificial Sequence
  Synthetic
agccaugaauuuauacuuc

SEQ ID NO: 48296 - RNA, 20 nt, Artificial Sequence
  Synthetic
uagccaugaauuuauacuuc

SEQ ID NO: 48297 - RNA, 21 nt, Artificial Sequence
  Synthetic
auagccaugaauuuauacuuc

SEQ ID NO: 48298 - RNA, 22 nt, Artificial Sequence
  Synthetic
uauagccaugaauuuauacuuc

SEQ ID NO: 48299 - RNA, 18 nt, Artificial Sequence
  Synthetic
acuuucaauuccuacuuc

SEQ ID NO: 48300 - RNA, 19 nt, Artificial Sequence
  Synthetic
uacuuucaauuccuacuuc

SEQ ID NO: 48301 - RNA, 20 nt, Artificial Sequence
  Synthetic
cuacuuucaauuccuacuuc

SEQ ID NO: 48302 - RNA, 21 nt, Artificial Sequence
  Synthetic
acuacuuucaauuccuacuuc

SEQ ID NO: 48303 - RNA, 22 nt, Artificial Sequence
  Synthetic
uacuacuuucaauuccuacuuc

SEQ ID NO: 48304 - RNA, 23 nt, Artificial Sequence
  Synthetic
auacuacuuucaauuccuacuuc

SEQ ID NO: 48305 - RNA, 24 nt, Artificial Sequence
  Synthetic
uauacuacuuucaauuccuacuuc

SEQ ID NO: 48306 - RNA, 18 nt, Artificial Sequence
  Synthetic
agugaaguggucuacuuc

SEQ ID NO: 48307 - RNA, 19 nt, Artificial Sequence
  Synthetic
aagugaaguggucuacuuc

SEQ ID NO: 48308 - RNA, 20 nt, Artificial Sequence
  Synthetic
uaagugaaguggucuacuuc

SEQ ID NO: 48309 - RNA, 21 nt, Artificial Sequence
  Synthetic
cuaagugaaguggucuacuuc

SEQ ID NO: 48310 - RNA, 23 nt, Artificial Sequence
  Synthetic
agcuaagugaaguggucuacuuc

SEQ ID NO: 48311 - RNA, 24 nt, Artificial Sequence
  Synthetic
uagcuaagugaaguggucuacuuc

SEQ ID NO: 48312 - RNA, 18 nt, Artificial Sequence
  Synthetic
aaucucccauucuacuuc

SEQ ID NO: 48313 - RNA, 19 nt, Artificial Sequence
  Synthetic
caaucucccauucuacuuc

SEQ ID NO: 48314 - RNA, 20 nt, Artificial Sequence
  Synthetic
ccaaucucccauucuacuuc

SEQ ID NO: 48315 - RNA, 21 nt, Artificial Sequence
  Synthetic
uccaaucucccauucuacuuc

SEQ ID NO: 48316 - RNA, 22 nt, Artificial Sequence
  Synthetic
auccaaucucccauucuacuuc

SEQ ID NO: 48317 - RNA, 23 nt, Artificial Sequence
  Synthetic
cauccaaucucccauucuacuuc

SEQ ID NO: 48318 - RNA, 24 nt, Artificial Sequence
  Synthetic
ccauccaaucucccauucuacuuc

SEQ ID NO: 48319 - RNA, 18 nt, Artificial Sequence
  Synthetic
auuucuuuuccguacuuc

SEQ ID NO: 48320 - RNA, 19 nt, Artificial Sequence
  Synthetic
uauuucuuuuccguacuuc

SEQ ID NO: 48321 - RNA, 21 nt, Artificial Sequence
  Synthetic
aguauuucuuuuccguacuuc

SEQ ID NO: 48322 - RNA, 22 nt, Artificial Sequence
  Synthetic
aaguauuucuuuuccguacuuc

SEQ ID NO: 48323 - RNA, 18 nt, Artificial Sequence
  Synthetic
uaaaacaguagguacuuc

SEQ ID NO: 48324 - RNA, 19 nt, Artificial Sequence
  Synthetic
uuaaaacaguagguacuuc

SEQ ID NO: 48325 - RNA, 20 nt, Artificial Sequence
  Synthetic
cuuaaaacaguagguacuuc

SEQ ID NO: 48326 - RNA, 22 nt, Artificial Sequence
  Synthetic
agcuuaaaacaguagguacuuc

SEQ ID NO: 48327 - RNA, 23 nt, Artificial Sequence
  Synthetic
uagcuuaaaacaguagguacuuc

SEQ ID NO: 48328 - RNA, 18 nt, Artificial Sequence
  Synthetic
uggaauuuauuuuacuuc

SEQ ID NO: 48329 - RNA, 21 nt, Artificial Sequence
  Synthetic
agguggaauuuauuuuacuuc

SEQ ID NO: 48330 - RNA, 23 nt, Artificial Sequence
  Synthetic
agagguggaauuuauuuuacuuc

SEQ ID NO: 48331 - RNA, 24 nt, Artificial Sequence
  Synthetic
aagagguggaauuuauuuuacuuc

SEQ ID NO: 48332 - RNA, 18 nt, Artificial Sequence
  Synthetic
auguucauaaguaccuuc

SEQ ID NO: 48333 - RNA, 19 nt, Artificial Sequence
  Synthetic
uauguucauaaguaccuuc

SEQ ID NO: 48334 - RNA, 20 nt, Artificial Sequence
  Synthetic
uuauguucauaaguaccuuc

SEQ ID NO: 48335 - RNA, 21 nt, Artificial Sequence
  Synthetic
cuuauguucauaaguaccuuc

SEQ ID NO: 48336 - RNA, 22 nt, Artificial Sequence
  Synthetic
ccuuauguucauaaguaccuuc

SEQ ID NO: 48337 - RNA, 23 nt, Artificial Sequence
  Synthetic
uccuuauguucauaaguaccuuc

SEQ ID NO: 48338 - RNA, 18 nt, Artificial Sequence
  Synthetic
uuuuuacauaaagccuuc

SEQ ID NO: 48339 - RNA, 19 nt, Artificial Sequence
  Synthetic
auuuuuacauaaagccuuc

SEQ ID NO: 48340 - RNA, 20 nt, Artificial Sequence
  Synthetic
uauuuuuacauaaagccuuc

SEQ ID NO: 48341 - RNA, 21 nt, Artificial Sequence
  Synthetic
cuauuuuuacauaaagccuuc

SEQ ID NO: 48342 - RNA, 22 nt, Artificial Sequence
  Synthetic
ucuauuuuuacauaaagccuuc

SEQ ID NO: 48343 - RNA, 24 nt, Artificial Sequence
  Synthetic
ugucuauuuuuacauaaagccuuc

SEQ ID NO: 48344 - RNA, 18 nt, Artificial Sequence
  Synthetic
auaacacacuuagccuuc

SEQ ID NO: 48345 - RNA, 19 nt, Artificial Sequence
  Synthetic
aauaacacacuuagccuuc

SEQ ID NO: 48346 - RNA, 20 nt, Artificial Sequence
  Synthetic
uaauaacacacuuagccuuc

SEQ ID NO: 48347 - RNA, 21 nt, Artificial Sequence
  Synthetic
cuaauaacacacuuagccuuc

SEQ ID NO: 48348 - RNA, 22 nt, Artificial Sequence
  Synthetic
acuaauaacacacuuagccuuc

SEQ ID NO: 48349 - RNA, 19 nt, Artificial Sequence
  Synthetic
uguuuuguuuuaauccuuc

SEQ ID NO: 48350 - RNA, 21 nt, Artificial Sequence
  Synthetic
caccacuaaacuuuaagcuuc

SEQ ID NO: 48351 - RNA, 22 nt, Artificial Sequence
  Synthetic
acaccacuaaacuuuaagcuuc

SEQ ID NO: 48352 - RNA, 23 nt, Artificial Sequence
  Synthetic
cacaccacuaaacuuuaagcuuc

SEQ ID NO: 48353 - RNA, 24 nt, Artificial Sequence
  Synthetic
acacaccacuaaacuuuaagcuuc

SEQ ID NO: 48354 - RNA, 21 nt, Artificial Sequence
  Synthetic
ucacccuccuaccucagcuuc

SEQ ID NO: 48355 - RNA, 22 nt, Artificial Sequence
  Synthetic
aucacccuccuaccucagcuuc

SEQ ID NO: 48356 - RNA, 23 nt, Artificial Sequence
  Synthetic
uaucacccuccuaccucagcuuc

SEQ ID NO: 48357 - RNA, 24 nt, Artificial Sequence
  Synthetic
auaucacccuccuaccucagcuuc

SEQ ID NO: 48358 - RNA, 18 nt, Artificial Sequence
  Synthetic
accuuuuccucuagcuuc

SEQ ID NO: 48359 - RNA, 19 nt, Artificial Sequence
  Synthetic
aaccuuuuccucuagcuuc

SEQ ID NO: 48360 - RNA, 22 nt, Artificial Sequence
  Synthetic
uggaaccuuuuccucuagcuuc

SEQ ID NO: 48361 - RNA, 23 nt, Artificial Sequence
  Synthetic
uuggaaccuuuuccucuagcuuc

SEQ ID NO: 48362 - RNA, 24 nt, Artificial Sequence
  Synthetic
uuuggaaccuuuuccucuagcuuc

SEQ ID NO: 48363 - RNA, 18 nt, Artificial Sequence
  Synthetic
uacuacauaguaugcuuc

SEQ ID NO: 48364 - RNA, 19 nt, Artificial Sequence
  Synthetic
auacuacauaguaugcuuc

SEQ ID NO: 48365 - RNA, 20 nt, Artificial Sequence
  Synthetic
cauacuacauaguaugcuuc

SEQ ID NO: 48366 - RNA, 21 nt, Artificial Sequence
  Synthetic
acauacuacauaguaugcuuc

SEQ ID NO: 48367 - RNA, 23 nt, Artificial Sequence
  Synthetic
ugacauacuacauaguaugcuuc

SEQ ID NO: 48368 - RNA, 19 nt, Artificial Sequence
  Synthetic
ugccucuccagacugcuuc

SEQ ID NO: 48369 - RNA, 20 nt, Artificial Sequence
  Synthetic
augccucuccagacugcuuc

SEQ ID NO: 48370 - RNA, 21 nt, Artificial Sequence
  Synthetic
caugccucuccagacugcuuc

SEQ ID NO: 48371 - RNA, 22 nt, Artificial Sequence
  Synthetic
acaugccucuccagacugcuuc

SEQ ID NO: 48372 - RNA, 23 nt, Artificial Sequence
  Synthetic
cacaugccucuccagacugcuuc

SEQ ID NO: 48373 - RNA, 24 nt, Artificial Sequence
  Synthetic
ucacaugccucuccagacugcuuc

SEQ ID NO: 48374 - RNA, 18 nt, Artificial Sequence
  Synthetic
accucaggugguugcuuc

SEQ ID NO: 48375 - RNA, 19 nt, Artificial Sequence
  Synthetic
aaccucaggugguugcuuc

SEQ ID NO: 48376 - RNA, 20 nt, Artificial Sequence
  Synthetic
caaccucaggugguugcuuc

SEQ ID NO: 48377 - RNA, 21 nt, Artificial Sequence
  Synthetic
ucaaccucaggugguugcuuc

SEQ ID NO: 48378 - RNA, 22 nt, Artificial Sequence
  Synthetic
uucaaccucaggugguugcuuc

SEQ ID NO: 48379 - RNA, 23 nt, Artificial Sequence
  Synthetic
uuucaaccucaggugguugcuuc

SEQ ID NO: 48380 - RNA, 24 nt, Artificial Sequence
  Synthetic
uuuucaaccucaggugguugcuuc

SEQ ID NO: 48381 - RNA, 18 nt, Artificial Sequence
  Synthetic
cuuacuauaguuugcuuc

SEQ ID NO: 48382 - RNA, 19 nt, Artificial Sequence
  Synthetic
ucuuacuauaguuugcuuc

SEQ ID NO: 48383 - RNA, 20 nt, Artificial Sequence
  Synthetic
uucuuacuauaguuugcuuc

SEQ ID NO: 48384 - RNA, 21 nt, Artificial Sequence
  Synthetic
uuucuuacuauaguuugcuuc

SEQ ID NO: 48385 - RNA, 22 nt, Artificial Sequence
  Synthetic
cuuucuuacuauaguuugcuuc

SEQ ID NO: 48386 - RNA, 23 nt, Artificial Sequence
  Synthetic
ucuuucuuacuauaguuugcuuc

SEQ ID NO: 48387 - RNA, 18 nt, Artificial Sequence
  Synthetic
accuauauuagcaucuuc

SEQ ID NO: 48388 - RNA, 19 nt, Artificial Sequence
  Synthetic
aaccuauauuagcaucuuc

SEQ ID NO: 48389 - RNA, 20 nt, Artificial Sequence
  Synthetic
aaaccuauauuagcaucuuc

SEQ ID NO: 48390 - RNA, 21 nt, Artificial Sequence
  Synthetic
aaaaccuauauuagcaucuuc

SEQ ID NO: 48391 - RNA, 23 nt, Artificial Sequence
  Synthetic
ugaaaaccuauauuagcaucuuc

SEQ ID NO: 48392 - RNA, 18 nt, Artificial Sequence
  Synthetic
aggcagcccaagaucuuc

SEQ ID NO: 48393 - RNA, 21 nt, Artificial Sequence
  Synthetic
uggaggcagcccaagaucuuc

SEQ ID NO: 48394 - RNA, 24 nt, Artificial Sequence
  Synthetic
ugguggaggcagcccaagaucuuc

SEQ ID NO: 48395 - RNA, 18 nt, Artificial Sequence
  Synthetic
cuaggguguacuaucuuc

SEQ ID NO: 48396 - RNA, 20 nt, Artificial Sequence
  Synthetic
agcuaggguguacuaucuuc

SEQ ID NO: 48397 - RNA, 21 nt, Artificial Sequence
  Synthetic
cagcuaggguguacuaucuuc

SEQ ID NO: 48398 - RNA, 22 nt, Artificial Sequence
  Synthetic
acagcuaggguguacuaucuuc

SEQ ID NO: 48399 - RNA, 24 nt, Artificial Sequence
  Synthetic
ugacagcuaggguguacuaucuuc

SEQ ID NO: 48400 - RNA, 21 nt, Artificial Sequence
  Synthetic
auauuuuccuucuuuaucuuc

SEQ ID NO: 48401 - RNA, 22 nt, Artificial Sequence
  Synthetic
aauauuuuccuucuuuaucuuc

SEQ ID NO: 48402 - RNA, 23 nt, Artificial Sequence
  Synthetic
caauauuuuccuucuuuaucuuc

SEQ ID NO: 48403 - RNA, 24 nt, Artificial Sequence
  Synthetic
ucaauauuuuccuucuuuaucuuc

SEQ ID NO: 48404 - RNA, 18 nt, Artificial Sequence
  Synthetic
ugaaauccaaaacucuuc

SEQ ID NO: 48405 - RNA, 20 nt, Artificial Sequence
  Synthetic
agugaaauccaaaacucuuc

SEQ ID NO: 48406 - RNA, 21 nt, Artificial Sequence
  Synthetic
aagugaaauccaaaacucuuc

SEQ ID NO: 48407 - RNA, 22 nt, Artificial Sequence
  Synthetic
uaagugaaauccaaaacucuuc

SEQ ID NO: 48408 - RNA, 23 nt, Artificial Sequence
  Synthetic
uuaagugaaauccaaaacucuuc

SEQ ID NO: 48409 - RNA, 24 nt, Artificial Sequence
  Synthetic
uuuaagugaaauccaaaacucuuc

SEQ ID NO: 48410 - RNA, 18 nt, Artificial Sequence
  Synthetic
ccacaauagauacucuuc

SEQ ID NO: 48411 - RNA, 19 nt, Artificial Sequence
  Synthetic
accacaauagauacucuuc

SEQ ID NO: 48412 - RNA, 20 nt, Artificial Sequence
  Synthetic
aaccacaauagauacucuuc

SEQ ID NO: 48413 - RNA, 21 nt, Artificial Sequence
  Synthetic
caaccacaauagauacucuuc

SEQ ID NO: 48414 - RNA, 23 nt, Artificial Sequence
  Synthetic
ugcaaccacaauagauacucuuc

SEQ ID NO: 48415 - RNA, 24 nt, Artificial Sequence
  Synthetic
augcaaccacaauagauacucuuc

SEQ ID NO: 48416 - RNA, 18 nt, Artificial Sequence
  Synthetic
cuccuucugguucucuuc

SEQ ID NO: 48417 - RNA, 19 nt, Artificial Sequence
  Synthetic
ccuccuucugguucucuuc

SEQ ID NO: 48418 - RNA, 20 nt, Artificial Sequence
  Synthetic
cccuccuucugguucucuuc

SEQ ID NO: 48419 - RNA, 21 nt, Artificial Sequence
  Synthetic
ucccuccuucugguucucuuc

SEQ ID NO: 48420 - RNA, 22 nt, Artificial Sequence
  Synthetic
cucccuccuucugguucucuuc

SEQ ID NO: 48421 - RNA, 23 nt, Artificial Sequence
  Synthetic
ccucccuccuucugguucucuuc

SEQ ID NO: 48422 - RNA, 24 nt, Artificial Sequence
  Synthetic
cccucccuccuucugguucucuuc

SEQ ID NO: 48423 - RNA, 18 nt, Artificial Sequence
  Synthetic
auaguucucuuucucuuc

SEQ ID NO: 48424 - RNA, 19 nt, Artificial Sequence
  Synthetic
aauaguucucuuucucuuc

SEQ ID NO: 48425 - RNA, 20 nt, Artificial Sequence
  Synthetic
uaauaguucucuuucucuuc

SEQ ID NO: 48426 - RNA, 21 nt, Artificial Sequence
  Synthetic
auaauaguucucuuucucuuc

SEQ ID NO: 48427 - RNA, 22 nt, Artificial Sequence
  Synthetic
uauaauaguucucuuucucuuc

SEQ ID NO: 48428 - RNA, 24 nt, Artificial Sequence
  Synthetic
uguauaauaguucucuuucucuuc

SEQ ID NO: 48429 - RNA, 18 nt, Artificial Sequence
  Synthetic
ugcacuuucccagucuuc

SEQ ID NO: 48430 - RNA, 19 nt, Artificial Sequence
  Synthetic
cugcacuuucccagucuuc

SEQ ID NO: 48431 - RNA, 20 nt, Artificial Sequence
  Synthetic
acugcacuuucccagucuuc

SEQ ID NO: 48432 - RNA, 21 nt, Artificial Sequence
  Synthetic
aacugcacuuucccagucuuc

SEQ ID NO: 48433 - RNA, 22 nt, Artificial Sequence
  Synthetic
aaacugcacuuucccagucuuc

SEQ ID NO: 48434 - RNA, 23 nt, Artificial Sequence
  Synthetic
aaaacugcacuuucccagucuuc

SEQ ID NO: 48435 - RNA, 24 nt, Artificial Sequence
  Synthetic
caaaacugcacuuucccagucuuc

SEQ ID NO: 48436 - RNA, 18 nt, Artificial Sequence
  Synthetic
aaguaccugugagucuuc

SEQ ID NO: 48437 - RNA, 19 nt, Artificial Sequence
  Synthetic
caaguaccugugagucuuc

SEQ ID NO: 48438 - RNA, 20 nt, Artificial Sequence
  Synthetic
acaaguaccugugagucuuc

SEQ ID NO: 48439 - RNA, 21 nt, Artificial Sequence
  Synthetic
uacaaguaccugugagucuuc

SEQ ID NO: 48440 - RNA, 22 nt, Artificial Sequence
  Synthetic
cuacaaguaccugugagucuuc

SEQ ID NO: 48441 - RNA, 23 nt, Artificial Sequence
  Synthetic
acuacaaguaccugugagucuuc

SEQ ID NO: 48442 - RNA, 24 nt, Artificial Sequence
  Synthetic
aacuacaaguaccugugagucuuc

SEQ ID NO: 48443 - RNA, 18 nt, Artificial Sequence
  Synthetic
uugaaaccuugggucuuc

SEQ ID NO: 48444 - RNA, 19 nt, Artificial Sequence
  Synthetic
auugaaaccuugggucuuc

SEQ ID NO: 48445 - RNA, 20 nt, Artificial Sequence
  Synthetic
aauugaaaccuugggucuuc

SEQ ID NO: 48446 - RNA, 19 nt, Artificial Sequence
  Synthetic
ugcaauuugcaccuucuuc

SEQ ID NO: 48447 - RNA, 20 nt, Artificial Sequence
  Synthetic
cugcaauuugcaccuucuuc

SEQ ID NO: 48448 - RNA, 21 nt, Artificial Sequence
  Synthetic
acugcaauuugcaccuucuuc

SEQ ID NO: 48449 - RNA, 22 nt, Artificial Sequence
  Synthetic
uacugcaauuugcaccuucuuc

SEQ ID NO: 48450 - RNA, 23 nt, Artificial Sequence
  Synthetic
cuacugcaauuugcaccuucuuc

SEQ ID NO: 48451 - RNA, 24 nt, Artificial Sequence
  Synthetic
ucuacugcaauuugcaccuucuuc

SEQ ID NO: 48452 - RNA, 18 nt, Artificial Sequence
  Synthetic
cauacacuccuuuucuuc

SEQ ID NO: 48453 - RNA, 19 nt, Artificial Sequence
  Synthetic
ucauacacuccuuuucuuc

SEQ ID NO: 48454 - RNA, 20 nt, Artificial Sequence
  Synthetic
uucauacacuccuuuucuuc

SEQ ID NO: 48455 - RNA, 21 nt, Artificial Sequence
  Synthetic
cuucauacacuccuuuucuuc

SEQ ID NO: 48456 - RNA, 22 nt, Artificial Sequence
  Synthetic
ucuucauacacuccuuuucuuc

SEQ ID NO: 48457 - RNA, 23 nt, Artificial Sequence
  Synthetic
aucuucauacacuccuuuucuuc

SEQ ID NO: 48458 - RNA, 24 nt, Artificial Sequence
  Synthetic
uaucuucauacacuccuuuucuuc

SEQ ID NO: 48459 - RNA, 18 nt, Artificial Sequence
  Synthetic
uauagcacauuuuucuuc

SEQ ID NO: 48460 - RNA, 19 nt, Artificial Sequence
  Synthetic
auauagcacauuuuucuuc

SEQ ID NO: 48461 - RNA, 20 nt, Artificial Sequence
  Synthetic
cauauagcacauuuuucuuc

SEQ ID NO: 48462 - RNA, 21 nt, Artificial Sequence
  Synthetic
ucauauagcacauuuuucuuc

SEQ ID NO: 48463 - RNA, 23 nt, Artificial Sequence
  Synthetic
ugucauauagcacauuuuucuuc

SEQ ID NO: 48464 - RNA, 24 nt, Artificial Sequence
  Synthetic
augucauauagcacauuuuucuuc

SEQ ID NO: 48465 - RNA, 21 nt, Artificial Sequence
  Synthetic
uuaaauacauuuuuuuucuuc

SEQ ID NO: 48466 - RNA, 22 nt, Artificial Sequence
  Synthetic
uuuaaauacauuuuuuuucuuc

SEQ ID NO: 48467 - RNA, 24 nt, Artificial Sequence
  Synthetic
uguuuaaauacauuuuuuuucuuc

SEQ ID NO: 48468 - RNA, 18 nt, Artificial Sequence
  Synthetic
caugcaggaaaaaaguuc

SEQ ID NO: 48469 - RNA, 19 nt, Artificial Sequence
  Synthetic
ccaugcaggaaaaaaguuc

SEQ ID NO: 48470 - RNA, 21 nt, Artificial Sequence
  Synthetic
agccaugcaggaaaaaaguuc

SEQ ID NO: 48471 - RNA, 22 nt, Artificial Sequence
  Synthetic
aagccaugcaggaaaaaaguuc

SEQ ID NO: 48472 - RNA, 23 nt, Artificial Sequence
  Synthetic
aaagccaugcaggaaaaaaguuc

SEQ ID NO: 48473 - RNA, 24 nt, Artificial Sequence
  Synthetic
caaagccaugcaggaaaaaaguuc

SEQ ID NO: 48474 - RNA, 20 nt, Artificial Sequence
  Synthetic
aggagaagaaaugaaaguuc

SEQ ID NO: 48475 - RNA, 23 nt, Artificial Sequence
  Synthetic
aggaggagaagaaaugaaaguuc

SEQ ID NO: 48476 - RNA, 19 nt, Artificial Sequence
  Synthetic
ugcuacuaccaccaaguuc

SEQ ID NO: 48477 - RNA, 20 nt, Artificial Sequence
  Synthetic
augcuacuaccaccaaguuc

SEQ ID NO: 48478 - RNA, 21 nt, Artificial Sequence
  Synthetic
caugcuacuaccaccaaguuc

SEQ ID NO: 48479 - RNA, 22 nt, Artificial Sequence
  Synthetic
ccaugcuacuaccaccaaguuc

SEQ ID NO: 48480 - RNA, 23 nt, Artificial Sequence
  Synthetic
uccaugcuacuaccaccaaguuc

SEQ ID NO: 48481 - RNA, 24 nt, Artificial Sequence
  Synthetic
auccaugcuacuaccaccaaguuc

SEQ ID NO: 48482 - RNA, 18 nt, Artificial Sequence
  Synthetic
aguuuauuugagaaguuc

SEQ ID NO: 48483 - RNA, 19 nt, Artificial Sequence
  Synthetic
caguuuauuugagaaguuc

SEQ ID NO: 48484 - RNA, 20 nt, Artificial Sequence
  Synthetic
ucaguuuauuugagaaguuc

SEQ ID NO: 48485 - RNA, 23 nt, Artificial Sequence
  Synthetic
aggucaguuuauuugagaaguuc

SEQ ID NO: 48486 - RNA, 24 nt, Artificial Sequence
  Synthetic
aaggucaguuuauuugagaaguuc

SEQ ID NO: 48487 - RNA, 19 nt, Artificial Sequence
  Synthetic
ugcuugacaacugaaguuc

SEQ ID NO: 48488 - RNA, 21 nt, Artificial Sequence
  Synthetic
agugcuugacaacugaaguuc

SEQ ID NO: 48489 - RNA, 22 nt, Artificial Sequence
  Synthetic
aagugcuugacaacugaaguuc

SEQ ID NO: 48490 - RNA, 23 nt, Artificial Sequence
  Synthetic
uaagugcuugacaacugaaguuc

SEQ ID NO: 48491 - RNA, 24 nt, Artificial Sequence
  Synthetic
auaagugcuugacaacugaaguuc

SEQ ID NO: 48492 - RNA, 18 nt, Artificial Sequence
  Synthetic
aagccuuagguuaaguuc

SEQ ID NO: 48493 - RNA, 20 nt, Artificial Sequence
  Synthetic
agaagccuuagguuaaguuc

SEQ ID NO: 48494 - RNA, 21 nt, Artificial Sequence
  Synthetic
uagaagccuuagguuaaguuc

SEQ ID NO: 48495 - RNA, 22 nt, Artificial Sequence
  Synthetic
auagaagccuuagguuaaguuc

SEQ ID NO: 48496 - RNA, 23 nt, Artificial Sequence
  Synthetic
aauagaagccuuagguuaaguuc

SEQ ID NO: 48497 - RNA, 24 nt, Artificial Sequence
  Synthetic
aaauagaagccuuagguuaaguuc

SEQ ID NO: 48498 - RNA, 21 nt, Artificial Sequence
  Synthetic
ucucagggaagccaucaguuc

SEQ ID NO: 48499 - RNA, 23 nt, Artificial Sequence
  Synthetic
cgucucagggaagccaucaguuc

SEQ ID NO: 48500 - RNA, 24 nt, Artificial Sequence
  Synthetic
ucgucucagggaagccaucaguuc

SEQ ID NO: 48501 - RNA, 21 nt, Artificial Sequence
  Synthetic
aaugaccacauuacucaguuc

SEQ ID NO: 48502 - RNA, 22 nt, Artificial Sequence
  Synthetic
caaugaccacauuacucaguuc

SEQ ID NO: 48503 - RNA, 24 nt, Artificial Sequence
  Synthetic
ugcaaugaccacauuacucaguuc

SEQ ID NO: 48504 - RNA, 18 nt, Artificial Sequence
  Synthetic
aagccugauaacuaguuc

SEQ ID NO: 48505 - RNA, 19 nt, Artificial Sequence
  Synthetic
caagccugauaacuaguuc

SEQ ID NO: 48506 - RNA, 20 nt, Artificial Sequence
  Synthetic
ccaagccugauaacuaguuc

SEQ ID NO: 48507 - RNA, 22 nt, Artificial Sequence
  Synthetic
ugccaagccugauaacuaguuc

SEQ ID NO: 48508 - RNA, 23 nt, Artificial Sequence
  Synthetic
cugccaagccugauaacuaguuc

SEQ ID NO: 48509 - RNA, 24 nt, Artificial Sequence
  Synthetic
ucugccaagccugauaacuaguuc

SEQ ID NO: 48510 - RNA, 19 nt, Artificial Sequence
  Synthetic
aguggaaauaaauuaguuc

SEQ ID NO: 48511 - RNA, 20 nt, Artificial Sequence
  Synthetic
caguggaaauaaauuaguuc

SEQ ID NO: 48512 - RNA, 21 nt, Artificial Sequence
  Synthetic
ucaguggaaauaaauuaguuc

SEQ ID NO: 48513 - RNA, 22 nt, Artificial Sequence
  Synthetic
cucaguggaaauaaauuaguuc

SEQ ID NO: 48514 - RNA, 23 nt, Artificial Sequence
  Synthetic
acucaguggaaauaaauuaguuc

SEQ ID NO: 48515 - RNA, 24 nt, Artificial Sequence
  Synthetic
aacucaguggaaauaaauuaguuc

SEQ ID NO: 48516 - RNA, 18 nt, Artificial Sequence
  Synthetic
ugguacacaaggccguuc

SEQ ID NO: 48517 - RNA, 19 nt, Artificial Sequence
  Synthetic
uugguacacaaggccguuc

SEQ ID NO: 48518 - RNA, 20 nt, Artificial Sequence
  Synthetic
cuugguacacaaggccguuc

SEQ ID NO: 48519 - RNA, 22 nt, Artificial Sequence
  Synthetic
agcuugguacacaaggccguuc

SEQ ID NO: 48520 - RNA, 23 nt, Artificial Sequence
  Synthetic
cagcuugguacacaaggccguuc

SEQ ID NO: 48521 - RNA, 24 nt, Artificial Sequence
  Synthetic
ucagcuugguacacaaggccguuc

SEQ ID NO: 48522 - RNA, 18 nt, Artificial Sequence
  Synthetic
uuugguaugguaugguuc

SEQ ID NO: 48523 - RNA, 20 nt, Artificial Sequence
  Synthetic
aguuugguaugguaugguuc

SEQ ID NO: 48524 - RNA, 21 nt, Artificial Sequence
  Synthetic
aaguuugguaugguaugguuc

SEQ ID NO: 48525 - RNA, 24 nt, Artificial Sequence
  Synthetic
aggaaguuugguaugguaugguuc

SEQ ID NO: 48526 - RNA, 19 nt, Artificial Sequence
  Synthetic
aguuaggauauuaugguuc

SEQ ID NO: 48527 - RNA, 20 nt, Artificial Sequence
  Synthetic
uaguuaggauauuaugguuc

SEQ ID NO: 48528 - RNA, 21 nt, Artificial Sequence
  Synthetic
auaguuaggauauuaugguuc

SEQ ID NO: 48529 - RNA, 22 nt, Artificial Sequence
  Synthetic
cauaguuaggauauuaugguuc

SEQ ID NO: 48530 - RNA, 23 nt, Artificial Sequence
  Synthetic
ccauaguuaggauauuaugguuc

SEQ ID NO: 48531 - RNA, 24 nt, Artificial Sequence
  Synthetic
accauaguuaggauauuaugguuc

SEQ ID NO: 48532 - RNA, 18 nt, Artificial Sequence
  Synthetic
ccaugaaucccuugguuc

SEQ ID NO: 48533 - RNA, 19 nt, Artificial Sequence
  Synthetic
uccaugaaucccuugguuc

SEQ ID NO: 48534 - RNA, 20 nt, Artificial Sequence
  Synthetic
uuccaugaaucccuugguuc

SEQ ID NO: 48535 - RNA, 21 nt, Artificial Sequence
  Synthetic
uuuccaugaaucccuugguuc

SEQ ID NO: 48536 - RNA, 22 nt, Artificial Sequence
  Synthetic
uuuuccaugaaucccuugguuc

SEQ ID NO: 48537 - RNA, 23 nt, Artificial Sequence
  Synthetic
uuuuuccaugaaucccuugguuc

SEQ ID NO: 48538 - RNA, 24 nt, Artificial Sequence
  Synthetic
auuuuuccaugaaucccuugguuc

SEQ ID NO: 48539 - RNA, 18 nt, Artificial Sequence
  Synthetic
ucauaguuggaaauguuc

SEQ ID NO: 48540 - RNA, 19 nt, Artificial Sequence
  Synthetic
cucauaguuggaaauguuc

SEQ ID NO: 48541 - RNA, 20 nt, Artificial Sequence
  Synthetic
ucucauaguuggaaauguuc

SEQ ID NO: 48542 - RNA, 21 nt, Artificial Sequence
  Synthetic
uucucauaguuggaaauguuc

SEQ ID NO: 48543 - RNA, 22 nt, Artificial Sequence
  Synthetic
uuucucauaguuggaaauguuc

SEQ ID NO: 48544 - RNA, 24 nt, Artificial Sequence
  Synthetic
aguuucucauaguuggaaauguuc

SEQ ID NO: 48545 - RNA, 18 nt, Artificial Sequence
  Synthetic
auuacacccaucauguuc

SEQ ID NO: 48546 - RNA, 20 nt, Artificial Sequence
  Synthetic
agauuacacccaucauguuc

SEQ ID NO: 48547 - RNA, 21 nt, Artificial Sequence
  Synthetic
cagauuacacccaucauguuc

SEQ ID NO: 48548 - RNA, 22 nt, Artificial Sequence
  Synthetic
ccagauuacacccaucauguuc

SEQ ID NO: 48549 - RNA, 23 nt, Artificial Sequence
  Synthetic
uccagauuacacccaucauguuc

SEQ ID NO: 48550 - RNA, 24 nt, Artificial Sequence
  Synthetic
cuccagauuacacccaucauguuc

SEQ ID NO: 48551 - RNA, 18 nt, Artificial Sequence
  Synthetic
aagacgggaaagauguuc

SEQ ID NO: 48552 - RNA, 19 nt, Artificial Sequence
  Synthetic
aaagacgggaaagauguuc

SEQ ID NO: 48553 - RNA, 22 nt, Artificial Sequence
  Synthetic
aggaaagacgggaaagauguuc

SEQ ID NO: 48554 - RNA, 23 nt, Artificial Sequence
  Synthetic
aaggaaagacgggaaagauguuc

SEQ ID NO: 48555 - RNA, 24 nt, Artificial Sequence
  Synthetic
aaaggaaagacgggaaagauguuc

SEQ ID NO: 48556 - RNA, 18 nt, Artificial Sequence
  Synthetic
aaauggauuaagauguuc

SEQ ID NO: 48557 - RNA, 19 nt, Artificial Sequence
  Synthetic
caaauggauuaagauguuc

SEQ ID NO: 48558 - RNA, 20 nt, Artificial Sequence
  Synthetic
ccaaauggauuaagauguuc

SEQ ID NO: 48559 - RNA, 21 nt, Artificial Sequence
  Synthetic
accaaauggauuaagauguuc

SEQ ID NO: 48560 - RNA, 22 nt, Artificial Sequence
  Synthetic
caccaaauggauuaagauguuc

SEQ ID NO: 48561 - RNA, 23 nt, Artificial Sequence
  Synthetic
ucaccaaauggauuaagauguuc

SEQ ID NO: 48562 - RNA, 24 nt, Artificial Sequence
  Synthetic
uucaccaaauggauuaagauguuc

SEQ ID NO: 48563 - RNA, 18 nt, Artificial Sequence
  Synthetic
cgauuauucaugauguuc

SEQ ID NO: 48564 - RNA, 19 nt, Artificial Sequence
  Synthetic
acgauuauucaugauguuc

SEQ ID NO: 48565 - RNA, 20 nt, Artificial Sequence
  Synthetic
uacgauuauucaugauguuc

SEQ ID NO: 48566 - RNA, 21 nt, Artificial Sequence
  Synthetic
auacgauuauucaugauguuc

SEQ ID NO: 48567 - RNA, 24 nt, Artificial Sequence
  Synthetic
uggauacgauuauucaugauguuc

SEQ ID NO: 48568 - RNA, 18 nt, Artificial Sequence
  Synthetic
uugcucuaagguauguuc

SEQ ID NO: 48569 - RNA, 19 nt, Artificial Sequence
  Synthetic
auugcucuaagguauguuc

SEQ ID NO: 48570 - RNA, 20 nt, Artificial Sequence
  Synthetic
uauugcucuaagguauguuc

SEQ ID NO: 48571 - RNA, 22 nt, Artificial Sequence
  Synthetic
aguauugcucuaagguauguuc

SEQ ID NO: 48572 - RNA, 24 nt, Artificial Sequence
  Synthetic
agaguauugcucuaagguauguuc

SEQ ID NO: 48573 - RNA, 18 nt, Artificial Sequence
  Synthetic
ugacccaaaauucuguuc

SEQ ID NO: 48574 - RNA, 19 nt, Artificial Sequence
  Synthetic
cugacccaaaauucuguuc

SEQ ID NO: 48575 - RNA, 20 nt, Artificial Sequence
  Synthetic
ucugacccaaaauucuguuc

SEQ ID NO: 48576 - RNA, 21 nt, Artificial Sequence
  Synthetic
cucugacccaaaauucuguuc

SEQ ID NO: 48577 - RNA, 23 nt, Artificial Sequence
  Synthetic
ugcucugacccaaaauucuguuc

SEQ ID NO: 48578 - RNA, 24 nt, Artificial Sequence
  Synthetic
augcucugacccaaaauucuguuc

SEQ ID NO: 48579 - RNA, 18 nt, Artificial Sequence
  Synthetic
auguuucuucaaguguuc

SEQ ID NO: 48580 - RNA, 19 nt, Artificial Sequence
  Synthetic
cauguuucuucaaguguuc

SEQ ID NO: 48581 - RNA, 20 nt, Artificial Sequence
  Synthetic
acauguuucuucaaguguuc

SEQ ID NO: 48582 - RNA, 21 nt, Artificial Sequence
  Synthetic
aacauguuucuucaaguguuc

SEQ ID NO: 48583 - RNA, 22 nt, Artificial Sequence
  Synthetic
uaacauguuucuucaaguguuc

SEQ ID NO: 48584 - RNA, 23 nt, Artificial Sequence
  Synthetic
auaacauguuucuucaaguguuc

SEQ ID NO: 48585 - RNA, 18 nt, Artificial Sequence
  Synthetic
cuucugagaacaguguuc

SEQ ID NO: 48586 - RNA, 19 nt, Artificial Sequence
  Synthetic
ccuucugagaacaguguuc

SEQ ID NO: 48587 - RNA, 20 nt, Artificial Sequence
  Synthetic
cccuucugagaacaguguuc

SEQ ID NO: 48588 - RNA, 22 nt, Artificial Sequence
  Synthetic
ugcccuucugagaacaguguuc

SEQ ID NO: 48589 - RNA, 23 nt, Artificial Sequence
  Synthetic
cugcccuucugagaacaguguuc

SEQ ID NO: 48590 - RNA, 24 nt, Artificial Sequence
  Synthetic
acugcccuucugagaacaguguuc

SEQ ID NO: 48591 - RNA, 18 nt, Artificial Sequence
  Synthetic
cagagcuguucaguguuc

SEQ ID NO: 48592 - RNA, 20 nt, Artificial Sequence
  Synthetic
ugcagagcuguucaguguuc

SEQ ID NO: 48593 - RNA, 21 nt, Artificial Sequence
  Synthetic
cugcagagcuguucaguguuc

SEQ ID NO: 48594 - RNA, 22 nt, Artificial Sequence
  Synthetic
ccugcagagcuguucaguguuc

SEQ ID NO: 48595 - RNA, 23 nt, Artificial Sequence
  Synthetic
cccugcagagcuguucaguguuc

SEQ ID NO: 48596 - RNA, 18 nt, Artificial Sequence
  Synthetic
uuccagaauuauguguuc

SEQ ID NO: 48597 - RNA, 19 nt, Artificial Sequence
  Synthetic
cuuccagaauuauguguuc

SEQ ID NO: 48598 - RNA, 20 nt, Artificial Sequence
  Synthetic
acuuccagaauuauguguuc

SEQ ID NO: 48599 - RNA, 22 nt, Artificial Sequence
  Synthetic
agacuuccagaauuauguguuc

SEQ ID NO: 48600 - RNA, 23 nt, Artificial Sequence
  Synthetic
aagacuuccagaauuauguguuc

SEQ ID NO: 48601 - RNA, 24 nt, Artificial Sequence
  Synthetic
caagacuuccagaauuauguguuc

SEQ ID NO: 48602 - RNA, 18 nt, Artificial Sequence
  Synthetic
uucugauuaacuguguuc

SEQ ID NO: 48603 - RNA, 19 nt, Artificial Sequence
  Synthetic
auucugauuaacuguguuc

SEQ ID NO: 48604 - RNA, 20 nt, Artificial Sequence
  Synthetic
uauucugauuaacuguguuc

SEQ ID NO: 48605 - RNA, 21 nt, Artificial Sequence
  Synthetic
uuauucugauuaacuguguuc

SEQ ID NO: 48606 - RNA, 22 nt, Artificial Sequence
  Synthetic
auuauucugauuaacuguguuc

SEQ ID NO: 48607 - RNA, 23 nt, Artificial Sequence
  Synthetic
aauuauucugauuaacuguguuc

SEQ ID NO: 48608 - RNA, 18 nt, Artificial Sequence
  Synthetic
auacuuaacuuguuguuc

SEQ ID NO: 48609 - RNA, 20 nt, Artificial Sequence
  Synthetic
agauacuuaacuuguuguuc

SEQ ID NO: 48610 - RNA, 21 nt, Artificial Sequence
  Synthetic
uagauacuuaacuuguuguuc

SEQ ID NO: 48611 - RNA, 24 nt, Artificial Sequence
  Synthetic
agguagauacuuaacuuguuguuc

SEQ ID NO: 48612 - RNA, 19 nt, Artificial Sequence
  Synthetic
aguuaaauuauguuuguuc

SEQ ID NO: 48613 - RNA, 20 nt, Artificial Sequence
  Synthetic
uaguuaaauuauguuuguuc

SEQ ID NO: 48614 - RNA, 21 nt, Artificial Sequence
  Synthetic
auaguuaaauuauguuuguuc

SEQ ID NO: 48615 - RNA, 22 nt, Artificial Sequence
  Synthetic
uauaguuaaauuauguuuguuc

SEQ ID NO: 48616 - RNA, 23 nt, Artificial Sequence
  Synthetic
cuauaguuaaauuauguuuguuc

SEQ ID NO: 48617 - RNA, 24 nt, Artificial Sequence
  Synthetic
ucuauaguuaaauuauguuuguuc

SEQ ID NO: 48618 - RNA, 18 nt, Artificial Sequence
  Synthetic
aaauuacuuguuuuguuc

SEQ ID NO: 48619 - RNA, 19 nt, Artificial Sequence
  Synthetic
aaaauuacuuguuuuguuc

SEQ ID NO: 48620 - RNA, 20 nt, Artificial Sequence
  Synthetic
aaaaauuacuuguuuuguuc

SEQ ID NO: 48621 - RNA, 21 nt, Artificial Sequence
  Synthetic
uaaaaauuacuuguuuuguuc

SEQ ID NO: 48622 - RNA, 23 nt, Artificial Sequence
  Synthetic
aguaaaaauuacuuguuuuguuc

SEQ ID NO: 48623 - RNA, 24 nt, Artificial Sequence
  Synthetic
caguaaaaauuacuuguuuuguuc

SEQ ID NO: 48624 - RNA, 18 nt, Artificial Sequence
  Synthetic
aaaccccuggaaaauuuc

SEQ ID NO: 48625 - RNA, 19 nt, Artificial Sequence
  Synthetic
caaaccccuggaaaauuuc

SEQ ID NO: 48626 - RNA, 20 nt, Artificial Sequence
  Synthetic
acaaaccccuggaaaauuuc

SEQ ID NO: 48627 - RNA, 21 nt, Artificial Sequence
  Synthetic
uacaaaccccuggaaaauuuc

SEQ ID NO: 48628 - RNA, 22 nt, Artificial Sequence
  Synthetic
uuacaaaccccuggaaaauuuc

SEQ ID NO: 48629 - RNA, 23 nt, Artificial Sequence
  Synthetic
uuuacaaaccccuggaaaauuuc

SEQ ID NO: 48630 - RNA, 24 nt, Artificial Sequence
  Synthetic
uuuuacaaaccccuggaaaauuuc

SEQ ID NO: 48631 - RNA, 18 nt, Artificial Sequence
  Synthetic
uaguuucuuugaaauuuc

SEQ ID NO: 48632 - RNA, 19 nt, Artificial Sequence
  Synthetic
cuaguuucuuugaaauuuc

SEQ ID NO: 48633 - RNA, 20 nt, Artificial Sequence
  Synthetic
ucuaguuucuuugaaauuuc

SEQ ID NO: 48634 - RNA, 21 nt, Artificial Sequence
  Synthetic
uucuaguuucuuugaaauuuc

SEQ ID NO: 48635 - RNA, 22 nt, Artificial Sequence
  Synthetic
uuucuaguuucuuugaaauuuc

SEQ ID NO: 48636 - RNA, 23 nt, Artificial Sequence
  Synthetic
cuuucuaguuucuuugaaauuuc

SEQ ID NO: 48637 - RNA, 24 nt, Artificial Sequence
  Synthetic
ucuuucuaguuucuuugaaauuuc

SEQ ID NO: 48638 - RNA, 22 nt, Artificial Sequence
  Synthetic
uguuaagauauuuguaaauuuc

SEQ ID NO: 48639 - RNA, 23 nt, Artificial Sequence
  Synthetic
auguuaagauauuuguaaauuuc

SEQ ID NO: 48640 - RNA, 24 nt, Artificial Sequence
  Synthetic
aauguuaagauauuuguaaauuuc

SEQ ID NO: 48641 - RNA, 18 nt, Artificial Sequence
  Synthetic
auguccucccucaauuuc

SEQ ID NO: 48642 - RNA, 19 nt, Artificial Sequence
  Synthetic
aauguccucccucaauuuc

SEQ ID NO: 48643 - RNA, 20 nt, Artificial Sequence
  Synthetic
aaauguccucccucaauuuc

SEQ ID NO: 48644 - RNA, 21 nt, Artificial Sequence
  Synthetic
caaauguccucccucaauuuc

SEQ ID NO: 48645 - RNA, 22 nt, Artificial Sequence
  Synthetic
ucaaauguccucccucaauuuc

SEQ ID NO: 48646 - RNA, 24 nt, Artificial Sequence
  Synthetic
agucaaauguccucccucaauuuc

SEQ ID NO: 48647 - RNA, 18 nt, Artificial Sequence
  Synthetic
ucucaaggccucaauuuc

SEQ ID NO: 48648 - RNA, 19 nt, Artificial Sequence
  Synthetic
uucucaaggccucaauuuc

SEQ ID NO: 48649 - RNA, 20 nt, Artificial Sequence
  Synthetic
cuucucaaggccucaauuuc

SEQ ID NO: 48650 - RNA, 21 nt, Artificial Sequence
  Synthetic
ccuucucaaggccucaauuuc

SEQ ID NO: 48651 - RNA, 22 nt, Artificial Sequence
  Synthetic
cccuucucaaggccucaauuuc

SEQ ID NO: 48652 - RNA, 23 nt, Artificial Sequence
  Synthetic
ccccuucucaaggccucaauuuc

SEQ ID NO: 48653 - RNA, 24 nt, Artificial Sequence
  Synthetic
uccccuucucaaggccucaauuuc

SEQ ID NO: 48654 - RNA, 18 nt, Artificial Sequence
  Synthetic
cuggaaacaaagaauuuc

SEQ ID NO: 48655 - RNA, 19 nt, Artificial Sequence
  Synthetic
acuggaaacaaagaauuuc

SEQ ID NO: 48656 - RNA, 20 nt, Artificial Sequence
  Synthetic
cacuggaaacaaagaauuuc

SEQ ID NO: 48657 - RNA, 21 nt, Artificial Sequence
  Synthetic
acacuggaaacaaagaauuuc

SEQ ID NO: 48658 - RNA, 22 nt, Artificial Sequence
  Synthetic
uacacuggaaacaaagaauuuc

SEQ ID NO: 48659 - RNA, 23 nt, Artificial Sequence
  Synthetic
auacacuggaaacaaagaauuuc

SEQ ID NO: 48660 - RNA, 24 nt, Artificial Sequence
  Synthetic
uauacacuggaaacaaagaauuuc

SEQ ID NO: 48661 - RNA, 18 nt, Artificial Sequence
  Synthetic
ccuaggauugagaauuuc

SEQ ID NO: 48662 - RNA, 20 nt, Artificial Sequence
  Synthetic
agccuaggauugagaauuuc

SEQ ID NO: 48663 - RNA, 21 nt, Artificial Sequence
  Synthetic
uagccuaggauugagaauuuc

SEQ ID NO: 48664 - RNA, 22 nt, Artificial Sequence
  Synthetic
cuagccuaggauugagaauuuc

SEQ ID NO: 48665 - RNA, 24 nt, Artificial Sequence
  Synthetic
ugcuagccuaggauugagaauuuc

SEQ ID NO: 48666 - RNA, 18 nt, Artificial Sequence
  Synthetic
aguucaaaguuuaauuuc

SEQ ID NO: 48667 - RNA, 19 nt, Artificial Sequence
  Synthetic
aaguucaaaguuuaauuuc

SEQ ID NO: 48668 - RNA, 21 nt, Artificial Sequence
  Synthetic
ugaaguucaaaguuuaauuuc

SEQ ID NO: 48669 - RNA, 22 nt, Artificial Sequence
  Synthetic
augaaguucaaaguuuaauuuc

SEQ ID NO: 48670 - RNA, 23 nt, Artificial Sequence
  Synthetic
caugaaguucaaaguuuaauuuc

SEQ ID NO: 48671 - RNA, 24 nt, Artificial Sequence
  Synthetic
acaugaaguucaaaguuuaauuuc

SEQ ID NO: 48672 - RNA, 18 nt, Artificial Sequence
  Synthetic
ugcugaugguuuaauuuc

SEQ ID NO: 48673 - RNA, 19 nt, Artificial Sequence
  Synthetic
uugcugaugguuuaauuuc

SEQ ID NO: 48674 - RNA, 21 nt, Artificial Sequence
  Synthetic
cguugcugaugguuuaauuuc

SEQ ID NO: 48675 - RNA, 22 nt, Artificial Sequence
  Synthetic
acguugcugaugguuuaauuuc

SEQ ID NO: 48676 - RNA, 23 nt, Artificial Sequence
  Synthetic
cacguugcugaugguuuaauuuc

SEQ ID NO: 48677 - RNA, 24 nt, Artificial Sequence
  Synthetic
acacguugcugaugguuuaauuuc

SEQ ID NO: 48678 - RNA, 18 nt, Artificial Sequence
  Synthetic
aggacauuauaacauuuc

SEQ ID NO: 48679 - RNA, 20 nt, Artificial Sequence
  Synthetic
cgaggacauuauaacauuuc

SEQ ID NO: 48680 - RNA, 21 nt, Artificial Sequence
  Synthetic
ccgaggacauuauaacauuuc

SEQ ID NO: 48681 - RNA, 22 nt, Artificial Sequence
  Synthetic
accgaggacauuauaacauuuc

SEQ ID NO: 48682 - RNA, 23 nt, Artificial Sequence
  Synthetic
aaccgaggacauuauaacauuuc

SEQ ID NO: 48683 - RNA, 24 nt, Artificial Sequence
  Synthetic
aaaccgaggacauuauaacauuuc

SEQ ID NO: 48684 - RNA, 18 nt, Artificial Sequence
  Synthetic
aaggucuauguacauuuc

SEQ ID NO: 48685 - RNA, 19 nt, Artificial Sequence
  Synthetic
aaaggucuauguacauuuc

SEQ ID NO: 48686 - RNA, 20 nt, Artificial Sequence
  Synthetic
uaaaggucuauguacauuuc

SEQ ID NO: 48687 - RNA, 21 nt, Artificial Sequence
  Synthetic
auaaaggucuauguacauuuc

SEQ ID NO: 48688 - RNA, 22 nt, Artificial Sequence
  Synthetic
aauaaaggucuauguacauuuc

SEQ ID NO: 48689 - RNA, 24 nt, Artificial Sequence
  Synthetic
ugaauaaaggucuauguacauuuc

SEQ ID NO: 48690 - RNA, 18 nt, Artificial Sequence
  Synthetic
aaaugauaauuacauuuc

SEQ ID NO: 48691 - RNA, 19 nt, Artificial Sequence
  Synthetic
aaaaugauaauuacauuuc

SEQ ID NO: 48692 - RNA, 21 nt, Artificial Sequence
  Synthetic
agaaaaugauaauuacauuuc

SEQ ID NO: 48693 - RNA, 23 nt, Artificial Sequence
  Synthetic
agagaaaaugauaauuacauuuc

SEQ ID NO: 48694 - RNA, 18 nt, Artificial Sequence
  Synthetic
aguuagugaacccauuuc

SEQ ID NO: 48695 - RNA, 19 nt, Artificial Sequence
  Synthetic
caguuagugaacccauuuc

SEQ ID NO: 48696 - RNA, 22 nt, Artificial Sequence
  Synthetic
uggcaguuagugaacccauuuc

SEQ ID NO: 48697 - RNA, 23 nt, Artificial Sequence
  Synthetic
uuggcaguuagugaacccauuuc

SEQ ID NO: 48698 - RNA, 24 nt, Artificial Sequence
  Synthetic
cuuggcaguuagugaacccauuuc

SEQ ID NO: 48699 - RNA, 18 nt, Artificial Sequence
  Synthetic
aauuuuuucauccauuuc

SEQ ID NO: 48700 - RNA, 19 nt, Artificial Sequence
  Synthetic
uaauuuuuucauccauuuc

SEQ ID NO: 48701 - RNA, 21 nt, Artificial Sequence
  Synthetic
uguaauuuuuucauccauuuc

SEQ ID NO: 48702 - RNA, 22 nt, Artificial Sequence
  Synthetic
cuguaauuuuuucauccauuuc

SEQ ID NO: 48703 - RNA, 24 nt, Artificial Sequence
  Synthetic
agcuguaauuuuuucauccauuuc

SEQ ID NO: 48704 - RNA, 18 nt, Artificial Sequence
  Synthetic
uuuuuauguauccauuuc

SEQ ID NO: 48705 - RNA, 19 nt, Artificial Sequence
  Synthetic
uuuuuuauguauccauuuc

SEQ ID NO: 48706 - RNA, 20 nt, Artificial Sequence
  Synthetic
auuuuuuauguauccauuuc

SEQ ID NO: 48707 - RNA, 21 nt, Artificial Sequence
  Synthetic
aauuuuuuauguauccauuuc

SEQ ID NO: 48708 - RNA, 22 nt, Artificial Sequence
  Synthetic
aaauuuuuuauguauccauuuc

SEQ ID NO: 48709 - RNA, 24 nt, Artificial Sequence
  Synthetic
ugaaauuuuuuauguauccauuuc

SEQ ID NO: 48710 - RNA, 18 nt, Artificial Sequence
  Synthetic
aauaggcauugugauuuc

SEQ ID NO: 48711 - RNA, 19 nt, Artificial Sequence
  Synthetic
uaauaggcauugugauuuc

SEQ ID NO: 48712 - RNA, 20 nt, Artificial Sequence
  Synthetic
uuaauaggcauugugauuuc

SEQ ID NO: 48713 - RNA, 21 nt, Artificial Sequence
  Synthetic
auuaauaggcauugugauuuc

SEQ ID NO: 48714 - RNA, 22 nt, Artificial Sequence
  Synthetic
cauuaauaggcauugugauuuc

SEQ ID NO: 48715 - RNA, 23 nt, Artificial Sequence
  Synthetic
acauuaauaggcauugugauuuc

SEQ ID NO: 48716 - RNA, 24 nt, Artificial Sequence
  Synthetic
aacauuaauaggcauugugauuuc

SEQ ID NO: 48717 - RNA, 21 nt, Artificial Sequence
  Synthetic
aucaguauuuuaaaauauuuc

SEQ ID NO: 48718 - RNA, 22 nt, Artificial Sequence
  Synthetic
caucaguauuuuaaaauauuuc

SEQ ID NO: 48719 - RNA, 23 nt, Artificial Sequence
  Synthetic
acaucaguauuuuaaaauauuuc

SEQ ID NO: 48720 - RNA, 22 nt, Artificial Sequence
  Synthetic
agguuuuuucaacaaauauuuc

SEQ ID NO: 48721 - RNA, 23 nt, Artificial Sequence
  Synthetic
uagguuuuuucaacaaauauuuc

SEQ ID NO: 48722 - RNA, 18 nt, Artificial Sequence
  Synthetic
caguaaguuuaauauuuc

SEQ ID NO: 48723 - RNA, 19 nt, Artificial Sequence
  Synthetic
ccaguaaguuuaauauuuc

SEQ ID NO: 48724 - RNA, 20 nt, Artificial Sequence
  Synthetic
uccaguaaguuuaauauuuc

SEQ ID NO: 48725 - RNA, 21 nt, Artificial Sequence
  Synthetic
cuccaguaaguuuaauauuuc

SEQ ID NO: 48726 - RNA, 22 nt, Artificial Sequence
  Synthetic
ucuccaguaaguuuaauauuuc

SEQ ID NO: 48727 - RNA, 23 nt, Artificial Sequence
  Synthetic
uucuccaguaaguuuaauauuuc

SEQ ID NO: 48728 - RNA, 21 nt, Artificial Sequence
  Synthetic
uguaaaugaaauacauauuuc

SEQ ID NO: 48729 - RNA, 22 nt, Artificial Sequence
  Synthetic
auguaaaugaaauacauauuuc

SEQ ID NO: 48730 - RNA, 23 nt, Artificial Sequence
  Synthetic
aauguaaaugaaauacauauuuc

SEQ ID NO: 48731 - RNA, 24 nt, Artificial Sequence
  Synthetic
caauguaaaugaaauacauauuuc

SEQ ID NO: 48732 - RNA, 19 nt, Artificial Sequence
  Synthetic
uggauauuagauauauuuc

SEQ ID NO: 48733 - RNA, 20 nt, Artificial Sequence
  Synthetic
auggauauuagauauauuuc

SEQ ID NO: 48734 - RNA, 21 nt, Artificial Sequence
  Synthetic
aauggauauuagauauauuuc

SEQ ID NO: 48735 - RNA, 22 nt, Artificial Sequence
  Synthetic
aaauggauauuagauauauuuc

SEQ ID NO: 48736 - RNA, 23 nt, Artificial Sequence
  Synthetic
aaaauggauauuagauauauuuc

SEQ ID NO: 48737 - RNA, 24 nt, Artificial Sequence
  Synthetic
uaaaauggauauuagauauauuuc

SEQ ID NO: 48738 - RNA, 20 nt, Artificial Sequence
  Synthetic
uggagagggaaggguauuuc

SEQ ID NO: 48739 - RNA, 21 nt, Artificial Sequence
  Synthetic
cuggagagggaaggguauuuc

SEQ ID NO: 48740 - RNA, 23 nt, Artificial Sequence
  Synthetic
agcuggagagggaaggguauuuc

SEQ ID NO: 48741 - RNA, 24 nt, Artificial Sequence
  Synthetic
aagcuggagagggaaggguauuuc

SEQ ID NO: 48742 - RNA, 18 nt, Artificial Sequence
  Synthetic
ugaugcuagguuuauuuc

SEQ ID NO: 48743 - RNA, 21 nt, Artificial Sequence
  Synthetic
aggugaugcuagguuuauuuc

SEQ ID NO: 48744 - RNA, 22 nt, Artificial Sequence
  Synthetic
aaggugaugcuagguuuauuuc

SEQ ID NO: 48745 - RNA, 24 nt, Artificial Sequence
  Synthetic
ugaaggugaugcuagguuuauuuc

SEQ ID NO: 48746 - RNA, 18 nt, Artificial Sequence
  Synthetic
cuacacuuucccacuuuc

SEQ ID NO: 48747 - RNA, 19 nt, Artificial Sequence
  Synthetic
ccuacacuuucccacuuuc

SEQ ID NO: 48748 - RNA, 20 nt, Artificial Sequence
  Synthetic
uccuacacuuucccacuuuc

SEQ ID NO: 48749 - RNA, 21 nt, Artificial Sequence
  Synthetic
uuccuacacuuucccacuuuc

SEQ ID NO: 48750 - RNA, 22 nt, Artificial Sequence
  Synthetic
cuuccuacacuuucccacuuuc

SEQ ID NO: 48751 - RNA, 23 nt, Artificial Sequence
  Synthetic
acuuccuacacuuucccacuuuc

SEQ ID NO: 48752 - RNA, 24 nt, Artificial Sequence
  Synthetic
cacuuccuacacuuucccacuuuc

SEQ ID NO: 48753 - RNA, 18 nt, Artificial Sequence
  Synthetic
ugaauaguuaucacuuuc

SEQ ID NO: 48754 - RNA, 20 nt, Artificial Sequence
  Synthetic
ugugaauaguuaucacuuuc

SEQ ID NO: 48755 - RNA, 21 nt, Artificial Sequence
  Synthetic
uugugaauaguuaucacuuuc

SEQ ID NO: 48756 - RNA, 22 nt, Artificial Sequence
  Synthetic
cuugugaauaguuaucacuuuc

SEQ ID NO: 48757 - RNA, 23 nt, Artificial Sequence
  Synthetic
acuugugaauaguuaucacuuuc

SEQ ID NO: 48758 - RNA, 24 nt, Artificial Sequence
  Synthetic
uacuugugaauaguuaucacuuuc

SEQ ID NO: 48759 - RNA, 18 nt, Artificial Sequence
  Synthetic
uucuucucuauuacuuuc

SEQ ID NO: 48760 - RNA, 21 nt, Artificial Sequence
  Synthetic
ugguucuucucuauuacuuuc

SEQ ID NO: 48761 - RNA, 22 nt, Artificial Sequence
  Synthetic
uugguucuucucuauuacuuuc

SEQ ID NO: 48762 - RNA, 23 nt, Artificial Sequence
  Synthetic
cuugguucuucucuauuacuuuc

SEQ ID NO: 48763 - RNA, 24 nt, Artificial Sequence
  Synthetic
acuugguucuucucuauuacuuuc

SEQ ID NO: 48764 - RNA, 18 nt, Artificial Sequence
  Synthetic
agaauaauauaaccuuuc

SEQ ID NO: 48765 - RNA, 19 nt, Artificial Sequence
  Synthetic
aagaauaauauaaccuuuc

SEQ ID NO: 48766 - RNA, 20 nt, Artificial Sequence
  Synthetic
uaagaauaauauaaccuuuc

SEQ ID NO: 48767 - RNA, 22 nt, Artificial Sequence
  Synthetic
aguaagaauaauauaaccuuuc

SEQ ID NO: 48768 - RNA, 23 nt, Artificial Sequence
  Synthetic
aaguaagaauaauauaaccuuuc

SEQ ID NO: 48769 - RNA, 24 nt, Artificial Sequence
  Synthetic
aaaguaagaauaauauaaccuuuc

SEQ ID NO: 48770 - RNA, 19 nt, Artificial Sequence
  Synthetic
agcuaccuguuaaccuuuc

SEQ ID NO: 48771 - RNA, 20 nt, Artificial Sequence
  Synthetic
uagcuaccuguuaaccuuuc

SEQ ID NO: 48772 - RNA, 21 nt, Artificial Sequence
  Synthetic
auagcuaccuguuaaccuuuc

SEQ ID NO: 48773 - RNA, 23 nt, Artificial Sequence
  Synthetic
agauagcuaccuguuaaccuuuc

SEQ ID NO: 48774 - RNA, 24 nt, Artificial Sequence
  Synthetic
cagauagcuaccuguuaaccuuuc

SEQ ID NO: 48775 - RNA, 19 nt, Artificial Sequence
  Synthetic
aguuacuuuugacccuuuc

SEQ ID NO: 48776 - RNA, 20 nt, Artificial Sequence
  Synthetic
aaguuacuuuugacccuuuc

SEQ ID NO: 48777 - RNA, 21 nt, Artificial Sequence
  Synthetic
aaaguuacuuuugacccuuuc

SEQ ID NO: 48778 - RNA, 22 nt, Artificial Sequence
  Synthetic
aaaaguuacuuuugacccuuuc

SEQ ID NO: 48779 - RNA, 23 nt, Artificial Sequence
  Synthetic
aaaaaguuacuuuugacccuuuc

SEQ ID NO: 48780 - RNA, 24 nt, Artificial Sequence
  Synthetic
caaaaaguuacuuuugacccuuuc

SEQ ID NO: 48781 - RNA, 18 nt, Artificial Sequence
  Synthetic
aagcccauauugccuuuc

SEQ ID NO: 48782 - RNA, 19 nt, Artificial Sequence
  Synthetic
uaagcccauauugccuuuc

SEQ ID NO: 48783 - RNA, 20 nt, Artificial Sequence
  Synthetic
auaagcccauauugccuuuc

SEQ ID NO: 48784 - RNA, 21 nt, Artificial Sequence
  Synthetic
aauaagcccauauugccuuuc

SEQ ID NO: 48785 - RNA, 22 nt, Artificial Sequence
  Synthetic
caauaagcccauauugccuuuc

SEQ ID NO: 48786 - RNA, 24 nt, Artificial Sequence
  Synthetic
agcaauaagcccauauugccuuuc

SEQ ID NO: 48787 - RNA, 18 nt, Artificial Sequence
  Synthetic
uaauuuggcuugccuuuc

SEQ ID NO: 48788 - RNA, 19 nt, Artificial Sequence
  Synthetic
auaauuuggcuugccuuuc

SEQ ID NO: 48789 - RNA, 20 nt, Artificial Sequence
  Synthetic
aauaauuuggcuugccuuuc

SEQ ID NO: 48790 - RNA, 23 nt, Artificial Sequence
  Synthetic
aggaauaauuuggcuugccuuuc

SEQ ID NO: 48791 - RNA, 24 nt, Artificial Sequence
  Synthetic
aaggaauaauuuggcuugccuuuc

SEQ ID NO: 48792 - RNA, 18 nt, Artificial Sequence
  Synthetic
acaccucugcuuccuuuc

SEQ ID NO: 48793 - RNA, 19 nt, Artificial Sequence
  Synthetic
aacaccucugcuuccuuuc

SEQ ID NO: 48794 - RNA, 21 nt, Artificial Sequence
  Synthetic
agaacaccucugcuuccuuuc

SEQ ID NO: 48795 - RNA, 22 nt, Artificial Sequence
  Synthetic
aagaacaccucugcuuccuuuc

SEQ ID NO: 48796 - RNA, 23 nt, Artificial Sequence
  Synthetic
aaagaacaccucugcuuccuuuc

SEQ ID NO: 48797 - RNA, 24 nt, Artificial Sequence
  Synthetic
uaaagaacaccucugcuuccuuuc

SEQ ID NO: 48798 - RNA, 18 nt, Artificial Sequence
  Synthetic
auuuacaaauuuccuuuc

SEQ ID NO: 48799 - RNA, 19 nt, Artificial Sequence
  Synthetic
uauuuacaaauuuccuuuc

SEQ ID NO: 48800 - RNA, 20 nt, Artificial Sequence
  Synthetic
cuauuuacaaauuuccuuuc

SEQ ID NO: 48801 - RNA, 21 nt, Artificial Sequence
  Synthetic
ucuauuuacaaauuuccuuuc

SEQ ID NO: 48802 - RNA, 22 nt, Artificial Sequence
  Synthetic
uucuauuuacaaauuuccuuuc

SEQ ID NO: 48803 - RNA, 23 nt, Artificial Sequence
  Synthetic
auucuauuuacaaauuuccuuuc

SEQ ID NO: 48804 - RNA, 24 nt, Artificial Sequence
  Synthetic
aauucuauuuacaaauuuccuuuc

SEQ ID NO: 48805 - RNA, 18 nt, Artificial Sequence
  Synthetic
ccaugcuuccacgcuuuc

SEQ ID NO: 48806 - RNA, 19 nt, Artificial Sequence
  Synthetic
accaugcuuccacgcuuuc

SEQ ID NO: 48807 - RNA, 20 nt, Artificial Sequence
  Synthetic
uaccaugcuuccacgcuuuc

SEQ ID NO: 48808 - RNA, 21 nt, Artificial Sequence
  Synthetic
uuaccaugcuuccacgcuuuc

SEQ ID NO: 48809 - RNA, 23 nt, Artificial Sequence
  Synthetic
uguuaccaugcuuccacgcuuuc

SEQ ID NO: 48810 - RNA, 24 nt, Artificial Sequence
  Synthetic
auguuaccaugcuuccacgcuuuc

SEQ ID NO: 48811 - RNA, 18 nt, Artificial Sequence
  Synthetic
ucuucuaccauggcuuuc

SEQ ID NO: 48812 - RNA, 19 nt, Artificial Sequence
  Synthetic
cucuucuaccauggcuuuc

SEQ ID NO: 48813 - RNA, 20 nt, Artificial Sequence
  Synthetic
ucucuucuaccauggcuuuc

SEQ ID NO: 48814 - RNA, 21 nt, Artificial Sequence
  Synthetic
uucucuucuaccauggcuuuc

SEQ ID NO: 48815 - RNA, 22 nt, Artificial Sequence
  Synthetic
cuucucuucuaccauggcuuuc

SEQ ID NO: 48816 - RNA, 23 nt, Artificial Sequence
  Synthetic
ucuucucuucuaccauggcuuuc

SEQ ID NO: 48817 - RNA, 24 nt, Artificial Sequence
  Synthetic
aucuucucuucuaccauggcuuuc

SEQ ID NO: 48818 - RNA, 18 nt, Artificial Sequence
  Synthetic
uagucagagacugcuuuc

SEQ ID NO: 48819 - RNA, 23 nt, Artificial Sequence
  Synthetic
ugggguagucagagacugcuuuc

SEQ ID NO: 48820 - RNA, 24 nt, Artificial Sequence
  Synthetic
uugggguagucagagacugcuuuc

SEQ ID NO: 48821 - RNA, 19 nt, Artificial Sequence
  Synthetic
agucuaggcaauaucuuuc

SEQ ID NO: 48822 - RNA, 20 nt, Artificial Sequence
  Synthetic
cagucuaggcaauaucuuuc

SEQ ID NO: 48823 - RNA, 21 nt, Artificial Sequence
  Synthetic
uacugauagaaacucucuuuc

SEQ ID NO: 48824 - RNA, 23 nt, Artificial Sequence
  Synthetic
uguacugauagaaacucucuuuc

SEQ ID NO: 48825 - RNA, 18 nt, Artificial Sequence
  Synthetic
cuaucuuuguugucuuuc

SEQ ID NO: 48826 - RNA, 19 nt, Artificial Sequence
  Synthetic
ccuaucuuuguugucuuuc

SEQ ID NO: 48827 - RNA, 20 nt, Artificial Sequence
  Synthetic
accuaucuuuguugucuuuc

SEQ ID NO: 48828 - RNA, 21 nt, Artificial Sequence
  Synthetic
uaccuaucuuuguugucuuuc

SEQ ID NO: 48829 - RNA, 22 nt, Artificial Sequence
  Synthetic
uuaccuaucuuuguugucuuuc

SEQ ID NO: 48830 - RNA, 24 nt, Artificial Sequence
  Synthetic
uguuaccuaucuuuguugucuuuc

SEQ ID NO: 48831 - RNA, 18 nt, Artificial Sequence
  Synthetic
uauuuauccauuucuuuc

SEQ ID NO: 48832 - RNA, 19 nt, Artificial Sequence
  Synthetic
uuauuuauccauuucuuuc

SEQ ID NO: 48833 - RNA, 21 nt, Artificial Sequence
  Synthetic
aguuauuuauccauuucuuuc

SEQ ID NO: 48834 - RNA, 22 nt, Artificial Sequence
  Synthetic
caguuauuuauccauuucuuuc

SEQ ID NO: 48835 - RNA, 23 nt, Artificial Sequence
  Synthetic
acaguuauuuauccauuucuuuc

SEQ ID NO: 48836 - RNA, 24 nt, Artificial Sequence
  Synthetic
uacaguuauuuauccauuucuuuc

SEQ ID NO: 48837 - RNA, 18 nt, Artificial Sequence
  Synthetic
agaggggaauuuucuuuc

SEQ ID NO: 48838 - RNA, 19 nt, Artificial Sequence
  Synthetic
cagaggggaauuuucuuuc

SEQ ID NO: 48839 - RNA, 20 nt, Artificial Sequence
  Synthetic
ucagaggggaauuuucuuuc

SEQ ID NO: 48840 - RNA, 21 nt, Artificial Sequence
  Synthetic
uucagaggggaauuuucuuuc

SEQ ID NO: 48841 - RNA, 22 nt, Artificial Sequence
  Synthetic
cuucagaggggaauuuucuuuc

SEQ ID NO: 48842 - RNA, 23 nt, Artificial Sequence
  Synthetic
acuucagaggggaauuuucuuuc

SEQ ID NO: 48843 - RNA, 24 nt, Artificial Sequence
  Synthetic
cacuucagaggggaauuuucuuuc

SEQ ID NO: 48844 - RNA, 19 nt, Artificial Sequence
  Synthetic
aggaaaauggcaaaguuuc

SEQ ID NO: 48845 - RNA, 20 nt, Artificial Sequence
  Synthetic
caggaaaauggcaaaguuuc

SEQ ID NO: 48846 - RNA, 21 nt, Artificial Sequence
  Synthetic
ccaggaaaauggcaaaguuuc

SEQ ID NO: 48847 - RNA, 22 nt, Artificial Sequence
  Synthetic
cccaggaaaauggcaaaguuuc

SEQ ID NO: 48848 - RNA, 23 nt, Artificial Sequence
  Synthetic
acccaggaaaauggcaaaguuuc

SEQ ID NO: 48849 - RNA, 24 nt, Artificial Sequence
  Synthetic
aacccaggaaaauggcaaaguuuc

SEQ ID NO: 48850 - RNA, 18 nt, Artificial Sequence
  Synthetic
aaacuugagaacaguuuc

SEQ ID NO: 48851 - RNA, 19 nt, Artificial Sequence
  Synthetic
uaaacuugagaacaguuuc

SEQ ID NO: 48852 - RNA, 20 nt, Artificial Sequence
  Synthetic
auaaacuugagaacaguuuc

SEQ ID NO: 48853 - RNA, 22 nt, Artificial Sequence
  Synthetic
ugcugccaagguuuucaguuuc

SEQ ID NO: 48854 - RNA, 24 nt, Artificial Sequence
  Synthetic
ugugcugccaagguuuucaguuuc

SEQ ID NO: 48855 - RNA, 20 nt, Artificial Sequence
  Synthetic
ugguuaugagagagaguuuc

SEQ ID NO: 48856 - RNA, 21 nt, Artificial Sequence
  Synthetic
cugguuaugagagagaguuuc

SEQ ID NO: 48857 - RNA, 22 nt, Artificial Sequence
  Synthetic
ccugguuaugagagagaguuuc

SEQ ID NO: 48858 - RNA, 24 nt, Artificial Sequence
  Synthetic
cgccugguuaugagagagaguuuc

SEQ ID NO: 48859 - RNA, 18 nt, Artificial Sequence
  Synthetic
aguaguguuuguaguuuc

SEQ ID NO: 48860 - RNA, 19 nt, Artificial Sequence
  Synthetic
caguaguguuuguaguuuc

SEQ ID NO: 48861 - RNA, 20 nt, Artificial Sequence
  Synthetic
ucaguaguguuuguaguuuc

SEQ ID NO: 48862 - RNA, 21 nt, Artificial Sequence
  Synthetic
cucaguaguguuuguaguuuc

SEQ ID NO: 48863 - RNA, 22 nt, Artificial Sequence
  Synthetic
ucucaguaguguuuguaguuuc

SEQ ID NO: 48864 - RNA, 24 nt, Artificial Sequence
  Synthetic
ugucucaguaguguuuguaguuuc

SEQ ID NO: 48865 - RNA, 18 nt, Artificial Sequence
  Synthetic
aaaauauaggcagguuuc

SEQ ID NO: 48866 - RNA, 19 nt, Artificial Sequence
  Synthetic
caaaauauaggcagguuuc

SEQ ID NO: 48867 - RNA, 22 nt, Artificial Sequence
  Synthetic
uggcaaaauauaggcagguuuc

SEQ ID NO: 48868 - RNA, 23 nt, Artificial Sequence
  Synthetic
cuggcaaaauauaggcagguuuc

SEQ ID NO: 48869 - RNA, 24 nt, Artificial Sequence
  Synthetic
acuggcaaaauauaggcagguuuc

SEQ ID NO: 48870 - RNA, 18 nt, Artificial Sequence
  Synthetic
aaaggccucugagguuuc

SEQ ID NO: 48871 - RNA, 19 nt, Artificial Sequence
  Synthetic
uaaaggccucugagguuuc

SEQ ID NO: 48872 - RNA, 20 nt, Artificial Sequence
  Synthetic
auaaaggccucugagguuuc

SEQ ID NO: 48873 - RNA, 22 nt, Artificial Sequence
  Synthetic
agauaaaggccucugagguuuc

SEQ ID NO: 48874 - RNA, 23 nt, Artificial Sequence
  Synthetic
uagauaaaggccucugagguuuc

SEQ ID NO: 48875 - RNA, 24 nt, Artificial Sequence
  Synthetic
uuagauaaaggccucugagguuuc

SEQ ID NO: 48876 - RNA, 18 nt, Artificial Sequence
  Synthetic
aaggaccguugagguuuc

SEQ ID NO: 48877 - RNA, 19 nt, Artificial Sequence
  Synthetic
uaaggaccguugagguuuc

SEQ ID NO: 48878 - RNA, 20 nt, Artificial Sequence
  Synthetic
cuaaggaccguugagguuuc

SEQ ID NO: 48879 - RNA, 21 nt, Artificial Sequence
  Synthetic
ccuaaggaccguugagguuuc

SEQ ID NO: 48880 - RNA, 22 nt, Artificial Sequence
  Synthetic
cccuaaggaccguugagguuuc

SEQ ID NO: 48881 - RNA, 23 nt, Artificial Sequence
  Synthetic
ccccuaaggaccguugagguuuc

SEQ ID NO: 48882 - RNA, 24 nt, Artificial Sequence
  Synthetic
uccccuaaggaccguugagguuuc

SEQ ID NO: 48883 - RNA, 19 nt, Artificial Sequence
  Synthetic
ugaauguggauacgguuuc

SEQ ID NO: 48884 - RNA, 21 nt, Artificial Sequence
  Synthetic
ugugaauguggauacgguuuc

SEQ ID NO: 48885 - RNA, 22 nt, Artificial Sequence
  Synthetic
cugugaauguggauacgguuuc

SEQ ID NO: 48886 - RNA, 23 nt, Artificial Sequence
  Synthetic
ucugugaauguggauacgguuuc

SEQ ID NO: 48887 - RNA, 24 nt, Artificial Sequence
  Synthetic
aucugugaauguggauacgguuuc

SEQ ID NO: 48888 - RNA, 18 nt, Artificial Sequence
  Synthetic
uaaaauacccuugguuuc

SEQ ID NO: 48889 - RNA, 19 nt, Artificial Sequence
  Synthetic
cuaaaauacccuugguuuc

SEQ ID NO: 48890 - RNA, 20 nt, Artificial Sequence
  Synthetic
ccuaaaauacccuugguuuc

SEQ ID NO: 48891 - RNA, 21 nt, Artificial Sequence
  Synthetic
uccuaaaauacccuugguuuc

SEQ ID NO: 48892 - RNA, 22 nt, Artificial Sequence
  Synthetic
uuccuaaaauacccuugguuuc

SEQ ID NO: 48893 - RNA, 18 nt, Artificial Sequence
  Synthetic
uuuacuuugccauguuuc

SEQ ID NO: 48894 - RNA, 19 nt, Artificial Sequence
  Synthetic
uuuuacuuugccauguuuc

SEQ ID NO: 48895 - RNA, 21 nt, Artificial Sequence
  Synthetic
uguuuuacuuugccauguuuc

SEQ ID NO: 48896 - RNA, 22 nt, Artificial Sequence
  Synthetic
uuguuuuacuuugccauguuuc

SEQ ID NO: 48897 - RNA, 23 nt, Artificial Sequence
  Synthetic
uuuguuuuacuuugccauguuuc

SEQ ID NO: 48898 - RNA, 24 nt, Artificial Sequence
  Synthetic
uuuuguuuuacuuugccauguuuc

SEQ ID NO: 48899 - RNA, 18 nt, Artificial Sequence
  Synthetic
uuauuauauccauguuuc

SEQ ID NO: 48900 - RNA, 19 nt, Artificial Sequence
  Synthetic
auuauuauauccauguuuc

SEQ ID NO: 48901 - RNA, 20 nt, Artificial Sequence
  Synthetic
uauuauuauauccauguuuc

SEQ ID NO: 48902 - RNA, 23 nt, Artificial Sequence
  Synthetic
ugguauuauuauauccauguuuc

SEQ ID NO: 48903 - RNA, 18 nt, Artificial Sequence
  Synthetic
acccagucaauauguuuc

SEQ ID NO: 48904 - RNA, 19 nt, Artificial Sequence
  Synthetic
aacccagucaauauguuuc

SEQ ID NO: 48905 - RNA, 20 nt, Artificial Sequence
  Synthetic
aaacccagucaauauguuuc

SEQ ID NO: 48906 - RNA, 21 nt, Artificial Sequence
  Synthetic
caaacccagucaauauguuuc

SEQ ID NO: 48907 - RNA, 22 nt, Artificial Sequence
  Synthetic
ucaaacccagucaauauguuuc

SEQ ID NO: 48908 - RNA, 23 nt, Artificial Sequence
  Synthetic
aucaaacccagucaauauguuuc

SEQ ID NO: 48909 - RNA, 24 nt, Artificial Sequence
  Synthetic
caucaaacccagucaauauguuuc

SEQ ID NO: 48910 - RNA, 19 nt, Artificial Sequence
  Synthetic
agagugaauuuacuguuuc

SEQ ID NO: 48911 - RNA, 20 nt, Artificial Sequence
  Synthetic
cagagugaauuuacuguuuc

SEQ ID NO: 48912 - RNA, 21 nt, Artificial Sequence
  Synthetic
ucagagugaauuuacuguuuc

SEQ ID NO: 48913 - RNA, 22 nt, Artificial Sequence
  Synthetic
cucagagugaauuuacuguuuc

SEQ ID NO: 48914 - RNA, 23 nt, Artificial Sequence
  Synthetic
ucucagagugaauuuacuguuuc

SEQ ID NO: 48915 - RNA, 24 nt, Artificial Sequence
  Synthetic
cucucagagugaauuuacuguuuc

SEQ ID NO: 48916 - RNA, 19 nt, Artificial Sequence
  Synthetic
uguccucuggcauuguuuc

SEQ ID NO: 48917 - RNA, 20 nt, Artificial Sequence
  Synthetic
cuguccucuggcauuguuuc

SEQ ID NO: 48918 - RNA, 21 nt, Artificial Sequence
  Synthetic
ucuguccucuggcauuguuuc

SEQ ID NO: 48919 - RNA, 22 nt, Artificial Sequence
  Synthetic
uucuguccucuggcauuguuuc

SEQ ID NO: 48920 - RNA, 21 nt, Artificial Sequence
  Synthetic
uauuuguauguauuuuguuuc

SEQ ID NO: 48921 - RNA, 23 nt, Artificial Sequence
  Synthetic
aguauuuguauguauuuuguuuc

SEQ ID NO: 48922 - RNA, 24 nt, Artificial Sequence
  Synthetic
aaguauuuguauguauuuuguuuc

SEQ ID NO: 48923 - RNA, 19 nt, Artificial Sequence
  Synthetic
ugucaccgcuuaaauuuuc

SEQ ID NO: 48924 - RNA, 21 nt, Artificial Sequence
  Synthetic
ugugucaccgcuuaaauuuuc

SEQ ID NO: 48925 - RNA, 22 nt, Artificial Sequence
  Synthetic
cugugucaccgcuuaaauuuuc

SEQ ID NO: 48926 - RNA, 23 nt, Artificial Sequence
  Synthetic
ccugugucaccgcuuaaauuuuc

SEQ ID NO: 48927 - RNA, 24 nt, Artificial Sequence
  Synthetic
uccugugucaccgcuuaaauuuuc

SEQ ID NO: 48928 - RNA, 22 nt, Artificial Sequence
  Synthetic
uggaaauacuuguuaaauuuuc

SEQ ID NO: 48929 - RNA, 23 nt, Artificial Sequence
  Synthetic
cuggaaauacuuguuaaauuuuc

SEQ ID NO: 48930 - RNA, 21 nt, Artificial Sequence
  Synthetic
aauuaacuuuucuuaauuuuc

SEQ ID NO: 48931 - RNA, 22 nt, Artificial Sequence
  Synthetic
aaauuaacuuuucuuaauuuuc

SEQ ID NO: 48932 - RNA, 23 nt, Artificial Sequence
  Synthetic
uaaauuaacuuuucuuaauuuuc

SEQ ID NO: 48933 - RNA, 18 nt, Artificial Sequence
  Synthetic
ugaaaaaacgccauuuuc

SEQ ID NO: 48934 - RNA, 19 nt, Artificial Sequence
  Synthetic
cugaaaaaacgccauuuuc

SEQ ID NO: 48935 - RNA, 21 nt, Artificial Sequence
  Synthetic
agcugaaaaaacgccauuuuc

SEQ ID NO: 48936 - RNA, 24 nt, Artificial Sequence
  Synthetic
aggagcugaaaaaacgccauuuuc

SEQ ID NO: 48937 - RNA, 18 nt, Artificial Sequence
  Synthetic
uuguaacacagcauuuuc

SEQ ID NO: 48938 - RNA, 19 nt, Artificial Sequence
  Synthetic
auuguaacacagcauuuuc

SEQ ID NO: 48939 - RNA, 20 nt, Artificial Sequence
  Synthetic
uauuguaacacagcauuuuc

SEQ ID NO: 48940 - RNA, 21 nt, Artificial Sequence
  Synthetic
auauuguaacacagcauuuuc

SEQ ID NO: 48941 - RNA, 22 nt, Artificial Sequence
  Synthetic
uauauuguaacacagcauuuuc

SEQ ID NO: 48942 - RNA, 23 nt, Artificial Sequence
  Synthetic
uuauauuguaacacagcauuuuc

SEQ ID NO: 48943 - RNA, 19 nt, Artificial Sequence
  Synthetic
aggaaaccguaucauuuuc

SEQ ID NO: 48944 - RNA, 20 nt, Artificial Sequence
  Synthetic
aaggaaaccguaucauuuuc

SEQ ID NO: 48945 - RNA, 22 nt, Artificial Sequence
  Synthetic
agaaggaaaccguaucauuuuc

SEQ ID NO: 48946 - RNA, 23 nt, Artificial Sequence
  Synthetic
aagaaggaaaccguaucauuuuc

SEQ ID NO: 48947 - RNA, 24 nt, Artificial Sequence
  Synthetic
uaagaaggaaaccguaucauuuuc

SEQ ID NO: 48948 - RNA, 19 nt, Artificial Sequence
  Synthetic
uggcagaagccugauuuuc

SEQ ID NO: 48949 - RNA, 20 nt, Artificial Sequence
  Synthetic
auggcagaagccugauuuuc

SEQ ID NO: 48950 - RNA, 22 nt, Artificial Sequence
  Synthetic
ugauggcagaagccugauuuuc

SEQ ID NO: 48951 - RNA, 23 nt, Artificial Sequence
  Synthetic
augauggcagaagccugauuuuc

SEQ ID NO: 48952 - RNA, 18 nt, Artificial Sequence
  Synthetic
uuucaauuugugauuuuc

SEQ ID NO: 48953 - RNA, 19 nt, Artificial Sequence
  Synthetic
auuucaauuugugauuuuc

SEQ ID NO: 48954 - RNA, 20 nt, Artificial Sequence
  Synthetic
aauuucaauuugugauuuuc

SEQ ID NO: 48955 - RNA, 21 nt, Artificial Sequence
  Synthetic
uaauuucaauuugugauuuuc

SEQ ID NO: 48956 - RNA, 24 nt, Artificial Sequence
  Synthetic
agguaauuucaauuugugauuuuc

SEQ ID NO: 48957 - RNA, 21 nt, Artificial Sequence
  Synthetic
ugaaaagauauguuuauuuuc

SEQ ID NO: 48958 - RNA, 22 nt, Artificial Sequence
  Synthetic
augaaaagauauguuuauuuuc

SEQ ID NO: 48959 - RNA, 23 nt, Artificial Sequence
  Synthetic
aaugaaaagauauguuuauuuuc

SEQ ID NO: 48960 - RNA, 24 nt, Artificial Sequence
  Synthetic
uaaugaaaagauauguuuauuuuc

SEQ ID NO: 48961 - RNA, 18 nt, Artificial Sequence
  Synthetic
uuuuaaugagaacuuuuc

SEQ ID NO: 48962 - RNA, 19 nt, Artificial Sequence
  Synthetic
auuuuaaugagaacuuuuc

SEQ ID NO: 48963 - RNA, 20 nt, Artificial Sequence
  Synthetic
uauuuuaaugagaacuuuuc

SEQ ID NO: 48964 - RNA, 21 nt, Artificial Sequence
  Synthetic
cuauuuuaaugagaacuuuuc

SEQ ID NO: 48965 - RNA, 22 nt, Artificial Sequence
  Synthetic
acuauuuuaaugagaacuuuuc

SEQ ID NO: 48966 - RNA, 23 nt, Artificial Sequence
  Synthetic
aacuauuuuaaugagaacuuuuc

SEQ ID NO: 48967 - RNA, 24 nt, Artificial Sequence
  Synthetic
uaacuauuuuaaugagaacuuuuc

SEQ ID NO: 48968 - RNA, 21 nt, Artificial Sequence
  Synthetic
cacaauaaauguuuacuuuuc

SEQ ID NO: 48969 - RNA, 22 nt, Artificial Sequence
  Synthetic
ucacaauaaauguuuacuuuuc

SEQ ID NO: 48970 - RNA, 24 nt, Artificial Sequence
  Synthetic
ugucacaauaaauguuuacuuuuc

SEQ ID NO: 48971 - RNA, 18 nt, Artificial Sequence
  Synthetic
uagacuucuauccuuuuc

SEQ ID NO: 48972 - RNA, 19 nt, Artificial Sequence
  Synthetic
cuagacuucuauccuuuuc

SEQ ID NO: 48973 - RNA, 20 nt, Artificial Sequence
  Synthetic
acuagacuucuauccuuuuc

SEQ ID NO: 48974 - RNA, 22 nt, Artificial Sequence
  Synthetic
ugacuagacuucuauccuuuuc

SEQ ID NO: 48975 - RNA, 23 nt, Artificial Sequence
  Synthetic
cugacuagacuucuauccuuuuc

SEQ ID NO: 48976 - RNA, 24 nt, Artificial Sequence
  Synthetic
ccugacuagacuucuauccuuuuc

SEQ ID NO: 48977 - RNA, 18 nt, Artificial Sequence
  Synthetic
auaaucugggagcuuuuc

SEQ ID NO: 48978 - RNA, 19 nt, Artificial Sequence
  Synthetic
cauaaucugggagcuuuuc

SEQ ID NO: 48979 - RNA, 21 nt, Artificial Sequence
  Synthetic
ugcauaaucugggagcuuuuc

SEQ ID NO: 48980 - RNA, 22 nt, Artificial Sequence
  Synthetic
augcauaaucugggagcuuuuc

SEQ ID NO: 48981 - RNA, 24 nt, Artificial Sequence
  Synthetic
agaugcauaaucugggagcuuuuc

SEQ ID NO: 48982 - RNA, 18 nt, Artificial Sequence
  Synthetic
agauacaagaggcuuuuc

SEQ ID NO: 48983 - RNA, 21 nt, Artificial Sequence
  Synthetic
aggagauacaagaggcuuuuc

SEQ ID NO: 48984 - RNA, 23 nt, Artificial Sequence
  Synthetic
agaggagauacaagaggcuuuuc

SEQ ID NO: 48985 - RNA, 24 nt, Artificial Sequence
  Synthetic
aagaggagauacaagaggcuuuuc

SEQ ID NO: 48986 - RNA, 18 nt, Artificial Sequence
  Synthetic
acuauuaagcaucuuuuc

SEQ ID NO: 48987 - RNA, 19 nt, Artificial Sequence
  Synthetic
cacuauuaagcaucuuuuc

SEQ ID NO: 48988 - RNA, 21 nt, Artificial Sequence
  Synthetic
agcacuauuaagcaucuuuuc

SEQ ID NO: 48989 - RNA, 22 nt, Artificial Sequence
  Synthetic
uagcacuauuaagcaucuuuuc

SEQ ID NO: 48990 - RNA, 23 nt, Artificial Sequence
  Synthetic
cuagcacuauuaagcaucuuuuc

SEQ ID NO: 48991 - RNA, 24 nt, Artificial Sequence
  Synthetic
acuagcacuauuaagcaucuuuuc

SEQ ID NO: 48992 - RNA, 18 nt, Artificial Sequence
  Synthetic
caaaaugauccucuuuuc

SEQ ID NO: 48993 - RNA, 20 nt, Artificial Sequence
  Synthetic
ugcaaaaugauccucuuuuc

SEQ ID NO: 48994 - RNA, 21 nt, Artificial Sequence
  Synthetic
cugcaaaaugauccucuuuuc

SEQ ID NO: 48995 - RNA, 22 nt, Artificial Sequence
  Synthetic
ucugcaaaaugauccucuuuuc

SEQ ID NO: 48996 - RNA, 23 nt, Artificial Sequence
  Synthetic
uucugcaaaaugauccucuuuuc

SEQ ID NO: 48997 - RNA, 24 nt, Artificial Sequence
  Synthetic
uuucugcaaaaugauccucuuuuc

SEQ ID NO: 48998 - RNA, 22 nt, Artificial Sequence
  Synthetic
agaguuacaaaaacuucuuuuc

SEQ ID NO: 48999 - RNA, 23 nt, Artificial Sequence
  Synthetic
cagaguuacaaaaacuucuuuuc

SEQ ID NO: 49000 - RNA, 24 nt, Artificial Sequence
  Synthetic
ucagaguuacaaaaacuucuuuuc

SEQ ID NO: 49001 - RNA, 22 nt, Artificial Sequence
  Synthetic
agaaauaauauauaaaguuuuc

SEQ ID NO: 49002 - RNA, 24 nt, Artificial Sequence
  Synthetic
agagaaauaauauauaaaguuuuc

SEQ ID NO: 49003 - RNA, 18 nt, Artificial Sequence
  Synthetic
acucauucagcaguuuuc

SEQ ID NO: 49004 - RNA, 19 nt, Artificial Sequence
  Synthetic
uacucauucagcaguuuuc

SEQ ID NO: 49005 - RNA, 20 nt, Artificial Sequence
  Synthetic
auacucauucagcaguuuuc

SEQ ID NO: 49006 - RNA, 21 nt, Artificial Sequence
  Synthetic
aauacucauucagcaguuuuc

SEQ ID NO: 49007 - RNA, 22 nt, Artificial Sequence
  Synthetic
caauacucauucagcaguuuuc

SEQ ID NO: 49008 - RNA, 23 nt, Artificial Sequence
  Synthetic
ucaauacucauucagcaguuuuc

SEQ ID NO: 49009 - RNA, 24 nt, Artificial Sequence
  Synthetic
uucaauacucauucagcaguuuuc

SEQ ID NO: 49010 - RNA, 18 nt, Artificial Sequence
  Synthetic
ucaguuuuugagguuuuc

SEQ ID NO: 49011 - RNA, 19 nt, Artificial Sequence
  Synthetic
aucaguuuuugagguuuuc

SEQ ID NO: 49012 - RNA, 20 nt, Artificial Sequence
  Synthetic
caucaguuuuugagguuuuc

SEQ ID NO: 49013 - RNA, 21 nt, Artificial Sequence
  Synthetic
ucaucaguuuuugagguuuuc

SEQ ID NO: 49014 - RNA, 22 nt, Artificial Sequence
  Synthetic
aucaucaguuuuugagguuuuc

SEQ ID NO: 49015 - RNA, 24 nt, Artificial Sequence
  Synthetic
ugaucaucaguuuuugagguuuuc

SEQ ID NO: 49016 - RNA, 18 nt, Artificial Sequence
  Synthetic
uuuagaaguuugguuuuc

SEQ ID NO: 49017 - RNA, 19 nt, Artificial Sequence
  Synthetic
uuuuagaaguuugguuuuc

SEQ ID NO: 49018 - RNA, 20 nt, Artificial Sequence
  Synthetic
uuuuuagaaguuugguuuuc

SEQ ID NO: 49019 - RNA, 18 nt, Artificial Sequence
  Synthetic
acaccuuuugauguuuuc

SEQ ID NO: 49020 - RNA, 19 nt, Artificial Sequence
  Synthetic
uacaccuuuugauguuuuc

SEQ ID NO: 49021 - RNA, 20 nt, Artificial Sequence
  Synthetic
uuacaccuuuugauguuuuc

SEQ ID NO: 49022 - RNA, 21 nt, Artificial Sequence
  Synthetic
uuuacaccuuuugauguuuuc

SEQ ID NO: 49023 - RNA, 22 nt, Artificial Sequence
  Synthetic
uuuuacaccuuuugauguuuuc

SEQ ID NO: 49024 - RNA, 18 nt, Artificial Sequence
  Synthetic
auaguugcugaauuuuuc

SEQ ID NO: 49025 - RNA, 20 nt, Artificial Sequence
  Synthetic
ugauaguugcugaauuuuuc

SEQ ID NO: 49026 - RNA, 21 nt, Artificial Sequence
  Synthetic
uugauaguugcugaauuuuuc

SEQ ID NO: 49027 - RNA, 22 nt, Artificial Sequence
  Synthetic
uuugauaguugcugaauuuuuc

SEQ ID NO: 49028 - RNA, 23 nt, Artificial Sequence
  Synthetic
uuuugauaguugcugaauuuuuc

SEQ ID NO: 49029 - RNA, 18 nt, Artificial Sequence
  Synthetic
aggguugacucauuuuuc

SEQ ID NO: 49030 - RNA, 19 nt, Artificial Sequence
  Synthetic
aaggguugacucauuuuuc

SEQ ID NO: 49031 - RNA, 20 nt, Artificial Sequence
  Synthetic
caaggguugacucauuuuuc

SEQ ID NO: 49032 - RNA, 22 nt, Artificial Sequence
  Synthetic
ugcaaggguugacucauuuuuc

SEQ ID NO: 49033 - RNA, 23 nt, Artificial Sequence
  Synthetic
cugcaaggguugacucauuuuuc

SEQ ID NO: 49034 - RNA, 24 nt, Artificial Sequence
  Synthetic
ucugcaaggguugacucauuuuuc

SEQ ID NO: 49035 - RNA, 22 nt, Artificial Sequence
  Synthetic
agcaccugaacaauuauuuuuc

SEQ ID NO: 49036 - RNA, 23 nt, Artificial Sequence
  Synthetic
uagcaccugaacaauuauuuuuc

SEQ ID NO: 49037 - RNA, 21 nt, Artificial Sequence
  Synthetic
auaaaaguuuccuucuuuuuc

SEQ ID NO: 49038 - RNA, 22 nt, Artificial Sequence
  Synthetic
uauaaaaguuuccuucuuuuuc

SEQ ID NO: 49039 - RNA, 23 nt, Artificial Sequence
  Synthetic
uuauaaaaguuuccuucuuuuuc

SEQ ID NO: 49040 - RNA, 18 nt, Artificial Sequence
  Synthetic
caugaaauaaauuuuuuc

SEQ ID NO: 49041 - RNA, 19 nt, Artificial Sequence
  Synthetic
ccaugaaauaaauuuuuuc

SEQ ID NO: 49042 - RNA, 20 nt, Artificial Sequence
  Synthetic
accaugaaauaaauuuuuuc

SEQ ID NO: 49043 - RNA, 21 nt, Artificial Sequence
  Synthetic
caccaugaaauaaauuuuuuc

SEQ ID NO: 49044 - RNA, 22 nt, Artificial Sequence
  Synthetic
acaccaugaaauaaauuuuuuc

SEQ ID NO: 49045 - RNA, 23 nt, Artificial Sequence
  Synthetic
aacaccaugaaauaaauuuuuuc

SEQ ID NO: 49046 - RNA, 24 nt, Artificial Sequence
  Synthetic
uaacaccaugaaauaaauuuuuuc

SEQ ID NO: 49047 - RNA, 18 nt, Artificial Sequence
  Synthetic
aucucaaagaauuuuuuc

SEQ ID NO: 49048 - RNA, 19 nt, Artificial Sequence
  Synthetic
aaucucaaagaauuuuuuc

SEQ ID NO: 49049 - RNA, 20 nt, Artificial Sequence
  Synthetic
aaaucucaaagaauuuuuuc

SEQ ID NO: 49050 - RNA, 22 nt, Artificial Sequence
  Synthetic
ugaaaucucaaagaauuuuuuc

SEQ ID NO: 49051 - RNA, 23 nt, Artificial Sequence
  Synthetic
uugaaaucucaaagaauuuuuuc

SEQ ID NO: 49052 - RNA, 24 nt, Artificial Sequence
  Synthetic
uuugaaaucucaaagaauuuuuuc

SEQ ID NO: 49053 - RNA, 18 nt, Artificial Sequence
  Synthetic
cuuauuugaacuuuuuuc

SEQ ID NO: 49054 - RNA, 19 nt, Artificial Sequence
  Synthetic
acuuauuugaacuuuuuuc

SEQ ID NO: 49055 - RNA, 20 nt, Artificial Sequence
  Synthetic
uacuuauuugaacuuuuuuc

SEQ ID NO: 49056 - RNA, 21 nt, Artificial Sequence
  Synthetic
uuacuuauuugaacuuuuuuc

SEQ ID NO: 49057 - RNA, 22 nt, Artificial Sequence
  Synthetic
uuuacuuauuugaacuuuuuuc

SEQ ID NO: 49058 - RNA, 23 nt, Artificial Sequence
  Synthetic
uuuuacuuauuugaacuuuuuuc

SEQ ID NO: 49059 - RNA, 18 nt, Artificial Sequence
  Synthetic
uucagauuauuuuuuuuc

SEQ ID NO: 49060 - RNA, 19 nt, Artificial Sequence
  Synthetic
cuucagauuauuuuuuuuc

SEQ ID NO: 49061 - RNA, 21 nt, Artificial Sequence
  Synthetic
ugcuucagauuauuuuuuuuc

SEQ ID NO: 49062 - RNA, 23 nt, Artificial Sequence
  Synthetic
agugcuucagauuauuuuuuuuc

SEQ ID NO: 49063 - RNA, 24 nt, Artificial Sequence
  Synthetic
aagugcuucagauuauuuuuuuuc

SEQ ID NO: 49064 - RNA, 21 nt, Artificial Sequence
  Synthetic
auuaaaugagggaaaaaaaag

SEQ ID NO: 49065 - RNA, 22 nt, Artificial Sequence
  Synthetic
aauuaaaugagggaaaaaaaag

SEQ ID NO: 49066 - RNA, 23 nt, Artificial Sequence
  Synthetic
uaauuaaaugagggaaaaaaaag

SEQ ID NO: 49067 - RNA, 24 nt, Artificial Sequence
  Synthetic
auaauuaaaugagggaaaaaaaag

SEQ ID NO: 49068 - RNA, 18 nt, Artificial Sequence
  Synthetic
aaugcucaggaaaaaaag

SEQ ID NO: 49069 - RNA, 19 nt, Artificial Sequence
  Synthetic
uaaugcucaggaaaaaaag

SEQ ID NO: 49070 - RNA, 20 nt, Artificial Sequence
  Synthetic
uuaaugcucaggaaaaaaag

SEQ ID NO: 49071 - RNA, 21 nt, Artificial Sequence
  Synthetic
auuaaugcucaggaaaaaaag

SEQ ID NO: 49072 - RNA, 22 nt, Artificial Sequence
  Synthetic
cauuaaugcucaggaaaaaaag

SEQ ID NO: 49073 - RNA, 23 nt, Artificial Sequence
  Synthetic
acauuaaugcucaggaaaaaaag

SEQ ID NO: 49074 - RNA, 24 nt, Artificial Sequence
  Synthetic
aacauuaaugcucaggaaaaaaag

SEQ ID NO: 49075 - RNA, 21 nt, Artificial Sequence
  Synthetic
aaaaugauacauauaaaaaag

SEQ ID NO: 49076 - RNA, 22 nt, Artificial Sequence
  Synthetic
caaaaugauacauauaaaaaag

SEQ ID NO: 49077 - RNA, 23 nt, Artificial Sequence
  Synthetic
ucaaaaugauacauauaaaaaag

SEQ ID NO: 49078 - RNA, 24 nt, Artificial Sequence
  Synthetic
uucaaaaugauacauauaaaaaag

SEQ ID NO: 49079 - RNA, 18 nt, Artificial Sequence
  Synthetic
acaccuuuuuuaaaaaag

SEQ ID NO: 49080 - RNA, 20 nt, Artificial Sequence
  Synthetic
ugacaccuuuuuuaaaaaag

SEQ ID NO: 49081 - RNA, 22 nt, Artificial Sequence
  Synthetic
cgugacaccuuuuuuaaaaaag

SEQ ID NO: 49082 - RNA, 23 nt, Artificial Sequence
  Synthetic
acgugacaccuuuuuuaaaaaag

SEQ ID NO: 49083 - RNA, 24 nt, Artificial Sequence
  Synthetic
cacgugacaccuuuuuuaaaaaag

SEQ ID NO: 49084 - RNA, 18 nt, Artificial Sequence
  Synthetic
uuaauauuccucaaaaag

SEQ ID NO: 49085 - RNA, 19 nt, Artificial Sequence
  Synthetic
uuuaauauuccucaaaaag

SEQ ID NO: 49086 - RNA, 20 nt, Artificial Sequence
  Synthetic
cuuuaauauuccucaaaaag

SEQ ID NO: 49087 - RNA, 21 nt, Artificial Sequence
  Synthetic
ccuuuaauauuccucaaaaag

SEQ ID NO: 49088 - RNA, 22 nt, Artificial Sequence
  Synthetic
cccuuuaauauuccucaaaaag

SEQ ID NO: 49089 - RNA, 23 nt, Artificial Sequence
  Synthetic
ucccuuuaauauuccucaaaaag

SEQ ID NO: 49090 - RNA, 24 nt, Artificial Sequence
  Synthetic
cucccuuuaauauuccucaaaaag

SEQ ID NO: 49091 - RNA, 18 nt, Artificial Sequence
  Synthetic
uuguuugcucucaaaaag

SEQ ID NO: 49092 - RNA, 19 nt, Artificial Sequence
  Synthetic
auuguuugcucucaaaaag

SEQ ID NO: 49093 - RNA, 21 nt, Artificial Sequence
  Synthetic
ugauuguuugcucucaaaaag

SEQ ID NO: 49094 - RNA, 22 nt, Artificial Sequence
  Synthetic
uugauuguuugcucucaaaaag

SEQ ID NO: 49095 - RNA, 23 nt, Artificial Sequence
  Synthetic
cuugauuguuugcucucaaaaag

SEQ ID NO: 49096 - RNA, 24 nt, Artificial Sequence
  Synthetic
acuugauuguuugcucucaaaaag

SEQ ID NO: 49097 - RNA, 18 nt, Artificial Sequence
  Synthetic
cuuaagagugucaaaaag

SEQ ID NO: 49098 - RNA, 19 nt, Artificial Sequence
  Synthetic
ucuuaagagugucaaaaag

SEQ ID NO: 49099 - RNA, 20 nt, Artificial Sequence
  Synthetic
aucuuaagagugucaaaaag

SEQ ID NO: 49100 - RNA, 21 nt, Artificial Sequence
  Synthetic
uaucuuaagagugucaaaaag

SEQ ID NO: 49101 - RNA, 22 nt, Artificial Sequence
  Synthetic
uuaucuuaagagugucaaaaag

SEQ ID NO: 49102 - RNA, 23 nt, Artificial Sequence
  Synthetic
uuuaucuuaagagugucaaaaag

SEQ ID NO: 49103 - RNA, 24 nt, Artificial Sequence
  Synthetic
uuuuaucuuaagagugucaaaaag

SEQ ID NO: 49104 - RNA, 22 nt, Artificial Sequence
  Synthetic
ugaauguaaaauuuucaaaaag

SEQ ID NO: 49105 - RNA, 23 nt, Artificial Sequence
  Synthetic
uugaauguaaaauuuucaaaaag

SEQ ID NO: 49106 - RNA, 24 nt, Artificial Sequence
  Synthetic
uuugaauguaaaauuuucaaaaag

SEQ ID NO: 49107 - RNA, 18 nt, Artificial Sequence
  Synthetic
ucuugucccuggaaaaag

SEQ ID NO: 49108 - RNA, 19 nt, Artificial Sequence
  Synthetic
cucuugucccuggaaaaag

SEQ ID NO: 49109 - RNA, 20 nt, Artificial Sequence
  Synthetic
acucuugucccuggaaaaag

SEQ ID NO: 49110 - RNA, 21 nt, Artificial Sequence
  Synthetic
cacucuugucccuggaaaaag

SEQ ID NO: 49111 - RNA, 22 nt, Artificial Sequence
  Synthetic
ccacucuugucccuggaaaaag

SEQ ID NO: 49112 - RNA, 23 nt, Artificial Sequence
  Synthetic
cccacucuugucccuggaaaaag

SEQ ID NO: 49113 - RNA, 24 nt, Artificial Sequence
  Synthetic
acccacucuugucccuggaaaaag

SEQ ID NO: 49114 - RNA, 18 nt, Artificial Sequence
  Synthetic
uucauccuccugaaaaag

SEQ ID NO: 49115 - RNA, 19 nt, Artificial Sequence
  Synthetic
uuucauccuccugaaaaag

SEQ ID NO: 49116 - RNA, 20 nt, Artificial Sequence
  Synthetic
cuuucauccuccugaaaaag

SEQ ID NO: 49117 - RNA, 21 nt, Artificial Sequence
  Synthetic
acuuucauccuccugaaaaag

SEQ ID NO: 49118 - RNA, 22 nt, Artificial Sequence
  Synthetic
uacuuucauccuccugaaaaag

SEQ ID NO: 49119 - RNA, 24 nt, Artificial Sequence
  Synthetic
uguacuuucauccuccugaaaaag

SEQ ID NO: 49120 - RNA, 21 nt, Artificial Sequence
  Synthetic
aaaaugguuaauaauaaaaag

SEQ ID NO: 49121 - RNA, 22 nt, Artificial Sequence
  Synthetic
uaaaaugguuaauaauaaaaag

SEQ ID NO: 49122 - RNA, 23 nt, Artificial Sequence
  Synthetic
auaaaaugguuaauaauaaaaag

SEQ ID NO: 49123 - RNA, 24 nt, Artificial Sequence
  Synthetic
aauaaaaugguuaauaauaaaaag

SEQ ID NO: 49124 - RNA, 18 nt, Artificial Sequence
  Synthetic
agaagagucuuuaaaaag

SEQ ID NO: 49125 - RNA, 20 nt, Artificial Sequence
  Synthetic
ugagaagagucuuuaaaaag

SEQ ID NO: 49126 - RNA, 21 nt, Artificial Sequence
  Synthetic
uugagaagagucuuuaaaaag

SEQ ID NO: 49127 - RNA, 22 nt, Artificial Sequence
  Synthetic
uuugagaagagucuuuaaaaag

SEQ ID NO: 49128 - RNA, 23 nt, Artificial Sequence
  Synthetic
auuugagaagagucuuuaaaaag

SEQ ID NO: 49129 - RNA, 23 nt, Artificial Sequence
  Synthetic
aggaauauuaaagaggacaaaag

SEQ ID NO: 49130 - RNA, 24 nt, Artificial Sequence
  Synthetic
aaggaauauuaaagaggacaaaag

SEQ ID NO: 49131 - RNA, 18 nt, Artificial Sequence
  Synthetic
acagaauuucuacaaaag

SEQ ID NO: 49132 - RNA, 20 nt, Artificial Sequence
  Synthetic
agacagaauuucuacaaaag

SEQ ID NO: 49133 - RNA, 22 nt, Artificial Sequence
  Synthetic
ugagacagaauuucuacaaaag

SEQ ID NO: 49134 - RNA, 23 nt, Artificial Sequence
  Synthetic
augagacagaauuucuacaaaag

SEQ ID NO: 49135 - RNA, 24 nt, Artificial Sequence
  Synthetic
aaugagacagaauuucuacaaaag

SEQ ID NO: 49136 - RNA, 18 nt, Artificial Sequence
  Synthetic
ucuggcacucaccaaaag

SEQ ID NO: 49137 - RNA, 19 nt, Artificial Sequence
  Synthetic
aucuggcacucaccaaaag

SEQ ID NO: 49138 - RNA, 21 nt, Artificial Sequence
  Synthetic
ugaucuggcacucaccaaaag

SEQ ID NO: 49139 - RNA, 23 nt, Artificial Sequence
  Synthetic
agugaucuggcacucaccaaaag

SEQ ID NO: 49140 - RNA, 24 nt, Artificial Sequence
  Synthetic
uagugaucuggcacucaccaaaag

SEQ ID NO: 49141 - RNA, 18 nt, Artificial Sequence
  Synthetic
auggaacuaccccaaaag

SEQ ID NO: 49142 - RNA, 19 nt, Artificial Sequence
  Synthetic
uauggaacuaccccaaaag

SEQ ID NO: 49143 - RNA, 20 nt, Artificial Sequence
  Synthetic
auauggaacuaccccaaaag

SEQ ID NO: 49144 - RNA, 22 nt, Artificial Sequence
  Synthetic
agauauggaacuaccccaaaag

SEQ ID NO: 49145 - RNA, 23 nt, Artificial Sequence
  Synthetic
aagauauggaacuaccccaaaag

SEQ ID NO: 49146 - RNA, 24 nt, Artificial Sequence
  Synthetic
uaagauauggaacuaccccaaaag

SEQ ID NO: 49147 - RNA, 18 nt, Artificial Sequence
  Synthetic
aagccauauagccaaaag

SEQ ID NO: 49148 - RNA, 19 nt, Artificial Sequence
  Synthetic
caagccauauagccaaaag

SEQ ID NO: 49149 - RNA, 20 nt, Artificial Sequence
  Synthetic
ucaagccauauagccaaaag

SEQ ID NO: 49150 - RNA, 21 nt, Artificial Sequence
  Synthetic
uucaagccauauagccaaaag

SEQ ID NO: 49151 - RNA, 22 nt, Artificial Sequence
  Synthetic
uuucaagccauauagccaaaag

SEQ ID NO: 49152 - RNA, 23 nt, Artificial Sequence
  Synthetic
uuuucaagccauauagccaaaag

SEQ ID NO: 49153 - RNA, 24 nt, Artificial Sequence
  Synthetic
auuuucaagccauauagccaaaag

SEQ ID NO: 49154 - RNA, 18 nt, Artificial Sequence
  Synthetic
uuugacuaaggccaaaag

SEQ ID NO: 49155 - RNA, 20 nt, Artificial Sequence
  Synthetic
uguuugacuaaggccaaaag

SEQ ID NO: 49156 - RNA, 21 nt, Artificial Sequence
  Synthetic
cuguuugacuaaggccaaaag

SEQ ID NO: 49157 - RNA, 22 nt, Artificial Sequence
  Synthetic
ucuguuugacuaaggccaaaag

SEQ ID NO: 49158 - RNA, 23 nt, Artificial Sequence
  Synthetic
uucuguuugacuaaggccaaaag

SEQ ID NO: 49159 - RNA, 24 nt, Artificial Sequence
  Synthetic
auucuguuugacuaaggccaaaag

SEQ ID NO: 49160 - RNA, 18 nt, Artificial Sequence
  Synthetic
uauuccaagcagcaaaag

SEQ ID NO: 49161 - RNA, 21 nt, Artificial Sequence
  Synthetic
ugguauuccaagcagcaaaag

SEQ ID NO: 49162 - RNA, 22 nt, Artificial Sequence
  Synthetic
uugguauuccaagcagcaaaag

SEQ ID NO: 49163 - RNA, 23 nt, Artificial Sequence
  Synthetic
cuugguauuccaagcagcaaaag

SEQ ID NO: 49164 - RNA, 24 nt, Artificial Sequence
  Synthetic
acuugguauuccaagcagcaaaag

SEQ ID NO: 49165 - RNA, 18 nt, Artificial Sequence
  Synthetic
cuaccaucuucgcaaaag

SEQ ID NO: 49166 - RNA, 19 nt, Artificial Sequence
  Synthetic
acuaccaucuucgcaaaag

SEQ ID NO: 49167 - RNA, 20 nt, Artificial Sequence
  Synthetic
aacuaccaucuucgcaaaag

SEQ ID NO: 49168 - RNA, 22 nt, Artificial Sequence
  Synthetic
agaacuaccaucuucgcaaaag

SEQ ID NO: 49169 - RNA, 23 nt, Artificial Sequence
  Synthetic
aagaacuaccaucuucgcaaaag

SEQ ID NO: 49170 - RNA, 24 nt, Artificial Sequence
  Synthetic
uaagaacuaccaucuucgcaaaag

SEQ ID NO: 49171 - RNA, 18 nt, Artificial Sequence
  Synthetic
ugccuccagaggcaaaag

SEQ ID NO: 49172 - RNA, 19 nt, Artificial Sequence
  Synthetic
uugccuccagaggcaaaag

SEQ ID NO: 49173 - RNA, 20 nt, Artificial Sequence
  Synthetic
uuugccuccagaggcaaaag

SEQ ID NO: 49174 - RNA, 21 nt, Artificial Sequence
  Synthetic
uuuugccuccagaggcaaaag

SEQ ID NO: 49175 - RNA, 22 nt, Artificial Sequence
  Synthetic
cuuuugccuccagaggcaaaag

SEQ ID NO: 49176 - RNA, 23 nt, Artificial Sequence
  Synthetic
ccuuuugccuccagaggcaaaag

SEQ ID NO: 49177 - RNA, 24 nt, Artificial Sequence
  Synthetic
accuuuugccuccagaggcaaaag

SEQ ID NO: 49178 - RNA, 18 nt, Artificial Sequence
  Synthetic
ugugauuauaggcaaaag

SEQ ID NO: 49179 - RNA, 19 nt, Artificial Sequence
  Synthetic
augugauuauaggcaaaag

SEQ ID NO: 49180 - RNA, 20 nt, Artificial Sequence
  Synthetic
uaugugauuauaggcaaaag

SEQ ID NO: 49181 - RNA, 22 nt, Artificial Sequence
  Synthetic
aguaugugauuauaggcaaaag

SEQ ID NO: 49182 - RNA, 23 nt, Artificial Sequence
  Synthetic
caguaugugauuauaggcaaaag

SEQ ID NO: 49183 - RNA, 24 nt, Artificial Sequence
  Synthetic
acaguaugugauuauaggcaaaag

SEQ ID NO: 49184 - RNA, 18 nt, Artificial Sequence
  Synthetic
uaaaauaggaaucaaaag

SEQ ID NO: 49185 - RNA, 19 nt, Artificial Sequence
  Synthetic
auaaaauaggaaucaaaag

SEQ ID NO: 49186 - RNA, 20 nt, Artificial Sequence
  Synthetic
cauaaaauaggaaucaaaag

SEQ ID NO: 49187 - RNA, 21 nt, Artificial Sequence
  Synthetic
acauaaaauaggaaucaaaag

SEQ ID NO: 49188 - RNA, 22 nt, Artificial Sequence
  Synthetic
aacauaaaauaggaaucaaaag

SEQ ID NO: 49189 - RNA, 23 nt, Artificial Sequence
  Synthetic
aaacauaaaauaggaaucaaaag

SEQ ID NO: 49190 - RNA, 18 nt, Artificial Sequence
  Synthetic
uggcugaaacaucaaaag

SEQ ID NO: 49191 - RNA, 19 nt, Artificial Sequence
  Synthetic
cuggcugaaacaucaaaag

SEQ ID NO: 49192 - RNA, 20 nt, Artificial Sequence
  Synthetic
ccuggcugaaacaucaaaag

SEQ ID NO: 49193 - RNA, 21 nt, Artificial Sequence
  Synthetic
accuggcugaaacaucaaaag

SEQ ID NO: 49194 - RNA, 22 nt, Artificial Sequence
  Synthetic
uaccuggcugaaacaucaaaag

SEQ ID NO: 49195 - RNA, 23 nt, Artificial Sequence
  Synthetic
uuaccuggcugaaacaucaaaag

SEQ ID NO: 49196 - RNA, 24 nt, Artificial Sequence
  Synthetic
uuuaccuggcugaaacaucaaaag

SEQ ID NO: 49197 - RNA, 21 nt, Artificial Sequence
  Synthetic
uuaaggacaugccaucaaaag

SEQ ID NO: 49198 - RNA, 22 nt, Artificial Sequence
  Synthetic
auuaaggacaugccaucaaaag

SEQ ID NO: 49199 - RNA, 23 nt, Artificial Sequence
  Synthetic
cauuaaggacaugccaucaaaag

SEQ ID NO: 49200 - RNA, 24 nt, Artificial Sequence
  Synthetic
ucauuaaggacaugccaucaaaag

SEQ ID NO: 49201 - RNA, 18 nt, Artificial Sequence
  Synthetic
ugugcaauguaagaaaag

SEQ ID NO: 49202 - RNA, 19 nt, Artificial Sequence
  Synthetic
augugcaauguaagaaaag

SEQ ID NO: 49203 - RNA, 20 nt, Artificial Sequence
  Synthetic
aaugugcaauguaagaaaag

SEQ ID NO: 49204 - RNA, 21 nt, Artificial Sequence
  Synthetic
aaaugugcaauguaagaaaag

SEQ ID NO: 49205 - RNA, 22 nt, Artificial Sequence
  Synthetic
uaaaugugcaauguaagaaaag

SEQ ID NO: 49206 - RNA, 23 nt, Artificial Sequence
  Synthetic
uuaaaugugcaauguaagaaaag

SEQ ID NO: 49207 - RNA, 24 nt, Artificial Sequence
  Synthetic
cuuaaaugugcaauguaagaaaag

SEQ ID NO: 49208 - RNA, 22 nt, Artificial Sequence
  Synthetic
cgaaacugaagacacagaaaag

SEQ ID NO: 49209 - RNA, 24 nt, Artificial Sequence
  Synthetic
agcgaaacugaagacacagaaaag

SEQ ID NO: 49210 - RNA, 18 nt, Artificial Sequence
  Synthetic
aagaucaugccagaaaag

SEQ ID NO: 49211 - RNA, 20 nt, Artificial Sequence
  Synthetic
agaagaucaugccagaaaag

SEQ ID NO: 49212 - RNA, 21 nt, Artificial Sequence
  Synthetic
cagaagaucaugccagaaaag

SEQ ID NO: 49213 - RNA, 22 nt, Artificial Sequence
  Synthetic
acagaagaucaugccagaaaag

SEQ ID NO: 49214 - RNA, 23 nt, Artificial Sequence
  Synthetic
aacagaagaucaugccagaaaag

SEQ ID NO: 49215 - RNA, 24 nt, Artificial Sequence
  Synthetic
uaacagaagaucaugccagaaaag

SEQ ID NO: 49216 - RNA, 18 nt, Artificial Sequence
  Synthetic
auuucauccaaggaaaag

SEQ ID NO: 49217 - RNA, 19 nt, Artificial Sequence
  Synthetic
aauuucauccaaggaaaag

SEQ ID NO: 49218 - RNA, 20 nt, Artificial Sequence
  Synthetic
uaauuucauccaaggaaaag

SEQ ID NO: 49219 - RNA, 22 nt, Artificial Sequence
  Synthetic
aguaauuucauccaaggaaaag

SEQ ID NO: 49220 - RNA, 24 nt, Artificial Sequence
  Synthetic
agaguaauuucauccaaggaaaag

SEQ ID NO: 49221 - RNA, 21 nt, Artificial Sequence
  Synthetic
aagagaaaaacacuggaaaag

SEQ ID NO: 49222 - RNA, 22 nt, Artificial Sequence
  Synthetic
aaagagaaaaacacuggaaaag

SEQ ID NO: 49223 - RNA, 23 nt, Artificial Sequence
  Synthetic
aaaagagaaaaacacuggaaaag

SEQ ID NO: 49224 - RNA, 24 nt, Artificial Sequence
  Synthetic
uaaaagagaaaaacacuggaaaag

SEQ ID NO: 49225 - RNA, 18 nt, Artificial Sequence
  Synthetic
aacaaggguuuugaaaag

SEQ ID NO: 49226 - RNA, 19 nt, Artificial Sequence
  Synthetic
uaacaaggguuuugaaaag

SEQ ID NO: 49227 - RNA, 20 nt, Artificial Sequence
  Synthetic
uuaacaaggguuuugaaaag

SEQ ID NO: 49228 - RNA, 21 nt, Artificial Sequence
  Synthetic
uuuaacaaggguuuugaaaag

SEQ ID NO: 49229 - RNA, 22 nt, Artificial Sequence
  Synthetic
uuuuaacaaggguuuugaaaag

SEQ ID NO: 49230 - RNA, 23 nt, Artificial Sequence
  Synthetic
auuuuaacaaggguuuugaaaag

SEQ ID NO: 49231 - RNA, 24 nt, Artificial Sequence
  Synthetic
uauuuuaacaaggguuuugaaaag

SEQ ID NO: 49232 - RNA, 18 nt, Artificial Sequence
  Synthetic
aacuugauaaaauaaaag

SEQ ID NO: 49233 - RNA, 20 nt, Artificial Sequence
  Synthetic
ugaacuugauaaaauaaaag

SEQ ID NO: 49234 - RNA, 22 nt, Artificial Sequence
  Synthetic
ugugaacuugauaaaauaaaag

SEQ ID NO: 49235 - RNA, 23 nt, Artificial Sequence
  Synthetic
augugaacuugauaaaauaaaag

SEQ ID NO: 49236 - RNA, 24 nt, Artificial Sequence
  Synthetic
caugugaacuugauaaaauaaaag

SEQ ID NO: 49237 - RNA, 21 nt, Artificial Sequence
  Synthetic
cuuaauuacaaggaauaaaag

SEQ ID NO: 49238 - RNA, 22 nt, Artificial Sequence
  Synthetic
ucuuaauuacaaggaauaaaag

SEQ ID NO: 49239 - RNA, 23 nt, Artificial Sequence
  Synthetic
uucuuaauuacaaggaauaaaag

SEQ ID NO: 49240 - RNA, 24 nt, Artificial Sequence
  Synthetic
uuucuuaauuacaaggaauaaaag

SEQ ID NO: 49241 - RNA, 18 nt, Artificial Sequence
  Synthetic
aucucuuagaaguaaaag

SEQ ID NO: 49242 - RNA, 19 nt, Artificial Sequence
  Synthetic
caucucuuagaaguaaaag

SEQ ID NO: 49243 - RNA, 20 nt, Artificial Sequence
  Synthetic
ucaucucuuagaaguaaaag

SEQ ID NO: 49244 - RNA, 21 nt, Artificial Sequence
  Synthetic
uucaucucuuagaaguaaaag

SEQ ID NO: 49245 - RNA, 22 nt, Artificial Sequence
  Synthetic
uuucaucucuuagaaguaaaag

SEQ ID NO: 49246 - RNA, 23 nt, Artificial Sequence
  Synthetic
uuuucaucucuuagaaguaaaag

SEQ ID NO: 49247 - RNA, 24 nt, Artificial Sequence
  Synthetic
auuuucaucucuuagaaguaaaag

SEQ ID NO: 49248 - RNA, 18 nt, Artificial Sequence
  Synthetic
ucagggccauaguaaaag

SEQ ID NO: 49249 - RNA, 19 nt, Artificial Sequence
  Synthetic
aucagggccauaguaaaag

SEQ ID NO: 49250 - RNA, 21 nt, Artificial Sequence
  Synthetic
agaucagggccauaguaaaag

SEQ ID NO: 49251 - RNA, 22 nt, Artificial Sequence
  Synthetic
uagaucagggccauaguaaaag

SEQ ID NO: 49252 - RNA, 23 nt, Artificial Sequence
  Synthetic
uuagaucagggccauaguaaaag

SEQ ID NO: 49253 - RNA, 24 nt, Artificial Sequence
  Synthetic
cuuagaucagggccauaguaaaag

SEQ ID NO: 49254 - RNA, 18 nt, Artificial Sequence
  Synthetic
aaagugaggugguaaaag

SEQ ID NO: 49255 - RNA, 19 nt, Artificial Sequence
  Synthetic
aaaagugaggugguaaaag

SEQ ID NO: 49256 - RNA, 20 nt, Artificial Sequence
  Synthetic
uaaaagugaggugguaaaag

SEQ ID NO: 49257 - RNA, 21 nt, Artificial Sequence
  Synthetic
auaaaagugaggugguaaaag

SEQ ID NO: 49258 - RNA, 22 nt, Artificial Sequence
  Synthetic
cauaaaagugaggugguaaaag

SEQ ID NO: 49259 - RNA, 23 nt, Artificial Sequence
  Synthetic
acauaaaagugaggugguaaaag

SEQ ID NO: 49260 - RNA, 24 nt, Artificial Sequence
  Synthetic
aacauaaaagugaggugguaaaag

SEQ ID NO: 49261 - RNA, 18 nt, Artificial Sequence
  Synthetic
ucguuaccuugguaaaag

SEQ ID NO: 49262 - RNA, 19 nt, Artificial Sequence
  Synthetic
uucguuaccuugguaaaag

SEQ ID NO: 49263 - RNA, 20 nt, Artificial Sequence
  Synthetic
uuucguuaccuugguaaaag

SEQ ID NO: 49264 - RNA, 22 nt, Artificial Sequence
  Synthetic
aguuucguuaccuugguaaaag

SEQ ID NO: 49265 - RNA, 23 nt, Artificial Sequence
  Synthetic
aaguuucguuaccuugguaaaag

SEQ ID NO: 49266 - RNA, 24 nt, Artificial Sequence
  Synthetic
caaguuucguuaccuugguaaaag

SEQ ID NO: 49267 - RNA, 19 nt, Artificial Sequence
  Synthetic
ugcauuagugauguaaaag

SEQ ID NO: 49268 - RNA, 20 nt, Artificial Sequence
  Synthetic
augcauuagugauguaaaag

SEQ ID NO: 49269 - RNA, 22 nt, Artificial Sequence
  Synthetic
ugaugcauuagugauguaaaag

SEQ ID NO: 49270 - RNA, 23 nt, Artificial Sequence
  Synthetic
cugaugcauuagugauguaaaag

SEQ ID NO: 49271 - RNA, 21 nt, Artificial Sequence
  Synthetic
uagcaacagaagcauuaaaag

SEQ ID NO: 49272 - RNA, 22 nt, Artificial Sequence
  Synthetic
uuagcaacagaagcauuaaaag

SEQ ID NO: 49273 - RNA, 23 nt, Artificial Sequence
  Synthetic
auuagcaacagaagcauuaaaag

SEQ ID NO: 49274 - RNA, 24 nt, Artificial Sequence
  Synthetic
aauuagcaacagaagcauuaaaag

SEQ ID NO: 49275 - RNA, 18 nt, Artificial Sequence
  Synthetic
cccauaguguauuaaaag

SEQ ID NO: 49276 - RNA, 19 nt, Artificial Sequence
  Synthetic
acccauaguguauuaaaag

SEQ ID NO: 49277 - RNA, 21 nt, Artificial Sequence
  Synthetic
ugacccauaguguauuaaaag

SEQ ID NO: 49278 - RNA, 22 nt, Artificial Sequence
  Synthetic
uugacccauaguguauuaaaag

SEQ ID NO: 49279 - RNA, 23 nt, Artificial Sequence
  Synthetic
uuugacccauaguguauuaaaag

SEQ ID NO: 49280 - RNA, 24 nt, Artificial Sequence
  Synthetic
auuugacccauaguguauuaaaag

SEQ ID NO: 49281 - RNA, 18 nt, Artificial Sequence
  Synthetic
ccuuaaacaaguuaaaag

SEQ ID NO: 49282 - RNA, 19 nt, Artificial Sequence
  Synthetic
uccuuaaacaaguuaaaag

SEQ ID NO: 49283 - RNA, 21 nt, Artificial Sequence
  Synthetic
uguccuuaaacaaguuaaaag

SEQ ID NO: 49284 - RNA, 22 nt, Artificial Sequence
  Synthetic
cuguccuuaaacaaguuaaaag

SEQ ID NO: 49285 - RNA, 23 nt, Artificial Sequence
  Synthetic
acuguccuuaaacaaguuaaaag

SEQ ID NO: 49286 - RNA, 24 nt, Artificial Sequence
  Synthetic
cacuguccuuaaacaaguuaaaag

SEQ ID NO: 49287 - RNA, 18 nt, Artificial Sequence
  Synthetic
agauagcccaguuaaaag

SEQ ID NO: 49288 - RNA, 19 nt, Artificial Sequence
  Synthetic
uagauagcccaguuaaaag

SEQ ID NO: 49289 - RNA, 20 nt, Artificial Sequence
  Synthetic
uuagauagcccaguuaaaag

SEQ ID NO: 49290 - RNA, 21 nt, Artificial Sequence
  Synthetic
auuagauagcccaguuaaaag

SEQ ID NO: 49291 - RNA, 22 nt, Artificial Sequence
  Synthetic
aauuagauagcccaguuaaaag

SEQ ID NO: 49292 - RNA, 23 nt, Artificial Sequence
  Synthetic
uaauuagauagcccaguuaaaag

SEQ ID NO: 49293 - RNA, 24 nt, Artificial Sequence
  Synthetic
uuaauuagauagcccaguuaaaag

SEQ ID NO: 49294 - RNA, 20 nt, Artificial Sequence
  Synthetic
uggagguccuuaguuaaaag

SEQ ID NO: 49295 - RNA, 21 nt, Artificial Sequence
  Synthetic
cuggagguccuuaguuaaaag

SEQ ID NO: 49296 - RNA, 22 nt, Artificial Sequence
  Synthetic
ucuggagguccuuaguuaaaag

SEQ ID NO: 49297 - RNA, 23 nt, Artificial Sequence
  Synthetic
aucuggagguccuuaguuaaaag

SEQ ID NO: 49298 - RNA, 19 nt, Artificial Sequence
  Synthetic
agaugccaaacguuaaaag

SEQ ID NO: 49299 - RNA, 20 nt, Artificial Sequence
  Synthetic
cagaugccaaacguuaaaag

SEQ ID NO: 49300 - RNA, 21 nt, Artificial Sequence
  Synthetic
ucagaugccaaacguuaaaag

SEQ ID NO: 49301 - RNA, 22 nt, Artificial Sequence
  Synthetic
aucagaugccaaacguuaaaag

SEQ ID NO: 49302 - RNA, 23 nt, Artificial Sequence
  Synthetic
uaucagaugccaaacguuaaaag

SEQ ID NO: 49303 - RNA, 24 nt, Artificial Sequence
  Synthetic
uuaucagaugccaaacguuaaaag

SEQ ID NO: 49304 - RNA, 18 nt, Artificial Sequence
  Synthetic
ccauagaaauuuuaaaag

SEQ ID NO: 49305 - RNA, 19 nt, Artificial Sequence
  Synthetic
accauagaaauuuuaaaag

SEQ ID NO: 49306 - RNA, 20 nt, Artificial Sequence
  Synthetic
uaccauagaaauuuuaaaag

SEQ ID NO: 49307 - RNA, 21 nt, Artificial Sequence
  Synthetic
aaacagcagucuagaacaaag

SEQ ID NO: 49308 - RNA, 22 nt, Artificial Sequence
  Synthetic
caaacagcagucuagaacaaag

SEQ ID NO: 49309 - RNA, 23 nt, Artificial Sequence
  Synthetic
ccaaacagcagucuagaacaaag

SEQ ID NO: 49310 - RNA, 18 nt, Artificial Sequence
  Synthetic
caguaugacuggacaaag

SEQ ID NO: 49311 - RNA, 19 nt, Artificial Sequence
  Synthetic
ccaguaugacuggacaaag

SEQ ID NO: 49312 - RNA, 20 nt, Artificial Sequence
  Synthetic
uccaguaugacuggacaaag

SEQ ID NO: 49313 - RNA, 22 nt, Artificial Sequence
  Synthetic
uguccaguaugacuggacaaag

SEQ ID NO: 49314 - RNA, 23 nt, Artificial Sequence
  Synthetic
auguccaguaugacuggacaaag

SEQ ID NO: 49315 - RNA, 18 nt, Artificial Sequence
  Synthetic
aggauaggaaauacaaag

SEQ ID NO: 49316 - RNA, 19 nt, Artificial Sequence
  Synthetic
caggauaggaaauacaaag

SEQ ID NO: 49317 - RNA, 20 nt, Artificial Sequence
  Synthetic
ucaggauaggaaauacaaag

SEQ ID NO: 49318 - RNA, 22 nt, Artificial Sequence
  Synthetic
agucaggauaggaaauacaaag

SEQ ID NO: 49319 - RNA, 23 nt, Artificial Sequence
  Synthetic
uagucaggauaggaaauacaaag

SEQ ID NO: 49320 - RNA, 24 nt, Artificial Sequence
  Synthetic
uuagucaggauaggaaauacaaag

SEQ ID NO: 49321 - RNA, 18 nt, Artificial Sequence
  Synthetic
cagcuaugugcuacaaag

SEQ ID NO: 49322 - RNA, 19 nt, Artificial Sequence
  Synthetic
acagcuaugugcuacaaag

SEQ ID NO: 49323 - RNA, 20 nt, Artificial Sequence
  Synthetic
uacagcuaugugcuacaaag

SEQ ID NO: 49324 - RNA, 21 nt, Artificial Sequence
  Synthetic
auacagcuaugugcuacaaag

SEQ ID NO: 49325 - RNA, 22 nt, Artificial Sequence
  Synthetic
cauacagcuaugugcuacaaag

SEQ ID NO: 49326 - RNA, 23 nt, Artificial Sequence
  Synthetic
acauacagcuaugugcuacaaag

SEQ ID NO: 49327 - RNA, 24 nt, Artificial Sequence
  Synthetic
uacauacagcuaugugcuacaaag

SEQ ID NO: 49328 - RNA, 18 nt, Artificial Sequence
  Synthetic
ucaagaguuaguacaaag

SEQ ID NO: 49329 - RNA, 20 nt, Artificial Sequence
  Synthetic
agucaagaguuaguacaaag

SEQ ID NO: 49330 - RNA, 22 nt, Artificial Sequence
  Synthetic
ugagucaagaguuaguacaaag

SEQ ID NO: 49331 - RNA, 23 nt, Artificial Sequence
  Synthetic
augagucaagaguuaguacaaag

SEQ ID NO: 49332 - RNA, 24 nt, Artificial Sequence
  Synthetic
uaugagucaagaguuaguacaaag

SEQ ID NO: 49333 - RNA, 18 nt, Artificial Sequence
  Synthetic
aaacaaggaguaccaaag

SEQ ID NO: 49334 - RNA, 21 nt, Artificial Sequence
  Synthetic
uggaaacaaggaguaccaaag

SEQ ID NO: 49335 - RNA, 22 nt, Artificial Sequence
  Synthetic
cuggaaacaaggaguaccaaag

SEQ ID NO: 49336 - RNA, 23 nt, Artificial Sequence
  Synthetic
ucuggaaacaaggaguaccaaag

SEQ ID NO: 49337 - RNA, 24 nt, Artificial Sequence
  Synthetic
uucuggaaacaaggaguaccaaag

SEQ ID NO: 49338 - RNA, 19 nt, Artificial Sequence
  Synthetic
aggucaguuguuaccaaag

SEQ ID NO: 49339 - RNA, 20 nt, Artificial Sequence
  Synthetic
uaggucaguuguuaccaaag

SEQ ID NO: 49340 - RNA, 21 nt, Artificial Sequence
  Synthetic
cuaggucaguuguuaccaaag

SEQ ID NO: 49341 - RNA, 22 nt, Artificial Sequence
  Synthetic
ucuaggucaguuguuaccaaag

SEQ ID NO: 49342 - RNA, 23 nt, Artificial Sequence
  Synthetic
aucuaggucaguuguuaccaaag

SEQ ID NO: 49343 - RNA, 24 nt, Artificial Sequence
  Synthetic
uaucuaggucaguuguuaccaaag

SEQ ID NO: 49344 - RNA, 18 nt, Artificial Sequence
  Synthetic
uauucagccagcccaaag

SEQ ID NO: 49345 - RNA, 19 nt, Artificial Sequence
  Synthetic
auauucagccagcccaaag

SEQ ID NO: 49346 - RNA, 21 nt, Artificial Sequence
  Synthetic
agauauucagccagcccaaag

SEQ ID NO: 49347 - RNA, 22 nt, Artificial Sequence
  Synthetic
aagauauucagccagcccaaag

SEQ ID NO: 49348 - RNA, 24 nt, Artificial Sequence
  Synthetic
ugaagauauucagccagcccaaag

SEQ ID NO: 49349 - RNA, 18 nt, Artificial Sequence
  Synthetic
auuccaauuuagccaaag

SEQ ID NO: 49350 - RNA, 20 nt, Artificial Sequence
  Synthetic
ugauuccaauuuagccaaag

SEQ ID NO: 49351 - RNA, 21 nt, Artificial Sequence
  Synthetic
augauuccaauuuagccaaag

SEQ ID NO: 49352 - RNA, 22 nt, Artificial Sequence
  Synthetic
aaugauuccaauuuagccaaag

SEQ ID NO: 49353 - RNA, 23 nt, Artificial Sequence
  Synthetic
uaaugauuccaauuuagccaaag

SEQ ID NO: 49354 - RNA, 24 nt, Artificial Sequence
  Synthetic
uuaaugauuccaauuuagccaaag

SEQ ID NO: 49355 - RNA, 21 nt, Artificial Sequence
  Synthetic
cuaaguccuucauuuccaaag

SEQ ID NO: 49356 - RNA, 22 nt, Artificial Sequence
  Synthetic
acuaaguccuucauuuccaaag

SEQ ID NO: 49357 - RNA, 23 nt, Artificial Sequence
  Synthetic
aacuaaguccuucauuuccaaag

SEQ ID NO: 49358 - RNA, 21 nt, Artificial Sequence
  Synthetic
uaggaggcacagagagcaaag

SEQ ID NO: 49359 - RNA, 22 nt, Artificial Sequence
  Synthetic
uuaggaggcacagagagcaaag

SEQ ID NO: 49360 - RNA, 23 nt, Artificial Sequence
  Synthetic
uuuaggaggcacagagagcaaag

SEQ ID NO: 49361 - RNA, 24 nt, Artificial Sequence
  Synthetic
uuuuaggaggcacagagagcaaag

SEQ ID NO: 49362 - RNA, 18 nt, Artificial Sequence
  Synthetic
uuacagugcugaucaaag

SEQ ID NO: 49363 - RNA, 19 nt, Artificial Sequence
  Synthetic
auuacagugcugaucaaag

SEQ ID NO: 49364 - RNA, 21 nt, Artificial Sequence
  Synthetic
agauuacagugcugaucaaag

SEQ ID NO: 49365 - RNA, 22 nt, Artificial Sequence
  Synthetic
aagauuacagugcugaucaaag

SEQ ID NO: 49366 - RNA, 23 nt, Artificial Sequence
  Synthetic
uaagauuacagugcugaucaaag

SEQ ID NO: 49367 - RNA, 24 nt, Artificial Sequence
  Synthetic
uuaagauuacagugcugaucaaag

SEQ ID NO: 49368 - RNA, 19 nt, Artificial Sequence
  Synthetic
agaaaacuacauaucaaag

SEQ ID NO: 49369 - RNA, 21 nt, Artificial Sequence
  Synthetic
ugagaaaacuacauaucaaag

SEQ ID NO: 49370 - RNA, 22 nt, Artificial Sequence
  Synthetic
cugagaaaacuacauaucaaag

SEQ ID NO: 49371 - RNA, 23 nt, Artificial Sequence
  Synthetic
acugagaaaacuacauaucaaag

SEQ ID NO: 49372 - RNA, 18 nt, Artificial Sequence
  Synthetic
uagggaaaccacucaaag

SEQ ID NO: 49373 - RNA, 20 nt, Artificial Sequence
  Synthetic
uguagggaaaccacucaaag

SEQ ID NO: 49374 - RNA, 22 nt, Artificial Sequence
  Synthetic
aguguagggaaaccacucaaag

SEQ ID NO: 49375 - RNA, 23 nt, Artificial Sequence
  Synthetic
aaguguagggaaaccacucaaag

SEQ ID NO: 49376 - RNA, 24 nt, Artificial Sequence
  Synthetic
aaaguguagggaaaccacucaaag

SEQ ID NO: 49377 - RNA, 19 nt, Artificial Sequence
  Synthetic
aguuacaguugguucaaag

SEQ ID NO: 49378 - RNA, 20 nt, Artificial Sequence
  Synthetic
uaguuacaguugguucaaag

SEQ ID NO: 49379 - RNA, 21 nt, Artificial Sequence
  Synthetic
uuaguuacaguugguucaaag

SEQ ID NO: 49380 - RNA, 23 nt, Artificial Sequence
  Synthetic
uguuaguuacaguugguucaaag

SEQ ID NO: 49381 - RNA, 24 nt, Artificial Sequence
  Synthetic
auguuaguuacaguugguucaaag

SEQ ID NO: 49382 - RNA, 19 nt, Artificial Sequence
  Synthetic
uguugugcauauuucaaag

SEQ ID NO: 49383 - RNA, 20 nt, Artificial Sequence
  Synthetic
uuguugugcauauuucaaag

SEQ ID NO: 49384 - RNA, 21 nt, Artificial Sequence
  Synthetic
auuguugugcauauuucaaag

SEQ ID NO: 49385 - RNA, 22 nt, Artificial Sequence
  Synthetic
aauuguugugcauauuucaaag

SEQ ID NO: 49386 - RNA, 23 nt, Artificial Sequence
  Synthetic
aaauuguugugcauauuucaaag

SEQ ID NO: 49387 - RNA, 18 nt, Artificial Sequence
  Synthetic
uaccuuggauuuucaaag

SEQ ID NO: 49388 - RNA, 19 nt, Artificial Sequence
  Synthetic
uuaccuuggauuuucaaag

SEQ ID NO: 49389 - RNA, 21 nt, Artificial Sequence
  Synthetic
uguuaccuuggauuuucaaag

SEQ ID NO: 49390 - RNA, 22 nt, Artificial Sequence
  Synthetic
uuguuaccuuggauuuucaaag

SEQ ID NO: 49391 - RNA, 23 nt, Artificial Sequence
  Synthetic
uuuguuaccuuggauuuucaaag

SEQ ID NO: 49392 - RNA, 24 nt, Artificial Sequence
  Synthetic
auuuguuaccuuggauuuucaaag

SEQ ID NO: 49393 - RNA, 22 nt, Artificial Sequence
  Synthetic
ugcauuuauuauaaaaagaaag

SEQ ID NO: 49394 - RNA, 23 nt, Artificial Sequence
  Synthetic
uugcauuuauuauaaaaagaaag

SEQ ID NO: 49395 - RNA, 24 nt, Artificial Sequence
  Synthetic
uuugcauuuauuauaaaaagaaag

SEQ ID NO: 49396 - RNA, 22 nt, Artificial Sequence
  Synthetic
aguggaaaugcuggaaagaaag

SEQ ID NO: 49397 - RNA, 23 nt, Artificial Sequence
  Synthetic
aaguggaaaugcuggaaagaaag

SEQ ID NO: 49398 - RNA, 24 nt, Artificial Sequence
  Synthetic
caaguggaaaugcuggaaagaaag

SEQ ID NO: 49399 - RNA, 23 nt, Artificial Sequence
  Synthetic
ugguuaaaguauaaggaagaaag

SEQ ID NO: 49400 - RNA, 24 nt, Artificial Sequence
  Synthetic
uugguuaaaguauaaggaagaaag

SEQ ID NO: 49401 - RNA, 18 nt, Artificial Sequence
  Synthetic
ugaagacuauuaagaaag

SEQ ID NO: 49402 - RNA, 19 nt, Artificial Sequence
  Synthetic
uugaagacuauuaagaaag

SEQ ID NO: 49403 - RNA, 22 nt, Artificial Sequence
  Synthetic
agguugaagacuauuaagaaag

SEQ ID NO: 49404 - RNA, 23 nt, Artificial Sequence
  Synthetic
cagguugaagacuauuaagaaag

SEQ ID NO: 49405 - RNA, 24 nt, Artificial Sequence
  Synthetic
ucagguugaagacuauuaagaaag

SEQ ID NO: 49406 - RNA, 18 nt, Artificial Sequence
  Synthetic
cagaucaauuuaagaaag

SEQ ID NO: 49407 - RNA, 20 nt, Artificial Sequence
  Synthetic
agcagaucaauuuaagaaag

SEQ ID NO: 49408 - RNA, 21 nt, Artificial Sequence
  Synthetic
cagcagaucaauuuaagaaag

SEQ ID NO: 49409 - RNA, 22 nt, Artificial Sequence
  Synthetic
ucagcagaucaauuuaagaaag

SEQ ID NO: 49410 - RNA, 23 nt, Artificial Sequence
  Synthetic
cucagcagaucaauuuaagaaag

SEQ ID NO: 49411 - RNA, 24 nt, Artificial Sequence
  Synthetic
acucagcagaucaauuuaagaaag

SEQ ID NO: 49412 - RNA, 18 nt, Artificial Sequence
  Synthetic
aacccaaggaagagaaag

SEQ ID NO: 49413 - RNA, 19 nt, Artificial Sequence
  Synthetic
caacccaaggaagagaaag

SEQ ID NO: 49414 - RNA, 21 nt, Artificial Sequence
  Synthetic
ugcaacccaaggaagagaaag

SEQ ID NO: 49415 - RNA, 22 nt, Artificial Sequence
  Synthetic
uugcaacccaaggaagagaaag

SEQ ID NO: 49416 - RNA, 23 nt, Artificial Sequence
  Synthetic
uuugcaacccaaggaagagaaag

SEQ ID NO: 49417 - RNA, 24 nt, Artificial Sequence
  Synthetic
cuuugcaacccaaggaagagaaag

SEQ ID NO: 49418 - RNA, 21 nt, Artificial Sequence
  Synthetic
agugagagaaaauagagaaag

SEQ ID NO: 49419 - RNA, 22 nt, Artificial Sequence
  Synthetic
cagugagagaaaauagagaaag

SEQ ID NO: 49420 - RNA, 23 nt, Artificial Sequence
  Synthetic
ccagugagagaaaauagagaaag

SEQ ID NO: 49421 - RNA, 18 nt, Artificial Sequence
  Synthetic
uggaauucuccuagaaag

SEQ ID NO: 49422 - RNA, 19 nt, Artificial Sequence
  Synthetic
uuggaauucuccuagaaag

SEQ ID NO: 49423 - RNA, 20 nt, Artificial Sequence
  Synthetic
auuggaauucuccuagaaag

SEQ ID NO: 49424 - RNA, 21 nt, Artificial Sequence
  Synthetic
aauuggaauucuccuagaaag

SEQ ID NO: 49425 - RNA, 22 nt, Artificial Sequence
  Synthetic
caauuggaauucuccuagaaag

SEQ ID NO: 49426 - RNA, 23 nt, Artificial Sequence
  Synthetic
acaauuggaauucuccuagaaag

SEQ ID NO: 49427 - RNA, 19 nt, Artificial Sequence
  Synthetic
ugugucacacuguagaaag

SEQ ID NO: 49428 - RNA, 20 nt, Artificial Sequence
  Synthetic
augugucacacuguagaaag

SEQ ID NO: 49429 - RNA, 22 nt, Artificial Sequence
  Synthetic
agaugugucacacuguagaaag

SEQ ID NO: 49430 - RNA, 24 nt, Artificial Sequence
  Synthetic
ugagaugugucacacuguagaaag

SEQ ID NO: 49431 - RNA, 18 nt, Artificial Sequence
  Synthetic
agauuuauuuuuagaaag

SEQ ID NO: 49432 - RNA, 19 nt, Artificial Sequence
  Synthetic
uagauuuauuuuuagaaag

SEQ ID NO: 49433 - RNA, 22 nt, Artificial Sequence
  Synthetic
agguagauuuauuuuuagaaag

SEQ ID NO: 49434 - RNA, 23 nt, Artificial Sequence
  Synthetic
uagguagauuuauuuuuagaaag

SEQ ID NO: 49435 - RNA, 24 nt, Artificial Sequence
  Synthetic
uuagguagauuuauuuuuagaaag

SEQ ID NO: 49436 - RNA, 21 nt, Artificial Sequence
  Synthetic
uaaaaaagaauuaagggaaag

SEQ ID NO: 49437 - RNA, 22 nt, Artificial Sequence
  Synthetic
cuaaaaaagaauuaagggaaag

SEQ ID NO: 49438 - RNA, 24 nt, Artificial Sequence
  Synthetic
agcuaaaaaagaauuaagggaaag

SEQ ID NO: 49439 - RNA, 18 nt, Artificial Sequence
  Synthetic
aaacuagcacauggaaag

SEQ ID NO: 49440 - RNA, 19 nt, Artificial Sequence
  Synthetic
caaacuagcacauggaaag

SEQ ID NO: 49441 - RNA, 20 nt, Artificial Sequence
  Synthetic
ucaaacuagcacauggaaag

SEQ ID NO: 49442 - RNA, 21 nt, Artificial Sequence
  Synthetic
cucaaacuagcacauggaaag

SEQ ID NO: 49443 - RNA, 22 nt, Artificial Sequence
  Synthetic
ucucaaacuagcacauggaaag

SEQ ID NO: 49444 - RNA, 23 nt, Artificial Sequence
  Synthetic
cucucaaacuagcacauggaaag

SEQ ID NO: 49445 - RNA, 24 nt, Artificial Sequence
  Synthetic
ccucucaaacuagcacauggaaag

SEQ ID NO: 49446 - RNA, 19 nt, Artificial Sequence
  Synthetic
agauuagauauuuggaaag

SEQ ID NO: 49447 - RNA, 20 nt, Artificial Sequence
  Synthetic
cagauuagauauuuggaaag

SEQ ID NO: 49448 - RNA, 22 nt, Artificial Sequence
  Synthetic
ugcagauuagauauuuggaaag

SEQ ID NO: 49449 - RNA, 23 nt, Artificial Sequence
  Synthetic
cugcagauuagauauuuggaaag

SEQ ID NO: 49450 - RNA, 24 nt, Artificial Sequence
  Synthetic
acugcagauuagauauuuggaaag

SEQ ID NO: 49451 - RNA, 19 nt, Artificial Sequence
  Synthetic
agacgccaccaaaugaaag

SEQ ID NO: 49452 - RNA, 22 nt, Artificial Sequence
  Synthetic
aggagacgccaccaaaugaaag

SEQ ID NO: 49453 - RNA, 23 nt, Artificial Sequence
  Synthetic
uaggagacgccaccaaaugaaag

SEQ ID NO: 49454 - RNA, 24 nt, Artificial Sequence
  Synthetic
auaggagacgccaccaaaugaaag

SEQ ID NO: 49455 - RNA, 18 nt, Artificial Sequence
  Synthetic
aagagggcagccugaaag

SEQ ID NO: 49456 - RNA, 19 nt, Artificial Sequence
  Synthetic
caagagggcagccugaaag

SEQ ID NO: 49457 - RNA, 20 nt, Artificial Sequence
  Synthetic
ucaagagggcagccugaaag

SEQ ID NO: 49458 - RNA, 21 nt, Artificial Sequence
  Synthetic
aucaagagggcagccugaaag

SEQ ID NO: 49459 - RNA, 23 nt, Artificial Sequence
  Synthetic
ugaucaagagggcagccugaaag

SEQ ID NO: 49460 - RNA, 18 nt, Artificial Sequence
  Synthetic
aaaaguuuguccugaaag

SEQ ID NO: 49461 - RNA, 20 nt, Artificial Sequence
  Synthetic
ugaaaaguuuguccugaaag

SEQ ID NO: 49462 - RNA, 21 nt, Artificial Sequence
  Synthetic
uugaaaaguuuguccugaaag

SEQ ID NO: 49463 - RNA, 22 nt, Artificial Sequence
  Synthetic
uuugaaaaguuuguccugaaag

SEQ ID NO: 49464 - RNA, 23 nt, Artificial Sequence
  Synthetic
auuugaaaaguuuguccugaaag

SEQ ID NO: 49465 - RNA, 24 nt, Artificial Sequence
  Synthetic
cauuugaaaaguuuguccugaaag

SEQ ID NO: 49466 - RNA, 18 nt, Artificial Sequence
  Synthetic
uuaugggauaagugaaag

SEQ ID NO: 49467 - RNA, 19 nt, Artificial Sequence
  Synthetic
uuuaugggauaagugaaag

SEQ ID NO: 49468 - RNA, 20 nt, Artificial Sequence
  Synthetic
uuuuaugggauaagugaaag

SEQ ID NO: 49469 - RNA, 22 nt, Artificial Sequence
  Synthetic
uguuuuaugggauaagugaaag

SEQ ID NO: 49470 - RNA, 23 nt, Artificial Sequence
  Synthetic
cuguuuuaugggauaagugaaag

SEQ ID NO: 49471 - RNA, 24 nt, Artificial Sequence
  Synthetic
acuguuuuaugggauaagugaaag

SEQ ID NO: 49472 - RNA, 20 nt, Artificial Sequence
  Synthetic
cggaauguagggggugaaag

SEQ ID NO: 49473 - RNA, 21 nt, Artificial Sequence
  Synthetic
acggaauguagggggugaaag

SEQ ID NO: 49474 - RNA, 22 nt, Artificial Sequence
  Synthetic
aacggaauguagggggugaaag

SEQ ID NO: 49475 - RNA, 23 nt, Artificial Sequence
  Synthetic
aaacggaauguagggggugaaag

SEQ ID NO: 49476 - RNA, 24 nt, Artificial Sequence
  Synthetic
aaaacggaauguagggggugaaag

SEQ ID NO: 49477 - RNA, 18 nt, Artificial Sequence
  Synthetic
uuuugacagauuugaaag

SEQ ID NO: 49478 - RNA, 19 nt, Artificial Sequence
  Synthetic
cuuuugacagauuugaaag

SEQ ID NO: 49479 - RNA, 20 nt, Artificial Sequence
  Synthetic
acuuuugacagauuugaaag

SEQ ID NO: 49480 - RNA, 21 nt, Artificial Sequence
  Synthetic
aacuuuugacagauuugaaag

SEQ ID NO: 49481 - RNA, 22 nt, Artificial Sequence
  Synthetic
caacuuuugacagauuugaaag

SEQ ID NO: 49482 - RNA, 24 nt, Artificial Sequence
  Synthetic
agcaacuuuugacagauuugaaag

SEQ ID NO: 49483 - RNA, 18 nt, Artificial Sequence
  Synthetic
aggugcacacaaauaaag

SEQ ID NO: 49484 - RNA, 19 nt, Artificial Sequence
  Synthetic
caggugcacacaaauaaag

SEQ ID NO: 49485 - RNA, 20 nt, Artificial Sequence
  Synthetic
ccaggugcacacaaauaaag

SEQ ID NO: 49486 - RNA, 21 nt, Artificial Sequence
  Synthetic
cccaggugcacacaaauaaag

SEQ ID NO: 49487 - RNA, 22 nt, Artificial Sequence
  Synthetic
ucccaggugcacacaaauaaag

SEQ ID NO: 49488 - RNA, 23 nt, Artificial Sequence
  Synthetic
aucccaggugcacacaaauaaag

SEQ ID NO: 49489 - RNA, 24 nt, Artificial Sequence
  Synthetic
aaucccaggugcacacaaauaaag

SEQ ID NO: 49490 - RNA, 18 nt, Artificial Sequence
  Synthetic
auaaaggcuuuaauaaag

SEQ ID NO: 49491 - RNA, 19 nt, Artificial Sequence
  Synthetic
uauaaaggcuuuaauaaag

SEQ ID NO: 49492 - RNA, 20 nt, Artificial Sequence
  Synthetic
auauaaaggcuuuaauaaag

SEQ ID NO: 49493 - RNA, 21 nt, Artificial Sequence
  Synthetic
uauauaaaggcuuuaauaaag

SEQ ID NO: 49494 - RNA, 22 nt, Artificial Sequence
  Synthetic
auauauaaaggcuuuaauaaag

SEQ ID NO: 49495 - RNA, 23 nt, Artificial Sequence
  Synthetic
aauauauaaaggcuuuaauaaag

SEQ ID NO: 49496 - RNA, 18 nt, Artificial Sequence
  Synthetic
ucuaugacagacauaaag

SEQ ID NO: 49497 - RNA, 19 nt, Artificial Sequence
  Synthetic
aucuaugacagacauaaag

SEQ ID NO: 49498 - RNA, 20 nt, Artificial Sequence
  Synthetic
aaucuaugacagacauaaag

SEQ ID NO: 49499 - RNA, 21 nt, Artificial Sequence
  Synthetic
uaaucuaugacagacauaaag

SEQ ID NO: 49500 - RNA, 22 nt, Artificial Sequence
  Synthetic
cuaaucuaugacagacauaaag

SEQ ID NO: 49501 - RNA, 23 nt, Artificial Sequence
  Synthetic
ucuaaucuaugacagacauaaag

SEQ ID NO: 49502 - RNA, 24 nt, Artificial Sequence
  Synthetic
uucuaaucuaugacagacauaaag

SEQ ID NO: 49503 - RNA, 18 nt, Artificial Sequence
  Synthetic
aauaacaauuuuauaaag

SEQ ID NO: 49504 - RNA, 19 nt, Artificial Sequence
  Synthetic
uaauaacaauuuuauaaag

SEQ ID NO: 49505 - RNA, 21 nt, Artificial Sequence
  Synthetic
aguaauaacaauuuuauaaag

SEQ ID NO: 49506 - RNA, 22 nt, Artificial Sequence
  Synthetic
aaguaauaacaauuuuauaaag

SEQ ID NO: 49507 - RNA, 23 nt, Artificial Sequence
  Synthetic
caaguaauaacaauuuuauaaag

SEQ ID NO: 49508 - RNA, 24 nt, Artificial Sequence
  Synthetic
acaaguaauaacaauuuuauaaag

SEQ ID NO: 49509 - RNA, 18 nt, Artificial Sequence
  Synthetic
uccuaaauuuuacuaaag

SEQ ID NO: 49510 - RNA, 19 nt, Artificial Sequence
  Synthetic
uuccuaaauuuuacuaaag

SEQ ID NO: 49511 - RNA, 20 nt, Artificial Sequence
  Synthetic
uuuccuaaauuuuacuaaag

SEQ ID NO: 49512 - RNA, 21 nt, Artificial Sequence
  Synthetic
cuuuccuaaauuuuacuaaag

SEQ ID NO: 49513 - RNA, 23 nt, Artificial Sequence
  Synthetic
ugcuuuccuaaauuuuacuaaag

SEQ ID NO: 49514 - RNA, 24 nt, Artificial Sequence
  Synthetic
augcuuuccuaaauuuuacuaaag

SEQ ID NO: 49515 - RNA, 18 nt, Artificial Sequence
  Synthetic
augugaaacugccuaaag

SEQ ID NO: 49516 - RNA, 19 nt, Artificial Sequence
  Synthetic
uaugugaaacugccuaaag

SEQ ID NO: 49517 - RNA, 20 nt, Artificial Sequence
  Synthetic
auaugugaaacugccuaaag

SEQ ID NO: 49518 - RNA, 22 nt, Artificial Sequence
  Synthetic
ugauaugugaaacugccuaaag

SEQ ID NO: 49519 - RNA, 23 nt, Artificial Sequence
  Synthetic
augauaugugaaacugccuaaag

SEQ ID NO: 49520 - RNA, 24 nt, Artificial Sequence
  Synthetic
aaugauaugugaaacugccuaaag

SEQ ID NO: 49521 - RNA, 18 nt, Artificial Sequence
  Synthetic
ugucuuguaaaaguaaag

SEQ ID NO: 49522 - RNA, 19 nt, Artificial Sequence
  Synthetic
augucuuguaaaaguaaag

SEQ ID NO: 49523 - RNA, 20 nt, Artificial Sequence
  Synthetic
aaugucuuguaaaaguaaag

SEQ ID NO: 49524 - RNA, 21 nt, Artificial Sequence
  Synthetic
uaaugucuuguaaaaguaaag

SEQ ID NO: 49525 - RNA, 22 nt, Artificial Sequence
  Synthetic
cuaaugucuuguaaaaguaaag

SEQ ID NO: 49526 - RNA, 24 nt, Artificial Sequence
  Synthetic
agcuaaugucuuguaaaaguaaag

SEQ ID NO: 49527 - RNA, 19 nt, Artificial Sequence
  Synthetic
uguauucuauggaguaaag

SEQ ID NO: 49528 - RNA, 20 nt, Artificial Sequence
  Synthetic
uuguauucuauggaguaaag

SEQ ID NO: 49529 - RNA, 21 nt, Artificial Sequence
  Synthetic
uuuguauucuauggaguaaag

SEQ ID NO: 49530 - RNA, 22 nt, Artificial Sequence
  Synthetic
uuuuguauucuauggaguaaag

SEQ ID NO: 49531 - RNA, 23 nt, Artificial Sequence
  Synthetic
uuuuuguauucuauggaguaaag

SEQ ID NO: 49532 - RNA, 18 nt, Artificial Sequence
  Synthetic
augguaccuugaguaaag

SEQ ID NO: 49533 - RNA, 20 nt, Artificial Sequence
  Synthetic
ugaugguaccuugaguaaag

SEQ ID NO: 49534 - RNA, 21 nt, Artificial Sequence
  Synthetic
uugaugguaccuugaguaaag

SEQ ID NO: 49535 - RNA, 22 nt, Artificial Sequence
  Synthetic
uuugaugguaccuugaguaaag

SEQ ID NO: 49536 - RNA, 23 nt, Artificial Sequence
  Synthetic
auuugaugguaccuugaguaaag

SEQ ID NO: 49537 - RNA, 24 nt, Artificial Sequence
  Synthetic
uauuugaugguaccuugaguaaag

SEQ ID NO: 49538 - RNA, 21 nt, Artificial Sequence
  Synthetic
aggggcuacagauauguaaag

SEQ ID NO: 49539 - RNA, 22 nt, Artificial Sequence
  Synthetic
caggggcuacagauauguaaag

SEQ ID NO: 49540 - RNA, 23 nt, Artificial Sequence
  Synthetic
ucaggggcuacagauauguaaag

SEQ ID NO: 49541 - RNA, 18 nt, Artificial Sequence
  Synthetic
cuucccucagcuguaaag

SEQ ID NO: 49542 - RNA, 22 nt, Artificial Sequence
  Synthetic
agggcuucccucagcuguaaag

SEQ ID NO: 49543 - RNA, 23 nt, Artificial Sequence
  Synthetic
aagggcuucccucagcuguaaag

SEQ ID NO: 49544 - RNA, 24 nt, Artificial Sequence
  Synthetic
caagggcuucccucagcuguaaag

SEQ ID NO: 49545 - RNA, 18 nt, Artificial Sequence
  Synthetic
uuaugcuaacuauuaaag

SEQ ID NO: 49546 - RNA, 19 nt, Artificial Sequence
  Synthetic
uuuaugcuaacuauuaaag

SEQ ID NO: 49547 - RNA, 20 nt, Artificial Sequence
  Synthetic
uuuuaugcuaacuauuaaag

SEQ ID NO: 49548 - RNA, 21 nt, Artificial Sequence
  Synthetic
cuuuuaugcuaacuauuaaag

SEQ ID NO: 49549 - RNA, 22 nt, Artificial Sequence
  Synthetic
acuuuuaugcuaacuauuaaag

SEQ ID NO: 49550 - RNA, 23 nt, Artificial Sequence
  Synthetic
uacuuuuaugcuaacuauuaaag

SEQ ID NO: 49551 - RNA, 18 nt, Artificial Sequence
  Synthetic
aagaaacuuuccuuaaag

SEQ ID NO: 49552 - RNA, 19 nt, Artificial Sequence
  Synthetic
caagaaacuuuccuuaaag

SEQ ID NO: 49553 - RNA, 21 nt, Artificial Sequence
  Synthetic
ugcaagaaacuuuccuuaaag

SEQ ID NO: 49554 - RNA, 24 nt, Artificial Sequence
  Synthetic
uggugcaagaaacuuuccuuaaag

SEQ ID NO: 49555 - RNA, 18 nt, Artificial Sequence
  Synthetic
acccaugauugcuuaaag

SEQ ID NO: 49556 - RNA, 19 nt, Artificial Sequence
  Synthetic
cacccaugauugcuuaaag

SEQ ID NO: 49557 - RNA, 20 nt, Artificial Sequence
  Synthetic
ucacccaugauugcuuaaag

SEQ ID NO: 49558 - RNA, 21 nt, Artificial Sequence
  Synthetic
aucacccaugauugcuuaaag

SEQ ID NO: 49559 - RNA, 22 nt, Artificial Sequence
  Synthetic
aaucacccaugauugcuuaaag

SEQ ID NO: 49560 - RNA, 23 nt, Artificial Sequence
  Synthetic
aaaucacccaugauugcuuaaag

SEQ ID NO: 49561 - RNA, 24 nt, Artificial Sequence
  Synthetic
aaaaucacccaugauugcuuaaag

SEQ ID NO: 49562 - RNA, 18 nt, Artificial Sequence
  Synthetic
ucugucuauugcuuaaag

SEQ ID NO: 49563 - RNA, 19 nt, Artificial Sequence
  Synthetic
uucugucuauugcuuaaag

SEQ ID NO: 49564 - RNA, 20 nt, Artificial Sequence
  Synthetic
uuucugucuauugcuuaaag

SEQ ID NO: 49565 - RNA, 21 nt, Artificial Sequence
  Synthetic
uuuucugucuauugcuuaaag

SEQ ID NO: 49566 - RNA, 22 nt, Artificial Sequence
  Synthetic
uuuuucugucuauugcuuaaag

SEQ ID NO: 49567 - RNA, 23 nt, Artificial Sequence
  Synthetic
auuuuucugucuauugcuuaaag

SEQ ID NO: 49568 - RNA, 24 nt, Artificial Sequence
  Synthetic
aauuuuucugucuauugcuuaaag

SEQ ID NO: 49569 - RNA, 21 nt, Artificial Sequence
  Synthetic
uuaauauaauuaauguuaaag

SEQ ID NO: 49570 - RNA, 22 nt, Artificial Sequence
  Synthetic
uuuaauauaauuaauguuaaag

SEQ ID NO: 49571 - RNA, 23 nt, Artificial Sequence
  Synthetic
uuuuaauauaauuaauguuaaag

SEQ ID NO: 49572 - RNA, 24 nt, Artificial Sequence
  Synthetic
uuuuuaauauaauuaauguuaaag

SEQ ID NO: 49573 - RNA, 18 nt, Artificial Sequence
  Synthetic
cugacuagaguuuuaaag

SEQ ID NO: 49574 - RNA, 19 nt, Artificial Sequence
  Synthetic
ucugacuagaguuuuaaag

SEQ ID NO: 49575 - RNA, 20 nt, Artificial Sequence
  Synthetic
cucugacuagaguuuuaaag

SEQ ID NO: 49576 - RNA, 21 nt, Artificial Sequence
  Synthetic
ucucugacuagaguuuuaaag

SEQ ID NO: 49577 - RNA, 22 nt, Artificial Sequence
  Synthetic
uucucugacuagaguuuuaaag

SEQ ID NO: 49578 - RNA, 23 nt, Artificial Sequence
  Synthetic
cuucucugacuagaguuuuaaag

SEQ ID NO: 49579 - RNA, 24 nt, Artificial Sequence
  Synthetic
acuucucugacuagaguuuuaaag

SEQ ID NO: 49580 - RNA, 22 nt, Artificial Sequence
  Synthetic
agauaagcuuuuuuuuuuaaag

SEQ ID NO: 49581 - RNA, 23 nt, Artificial Sequence
  Synthetic
uagauaagcuuuuuuuuuuaaag

SEQ ID NO: 49582 - RNA, 24 nt, Artificial Sequence
  Synthetic
uuagauaagcuuuuuuuuuuaaag

SEQ ID NO: 49583 - RNA, 18 nt, Artificial Sequence
  Synthetic
uauuuuaacuucaacaag

SEQ ID NO: 49584 - RNA, 19 nt, Artificial Sequence
  Synthetic
auauuuuaacuucaacaag

SEQ ID NO: 49585 - RNA, 20 nt, Artificial Sequence
  Synthetic
uauauuuuaacuucaacaag

SEQ ID NO: 49586 - RNA, 21 nt, Artificial Sequence
  Synthetic
auauauuuuaacuucaacaag

SEQ ID NO: 49587 - RNA, 22 nt, Artificial Sequence
  Synthetic
aauauauuuuaacuucaacaag

SEQ ID NO: 49588 - RNA, 23 nt, Artificial Sequence
  Synthetic
caauauauuuuaacuucaacaag

SEQ ID NO: 49589 - RNA, 24 nt, Artificial Sequence
  Synthetic
ucaauauauuuuaacuucaacaag

SEQ ID NO: 49590 - RNA, 19 nt, Artificial Sequence
  Synthetic
ugcucugaagauuaacaag

SEQ ID NO: 49591 - RNA, 20 nt, Artificial Sequence
  Synthetic
cugcucugaagauuaacaag

SEQ ID NO: 49592 - RNA, 21 nt, Artificial Sequence
  Synthetic
ucugcucugaagauuaacaag

SEQ ID NO: 49593 - RNA, 22 nt, Artificial Sequence
  Synthetic
uucugcucugaagauuaacaag

SEQ ID NO: 49594 - RNA, 23 nt, Artificial Sequence
  Synthetic
auucugcucugaagauuaacaag

SEQ ID NO: 49595 - RNA, 24 nt, Artificial Sequence
  Synthetic
cauucugcucugaagauuaacaag

SEQ ID NO: 49596 - RNA, 22 nt, Artificial Sequence
  Synthetic
agauguaacaaauuaccacaag

SEQ ID NO: 49597 - RNA, 23 nt, Artificial Sequence
  Synthetic
cagauguaacaaauuaccacaag

SEQ ID NO: 49598 - RNA, 24 nt, Artificial Sequence
  Synthetic
acagauguaacaaauuaccacaag

SEQ ID NO: 49599 - RNA, 21 nt, Artificial Sequence
  Synthetic
uuuccugagacuucccacaag

SEQ ID NO: 49600 - RNA, 22 nt, Artificial Sequence
  Synthetic
uuuuccugagacuucccacaag

SEQ ID NO: 49601 - RNA, 23 nt, Artificial Sequence
  Synthetic
uuuuuccugagacuucccacaag

SEQ ID NO: 49602 - RNA, 24 nt, Artificial Sequence
  Synthetic
uuuuuuccugagacuucccacaag

SEQ ID NO: 49603 - RNA, 18 nt, Artificial Sequence
  Synthetic
uucaugaagaaucacaag

SEQ ID NO: 49604 - RNA, 19 nt, Artificial Sequence
  Synthetic
uuucaugaagaaucacaag

SEQ ID NO: 49605 - RNA, 20 nt, Artificial Sequence
  Synthetic
uuuucaugaagaaucacaag

SEQ ID NO: 49606 - RNA, 22 nt, Artificial Sequence
  Synthetic
aguuuucaugaagaaucacaag

SEQ ID NO: 49607 - RNA, 23 nt, Artificial Sequence
  Synthetic
aaguuuucaugaagaaucacaag

SEQ ID NO: 49608 - RNA, 18 nt, Artificial Sequence
  Synthetic
aggaggugaugauacaag

SEQ ID NO: 49609 - RNA, 19 nt, Artificial Sequence
  Synthetic
aaggaggugaugauacaag

SEQ ID NO: 49610 - RNA, 21 nt, Artificial Sequence
  Synthetic
agaaggaggugaugauacaag

SEQ ID NO: 49611 - RNA, 23 nt, Artificial Sequence
  Synthetic
agagaaggaggugaugauacaag

SEQ ID NO: 49612 - RNA, 18 nt, Artificial Sequence
  Synthetic
aaaauauaauauuacaag

SEQ ID NO: 49613 - RNA, 19 nt, Artificial Sequence
  Synthetic
uaaaauauaauauuacaag

SEQ ID NO: 49614 - RNA, 21 nt, Artificial Sequence
  Synthetic
aguaaaauauaauauuacaag

SEQ ID NO: 49615 - RNA, 22 nt, Artificial Sequence
  Synthetic
uaguaaaauauaauauuacaag

SEQ ID NO: 49616 - RNA, 23 nt, Artificial Sequence
  Synthetic
auaguaaaauauaauauuacaag

SEQ ID NO: 49617 - RNA, 24 nt, Artificial Sequence
  Synthetic
uauaguaaaauauaauauuacaag

SEQ ID NO: 49618 - RNA, 18 nt, Artificial Sequence
  Synthetic
auaacagugcuaaccaag

SEQ ID NO: 49619 - RNA, 19 nt, Artificial Sequence
  Synthetic
aauaacagugcuaaccaag

SEQ ID NO: 49620 - RNA, 20 nt, Artificial Sequence
  Synthetic
aaauaacagugcuaaccaag

SEQ ID NO: 49621 - RNA, 21 nt, Artificial Sequence
  Synthetic
caaauaacagugcuaaccaag

SEQ ID NO: 49622 - RNA, 22 nt, Artificial Sequence
  Synthetic
ccaaauaacagugcuaaccaag

SEQ ID NO: 49623 - RNA, 23 nt, Artificial Sequence
  Synthetic
uccaaauaacagugcuaaccaag

SEQ ID NO: 49624 - RNA, 24 nt, Artificial Sequence
  Synthetic
cuccaaauaacagugcuaaccaag

SEQ ID NO: 49625 - RNA, 18 nt, Artificial Sequence
  Synthetic
ugugccaccaccaccaag

SEQ ID NO: 49626 - RNA, 19 nt, Artificial Sequence
  Synthetic
uugugccaccaccaccaag

SEQ ID NO: 49627 - RNA, 20 nt, Artificial Sequence
  Synthetic
cuugugccaccaccaccaag

SEQ ID NO: 49628 - RNA, 21 nt, Artificial Sequence
  Synthetic
acuugugccaccaccaccaag

SEQ ID NO: 49629 - RNA, 22 nt, Artificial Sequence
  Synthetic
aacuugugccaccaccaccaag

SEQ ID NO: 49630 - RNA, 23 nt, Artificial Sequence
  Synthetic
uaacuugugccaccaccaccaag

SEQ ID NO: 49631 - RNA, 24 nt, Artificial Sequence
  Synthetic
cuaacuugugccaccaccaccaag

SEQ ID NO: 49632 - RNA, 18 nt, Artificial Sequence
  Synthetic
uuucuuccguaccccaag

SEQ ID NO: 49633 - RNA, 19 nt, Artificial Sequence
  Synthetic
uuuucuuccguaccccaag

SEQ ID NO: 49634 - RNA, 21 nt, Artificial Sequence
  Synthetic
aguuuucuuccguaccccaag

SEQ ID NO: 49635 - RNA, 22 nt, Artificial Sequence
  Synthetic
aaguuuucuuccguaccccaag

SEQ ID NO: 49636 - RNA, 23 nt, Artificial Sequence
  Synthetic
caaguuuucuuccguaccccaag

SEQ ID NO: 49637 - RNA, 24 nt, Artificial Sequence
  Synthetic
ccaaguuuucuuccguaccccaag

SEQ ID NO: 49638 - RNA, 18 nt, Artificial Sequence
  Synthetic
cuacgcucaccucccaag

SEQ ID NO: 49639 - RNA, 19 nt, Artificial Sequence
  Synthetic
ccuacgcucaccucccaag

SEQ ID NO: 49640 - RNA, 20 nt, Artificial Sequence
  Synthetic
uccuacgcucaccucccaag

SEQ ID NO: 49641 - RNA, 21 nt, Artificial Sequence
  Synthetic
cuccuacgcucaccucccaag

SEQ ID NO: 49642 - RNA, 23 nt, Artificial Sequence
  Synthetic
agcuccuacgcucaccucccaag

SEQ ID NO: 49643 - RNA, 24 nt, Artificial Sequence
  Synthetic
cagcuccuacgcucaccucccaag

SEQ ID NO: 49644 - RNA, 18 nt, Artificial Sequence
  Synthetic
uauugcuuacaugccaag

SEQ ID NO: 49645 - RNA, 19 nt, Artificial Sequence
  Synthetic
auauugcuuacaugccaag

SEQ ID NO: 49646 - RNA, 20 nt, Artificial Sequence
  Synthetic
cauauugcuuacaugccaag

SEQ ID NO: 49647 - RNA, 22 nt, Artificial Sequence
  Synthetic
ugcauauugcuuacaugccaag

SEQ ID NO: 49648 - RNA, 23 nt, Artificial Sequence
  Synthetic
uugcauauugcuuacaugccaag

SEQ ID NO: 49649 - RNA, 18 nt, Artificial Sequence
  Synthetic
aaauaaaaccccuccaag

SEQ ID NO: 49650 - RNA, 21 nt, Artificial Sequence
  Synthetic
aggaaauaaaaccccuccaag

SEQ ID NO: 49651 - RNA, 23 nt, Artificial Sequence
  Synthetic
agaggaaauaaaaccccuccaag

SEQ ID NO: 49652 - RNA, 24 nt, Artificial Sequence
  Synthetic
cagaggaaauaaaaccccuccaag

SEQ ID NO: 49653 - RNA, 18 nt, Artificial Sequence
  Synthetic
uagguaauccucuccaag

SEQ ID NO: 49654 - RNA, 22 nt, Artificial Sequence
  Synthetic
uggguagguaauccucuccaag

SEQ ID NO: 49655 - RNA, 23 nt, Artificial Sequence
  Synthetic
uuggguagguaauccucuccaag

SEQ ID NO: 49656 - RNA, 24 nt, Artificial Sequence
  Synthetic
uuuggguagguaauccucuccaag

SEQ ID NO: 49657 - RNA, 18 nt, Artificial Sequence
  Synthetic
uagagcaauaaguccaag

SEQ ID NO: 49658 - RNA, 19 nt, Artificial Sequence
  Synthetic
auagagcaauaaguccaag

SEQ ID NO: 49659 - RNA, 20 nt, Artificial Sequence
  Synthetic
aauagagcaauaaguccaag

SEQ ID NO: 49660 - RNA, 22 nt, Artificial Sequence
  Synthetic
ugaauagagcaauaaguccaag

SEQ ID NO: 49661 - RNA, 23 nt, Artificial Sequence
  Synthetic
augaauagagcaauaaguccaag

SEQ ID NO: 49662 - RNA, 24 nt, Artificial Sequence
  Synthetic
uaugaauagagcaauaaguccaag

SEQ ID NO: 49663 - RNA, 21 nt, Artificial Sequence
  Synthetic
agagcccaggaugaguccaag

SEQ ID NO: 49664 - RNA, 22 nt, Artificial Sequence
  Synthetic
aagagcccaggaugaguccaag

SEQ ID NO: 49665 - RNA, 24 nt, Artificial Sequence
  Synthetic
agaagagcccaggaugaguccaag

SEQ ID NO: 49666 - RNA, 18 nt, Artificial Sequence
  Synthetic
ugacauccacauuccaag

SEQ ID NO: 49667 - RNA, 19 nt, Artificial Sequence
  Synthetic
augacauccacauuccaag

SEQ ID NO: 49668 - RNA, 20 nt, Artificial Sequence
  Synthetic
caugacauccacauuccaag

SEQ ID NO: 49669 - RNA, 21 nt, Artificial Sequence
  Synthetic
ucaugacauccacauuccaag

SEQ ID NO: 49670 - RNA, 22 nt, Artificial Sequence
  Synthetic
cucaugacauccacauuccaag

SEQ ID NO: 49671 - RNA, 23 nt, Artificial Sequence
  Synthetic
ucucaugacauccacauuccaag

SEQ ID NO: 49672 - RNA, 24 nt, Artificial Sequence
  Synthetic
cucucaugacauccacauuccaag

SEQ ID NO: 49673 - RNA, 18 nt, Artificial Sequence
  Synthetic
aacucauucaguuccaag

SEQ ID NO: 49674 - RNA, 19 nt, Artificial Sequence
  Synthetic
uaacucauucaguuccaag

SEQ ID NO: 49675 - RNA, 21 nt, Artificial Sequence
  Synthetic
aguaacucauucaguuccaag

SEQ ID NO: 49676 - RNA, 22 nt, Artificial Sequence
  Synthetic
caguaacucauucaguuccaag

SEQ ID NO: 49677 - RNA, 23 nt, Artificial Sequence
  Synthetic
acaguaacucauucaguuccaag

SEQ ID NO: 49678 - RNA, 24 nt, Artificial Sequence
  Synthetic
aacaguaacucauucaguuccaag

SEQ ID NO: 49679 - RNA, 18 nt, Artificial Sequence
  Synthetic
aagaucucuuuaagcaag

SEQ ID NO: 49680 - RNA, 20 nt, Artificial Sequence
  Synthetic
ugaagaucucuuuaagcaag

SEQ ID NO: 49681 - RNA, 21 nt, Artificial Sequence
  Synthetic
uugaagaucucuuuaagcaag

SEQ ID NO: 49682 - RNA, 22 nt, Artificial Sequence
  Synthetic
uuugaagaucucuuuaagcaag

SEQ ID NO: 49683 - RNA, 23 nt, Artificial Sequence
  Synthetic
cuuugaagaucucuuuaagcaag

SEQ ID NO: 49684 - RNA, 24 nt, Artificial Sequence
  Synthetic
acuuugaagaucucuuuaagcaag

SEQ ID NO: 49685 - RNA, 18 nt, Artificial Sequence
  Synthetic
ugugaagagugacgcaag

SEQ ID NO: 49686 - RNA, 19 nt, Artificial Sequence
  Synthetic
uugugaagagugacgcaag

SEQ ID NO: 49687 - RNA, 20 nt, Artificial Sequence
  Synthetic
cuugugaagagugacgcaag

SEQ ID NO: 49688 - RNA, 21 nt, Artificial Sequence
  Synthetic
ucuugugaagagugacgcaag

SEQ ID NO: 49689 - RNA, 22 nt, Artificial Sequence
  Synthetic
cucuugugaagagugacgcaag

SEQ ID NO: 49690 - RNA, 23 nt, Artificial Sequence
  Synthetic
ccucuugugaagagugacgcaag

SEQ ID NO: 49691 - RNA, 21 nt, Artificial Sequence
  Synthetic
uuauagagaaaaccaggcaag

SEQ ID NO: 49692 - RNA, 22 nt, Artificial Sequence
  Synthetic
uuuauagagaaaaccaggcaag

SEQ ID NO: 49693 - RNA, 23 nt, Artificial Sequence
  Synthetic
auuuauagagaaaaccaggcaag

SEQ ID NO: 49694 - RNA, 18 nt, Artificial Sequence
  Synthetic
uuagacugguucggcaag

SEQ ID NO: 49695 - RNA, 19 nt, Artificial Sequence
  Synthetic
cuuagacugguucggcaag

SEQ ID NO: 49696 - RNA, 20 nt, Artificial Sequence
  Synthetic
ucuuagacugguucggcaag

SEQ ID NO: 49697 - RNA, 21 nt, Artificial Sequence
  Synthetic
aucuuagacugguucggcaag

SEQ ID NO: 49698 - RNA, 22 nt, Artificial Sequence
  Synthetic
uaucuuagacugguucggcaag

SEQ ID NO: 49699 - RNA, 23 nt, Artificial Sequence
  Synthetic
auaucuuagacugguucggcaag

SEQ ID NO: 49700 - RNA, 24 nt, Artificial Sequence
  Synthetic
aauaucuuagacugguucggcaag

SEQ ID NO: 49701 - RNA, 18 nt, Artificial Sequence
  Synthetic
auuccuuccgggggcaag

SEQ ID NO: 49702 - RNA, 19 nt, Artificial Sequence
  Synthetic
uauuccuuccgggggcaag

SEQ ID NO: 49703 - RNA, 20 nt, Artificial Sequence
  Synthetic
cuauuccuuccgggggcaag

SEQ ID NO: 49704 - RNA, 21 nt, Artificial Sequence
  Synthetic
acuauuccuuccgggggcaag

SEQ ID NO: 49705 - RNA, 22 nt, Artificial Sequence
  Synthetic
cacuauuccuuccgggggcaag

SEQ ID NO: 49706 - RNA, 23 nt, Artificial Sequence
  Synthetic
ccacuauuccuuccgggggcaag

SEQ ID NO: 49707 - RNA, 24 nt, Artificial Sequence
  Synthetic
accacuauuccuuccgggggcaag

SEQ ID NO: 49708 - RNA, 18 nt, Artificial Sequence
  Synthetic
uugauuguuguaugcaag

SEQ ID NO: 49709 - RNA, 23 nt, Artificial Sequence
  Synthetic
ugggguugauuguuguaugcaag

SEQ ID NO: 49710 - RNA, 24 nt, Artificial Sequence
  Synthetic
uugggguugauuguuguaugcaag

SEQ ID NO: 49711 - RNA, 18 nt, Artificial Sequence
  Synthetic
acccauucauuuugcaag

SEQ ID NO: 49712 - RNA, 19 nt, Artificial Sequence
  Synthetic
aacccauucauuuugcaag

SEQ ID NO: 49713 - RNA, 20 nt, Artificial Sequence
  Synthetic
uaacccauucauuuugcaag

SEQ ID NO: 49714 - RNA, 21 nt, Artificial Sequence
  Synthetic
uuaacccauucauuuugcaag

SEQ ID NO: 49715 - RNA, 22 nt, Artificial Sequence
  Synthetic
auuaacccauucauuuugcaag

SEQ ID NO: 49716 - RNA, 23 nt, Artificial Sequence
  Synthetic
aauuaacccauucauuuugcaag

SEQ ID NO: 49717 - RNA, 24 nt, Artificial Sequence
  Synthetic
caauuaacccauucauuuugcaag

SEQ ID NO: 49718 - RNA, 18 nt, Artificial Sequence
  Synthetic
aacauagcuuuuugcaag

SEQ ID NO: 49719 - RNA, 19 nt, Artificial Sequence
  Synthetic
caacauagcuuuuugcaag

SEQ ID NO: 49720 - RNA, 23 nt, Artificial Sequence
  Synthetic
agggcaacauagcuuuuugcaag

SEQ ID NO: 49721 - RNA, 24 nt, Artificial Sequence
  Synthetic
cagggcaacauagcuuuuugcaag

SEQ ID NO: 49722 - RNA, 18 nt, Artificial Sequence
  Synthetic
aagcacuaggaaaucaag

SEQ ID NO: 49723 - RNA, 19 nt, Artificial Sequence
  Synthetic
aaagcacuaggaaaucaag

SEQ ID NO: 49724 - RNA, 20 nt, Artificial Sequence
  Synthetic
caaagcacuaggaaaucaag

SEQ ID NO: 49725 - RNA, 23 nt, Artificial Sequence
  Synthetic
uggcaaagcacuaggaaaucaag

SEQ ID NO: 49726 - RNA, 24 nt, Artificial Sequence
  Synthetic
cuggcaaagcacuaggaaaucaag

SEQ ID NO: 49727 - RNA, 18 nt, Artificial Sequence
  Synthetic
agaauccuugguaucaag

SEQ ID NO: 49728 - RNA, 19 nt, Artificial Sequence
  Synthetic
uagaauccuugguaucaag

SEQ ID NO: 49729 - RNA, 20 nt, Artificial Sequence
  Synthetic
auagaauccuugguaucaag

SEQ ID NO: 49730 - RNA, 21 nt, Artificial Sequence
  Synthetic
uauagaauccuugguaucaag

SEQ ID NO: 49731 - RNA, 23 nt, Artificial Sequence
  Synthetic
uguauagaauccuugguaucaag

SEQ ID NO: 49732 - RNA, 24 nt, Artificial Sequence
  Synthetic
uuguauagaauccuugguaucaag

SEQ ID NO: 49733 - RNA, 20 nt, Artificial Sequence
  Synthetic
aggcugcaaaaugugucaag

SEQ ID NO: 49734 - RNA, 21 nt, Artificial Sequence
  Synthetic
caggcugcaaaaugugucaag

SEQ ID NO: 49735 - RNA, 22 nt, Artificial Sequence
  Synthetic
acaggcugcaaaaugugucaag

SEQ ID NO: 49736 - RNA, 23 nt, Artificial Sequence
  Synthetic
uacaggcugcaaaaugugucaag

SEQ ID NO: 49737 - RNA, 24 nt, Artificial Sequence
  Synthetic
cuacaggcugcaaaaugugucaag

SEQ ID NO: 49738 - RNA, 19 nt, Artificial Sequence
  Synthetic
uguagagaagugguucaag

SEQ ID NO: 49739 - RNA, 20 nt, Artificial Sequence
  Synthetic
auguagagaagugguucaag

SEQ ID NO: 49740 - RNA, 21 nt, Artificial Sequence
  Synthetic
aauguagagaagugguucaag

SEQ ID NO: 49741 - RNA, 22 nt, Artificial Sequence
  Synthetic
aaauguagagaagugguucaag

SEQ ID NO: 49742 - RNA, 23 nt, Artificial Sequence
  Synthetic
aaaauguagagaagugguucaag

SEQ ID NO: 49743 - RNA, 24 nt, Artificial Sequence
  Synthetic
aaaaauguagagaagugguucaag

SEQ ID NO: 49744 - RNA, 18 nt, Artificial Sequence
  Synthetic
agugaguuaagaaagaag

SEQ ID NO: 49745 - RNA, 19 nt, Artificial Sequence
  Synthetic
uagugaguuaagaaagaag

SEQ ID NO: 49746 - RNA, 20 nt, Artificial Sequence
  Synthetic
cuagugaguuaagaaagaag

SEQ ID NO: 49747 - RNA, 22 nt, Artificial Sequence
  Synthetic
ugcuagugaguuaagaaagaag

SEQ ID NO: 49748 - RNA, 23 nt, Artificial Sequence
  Synthetic
augcuagugaguuaagaaagaag

SEQ ID NO: 49749 - RNA, 24 nt, Artificial Sequence
  Synthetic
uaugcuagugaguuaagaaagaag

SEQ ID NO: 49750 - RNA, 18 nt, Artificial Sequence
  Synthetic
ugcuuauuuuagaagaag

SEQ ID NO: 49751 - RNA, 19 nt, Artificial Sequence
  Synthetic
uugcuuauuuuagaagaag

SEQ ID NO: 49752 - RNA, 22 nt, Artificial Sequence
  Synthetic
ugguugcuuauuuuagaagaag

SEQ ID NO: 49753 - RNA, 23 nt, Artificial Sequence
  Synthetic
augguugcuuauuuuagaagaag

SEQ ID NO: 49754 - RNA, 18 nt, Artificial Sequence
  Synthetic
aacuacugugugaagaag

SEQ ID NO: 49755 - RNA, 19 nt, Artificial Sequence
  Synthetic
caacuacugugugaagaag

SEQ ID NO: 49756 - RNA, 20 nt, Artificial Sequence
  Synthetic
ccaacuacugugugaagaag

SEQ ID NO: 49757 - RNA, 21 nt, Artificial Sequence
  Synthetic
uccaacuacugugugaagaag

SEQ ID NO: 49758 - RNA, 22 nt, Artificial Sequence
  Synthetic
cuccaacuacugugugaagaag

SEQ ID NO: 49759 - RNA, 23 nt, Artificial Sequence
  Synthetic
ccuccaacuacugugugaagaag

SEQ ID NO: 49760 - RNA, 24 nt, Artificial Sequence
  Synthetic
cccuccaacuacugugugaagaag

SEQ ID NO: 49761 - RNA, 18 nt, Artificial Sequence
  Synthetic
ucaguggauauuaagaag

SEQ ID NO: 49762 - RNA, 19 nt, Artificial Sequence
  Synthetic
uucaguggauauuaagaag

SEQ ID NO: 49763 - RNA, 20 nt, Artificial Sequence
  Synthetic
cuucaguggauauuaagaag

SEQ ID NO: 49764 - RNA, 21 nt, Artificial Sequence
  Synthetic
ccuucaguggauauuaagaag

SEQ ID NO: 49765 - RNA, 22 nt, Artificial Sequence
  Synthetic
uccuucaguggauauuaagaag

SEQ ID NO: 49766 - RNA, 23 nt, Artificial Sequence
  Synthetic
uuccuucaguggauauuaagaag

SEQ ID NO: 49767 - RNA, 24 nt, Artificial Sequence
  Synthetic
auuccuucaguggauauuaagaag

SEQ ID NO: 49768 - RNA, 18 nt, Artificial Sequence
  Synthetic
agaagagcuauuaagaag

SEQ ID NO: 49769 - RNA, 19 nt, Artificial Sequence
  Synthetic
aagaagagcuauuaagaag

SEQ ID NO: 49770 - RNA, 20 nt, Artificial Sequence
  Synthetic
uaagaagagcuauuaagaag

SEQ ID NO: 49771 - RNA, 21 nt, Artificial Sequence
  Synthetic
uuaagaagagcuauuaagaag

SEQ ID NO: 49772 - RNA, 22 nt, Artificial Sequence
  Synthetic
uuuaagaagagcuauuaagaag

SEQ ID NO: 49773 - RNA, 23 nt, Artificial Sequence
  Synthetic
uuuuaagaagagcuauuaagaag

SEQ ID NO: 49774 - RNA, 24 nt, Artificial Sequence
  Synthetic
cuuuuaagaagagcuauuaagaag

SEQ ID NO: 49775 - RNA, 18 nt, Artificial Sequence
  Synthetic
auguaagaaggccagaag

SEQ ID NO: 49776 - RNA, 21 nt, Artificial Sequence
  Synthetic
aggauguaagaaggccagaag

SEQ ID NO: 49777 - RNA, 22 nt, Artificial Sequence
  Synthetic
aaggauguaagaaggccagaag

SEQ ID NO: 49778 - RNA, 24 nt, Artificial Sequence
  Synthetic
agaaggauguaagaaggccagaag

SEQ ID NO: 49779 - RNA, 19 nt, Artificial Sequence
  Synthetic
agggccauaguagcagaag

SEQ ID NO: 49780 - RNA, 20 nt, Artificial Sequence
  Synthetic
aagggccauaguagcagaag

SEQ ID NO: 49781 - RNA, 21 nt, Artificial Sequence
  Synthetic
aaagggccauaguagcagaag

SEQ ID NO: 49782 - RNA, 23 nt, Artificial Sequence
  Synthetic
agaaagggccauaguagcagaag

SEQ ID NO: 49783 - RNA, 18 nt, Artificial Sequence
  Synthetic
uuucuuauucaucagaag

SEQ ID NO: 49784 - RNA, 19 nt, Artificial Sequence
  Synthetic
uuuucuuauucaucagaag

SEQ ID NO: 49785 - RNA, 20 nt, Artificial Sequence
  Synthetic
uuuuucuuauucaucagaag

SEQ ID NO: 49786 - RNA, 22 nt, Artificial Sequence
  Synthetic
uguuuuucuuauucaucagaag

SEQ ID NO: 49787 - RNA, 24 nt, Artificial Sequence
  Synthetic
aguguuuuucuuauucaucagaag

SEQ ID NO: 49788 - RNA, 19 nt, Artificial Sequence
  Synthetic
ugugauuggagaucagaag

SEQ ID NO: 49789 - RNA, 20 nt, Artificial Sequence
  Synthetic
uugugauuggagaucagaag

SEQ ID NO: 49790 - RNA, 22 nt, Artificial Sequence
  Synthetic
aguugugauuggagaucagaag

SEQ ID NO: 49791 - RNA, 23 nt, Artificial Sequence
  Synthetic
uaguugugauuggagaucagaag

SEQ ID NO: 49792 - RNA, 24 nt, Artificial Sequence
  Synthetic
uuaguugugauuggagaucagaag

SEQ ID NO: 49793 - RNA, 18 nt, Artificial Sequence
  Synthetic
uucacuuuuauucagaag

SEQ ID NO: 49794 - RNA, 19 nt, Artificial Sequence
  Synthetic
cuucacuuuuauucagaag

SEQ ID NO: 49795 - RNA, 20 nt, Artificial Sequence
  Synthetic
ucuucacuuuuauucagaag

SEQ ID NO: 49796 - RNA, 21 nt, Artificial Sequence
  Synthetic
aucuucacuuuuauucagaag

SEQ ID NO: 49797 - RNA, 22 nt, Artificial Sequence
  Synthetic
uaucuucacuuuuauucagaag

SEQ ID NO: 49798 - RNA, 23 nt, Artificial Sequence
  Synthetic
uuaucuucacuuuuauucagaag

SEQ ID NO: 49799 - RNA, 24 nt, Artificial Sequence
  Synthetic
cuuaucuucacuuuuauucagaag

SEQ ID NO: 49800 - RNA, 18 nt, Artificial Sequence
  Synthetic
auuauuccucaagagaag

SEQ ID NO: 49801 - RNA, 19 nt, Artificial Sequence
  Synthetic
cauuauuccucaagagaag

SEQ ID NO: 49802 - RNA, 21 nt, Artificial Sequence
  Synthetic
cgcauuauuccucaagagaag

SEQ ID NO: 49803 - RNA, 22 nt, Artificial Sequence
  Synthetic
ucgcauuauuccucaagagaag

SEQ ID NO: 49804 - RNA, 23 nt, Artificial Sequence
  Synthetic
cucgcauuauuccucaagagaag

SEQ ID NO: 49805 - RNA, 24 nt, Artificial Sequence
  Synthetic
acucgcauuauuccucaagagaag

SEQ ID NO: 49806 - RNA, 18 nt, Artificial Sequence
  Synthetic
uguuuuuugacagagaag

SEQ ID NO: 49807 - RNA, 21 nt, Artificial Sequence
  Synthetic
ugguguuuuuugacagagaag

SEQ ID NO: 49808 - RNA, 22 nt, Artificial Sequence
  Synthetic
augguguuuuuugacagagaag

SEQ ID NO: 49809 - RNA, 23 nt, Artificial Sequence
  Synthetic
aaugguguuuuuugacagagaag

SEQ ID NO: 49810 - RNA, 24 nt, Artificial Sequence
  Synthetic
aaaugguguuuuuugacagagaag

SEQ ID NO: 49811 - RNA, 21 nt, Artificial Sequence
  Synthetic
cugccaagacagagagagaag

SEQ ID NO: 49812 - RNA, 22 nt, Artificial Sequence
  Synthetic
acugccaagacagagagagaag

SEQ ID NO: 49813 - RNA, 23 nt, Artificial Sequence
  Synthetic
uacugccaagacagagagagaag

SEQ ID NO: 49814 - RNA, 24 nt, Artificial Sequence
  Synthetic
auacugccaagacagagagagaag

SEQ ID NO: 49815 - RNA, 18 nt, Artificial Sequence
  Synthetic
auuauccugaaggagaag

SEQ ID NO: 49816 - RNA, 19 nt, Artificial Sequence
  Synthetic
cauuauccugaaggagaag

SEQ ID NO: 49817 - RNA, 20 nt, Artificial Sequence
  Synthetic
ccauuauccugaaggagaag

SEQ ID NO: 49818 - RNA, 21 nt, Artificial Sequence
  Synthetic
cccauuauccugaaggagaag

SEQ ID NO: 49819 - RNA, 22 nt, Artificial Sequence
  Synthetic
ccccauuauccugaaggagaag

SEQ ID NO: 49820 - RNA, 23 nt, Artificial Sequence
  Synthetic
cccccauuauccugaaggagaag

SEQ ID NO: 49821 - RNA, 24 nt, Artificial Sequence
  Synthetic
ucccccauuauccugaaggagaag

SEQ ID NO: 49822 - RNA, 18 nt, Artificial Sequence
  Synthetic
aguauauuauaggagaag

SEQ ID NO: 49823 - RNA, 19 nt, Artificial Sequence
  Synthetic
uaguauauuauaggagaag

SEQ ID NO: 49824 - RNA, 20 nt, Artificial Sequence
  Synthetic
auaguauauuauaggagaag

SEQ ID NO: 49825 - RNA, 23 nt, Artificial Sequence
  Synthetic
aggauaguauauuauaggagaag

SEQ ID NO: 49826 - RNA, 18 nt, Artificial Sequence
  Synthetic
uguugucccuaggagaag

SEQ ID NO: 49827 - RNA, 19 nt, Artificial Sequence
  Synthetic
cuguugucccuaggagaag

SEQ ID NO: 49828 - RNA, 20 nt, Artificial Sequence
  Synthetic
ccuguugucccuaggagaag

SEQ ID NO: 49829 - RNA, 21 nt, Artificial Sequence
  Synthetic
accuguugucccuaggagaag

SEQ ID NO: 49830 - RNA, 22 nt, Artificial Sequence
  Synthetic
aaccuguugucccuaggagaag

SEQ ID NO: 49831 - RNA, 23 nt, Artificial Sequence
  Synthetic
uaaccuguugucccuaggagaag

SEQ ID NO: 49832 - RNA, 18 nt, Artificial Sequence
  Synthetic
uaugagaacaccuagaag

SEQ ID NO: 49833 - RNA, 19 nt, Artificial Sequence
  Synthetic
auaugagaacaccuagaag

SEQ ID NO: 49834 - RNA, 20 nt, Artificial Sequence
  Synthetic
cauaugagaacaccuagaag

SEQ ID NO: 49835 - RNA, 21 nt, Artificial Sequence
  Synthetic
acauaugagaacaccuagaag

SEQ ID NO: 49836 - RNA, 23 nt, Artificial Sequence
  Synthetic
agacauaugagaacaccuagaag

SEQ ID NO: 49837 - RNA, 24 nt, Artificial Sequence
  Synthetic
uagacauaugagaacaccuagaag

SEQ ID NO: 49838 - RNA, 21 nt, Artificial Sequence
  Synthetic
cauuucucucaguccuagaag

SEQ ID NO: 49839 - RNA, 23 nt, Artificial Sequence
  Synthetic
agcauuucucucaguccuagaag

SEQ ID NO: 49840 - RNA, 24 nt, Artificial Sequence
  Synthetic
uagcauuucucucaguccuagaag

SEQ ID NO: 49841 - RNA, 18 nt, Artificial Sequence
  Synthetic
uaccuggccuucuagaag

SEQ ID NO: 49842 - RNA, 19 nt, Artificial Sequence
  Synthetic
auaccuggccuucuagaag

SEQ ID NO: 49843 - RNA, 20 nt, Artificial Sequence
  Synthetic
uauaccuggccuucuagaag

SEQ ID NO: 49844 - RNA, 21 nt, Artificial Sequence
  Synthetic
uuauaccuggccuucuagaag

SEQ ID NO: 49845 - RNA, 22 nt, Artificial Sequence
  Synthetic
uuuauaccuggccuucuagaag

SEQ ID NO: 49846 - RNA, 23 nt, Artificial Sequence
  Synthetic
auuuauaccuggccuucuagaag

SEQ ID NO: 49847 - RNA, 24 nt, Artificial Sequence
  Synthetic
uauuuauaccuggccuucuagaag

SEQ ID NO: 49848 - RNA, 18 nt, Artificial Sequence
  Synthetic
ugaguaacucuguagaag

SEQ ID NO: 49849 - RNA, 19 nt, Artificial Sequence
  Synthetic
uugaguaacucuguagaag

SEQ ID NO: 49850 - RNA, 20 nt, Artificial Sequence
  Synthetic
uuugaguaacucuguagaag

SEQ ID NO: 49851 - RNA, 22 nt, Artificial Sequence
  Synthetic
aguuugaguaacucuguagaag

SEQ ID NO: 49852 - RNA, 23 nt, Artificial Sequence
  Synthetic
uaguuugaguaacucuguagaag

SEQ ID NO: 49853 - RNA, 24 nt, Artificial Sequence
  Synthetic
uuaguuugaguaacucuguagaag

SEQ ID NO: 49854 - RNA, 18 nt, Artificial Sequence
  Synthetic
caagagagggcuuagaag

SEQ ID NO: 49855 - RNA, 19 nt, Artificial Sequence
  Synthetic
ucaagagagggcuuagaag

SEQ ID NO: 49856 - RNA, 20 nt, Artificial Sequence
  Synthetic
uucaagagagggcuuagaag

SEQ ID NO: 49857 - RNA, 21 nt, Artificial Sequence
  Synthetic
auucaagagagggcuuagaag

SEQ ID NO: 49858 - RNA, 22 nt, Artificial Sequence
  Synthetic
uauucaagagagggcuuagaag

SEQ ID NO: 49859 - RNA, 23 nt, Artificial Sequence
  Synthetic
auauucaagagagggcuuagaag

SEQ ID NO: 49860 - RNA, 24 nt, Artificial Sequence
  Synthetic
cauauucaagagagggcuuagaag

SEQ ID NO: 49861 - RNA, 19 nt, Artificial Sequence
  Synthetic
ugcuuugcacuguuagaag

SEQ ID NO: 49862 - RNA, 21 nt, Artificial Sequence
  Synthetic
agugcuuugcacuguuagaag

SEQ ID NO: 49863 - RNA, 22 nt, Artificial Sequence
  Synthetic
aagugcuuugcacuguuagaag

SEQ ID NO: 49864 - RNA, 23 nt, Artificial Sequence
  Synthetic
uaagugcuuugcacuguuagaag

SEQ ID NO: 49865 - RNA, 24 nt, Artificial Sequence
  Synthetic
cuaagugcuuugcacuguuagaag

SEQ ID NO: 49866 - RNA, 18 nt, Artificial Sequence
  Synthetic
cauuccacuaacacgaag

SEQ ID NO: 49867 - RNA, 19 nt, Artificial Sequence
  Synthetic
acauuccacuaacacgaag

SEQ ID NO: 49868 - RNA, 21 nt, Artificial Sequence
  Synthetic
ugacauuccacuaacacgaag

SEQ ID NO: 49869 - RNA, 23 nt, Artificial Sequence
  Synthetic
agugacauuccacuaacacgaag

SEQ ID NO: 49870 - RNA, 24 nt, Artificial Sequence
  Synthetic
cagugacauuccacuaacacgaag

SEQ ID NO: 49871 - RNA, 18 nt, Artificial Sequence
  Synthetic
cuuccccuauuaaggaag

SEQ ID NO: 49872 - RNA, 19 nt, Artificial Sequence
  Synthetic
ucuuccccuauuaaggaag

SEQ ID NO: 49873 - RNA, 20 nt, Artificial Sequence
  Synthetic
cucuuccccuauuaaggaag

SEQ ID NO: 49874 - RNA, 21 nt, Artificial Sequence
  Synthetic
ccucuuccccuauuaaggaag

SEQ ID NO: 49875 - RNA, 22 nt, Artificial Sequence
  Synthetic
cccucuuccccuauuaaggaag

SEQ ID NO: 49876 - RNA, 23 nt, Artificial Sequence
  Synthetic
ccccucuuccccuauuaaggaag

SEQ ID NO: 49877 - RNA, 18 nt, Artificial Sequence
  Synthetic
uguaagcagaagaggaag

SEQ ID NO: 49878 - RNA, 19 nt, Artificial Sequence
  Synthetic
uuguaagcagaagaggaag

SEQ ID NO: 49879 - RNA, 20 nt, Artificial Sequence
  Synthetic
auuguaagcagaagaggaag

SEQ ID NO: 49880 - RNA, 22 nt, Artificial Sequence
  Synthetic
agauuguaagcagaagaggaag

SEQ ID NO: 49881 - RNA, 23 nt, Artificial Sequence
  Synthetic
uagauuguaagcagaagaggaag

SEQ ID NO: 49882 - RNA, 24 nt, Artificial Sequence
  Synthetic
auagauuguaagcagaagaggaag

SEQ ID NO: 49883 - RNA, 18 nt, Artificial Sequence
  Synthetic
agaugacaagugaggaag

SEQ ID NO: 49884 - RNA, 19 nt, Artificial Sequence
  Synthetic
aagaugacaagugaggaag

SEQ ID NO: 49885 - RNA, 22 nt, Artificial Sequence
  Synthetic
aggaagaugacaagugaggaag

SEQ ID NO: 49886 - RNA, 23 nt, Artificial Sequence
  Synthetic
uaggaagaugacaagugaggaag

SEQ ID NO: 49887 - RNA, 24 nt, Artificial Sequence
  Synthetic
uuaggaagaugacaagugaggaag

SEQ ID NO: 49888 - RNA, 18 nt, Artificial Sequence
  Synthetic
cugaagugguugaggaag

SEQ ID NO: 49889 - RNA, 20 nt, Artificial Sequence
  Synthetic
agcugaagugguugaggaag

SEQ ID NO: 49890 - RNA, 21 nt, Artificial Sequence
  Synthetic
uagcugaagugguugaggaag

SEQ ID NO: 49891 - RNA, 22 nt, Artificial Sequence
  Synthetic
uuagcugaagugguugaggaag

SEQ ID NO: 49892 - RNA, 23 nt, Artificial Sequence
  Synthetic
cuuagcugaagugguugaggaag

SEQ ID NO: 49893 - RNA, 24 nt, Artificial Sequence
  Synthetic
ucuuagcugaagugguugaggaag

SEQ ID NO: 49894 - RNA, 18 nt, Artificial Sequence
  Synthetic
aaguguuagaauaggaag

SEQ ID NO: 49895 - RNA, 19 nt, Artificial Sequence
  Synthetic
uaaguguuagaauaggaag

SEQ ID NO: 49896 - RNA, 20 nt, Artificial Sequence
  Synthetic
auaaguguuagaauaggaag

SEQ ID NO: 49897 - RNA, 21 nt, Artificial Sequence
  Synthetic
aauaaguguuagaauaggaag

SEQ ID NO: 49898 - RNA, 24 nt, Artificial Sequence
  Synthetic
aggaauaaguguuagaauaggaag

SEQ ID NO: 49899 - RNA, 18 nt, Artificial Sequence
  Synthetic
uaggaaguugcacggaag

SEQ ID NO: 49900 - RNA, 19 nt, Artificial Sequence
  Synthetic
auaggaaguugcacggaag

SEQ ID NO: 49901 - RNA, 20 nt, Artificial Sequence
  Synthetic
uauaggaaguugcacggaag

SEQ ID NO: 49902 - RNA, 21 nt, Artificial Sequence
  Synthetic
auauaggaaguugcacggaag

SEQ ID NO: 49903 - RNA, 22 nt, Artificial Sequence
  Synthetic
aauauaggaaguugcacggaag

SEQ ID NO: 49904 - RNA, 23 nt, Artificial Sequence
  Synthetic
aaauauaggaaguugcacggaag

SEQ ID NO: 49905 - RNA, 24 nt, Artificial Sequence
  Synthetic
aaaauauaggaaguugcacggaag

SEQ ID NO: 49906 - RNA, 18 nt, Artificial Sequence
  Synthetic
aacucuuccaaagggaag

SEQ ID NO: 49907 - RNA, 19 nt, Artificial Sequence
  Synthetic
aaacucuuccaaagggaag

SEQ ID NO: 49908 - RNA, 20 nt, Artificial Sequence
  Synthetic
uaaacucuuccaaagggaag

SEQ ID NO: 49909 - RNA, 21 nt, Artificial Sequence
  Synthetic
uuaaacucuuccaaagggaag

SEQ ID NO: 49910 - RNA, 22 nt, Artificial Sequence
  Synthetic
cuuaaacucuuccaaagggaag

SEQ ID NO: 49911 - RNA, 24 nt, Artificial Sequence
  Synthetic
ugcuuaaacucuuccaaagggaag

SEQ ID NO: 49912 - RNA, 18 nt, Artificial Sequence
  Synthetic
aucaggggagaagggaag

SEQ ID NO: 49913 - RNA, 19 nt, Artificial Sequence
  Synthetic
caucaggggagaagggaag

SEQ ID NO: 49914 - RNA, 20 nt, Artificial Sequence
  Synthetic
acaucaggggagaagggaag

SEQ ID NO: 49915 - RNA, 21 nt, Artificial Sequence
  Synthetic
aacaucaggggagaagggaag

SEQ ID NO: 49916 - RNA, 22 nt, Artificial Sequence
  Synthetic
caacaucaggggagaagggaag

SEQ ID NO: 49917 - RNA, 23 nt, Artificial Sequence
  Synthetic
acaacaucaggggagaagggaag

SEQ ID NO: 49918 - RNA, 24 nt, Artificial Sequence
  Synthetic
uacaacaucaggggagaagggaag

SEQ ID NO: 49919 - RNA, 19 nt, Artificial Sequence
  Synthetic
agcugaaguaaccgggaag

SEQ ID NO: 49920 - RNA, 20 nt, Artificial Sequence
  Synthetic
aagcugaaguaaccgggaag

SEQ ID NO: 49921 - RNA, 21 nt, Artificial Sequence
  Synthetic
aaagcugaaguaaccgggaag

SEQ ID NO: 49922 - RNA, 22 nt, Artificial Sequence
  Synthetic
aaaagcugaaguaaccgggaag

SEQ ID NO: 49923 - RNA, 23 nt, Artificial Sequence
  Synthetic
aaaaagcugaaguaaccgggaag

SEQ ID NO: 49924 - RNA, 24 nt, Artificial Sequence
  Synthetic
aaaaaagcugaaguaaccgggaag

SEQ ID NO: 49925 - RNA, 18 nt, Artificial Sequence
  Synthetic
aaagggagagaugggaag

SEQ ID NO: 49926 - RNA, 19 nt, Artificial Sequence
  Synthetic
caaagggagagaugggaag

SEQ ID NO: 49927 - RNA, 20 nt, Artificial Sequence
  Synthetic
ccaaagggagagaugggaag

SEQ ID NO: 49928 - RNA, 21 nt, Artificial Sequence
  Synthetic
cggaagcaaggcagugggaag

SEQ ID NO: 49929 - RNA, 22 nt, Artificial Sequence
  Synthetic
acggaagcaaggcagugggaag

SEQ ID NO: 49930 - RNA, 24 nt, Artificial Sequence
  Synthetic
agacggaagcaaggcagugggaag

SEQ ID NO: 49931 - RNA, 22 nt, Artificial Sequence
  Synthetic
ugaggaaaggaggaaauggaag

SEQ ID NO: 49932 - RNA, 24 nt, Artificial Sequence
  Synthetic
agugaggaaaggaggaaauggaag

SEQ ID NO: 49933 - RNA, 18 nt, Artificial Sequence
  Synthetic
uuggcagguuuauggaag

SEQ ID NO: 49934 - RNA, 19 nt, Artificial Sequence
  Synthetic
auuggcagguuuauggaag

SEQ ID NO: 49935 - RNA, 20 nt, Artificial Sequence
  Synthetic
uauuggcagguuuauggaag

SEQ ID NO: 49936 - RNA, 21 nt, Artificial Sequence
  Synthetic
auauuggcagguuuauggaag

SEQ ID NO: 49937 - RNA, 22 nt, Artificial Sequence
  Synthetic
aauauuggcagguuuauggaag

SEQ ID NO: 49938 - RNA, 23 nt, Artificial Sequence
  Synthetic
aaauauuggcagguuuauggaag

SEQ ID NO: 49939 - RNA, 24 nt, Artificial Sequence
  Synthetic
uaaauauuggcagguuuauggaag

SEQ ID NO: 49940 - RNA, 18 nt, Artificial Sequence
  Synthetic
uuaacagugggguggaag

SEQ ID NO: 49941 - RNA, 20 nt, Artificial Sequence
  Synthetic
uguuaacagugggguggaag

SEQ ID NO: 49942 - RNA, 21 nt, Artificial Sequence
  Synthetic
cuguuaacagugggguggaag

SEQ ID NO: 49943 - RNA, 22 nt, Artificial Sequence
  Synthetic
ccuguuaacagugggguggaag

SEQ ID NO: 49944 - RNA, 23 nt, Artificial Sequence
  Synthetic
accuguuaacagugggguggaag

SEQ ID NO: 49945 - RNA, 18 nt, Artificial Sequence
  Synthetic
ugcagugaucccaugaag

SEQ ID NO: 49946 - RNA, 20 nt, Artificial Sequence
  Synthetic
agugcagugaucccaugaag

SEQ ID NO: 49947 - RNA, 21 nt, Artificial Sequence
  Synthetic
uagugcagugaucccaugaag

SEQ ID NO: 49948 - RNA, 22 nt, Artificial Sequence
  Synthetic
uuagugcagugaucccaugaag

SEQ ID NO: 49949 - RNA, 23 nt, Artificial Sequence
  Synthetic
uuuagugcagugaucccaugaag

SEQ ID NO: 49950 - RNA, 24 nt, Artificial Sequence
  Synthetic
uuuuagugcagugaucccaugaag

SEQ ID NO: 49951 - RNA, 18 nt, Artificial Sequence
  Synthetic
ucaucuaauuccaugaag

SEQ ID NO: 49952 - RNA, 19 nt, Artificial Sequence
  Synthetic
cucaucuaauuccaugaag

SEQ ID NO: 49953 - RNA, 20 nt, Artificial Sequence
  Synthetic
ucucaucuaauuccaugaag

SEQ ID NO: 49954 - RNA, 21 nt, Artificial Sequence
  Synthetic
uucucaucuaauuccaugaag

SEQ ID NO: 49955 - RNA, 22 nt, Artificial Sequence
  Synthetic
cuucucaucuaauuccaugaag

SEQ ID NO: 49956 - RNA, 23 nt, Artificial Sequence
  Synthetic
ucuucucaucuaauuccaugaag

SEQ ID NO: 49957 - RNA, 24 nt, Artificial Sequence
  Synthetic
cucuucucaucuaauuccaugaag

SEQ ID NO: 49958 - RNA, 18 nt, Artificial Sequence
  Synthetic
aacacuuguaagaugaag

SEQ ID NO: 49959 - RNA, 19 nt, Artificial Sequence
  Synthetic
uaacacuuguaagaugaag

SEQ ID NO: 49960 - RNA, 20 nt, Artificial Sequence
  Synthetic
uuaacacuuguaagaugaag

SEQ ID NO: 49961 - RNA, 21 nt, Artificial Sequence
  Synthetic
auuaacacuuguaagaugaag

SEQ ID NO: 49962 - RNA, 22 nt, Artificial Sequence
  Synthetic
uauuaacacuuguaagaugaag

SEQ ID NO: 49963 - RNA, 23 nt, Artificial Sequence
  Synthetic
uuauuaacacuuguaagaugaag

SEQ ID NO: 49964 - RNA, 24 nt, Artificial Sequence
  Synthetic
auuauuaacacuuguaagaugaag

SEQ ID NO: 49965 - RNA, 18 nt, Artificial Sequence
  Synthetic
cauuguucuauucugaag

SEQ ID NO: 49966 - RNA, 19 nt, Artificial Sequence
  Synthetic
acauuguucuauucugaag

SEQ ID NO: 49967 - RNA, 21 nt, Artificial Sequence
  Synthetic
agacauuguucuauucugaag

SEQ ID NO: 49968 - RNA, 22 nt, Artificial Sequence
  Synthetic
uagacauuguucuauucugaag

SEQ ID NO: 49969 - RNA, 24 nt, Artificial Sequence
  Synthetic
uguagacauuguucuauucugaag

SEQ ID NO: 49970 - RNA, 19 nt, Artificial Sequence
  Synthetic
uguguguauacaagugaag

SEQ ID NO: 49971 - RNA, 20 nt, Artificial Sequence
  Synthetic
cuguguguauacaagugaag

SEQ ID NO: 49972 - RNA, 21 nt, Artificial Sequence
  Synthetic
ucuguguguauacaagugaag

SEQ ID NO: 49973 - RNA, 22 nt, Artificial Sequence
  Synthetic
aucuguguguauacaagugaag

SEQ ID NO: 49974 - RNA, 24 nt, Artificial Sequence
  Synthetic
ugaucuguguguauacaagugaag

SEQ ID NO: 49975 - RNA, 19 nt, Artificial Sequence
  Synthetic
aguaaaaacuccugugaag

SEQ ID NO: 49976 - RNA, 21 nt, Artificial Sequence
  Synthetic
agaguaaaaacuccugugaag

SEQ ID NO: 49977 - RNA, 23 nt, Artificial Sequence
  Synthetic
agagaguaaaaacuccugugaag

SEQ ID NO: 49978 - RNA, 24 nt, Artificial Sequence
  Synthetic
uagagaguaaaaacuccugugaag

SEQ ID NO: 49979 - RNA, 18 nt, Artificial Sequence
  Synthetic
accauugcugaguugaag

SEQ ID NO: 49980 - RNA, 19 nt, Artificial Sequence
  Synthetic
aaccauugcugaguugaag

SEQ ID NO: 49981 - RNA, 20 nt, Artificial Sequence
  Synthetic
aaaccauugcugaguugaag

SEQ ID NO: 49982 - RNA, 21 nt, Artificial Sequence
  Synthetic
aaaaccauugcugaguugaag

SEQ ID NO: 49983 - RNA, 22 nt, Artificial Sequence
  Synthetic
aaaaaccauugcugaguugaag

SEQ ID NO: 49984 - RNA, 23 nt, Artificial Sequence
  Synthetic
caaaaaccauugcugaguugaag

SEQ ID NO: 49985 - RNA, 24 nt, Artificial Sequence
  Synthetic
ccaaaaaccauugcugaguugaag

SEQ ID NO: 49986 - RNA, 18 nt, Artificial Sequence
  Synthetic
ugcuauagagauuugaag

SEQ ID NO: 49987 - RNA, 21 nt, Artificial Sequence
  Synthetic
uggugcuauagagauuugaag

SEQ ID NO: 49988 - RNA, 22 nt, Artificial Sequence
  Synthetic
auggugcuauagagauuugaag

SEQ ID NO: 49989 - RNA, 23 nt, Artificial Sequence
  Synthetic
uauggugcuauagagauuugaag

SEQ ID NO: 49990 - RNA, 24 nt, Artificial Sequence
  Synthetic
auauggugcuauagagauuugaag

SEQ ID NO: 49991 - RNA, 21 nt, Artificial Sequence
  Synthetic
agggcauacuuuuauuugaag

SEQ ID NO: 49992 - RNA, 22 nt, Artificial Sequence
  Synthetic
cagggcauacuuuuauuugaag

SEQ ID NO: 49993 - RNA, 19 nt, Artificial Sequence
  Synthetic
agcagguacggguuugaag

SEQ ID NO: 49994 - RNA, 22 nt, Artificial Sequence
  Synthetic
uggagcagguacggguuugaag

SEQ ID NO: 49995 - RNA, 23 nt, Artificial Sequence
  Synthetic
auggagcagguacggguuugaag

SEQ ID NO: 49996 - RNA, 18 nt, Artificial Sequence
  Synthetic
ucauugacuuuuuugaag

SEQ ID NO: 49997 - RNA, 19 nt, Artificial Sequence
  Synthetic
uucauugacuuuuuugaag

SEQ ID NO: 49998 - RNA, 20 nt, Artificial Sequence
  Synthetic
cuucauugacuuuuuugaag

SEQ ID NO: 49999 - RNA, 21 nt, Artificial Sequence
  Synthetic
ccuucauugacuuuuuugaag

SEQ ID NO: 50000 - RNA, 22 nt, Artificial Sequence
  Synthetic
accuucauugacuuuuuugaag

SEQ ID NO: 50001 - RNA, 23 nt, Artificial Sequence
  Synthetic
uaccuucauugacuuuuuugaag

SEQ ID NO: 50002 - RNA, 24 nt, Artificial Sequence
  Synthetic
cuaccuucauugacuuuuuugaag

SEQ ID NO: 50003 - RNA, 21 nt, Artificial Sequence
  Synthetic
acaaaaauugaaaaaaauaag

SEQ ID NO: 50004 - RNA, 22 nt, Artificial Sequence
  Synthetic
cacaaaaauugaaaaaaauaag

SEQ ID NO: 50005 - RNA, 23 nt, Artificial Sequence
  Synthetic
ucacaaaaauugaaaaaaauaag

SEQ ID NO: 50006 - RNA, 24 nt, Artificial Sequence
  Synthetic
aucacaaaaauugaaaaaaauaag

SEQ ID NO: 50007 - RNA, 18 nt, Artificial Sequence
  Synthetic
ugacuacaauaaaauaag

SEQ ID NO: 50008 - RNA, 20 nt, Artificial Sequence
  Synthetic
agugacuacaauaaaauaag

SEQ ID NO: 50009 - RNA, 21 nt, Artificial Sequence
  Synthetic
uagugacuacaauaaaauaag

SEQ ID NO: 50010 - RNA, 22 nt, Artificial Sequence
  Synthetic
uuagugacuacaauaaaauaag

SEQ ID NO: 50011 - RNA, 23 nt, Artificial Sequence
  Synthetic
uuuagugacuacaauaaaauaag

SEQ ID NO: 50012 - RNA, 24 nt, Artificial Sequence
  Synthetic
uuuuagugacuacaauaaaauaag

SEQ ID NO: 50013 - RNA, 18 nt, Artificial Sequence
  Synthetic
ugugagaggggaaauaag

SEQ ID NO: 50014 - RNA, 20 nt, Artificial Sequence
  Synthetic
ugugugagaggggaaauaag

SEQ ID NO: 50015 - RNA, 22 nt, Artificial Sequence
  Synthetic
ugugugugagaggggaaauaag

SEQ ID NO: 50016 - RNA, 23 nt, Artificial Sequence
  Synthetic
augugugugagaggggaaauaag

SEQ ID NO: 50017 - RNA, 24 nt, Artificial Sequence
  Synthetic
aaugugugugagaggggaaauaag

SEQ ID NO: 50018 - RNA, 18 nt, Artificial Sequence
  Synthetic
agugaugcauucaauaag

SEQ ID NO: 50019 - RNA, 19 nt, Artificial Sequence
  Synthetic
uagugaugcauucaauaag

SEQ ID NO: 50020 - RNA, 20 nt, Artificial Sequence
  Synthetic
uuagugaugcauucaauaag

SEQ ID NO: 50021 - RNA, 21 nt, Artificial Sequence
  Synthetic
auuagugaugcauucaauaag

SEQ ID NO: 50022 - RNA, 22 nt, Artificial Sequence
  Synthetic
aauuagugaugcauucaauaag

SEQ ID NO: 50023 - RNA, 23 nt, Artificial Sequence
  Synthetic
uaauuagugaugcauucaauaag

SEQ ID NO: 50024 - RNA, 24 nt, Artificial Sequence
  Synthetic
uuaauuagugaugcauucaauaag

SEQ ID NO: 50025 - RNA, 18 nt, Artificial Sequence
  Synthetic
uacaauaucuuacauaag

SEQ ID NO: 50026 - RNA, 19 nt, Artificial Sequence
  Synthetic
uuacaauaucuuacauaag

SEQ ID NO: 50027 - RNA, 20 nt, Artificial Sequence
  Synthetic
uuuacaauaucuuacauaag

SEQ ID NO: 50028 - RNA, 21 nt, Artificial Sequence
  Synthetic
cuuuacaauaucuuacauaag

SEQ ID NO: 50029 - RNA, 23 nt, Artificial Sequence
  Synthetic
ugcuuuacaauaucuuacauaag

SEQ ID NO: 50030 - RNA, 24 nt, Artificial Sequence
  Synthetic
uugcuuuacaauaucuuacauaag

SEQ ID NO: 50031 - RNA, 18 nt, Artificial Sequence
  Synthetic
uuaggggaaaggcauaag

SEQ ID NO: 50032 - RNA, 19 nt, Artificial Sequence
  Synthetic
auuaggggaaaggcauaag

SEQ ID NO: 50033 - RNA, 20 nt, Artificial Sequence
  Synthetic
uauuaggggaaaggcauaag

SEQ ID NO: 50034 - RNA, 21 nt, Artificial Sequence
  Synthetic
auauuaggggaaaggcauaag

SEQ ID NO: 50035 - RNA, 23 nt, Artificial Sequence
  Synthetic
agauauuaggggaaaggcauaag

SEQ ID NO: 50036 - RNA, 24 nt, Artificial Sequence
  Synthetic
aagauauuaggggaaaggcauaag

SEQ ID NO: 50037 - RNA, 19 nt, Artificial Sequence
  Synthetic
aguuguuuucuugcauaag

SEQ ID NO: 50038 - RNA, 20 nt, Artificial Sequence
  Synthetic
uaguuguuuucuugcauaag

SEQ ID NO: 50039 - RNA, 21 nt, Artificial Sequence
  Synthetic
uuaguuguuuucuugcauaag

SEQ ID NO: 50040 - RNA, 23 nt, Artificial Sequence
  Synthetic
aguuaguuguuuucuugcauaag

SEQ ID NO: 50041 - RNA, 24 nt, Artificial Sequence
  Synthetic
caguuaguuguuuucuugcauaag

SEQ ID NO: 50042 - RNA, 19 nt, Artificial Sequence
  Synthetic
agucauauuucuucauaag

SEQ ID NO: 50043 - RNA, 20 nt, Artificial Sequence
  Synthetic
uagucauauuucuucauaag

SEQ ID NO: 50044 - RNA, 21 nt, Artificial Sequence
  Synthetic
cuagucauauuucuucauaag

SEQ ID NO: 50045 - RNA, 22 nt, Artificial Sequence
  Synthetic
ucuagucauauuucuucauaag

SEQ ID NO: 50046 - RNA, 23 nt, Artificial Sequence
  Synthetic
uucuagucauauuucuucauaag

SEQ ID NO: 50047 - RNA, 24 nt, Artificial Sequence
  Synthetic
auucuagucauauuucuucauaag

SEQ ID NO: 50048 - RNA, 19 nt, Artificial Sequence
  Synthetic
ugaguccaagguggauaag

SEQ ID NO: 50049 - RNA, 20 nt, Artificial Sequence
  Synthetic
augaguccaagguggauaag

SEQ ID NO: 50050 - RNA, 23 nt, Artificial Sequence
  Synthetic
aggaugaguccaagguggauaag

SEQ ID NO: 50051 - RNA, 24 nt, Artificial Sequence
  Synthetic
caggaugaguccaagguggauaag

SEQ ID NO: 50052 - RNA, 18 nt, Artificial Sequence
  Synthetic
auguuaaggcauuauaag

SEQ ID NO: 50053 - RNA, 19 nt, Artificial Sequence
  Synthetic
cauguuaaggcauuauaag

SEQ ID NO: 50054 - RNA, 20 nt, Artificial Sequence
  Synthetic
ccauguuaaggcauuauaag

SEQ ID NO: 50055 - RNA, 21 nt, Artificial Sequence
  Synthetic
uccauguuaaggcauuauaag

SEQ ID NO: 50056 - RNA, 22 nt, Artificial Sequence
  Synthetic
auccauguuaaggcauuauaag

SEQ ID NO: 50057 - RNA, 23 nt, Artificial Sequence
  Synthetic
aauccauguuaaggcauuauaag

SEQ ID NO: 50058 - RNA, 24 nt, Artificial Sequence
  Synthetic
aaauccauguuaaggcauuauaag

SEQ ID NO: 50059 - RNA, 18 nt, Artificial Sequence
  Synthetic
uucaugagagauuauaag

SEQ ID NO: 50060 - RNA, 19 nt, Artificial Sequence
  Synthetic
uuucaugagagauuauaag

SEQ ID NO: 50061 - RNA, 20 nt, Artificial Sequence
  Synthetic
auuucaugagagauuauaag

SEQ ID NO: 50062 - RNA, 21 nt, Artificial Sequence
  Synthetic
uauuucaugagagauuauaag

SEQ ID NO: 50063 - RNA, 22 nt, Artificial Sequence
  Synthetic
auauuucaugagagauuauaag

SEQ ID NO: 50064 - RNA, 23 nt, Artificial Sequence
  Synthetic
aauauuucaugagagauuauaag

SEQ ID NO: 50065 - RNA, 18 nt, Artificial Sequence
  Synthetic
uggaggggaagaacuaag

SEQ ID NO: 50066 - RNA, 20 nt, Artificial Sequence
  Synthetic
uguggaggggaagaacuaag

SEQ ID NO: 50067 - RNA, 24 nt, Artificial Sequence
  Synthetic
uggguguggaggggaagaacuaag

SEQ ID NO: 50068 - RNA, 18 nt, Artificial Sequence
  Synthetic
cuuuuuuacuuaccuaag

SEQ ID NO: 50069 - RNA, 20 nt, Artificial Sequence
  Synthetic
agcuuuuuuacuuaccuaag

SEQ ID NO: 50070 - RNA, 21 nt, Artificial Sequence
  Synthetic
aagcuuuuuuacuuaccuaag

SEQ ID NO: 50071 - RNA, 22 nt, Artificial Sequence
  Synthetic
aaagcuuuuuuacuuaccuaag

SEQ ID NO: 50072 - RNA, 23 nt, Artificial Sequence
  Synthetic
uaaagcuuuuuuacuuaccuaag

SEQ ID NO: 50073 - RNA, 24 nt, Artificial Sequence
  Synthetic
cuaaagcuuuuuuacuuaccuaag

SEQ ID NO: 50074 - RNA, 18 nt, Artificial Sequence
  Synthetic
cucgaaaagaacccuaag

SEQ ID NO: 50075 - RNA, 19 nt, Artificial Sequence
  Synthetic
ucucgaaaagaacccuaag

SEQ ID NO: 50076 - RNA, 20 nt, Artificial Sequence
  Synthetic
aucucgaaaagaacccuaag

SEQ ID NO: 50077 - RNA, 21 nt, Artificial Sequence
  Synthetic
uaucucgaaaagaacccuaag

SEQ ID NO: 50078 - RNA, 23 nt, Artificial Sequence
  Synthetic
aguaucucgaaaagaacccuaag

SEQ ID NO: 50079 - RNA, 24 nt, Artificial Sequence
  Synthetic
uaguaucucgaaaagaacccuaag

SEQ ID NO: 50080 - RNA, 18 nt, Artificial Sequence
  Synthetic
ccuuuugucaccccuaag

SEQ ID NO: 50081 - RNA, 19 nt, Artificial Sequence
  Synthetic
accuuuugucaccccuaag

SEQ ID NO: 50082 - RNA, 20 nt, Artificial Sequence
  Synthetic
uaccuuuugucaccccuaag

SEQ ID NO: 50083 - RNA, 21 nt, Artificial Sequence
  Synthetic
auaccuuuugucaccccuaag

SEQ ID NO: 50084 - RNA, 22 nt, Artificial Sequence
  Synthetic
uauaccuuuugucaccccuaag

SEQ ID NO: 50085 - RNA, 23 nt, Artificial Sequence
  Synthetic
auauaccuuuugucaccccuaag

SEQ ID NO: 50086 - RNA, 24 nt, Artificial Sequence
  Synthetic
uauauaccuuuugucaccccuaag

SEQ ID NO: 50087 - RNA, 18 nt, Artificial Sequence
  Synthetic
uauuuaaggagcccuaag

SEQ ID NO: 50088 - RNA, 19 nt, Artificial Sequence
  Synthetic
uuauuuaaggagcccuaag

SEQ ID NO: 50089 - RNA, 20 nt, Artificial Sequence
  Synthetic
uuuauuuaaggagcccuaag

SEQ ID NO: 50090 - RNA, 21 nt, Artificial Sequence
  Synthetic
uuuuauuuaaggagcccuaag

SEQ ID NO: 50091 - RNA, 23 nt, Artificial Sequence
  Synthetic
uguuuuauuuaaggagcccuaag

SEQ ID NO: 50092 - RNA, 24 nt, Artificial Sequence
  Synthetic
uuguuuuauuuaaggagcccuaag

SEQ ID NO: 50093 - RNA, 18 nt, Artificial Sequence
  Synthetic
cuucuuaaacucccuaag

SEQ ID NO: 50094 - RNA, 20 nt, Artificial Sequence
  Synthetic
ugcuucuuaaacucccuaag

SEQ ID NO: 50095 - RNA, 22 nt, Artificial Sequence
  Synthetic
agugcuucuuaaacucccuaag

SEQ ID NO: 50096 - RNA, 23 nt, Artificial Sequence
  Synthetic
aagugcuucuuaaacucccuaag

SEQ ID NO: 50097 - RNA, 18 nt, Artificial Sequence
  Synthetic
uucugcuuugggccuaag

SEQ ID NO: 50098 - RNA, 19 nt, Artificial Sequence
  Synthetic
uuucugcuuugggccuaag

SEQ ID NO: 50099 - RNA, 20 nt, Artificial Sequence
  Synthetic
uuuucugcuuugggccuaag

SEQ ID NO: 50100 - RNA, 21 nt, Artificial Sequence
  Synthetic
auuuucugcuuugggccuaag

SEQ ID NO: 50101 - RNA, 22 nt, Artificial Sequence
  Synthetic
cauuuucugcuuugggccuaag

SEQ ID NO: 50102 - RNA, 23 nt, Artificial Sequence
  Synthetic
acauuuucugcuuugggccuaag

SEQ ID NO: 50103 - RNA, 24 nt, Artificial Sequence
  Synthetic
aacauuuucugcuuugggccuaag

SEQ ID NO: 50104 - RNA, 18 nt, Artificial Sequence
  Synthetic
aucuaggcuuauccuaag

SEQ ID NO: 50105 - RNA, 19 nt, Artificial Sequence
  Synthetic
aaucuaggcuuauccuaag

SEQ ID NO: 50106 - RNA, 20 nt, Artificial Sequence
  Synthetic
caaucuaggcuuauccuaag

SEQ ID NO: 50107 - RNA, 21 nt, Artificial Sequence
  Synthetic
acaaucuaggcuuauccuaag

SEQ ID NO: 50108 - RNA, 23 nt, Artificial Sequence
  Synthetic
agacaaucuaggcuuauccuaag

SEQ ID NO: 50109 - RNA, 24 nt, Artificial Sequence
  Synthetic
uagacaaucuaggcuuauccuaag

SEQ ID NO: 50110 - RNA, 19 nt, Artificial Sequence
  Synthetic
agucuauggacaggcuaag

SEQ ID NO: 50111 - RNA, 20 nt, Artificial Sequence
  Synthetic
cagucuauggacaggcuaag

SEQ ID NO: 50112 - RNA, 21 nt, Artificial Sequence
  Synthetic
ucagucuauggacaggcuaag

SEQ ID NO: 50113 - RNA, 22 nt, Artificial Sequence
  Synthetic
cucagucuauggacaggcuaag

SEQ ID NO: 50114 - RNA, 23 nt, Artificial Sequence
  Synthetic
ccucagucuauggacaggcuaag

SEQ ID NO: 50115 - RNA, 24 nt, Artificial Sequence
  Synthetic
cccucagucuauggacaggcuaag

SEQ ID NO: 50116 - RNA, 18 nt, Artificial Sequence
  Synthetic
uaaucgucauuugcuaag

SEQ ID NO: 50117 - RNA, 19 nt, Artificial Sequence
  Synthetic
uuaaucgucauuugcuaag

SEQ ID NO: 50118 - RNA, 20 nt, Artificial Sequence
  Synthetic
uuuaaucgucauuugcuaag

SEQ ID NO: 50119 - RNA, 21 nt, Artificial Sequence
  Synthetic
cuuuaaucgucauuugcuaag

SEQ ID NO: 50120 - RNA, 22 nt, Artificial Sequence
  Synthetic
acuuuaaucgucauuugcuaag

SEQ ID NO: 50121 - RNA, 23 nt, Artificial Sequence
  Synthetic
aacuuuaaucgucauuugcuaag

SEQ ID NO: 50122 - RNA, 24 nt, Artificial Sequence
  Synthetic
aaacuuuaaucgucauuugcuaag

SEQ ID NO: 50123 - RNA, 18 nt, Artificial Sequence
  Synthetic
ucauguaaacagucuaag

SEQ ID NO: 50124 - RNA, 19 nt, Artificial Sequence
  Synthetic
cucauguaaacagucuaag

SEQ ID NO: 50125 - RNA, 20 nt, Artificial Sequence
  Synthetic
ucucauguaaacagucuaag

SEQ ID NO: 50126 - RNA, 21 nt, Artificial Sequence
  Synthetic
uucucauguaaacagucuaag

SEQ ID NO: 50127 - RNA, 22 nt, Artificial Sequence
  Synthetic
uuucucauguaaacagucuaag

SEQ ID NO: 50128 - RNA, 23 nt, Artificial Sequence
  Synthetic
cuuucucauguaaacagucuaag

SEQ ID NO: 50129 - RNA, 24 nt, Artificial Sequence
  Synthetic
ucuuucucauguaaacagucuaag

SEQ ID NO: 50130 - RNA, 18 nt, Artificial Sequence
  Synthetic
ccucuuaauuguucuaag

SEQ ID NO: 50131 - RNA, 19 nt, Artificial Sequence
  Synthetic
uccucuuaauuguucuaag

SEQ ID NO: 50132 - RNA, 20 nt, Artificial Sequence
  Synthetic
uuccucuuaauuguucuaag

SEQ ID NO: 50133 - RNA, 21 nt, Artificial Sequence
  Synthetic
auuccucuuaauuguucuaag

SEQ ID NO: 50134 - RNA, 22 nt, Artificial Sequence
  Synthetic
aauuccucuuaauuguucuaag

SEQ ID NO: 50135 - RNA, 23 nt, Artificial Sequence
  Synthetic
uaauuccucuuaauuguucuaag

SEQ ID NO: 50136 - RNA, 24 nt, Artificial Sequence
  Synthetic
uuaauuccucuuaauuguucuaag

SEQ ID NO: 50137 - RNA, 18 nt, Artificial Sequence
  Synthetic
agauuaucugaaaguaag

SEQ ID NO: 50138 - RNA, 19 nt, Artificial Sequence
  Synthetic
uagauuaucugaaaguaag

SEQ ID NO: 50139 - RNA, 20 nt, Artificial Sequence
  Synthetic
cuagauuaucugaaaguaag

SEQ ID NO: 50140 - RNA, 22 nt, Artificial Sequence
  Synthetic
agcuagauuaucugaaaguaag

SEQ ID NO: 50141 - RNA, 24 nt, Artificial Sequence
  Synthetic
ugagcuagauuaucugaaaguaag

SEQ ID NO: 50142 - RNA, 18 nt, Artificial Sequence
  Synthetic
uaccuuauuucaaguaag

SEQ ID NO: 50143 - RNA, 19 nt, Artificial Sequence
  Synthetic
auaccuuauuucaaguaag

SEQ ID NO: 50144 - RNA, 21 nt, Artificial Sequence
  Synthetic
agauaccuuauuucaaguaag

SEQ ID NO: 50145 - RNA, 22 nt, Artificial Sequence
  Synthetic
uagauaccuuauuucaaguaag

SEQ ID NO: 50146 - RNA, 23 nt, Artificial Sequence
  Synthetic
uuagauaccuuauuucaaguaag

SEQ ID NO: 50147 - RNA, 24 nt, Artificial Sequence
  Synthetic
uuuagauaccuuauuucaaguaag

SEQ ID NO: 50148 - RNA, 18 nt, Artificial Sequence
  Synthetic
ugaggcagacagaguaag

SEQ ID NO: 50149 - RNA, 20 nt, Artificial Sequence
  Synthetic
agugaggcagacagaguaag

SEQ ID NO: 50150 - RNA, 21 nt, Artificial Sequence
  Synthetic
aagugaggcagacagaguaag

SEQ ID NO: 50151 - RNA, 23 nt, Artificial Sequence
  Synthetic
agaagugaggcagacagaguaag

SEQ ID NO: 50152 - RNA, 24 nt, Artificial Sequence
  Synthetic
aagaagugaggcagacagaguaag

SEQ ID NO: 50153 - RNA, 18 nt, Artificial Sequence
  Synthetic
ugaguggguaggaguaag

SEQ ID NO: 50154 - RNA, 19 nt, Artificial Sequence
  Synthetic
uugaguggguaggaguaag

SEQ ID NO: 50155 - RNA, 21 nt, Artificial Sequence
  Synthetic
cguugaguggguaggaguaag

SEQ ID NO: 50156 - RNA, 22 nt, Artificial Sequence
  Synthetic
ccguugaguggguaggaguaag

SEQ ID NO: 50157 - RNA, 23 nt, Artificial Sequence
  Synthetic
uccguugaguggguaggaguaag

SEQ ID NO: 50158 - RNA, 24 nt, Artificial Sequence
  Synthetic
uuccguugaguggguaggaguaag

SEQ ID NO: 50159 - RNA, 18 nt, Artificial Sequence
  Synthetic
uuagagacaaugaguaag

SEQ ID NO: 50160 - RNA, 20 nt, Artificial Sequence
  Synthetic
aguuagagacaaugaguaag

SEQ ID NO: 50161 - RNA, 21 nt, Artificial Sequence
  Synthetic
aaguuagagacaaugaguaag

SEQ ID NO: 50162 - RNA, 22 nt, Artificial Sequence
  Synthetic
caaguuagagacaaugaguaag

SEQ ID NO: 50163 - RNA, 23 nt, Artificial Sequence
  Synthetic
ucaaguuagagacaaugaguaag

SEQ ID NO: 50164 - RNA, 24 nt, Artificial Sequence
  Synthetic
cucaaguuagagacaaugaguaag

SEQ ID NO: 50165 - RNA, 18 nt, Artificial Sequence
  Synthetic
aucuacuugauugguaag

SEQ ID NO: 50166 - RNA, 19 nt, Artificial Sequence
  Synthetic
uaucuacuugauugguaag

SEQ ID NO: 50167 - RNA, 20 nt, Artificial Sequence
  Synthetic
uuaucuacuugauugguaag

SEQ ID NO: 50168 - RNA, 21 nt, Artificial Sequence
  Synthetic
cuuaucuacuugauugguaag

SEQ ID NO: 50169 - RNA, 22 nt, Artificial Sequence
  Synthetic
ucuuaucuacuugauugguaag

SEQ ID NO: 50170 - RNA, 23 nt, Artificial Sequence
  Synthetic
uucuuaucuacuugauugguaag

SEQ ID NO: 50171 - RNA, 24 nt, Artificial Sequence
  Synthetic
cuucuuaucuacuugauugguaag

SEQ ID NO: 50172 - RNA, 21 nt, Artificial Sequence
  Synthetic
uuaauaauaacaauauguaag

SEQ ID NO: 50173 - RNA, 24 nt, Artificial Sequence
  Synthetic
agguuaauaauaacaauauguaag

SEQ ID NO: 50174 - RNA, 18 nt, Artificial Sequence
  Synthetic
aucagcuuuauauguaag

SEQ ID NO: 50175 - RNA, 19 nt, Artificial Sequence
  Synthetic
aaucagcuuuauauguaag

SEQ ID NO: 50176 - RNA, 21 nt, Artificial Sequence
  Synthetic
agaaucagcuuuauauguaag

SEQ ID NO: 50177 - RNA, 24 nt, Artificial Sequence
  Synthetic
aggagaaucagcuuuauauguaag

SEQ ID NO: 50178 - RNA, 18 nt, Artificial Sequence
  Synthetic
uccacauagaucuguaag

SEQ ID NO: 50179 - RNA, 19 nt, Artificial Sequence
  Synthetic
uuccacauagaucuguaag

SEQ ID NO: 50180 - RNA, 21 nt, Artificial Sequence
  Synthetic
uguuccacauagaucuguaag

SEQ ID NO: 50181 - RNA, 24 nt, Artificial Sequence
  Synthetic
agguguuccacauagaucuguaag

SEQ ID NO: 50182 - RNA, 18 nt, Artificial Sequence
  Synthetic
uuggccuuagguuguaag

SEQ ID NO: 50183 - RNA, 19 nt, Artificial Sequence
  Synthetic
auuggccuuagguuguaag

SEQ ID NO: 50184 - RNA, 20 nt, Artificial Sequence
  Synthetic
aauuggccuuagguuguaag

SEQ ID NO: 50185 - RNA, 22 nt, Artificial Sequence
  Synthetic
ugaauuggccuuagguuguaag

SEQ ID NO: 50186 - RNA, 23 nt, Artificial Sequence
  Synthetic
cugaauuggccuuagguuguaag

SEQ ID NO: 50187 - RNA, 24 nt, Artificial Sequence
  Synthetic
ucugaauuggccuuagguuguaag

SEQ ID NO: 50188 - RNA, 18 nt, Artificial Sequence
  Synthetic
aauaacuuauuuuguaag

SEQ ID NO: 50189 - RNA, 19 nt, Artificial Sequence
  Synthetic
caauaacuuauuuuguaag

SEQ ID NO: 50190 - RNA, 20 nt, Artificial Sequence
  Synthetic
ccaauaacuuauuuuguaag

SEQ ID NO: 50191 - RNA, 21 nt, Artificial Sequence
  Synthetic
cccaauaacuuauuuuguaag

SEQ ID NO: 50192 - RNA, 23 nt, Artificial Sequence
  Synthetic
agcccaauaacuuauuuuguaag

SEQ ID NO: 50193 - RNA, 18 nt, Artificial Sequence
  Synthetic
uuuuucuaugacauuaag

SEQ ID NO: 50194 - RNA, 20 nt, Artificial Sequence
  Synthetic
uguuuuucuaugacauuaag

SEQ ID NO: 50195 - RNA, 21 nt, Artificial Sequence
  Synthetic
auguuuuucuaugacauuaag

SEQ ID NO: 50196 - RNA, 22 nt, Artificial Sequence
  Synthetic
aauguuuuucuaugacauuaag

SEQ ID NO: 50197 - RNA, 24 nt, Artificial Sequence
  Synthetic
agaauguuuuucuaugacauuaag

SEQ ID NO: 50198 - RNA, 19 nt, Artificial Sequence
  Synthetic
aguaacuaaacagauuaag

SEQ ID NO: 50199 - RNA, 20 nt, Artificial Sequence
  Synthetic
aaguaacuaaacagauuaag

SEQ ID NO: 50200 - RNA, 21 nt, Artificial Sequence
  Synthetic
uaaguaacuaaacagauuaag

SEQ ID NO: 50201 - RNA, 22 nt, Artificial Sequence
  Synthetic
uuaaguaacuaaacagauuaag

SEQ ID NO: 50202 - RNA, 23 nt, Artificial Sequence
  Synthetic
uuuaaguaacuaaacagauuaag

SEQ ID NO: 50203 - RNA, 24 nt, Artificial Sequence
  Synthetic
uuuuaaguaacuaaacagauuaag

SEQ ID NO: 50204 - RNA, 19 nt, Artificial Sequence
  Synthetic
agcagugaaugcgauuaag

SEQ ID NO: 50205 - RNA, 20 nt, Artificial Sequence
  Synthetic
aagcagugaaugcgauuaag

SEQ ID NO: 50206 - RNA, 21 nt, Artificial Sequence
  Synthetic
aaagcagugaaugcgauuaag

SEQ ID NO: 50207 - RNA, 22 nt, Artificial Sequence
  Synthetic
uaaagcagugaaugcgauuaag

SEQ ID NO: 50208 - RNA, 23 nt, Artificial Sequence
  Synthetic
auaaagcagugaaugcgauuaag

SEQ ID NO: 50209 - RNA, 24 nt, Artificial Sequence
  Synthetic
aauaaagcagugaaugcgauuaag

SEQ ID NO: 50210 - RNA, 21 nt, Artificial Sequence
  Synthetic
auguauuuuucaauuauuaag

SEQ ID NO: 50211 - RNA, 22 nt, Artificial Sequence
  Synthetic
cauguauuuuucaauuauuaag

SEQ ID NO: 50212 - RNA, 23 nt, Artificial Sequence
  Synthetic
ucauguauuuuucaauuauuaag

SEQ ID NO: 50213 - RNA, 24 nt, Artificial Sequence
  Synthetic
aucauguauuuuucaauuauuaag

SEQ ID NO: 50214 - RNA, 18 nt, Artificial Sequence
  Synthetic
ccuugauguagccuuaag

SEQ ID NO: 50215 - RNA, 19 nt, Artificial Sequence
  Synthetic
accuugauguagccuuaag

SEQ ID NO: 50216 - RNA, 20 nt, Artificial Sequence
  Synthetic
caccuugauguagccuuaag

SEQ ID NO: 50217 - RNA, 21 nt, Artificial Sequence
  Synthetic
acaccuugauguagccuuaag

SEQ ID NO: 50218 - RNA, 22 nt, Artificial Sequence
  Synthetic
aacaccuugauguagccuuaag

SEQ ID NO: 50219 - RNA, 23 nt, Artificial Sequence
  Synthetic
aaacaccuugauguagccuuaag

SEQ ID NO: 50220 - RNA, 24 nt, Artificial Sequence
  Synthetic
aaaacaccuugauguagccuuaag

SEQ ID NO: 50221 - RNA, 19 nt, Artificial Sequence
  Synthetic
aguuuggugaaagguuaag

SEQ ID NO: 50222 - RNA, 20 nt, Artificial Sequence
  Synthetic
aaguuuggugaaagguuaag

SEQ ID NO: 50223 - RNA, 21 nt, Artificial Sequence
  Synthetic
uaaguuuggugaaagguuaag

SEQ ID NO: 50224 - RNA, 23 nt, Artificial Sequence
  Synthetic
uguaaguuuggugaaagguuaag

SEQ ID NO: 50225 - RNA, 24 nt, Artificial Sequence
  Synthetic
uuguaaguuuggugaaagguuaag

SEQ ID NO: 50226 - RNA, 18 nt, Artificial Sequence
  Synthetic
acacuauauaaauuuaag

SEQ ID NO: 50227 - RNA, 19 nt, Artificial Sequence
  Synthetic
aacacuauauaaauuuaag

SEQ ID NO: 50228 - RNA, 20 nt, Artificial Sequence
  Synthetic
caacacuauauaaauuuaag

SEQ ID NO: 50229 - RNA, 21 nt, Artificial Sequence
  Synthetic
acaacacuauauaaauuuaag

SEQ ID NO: 50230 - RNA, 22 nt, Artificial Sequence
  Synthetic
aacaacacuauauaaauuuaag

SEQ ID NO: 50231 - RNA, 23 nt, Artificial Sequence
  Synthetic
aaacaacacuauauaaauuuaag

SEQ ID NO: 50232 - RNA, 18 nt, Artificial Sequence
  Synthetic
uggagucugagauuuaag

SEQ ID NO: 50233 - RNA, 19 nt, Artificial Sequence
  Synthetic
uuggagucugagauuuaag

SEQ ID NO: 50234 - RNA, 21 nt, Artificial Sequence
  Synthetic
uguuggagucugagauuuaag

SEQ ID NO: 50235 - RNA, 24 nt, Artificial Sequence
  Synthetic
agguguuggagucugagauuuaag

SEQ ID NO: 50236 - RNA, 18 nt, Artificial Sequence
  Synthetic
cauauugagguauuuaag

SEQ ID NO: 50237 - RNA, 19 nt, Artificial Sequence
  Synthetic
ccauauugagguauuuaag

SEQ ID NO: 50238 - RNA, 20 nt, Artificial Sequence
  Synthetic
uccauauugagguauuuaag

SEQ ID NO: 50239 - RNA, 21 nt, Artificial Sequence
  Synthetic
auccauauugagguauuuaag

SEQ ID NO: 50240 - RNA, 22 nt, Artificial Sequence
  Synthetic
uauccauauugagguauuuaag

SEQ ID NO: 50241 - RNA, 23 nt, Artificial Sequence
  Synthetic
auauccauauugagguauuuaag

SEQ ID NO: 50242 - RNA, 18 nt, Artificial Sequence
  Synthetic
aguuaaagcuacuuuaag

SEQ ID NO: 50243 - RNA, 19 nt, Artificial Sequence
  Synthetic
uaguuaaagcuacuuuaag

SEQ ID NO: 50244 - RNA, 20 nt, Artificial Sequence
  Synthetic
cuaguuaaagcuacuuuaag

SEQ ID NO: 50245 - RNA, 21 nt, Artificial Sequence
  Synthetic
ccuaguuaaagcuacuuuaag

SEQ ID NO: 50246 - RNA, 22 nt, Artificial Sequence
  Synthetic
cccuaguuaaagcuacuuuaag

SEQ ID NO: 50247 - RNA, 23 nt, Artificial Sequence
  Synthetic
acccuaguuaaagcuacuuuaag

SEQ ID NO: 50248 - RNA, 24 nt, Artificial Sequence
  Synthetic
uacccuaguuaaagcuacuuuaag

SEQ ID NO: 50249 - RNA, 18 nt, Artificial Sequence
  Synthetic
uuaaagaacuauuuuaag

SEQ ID NO: 50250 - RNA, 19 nt, Artificial Sequence
  Synthetic
uuuaaagaacuauuuuaag

SEQ ID NO: 50251 - RNA, 20 nt, Artificial Sequence
  Synthetic
auuuaaagaacuauuuuaag

SEQ ID NO: 50252 - RNA, 22 nt, Artificial Sequence
  Synthetic
agauuuaaagaacuauuuuaag

SEQ ID NO: 50253 - RNA, 23 nt, Artificial Sequence
  Synthetic
aagauuuaaagaacuauuuuaag

SEQ ID NO: 50254 - RNA, 24 nt, Artificial Sequence
  Synthetic
caagauuuaaagaacuauuuuaag

SEQ ID NO: 50255 - RNA, 18 nt, Artificial Sequence
  Synthetic
uuccauaggaaaaaacag

SEQ ID NO: 50256 - RNA, 19 nt, Artificial Sequence
  Synthetic
cuuccauaggaaaaaacag

SEQ ID NO: 50257 - RNA, 21 nt, Artificial Sequence
  Synthetic
agcuuccauaggaaaaaacag

SEQ ID NO: 50258 - RNA, 22 nt, Artificial Sequence
  Synthetic
uagcuuccauaggaaaaaacag

SEQ ID NO: 50259 - RNA, 23 nt, Artificial Sequence
  Synthetic
auagcuuccauaggaaaaaacag

SEQ ID NO: 50260 - RNA, 24 nt, Artificial Sequence
  Synthetic
cauagcuuccauaggaaaaaacag

SEQ ID NO: 50261 - RNA, 19 nt, Artificial Sequence
  Synthetic
uguuuuauuaccaaaacag

SEQ ID NO: 50262 - RNA, 20 nt, Artificial Sequence
  Synthetic
auguuuuauuaccaaaacag

SEQ ID NO: 50263 - RNA, 21 nt, Artificial Sequence
  Synthetic
uauguuuuauuaccaaaacag

SEQ ID NO: 50264 - RNA, 22 nt, Artificial Sequence
  Synthetic
cuauguuuuauuaccaaaacag

SEQ ID NO: 50265 - RNA, 23 nt, Artificial Sequence
  Synthetic
ccuauguuuuauuaccaaaacag

SEQ ID NO: 50266 - RNA, 24 nt, Artificial Sequence
  Synthetic
cccuauguuuuauuaccaaaacag

SEQ ID NO: 50267 - RNA, 18 nt, Artificial Sequence
  Synthetic
aaggaggauuuaaaacag

SEQ ID NO: 50268 - RNA, 19 nt, Artificial Sequence
  Synthetic
aaaggaggauuuaaaacag

SEQ ID NO: 50269 - RNA, 20 nt, Artificial Sequence
  Synthetic
uaaaggaggauuuaaaacag

SEQ ID NO: 50270 - RNA, 21 nt, Artificial Sequence
  Synthetic
uuaaaggaggauuuaaaacag

SEQ ID NO: 50271 - RNA, 22 nt, Artificial Sequence
  Synthetic
cuuaaaggaggauuuaaaacag

SEQ ID NO: 50272 - RNA, 23 nt, Artificial Sequence
  Synthetic
ccuuaaaggaggauuuaaaacag

SEQ ID NO: 50273 - RNA, 24 nt, Artificial Sequence
  Synthetic
uccuuaaaggaggauuuaaaacag

SEQ ID NO: 50274 - RNA, 19 nt, Artificial Sequence
  Synthetic
uggugauagugugaaacag

SEQ ID NO: 50275 - RNA, 20 nt, Artificial Sequence
  Synthetic
auggugauagugugaaacag

SEQ ID NO: 50276 - RNA, 22 nt, Artificial Sequence
  Synthetic
ugauggugauagugugaaacag

SEQ ID NO: 50277 - RNA, 24 nt, Artificial Sequence
  Synthetic
ugugauggugauagugugaaacag

SEQ ID NO: 50278 - RNA, 18 nt, Artificial Sequence
  Synthetic
ucauccuuaucccaacag

SEQ ID NO: 50279 - RNA, 19 nt, Artificial Sequence
  Synthetic
uucauccuuaucccaacag

SEQ ID NO: 50280 - RNA, 21 nt, Artificial Sequence
  Synthetic
uguucauccuuaucccaacag

SEQ ID NO: 50281 - RNA, 22 nt, Artificial Sequence
  Synthetic
auguucauccuuaucccaacag

SEQ ID NO: 50282 - RNA, 23 nt, Artificial Sequence
  Synthetic
cauguucauccuuaucccaacag

SEQ ID NO: 50283 - RNA, 24 nt, Artificial Sequence
  Synthetic
acauguucauccuuaucccaacag

SEQ ID NO: 50284 - RNA, 19 nt, Artificial Sequence
  Synthetic
uggaaagaaacagcaacag

SEQ ID NO: 50285 - RNA, 21 nt, Artificial Sequence
  Synthetic
aguggaaagaaacagcaacag

SEQ ID NO: 50286 - RNA, 23 nt, Artificial Sequence
  Synthetic
agaguggaaagaaacagcaacag

SEQ ID NO: 50287 - RNA, 24 nt, Artificial Sequence
  Synthetic
cagaguggaaagaaacagcaacag

SEQ ID NO: 50288 - RNA, 18 nt, Artificial Sequence
  Synthetic
aacauauucugagaacag

SEQ ID NO: 50289 - RNA, 21 nt, Artificial Sequence
  Synthetic
uggaacauauucugagaacag

SEQ ID NO: 50290 - RNA, 22 nt, Artificial Sequence
  Synthetic
auggaacauauucugagaacag

SEQ ID NO: 50291 - RNA, 23 nt, Artificial Sequence
  Synthetic
uauggaacauauucugagaacag

SEQ ID NO: 50292 - RNA, 18 nt, Artificial Sequence
  Synthetic
acacaugguacauaacag

SEQ ID NO: 50293 - RNA, 19 nt, Artificial Sequence
  Synthetic
uacacaugguacauaacag

SEQ ID NO: 50294 - RNA, 20 nt, Artificial Sequence
  Synthetic
auacacaugguacauaacag

SEQ ID NO: 50295 - RNA, 21 nt, Artificial Sequence
  Synthetic
aauacacaugguacauaacag

SEQ ID NO: 50296 - RNA, 22 nt, Artificial Sequence
  Synthetic
aaauacacaugguacauaacag

SEQ ID NO: 50297 - RNA, 23 nt, Artificial Sequence
  Synthetic
caaauacacaugguacauaacag

SEQ ID NO: 50298 - RNA, 24 nt, Artificial Sequence
  Synthetic
ucaaauacacaugguacauaacag

SEQ ID NO: 50299 - RNA, 18 nt, Artificial Sequence
  Synthetic
auugcuaaauaguaacag

SEQ ID NO: 50300 - RNA, 19 nt, Artificial Sequence
  Synthetic
cauugcuaaauaguaacag

SEQ ID NO: 50301 - RNA, 20 nt, Artificial Sequence
  Synthetic
ccauugcuaaauaguaacag

SEQ ID NO: 50302 - RNA, 21 nt, Artificial Sequence
  Synthetic
uccauugcuaaauaguaacag

SEQ ID NO: 50303 - RNA, 22 nt, Artificial Sequence
  Synthetic
auccauugcuaaauaguaacag

SEQ ID NO: 50304 - RNA, 23 nt, Artificial Sequence
  Synthetic
uauccauugcuaaauaguaacag

SEQ ID NO: 50305 - RNA, 18 nt, Artificial Sequence
  Synthetic
aauuagaccuguuaacag

SEQ ID NO: 50306 - RNA, 19 nt, Artificial Sequence
  Synthetic
uaauuagaccuguuaacag

SEQ ID NO: 50307 - RNA, 20 nt, Artificial Sequence
  Synthetic
auaauuagaccuguuaacag

SEQ ID NO: 50308 - RNA, 21 nt, Artificial Sequence
  Synthetic
cauaauuagaccuguuaacag

SEQ ID NO: 50309 - RNA, 22 nt, Artificial Sequence
  Synthetic
acauaauuagaccuguuaacag

SEQ ID NO: 50310 - RNA, 23 nt, Artificial Sequence
  Synthetic
uacauaauuagaccuguuaacag

SEQ ID NO: 50311 - RNA, 24 nt, Artificial Sequence
  Synthetic
auacauaauuagaccuguuaacag

SEQ ID NO: 50312 - RNA, 18 nt, Artificial Sequence
  Synthetic
ugucagagauaaacacag

SEQ ID NO: 50313 - RNA, 19 nt, Artificial Sequence
  Synthetic
uugucagagauaaacacag

SEQ ID NO: 50314 - RNA, 20 nt, Artificial Sequence
  Synthetic
auugucagagauaaacacag

SEQ ID NO: 50315 - RNA, 21 nt, Artificial Sequence
  Synthetic
uauugucagagauaaacacag

SEQ ID NO: 50316 - RNA, 22 nt, Artificial Sequence
  Synthetic
auauugucagagauaaacacag

SEQ ID NO: 50317 - RNA, 23 nt, Artificial Sequence
  Synthetic
uauauugucagagauaaacacag

SEQ ID NO: 50318 - RNA, 24 nt, Artificial Sequence
  Synthetic
auauauugucagagauaaacacag

SEQ ID NO: 50319 - RNA, 19 nt, Artificial Sequence
  Synthetic
ugauauuugcuacacacag

SEQ ID NO: 50320 - RNA, 20 nt, Artificial Sequence
  Synthetic
cugauauuugcuacacacag

SEQ ID NO: 50321 - RNA, 21 nt, Artificial Sequence
  Synthetic
acugauauuugcuacacacag

SEQ ID NO: 50322 - RNA, 22 nt, Artificial Sequence
  Synthetic
cacugauauuugcuacacacag

SEQ ID NO: 50323 - RNA, 23 nt, Artificial Sequence
  Synthetic
ccacugauauuugcuacacacag

SEQ ID NO: 50324 - RNA, 24 nt, Artificial Sequence
  Synthetic
uccacugauauuugcuacacacag

SEQ ID NO: 50325 - RNA, 18 nt, Artificial Sequence
  Synthetic
ucuggcagccccacacag

SEQ ID NO: 50326 - RNA, 19 nt, Artificial Sequence
  Synthetic
uucuggcagccccacacag

SEQ ID NO: 50327 - RNA, 20 nt, Artificial Sequence
  Synthetic
uuucuggcagccccacacag

SEQ ID NO: 50328 - RNA, 21 nt, Artificial Sequence
  Synthetic
uuuucuggcagccccacacag

SEQ ID NO: 50329 - RNA, 22 nt, Artificial Sequence
  Synthetic
cuuuucuggcagccccacacag

SEQ ID NO: 50330 - RNA, 24 nt, Artificial Sequence
  Synthetic
ugcuuuucuggcagccccacacag

SEQ ID NO: 50331 - RNA, 18 nt, Artificial Sequence
  Synthetic
uuauuacccaacccacag

SEQ ID NO: 50332 - RNA, 19 nt, Artificial Sequence
  Synthetic
auuauuacccaacccacag

SEQ ID NO: 50333 - RNA, 20 nt, Artificial Sequence
  Synthetic
uauuauuacccaacccacag

SEQ ID NO: 50334 - RNA, 22 nt, Artificial Sequence
  Synthetic
uguauuauuacccaacccacag

SEQ ID NO: 50335 - RNA, 24 nt, Artificial Sequence
  Synthetic
aguguauuauuacccaacccacag

SEQ ID NO: 50336 - RNA, 18 nt, Artificial Sequence
  Synthetic
auguguggggaugcacag

SEQ ID NO: 50337 - RNA, 21 nt, Artificial Sequence
  Synthetic
uggauguguggggaugcacag

SEQ ID NO: 50338 - RNA, 22 nt, Artificial Sequence
  Synthetic
auggauguguggggaugcacag

SEQ ID NO: 50339 - RNA, 18 nt, Artificial Sequence
  Synthetic
agccaguaaauaucacag

SEQ ID NO: 50340 - RNA, 20 nt, Artificial Sequence
  Synthetic
ugagccaguaaauaucacag

SEQ ID NO: 50341 - RNA, 21 nt, Artificial Sequence
  Synthetic
uugagccaguaaauaucacag

SEQ ID NO: 50342 - RNA, 23 nt, Artificial Sequence
  Synthetic
uguugagccaguaaauaucacag

SEQ ID NO: 50343 - RNA, 24 nt, Artificial Sequence
  Synthetic
auguugagccaguaaauaucacag

SEQ ID NO: 50344 - RNA, 18 nt, Artificial Sequence
  Synthetic
aaacagcuguccucacag

SEQ ID NO: 50345 - RNA, 19 nt, Artificial Sequence
  Synthetic
aaaacagcuguccucacag

SEQ ID NO: 50346 - RNA, 20 nt, Artificial Sequence
  Synthetic
uaaaacagcuguccucacag

SEQ ID NO: 50347 - RNA, 21 nt, Artificial Sequence
  Synthetic
uuaaaacagcuguccucacag

SEQ ID NO: 50348 - RNA, 22 nt, Artificial Sequence
  Synthetic
cuuaaaacagcuguccucacag

SEQ ID NO: 50349 - RNA, 23 nt, Artificial Sequence
  Synthetic
ucuuaaaacagcuguccucacag

SEQ ID NO: 50350 - RNA, 24 nt, Artificial Sequence
  Synthetic
uucuuaaaacagcuguccucacag

SEQ ID NO: 50351 - RNA, 18 nt, Artificial Sequence
  Synthetic
uguacaggcuugucacag

SEQ ID NO: 50352 - RNA, 19 nt, Artificial Sequence
  Synthetic
auguacaggcuugucacag

SEQ ID NO: 50353 - RNA, 20 nt, Artificial Sequence
  Synthetic
cauguacaggcuugucacag

SEQ ID NO: 50354 - RNA, 18 nt, Artificial Sequence
  Synthetic
ugcuuucaguauucacag

SEQ ID NO: 50355 - RNA, 19 nt, Artificial Sequence
  Synthetic
uugcuuucaguauucacag

SEQ ID NO: 50356 - RNA, 20 nt, Artificial Sequence
  Synthetic
uuugcuuucaguauucacag

SEQ ID NO: 50357 - RNA, 21 nt, Artificial Sequence
  Synthetic
auuugcuuucaguauucacag

SEQ ID NO: 50358 - RNA, 22 nt, Artificial Sequence
  Synthetic
cauuugcuuucaguauucacag

SEQ ID NO: 50359 - RNA, 23 nt, Artificial Sequence
  Synthetic
acauuugcuuucaguauucacag

SEQ ID NO: 50360 - RNA, 24 nt, Artificial Sequence
  Synthetic
cacauuugcuuucaguauucacag

SEQ ID NO: 50361 - RNA, 18 nt, Artificial Sequence
  Synthetic
auagauauuagaagacag

SEQ ID NO: 50362 - RNA, 19 nt, Artificial Sequence
  Synthetic
aauagauauuagaagacag

SEQ ID NO: 50363 - RNA, 20 nt, Artificial Sequence
  Synthetic
caauagauauuagaagacag

SEQ ID NO: 50364 - RNA, 21 nt, Artificial Sequence
  Synthetic
acaauagauauuagaagacag

SEQ ID NO: 50365 - RNA, 22 nt, Artificial Sequence
  Synthetic
aacaauagauauuagaagacag

SEQ ID NO: 50366 - RNA, 23 nt, Artificial Sequence
  Synthetic
caacaauagauauuagaagacag

SEQ ID NO: 50367 - RNA, 24 nt, Artificial Sequence
  Synthetic
ucaacaauagauauuagaagacag

SEQ ID NO: 50368 - RNA, 21 nt, Artificial Sequence
  Synthetic
cggacaaaauguguaagacag

SEQ ID NO: 50369 - RNA, 22 nt, Artificial Sequence
  Synthetic
acggacaaaauguguaagacag

SEQ ID NO: 50370 - RNA, 18 nt, Artificial Sequence
  Synthetic
cgaaggagacagcgacag

SEQ ID NO: 50371 - RNA, 20 nt, Artificial Sequence
  Synthetic
agcgaaggagacagcgacag

SEQ ID NO: 50372 - RNA, 23 nt, Artificial Sequence
  Synthetic
aggagcgaaggagacagcgacag

SEQ ID NO: 50373 - RNA, 24 nt, Artificial Sequence
  Synthetic
aaggagcgaaggagacagcgacag

SEQ ID NO: 50374 - RNA, 20 nt, Artificial Sequence
  Synthetic
aggcauuucugugaggacag

SEQ ID NO: 50375 - RNA, 21 nt, Artificial Sequence
  Synthetic
caggcauuucugugaggacag

SEQ ID NO: 50376 - RNA, 23 nt, Artificial Sequence
  Synthetic
agcaggcauuucugugaggacag

SEQ ID NO: 50377 - RNA, 24 nt, Artificial Sequence
  Synthetic
uagcaggcauuucugugaggacag

SEQ ID NO: 50378 - RNA, 18 nt, Artificial Sequence
  Synthetic
caaaaaauuuugggacag

SEQ ID NO: 50379 - RNA, 19 nt, Artificial Sequence
  Synthetic
acaaaaaauuuugggacag

SEQ ID NO: 50380 - RNA, 18 nt, Artificial Sequence
  Synthetic
uucaggaauugaugacag

SEQ ID NO: 50381 - RNA, 19 nt, Artificial Sequence
  Synthetic
uuucaggaauugaugacag

SEQ ID NO: 50382 - RNA, 20 nt, Artificial Sequence
  Synthetic
auuucaggaauugaugacag

SEQ ID NO: 50383 - RNA, 21 nt, Artificial Sequence
  Synthetic
uauuucaggaauugaugacag

SEQ ID NO: 50384 - RNA, 18 nt, Artificial Sequence
  Synthetic
cucaaagaccacugacag

SEQ ID NO: 50385 - RNA, 19 nt, Artificial Sequence
  Synthetic
ccucaaagaccacugacag

SEQ ID NO: 50386 - RNA, 20 nt, Artificial Sequence
  Synthetic
uccucaaagaccacugacag

SEQ ID NO: 50387 - RNA, 21 nt, Artificial Sequence
  Synthetic
uuccucaaagaccacugacag

SEQ ID NO: 50388 - RNA, 23 nt, Artificial Sequence
  Synthetic
aguuccucaaagaccacugacag

SEQ ID NO: 50389 - RNA, 24 nt, Artificial Sequence
  Synthetic
uaguuccucaaagaccacugacag

SEQ ID NO: 50390 - RNA, 18 nt, Artificial Sequence
  Synthetic
augucuacuuucugacag

SEQ ID NO: 50391 - RNA, 19 nt, Artificial Sequence
  Synthetic
caugucuacuuucugacag

SEQ ID NO: 50392 - RNA, 20 nt, Artificial Sequence
  Synthetic
ccaugucuacuuucugacag

SEQ ID NO: 50393 - RNA, 22 nt, Artificial Sequence
  Synthetic
ugccaugucuacuuucugacag

SEQ ID NO: 50394 - RNA, 23 nt, Artificial Sequence
  Synthetic
uugccaugucuacuuucugacag

SEQ ID NO: 50395 - RNA, 24 nt, Artificial Sequence
  Synthetic
uuugccaugucuacuuucugacag

SEQ ID NO: 50396 - RNA, 18 nt, Artificial Sequence
  Synthetic
acacgaaguugaauacag

SEQ ID NO: 50397 - RNA, 19 nt, Artificial Sequence
  Synthetic
aacacgaaguugaauacag

SEQ ID NO: 50398 - RNA, 20 nt, Artificial Sequence
  Synthetic
uaacacgaaguugaauacag

SEQ ID NO: 50399 - RNA, 21 nt, Artificial Sequence
  Synthetic
cuaacacgaaguugaauacag

SEQ ID NO: 50400 - RNA, 22 nt, Artificial Sequence
  Synthetic
acuaacacgaaguugaauacag

SEQ ID NO: 50401 - RNA, 23 nt, Artificial Sequence
  Synthetic
cacuaacacgaaguugaauacag

SEQ ID NO: 50402 - RNA, 24 nt, Artificial Sequence
  Synthetic
ccacuaacacgaaguugaauacag

SEQ ID NO: 50403 - RNA, 18 nt, Artificial Sequence
  Synthetic
aagucauuuauaauacag

SEQ ID NO: 50404 - RNA, 19 nt, Artificial Sequence
  Synthetic
aaagucauuuauaauacag

SEQ ID NO: 50405 - RNA, 20 nt, Artificial Sequence
  Synthetic
uaaagucauuuauaauacag

SEQ ID NO: 50406 - RNA, 21 nt, Artificial Sequence
  Synthetic
uuaaagucauuuauaauacag

SEQ ID NO: 50407 - RNA, 22 nt, Artificial Sequence
  Synthetic
auuaaagucauuuauaauacag

SEQ ID NO: 50408 - RNA, 23 nt, Artificial Sequence
  Synthetic
uauuaaagucauuuauaauacag

SEQ ID NO: 50409 - RNA, 24 nt, Artificial Sequence
  Synthetic
auauuaaagucauuuauaauacag

SEQ ID NO: 50410 - RNA, 19 nt, Artificial Sequence
  Synthetic
uggauagcuuguccuacag

SEQ ID NO: 50411 - RNA, 20 nt, Artificial Sequence
  Synthetic
auggauagcuuguccuacag

SEQ ID NO: 50412 - RNA, 21 nt, Artificial Sequence
  Synthetic
aauggauagcuuguccuacag

SEQ ID NO: 50413 - RNA, 22 nt, Artificial Sequence
  Synthetic
caauggauagcuuguccuacag

SEQ ID NO: 50414 - RNA, 24 nt, Artificial Sequence
  Synthetic
ugcaauggauagcuuguccuacag

SEQ ID NO: 50415 - RNA, 18 nt, Artificial Sequence
  Synthetic
uuacacaagaagcuacag

SEQ ID NO: 50416 - RNA, 19 nt, Artificial Sequence
  Synthetic
uuuacacaagaagcuacag

SEQ ID NO: 50417 - RNA, 20 nt, Artificial Sequence
  Synthetic
cuuuacacaagaagcuacag

SEQ ID NO: 50418 - RNA, 21 nt, Artificial Sequence
  Synthetic
ccuuuacacaagaagcuacag

SEQ ID NO: 50419 - RNA, 22 nt, Artificial Sequence
  Synthetic
accuuuacacaagaagcuacag

SEQ ID NO: 50420 - RNA, 23 nt, Artificial Sequence
  Synthetic
caccuuuacacaagaagcuacag

SEQ ID NO: 50421 - RNA, 24 nt, Artificial Sequence
  Synthetic
acaccuuuacacaagaagcuacag

SEQ ID NO: 50422 - RNA, 18 nt, Artificial Sequence
  Synthetic
auucucugcauucuacag

SEQ ID NO: 50423 - RNA, 19 nt, Artificial Sequence
  Synthetic
aauucucugcauucuacag

SEQ ID NO: 50424 - RNA, 20 nt, Artificial Sequence
  Synthetic
aaauucucugcauucuacag

SEQ ID NO: 50425 - RNA, 21 nt, Artificial Sequence
  Synthetic
aaaauucucugcauucuacag

SEQ ID NO: 50426 - RNA, 22 nt, Artificial Sequence
  Synthetic
aaaaauucucugcauucuacag

SEQ ID NO: 50427 - RNA, 23 nt, Artificial Sequence
  Synthetic
aaaaaauucucugcauucuacag

SEQ ID NO: 50428 - RNA, 24 nt, Artificial Sequence
  Synthetic
aaaaaaauucucugcauucuacag

SEQ ID NO: 50429 - RNA, 21 nt, Artificial Sequence
  Synthetic
uauauaagauaaaaaguacag

SEQ ID NO: 50430 - RNA, 23 nt, Artificial Sequence
  Synthetic
uguauauaagauaaaaaguacag

SEQ ID NO: 50431 - RNA, 24 nt, Artificial Sequence
  Synthetic
cuguauauaagauaaaaaguacag

SEQ ID NO: 50432 - RNA, 18 nt, Artificial Sequence
  Synthetic
aaucucucaugcguacag

SEQ ID NO: 50433 - RNA, 19 nt, Artificial Sequence
  Synthetic
aaaucucucaugcguacag

SEQ ID NO: 50434 - RNA, 20 nt, Artificial Sequence
  Synthetic
uaaaucucucaugcguacag

SEQ ID NO: 50435 - RNA, 21 nt, Artificial Sequence
  Synthetic
auaaaucucucaugcguacag

SEQ ID NO: 50436 - RNA, 23 nt, Artificial Sequence
  Synthetic
agauaaaucucucaugcguacag

SEQ ID NO: 50437 - RNA, 24 nt, Artificial Sequence
  Synthetic
uagauaaaucucucaugcguacag

SEQ ID NO: 50438 - RNA, 18 nt, Artificial Sequence
  Synthetic
uaaucuaacaaauuacag

SEQ ID NO: 50439 - RNA, 19 nt, Artificial Sequence
  Synthetic
uuaaucuaacaaauuacag

SEQ ID NO: 50440 - RNA, 20 nt, Artificial Sequence
  Synthetic
uuuaaucuaacaaauuacag

SEQ ID NO: 50441 - RNA, 21 nt, Artificial Sequence
  Synthetic
uuuuaaucuaacaaauuacag

SEQ ID NO: 50442 - RNA, 22 nt, Artificial Sequence
  Synthetic
auuuuaaucuaacaaauuacag

SEQ ID NO: 50443 - RNA, 23 nt, Artificial Sequence
  Synthetic
uauuuuaaucuaacaaauuacag

SEQ ID NO: 50444 - RNA, 24 nt, Artificial Sequence
  Synthetic
cuauuuuaaucuaacaaauuacag

SEQ ID NO: 50445 - RNA, 21 nt, Artificial Sequence
  Synthetic
ucaagcucuuacuuauuacag

SEQ ID NO: 50446 - RNA, 22 nt, Artificial Sequence
  Synthetic
cucaagcucuuacuuauuacag

SEQ ID NO: 50447 - RNA, 23 nt, Artificial Sequence
  Synthetic
ucucaagcucuuacuuauuacag

SEQ ID NO: 50448 - RNA, 24 nt, Artificial Sequence
  Synthetic
aucucaagcucuuacuuauuacag

SEQ ID NO: 50449 - RNA, 18 nt, Artificial Sequence
  Synthetic
auuaauacaaauuuacag

SEQ ID NO: 50450 - RNA, 20 nt, Artificial Sequence
  Synthetic
ugauuaauacaaauuuacag

SEQ ID NO: 50451 - RNA, 21 nt, Artificial Sequence
  Synthetic
augauuaauacaaauuuacag

SEQ ID NO: 50452 - RNA, 22 nt, Artificial Sequence
  Synthetic
uaugauuaauacaaauuuacag

SEQ ID NO: 50453 - RNA, 23 nt, Artificial Sequence
  Synthetic
auaugauuaauacaaauuuacag

SEQ ID NO: 50454 - RNA, 24 nt, Artificial Sequence
  Synthetic
aauaugauuaauacaaauuuacag

SEQ ID NO: 50455 - RNA, 18 nt, Artificial Sequence
  Synthetic
ugaaccuggauuuuacag

SEQ ID NO: 50456 - RNA, 19 nt, Artificial Sequence
  Synthetic
cugaaccuggauuuuacag

SEQ ID NO: 50457 - RNA, 21 nt, Artificial Sequence
  Synthetic
ugcugaaccuggauuuuacag

SEQ ID NO: 50458 - RNA, 22 nt, Artificial Sequence
  Synthetic
uugcugaaccuggauuuuacag

SEQ ID NO: 50459 - RNA, 23 nt, Artificial Sequence
  Synthetic
uuugcugaaccuggauuuuacag

SEQ ID NO: 50460 - RNA, 24 nt, Artificial Sequence
  Synthetic
cuuugcugaaccuggauuuuacag

SEQ ID NO: 50461 - RNA, 18 nt, Artificial Sequence
  Synthetic
auuaaguauuuaaaccag

SEQ ID NO: 50462 - RNA, 20 nt, Artificial Sequence
  Synthetic
agauuaaguauuuaaaccag

SEQ ID NO: 50463 - RNA, 18 nt, Artificial Sequence
  Synthetic
uucaaugacgugaaccag

SEQ ID NO: 50464 - RNA, 19 nt, Artificial Sequence
  Synthetic
uuucaaugacgugaaccag

SEQ ID NO: 50465 - RNA, 20 nt, Artificial Sequence
  Synthetic
uuuucaaugacgugaaccag

SEQ ID NO: 50466 - RNA, 22 nt, Artificial Sequence
  Synthetic
aguuuucaaugacgugaaccag

SEQ ID NO: 50467 - RNA, 23 nt, Artificial Sequence
  Synthetic
caguuuucaaugacgugaaccag

SEQ ID NO: 50468 - RNA, 18 nt, Artificial Sequence
  Synthetic
auugggguuuuuaaccag

SEQ ID NO: 50469 - RNA, 19 nt, Artificial Sequence
  Synthetic
cauugggguuuuuaaccag

SEQ ID NO: 50470 - RNA, 20 nt, Artificial Sequence
  Synthetic
ccauugggguuuuuaaccag

SEQ ID NO: 50471 - RNA, 22 nt, Artificial Sequence
  Synthetic
agccauugggguuuuuaaccag

SEQ ID NO: 50472 - RNA, 23 nt, Artificial Sequence
  Synthetic
aagccauugggguuuuuaaccag

SEQ ID NO: 50473 - RNA, 24 nt, Artificial Sequence
  Synthetic
uaagccauugggguuuuuaaccag

SEQ ID NO: 50474 - RNA, 18 nt, Artificial Sequence
  Synthetic
caaaucccaagacaccag

SEQ ID NO: 50475 - RNA, 19 nt, Artificial Sequence
  Synthetic
ucaaaucccaagacaccag

SEQ ID NO: 50476 - RNA, 20 nt, Artificial Sequence
  Synthetic
uucaaaucccaagacaccag

SEQ ID NO: 50477 - RNA, 21 nt, Artificial Sequence
  Synthetic
uuucaaaucccaagacaccag

SEQ ID NO: 50478 - RNA, 23 nt, Artificial Sequence
  Synthetic
uguuucaaaucccaagacaccag

SEQ ID NO: 50479 - RNA, 24 nt, Artificial Sequence
  Synthetic
uuguuucaaaucccaagacaccag

SEQ ID NO: 50480 - RNA, 18 nt, Artificial Sequence
  Synthetic
uugacuacaaugcaccag

SEQ ID NO: 50481 - RNA, 19 nt, Artificial Sequence
  Synthetic
cuugacuacaaugcaccag

SEQ ID NO: 50482 - RNA, 20 nt, Artificial Sequence
  Synthetic
ucuugacuacaaugcaccag

SEQ ID NO: 50483 - RNA, 21 nt, Artificial Sequence
  Synthetic
aucuugacuacaaugcaccag

SEQ ID NO: 50484 - RNA, 22 nt, Artificial Sequence
  Synthetic
uaucuugacuacaaugcaccag

SEQ ID NO: 50485 - RNA, 24 nt, Artificial Sequence
  Synthetic
uguaucuugacuacaaugcaccag

SEQ ID NO: 50486 - RNA, 19 nt, Artificial Sequence
  Synthetic
ugucccaaaaacagaccag

SEQ ID NO: 50487 - RNA, 21 nt, Artificial Sequence
  Synthetic
agugucccaaaaacagaccag

SEQ ID NO: 50488 - RNA, 22 nt, Artificial Sequence
  Synthetic
aagugucccaaaaacagaccag

SEQ ID NO: 50489 - RNA, 23 nt, Artificial Sequence
  Synthetic
aaagugucccaaaaacagaccag

SEQ ID NO: 50490 - RNA, 24 nt, Artificial Sequence
  Synthetic
caaagugucccaaaaacagaccag

SEQ ID NO: 50491 - RNA, 18 nt, Artificial Sequence
  Synthetic
uuuuccauaaaauaccag

SEQ ID NO: 50492 - RNA, 20 nt, Artificial Sequence
  Synthetic
uguuuuccauaaaauaccag

SEQ ID NO: 50493 - RNA, 22 nt, Artificial Sequence
  Synthetic
uguguuuuccauaaaauaccag

SEQ ID NO: 50494 - RNA, 23 nt, Artificial Sequence
  Synthetic
cuguguuuuccauaaaauaccag

SEQ ID NO: 50495 - RNA, 24 nt, Artificial Sequence
  Synthetic
acuguguuuuccauaaaauaccag

SEQ ID NO: 50496 - RNA, 18 nt, Artificial Sequence
  Synthetic
cuuccuagccuuccccag

SEQ ID NO: 50497 - RNA, 19 nt, Artificial Sequence
  Synthetic
ccuuccuagccuuccccag

SEQ ID NO: 50498 - RNA, 20 nt, Artificial Sequence
  Synthetic
uccuuccuagccuuccccag

SEQ ID NO: 50499 - RNA, 21 nt, Artificial Sequence
  Synthetic
cuccuuccuagccuuccccag

SEQ ID NO: 50500 - RNA, 22 nt, Artificial Sequence
  Synthetic
ucuccuuccuagccuuccccag

SEQ ID NO: 50501 - RNA, 23 nt, Artificial Sequence
  Synthetic
cucuccuuccuagccuuccccag

SEQ ID NO: 50502 - RNA, 24 nt, Artificial Sequence
  Synthetic
ccucuccuuccuagccuuccccag

SEQ ID NO: 50503 - RNA, 18 nt, Artificial Sequence
  Synthetic
auagauucuugagcccag

SEQ ID NO: 50504 - RNA, 19 nt, Artificial Sequence
  Synthetic
uauagauucuugagcccag

SEQ ID NO: 50505 - RNA, 20 nt, Artificial Sequence
  Synthetic
uuauagauucuugagcccag

SEQ ID NO: 50506 - RNA, 21 nt, Artificial Sequence
  Synthetic
uuuauagauucuugagcccag

SEQ ID NO: 50507 - RNA, 23 nt, Artificial Sequence
  Synthetic
uguuuauagauucuugagcccag

SEQ ID NO: 50508 - RNA, 18 nt, Artificial Sequence
  Synthetic
ccacuccucguagcccag

SEQ ID NO: 50509 - RNA, 19 nt, Artificial Sequence
  Synthetic
uccacuccucguagcccag

SEQ ID NO: 50510 - RNA, 20 nt, Artificial Sequence
  Synthetic
cuccacuccucguagcccag

SEQ ID NO: 50511 - RNA, 21 nt, Artificial Sequence
  Synthetic
acuccacuccucguagcccag

SEQ ID NO: 50512 - RNA, 22 nt, Artificial Sequence
  Synthetic
aacuccacuccucguagcccag

SEQ ID NO: 50513 - RNA, 23 nt, Artificial Sequence
  Synthetic
caacuccacuccucguagcccag

SEQ ID NO: 50514 - RNA, 21 nt, Artificial Sequence
  Synthetic
ccauaugggcucugcgcccag

SEQ ID NO: 50515 - RNA, 23 nt, Artificial Sequence
  Synthetic
ugccauaugggcucugcgcccag

SEQ ID NO: 50516 - RNA, 24 nt, Artificial Sequence
  Synthetic
augccauaugggcucugcgcccag

SEQ ID NO: 50517 - RNA, 18 nt, Artificial Sequence
  Synthetic
uguauauauaaugcccag

SEQ ID NO: 50518 - RNA, 19 nt, Artificial Sequence
  Synthetic
uuguauauauaaugcccag

SEQ ID NO: 50519 - RNA, 20 nt, Artificial Sequence
  Synthetic
cuuguauauauaaugcccag

SEQ ID NO: 50520 - RNA, 22 nt, Artificial Sequence
  Synthetic
ugcuuguauauauaaugcccag

SEQ ID NO: 50521 - RNA, 23 nt, Artificial Sequence
  Synthetic
uugcuuguauauauaaugcccag

SEQ ID NO: 50522 - RNA, 24 nt, Artificial Sequence
  Synthetic
uuugcuuguauauauaaugcccag

SEQ ID NO: 50523 - RNA, 18 nt, Artificial Sequence
  Synthetic
ucagcuagcuggucccag

SEQ ID NO: 50524 - RNA, 19 nt, Artificial Sequence
  Synthetic
uucagcuagcuggucccag

SEQ ID NO: 50525 - RNA, 20 nt, Artificial Sequence
  Synthetic
cuucagcuagcuggucccag

SEQ ID NO: 50526 - RNA, 22 nt, Artificial Sequence
  Synthetic
agcuucagcuagcuggucccag

SEQ ID NO: 50527 - RNA, 23 nt, Artificial Sequence
  Synthetic
aagcuucagcuagcuggucccag

SEQ ID NO: 50528 - RNA, 24 nt, Artificial Sequence
  Synthetic
caagcuucagcuagcuggucccag

SEQ ID NO: 50529 - RNA, 18 nt, Artificial Sequence
  Synthetic
caaagaguaacuagccag

SEQ ID NO: 50530 - RNA, 19 nt, Artificial Sequence
  Synthetic
ccaaagaguaacuagccag

SEQ ID NO: 50531 - RNA, 20 nt, Artificial Sequence
  Synthetic
cccaaagaguaacuagccag

SEQ ID NO: 50532 - RNA, 21 nt, Artificial Sequence
  Synthetic
acccaaagaguaacuagccag

SEQ ID NO: 50533 - RNA, 22 nt, Artificial Sequence
  Synthetic
aacccaaagaguaacuagccag

SEQ ID NO: 50534 - RNA, 23 nt, Artificial Sequence
  Synthetic
caacccaaagaguaacuagccag

SEQ ID NO: 50535 - RNA, 18 nt, Artificial Sequence
  Synthetic
uuauaacaugucauccag

SEQ ID NO: 50536 - RNA, 19 nt, Artificial Sequence
  Synthetic
auuauaacaugucauccag

SEQ ID NO: 50537 - RNA, 20 nt, Artificial Sequence
  Synthetic
aauuauaacaugucauccag

SEQ ID NO: 50538 - RNA, 21 nt, Artificial Sequence
  Synthetic
uaauuauaacaugucauccag

SEQ ID NO: 50539 - RNA, 22 nt, Artificial Sequence
  Synthetic
cuaauuauaacaugucauccag

SEQ ID NO: 50540 - RNA, 23 nt, Artificial Sequence
  Synthetic
ccuaauuauaacaugucauccag

SEQ ID NO: 50541 - RNA, 24 nt, Artificial Sequence
  Synthetic
uccuaauuauaacaugucauccag

SEQ ID NO: 50542 - RNA, 19 nt, Artificial Sequence
  Synthetic
aguccaauccaugauccag

SEQ ID NO: 50543 - RNA, 21 nt, Artificial Sequence
  Synthetic
ugaguccaauccaugauccag

SEQ ID NO: 50544 - RNA, 22 nt, Artificial Sequence
  Synthetic
uugaguccaauccaugauccag

SEQ ID NO: 50545 - RNA, 23 nt, Artificial Sequence
  Synthetic
auugaguccaauccaugauccag

SEQ ID NO: 50546 - RNA, 24 nt, Artificial Sequence
  Synthetic
aauugaguccaauccaugauccag

SEQ ID NO: 50547 - RNA, 18 nt, Artificial Sequence
  Synthetic
agagaaugaaauauccag

SEQ ID NO: 50548 - RNA, 19 nt, Artificial Sequence
  Synthetic
cagagaaugaaauauccag

SEQ ID NO: 50549 - RNA, 22 nt, Artificial Sequence
  Synthetic
uggcagagaaugaaauauccag

SEQ ID NO: 50550 - RNA, 23 nt, Artificial Sequence
  Synthetic
uuggcagagaaugaaauauccag

SEQ ID NO: 50551 - RNA, 24 nt, Artificial Sequence
  Synthetic
auuggcagagaaugaaauauccag

SEQ ID NO: 50552 - RNA, 18 nt, Artificial Sequence
  Synthetic
uccuacuuaguccuccag

SEQ ID NO: 50553 - RNA, 19 nt, Artificial Sequence
  Synthetic
uuccuacuuaguccuccag

SEQ ID NO: 50554 - RNA, 20 nt, Artificial Sequence
  Synthetic
uuuccuacuuaguccuccag

SEQ ID NO: 50555 - RNA, 21 nt, Artificial Sequence
  Synthetic
uuuuccuacuuaguccuccag

SEQ ID NO: 50556 - RNA, 22 nt, Artificial Sequence
  Synthetic
uuuuuccuacuuaguccuccag

SEQ ID NO: 50557 - RNA, 23 nt, Artificial Sequence
  Synthetic
uuuuuuccuacuuaguccuccag

SEQ ID NO: 50558 - RNA, 24 nt, Artificial Sequence
  Synthetic
cuuuuuuccuacuuaguccuccag

SEQ ID NO: 50559 - RNA, 22 nt, Artificial Sequence
  Synthetic
ugggggggaaaaaguaguccag

SEQ ID NO: 50560 - RNA, 23 nt, Artificial Sequence
  Synthetic
uugggggggaaaaaguaguccag

SEQ ID NO: 50561 - RNA, 24 nt, Artificial Sequence
  Synthetic
auugggggggaaaaaguaguccag

SEQ ID NO: 50562 - RNA, 18 nt, Artificial Sequence
  Synthetic
uggauauggaagguccag

SEQ ID NO: 50563 - RNA, 19 nt, Artificial Sequence
  Synthetic
auggauauggaagguccag

SEQ ID NO: 50564 - RNA, 21 nt, Artificial Sequence
  Synthetic
ugauggauauggaagguccag

SEQ ID NO: 50565 - RNA, 22 nt, Artificial Sequence
  Synthetic
augauggauauggaagguccag

SEQ ID NO: 50566 - RNA, 23 nt, Artificial Sequence
  Synthetic
aaugauggauauggaagguccag

SEQ ID NO: 50567 - RNA, 18 nt, Artificial Sequence
  Synthetic
acauacaugcauguccag

SEQ ID NO: 50568 - RNA, 19 nt, Artificial Sequence
  Synthetic
cacauacaugcauguccag

SEQ ID NO: 50569 - RNA, 20 nt, Artificial Sequence
  Synthetic
ccacauacaugcauguccag

SEQ ID NO: 50570 - RNA, 21 nt, Artificial Sequence
  Synthetic
uccacauacaugcauguccag

SEQ ID NO: 50571 - RNA, 22 nt, Artificial Sequence
  Synthetic
uuccacauacaugcauguccag

SEQ ID NO: 50572 - RNA, 23 nt, Artificial Sequence
  Synthetic
uuuccacauacaugcauguccag

SEQ ID NO: 50573 - RNA, 18 nt, Artificial Sequence
  Synthetic
acuauugaaauuguccag

SEQ ID NO: 50574 - RNA, 19 nt, Artificial Sequence
  Synthetic
cacuauugaaauuguccag

SEQ ID NO: 50575 - RNA, 20 nt, Artificial Sequence
  Synthetic
acacuauugaaauuguccag

SEQ ID NO: 50576 - RNA, 21 nt, Artificial Sequence
  Synthetic
cacacuauugaaauuguccag

SEQ ID NO: 50577 - RNA, 23 nt, Artificial Sequence
  Synthetic
agcacacuauugaaauuguccag

SEQ ID NO: 50578 - RNA, 24 nt, Artificial Sequence
  Synthetic
cagcacacuauugaaauuguccag

SEQ ID NO: 50579 - RNA, 18 nt, Artificial Sequence
  Synthetic
uaccacagaugauuccag

SEQ ID NO: 50580 - RNA, 19 nt, Artificial Sequence
  Synthetic
cuaccacagaugauuccag

SEQ ID NO: 50581 - RNA, 20 nt, Artificial Sequence
  Synthetic
ucuaccacagaugauuccag

SEQ ID NO: 50582 - RNA, 21 nt, Artificial Sequence
  Synthetic
cucuaccacagaugauuccag

SEQ ID NO: 50583 - RNA, 22 nt, Artificial Sequence
  Synthetic
ucucuaccacagaugauuccag

SEQ ID NO: 50584 - RNA, 23 nt, Artificial Sequence
  Synthetic
uucucuaccacagaugauuccag

SEQ ID NO: 50585 - RNA, 24 nt, Artificial Sequence
  Synthetic
cuucucuaccacagaugauuccag

SEQ ID NO: 50586 - RNA, 18 nt, Artificial Sequence
  Synthetic
aucauuauuuccuuccag

SEQ ID NO: 50587 - RNA, 19 nt, Artificial Sequence
  Synthetic
aaucauuauuuccuuccag

SEQ ID NO: 50588 - RNA, 21 nt, Artificial Sequence
  Synthetic
agaaucauuauuuccuuccag

SEQ ID NO: 50589 - RNA, 22 nt, Artificial Sequence
  Synthetic
uagaaucauuauuuccuuccag

SEQ ID NO: 50590 - RNA, 23 nt, Artificial Sequence
  Synthetic
auagaaucauuauuuccuuccag

SEQ ID NO: 50591 - RNA, 18 nt, Artificial Sequence
  Synthetic
ucauacuguaaguuccag

SEQ ID NO: 50592 - RNA, 20 nt, Artificial Sequence
  Synthetic
ugucauacuguaaguuccag

SEQ ID NO: 50593 - RNA, 21 nt, Artificial Sequence
  Synthetic
cugucauacuguaaguuccag

SEQ ID NO: 50594 - RNA, 23 nt, Artificial Sequence
  Synthetic
agcugucauacuguaaguuccag

SEQ ID NO: 50595 - RNA, 24 nt, Artificial Sequence
  Synthetic
aagcugucauacuguaaguuccag

SEQ ID NO: 50596 - RNA, 18 nt, Artificial Sequence
  Synthetic
cgggaaauccaaaagcag

SEQ ID NO: 50597 - RNA, 19 nt, Artificial Sequence
  Synthetic
acgggaaauccaaaagcag

SEQ ID NO: 50598 - RNA, 20 nt, Artificial Sequence
  Synthetic
uacgggaaauccaaaagcag

SEQ ID NO: 50599 - RNA, 21 nt, Artificial Sequence
  Synthetic
uuacgggaaauccaaaagcag

SEQ ID NO: 50600 - RNA, 22 nt, Artificial Sequence
  Synthetic
auuacgggaaauccaaaagcag

SEQ ID NO: 50601 - RNA, 23 nt, Artificial Sequence
  Synthetic
cauuacgggaaauccaaaagcag

SEQ ID NO: 50602 - RNA, 24 nt, Artificial Sequence
  Synthetic
ucauuacgggaaauccaaaagcag

SEQ ID NO: 50603 - RNA, 18 nt, Artificial Sequence
  Synthetic
aagugaaaauggaagcag

SEQ ID NO: 50604 - RNA, 19 nt, Artificial Sequence
  Synthetic
uaagugaaaauggaagcag

SEQ ID NO: 50605 - RNA, 20 nt, Artificial Sequence
  Synthetic
auaagugaaaauggaagcag

SEQ ID NO: 50606 - RNA, 21 nt, Artificial Sequence
  Synthetic
uauaagugaaaauggaagcag

SEQ ID NO: 50607 - RNA, 22 nt, Artificial Sequence
  Synthetic
auauaagugaaaauggaagcag

SEQ ID NO: 50608 - RNA, 23 nt, Artificial Sequence
  Synthetic
cauauaagugaaaauggaagcag

SEQ ID NO: 50609 - RNA, 24 nt, Artificial Sequence
  Synthetic
ucauauaagugaaaauggaagcag

SEQ ID NO: 50610 - RNA, 18 nt, Artificial Sequence
  Synthetic
aguagcaacuggaagcag

SEQ ID NO: 50611 - RNA, 19 nt, Artificial Sequence
  Synthetic
caguagcaacuggaagcag

SEQ ID NO: 50612 - RNA, 20 nt, Artificial Sequence
  Synthetic
acaguagcaacuggaagcag

SEQ ID NO: 50613 - RNA, 21 nt, Artificial Sequence
  Synthetic
aacaguagcaacuggaagcag

SEQ ID NO: 50614 - RNA, 22 nt, Artificial Sequence
  Synthetic
aaacaguagcaacuggaagcag

SEQ ID NO: 50615 - RNA, 23 nt, Artificial Sequence
  Synthetic
caaacaguagcaacuggaagcag

SEQ ID NO: 50616 - RNA, 18 nt, Artificial Sequence
  Synthetic
ugugguuaugauaagcag

SEQ ID NO: 50617 - RNA, 19 nt, Artificial Sequence
  Synthetic
augugguuaugauaagcag

SEQ ID NO: 50618 - RNA, 20 nt, Artificial Sequence
  Synthetic
uaugugguuaugauaagcag

SEQ ID NO: 50619 - RNA, 21 nt, Artificial Sequence
  Synthetic
uuaugugguuaugauaagcag

SEQ ID NO: 50620 - RNA, 22 nt, Artificial Sequence
  Synthetic
auuaugugguuaugauaagcag

SEQ ID NO: 50621 - RNA, 23 nt, Artificial Sequence
  Synthetic
cauuaugugguuaugauaagcag

SEQ ID NO: 50622 - RNA, 24 nt, Artificial Sequence
  Synthetic
ucauuaugugguuaugauaagcag

SEQ ID NO: 50623 - RNA, 18 nt, Artificial Sequence
  Synthetic
agguucuguguuaagcag

SEQ ID NO: 50624 - RNA, 19 nt, Artificial Sequence
  Synthetic
aagguucuguguuaagcag

SEQ ID NO: 50625 - RNA, 20 nt, Artificial Sequence
  Synthetic
aaagguucuguguuaagcag

SEQ ID NO: 50626 - RNA, 21 nt, Artificial Sequence
  Synthetic
uaaagguucuguguuaagcag

SEQ ID NO: 50627 - RNA, 22 nt, Artificial Sequence
  Synthetic
cuaaagguucuguguuaagcag

SEQ ID NO: 50628 - RNA, 23 nt, Artificial Sequence
  Synthetic
acuaaagguucuguguuaagcag

SEQ ID NO: 50629 - RNA, 24 nt, Artificial Sequence
  Synthetic
cacuaaagguucuguguuaagcag

SEQ ID NO: 50630 - RNA, 18 nt, Artificial Sequence
  Synthetic
caucucaucuaacagcag

SEQ ID NO: 50631 - RNA, 19 nt, Artificial Sequence
  Synthetic
acaucucaucuaacagcag

SEQ ID NO: 50632 - RNA, 20 nt, Artificial Sequence
  Synthetic
uacaucucaucuaacagcag

SEQ ID NO: 50633 - RNA, 18 nt, Artificial Sequence
  Synthetic
aaaaagccaguacagcag

SEQ ID NO: 50634 - RNA, 19 nt, Artificial Sequence
  Synthetic
caaaaagccaguacagcag

SEQ ID NO: 50635 - RNA, 20 nt, Artificial Sequence
  Synthetic
ucaaaaagccaguacagcag

SEQ ID NO: 50636 - RNA, 23 nt, Artificial Sequence
  Synthetic
aggucaaaaagccaguacagcag

SEQ ID NO: 50637 - RNA, 24 nt, Artificial Sequence
  Synthetic
aaggucaaaaagccaguacagcag

SEQ ID NO: 50638 - RNA, 18 nt, Artificial Sequence
  Synthetic
ccaacaaaucuccagcag

SEQ ID NO: 50639 - RNA, 19 nt, Artificial Sequence
  Synthetic
cccaacaaaucuccagcag

SEQ ID NO: 50640 - RNA, 20 nt, Artificial Sequence
  Synthetic
ucccaacaaaucuccagcag

SEQ ID NO: 50641 - RNA, 21 nt, Artificial Sequence
  Synthetic
cucccaacaaaucuccagcag

SEQ ID NO: 50642 - RNA, 22 nt, Artificial Sequence
  Synthetic
ucucccaacaaaucuccagcag

SEQ ID NO: 50643 - RNA, 24 nt, Artificial Sequence
  Synthetic
ugucucccaacaaaucuccagcag

SEQ ID NO: 50644 - RNA, 18 nt, Artificial Sequence
  Synthetic
uuagagugcaugcagcag

SEQ ID NO: 50645 - RNA, 19 nt, Artificial Sequence
  Synthetic
uuuagagugcaugcagcag

SEQ ID NO: 50646 - RNA, 20 nt, Artificial Sequence
  Synthetic
uuuuagagugcaugcagcag

SEQ ID NO: 50647 - RNA, 21 nt, Artificial Sequence
  Synthetic
cuuuuagagugcaugcagcag

SEQ ID NO: 50648 - RNA, 22 nt, Artificial Sequence
  Synthetic
acuuuuagagugcaugcagcag

SEQ ID NO: 50649 - RNA, 23 nt, Artificial Sequence
  Synthetic
aacuuuuagagugcaugcagcag

SEQ ID NO: 50650 - RNA, 21 nt, Artificial Sequence
  Synthetic
cggaguucaagacuucagcag

SEQ ID NO: 50651 - RNA, 22 nt, Artificial Sequence
  Synthetic
acggaguucaagacuucagcag

SEQ ID NO: 50652 - RNA, 24 nt, Artificial Sequence
  Synthetic
agacggaguucaagacuucagcag

SEQ ID NO: 50653 - RNA, 18 nt, Artificial Sequence
  Synthetic
ucguuaguguuucagcag

SEQ ID NO: 50654 - RNA, 19 nt, Artificial Sequence
  Synthetic
cucguuaguguuucagcag

SEQ ID NO: 50655 - RNA, 20 nt, Artificial Sequence
  Synthetic
ucucguuaguguuucagcag

SEQ ID NO: 50656 - RNA, 21 nt, Artificial Sequence
  Synthetic
uucucguuaguguuucagcag

SEQ ID NO: 50657 - RNA, 22 nt, Artificial Sequence
  Synthetic
auucucguuaguguuucagcag

SEQ ID NO: 50658 - RNA, 23 nt, Artificial Sequence
  Synthetic
aauucucguuaguguuucagcag

SEQ ID NO: 50659 - RNA, 24 nt, Artificial Sequence
  Synthetic
caauucucguuaguguuucagcag

SEQ ID NO: 50660 - RNA, 18 nt, Artificial Sequence
  Synthetic
auggcaucugcagagcag

SEQ ID NO: 50661 - RNA, 19 nt, Artificial Sequence
  Synthetic
uauggcaucugcagagcag

SEQ ID NO: 50662 - RNA, 20 nt, Artificial Sequence
  Synthetic
auauggcaucugcagagcag

SEQ ID NO: 50663 - RNA, 21 nt, Artificial Sequence
  Synthetic
cauauggcaucugcagagcag

SEQ ID NO: 50664 - RNA, 22 nt, Artificial Sequence
  Synthetic
acauauggcaucugcagagcag

SEQ ID NO: 50665 - RNA, 23 nt, Artificial Sequence
  Synthetic
uacauauggcaucugcagagcag

SEQ ID NO: 50666 - RNA, 24 nt, Artificial Sequence
  Synthetic
uuacauauggcaucugcagagcag

SEQ ID NO: 50667 - RNA, 18 nt, Artificial Sequence
  Synthetic
uuguaaguuucugagcag

SEQ ID NO: 50668 - RNA, 19 nt, Artificial Sequence
  Synthetic
auuguaaguuucugagcag

SEQ ID NO: 50669 - RNA, 20 nt, Artificial Sequence
  Synthetic
aauuguaaguuucugagcag

SEQ ID NO: 50670 - RNA, 21 nt, Artificial Sequence
  Synthetic
caauuguaaguuucugagcag

SEQ ID NO: 50671 - RNA, 23 nt, Artificial Sequence
  Synthetic
agcaauuguaaguuucugagcag

SEQ ID NO: 50672 - RNA, 18 nt, Artificial Sequence
  Synthetic
ccagaagauuuugagcag

SEQ ID NO: 50673 - RNA, 19 nt, Artificial Sequence
  Synthetic
accagaagauuuugagcag

SEQ ID NO: 50674 - RNA, 20 nt, Artificial Sequence
  Synthetic
caccagaagauuuugagcag

SEQ ID NO: 50675 - RNA, 21 nt, Artificial Sequence
  Synthetic
ccaccagaagauuuugagcag

SEQ ID NO: 50676 - RNA, 23 nt, Artificial Sequence
  Synthetic
agccaccagaagauuuugagcag

SEQ ID NO: 50677 - RNA, 18 nt, Artificial Sequence
  Synthetic
ccuaaaguuuaauagcag

SEQ ID NO: 50678 - RNA, 19 nt, Artificial Sequence
  Synthetic
cccuaaaguuuaauagcag

SEQ ID NO: 50679 - RNA, 20 nt, Artificial Sequence
  Synthetic
acccuaaaguuuaauagcag

SEQ ID NO: 50680 - RNA, 21 nt, Artificial Sequence
  Synthetic
uacccuaaaguuuaauagcag

SEQ ID NO: 50681 - RNA, 22 nt, Artificial Sequence
  Synthetic
auacccuaaaguuuaauagcag

SEQ ID NO: 50682 - RNA, 23 nt, Artificial Sequence
  Synthetic
aauacccuaaaguuuaauagcag

SEQ ID NO: 50683 - RNA, 24 nt, Artificial Sequence
  Synthetic
uaauacccuaaaguuuaauagcag

SEQ ID NO: 50684 - RNA, 18 nt, Artificial Sequence
  Synthetic
uugaagaaacaguagcag

SEQ ID NO: 50685 - RNA, 19 nt, Artificial Sequence
  Synthetic
auugaagaaacaguagcag

SEQ ID NO: 50686 - RNA, 20 nt, Artificial Sequence
  Synthetic
aauugaagaaacaguagcag

SEQ ID NO: 50687 - RNA, 21 nt, Artificial Sequence
  Synthetic
aaauugaagaaacaguagcag

SEQ ID NO: 50688 - RNA, 23 nt, Artificial Sequence
  Synthetic
agaaauugaagaaacaguagcag

SEQ ID NO: 50689 - RNA, 24 nt, Artificial Sequence
  Synthetic
aagaaauugaagaaacaguagcag

SEQ ID NO: 50690 - RNA, 18 nt, Artificial Sequence
  Synthetic
acacacuugacguagcag

SEQ ID NO: 50691 - RNA, 19 nt, Artificial Sequence
  Synthetic
cacacacuugacguagcag

SEQ ID NO: 50692 - RNA, 20 nt, Artificial Sequence
  Synthetic
acacacacuugacguagcag

SEQ ID NO: 50693 - RNA, 21 nt, Artificial Sequence
  Synthetic
aacacacacuugacguagcag

SEQ ID NO: 50694 - RNA, 22 nt, Artificial Sequence
  Synthetic
caacacacacuugacguagcag

SEQ ID NO: 50695 - RNA, 23 nt, Artificial Sequence
  Synthetic
ucaacacacacuugacguagcag

SEQ ID NO: 50696 - RNA, 24 nt, Artificial Sequence
  Synthetic
uucaacacacacuugacguagcag

SEQ ID NO: 50697 - RNA, 19 nt, Artificial Sequence
  Synthetic
ugggagggaguaaaggcag

SEQ ID NO: 50698 - RNA, 20 nt, Artificial Sequence
  Synthetic
cugggagggaguaaaggcag

SEQ ID NO: 50699 - RNA, 21 nt, Artificial Sequence
  Synthetic
ccugggagggaguaaaggcag

SEQ ID NO: 50700 - RNA, 23 nt, Artificial Sequence
  Synthetic
ugccugggagggaguaaaggcag

SEQ ID NO: 50701 - RNA, 24 nt, Artificial Sequence
  Synthetic
augccugggagggaguaaaggcag

SEQ ID NO: 50702 - RNA, 18 nt, Artificial Sequence
  Synthetic
ucuugccaaugcaggcag

SEQ ID NO: 50703 - RNA, 19 nt, Artificial Sequence
  Synthetic
uucuugccaaugcaggcag

SEQ ID NO: 50704 - RNA, 20 nt, Artificial Sequence
  Synthetic
auucuugccaaugcaggcag

SEQ ID NO: 50705 - RNA, 23 nt, Artificial Sequence
  Synthetic
uggauucuugccaaugcaggcag

SEQ ID NO: 50706 - RNA, 18 nt, Artificial Sequence
  Synthetic
cucuauuuggagaggcag

SEQ ID NO: 50707 - RNA, 19 nt, Artificial Sequence
  Synthetic
acucuauuuggagaggcag

SEQ ID NO: 50708 - RNA, 20 nt, Artificial Sequence
  Synthetic
cacucuauuuggagaggcag

SEQ ID NO: 50709 - RNA, 21 nt, Artificial Sequence
  Synthetic
ccacucuauuuggagaggcag

SEQ ID NO: 50710 - RNA, 24 nt, Artificial Sequence
  Synthetic
uggccacucuauuuggagaggcag

SEQ ID NO: 50711 - RNA, 19 nt, Artificial Sequence
  Synthetic
ugaguuuagguaggggcag

SEQ ID NO: 50712 - RNA, 20 nt, Artificial Sequence
  Synthetic
augaguuuagguaggggcag

SEQ ID NO: 50713 - RNA, 21 nt, Artificial Sequence
  Synthetic
aaugaguuuagguaggggcag

SEQ ID NO: 50714 - RNA, 22 nt, Artificial Sequence
  Synthetic
aaaugaguuuagguaggggcag

SEQ ID NO: 50715 - RNA, 23 nt, Artificial Sequence
  Synthetic
aaaaugaguuuagguaggggcag

SEQ ID NO: 50716 - RNA, 24 nt, Artificial Sequence
  Synthetic
caaaaugaguuuagguaggggcag

SEQ ID NO: 50717 - RNA, 21 nt, Artificial Sequence
  Synthetic
ugcuccucuccaaaauggcag

SEQ ID NO: 50718 - RNA, 22 nt, Artificial Sequence
  Synthetic
cugcuccucuccaaaauggcag

SEQ ID NO: 50719 - RNA, 23 nt, Artificial Sequence
  Synthetic
ccugcuccucuccaaaauggcag

SEQ ID NO: 50720 - RNA, 24 nt, Artificial Sequence
  Synthetic
uccugcuccucuccaaaauggcag

SEQ ID NO: 50721 - RNA, 18 nt, Artificial Sequence
  Synthetic
aguuguugauaaaugcag

SEQ ID NO: 50722 - RNA, 19 nt, Artificial Sequence
  Synthetic
caguuguugauaaaugcag

SEQ ID NO: 50723 - RNA, 20 nt, Artificial Sequence
  Synthetic
ccaguuguugauaaaugcag

SEQ ID NO: 50724 - RNA, 21 nt, Artificial Sequence
  Synthetic
accaguuguugauaaaugcag

SEQ ID NO: 50725 - RNA, 22 nt, Artificial Sequence
  Synthetic
aaccaguuguugauaaaugcag

SEQ ID NO: 50726 - RNA, 23 nt, Artificial Sequence
  Synthetic
uaaccaguuguugauaaaugcag

SEQ ID NO: 50727 - RNA, 24 nt, Artificial Sequence
  Synthetic
cuaaccaguuguugauaaaugcag

SEQ ID NO: 50728 - RNA, 18 nt, Artificial Sequence
  Synthetic
cucagauggcuucugcag

SEQ ID NO: 50729 - RNA, 20 nt, Artificial Sequence
  Synthetic
agcucagauggcuucugcag

SEQ ID NO: 50730 - RNA, 24 nt, Artificial Sequence
  Synthetic
agggagcucagauggcuucugcag

SEQ ID NO: 50731 - RNA, 18 nt, Artificial Sequence
  Synthetic
aagucacaaagagugcag

SEQ ID NO: 50732 - RNA, 19 nt, Artificial Sequence
  Synthetic
aaagucacaaagagugcag

SEQ ID NO: 50733 - RNA, 20 nt, Artificial Sequence
  Synthetic
uaaagucacaaagagugcag

SEQ ID NO: 50734 - RNA, 22 nt, Artificial Sequence
  Synthetic
aguaaagucacaaagagugcag

SEQ ID NO: 50735 - RNA, 23 nt, Artificial Sequence
  Synthetic
caguaaagucacaaagagugcag

SEQ ID NO: 50736 - RNA, 24 nt, Artificial Sequence
  Synthetic
ccaguaaagucacaaagagugcag

SEQ ID NO: 50737 - RNA, 18 nt, Artificial Sequence
  Synthetic
uauguuccuugugugcag

SEQ ID NO: 50738 - RNA, 19 nt, Artificial Sequence
  Synthetic
uuauguuccuugugugcag

SEQ ID NO: 50739 - RNA, 20 nt, Artificial Sequence
  Synthetic
uuuauguuccuugugugcag

SEQ ID NO: 50740 - RNA, 21 nt, Artificial Sequence
  Synthetic
auuuauguuccuugugugcag

SEQ ID NO: 50741 - RNA, 22 nt, Artificial Sequence
  Synthetic
aauuuauguuccuugugugcag

SEQ ID NO: 50742 - RNA, 24 nt, Artificial Sequence
  Synthetic
ugaauuuauguuccuugugugcag

SEQ ID NO: 50743 - RNA, 18 nt, Artificial Sequence
  Synthetic
uccuugcccaccuugcag

SEQ ID NO: 50744 - RNA, 19 nt, Artificial Sequence
  Synthetic
uuccuugcccaccuugcag

SEQ ID NO: 50745 - RNA, 20 nt, Artificial Sequence
  Synthetic
uuuccuugcccaccuugcag

SEQ ID NO: 50746 - RNA, 21 nt, Artificial Sequence
  Synthetic
cuuuccuugcccaccuugcag

SEQ ID NO: 50747 - RNA, 22 nt, Artificial Sequence
  Synthetic
ccuuuccuugcccaccuugcag

SEQ ID NO: 50748 - RNA, 23 nt, Artificial Sequence
  Synthetic
cccuuuccuugcccaccuugcag

SEQ ID NO: 50749 - RNA, 24 nt, Artificial Sequence
  Synthetic
acccuuuccuugcccaccuugcag

SEQ ID NO: 50750 - RNA, 18 nt, Artificial Sequence
  Synthetic
uuuagcacuuauuugcag

SEQ ID NO: 50751 - RNA, 19 nt, Artificial Sequence
  Synthetic
auuuagcacuuauuugcag

SEQ ID NO: 50752 - RNA, 20 nt, Artificial Sequence
  Synthetic
uauuuagcacuuauuugcag

SEQ ID NO: 50753 - RNA, 21 nt, Artificial Sequence
  Synthetic
auauuuagcacuuauuugcag

SEQ ID NO: 50754 - RNA, 22 nt, Artificial Sequence
  Synthetic
aauauuuagcacuuauuugcag

SEQ ID NO: 50755 - RNA, 23 nt, Artificial Sequence
  Synthetic
aaauauuuagcacuuauuugcag

SEQ ID NO: 50756 - RNA, 24 nt, Artificial Sequence
  Synthetic
aaaauauuuagcacuuauuugcag

SEQ ID NO: 50757 - RNA, 19 nt, Artificial Sequence
  Synthetic
ugucuuuuauauuuugcag

SEQ ID NO: 50758 - RNA, 20 nt, Artificial Sequence
  Synthetic
augucuuuuauauuuugcag

SEQ ID NO: 50759 - RNA, 21 nt, Artificial Sequence
  Synthetic
aaugucuuuuauauuuugcag

SEQ ID NO: 50760 - RNA, 22 nt, Artificial Sequence
  Synthetic
aaaugucuuuuauauuuugcag

SEQ ID NO: 50761 - RNA, 23 nt, Artificial Sequence
  Synthetic
aaaaugucuuuuauauuuugcag

SEQ ID NO: 50762 - RNA, 24 nt, Artificial Sequence
  Synthetic
aaaaaugucuuuuauauuuugcag

SEQ ID NO: 50763 - RNA, 18 nt, Artificial Sequence
  Synthetic
uaauaaacucuuuugcag

SEQ ID NO: 50764 - RNA, 19 nt, Artificial Sequence
  Synthetic
uuaauaaacucuuuugcag

SEQ ID NO: 50765 - RNA, 20 nt, Artificial Sequence
  Synthetic
uuuaauaaacucuuuugcag

SEQ ID NO: 50766 - RNA, 21 nt, Artificial Sequence
  Synthetic
cuuuaauaaacucuuuugcag

SEQ ID NO: 50767 - RNA, 23 nt, Artificial Sequence
  Synthetic
agcuuuaauaaacucuuuugcag

SEQ ID NO: 50768 - RNA, 24 nt, Artificial Sequence
  Synthetic
aagcuuuaauaaacucuuuugcag

SEQ ID NO: 50769 - RNA, 18 nt, Artificial Sequence
  Synthetic
uaaacuaucacaaaucag

SEQ ID NO: 50770 - RNA, 20 nt, Artificial Sequence
  Synthetic
uguaaacuaucacaaaucag

SEQ ID NO: 50771 - RNA, 21 nt, Artificial Sequence
  Synthetic
cuguaaacuaucacaaaucag

SEQ ID NO: 50772 - RNA, 22 nt, Artificial Sequence
  Synthetic
acuguaaacuaucacaaaucag

SEQ ID NO: 50773 - RNA, 23 nt, Artificial Sequence
  Synthetic
cacuguaaacuaucacaaaucag

SEQ ID NO: 50774 - RNA, 24 nt, Artificial Sequence
  Synthetic
ccacuguaaacuaucacaaaucag

SEQ ID NO: 50775 - RNA, 19 nt, Artificial Sequence
  Synthetic
uggccaugucccaaaucag

SEQ ID NO: 50776 - RNA, 20 nt, Artificial Sequence
  Synthetic
cuggccaugucccaaaucag

SEQ ID NO: 50777 - RNA, 21 nt, Artificial Sequence
  Synthetic
ccuggccaugucccaaaucag

SEQ ID NO: 50778 - RNA, 22 nt, Artificial Sequence
  Synthetic
cccuggccaugucccaaaucag

SEQ ID NO: 50779 - RNA, 24 nt, Artificial Sequence
  Synthetic
ugcccuggccaugucccaaaucag

SEQ ID NO: 50780 - RNA, 18 nt, Artificial Sequence
  Synthetic
uuuucuaucuuaaaucag

SEQ ID NO: 50781 - RNA, 19 nt, Artificial Sequence
  Synthetic
cuuuucuaucuuaaaucag

SEQ ID NO: 50782 - RNA, 20 nt, Artificial Sequence
  Synthetic
ucuuuucuaucuuaaaucag

SEQ ID NO: 50783 - RNA, 21 nt, Artificial Sequence
  Synthetic
uucuuuucuaucuuaaaucag

SEQ ID NO: 50784 - RNA, 22 nt, Artificial Sequence
  Synthetic
uuucuuuucuaucuuaaaucag

SEQ ID NO: 50785 - RNA, 23 nt, Artificial Sequence
  Synthetic
uuuucuuuucuaucuuaaaucag

SEQ ID NO: 50786 - RNA, 24 nt, Artificial Sequence
  Synthetic
cuuuucuuuucuaucuuaaaucag

SEQ ID NO: 50787 - RNA, 22 nt, Artificial Sequence
  Synthetic
aguugaaagaauucagaaucag

SEQ ID NO: 50788 - RNA, 23 nt, Artificial Sequence
  Synthetic
uaguugaaagaauucagaaucag

SEQ ID NO: 50789 - RNA, 24 nt, Artificial Sequence
  Synthetic
cuaguugaaagaauucagaaucag

SEQ ID NO: 50790 - RNA, 21 nt, Artificial Sequence
  Synthetic
caaaagugauuagagaaucag

SEQ ID NO: 50791 - RNA, 22 nt, Artificial Sequence
  Synthetic
ucaaaagugauuagagaaucag

SEQ ID NO: 50792 - RNA, 23 nt, Artificial Sequence
  Synthetic
aucaaaagugauuagagaaucag

SEQ ID NO: 50793 - RNA, 24 nt, Artificial Sequence
  Synthetic
aaucaaaagugauuagagaaucag

SEQ ID NO: 50794 - RNA, 18 nt, Artificial Sequence
  Synthetic
aguuuauuaauacaucag

SEQ ID NO: 50795 - RNA, 19 nt, Artificial Sequence
  Synthetic
aaguuuauuaauacaucag

SEQ ID NO: 50796 - RNA, 20 nt, Artificial Sequence
  Synthetic
uaaguuuauuaauacaucag

SEQ ID NO: 50797 - RNA, 21 nt, Artificial Sequence
  Synthetic
uuaaguuuauuaauacaucag

SEQ ID NO: 50798 - RNA, 22 nt, Artificial Sequence
  Synthetic
uuuaaguuuauuaauacaucag

SEQ ID NO: 50799 - RNA, 24 nt, Artificial Sequence
  Synthetic
uguuuaaguuuauuaauacaucag

SEQ ID NO: 50800 - RNA, 18 nt, Artificial Sequence
  Synthetic
aggagaugucaccaucag

SEQ ID NO: 50801 - RNA, 19 nt, Artificial Sequence
  Synthetic
caggagaugucaccaucag

SEQ ID NO: 50802 - RNA, 21 nt, Artificial Sequence
  Synthetic
agcaggagaugucaccaucag

SEQ ID NO: 50803 - RNA, 22 nt, Artificial Sequence
  Synthetic
cagcaggagaugucaccaucag

SEQ ID NO: 50804 - RNA, 18 nt, Artificial Sequence
  Synthetic
ucuagaaccagucaucag

SEQ ID NO: 50805 - RNA, 20 nt, Artificial Sequence
  Synthetic
agucuagaaccagucaucag

SEQ ID NO: 50806 - RNA, 21 nt, Artificial Sequence
  Synthetic
uagucuagaaccagucaucag

SEQ ID NO: 50807 - RNA, 22 nt, Artificial Sequence
  Synthetic
uuagucuagaaccagucaucag

SEQ ID NO: 50808 - RNA, 23 nt, Artificial Sequence
  Synthetic
cuuagucuagaaccagucaucag

SEQ ID NO: 50809 - RNA, 24 nt, Artificial Sequence
  Synthetic
ucuuagucuagaaccagucaucag

SEQ ID NO: 50810 - RNA, 18 nt, Artificial Sequence
  Synthetic
uuaaaacuucaggaucag

SEQ ID NO: 50811 - RNA, 19 nt, Artificial Sequence
  Synthetic
cuuaaaacuucaggaucag

SEQ ID NO: 50812 - RNA, 20 nt, Artificial Sequence
  Synthetic
ccuuaaaacuucaggaucag

SEQ ID NO: 50813 - RNA, 22 nt, Artificial Sequence
  Synthetic
ugccuuaaaacuucaggaucag

SEQ ID NO: 50814 - RNA, 23 nt, Artificial Sequence
  Synthetic
augccuuaaaacuucaggaucag

SEQ ID NO: 50815 - RNA, 24 nt, Artificial Sequence
  Synthetic
uaugccuuaaaacuucaggaucag

SEQ ID NO: 50816 - RNA, 20 nt, Artificial Sequence
  Synthetic
uggugagggaauaugaucag

SEQ ID NO: 50817 - RNA, 21 nt, Artificial Sequence
  Synthetic
cuggugagggaauaugaucag

SEQ ID NO: 50818 - RNA, 22 nt, Artificial Sequence
  Synthetic
acuggugagggaauaugaucag

SEQ ID NO: 50819 - RNA, 23 nt, Artificial Sequence
  Synthetic
cacuggugagggaauaugaucag

SEQ ID NO: 50820 - RNA, 24 nt, Artificial Sequence
  Synthetic
acacuggugagggaauaugaucag

SEQ ID NO: 50821 - RNA, 18 nt, Artificial Sequence
  Synthetic
cucacuaucccugaucag

SEQ ID NO: 50822 - RNA, 19 nt, Artificial Sequence
  Synthetic
ccucacuaucccugaucag

SEQ ID NO: 50823 - RNA, 21 nt, Artificial Sequence
  Synthetic
ugccucacuaucccugaucag

SEQ ID NO: 50824 - RNA, 22 nt, Artificial Sequence
  Synthetic
cugccucacuaucccugaucag

SEQ ID NO: 50825 - RNA, 24 nt, Artificial Sequence
  Synthetic
ugcugccucacuaucccugaucag

SEQ ID NO: 50826 - RNA, 18 nt, Artificial Sequence
  Synthetic
uggauaugaaaauaucag

SEQ ID NO: 50827 - RNA, 19 nt, Artificial Sequence
  Synthetic
uuggauaugaaaauaucag

SEQ ID NO: 50828 - RNA, 20 nt, Artificial Sequence
  Synthetic
auuggauaugaaaauaucag

SEQ ID NO: 50829 - RNA, 21 nt, Artificial Sequence
  Synthetic
uauuggauaugaaaauaucag

SEQ ID NO: 50830 - RNA, 22 nt, Artificial Sequence
  Synthetic
auauuggauaugaaaauaucag

SEQ ID NO: 50831 - RNA, 23 nt, Artificial Sequence
  Synthetic
uauauuggauaugaaaauaucag

SEQ ID NO: 50832 - RNA, 24 nt, Artificial Sequence
  Synthetic
uuauauuggauaugaaaauaucag

SEQ ID NO: 50833 - RNA, 18 nt, Artificial Sequence
  Synthetic
uuucaagugaaauaucag

SEQ ID NO: 50834 - RNA, 19 nt, Artificial Sequence
  Synthetic
auuucaagugaaauaucag

SEQ ID NO: 50835 - RNA, 21 nt, Artificial Sequence
  Synthetic
agauuucaagugaaauaucag

SEQ ID NO: 50836 - RNA, 24 nt, Artificial Sequence
  Synthetic
uggagauuucaagugaaauaucag

SEQ ID NO: 50837 - RNA, 21 nt, Artificial Sequence
  Synthetic
aaaaaaaacagaguauaucag

SEQ ID NO: 50838 - RNA, 24 nt, Artificial Sequence
  Synthetic
uggaaaaaaaacagaguauaucag

SEQ ID NO: 50839 - RNA, 18 nt, Artificial Sequence
  Synthetic
acaaauauugcuuaucag

SEQ ID NO: 50840 - RNA, 19 nt, Artificial Sequence
  Synthetic
aacaaauauugcuuaucag

SEQ ID NO: 50841 - RNA, 20 nt, Artificial Sequence
  Synthetic
caacaaauauugcuuaucag

SEQ ID NO: 50842 - RNA, 21 nt, Artificial Sequence
  Synthetic
ucaacaaauauugcuuaucag

SEQ ID NO: 50843 - RNA, 22 nt, Artificial Sequence
  Synthetic
cucaacaaauauugcuuaucag

SEQ ID NO: 50844 - RNA, 24 nt, Artificial Sequence
  Synthetic
ugcucaacaaauauugcuuaucag

SEQ ID NO: 50845 - RNA, 18 nt, Artificial Sequence
  Synthetic
ugggaauuuguuuaucag

SEQ ID NO: 50846 - RNA, 19 nt, Artificial Sequence
  Synthetic
augggaauuuguuuaucag

SEQ ID NO: 50847 - RNA, 20 nt, Artificial Sequence
  Synthetic
caugggaauuuguuuaucag

SEQ ID NO: 50848 - RNA, 21 nt, Artificial Sequence
  Synthetic
acaugggaauuuguuuaucag

SEQ ID NO: 50849 - RNA, 22 nt, Artificial Sequence
  Synthetic
uacaugggaauuuguuuaucag

SEQ ID NO: 50850 - RNA, 23 nt, Artificial Sequence
  Synthetic
auacaugggaauuuguuuaucag

SEQ ID NO: 50851 - RNA, 24 nt, Artificial Sequence
  Synthetic
uauacaugggaauuuguuuaucag

SEQ ID NO: 50852 - RNA, 18 nt, Artificial Sequence
  Synthetic
uuguaaauaagaacucag

SEQ ID NO: 50853 - RNA, 19 nt, Artificial Sequence
  Synthetic
auuguaaauaagaacucag

SEQ ID NO: 50854 - RNA, 20 nt, Artificial Sequence
  Synthetic
aauuguaaauaagaacucag

SEQ ID NO: 50855 - RNA, 21 nt, Artificial Sequence
  Synthetic
aaauuguaaauaagaacucag

SEQ ID NO: 50856 - RNA, 23 nt, Artificial Sequence
  Synthetic
agaaauuguaaauaagaacucag

SEQ ID NO: 50857 - RNA, 24 nt, Artificial Sequence
  Synthetic
uagaaauuguaaauaagaacucag

SEQ ID NO: 50858 - RNA, 19 nt, Artificial Sequence
  Synthetic
uguacacaucagaacucag

SEQ ID NO: 50859 - RNA, 20 nt, Artificial Sequence
  Synthetic
uuguacacaucagaacucag

SEQ ID NO: 50860 - RNA, 21 nt, Artificial Sequence
  Synthetic
uuuguacacaucagaacucag

SEQ ID NO: 50861 - RNA, 22 nt, Artificial Sequence
  Synthetic
auuuguacacaucagaacucag

SEQ ID NO: 50862 - RNA, 19 nt, Artificial Sequence
  Synthetic
ugaaaaagcauacccucag

SEQ ID NO: 50863 - RNA, 23 nt, Artificial Sequence
  Synthetic
agggugaaaaagcauacccucag

SEQ ID NO: 50864 - RNA, 24 nt, Artificial Sequence
  Synthetic
aagggugaaaaagcauacccucag

SEQ ID NO: 50865 - RNA, 19 nt, Artificial Sequence
  Synthetic
aggaauacacuauccucag

SEQ ID NO: 50866 - RNA, 20 nt, Artificial Sequence
  Synthetic
aaggaauacacuauccucag

SEQ ID NO: 50867 - RNA, 21 nt, Artificial Sequence
  Synthetic
aaaggaauacacuauccucag

SEQ ID NO: 50868 - RNA, 22 nt, Artificial Sequence
  Synthetic
aaaaggaauacacuauccucag

SEQ ID NO: 50869 - RNA, 23 nt, Artificial Sequence
  Synthetic
aaaaaggaauacacuauccucag

SEQ ID NO: 50870 - RNA, 24 nt, Artificial Sequence
  Synthetic
aaaaaaggaauacacuauccucag

SEQ ID NO: 50871 - RNA, 19 nt, Artificial Sequence
  Synthetic
ugaguucuaaagaucucag

SEQ ID NO: 50872 - RNA, 20 nt, Artificial Sequence
  Synthetic
cugaguucuaaagaucucag

SEQ ID NO: 50873 - RNA, 23 nt, Artificial Sequence
  Synthetic
uggcugaguucuaaagaucucag

SEQ ID NO: 50874 - RNA, 24 nt, Artificial Sequence
  Synthetic
auggcugaguucuaaagaucucag

SEQ ID NO: 50875 - RNA, 18 nt, Artificial Sequence
  Synthetic
uauuuauucagaggucag

SEQ ID NO: 50876 - RNA, 19 nt, Artificial Sequence
  Synthetic
uuauuuauucagaggucag

SEQ ID NO: 50877 - RNA, 20 nt, Artificial Sequence
  Synthetic
uuuauuuauucagaggucag

SEQ ID NO: 50878 - RNA, 21 nt, Artificial Sequence
  Synthetic
cuuuauuuauucagaggucag

SEQ ID NO: 50879 - RNA, 22 nt, Artificial Sequence
  Synthetic
acuuuauuuauucagaggucag

SEQ ID NO: 50880 - RNA, 23 nt, Artificial Sequence
  Synthetic
cacuuuauuuauucagaggucag

SEQ ID NO: 50881 - RNA, 18 nt, Artificial Sequence
  Synthetic
auauaugguucaugucag

SEQ ID NO: 50882 - RNA, 19 nt, Artificial Sequence
  Synthetic
uauauaugguucaugucag

SEQ ID NO: 50883 - RNA, 20 nt, Artificial Sequence
  Synthetic
auauauaugguucaugucag

SEQ ID NO: 50884 - RNA, 21 nt, Artificial Sequence
  Synthetic
cauauauaugguucaugucag

SEQ ID NO: 50885 - RNA, 23 nt, Artificial Sequence
  Synthetic
agcauauauaugguucaugucag

SEQ ID NO: 50886 - RNA, 24 nt, Artificial Sequence
  Synthetic
aagcauauauaugguucaugucag

SEQ ID NO: 50887 - RNA, 18 nt, Artificial Sequence
  Synthetic
uucacuuuuguaugucag

SEQ ID NO: 50888 - RNA, 19 nt, Artificial Sequence
  Synthetic
uuucacuuuuguaugucag

SEQ ID NO: 50889 - RNA, 20 nt, Artificial Sequence
  Synthetic
auuucacuuuuguaugucag

SEQ ID NO: 50890 - RNA, 21 nt, Artificial Sequence
  Synthetic
uauuucacuuuuguaugucag

SEQ ID NO: 50891 - RNA, 22 nt, Artificial Sequence
  Synthetic
uuauuucacuuuuguaugucag

SEQ ID NO: 50892 - RNA, 23 nt, Artificial Sequence
  Synthetic
auuauuucacuuuuguaugucag

SEQ ID NO: 50893 - RNA, 24 nt, Artificial Sequence
  Synthetic
uauuauuucacuuuuguaugucag

SEQ ID NO: 50894 - RNA, 21 nt, Artificial Sequence
  Synthetic
uacaaagcaugugucugucag

SEQ ID NO: 50895 - RNA, 22 nt, Artificial Sequence
  Synthetic
uuacaaagcaugugucugucag

SEQ ID NO: 50896 - RNA, 23 nt, Artificial Sequence
  Synthetic
cuuacaaagcaugugucugucag

SEQ ID NO: 50897 - RNA, 18 nt, Artificial Sequence
  Synthetic
uuugagcaauagugucag

SEQ ID NO: 50898 - RNA, 19 nt, Artificial Sequence
  Synthetic
cuuugagcaauagugucag

SEQ ID NO: 50899 - RNA, 20 nt, Artificial Sequence
  Synthetic
ccuuugagcaauagugucag

SEQ ID NO: 50900 - RNA, 21 nt, Artificial Sequence
  Synthetic
uccuuugagcaauagugucag

SEQ ID NO: 50901 - RNA, 22 nt, Artificial Sequence
  Synthetic
cuccuuugagcaauagugucag

SEQ ID NO: 50902 - RNA, 23 nt, Artificial Sequence
  Synthetic
ccuccuuugagcaauagugucag

SEQ ID NO: 50903 - RNA, 24 nt, Artificial Sequence
  Synthetic
cccuccuuugagcaauagugucag

SEQ ID NO: 50904 - RNA, 18 nt, Artificial Sequence
  Synthetic
uuaacuggugauugucag

SEQ ID NO: 50905 - RNA, 19 nt, Artificial Sequence
  Synthetic
auuaacuggugauugucag

SEQ ID NO: 50906 - RNA, 20 nt, Artificial Sequence
  Synthetic
aauuaacuggugauugucag

SEQ ID NO: 50907 - RNA, 22 nt, Artificial Sequence
  Synthetic
agaauuaacuggugauugucag

SEQ ID NO: 50908 - RNA, 23 nt, Artificial Sequence
  Synthetic
cagaauuaacuggugauugucag

SEQ ID NO: 50909 - RNA, 24 nt, Artificial Sequence
  Synthetic
acagaauuaacuggugauugucag

SEQ ID NO: 50910 - RNA, 18 nt, Artificial Sequence
  Synthetic
uagcaacuauuaauucag

SEQ ID NO: 50911 - RNA, 19 nt, Artificial Sequence
  Synthetic
uuagcaacuauuaauucag

SEQ ID NO: 50912 - RNA, 20 nt, Artificial Sequence
  Synthetic
cuuagcaacuauuaauucag

SEQ ID NO: 50913 - RNA, 21 nt, Artificial Sequence
  Synthetic
ucuuagcaacuauuaauucag

SEQ ID NO: 50914 - RNA, 22 nt, Artificial Sequence
  Synthetic
uucuuagcaacuauuaauucag

SEQ ID NO: 50915 - RNA, 23 nt, Artificial Sequence
  Synthetic
uuucuuagcaacuauuaauucag

SEQ ID NO: 50916 - RNA, 24 nt, Artificial Sequence
  Synthetic
uuuucuuagcaacuauuaauucag

SEQ ID NO: 50917 - RNA, 18 nt, Artificial Sequence
  Synthetic
caacauguuaccauucag

SEQ ID NO: 50918 - RNA, 20 nt, Artificial Sequence
  Synthetic
ugcaacauguuaccauucag

SEQ ID NO: 50919 - RNA, 21 nt, Artificial Sequence
  Synthetic
uugcaacauguuaccauucag

SEQ ID NO: 50920 - RNA, 22 nt, Artificial Sequence
  Synthetic
uuugcaacauguuaccauucag

SEQ ID NO: 50921 - RNA, 24 nt, Artificial Sequence
  Synthetic
uguuugcaacauguuaccauucag

SEQ ID NO: 50922 - RNA, 18 nt, Artificial Sequence
  Synthetic
uucaaagcauucauucag

SEQ ID NO: 50923 - RNA, 19 nt, Artificial Sequence
  Synthetic
cuucaaagcauucauucag

SEQ ID NO: 50924 - RNA, 20 nt, Artificial Sequence
  Synthetic
ucuucaaagcauucauucag

SEQ ID NO: 50925 - RNA, 21 nt, Artificial Sequence
  Synthetic
uucuucaaagcauucauucag

SEQ ID NO: 50926 - RNA, 22 nt, Artificial Sequence
  Synthetic
uuucuucaaagcauucauucag

SEQ ID NO: 50927 - RNA, 23 nt, Artificial Sequence
  Synthetic
uuuucuucaaagcauucauucag

SEQ ID NO: 50928 - RNA, 24 nt, Artificial Sequence
  Synthetic
auuuucuucaaagcauucauucag

SEQ ID NO: 50929 - RNA, 18 nt, Artificial Sequence
  Synthetic
accaauuacuuuauucag

SEQ ID NO: 50930 - RNA, 19 nt, Artificial Sequence
  Synthetic
aaccaauuacuuuauucag

SEQ ID NO: 50931 - RNA, 20 nt, Artificial Sequence
  Synthetic
caaccaauuacuuuauucag

SEQ ID NO: 50932 - RNA, 21 nt, Artificial Sequence
  Synthetic
ucaaccaauuacuuuauucag

SEQ ID NO: 50933 - RNA, 22 nt, Artificial Sequence
  Synthetic
uucaaccaauuacuuuauucag

SEQ ID NO: 50934 - RNA, 23 nt, Artificial Sequence
  Synthetic
uuucaaccaauuacuuuauucag

SEQ ID NO: 50935 - RNA, 24 nt, Artificial Sequence
  Synthetic
auuucaaccaauuacuuuauucag

SEQ ID NO: 50936 - RNA, 19 nt, Artificial Sequence
  Synthetic
agcgauguguagacuucag

SEQ ID NO: 50937 - RNA, 20 nt, Artificial Sequence
  Synthetic
cagcgauguguagacuucag

SEQ ID NO: 50938 - RNA, 21 nt, Artificial Sequence
  Synthetic
acagcgauguguagacuucag

SEQ ID NO: 50939 - RNA, 24 nt, Artificial Sequence
  Synthetic
uggacagcgauguguagacuucag

SEQ ID NO: 50940 - RNA, 19 nt, Artificial Sequence
  Synthetic
uggcacaaaguagguucag

SEQ ID NO: 50941 - RNA, 20 nt, Artificial Sequence
  Synthetic
uuggcacaaaguagguucag

SEQ ID NO: 50942 - RNA, 21 nt, Artificial Sequence
  Synthetic
uuuggcacaaaguagguucag

SEQ ID NO: 50943 - RNA, 23 nt, Artificial Sequence
  Synthetic
uguuuggcacaaaguagguucag

SEQ ID NO: 50944 - RNA, 18 nt, Artificial Sequence
  Synthetic
cauggacauuugguucag

SEQ ID NO: 50945 - RNA, 19 nt, Artificial Sequence
  Synthetic
ucauggacauuugguucag

SEQ ID NO: 50946 - RNA, 20 nt, Artificial Sequence
  Synthetic
uucauggacauuugguucag

SEQ ID NO: 50947 - RNA, 23 nt, Artificial Sequence
  Synthetic
agguucauggacauuugguucag

SEQ ID NO: 50948 - RNA, 24 nt, Artificial Sequence
  Synthetic
cagguucauggacauuugguucag

SEQ ID NO: 50949 - RNA, 18 nt, Artificial Sequence
  Synthetic
caucuuacagaauuucag

SEQ ID NO: 50950 - RNA, 19 nt, Artificial Sequence
  Synthetic
acaucuuacagaauuucag

SEQ ID NO: 50951 - RNA, 20 nt, Artificial Sequence
  Synthetic
aacaucuuacagaauuucag

SEQ ID NO: 50952 - RNA, 21 nt, Artificial Sequence
  Synthetic
aaacaucuuacagaauuucag

SEQ ID NO: 50953 - RNA, 22 nt, Artificial Sequence
  Synthetic
uaaacaucuuacagaauuucag

SEQ ID NO: 50954 - RNA, 23 nt, Artificial Sequence
  Synthetic
auaaacaucuuacagaauuucag

SEQ ID NO: 50955 - RNA, 24 nt, Artificial Sequence
  Synthetic
aauaaacaucuuacagaauuucag

SEQ ID NO: 50956 - RNA, 18 nt, Artificial Sequence
  Synthetic
uuaucaacauaauuucag

SEQ ID NO: 50957 - RNA, 20 nt, Artificial Sequence
  Synthetic
uguuaucaacauaauuucag

SEQ ID NO: 50958 - RNA, 21 nt, Artificial Sequence
  Synthetic
auguuaucaacauaauuucag

SEQ ID NO: 50959 - RNA, 22 nt, Artificial Sequence
  Synthetic
uauguuaucaacauaauuucag

SEQ ID NO: 50960 - RNA, 23 nt, Artificial Sequence
  Synthetic
auauguuaucaacauaauuucag

SEQ ID NO: 50961 - RNA, 24 nt, Artificial Sequence
  Synthetic
aauauguuaucaacauaauuucag

SEQ ID NO: 50962 - RNA, 18 nt, Artificial Sequence
  Synthetic
ccuuaucucucauuucag

SEQ ID NO: 50963 - RNA, 20 nt, Artificial Sequence
  Synthetic
agccuuaucucucauuucag

SEQ ID NO: 50964 - RNA, 21 nt, Artificial Sequence
  Synthetic
aagccuuaucucucauuucag

SEQ ID NO: 50965 - RNA, 22 nt, Artificial Sequence
  Synthetic
aaagccuuaucucucauuucag

SEQ ID NO: 50966 - RNA, 24 nt, Artificial Sequence
  Synthetic
agaaagccuuaucucucauuucag

SEQ ID NO: 50967 - RNA, 21 nt, Artificial Sequence
  Synthetic
uuauuguugcuaauauuucag

SEQ ID NO: 50968 - RNA, 22 nt, Artificial Sequence
  Synthetic
uuuauuguugcuaauauuucag

SEQ ID NO: 50969 - RNA, 23 nt, Artificial Sequence
  Synthetic
uuuuauuguugcuaauauuucag

SEQ ID NO: 50970 - RNA, 24 nt, Artificial Sequence
  Synthetic
auuuuauuguugcuaauauuucag

SEQ ID NO: 50971 - RNA, 18 nt, Artificial Sequence
  Synthetic
ugauaacuuaaguuucag

SEQ ID NO: 50972 - RNA, 20 nt, Artificial Sequence
  Synthetic
ugugauaacuuaaguuucag

SEQ ID NO: 50973 - RNA, 21 nt, Artificial Sequence
  Synthetic
augugauaacuuaaguuucag

SEQ ID NO: 50974 - RNA, 22 nt, Artificial Sequence
  Synthetic
aaugugauaacuuaaguuucag

SEQ ID NO: 50975 - RNA, 24 nt, Artificial Sequence
  Synthetic
agaaugugauaacuuaaguuucag

SEQ ID NO: 50976 - RNA, 18 nt, Artificial Sequence
  Synthetic
augggaauucuguuucag

SEQ ID NO: 50977 - RNA, 19 nt, Artificial Sequence
  Synthetic
uaugggaauucuguuucag

SEQ ID NO: 50978 - RNA, 20 nt, Artificial Sequence
  Synthetic
cuaugggaauucuguuucag

SEQ ID NO: 50979 - RNA, 21 nt, Artificial Sequence
  Synthetic
acuaugggaauucuguuucag

SEQ ID NO: 50980 - RNA, 22 nt, Artificial Sequence
  Synthetic
uacuaugggaauucuguuucag

SEQ ID NO: 50981 - RNA, 23 nt, Artificial Sequence
  Synthetic
uuacuaugggaauucuguuucag

SEQ ID NO: 50982 - RNA, 24 nt, Artificial Sequence
  Synthetic
uuuacuaugggaauucuguuucag

SEQ ID NO: 50983 - RNA, 21 nt, Artificial Sequence
  Synthetic
aaacucauuaaaaauuuucag

SEQ ID NO: 50984 - RNA, 22 nt, Artificial Sequence
  Synthetic
caaacucauuaaaaauuuucag

SEQ ID NO: 50985 - RNA, 24 nt, Artificial Sequence
  Synthetic
ugcaaacucauuaaaaauuuucag

SEQ ID NO: 50986 - RNA, 20 nt, Artificial Sequence
  Synthetic
cggccucaucagauuuucag

SEQ ID NO: 50987 - RNA, 22 nt, Artificial Sequence
  Synthetic
ugcggccucaucagauuuucag

SEQ ID NO: 50988 - RNA, 23 nt, Artificial Sequence
  Synthetic
uugcggccucaucagauuuucag

SEQ ID NO: 50989 - RNA, 21 nt, Artificial Sequence
  Synthetic
augaauucuaacaguuuucag

SEQ ID NO: 50990 - RNA, 22 nt, Artificial Sequence
  Synthetic
uaugaauucuaacaguuuucag

SEQ ID NO: 50991 - RNA, 24 nt, Artificial Sequence
  Synthetic
uguaugaauucuaacaguuuucag

SEQ ID NO: 50992 - RNA, 22 nt, Artificial Sequence
  Synthetic
agacaaaauacacaaaaaagag

SEQ ID NO: 50993 - RNA, 23 nt, Artificial Sequence
  Synthetic
aagacaaaauacacaaaaaagag

SEQ ID NO: 50994 - RNA, 24 nt, Artificial Sequence
  Synthetic
caagacaaaauacacaaaaaagag

SEQ ID NO: 50995 - RNA, 21 nt, Artificial Sequence
  Synthetic
cuacuuaaaagggaaaaagag

SEQ ID NO: 50996 - RNA, 22 nt, Artificial Sequence
  Synthetic
ucuacuuaaaagggaaaaagag

SEQ ID NO: 50997 - RNA, 23 nt, Artificial Sequence
  Synthetic
aucuacuuaaaagggaaaaagag

SEQ ID NO: 50998 - RNA, 18 nt, Artificial Sequence
  Synthetic
agacauauuugaaaagag

SEQ ID NO: 50999 - RNA, 20 nt, Artificial Sequence
  Synthetic
ugagacauauuugaaaagag

SEQ ID NO: 51000 - RNA, 21 nt, Artificial Sequence
  Synthetic
uugagacauauuugaaaagag

SEQ ID NO: 51001 - RNA, 22 nt, Artificial Sequence
  Synthetic
uuugagacauauuugaaaagag

SEQ ID NO: 51002 - RNA, 23 nt, Artificial Sequence
  Synthetic
auuugagacauauuugaaaagag

SEQ ID NO: 51003 - RNA, 24 nt, Artificial Sequence
  Synthetic
aauuugagacauauuugaaaagag

SEQ ID NO: 51004 - RNA, 20 nt, Artificial Sequence
  Synthetic
uggcucuuguagacaaagag

SEQ ID NO: 51005 - RNA, 21 nt, Artificial Sequence
  Synthetic
auggcucuuguagacaaagag

SEQ ID NO: 51006 - RNA, 22 nt, Artificial Sequence
  Synthetic
cauggcucuuguagacaaagag

SEQ ID NO: 51007 - RNA, 23 nt, Artificial Sequence
  Synthetic
acauggcucuuguagacaaagag

SEQ ID NO: 51008 - RNA, 24 nt, Artificial Sequence
  Synthetic
cacauggcucuuguagacaaagag

SEQ ID NO: 51009 - RNA, 18 nt, Artificial Sequence
  Synthetic
aauguuuucuagaaagag

SEQ ID NO: 51010 - RNA, 20 nt, Artificial Sequence
  Synthetic
ugaauguuuucuagaaagag

SEQ ID NO: 51011 - RNA, 21 nt, Artificial Sequence
  Synthetic
augaauguuuucuagaaagag

SEQ ID NO: 51012 - RNA, 22 nt, Artificial Sequence
  Synthetic
aaugaauguuuucuagaaagag

SEQ ID NO: 51013 - RNA, 23 nt, Artificial Sequence
  Synthetic
uaaugaauguuuucuagaaagag

SEQ ID NO: 51014 - RNA, 24 nt, Artificial Sequence
  Synthetic
uuaaugaauguuuucuagaaagag

SEQ ID NO: 51015 - RNA, 18 nt, Artificial Sequence
  Synthetic
ccaaagguaggacaagag

SEQ ID NO: 51016 - RNA, 19 nt, Artificial Sequence
  Synthetic
uccaaagguaggacaagag

SEQ ID NO: 51017 - RNA, 20 nt, Artificial Sequence
  Synthetic
uuccaaagguaggacaagag

SEQ ID NO: 51018 - RNA, 21 nt, Artificial Sequence
  Synthetic
cuuccaaagguaggacaagag

SEQ ID NO: 51019 - RNA, 22 nt, Artificial Sequence
  Synthetic
ccuuccaaagguaggacaagag

SEQ ID NO: 51020 - RNA, 23 nt, Artificial Sequence
  Synthetic
accuuccaaagguaggacaagag

SEQ ID NO: 51021 - RNA, 24 nt, Artificial Sequence
  Synthetic
uaccuuccaaagguaggacaagag

SEQ ID NO: 51022 - RNA, 18 nt, Artificial Sequence
  Synthetic
agcuguugcacccaagag

SEQ ID NO: 51023 - RNA, 19 nt, Artificial Sequence
  Synthetic
uagcuguugcacccaagag

SEQ ID NO: 51024 - RNA, 20 nt, Artificial Sequence
  Synthetic
cuagcuguugcacccaagag

SEQ ID NO: 51025 - RNA, 21 nt, Artificial Sequence
  Synthetic
ccuagcuguugcacccaagag

SEQ ID NO: 51026 - RNA, 22 nt, Artificial Sequence
  Synthetic
cccuagcuguugcacccaagag

SEQ ID NO: 51027 - RNA, 23 nt, Artificial Sequence
  Synthetic
acccuagcuguugcacccaagag

SEQ ID NO: 51028 - RNA, 24 nt, Artificial Sequence
  Synthetic
uacccuagcuguugcacccaagag

SEQ ID NO: 51029 - RNA, 18 nt, Artificial Sequence
  Synthetic
aaaguguagaugcaagag

SEQ ID NO: 51030 - RNA, 19 nt, Artificial Sequence
  Synthetic
aaaaguguagaugcaagag

SEQ ID NO: 51031 - RNA, 20 nt, Artificial Sequence
  Synthetic
caaaaguguagaugcaagag

SEQ ID NO: 51032 - RNA, 21 nt, Artificial Sequence
  Synthetic
acaaaaguguagaugcaagag

SEQ ID NO: 51033 - RNA, 23 nt, Artificial Sequence
  Synthetic
ugacaaaaguguagaugcaagag

SEQ ID NO: 51034 - RNA, 24 nt, Artificial Sequence
  Synthetic
uugacaaaaguguagaugcaagag

SEQ ID NO: 51035 - RNA, 18 nt, Artificial Sequence
  Synthetic
acaucacaauugcaagag

SEQ ID NO: 51036 - RNA, 20 nt, Artificial Sequence
  Synthetic
ugacaucacaauugcaagag

SEQ ID NO: 51037 - RNA, 21 nt, Artificial Sequence
  Synthetic
augacaucacaauugcaagag

SEQ ID NO: 51038 - RNA, 22 nt, Artificial Sequence
  Synthetic
uaugacaucacaauugcaagag

SEQ ID NO: 51039 - RNA, 24 nt, Artificial Sequence
  Synthetic
uguaugacaucacaauugcaagag

SEQ ID NO: 51040 - RNA, 21 nt, Artificial Sequence
  Synthetic
cuaauaagggaaagagaagag

SEQ ID NO: 51041 - RNA, 24 nt, Artificial Sequence
  Synthetic
uggcuaauaagggaaagagaagag

SEQ ID NO: 51042 - RNA, 21 nt, Artificial Sequence
  Synthetic
agaaggcaguggggagaagag

SEQ ID NO: 51043 - RNA, 23 nt, Artificial Sequence
  Synthetic
cgagaaggcaguggggagaagag

SEQ ID NO: 51044 - RNA, 24 nt, Artificial Sequence
  Synthetic
ccgagaaggcaguggggagaagag

SEQ ID NO: 51045 - RNA, 19 nt, Artificial Sequence
  Synthetic
agaauuagugauggaagag

SEQ ID NO: 51046 - RNA, 20 nt, Artificial Sequence
  Synthetic
cagaauuagugauggaagag

SEQ ID NO: 51047 - RNA, 21 nt, Artificial Sequence
  Synthetic
ucagaauuagugauggaagag

SEQ ID NO: 51048 - RNA, 22 nt, Artificial Sequence
  Synthetic
aucagaauuagugauggaagag

SEQ ID NO: 51049 - RNA, 23 nt, Artificial Sequence
  Synthetic
caucagaauuagugauggaagag

SEQ ID NO: 51050 - RNA, 24 nt, Artificial Sequence
  Synthetic
ucaucagaauuagugauggaagag

SEQ ID NO: 51051 - RNA, 18 nt, Artificial Sequence
  Synthetic
aauaaucuaguugaagag

SEQ ID NO: 51052 - RNA, 20 nt, Artificial Sequence
  Synthetic
agaauaaucuaguugaagag

SEQ ID NO: 51053 - RNA, 21 nt, Artificial Sequence
  Synthetic
cagaauaaucuaguugaagag

SEQ ID NO: 51054 - RNA, 22 nt, Artificial Sequence
  Synthetic
ucagaauaaucuaguugaagag

SEQ ID NO: 51055 - RNA, 23 nt, Artificial Sequence
  Synthetic
uucagaauaaucuaguugaagag

SEQ ID NO: 51056 - RNA, 24 nt, Artificial Sequence
  Synthetic
uuucagaauaaucuaguugaagag

SEQ ID NO: 51057 - RNA, 18 nt, Artificial Sequence
  Synthetic
ugggugaguaaauaagag

SEQ ID NO: 51058 - RNA, 19 nt, Artificial Sequence
  Synthetic
cugggugaguaaauaagag

SEQ ID NO: 51059 - RNA, 20 nt, Artificial Sequence
  Synthetic
ccugggugaguaaauaagag

SEQ ID NO: 51060 - RNA, 22 nt, Artificial Sequence
  Synthetic
ugccugggugaguaaauaagag

SEQ ID NO: 51061 - RNA, 23 nt, Artificial Sequence
  Synthetic
augccugggugaguaaauaagag

SEQ ID NO: 51062 - RNA, 24 nt, Artificial Sequence
  Synthetic
aaugccugggugaguaaauaagag

SEQ ID NO: 51063 - RNA, 19 nt, Artificial Sequence
  Synthetic
ugaggaaacugaauaagag

SEQ ID NO: 51064 - RNA, 20 nt, Artificial Sequence
  Synthetic
uugaggaaacugaauaagag

SEQ ID NO: 51065 - RNA, 22 nt, Artificial Sequence
  Synthetic
aguugaggaaacugaauaagag

SEQ ID NO: 51066 - RNA, 23 nt, Artificial Sequence
  Synthetic
caguugaggaaacugaauaagag

SEQ ID NO: 51067 - RNA, 18 nt, Artificial Sequence
  Synthetic
uaaauggagaccuaagag

SEQ ID NO: 51068 - RNA, 19 nt, Artificial Sequence
  Synthetic
cuaaauggagaccuaagag

SEQ ID NO: 51069 - RNA, 20 nt, Artificial Sequence
  Synthetic
ucuaaauggagaccuaagag

SEQ ID NO: 51070 - RNA, 21 nt, Artificial Sequence
  Synthetic
aucuaaauggagaccuaagag

SEQ ID NO: 51071 - RNA, 22 nt, Artificial Sequence
  Synthetic
caucuaaauggagaccuaagag

SEQ ID NO: 51072 - RNA, 23 nt, Artificial Sequence
  Synthetic
acaucuaaauggagaccuaagag

SEQ ID NO: 51073 - RNA, 18 nt, Artificial Sequence
  Synthetic
caaccagggaccuaagag

SEQ ID NO: 51074 - RNA, 19 nt, Artificial Sequence
  Synthetic
ccaaccagggaccuaagag

SEQ ID NO: 51075 - RNA, 20 nt, Artificial Sequence
  Synthetic
uccaaccagggaccuaagag

SEQ ID NO: 51076 - RNA, 21 nt, Artificial Sequence
  Synthetic
cuccaaccagggaccuaagag

SEQ ID NO: 51077 - RNA, 22 nt, Artificial Sequence
  Synthetic
acuccaaccagggaccuaagag

SEQ ID NO: 51078 - RNA, 23 nt, Artificial Sequence
  Synthetic
cacuccaaccagggaccuaagag

SEQ ID NO: 51079 - RNA, 18 nt, Artificial Sequence
  Synthetic
uuuuucacaguguaagag

SEQ ID NO: 51080 - RNA, 19 nt, Artificial Sequence
  Synthetic
cuuuuucacaguguaagag

SEQ ID NO: 51081 - RNA, 23 nt, Artificial Sequence
  Synthetic
ugggcuuuuucacaguguaagag

SEQ ID NO: 51082 - RNA, 24 nt, Artificial Sequence
  Synthetic
uugggcuuuuucacaguguaagag

SEQ ID NO: 51083 - RNA, 19 nt, Artificial Sequence
  Synthetic
aggacucuaacauuaagag

SEQ ID NO: 51084 - RNA, 20 nt, Artificial Sequence
  Synthetic
aaggacucuaacauuaagag

SEQ ID NO: 51085 - RNA, 21 nt, Artificial Sequence
  Synthetic
uaaggacucuaacauuaagag

SEQ ID NO: 51086 - RNA, 22 nt, Artificial Sequence
  Synthetic
cuaaggacucuaacauuaagag

SEQ ID NO: 51087 - RNA, 23 nt, Artificial Sequence
  Synthetic
acuaaggacucuaacauuaagag

SEQ ID NO: 51088 - RNA, 18 nt, Artificial Sequence
  Synthetic
cuuucugaauaaacagag

SEQ ID NO: 51089 - RNA, 19 nt, Artificial Sequence
  Synthetic
ucuuucugaauaaacagag

SEQ ID NO: 51090 - RNA, 20 nt, Artificial Sequence
  Synthetic
aucuuucugaauaaacagag

SEQ ID NO: 51091 - RNA, 22 nt, Artificial Sequence
  Synthetic
agaucuuucugaauaaacagag

SEQ ID NO: 51092 - RNA, 23 nt, Artificial Sequence
  Synthetic
cagaucuuucugaauaaacagag

SEQ ID NO: 51093 - RNA, 24 nt, Artificial Sequence
  Synthetic
acagaucuuucugaauaaacagag

SEQ ID NO: 51094 - RNA, 18 nt, Artificial Sequence
  Synthetic
ucgggcguugucacagag

SEQ ID NO: 51095 - RNA, 21 nt, Artificial Sequence
  Synthetic
cggucgggcguugucacagag

SEQ ID NO: 51096 - RNA, 23 nt, Artificial Sequence
  Synthetic
ugcggucgggcguugucacagag

SEQ ID NO: 51097 - RNA, 18 nt, Artificial Sequence
  Synthetic
uucccuaaagauacagag

SEQ ID NO: 51098 - RNA, 19 nt, Artificial Sequence
  Synthetic
cuucccuaaagauacagag

SEQ ID NO: 51099 - RNA, 20 nt, Artificial Sequence
  Synthetic
acuucccuaaagauacagag

SEQ ID NO: 51100 - RNA, 24 nt, Artificial Sequence
  Synthetic
agggacuucccuaaagauacagag

SEQ ID NO: 51101 - RNA, 18 nt, Artificial Sequence
  Synthetic
ucuuccgcuuugccagag

SEQ ID NO: 51102 - RNA, 19 nt, Artificial Sequence
  Synthetic
uucuuccgcuuugccagag

SEQ ID NO: 51103 - RNA, 20 nt, Artificial Sequence
  Synthetic
cuucuuccgcuuugccagag

SEQ ID NO: 51104 - RNA, 22 nt, Artificial Sequence
  Synthetic
agcuucuuccgcuuugccagag

SEQ ID NO: 51105 - RNA, 23 nt, Artificial Sequence
  Synthetic
uagcuucuuccgcuuugccagag

SEQ ID NO: 51106 - RNA, 24 nt, Artificial Sequence
  Synthetic
cuagcuucuuccgcuuugccagag

SEQ ID NO: 51107 - RNA, 18 nt, Artificial Sequence
  Synthetic
aaguaaguaacuccagag

SEQ ID NO: 51108 - RNA, 19 nt, Artificial Sequence
  Synthetic
caaguaaguaacuccagag

SEQ ID NO: 51109 - RNA, 20 nt, Artificial Sequence
  Synthetic
ucaaguaaguaacuccagag

SEQ ID NO: 51110 - RNA, 21 nt, Artificial Sequence
  Synthetic
uucaaguaaguaacuccagag

SEQ ID NO: 51111 - RNA, 22 nt, Artificial Sequence
  Synthetic
cuucaaguaaguaacuccagag

SEQ ID NO: 51112 - RNA, 23 nt, Artificial Sequence
  Synthetic
ucuucaaguaaguaacuccagag

SEQ ID NO: 51113 - RNA, 24 nt, Artificial Sequence
  Synthetic
cucuucaaguaaguaacuccagag

SEQ ID NO: 51114 - RNA, 18 nt, Artificial Sequence
  Synthetic
uagcuuacugcagcagag

SEQ ID NO: 51115 - RNA, 19 nt, Artificial Sequence
  Synthetic
auagcuuacugcagcagag

SEQ ID NO: 51116 - RNA, 20 nt, Artificial Sequence
  Synthetic
uauagcuuacugcagcagag

SEQ ID NO: 51117 - RNA, 21 nt, Artificial Sequence
  Synthetic
auauagcuuacugcagcagag

SEQ ID NO: 51118 - RNA, 22 nt, Artificial Sequence
  Synthetic
ugaaacuucugaaaaggcagag

SEQ ID NO: 51119 - RNA, 23 nt, Artificial Sequence
  Synthetic
uugaaacuucugaaaaggcagag

SEQ ID NO: 51120 - RNA, 24 nt, Artificial Sequence
  Synthetic
uuugaaacuucugaaaaggcagag

SEQ ID NO: 51121 - RNA, 18 nt, Artificial Sequence
  Synthetic
uugaacuucaaggcagag

SEQ ID NO: 51122 - RNA, 19 nt, Artificial Sequence
  Synthetic
uuugaacuucaaggcagag

SEQ ID NO: 51123 - RNA, 20 nt, Artificial Sequence
  Synthetic
uuuugaacuucaaggcagag

SEQ ID NO: 51124 - RNA, 21 nt, Artificial Sequence
  Synthetic
uuuuugaacuucaaggcagag

SEQ ID NO: 51125 - RNA, 22 nt, Artificial Sequence
  Synthetic
uuuuuugaacuucaaggcagag

SEQ ID NO: 51126 - RNA, 23 nt, Artificial Sequence
  Synthetic
uuuuuuugaacuucaaggcagag

SEQ ID NO: 51127 - RNA, 24 nt, Artificial Sequence
  Synthetic
uuuuuuuugaacuucaaggcagag

SEQ ID NO: 51128 - RNA, 18 nt, Artificial Sequence
  Synthetic
cuacugcagaaggcagag

SEQ ID NO: 51129 - RNA, 20 nt, Artificial Sequence
  Synthetic
agcuacugcagaaggcagag

SEQ ID NO: 51130 - RNA, 21 nt, Artificial Sequence
  Synthetic
cagcuacugcagaaggcagag

SEQ ID NO: 51131 - RNA, 22 nt, Artificial Sequence
  Synthetic
ccagcuacugcagaaggcagag

SEQ ID NO: 51132 - RNA, 23 nt, Artificial Sequence
  Synthetic
accagcuacugcagaaggcagag

SEQ ID NO: 51133 - RNA, 24 nt, Artificial Sequence
  Synthetic
caccagcuacugcagaaggcagag

SEQ ID NO: 51134 - RNA, 18 nt, Artificial Sequence
  Synthetic
ucaugcaugcaugcagag

SEQ ID NO: 51135 - RNA, 19 nt, Artificial Sequence
  Synthetic
uucaugcaugcaugcagag

SEQ ID NO: 51136 - RNA, 20 nt, Artificial Sequence
  Synthetic
cuucaugcaugcaugcagag

SEQ ID NO: 51137 - RNA, 21 nt, Artificial Sequence
  Synthetic
acuucaugcaugcaugcagag

SEQ ID NO: 51138 - RNA, 23 nt, Artificial Sequence
  Synthetic
ugacuucaugcaugcaugcagag

SEQ ID NO: 51139 - RNA, 24 nt, Artificial Sequence
  Synthetic
cugacuucaugcaugcaugcagag

SEQ ID NO: 51140 - RNA, 18 nt, Artificial Sequence
  Synthetic
cuccuccuuugugcagag

SEQ ID NO: 51141 - RNA, 19 nt, Artificial Sequence
  Synthetic
ucuccuccuuugugcagag

SEQ ID NO: 51142 - RNA, 20 nt, Artificial Sequence
  Synthetic
uucuccuccuuugugcagag

SEQ ID NO: 51143 - RNA, 21 nt, Artificial Sequence
  Synthetic
uuucuccuccuuugugcagag

SEQ ID NO: 51144 - RNA, 22 nt, Artificial Sequence
  Synthetic
auuucuccuccuuugugcagag

SEQ ID NO: 51145 - RNA, 23 nt, Artificial Sequence
  Synthetic
uauuucuccuccuuugugcagag

SEQ ID NO: 51146 - RNA, 24 nt, Artificial Sequence
  Synthetic
auauuucuccuccuuugugcagag

SEQ ID NO: 51147 - RNA, 18 nt, Artificial Sequence
  Synthetic
aguugaacgauugcagag

SEQ ID NO: 51148 - RNA, 19 nt, Artificial Sequence
  Synthetic
aaguugaacgauugcagag

SEQ ID NO: 51149 - RNA, 20 nt, Artificial Sequence
  Synthetic
uaaguugaacgauugcagag

SEQ ID NO: 51150 - RNA, 21 nt, Artificial Sequence
  Synthetic
uuaaguugaacgauugcagag

SEQ ID NO: 51151 - RNA, 23 nt, Artificial Sequence
  Synthetic
uguuaaguugaacgauugcagag

SEQ ID NO: 51152 - RNA, 18 nt, Artificial Sequence
  Synthetic
aagauuaaccaaucagag

SEQ ID NO: 51153 - RNA, 19 nt, Artificial Sequence
  Synthetic
aaagauuaaccaaucagag

SEQ ID NO: 51154 - RNA, 20 nt, Artificial Sequence
  Synthetic
caaagauuaaccaaucagag

SEQ ID NO: 51155 - RNA, 21 nt, Artificial Sequence
  Synthetic
ccaaagauuaaccaaucagag

SEQ ID NO: 51156 - RNA, 22 nt, Artificial Sequence
  Synthetic
accaaagauuaaccaaucagag

SEQ ID NO: 51157 - RNA, 23 nt, Artificial Sequence
  Synthetic
caccaaagauuaaccaaucagag

SEQ ID NO: 51158 - RNA, 24 nt, Artificial Sequence
  Synthetic
ccaccaaagauuaaccaaucagag

SEQ ID NO: 51159 - RNA, 21 nt, Artificial Sequence
  Synthetic
aagaauucaucaagaucagag

SEQ ID NO: 51160 - RNA, 22 nt, Artificial Sequence
  Synthetic
aaagaauucaucaagaucagag

SEQ ID NO: 51161 - RNA, 24 nt, Artificial Sequence
  Synthetic
agaaagaauucaucaagaucagag

SEQ ID NO: 51162 - RNA, 18 nt, Artificial Sequence
  Synthetic
uaaaugaguagaucagag

SEQ ID NO: 51163 - RNA, 19 nt, Artificial Sequence
  Synthetic
uuaaaugaguagaucagag

SEQ ID NO: 51164 - RNA, 20 nt, Artificial Sequence
  Synthetic
cuuaaaugaguagaucagag

SEQ ID NO: 51165 - RNA, 21 nt, Artificial Sequence
  Synthetic
acuuaaaugaguagaucagag

SEQ ID NO: 51166 - RNA, 23 nt, Artificial Sequence
  Synthetic
ugacuuaaaugaguagaucagag

SEQ ID NO: 51167 - RNA, 24 nt, Artificial Sequence
  Synthetic
uugacuuaaaugaguagaucagag

SEQ ID NO: 51168 - RNA, 18 nt, Artificial Sequence
  Synthetic
acaaugaauauaucagag

SEQ ID NO: 51169 - RNA, 19 nt, Artificial Sequence
  Synthetic
uacaaugaauauaucagag

SEQ ID NO: 51170 - RNA, 21 nt, Artificial Sequence
  Synthetic
aguacaaugaauauaucagag

SEQ ID NO: 51171 - RNA, 22 nt, Artificial Sequence
  Synthetic
uaguacaaugaauauaucagag

SEQ ID NO: 51172 - RNA, 23 nt, Artificial Sequence
  Synthetic
uuaguacaaugaauauaucagag

SEQ ID NO: 51173 - RNA, 24 nt, Artificial Sequence
  Synthetic
uuuaguacaaugaauauaucagag

SEQ ID NO: 51174 - RNA, 18 nt, Artificial Sequence
  Synthetic
acuuaaaagaauucagag

SEQ ID NO: 51175 - RNA, 20 nt, Artificial Sequence
  Synthetic
ugacuuaaaagaauucagag

SEQ ID NO: 51176 - RNA, 22 nt, Artificial Sequence
  Synthetic
agugacuuaaaagaauucagag

SEQ ID NO: 51177 - RNA, 23 nt, Artificial Sequence
  Synthetic
cagugacuuaaaagaauucagag

SEQ ID NO: 51178 - RNA, 24 nt, Artificial Sequence
  Synthetic
acagugacuuaaaagaauucagag

SEQ ID NO: 51179 - RNA, 18 nt, Artificial Sequence
  Synthetic
aaauuauucacuucagag

SEQ ID NO: 51180 - RNA, 19 nt, Artificial Sequence
  Synthetic
aaaauuauucacuucagag

SEQ ID NO: 51181 - RNA, 20 nt, Artificial Sequence
  Synthetic
aaaaauuauucacuucagag

SEQ ID NO: 51182 - RNA, 21 nt, Artificial Sequence
  Synthetic
aaaaaauuauucacuucagag

SEQ ID NO: 51183 - RNA, 22 nt, Artificial Sequence
  Synthetic
uaaaaaauuauucacuucagag

SEQ ID NO: 51184 - RNA, 23 nt, Artificial Sequence
  Synthetic
uuaaaaaauuauucacuucagag

SEQ ID NO: 51185 - RNA, 24 nt, Artificial Sequence
  Synthetic
auuaaaaaauuauucacuucagag

SEQ ID NO: 51186 - RNA, 21 nt, Artificial Sequence
  Synthetic
uuaaauuaauuaucuucagag

SEQ ID NO: 51187 - RNA, 22 nt, Artificial Sequence
  Synthetic
uuuaaauuaauuaucuucagag

SEQ ID NO: 51188 - RNA, 23 nt, Artificial Sequence
  Synthetic
uuuuaaauuaauuaucuucagag

SEQ ID NO: 51189 - RNA, 24 nt, Artificial Sequence
  Synthetic
uuuuuaaauuaauuaucuucagag

SEQ ID NO: 51190 - RNA, 21 nt, Artificial Sequence
  Synthetic
ugaaaagaacauauuucagag

SEQ ID NO: 51191 - RNA, 22 nt, Artificial Sequence
  Synthetic
uugaaaagaacauauuucagag

SEQ ID NO: 51192 - RNA, 23 nt, Artificial Sequence
  Synthetic
uuugaaaagaacauauuucagag

SEQ ID NO: 51193 - RNA, 24 nt, Artificial Sequence
  Synthetic
auuugaaaagaacauauuucagag

SEQ ID NO: 51194 - RNA, 21 nt, Artificial Sequence
  Synthetic
aaaagaggcauacacagagag

SEQ ID NO: 51195 - RNA, 24 nt, Artificial Sequence
  Synthetic
aggaaaagaggcauacacagagag

SEQ ID NO: 51196 - RNA, 18 nt, Artificial Sequence
  Synthetic
ccugagaacuacagagag

SEQ ID NO: 51197 - RNA, 19 nt, Artificial Sequence
  Synthetic
cccugagaacuacagagag

SEQ ID NO: 51198 - RNA, 20 nt, Artificial Sequence
  Synthetic
ucccugagaacuacagagag

SEQ ID NO: 51199 - RNA, 21 nt, Artificial Sequence
  Synthetic
uucccugagaacuacagagag

SEQ ID NO: 51200 - RNA, 22 nt, Artificial Sequence
  Synthetic
uuucccugagaacuacagagag

SEQ ID NO: 51201 - RNA, 23 nt, Artificial Sequence
  Synthetic
auuucccugagaacuacagagag

SEQ ID NO: 51202 - RNA, 24 nt, Artificial Sequence
  Synthetic
aauuucccugagaacuacagagag

SEQ ID NO: 51203 - RNA, 18 nt, Artificial Sequence
  Synthetic
auucuagcuuacagagag

SEQ ID NO: 51204 - RNA, 19 nt, Artificial Sequence
  Synthetic
aauucuagcuuacagagag

SEQ ID NO: 51205 - RNA, 21 nt, Artificial Sequence
  Synthetic
agaauucuagcuuacagagag

SEQ ID NO: 51206 - RNA, 22 nt, Artificial Sequence
  Synthetic
aagaauucuagcuuacagagag

SEQ ID NO: 51207 - RNA, 23 nt, Artificial Sequence
  Synthetic
aaagaauucuagcuuacagagag

SEQ ID NO: 51208 - RNA, 24 nt, Artificial Sequence
  Synthetic
uaaagaauucuagcuuacagagag

SEQ ID NO: 51209 - RNA, 21 nt, Artificial Sequence
  Synthetic
caagauaaaaaugucagagag

SEQ ID NO: 51210 - RNA, 22 nt, Artificial Sequence
  Synthetic
ccaagauaaaaaugucagagag

SEQ ID NO: 51211 - RNA, 24 nt, Artificial Sequence
  Synthetic
agccaagauaaaaaugucagagag

SEQ ID NO: 51212 - RNA, 20 nt, Artificial Sequence
  Synthetic
uggucuguguaaagagagag

SEQ ID NO: 51213 - RNA, 21 nt, Artificial Sequence
  Synthetic
uuggucuguguaaagagagag

SEQ ID NO: 51214 - RNA, 22 nt, Artificial Sequence
  Synthetic
uuuggucuguguaaagagagag

SEQ ID NO: 51215 - RNA, 23 nt, Artificial Sequence
  Synthetic
auuuggucuguguaaagagagag

SEQ ID NO: 51216 - RNA, 24 nt, Artificial Sequence
  Synthetic
uauuuggucuguguaaagagagag

SEQ ID NO: 51217 - RNA, 18 nt, Artificial Sequence
  Synthetic
aaucuagggaagagagag

SEQ ID NO: 51218 - RNA, 19 nt, Artificial Sequence
  Synthetic
caaucuagggaagagagag

SEQ ID NO: 51219 - RNA, 21 nt, Artificial Sequence
  Synthetic
agcaaucuagggaagagagag

SEQ ID NO: 51220 - RNA, 22 nt, Artificial Sequence
  Synthetic
aagcaaucuagggaagagagag

SEQ ID NO: 51221 - RNA, 23 nt, Artificial Sequence
  Synthetic
aaagcaaucuagggaagagagag

SEQ ID NO: 51222 - RNA, 24 nt, Artificial Sequence
  Synthetic
uaaagcaaucuagggaagagagag

SEQ ID NO: 51223 - RNA, 23 nt, Artificial Sequence
  Synthetic
aggcagcaggauugaggagagag

SEQ ID NO: 51224 - RNA, 24 nt, Artificial Sequence
  Synthetic
aaggcagcaggauugaggagagag

SEQ ID NO: 51225 - RNA, 21 nt, Artificial Sequence
  Synthetic
cucugggagugagggagagag

SEQ ID NO: 51226 - RNA, 23 nt, Artificial Sequence
  Synthetic
cgcucugggagugagggagagag

SEQ ID NO: 51227 - RNA, 24 nt, Artificial Sequence
  Synthetic
acgcucugggagugagggagagag

SEQ ID NO: 51228 - RNA, 18 nt, Artificial Sequence
  Synthetic
uuucagcuuaauagagag

SEQ ID NO: 51229 - RNA, 19 nt, Artificial Sequence
  Synthetic
auuucagcuuaauagagag

SEQ ID NO: 51230 - RNA, 20 nt, Artificial Sequence
  Synthetic
uauuucagcuuaauagagag

SEQ ID NO: 51231 - RNA, 21 nt, Artificial Sequence
  Synthetic
auauuucagcuuaauagagag

SEQ ID NO: 51232 - RNA, 22 nt, Artificial Sequence
  Synthetic
uauauuucagcuuaauagagag

SEQ ID NO: 51233 - RNA, 24 nt, Artificial Sequence
  Synthetic
cguauauuucagcuuaauagagag

SEQ ID NO: 51234 - RNA, 21 nt, Artificial Sequence
  Synthetic
ucuuccucugagacuagagag

SEQ ID NO: 51235 - RNA, 22 nt, Artificial Sequence
  Synthetic
cucuuccucugagacuagagag

SEQ ID NO: 51236 - RNA, 23 nt, Artificial Sequence
  Synthetic
ccucuuccucugagacuagagag

SEQ ID NO: 51237 - RNA, 19 nt, Artificial Sequence
  Synthetic
ugcaacaggugaaggagag

SEQ ID NO: 51238 - RNA, 20 nt, Artificial Sequence
  Synthetic
augcaacaggugaaggagag

SEQ ID NO: 51239 - RNA, 21 nt, Artificial Sequence
  Synthetic
aaugcaacaggugaaggagag

SEQ ID NO: 51240 - RNA, 23 nt, Artificial Sequence
  Synthetic
ugaaugcaacaggugaaggagag

SEQ ID NO: 51241 - RNA, 24 nt, Artificial Sequence
  Synthetic
augaaugcaacaggugaaggagag

SEQ ID NO: 51242 - RNA, 18 nt, Artificial Sequence
  Synthetic
aaccgaaaauagggagag

SEQ ID NO: 51243 - RNA, 19 nt, Artificial Sequence
  Synthetic
aaaccgaaaauagggagag

SEQ ID NO: 51244 - RNA, 21 nt, Artificial Sequence
  Synthetic
agaaaccgaaaauagggagag

SEQ ID NO: 51245 - RNA, 23 nt, Artificial Sequence
  Synthetic
ugagaaaccgaaaauagggagag

SEQ ID NO: 51246 - RNA, 24 nt, Artificial Sequence
  Synthetic
cugagaaaccgaaaauagggagag

SEQ ID NO: 51247 - RNA, 19 nt, Artificial Sequence
  Synthetic
ugggaucagaaugggagag

SEQ ID NO: 51248 - RNA, 20 nt, Artificial Sequence
  Synthetic
cugggaucagaaugggagag

SEQ ID NO: 51249 - RNA, 23 nt, Artificial Sequence
  Synthetic
uggcugggaucagaaugggagag

SEQ ID NO: 51250 - RNA, 18 nt, Artificial Sequence
  Synthetic
cagaucaauggaugagag

SEQ ID NO: 51251 - RNA, 20 nt, Artificial Sequence
  Synthetic
agcagaucaauggaugagag

SEQ ID NO: 51252 - RNA, 21 nt, Artificial Sequence
  Synthetic
cagcagaucaauggaugagag

SEQ ID NO: 51253 - RNA, 22 nt, Artificial Sequence
  Synthetic
ucagcagaucaauggaugagag

SEQ ID NO: 51254 - RNA, 23 nt, Artificial Sequence
  Synthetic
aucagcagaucaauggaugagag

SEQ ID NO: 51255 - RNA, 24 nt, Artificial Sequence
  Synthetic
caucagcagaucaauggaugagag

SEQ ID NO: 51256 - RNA, 18 nt, Artificial Sequence
  Synthetic
aagaauucagggugagag

SEQ ID NO: 51257 - RNA, 19 nt, Artificial Sequence
  Synthetic
aaagaauucagggugagag

SEQ ID NO: 51258 - RNA, 20 nt, Artificial Sequence
  Synthetic
aaaagaauucagggugagag

SEQ ID NO: 51259 - RNA, 23 nt, Artificial Sequence
  Synthetic
aggaaaagaauucagggugagag

SEQ ID NO: 51260 - RNA, 24 nt, Artificial Sequence
  Synthetic
aaggaaaagaauucagggugagag

SEQ ID NO: 51261 - RNA, 18 nt, Artificial Sequence
  Synthetic
augcuuaguaugugagag

SEQ ID NO: 51262 - RNA, 19 nt, Artificial Sequence
  Synthetic
aaugcuuaguaugugagag

SEQ ID NO: 51263 - RNA, 20 nt, Artificial Sequence
  Synthetic
aaaugcuuaguaugugagag

SEQ ID NO: 51264 - RNA, 21 nt, Artificial Sequence
  Synthetic
aaaaugcuuaguaugugagag

SEQ ID NO: 51265 - RNA, 22 nt, Artificial Sequence
  Synthetic
uaaaaugcuuaguaugugagag

SEQ ID NO: 51266 - RNA, 23 nt, Artificial Sequence
  Synthetic
uuaaaaugcuuaguaugugagag

SEQ ID NO: 51267 - RNA, 24 nt, Artificial Sequence
  Synthetic
cuuaaaaugcuuaguaugugagag

SEQ ID NO: 51268 - RNA, 18 nt, Artificial Sequence
  Synthetic
uaagcagcuauuugagag

SEQ ID NO: 51269 - RNA, 19 nt, Artificial Sequence
  Synthetic
cuaagcagcuauuugagag

SEQ ID NO: 51270 - RNA, 20 nt, Artificial Sequence
  Synthetic
ucuaagcagcuauuugagag

SEQ ID NO: 51271 - RNA, 21 nt, Artificial Sequence
  Synthetic
uucuaagcagcuauuugagag

SEQ ID NO: 51272 - RNA, 22 nt, Artificial Sequence
  Synthetic
auucuaagcagcuauuugagag

SEQ ID NO: 51273 - RNA, 23 nt, Artificial Sequence
  Synthetic
aauucuaagcagcuauuugagag

SEQ ID NO: 51274 - RNA, 24 nt, Artificial Sequence
  Synthetic
aaauucuaagcagcuauuugagag

SEQ ID NO: 51275 - RNA, 18 nt, Artificial Sequence
  Synthetic
uuuuacaguaaaauagag

SEQ ID NO: 51276 - RNA, 19 nt, Artificial Sequence
  Synthetic
cuuuuacaguaaaauagag

SEQ ID NO: 51277 - RNA, 21 nt, Artificial Sequence
  Synthetic
agcuuuuacaguaaaauagag

SEQ ID NO: 51278 - RNA, 22 nt, Artificial Sequence
  Synthetic
aagcuuuuacaguaaaauagag

SEQ ID NO: 51279 - RNA, 23 nt, Artificial Sequence
  Synthetic
aaagcuuuuacaguaaaauagag

SEQ ID NO: 51280 - RNA, 24 nt, Artificial Sequence
  Synthetic
uaaagcuuuuacaguaaaauagag

SEQ ID NO: 51281 - RNA, 18 nt, Artificial Sequence
  Synthetic
uccuuuaucuuaauagag

SEQ ID NO: 51282 - RNA, 20 nt, Artificial Sequence
  Synthetic
uguccuuuaucuuaauagag

SEQ ID NO: 51283 - RNA, 21 nt, Artificial Sequence
  Synthetic
uuguccuuuaucuuaauagag

SEQ ID NO: 51284 - RNA, 23 nt, Artificial Sequence
  Synthetic
aguuguccuuuaucuuaauagag

SEQ ID NO: 51285 - RNA, 24 nt, Artificial Sequence
  Synthetic
aaguuguccuuuaucuuaauagag

SEQ ID NO: 51286 - RNA, 18 nt, Artificial Sequence
  Synthetic
uauguguugaccauagag

SEQ ID NO: 51287 - RNA, 20 nt, Artificial Sequence
  Synthetic
uguauguguugaccauagag

SEQ ID NO: 51288 - RNA, 21 nt, Artificial Sequence
  Synthetic
uuguauguguugaccauagag

SEQ ID NO: 51289 - RNA, 22 nt, Artificial Sequence
  Synthetic
uuuguauguguugaccauagag

SEQ ID NO: 51290 - RNA, 24 nt, Artificial Sequence
  Synthetic
uguuuguauguguugaccauagag

SEQ ID NO: 51291 - RNA, 19 nt, Artificial Sequence
  Synthetic
uggacugaaauggauagag

SEQ ID NO: 51292 - RNA, 20 nt, Artificial Sequence
  Synthetic
auggacugaaauggauagag

SEQ ID NO: 51293 - RNA, 22 nt, Artificial Sequence
  Synthetic
agauggacugaaauggauagag

SEQ ID NO: 51294 - RNA, 23 nt, Artificial Sequence
  Synthetic
aagauggacugaaauggauagag

SEQ ID NO: 51295 - RNA, 24 nt, Artificial Sequence
  Synthetic
aaagauggacugaaauggauagag

SEQ ID NO: 51296 - RNA, 18 nt, Artificial Sequence
  Synthetic
aauauggaguggauagag

SEQ ID NO: 51297 - RNA, 20 nt, Artificial Sequence
  Synthetic
agaauauggaguggauagag

SEQ ID NO: 51298 - RNA, 21 nt, Artificial Sequence
  Synthetic
aagaauauggaguggauagag

SEQ ID NO: 51299 - RNA, 23 nt, Artificial Sequence
  Synthetic
ugaagaauauggaguggauagag

SEQ ID NO: 51300 - RNA, 24 nt, Artificial Sequence
  Synthetic
uugaagaauauggaguggauagag

SEQ ID NO: 51301 - RNA, 18 nt, Artificial Sequence
  Synthetic
uucauaacuuguauagag

SEQ ID NO: 51302 - RNA, 19 nt, Artificial Sequence
  Synthetic
cuucauaacuuguauagag

SEQ ID NO: 51303 - RNA, 20 nt, Artificial Sequence
  Synthetic
acuucauaacuuguauagag

SEQ ID NO: 51304 - RNA, 21 nt, Artificial Sequence
  Synthetic
cacuucauaacuuguauagag

SEQ ID NO: 51305 - RNA, 22 nt, Artificial Sequence
  Synthetic
ccacuucauaacuuguauagag

SEQ ID NO: 51306 - RNA, 23 nt, Artificial Sequence
  Synthetic
uccacuucauaacuuguauagag

SEQ ID NO: 51307 - RNA, 24 nt, Artificial Sequence
  Synthetic
uuccacuucauaacuuguauagag

SEQ ID NO: 51308 - RNA, 21 nt, Artificial Sequence
  Synthetic
caaccuuguguuuuuauagag

SEQ ID NO: 51309 - RNA, 22 nt, Artificial Sequence
  Synthetic
ucaaccuuguguuuuuauagag

SEQ ID NO: 51310 - RNA, 23 nt, Artificial Sequence
  Synthetic
uucaaccuuguguuuuuauagag

SEQ ID NO: 51311 - RNA, 24 nt, Artificial Sequence
  Synthetic
auucaaccuuguguuuuuauagag

SEQ ID NO: 51312 - RNA, 18 nt, Artificial Sequence
  Synthetic
aauacguaauaccuagag

SEQ ID NO: 51313 - RNA, 20 nt, Artificial Sequence
  Synthetic
ugaauacguaauaccuagag

SEQ ID NO: 51314 - RNA, 21 nt, Artificial Sequence
  Synthetic
cugaauacguaauaccuagag

SEQ ID NO: 51315 - RNA, 22 nt, Artificial Sequence
  Synthetic
acugaauacguaauaccuagag

SEQ ID NO: 51316 - RNA, 23 nt, Artificial Sequence
  Synthetic
cacugaauacguaauaccuagag

SEQ ID NO: 51317 - RNA, 24 nt, Artificial Sequence
  Synthetic
ccacugaauacguaauaccuagag

SEQ ID NO: 51318 - RNA, 19 nt, Artificial Sequence
  Synthetic
agcuaaggcagagcuagag

SEQ ID NO: 51319 - RNA, 20 nt, Artificial Sequence
  Synthetic
uagcuaaggcagagcuagag

SEQ ID NO: 51320 - RNA, 21 nt, Artificial Sequence
  Synthetic
cuagcuaaggcagagcuagag

SEQ ID NO: 51321 - RNA, 22 nt, Artificial Sequence
  Synthetic
acuagcuaaggcagagcuagag

SEQ ID NO: 51322 - RNA, 23 nt, Artificial Sequence
  Synthetic
cacuagcuaaggcagagcuagag

SEQ ID NO: 51323 - RNA, 24 nt, Artificial Sequence
  Synthetic
acacuagcuaaggcagagcuagag

SEQ ID NO: 51324 - RNA, 21 nt, Artificial Sequence
  Synthetic
auauuauucuuuaugguagag

SEQ ID NO: 51325 - RNA, 22 nt, Artificial Sequence
  Synthetic
aauauuauucuuuaugguagag

SEQ ID NO: 51326 - RNA, 23 nt, Artificial Sequence
  Synthetic
uaauauuauucuuuaugguagag

SEQ ID NO: 51327 - RNA, 24 nt, Artificial Sequence
  Synthetic
cuaauauuauucuuuaugguagag

SEQ ID NO: 51328 - RNA, 21 nt, Artificial Sequence
  Synthetic
ugaauucauagagauguagag

SEQ ID NO: 51329 - RNA, 22 nt, Artificial Sequence
  Synthetic
uugaauucauagagauguagag

SEQ ID NO: 51330 - RNA, 24 nt, Artificial Sequence
  Synthetic
aguugaauucauagagauguagag

SEQ ID NO: 51331 - RNA, 18 nt, Artificial Sequence
  Synthetic
cacuaauguaaauuagag

SEQ ID NO: 51332 - RNA, 19 nt, Artificial Sequence
  Synthetic
acacuaauguaaauuagag

SEQ ID NO: 51333 - RNA, 21 nt, Artificial Sequence
  Synthetic
ugacacuaauguaaauuagag

SEQ ID NO: 51334 - RNA, 22 nt, Artificial Sequence
  Synthetic
augacacuaauguaaauuagag

SEQ ID NO: 51335 - RNA, 23 nt, Artificial Sequence
  Synthetic
aaugacacuaauguaaauuagag

SEQ ID NO: 51336 - RNA, 24 nt, Artificial Sequence
  Synthetic
uaaugacacuaauguaaauuagag

SEQ ID NO: 51337 - RNA, 18 nt, Artificial Sequence
  Synthetic
auucagaaacauuuagag

SEQ ID NO: 51338 - RNA, 19 nt, Artificial Sequence
  Synthetic
uauucagaaacauuuagag

SEQ ID NO: 51339 - RNA, 20 nt, Artificial Sequence
  Synthetic
uuauucagaaacauuuagag

SEQ ID NO: 51340 - RNA, 21 nt, Artificial Sequence
  Synthetic
uuuauucagaaacauuuagag

SEQ ID NO: 51341 - RNA, 22 nt, Artificial Sequence
  Synthetic
auuuauucagaaacauuuagag

SEQ ID NO: 51342 - RNA, 23 nt, Artificial Sequence
  Synthetic
uauuuauucagaaacauuuagag

SEQ ID NO: 51343 - RNA, 24 nt, Artificial Sequence
  Synthetic
uuauuuauucagaaacauuuagag

SEQ ID NO: 51344 - RNA, 21 nt, Artificial Sequence
  Synthetic
aagagaaccuuaauuuuagag

SEQ ID NO: 51345 - RNA, 22 nt, Artificial Sequence
  Synthetic
caagagaaccuuaauuuuagag

SEQ ID NO: 51346 - RNA, 23 nt, Artificial Sequence
  Synthetic
ucaagagaaccuuaauuuuagag

SEQ ID NO: 51347 - RNA, 24 nt, Artificial Sequence
  Synthetic
cucaagagaaccuuaauuuuagag

SEQ ID NO: 51348 - RNA, 18 nt, Artificial Sequence
  Synthetic
cucugguuacuuuuagag

SEQ ID NO: 51349 - RNA, 19 nt, Artificial Sequence
  Synthetic
acucugguuacuuuuagag

SEQ ID NO: 51350 - RNA, 20 nt, Artificial Sequence
  Synthetic
aacucugguuacuuuuagag

SEQ ID NO: 51351 - RNA, 18 nt, Artificial Sequence
  Synthetic
aaugaguuagaaggcgag

SEQ ID NO: 51352 - RNA, 20 nt, Artificial Sequence
  Synthetic
ugaaugaguuagaaggcgag

SEQ ID NO: 51353 - RNA, 21 nt, Artificial Sequence
  Synthetic
augaaugaguuagaaggcgag

SEQ ID NO: 51354 - RNA, 22 nt, Artificial Sequence
  Synthetic
caugaaugaguuagaaggcgag

SEQ ID NO: 51355 - RNA, 23 nt, Artificial Sequence
  Synthetic
ucaugaaugaguuagaaggcgag

SEQ ID NO: 51356 - RNA, 24 nt, Artificial Sequence
  Synthetic
cucaugaaugaguuagaaggcgag

SEQ ID NO: 51357 - RNA, 18 nt, Artificial Sequence
  Synthetic
cuuuccccuaccaucgag

SEQ ID NO: 51358 - RNA, 20 nt, Artificial Sequence
  Synthetic
agcuuuccccuaccaucgag

SEQ ID NO: 51359 - RNA, 21 nt, Artificial Sequence
  Synthetic
aagcuuuccccuaccaucgag

SEQ ID NO: 51360 - RNA, 22 nt, Artificial Sequence
  Synthetic
caagcuuuccccuaccaucgag

SEQ ID NO: 51361 - RNA, 23 nt, Artificial Sequence
  Synthetic
acaagcuuuccccuaccaucgag

SEQ ID NO: 51362 - RNA, 24 nt, Artificial Sequence
  Synthetic
cacaagcuuuccccuaccaucgag

SEQ ID NO: 51363 - RNA, 18 nt, Artificial Sequence
  Synthetic
aauuaucaugcugucgag

SEQ ID NO: 51364 - RNA, 19 nt, Artificial Sequence
  Synthetic
aaauuaucaugcugucgag

SEQ ID NO: 51365 - RNA, 20 nt, Artificial Sequence
  Synthetic
aaaauuaucaugcugucgag

SEQ ID NO: 51366 - RNA, 21 nt, Artificial Sequence
  Synthetic
uaaaauuaucaugcugucgag

SEQ ID NO: 51367 - RNA, 22 nt, Artificial Sequence
  Synthetic
cuaaaauuaucaugcugucgag

SEQ ID NO: 51368 - RNA, 24 nt, Artificial Sequence
  Synthetic
agcuaaaauuaucaugcugucgag

SEQ ID NO: 51369 - RNA, 18 nt, Artificial Sequence
  Synthetic
augcuuuuugaauucgag

SEQ ID NO: 51370 - RNA, 19 nt, Artificial Sequence
  Synthetic
aaugcuuuuugaauucgag

SEQ ID NO: 51371 - RNA, 20 nt, Artificial Sequence
  Synthetic
aaaugcuuuuugaauucgag

SEQ ID NO: 51372 - RNA, 21 nt, Artificial Sequence
  Synthetic
caaaugcuuuuugaauucgag

SEQ ID NO: 51373 - RNA, 23 nt, Artificial Sequence
  Synthetic
ugcaaaugcuuuuugaauucgag

SEQ ID NO: 51374 - RNA, 24 nt, Artificial Sequence
  Synthetic
uugcaaaugcuuuuugaauucgag

SEQ ID NO: 51375 - RNA, 21 nt, Artificial Sequence
  Synthetic
aaauggcaggcuacaaaggag

SEQ ID NO: 51376 - RNA, 22 nt, Artificial Sequence
  Synthetic
aaaauggcaggcuacaaaggag

SEQ ID NO: 51377 - RNA, 24 nt, Artificial Sequence
  Synthetic
agaaaauggcaggcuacaaaggag

SEQ ID NO: 51378 - RNA, 21 nt, Artificial Sequence
  Synthetic
ucauuuggggaaagaaaggag

SEQ ID NO: 51379 - RNA, 22 nt, Artificial Sequence
  Synthetic
cucauuuggggaaagaaaggag

SEQ ID NO: 51380 - RNA, 23 nt, Artificial Sequence
  Synthetic
acucauuuggggaaagaaaggag

SEQ ID NO: 51381 - RNA, 24 nt, Artificial Sequence
  Synthetic
aacucauuuggggaaagaaaggag

SEQ ID NO: 51382 - RNA, 18 nt, Artificial Sequence
  Synthetic
cacugaaguuuaaaggag

SEQ ID NO: 51383 - RNA, 19 nt, Artificial Sequence
  Synthetic
acacugaaguuuaaaggag

SEQ ID NO: 51384 - RNA, 22 nt, Artificial Sequence
  Synthetic
aggacacugaaguuuaaaggag

SEQ ID NO: 51385 - RNA, 23 nt, Artificial Sequence
  Synthetic
aaggacacugaaguuuaaaggag

SEQ ID NO: 51386 - RNA, 24 nt, Artificial Sequence
  Synthetic
caaggacacugaaguuuaaaggag

SEQ ID NO: 51387 - RNA, 19 nt, Artificial Sequence
  Synthetic
ugcugugugcagcaaggag

SEQ ID NO: 51388 - RNA, 20 nt, Artificial Sequence
  Synthetic
cugcugugugcagcaaggag

SEQ ID NO: 51389 - RNA, 21 nt, Artificial Sequence
  Synthetic
ucugcugugugcagcaaggag

SEQ ID NO: 51390 - RNA, 22 nt, Artificial Sequence
  Synthetic
uucugcugugugcagcaaggag

SEQ ID NO: 51391 - RNA, 23 nt, Artificial Sequence
  Synthetic
cuucugcugugugcagcaaggag

SEQ ID NO: 51392 - RNA, 24 nt, Artificial Sequence
  Synthetic
ccuucugcugugugcagcaaggag

SEQ ID NO: 51393 - RNA, 18 nt, Artificial Sequence
  Synthetic
aaugcgaaggucaaggag

SEQ ID NO: 51394 - RNA, 20 nt, Artificial Sequence
  Synthetic
agaaugcgaaggucaaggag

SEQ ID NO: 51395 - RNA, 21 nt, Artificial Sequence
  Synthetic
aagaaugcgaaggucaaggag

SEQ ID NO: 51396 - RNA, 22 nt, Artificial Sequence
  Synthetic
caagaaugcgaaggucaaggag

SEQ ID NO: 51397 - RNA, 23 nt, Artificial Sequence
  Synthetic
ucaagaaugcgaaggucaaggag

SEQ ID NO: 51398 - RNA, 18 nt, Artificial Sequence
  Synthetic
cguaguaaaaggaaggag

SEQ ID NO: 51399 - RNA, 20 nt, Artificial Sequence
  Synthetic
ugcguaguaaaaggaaggag

SEQ ID NO: 51400 - RNA, 21 nt, Artificial Sequence
  Synthetic
cugcguaguaaaaggaaggag

SEQ ID NO: 51401 - RNA, 23 nt, Artificial Sequence
  Synthetic
ugcugcguaguaaaaggaaggag

SEQ ID NO: 51402 - RNA, 24 nt, Artificial Sequence
  Synthetic
cugcugcguaguaaaaggaaggag

SEQ ID NO: 51403 - RNA, 19 nt, Artificial Sequence
  Synthetic
agaacuauuagauaaggag

SEQ ID NO: 51404 - RNA, 20 nt, Artificial Sequence
  Synthetic
aagaacuauuagauaaggag

SEQ ID NO: 51405 - RNA, 18 nt, Artificial Sequence
  Synthetic
aguggauaaguuaaggag

SEQ ID NO: 51406 - RNA, 19 nt, Artificial Sequence
  Synthetic
caguggauaaguuaaggag

SEQ ID NO: 51407 - RNA, 20 nt, Artificial Sequence
  Synthetic
ucaguggauaaguuaaggag

SEQ ID NO: 51408 - RNA, 21 nt, Artificial Sequence
  Synthetic
aucaguggauaaguuaaggag

SEQ ID NO: 51409 - RNA, 22 nt, Artificial Sequence
  Synthetic
caucaguggauaaguuaaggag

SEQ ID NO: 51410 - RNA, 23 nt, Artificial Sequence
  Synthetic
acaucaguggauaaguuaaggag

SEQ ID NO: 51411 - RNA, 24 nt, Artificial Sequence
  Synthetic
uacaucaguggauaaguuaaggag

SEQ ID NO: 51412 - RNA, 20 nt, Artificial Sequence
  Synthetic
aggaccugcaaccacaggag

SEQ ID NO: 51413 - RNA, 21 nt, Artificial Sequence
  Synthetic
caggaccugcaaccacaggag

SEQ ID NO: 51414 - RNA, 24 nt, Artificial Sequence
  Synthetic
cggcaggaccugcaaccacaggag

SEQ ID NO: 51415 - RNA, 18 nt, Artificial Sequence
  Synthetic
uugcuugccauccaggag

SEQ ID NO: 51416 - RNA, 19 nt, Artificial Sequence
  Synthetic
cuugcuugccauccaggag

SEQ ID NO: 51417 - RNA, 21 nt, Artificial Sequence
  Synthetic
agcuugcuugccauccaggag

SEQ ID NO: 51418 - RNA, 22 nt, Artificial Sequence
  Synthetic
cagcuugcuugccauccaggag

SEQ ID NO: 51419 - RNA, 24 nt, Artificial Sequence
  Synthetic
ugcagcuugcuugccauccaggag

SEQ ID NO: 51420 - RNA, 21 nt, Artificial Sequence
  Synthetic
cucagacugugguagcaggag

SEQ ID NO: 51421 - RNA, 22 nt, Artificial Sequence
  Synthetic
ucucagacugugguagcaggag

SEQ ID NO: 51422 - RNA, 23 nt, Artificial Sequence
  Synthetic
uucucagacugugguagcaggag

SEQ ID NO: 51423 - RNA, 24 nt, Artificial Sequence
  Synthetic
uuucucagacugugguagcaggag

SEQ ID NO: 51424 - RNA, 21 nt, Artificial Sequence
  Synthetic
uugcagaagaagaaagaggag

SEQ ID NO: 51425 - RNA, 22 nt, Artificial Sequence
  Synthetic
auugcagaagaagaaagaggag

SEQ ID NO: 51426 - RNA, 23 nt, Artificial Sequence
  Synthetic
aauugcagaagaagaaagaggag

SEQ ID NO: 51427 - RNA, 22 nt, Artificial Sequence
  Synthetic
agaagaauugaagacagaggag

SEQ ID NO: 51428 - RNA, 24 nt, Artificial Sequence
  Synthetic
ugagaagaauugaagacagaggag

SEQ ID NO: 51429 - RNA, 19 nt, Artificial Sequence
  Synthetic
agauuaugaaagagaggag

SEQ ID NO: 51430 - RNA, 21 nt, Artificial Sequence
  Synthetic
agagauuaugaaagagaggag

SEQ ID NO: 51431 - RNA, 22 nt, Artificial Sequence
  Synthetic
cagagauuaugaaagagaggag

SEQ ID NO: 51432 - RNA, 23 nt, Artificial Sequence
  Synthetic
ucagagauuaugaaagagaggag

SEQ ID NO: 51433 - RNA, 24 nt, Artificial Sequence
  Synthetic
cucagagauuaugaaagagaggag

SEQ ID NO: 51434 - RNA, 21 nt, Artificial Sequence
  Synthetic
aggauugaggagagagaggag

SEQ ID NO: 51435 - RNA, 22 nt, Artificial Sequence
  Synthetic
caggauugaggagagagaggag

SEQ ID NO: 51436 - RNA, 24 nt, Artificial Sequence
  Synthetic
agcaggauugaggagagagaggag

SEQ ID NO: 51437 - RNA, 21 nt, Artificial Sequence
  Synthetic
uccuagaaucugggagaggag

SEQ ID NO: 51438 - RNA, 22 nt, Artificial Sequence
  Synthetic
auccuagaaucugggagaggag

SEQ ID NO: 51439 - RNA, 23 nt, Artificial Sequence
  Synthetic
uauccuagaaucugggagaggag

SEQ ID NO: 51440 - RNA, 24 nt, Artificial Sequence
  Synthetic
uuauccuagaaucugggagaggag

SEQ ID NO: 51441 - RNA, 19 nt, Artificial Sequence
  Synthetic
ugaaauuauauuagaggag

SEQ ID NO: 51442 - RNA, 20 nt, Artificial Sequence
  Synthetic
cugaaauuauauuagaggag

SEQ ID NO: 51443 - RNA, 21 nt, Artificial Sequence
  Synthetic
ucugaaauuauauuagaggag

SEQ ID NO: 51444 - RNA, 22 nt, Artificial Sequence
  Synthetic
cucugaaauuauauuagaggag

SEQ ID NO: 51445 - RNA, 24 nt, Artificial Sequence
  Synthetic
agcucugaaauuauauuagaggag

SEQ ID NO: 51446 - RNA, 18 nt, Artificial Sequence
  Synthetic
uaaagacugaaggaggag

SEQ ID NO: 51447 - RNA, 20 nt, Artificial Sequence
  Synthetic
aguaaagacugaaggaggag

SEQ ID NO: 51448 - RNA, 21 nt, Artificial Sequence
  Synthetic
caguaaagacugaaggaggag

SEQ ID NO: 51449 - RNA, 22 nt, Artificial Sequence
  Synthetic
ccaguaaagacugaaggaggag

SEQ ID NO: 51450 - RNA, 23 nt, Artificial Sequence
  Synthetic
uccaguaaagacugaaggaggag

SEQ ID NO: 51451 - RNA, 24 nt, Artificial Sequence
  Synthetic
auccaguaaagacugaaggaggag

SEQ ID NO: 51452 - RNA, 21 nt, Artificial Sequence
  Synthetic
uuguuguggguggaggaggag

SEQ ID NO: 51453 - RNA, 22 nt, Artificial Sequence
  Synthetic
uuuguuguggguggaggaggag

SEQ ID NO: 51454 - RNA, 19 nt, Artificial Sequence
  Synthetic
ugcauuucugugugaggag

SEQ ID NO: 51455 - RNA, 20 nt, Artificial Sequence
  Synthetic
uugcauuucugugugaggag

SEQ ID NO: 51456 - RNA, 21 nt, Artificial Sequence
  Synthetic
uuugcauuucugugugaggag

SEQ ID NO: 51457 - RNA, 23 nt, Artificial Sequence
  Synthetic
uguuugcauuucugugugaggag

SEQ ID NO: 51458 - RNA, 24 nt, Artificial Sequence
  Synthetic
auguuugcauuucugugugaggag

SEQ ID NO: 51459 - RNA, 18 nt, Artificial Sequence
  Synthetic
ucacagaaguuauaggag

SEQ ID NO: 51460 - RNA, 20 nt, Artificial Sequence
  Synthetic
agucacagaaguuauaggag

SEQ ID NO: 51461 - RNA, 22 nt, Artificial Sequence
  Synthetic
ugagucacagaaguuauaggag

SEQ ID NO: 51462 - RNA, 23 nt, Artificial Sequence
  Synthetic
uugagucacagaaguuauaggag

SEQ ID NO: 51463 - RNA, 24 nt, Artificial Sequence
  Synthetic
uuugagucacagaaguuauaggag

SEQ ID NO: 51464 - RNA, 20 nt, Artificial Sequence
  Synthetic
uggaugaagucuucuaggag

SEQ ID NO: 51465 - RNA, 21 nt, Artificial Sequence
  Synthetic
cuggaugaagucuucuaggag

SEQ ID NO: 51466 - RNA, 22 nt, Artificial Sequence
  Synthetic
acuggaugaagucuucuaggag

SEQ ID NO: 51467 - RNA, 18 nt, Artificial Sequence
  Synthetic
aauaccaagaauuaggag

SEQ ID NO: 51468 - RNA, 20 nt, Artificial Sequence
  Synthetic
agaauaccaagaauuaggag

SEQ ID NO: 51469 - RNA, 21 nt, Artificial Sequence
  Synthetic
uagaauaccaagaauuaggag

SEQ ID NO: 51470 - RNA, 22 nt, Artificial Sequence
  Synthetic
auagaauaccaagaauuaggag

SEQ ID NO: 51471 - RNA, 23 nt, Artificial Sequence
  Synthetic
uauagaauaccaagaauuaggag

SEQ ID NO: 51472 - RNA, 24 nt, Artificial Sequence
  Synthetic
auauagaauaccaagaauuaggag

SEQ ID NO: 51473 - RNA, 21 nt, Artificial Sequence
  Synthetic
agcggaggaaaggaaagggag

SEQ ID NO: 51474 - RNA, 23 nt, Artificial Sequence
  Synthetic
ugagcggaggaaaggaaagggag

SEQ ID NO: 51475 - RNA, 18 nt, Artificial Sequence
  Synthetic
aguaccauaagaagggag

SEQ ID NO: 51476 - RNA, 19 nt, Artificial Sequence
  Synthetic
aaguaccauaagaagggag

SEQ ID NO: 51477 - RNA, 20 nt, Artificial Sequence
  Synthetic
aaaguaccauaagaagggag

SEQ ID NO: 51478 - RNA, 22 nt, Artificial Sequence
  Synthetic
ugaaaguaccauaagaagggag

SEQ ID NO: 51479 - RNA, 23 nt, Artificial Sequence
  Synthetic
augaaaguaccauaagaagggag

SEQ ID NO: 51480 - RNA, 24 nt, Artificial Sequence
  Synthetic
aaugaaaguaccauaagaagggag

SEQ ID NO: 51481 - RNA, 21 nt, Artificial Sequence
  Synthetic
uaagagacagaacgaagggag

SEQ ID NO: 51482 - RNA, 22 nt, Artificial Sequence
  Synthetic
cuaagagacagaacgaagggag

SEQ ID NO: 51483 - RNA, 23 nt, Artificial Sequence
  Synthetic
ucuaagagacagaacgaagggag

SEQ ID NO: 51484 - RNA, 24 nt, Artificial Sequence
  Synthetic
uucuaagagacagaacgaagggag

SEQ ID NO: 51485 - RNA, 18 nt, Artificial Sequence
  Synthetic
accacuaaagccagggag

SEQ ID NO: 51486 - RNA, 19 nt, Artificial Sequence
  Synthetic
aaccacuaaagccagggag

SEQ ID NO: 51487 - RNA, 20 nt, Artificial Sequence
  Synthetic
uaaccacuaaagccagggag

SEQ ID NO: 51488 - RNA, 21 nt, Artificial Sequence
  Synthetic
uuaaccacuaaagccagggag

SEQ ID NO: 51489 - RNA, 22 nt, Artificial Sequence
  Synthetic
auuaaccacuaaagccagggag

SEQ ID NO: 51490 - RNA, 23 nt, Artificial Sequence
  Synthetic
aauuaaccacuaaagccagggag

SEQ ID NO: 51491 - RNA, 18 nt, Artificial Sequence
  Synthetic
ucuuaugagggaggggag

SEQ ID NO: 51492 - RNA, 19 nt, Artificial Sequence
  Synthetic
uucuuaugagggaggggag

SEQ ID NO: 51493 - RNA, 20 nt, Artificial Sequence
  Synthetic
uuucuuaugagggaggggag

SEQ ID NO: 51494 - RNA, 21 nt, Artificial Sequence
  Synthetic
cuuucuuaugagggaggggag

SEQ ID NO: 51495 - RNA, 22 nt, Artificial Sequence
  Synthetic
ccuuucuuaugagggaggggag

SEQ ID NO: 51496 - RNA, 23 nt, Artificial Sequence
  Synthetic
cccuuucuuaugagggaggggag

SEQ ID NO: 51497 - RNA, 24 nt, Artificial Sequence
  Synthetic
ucccuuucuuaugagggaggggag

SEQ ID NO: 51498 - RNA, 21 nt, Artificial Sequence
  Synthetic
auuccacagaccuggggggag

SEQ ID NO: 51499 - RNA, 22 nt, Artificial Sequence
  Synthetic
uauuccacagaccuggggggag

SEQ ID NO: 51500 - RNA, 23 nt, Artificial Sequence
  Synthetic
uuauuccacagaccuggggggag

SEQ ID NO: 51501 - RNA, 24 nt, Artificial Sequence
  Synthetic
auuauuccacagaccuggggggag

SEQ ID NO: 51502 - RNA, 22 nt, Artificial Sequence
  Synthetic
ugugcuugugcuuuguggggag

SEQ ID NO: 51503 - RNA, 23 nt, Artificial Sequence
  Synthetic
augugcuugugcuuuguggggag

SEQ ID NO: 51504 - RNA, 24 nt, Artificial Sequence
  Synthetic
uaugugcuugugcuuuguggggag

SEQ ID NO: 51505 - RNA, 21 nt, Artificial Sequence
  Synthetic
aaacauuugaauuugugggag

SEQ ID NO: 51506 - RNA, 22 nt, Artificial Sequence
  Synthetic
caaacauuugaauuugugggag

SEQ ID NO: 51507 - RNA, 23 nt, Artificial Sequence
  Synthetic
acaaacauuugaauuugugggag

SEQ ID NO: 51508 - RNA, 21 nt, Artificial Sequence
  Synthetic
ucaaagugauagaauugggag

SEQ ID NO: 51509 - RNA, 22 nt, Artificial Sequence
  Synthetic
uucaaagugauagaauugggag

SEQ ID NO: 51510 - RNA, 24 nt, Artificial Sequence
  Synthetic
uguucaaagugauagaauugggag

SEQ ID NO: 51511 - RNA, 18 nt, Artificial Sequence
  Synthetic
cauaugaguggaauggag

SEQ ID NO: 51512 - RNA, 19 nt, Artificial Sequence
  Synthetic
ccauaugaguggaauggag

SEQ ID NO: 51513 - RNA, 20 nt, Artificial Sequence
  Synthetic
uccauaugaguggaauggag

SEQ ID NO: 51514 - RNA, 21 nt, Artificial Sequence
  Synthetic
auccauaugaguggaauggag

SEQ ID NO: 51515 - RNA, 22 nt, Artificial Sequence
  Synthetic
aauccauaugaguggaauggag

SEQ ID NO: 51516 - RNA, 24 nt, Artificial Sequence
  Synthetic
agaauccauaugaguggaauggag

SEQ ID NO: 51517 - RNA, 18 nt, Artificial Sequence
  Synthetic
aauguugcuuacauggag

SEQ ID NO: 51518 - RNA, 19 nt, Artificial Sequence
  Synthetic
caauguugcuuacauggag

SEQ ID NO: 51519 - RNA, 20 nt, Artificial Sequence
  Synthetic
ccaauguugcuuacauggag

SEQ ID NO: 51520 - RNA, 21 nt, Artificial Sequence
  Synthetic
uccaauguugcuuacauggag

SEQ ID NO: 51521 - RNA, 22 nt, Artificial Sequence
  Synthetic
cuccaauguugcuuacauggag

SEQ ID NO: 51522 - RNA, 23 nt, Artificial Sequence
  Synthetic
ucuccaauguugcuuacauggag

SEQ ID NO: 51523 - RNA, 24 nt, Artificial Sequence
  Synthetic
uucuccaauguugcuuacauggag

SEQ ID NO: 51524 - RNA, 19 nt, Artificial Sequence
  Synthetic
ugaaauauguuuccuggag

SEQ ID NO: 51525 - RNA, 21 nt, Artificial Sequence
  Synthetic
ugugaaauauguuuccuggag

SEQ ID NO: 51526 - RNA, 22 nt, Artificial Sequence
  Synthetic
augugaaauauguuuccuggag

SEQ ID NO: 51527 - RNA, 23 nt, Artificial Sequence
  Synthetic
uaugugaaauauguuuccuggag

SEQ ID NO: 51528 - RNA, 24 nt, Artificial Sequence
  Synthetic
uuaugugaaauauguuuccuggag

SEQ ID NO: 51529 - RNA, 21 nt, Artificial Sequence
  Synthetic
cuucagaagacuucucuggag

SEQ ID NO: 51530 - RNA, 22 nt, Artificial Sequence
  Synthetic
ucuucagaagacuucucuggag

SEQ ID NO: 51531 - RNA, 23 nt, Artificial Sequence
  Synthetic
aucuucagaagacuucucuggag

SEQ ID NO: 51532 - RNA, 24 nt, Artificial Sequence
  Synthetic
caucuucagaagacuucucuggag

SEQ ID NO: 51533 - RNA, 21 nt, Artificial Sequence
  Synthetic
agagagagggaguauguggag

SEQ ID NO: 51534 - RNA, 22 nt, Artificial Sequence
  Synthetic
aagagagagggaguauguggag

SEQ ID NO: 51535 - RNA, 23 nt, Artificial Sequence
  Synthetic
aaagagagagggaguauguggag

SEQ ID NO: 51536 - RNA, 24 nt, Artificial Sequence
  Synthetic
caaagagagagggaguauguggag

SEQ ID NO: 51537 - RNA, 18 nt, Artificial Sequence
  Synthetic
uucucuuauccuguggag

SEQ ID NO: 51538 - RNA, 19 nt, Artificial Sequence
  Synthetic
cuucucuuauccuguggag

SEQ ID NO: 51539 - RNA, 20 nt, Artificial Sequence
  Synthetic
ucuucucuuauccuguggag

SEQ ID NO: 51540 - RNA, 21 nt, Artificial Sequence
  Synthetic
uucuucucuuauccuguggag

SEQ ID NO: 51541 - RNA, 22 nt, Artificial Sequence
  Synthetic
uuucuucucuuauccuguggag

SEQ ID NO: 51542 - RNA, 23 nt, Artificial Sequence
  Synthetic
cuuucuucucuuauccuguggag

SEQ ID NO: 51543 - RNA, 24 nt, Artificial Sequence
  Synthetic
acuuucuucucuuauccuguggag

SEQ ID NO: 51544 - RNA, 19 nt, Artificial Sequence
  Synthetic
ugaaaccuccucuguggag

SEQ ID NO: 51545 - RNA, 20 nt, Artificial Sequence
  Synthetic
augaaaccuccucuguggag

SEQ ID NO: 51546 - RNA, 21 nt, Artificial Sequence
  Synthetic
uaugaaaccuccucuguggag

SEQ ID NO: 51547 - RNA, 22 nt, Artificial Sequence
  Synthetic
auaugaaaccuccucuguggag

SEQ ID NO: 51548 - RNA, 23 nt, Artificial Sequence
  Synthetic
uauaugaaaccuccucuguggag

SEQ ID NO: 51549 - RNA, 24 nt, Artificial Sequence
  Synthetic
auauaugaaaccuccucuguggag

SEQ ID NO: 51550 - RNA, 18 nt, Artificial Sequence
  Synthetic
uagcuuuguauguuggag

SEQ ID NO: 51551 - RNA, 19 nt, Artificial Sequence
  Synthetic
cuagcuuuguauguuggag

SEQ ID NO: 51552 - RNA, 20 nt, Artificial Sequence
  Synthetic
acuagcuuuguauguuggag

SEQ ID NO: 51553 - RNA, 21 nt, Artificial Sequence
  Synthetic
aacuagcuuuguauguuggag

SEQ ID NO: 51554 - RNA, 23 nt, Artificial Sequence
  Synthetic
ugaacuagcuuuguauguuggag

SEQ ID NO: 51555 - RNA, 24 nt, Artificial Sequence
  Synthetic
augaacuagcuuuguauguuggag

SEQ ID NO: 51556 - RNA, 18 nt, Artificial Sequence
  Synthetic
uaguucaugccuuuggag

SEQ ID NO: 51557 - RNA, 19 nt, Artificial Sequence
  Synthetic
auaguucaugccuuuggag

SEQ ID NO: 51558 - RNA, 20 nt, Artificial Sequence
  Synthetic
aauaguucaugccuuuggag

SEQ ID NO: 51559 - RNA, 21 nt, Artificial Sequence
  Synthetic
aaauaguucaugccuuuggag

SEQ ID NO: 51560 - RNA, 23 nt, Artificial Sequence
  Synthetic
agaaauaguucaugccuuuggag

SEQ ID NO: 51561 - RNA, 24 nt, Artificial Sequence
  Synthetic
uagaaauaguucaugccuuuggag

SEQ ID NO: 51562 - RNA, 19 nt, Artificial Sequence
  Synthetic
ugcaggccauaguuuggag

SEQ ID NO: 51563 - RNA, 20 nt, Artificial Sequence
  Synthetic
uugcaggccauaguuuggag

SEQ ID NO: 51564 - RNA, 21 nt, Artificial Sequence
  Synthetic
cuugcaggccauaguuuggag

SEQ ID NO: 51565 - RNA, 22 nt, Artificial Sequence
  Synthetic
ucuugcaggccauaguuuggag

SEQ ID NO: 51566 - RNA, 21 nt, Artificial Sequence
  Synthetic
auuguuucugccuuuuuggag

SEQ ID NO: 51567 - RNA, 22 nt, Artificial Sequence
  Synthetic
cauuguuucugccuuuuuggag

SEQ ID NO: 51568 - RNA, 23 nt, Artificial Sequence
  Synthetic
acauuguuucugccuuuuuggag

SEQ ID NO: 51569 - RNA, 24 nt, Artificial Sequence
  Synthetic
cacauuguuucugccuuuuuggag

SEQ ID NO: 51570 - RNA, 19 nt, Artificial Sequence
  Synthetic
agagacuacaaaaaaugag

SEQ ID NO: 51571 - RNA, 20 nt, Artificial Sequence
  Synthetic
aagagacuacaaaaaaugag

SEQ ID NO: 51572 - RNA, 21 nt, Artificial Sequence
  Synthetic
uaagagacuacaaaaaaugag

SEQ ID NO: 51573 - RNA, 23 nt, Artificial Sequence
  Synthetic
aguaagagacuacaaaaaaugag

SEQ ID NO: 51574 - RNA, 18 nt, Artificial Sequence
  Synthetic
accuuauuacacaaugag

SEQ ID NO: 51575 - RNA, 19 nt, Artificial Sequence
  Synthetic
uaccuuauuacacaaugag

SEQ ID NO: 51576 - RNA, 20 nt, Artificial Sequence
  Synthetic
cuaccuuauuacacaaugag

SEQ ID NO: 51577 - RNA, 21 nt, Artificial Sequence
  Synthetic
ucuaccuuauuacacaaugag

SEQ ID NO: 51578 - RNA, 22 nt, Artificial Sequence
  Synthetic
uucuaccuuauuacacaaugag

SEQ ID NO: 51579 - RNA, 23 nt, Artificial Sequence
  Synthetic
cuucuaccuuauuacacaaugag

SEQ ID NO: 51580 - RNA, 24 nt, Artificial Sequence
  Synthetic
acuucuaccuuauuacacaaugag

SEQ ID NO: 51581 - RNA, 18 nt, Artificial Sequence
  Synthetic
ucaacauauaguaaugag

SEQ ID NO: 51582 - RNA, 22 nt, Artificial Sequence
  Synthetic
ugggucaacauauaguaaugag

SEQ ID NO: 51583 - RNA, 23 nt, Artificial Sequence
  Synthetic
cugggucaacauauaguaaugag

SEQ ID NO: 51584 - RNA, 24 nt, Artificial Sequence
  Synthetic
acugggucaacauauaguaaugag

SEQ ID NO: 51585 - RNA, 18 nt, Artificial Sequence
  Synthetic
uucugguugugacaugag

SEQ ID NO: 51586 - RNA, 19 nt, Artificial Sequence
  Synthetic
uuucugguugugacaugag

SEQ ID NO: 51587 - RNA, 20 nt, Artificial Sequence
  Synthetic
auuucugguugugacaugag

SEQ ID NO: 51588 - RNA, 21 nt, Artificial Sequence
  Synthetic
cauuucugguugugacaugag

SEQ ID NO: 51589 - RNA, 22 nt, Artificial Sequence
  Synthetic
ccauuucugguugugacaugag

SEQ ID NO: 51590 - RNA, 23 nt, Artificial Sequence
  Synthetic
uccauuucugguugugacaugag

SEQ ID NO: 51591 - RNA, 24 nt, Artificial Sequence
  Synthetic
auccauuucugguugugacaugag

SEQ ID NO: 51592 - RNA, 18 nt, Artificial Sequence
  Synthetic
uauuaagaucaggaugag

SEQ ID NO: 51593 - RNA, 19 nt, Artificial Sequence
  Synthetic
auauuaagaucaggaugag

SEQ ID NO: 51594 - RNA, 20 nt, Artificial Sequence
  Synthetic
aauauuaagaucaggaugag

SEQ ID NO: 51595 - RNA, 21 nt, Artificial Sequence
  Synthetic
uaauauuaagaucaggaugag

SEQ ID NO: 51596 - RNA, 22 nt, Artificial Sequence
  Synthetic
cuaauauuaagaucaggaugag

SEQ ID NO: 51597 - RNA, 23 nt, Artificial Sequence
  Synthetic
ucuaauauuaagaucaggaugag

SEQ ID NO: 51598 - RNA, 24 nt, Artificial Sequence
  Synthetic
cucuaauauuaagaucaggaugag

SEQ ID NO: 51599 - RNA, 19 nt, Artificial Sequence
  Synthetic
agggaaucuaugggaugag

SEQ ID NO: 51600 - RNA, 21 nt, Artificial Sequence
  Synthetic
ugagggaaucuaugggaugag

SEQ ID NO: 51601 - RNA, 22 nt, Artificial Sequence
  Synthetic
augagggaaucuaugggaugag

SEQ ID NO: 51602 - RNA, 23 nt, Artificial Sequence
  Synthetic
aaugagggaaucuaugggaugag

SEQ ID NO: 51603 - RNA, 24 nt, Artificial Sequence
  Synthetic
aaaugagggaaucuaugggaugag

SEQ ID NO: 51604 - RNA, 18 nt, Artificial Sequence
  Synthetic
aguagaugggaugaugag

SEQ ID NO: 51605 - RNA, 19 nt, Artificial Sequence
  Synthetic
aaguagaugggaugaugag

SEQ ID NO: 51606 - RNA, 20 nt, Artificial Sequence
  Synthetic
uaaguagaugggaugaugag

SEQ ID NO: 51607 - RNA, 21 nt, Artificial Sequence
  Synthetic
uuaaguagaugggaugaugag

SEQ ID NO: 51608 - RNA, 23 nt, Artificial Sequence
  Synthetic
cguuaaguagaugggaugaugag

SEQ ID NO: 51609 - RNA, 24 nt, Artificial Sequence
  Synthetic
ucguuaaguagaugggaugaugag

SEQ ID NO: 51610 - RNA, 18 nt, Artificial Sequence
  Synthetic
uacuaugaaagugaugag

SEQ ID NO: 51611 - RNA, 19 nt, Artificial Sequence
  Synthetic
cuacuaugaaagugaugag

SEQ ID NO: 51612 - RNA, 20 nt, Artificial Sequence
  Synthetic
ccuacuaugaaagugaugag

SEQ ID NO: 51613 - RNA, 21 nt, Artificial Sequence
  Synthetic
cccuacuaugaaagugaugag

SEQ ID NO: 51614 - RNA, 22 nt, Artificial Sequence
  Synthetic
ccccuacuaugaaagugaugag

SEQ ID NO: 51615 - RNA, 23 nt, Artificial Sequence
  Synthetic
uccccuacuaugaaagugaugag

SEQ ID NO: 51616 - RNA, 24 nt, Artificial Sequence
  Synthetic
uuccccuacuaugaaagugaugag

SEQ ID NO: 51617 - RNA, 18 nt, Artificial Sequence
  Synthetic
aauuuaagggaauaugag

SEQ ID NO: 51618 - RNA, 19 nt, Artificial Sequence
  Synthetic
aaauuuaagggaauaugag

SEQ ID NO: 51619 - RNA, 20 nt, Artificial Sequence
  Synthetic
uaaauuuaagggaauaugag

SEQ ID NO: 51620 - RNA, 21 nt, Artificial Sequence
  Synthetic
uuaaauuuaagggaauaugag

SEQ ID NO: 51621 - RNA, 22 nt, Artificial Sequence
  Synthetic
auuaaauuuaagggaauaugag

SEQ ID NO: 51622 - RNA, 23 nt, Artificial Sequence
  Synthetic
cauuaaauuuaagggaauaugag

SEQ ID NO: 51623 - RNA, 24 nt, Artificial Sequence
  Synthetic
acauuaaauuuaagggaauaugag

SEQ ID NO: 51624 - RNA, 18 nt, Artificial Sequence
  Synthetic
ugugagaauccauaugag

SEQ ID NO: 51625 - RNA, 19 nt, Artificial Sequence
  Synthetic
augugagaauccauaugag

SEQ ID NO: 51626 - RNA, 20 nt, Artificial Sequence
  Synthetic
caugugagaauccauaugag

SEQ ID NO: 51627 - RNA, 21 nt, Artificial Sequence
  Synthetic
ccaugugagaauccauaugag

SEQ ID NO: 51628 - RNA, 22 nt, Artificial Sequence
  Synthetic
cccaugugagaauccauaugag

SEQ ID NO: 51629 - RNA, 23 nt, Artificial Sequence
  Synthetic
acccaugugagaauccauaugag

SEQ ID NO: 51630 - RNA, 24 nt, Artificial Sequence
  Synthetic
aacccaugugagaauccauaugag

SEQ ID NO: 51631 - RNA, 18 nt, Artificial Sequence
  Synthetic
agguuucagucauaugag

SEQ ID NO: 51632 - RNA, 19 nt, Artificial Sequence
  Synthetic
uagguuucagucauaugag

SEQ ID NO: 51633 - RNA, 20 nt, Artificial Sequence
  Synthetic
cuagguuucagucauaugag

SEQ ID NO: 51634 - RNA, 21 nt, Artificial Sequence
  Synthetic
acuagguuucagucauaugag

SEQ ID NO: 51635 - RNA, 22 nt, Artificial Sequence
  Synthetic
aacuagguuucagucauaugag

SEQ ID NO: 51636 - RNA, 23 nt, Artificial Sequence
  Synthetic
uaacuagguuucagucauaugag

SEQ ID NO: 51637 - RNA, 24 nt, Artificial Sequence
  Synthetic
cuaacuagguuucagucauaugag

SEQ ID NO: 51638 - RNA, 18 nt, Artificial Sequence
  Synthetic
auaagcugaugauaugag

SEQ ID NO: 51639 - RNA, 19 nt, Artificial Sequence
  Synthetic
aauaagcugaugauaugag

SEQ ID NO: 51640 - RNA, 18 nt, Artificial Sequence
  Synthetic
cacuuuuugaauuaugag

SEQ ID NO: 51641 - RNA, 19 nt, Artificial Sequence
  Synthetic
ucacuuuuugaauuaugag

SEQ ID NO: 51642 - RNA, 20 nt, Artificial Sequence
  Synthetic
cucacuuuuugaauuaugag

SEQ ID NO: 51643 - RNA, 21 nt, Artificial Sequence
  Synthetic
ucucacuuuuugaauuaugag

SEQ ID NO: 51644 - RNA, 22 nt, Artificial Sequence
  Synthetic
cucucacuuuuugaauuaugag

SEQ ID NO: 51645 - RNA, 23 nt, Artificial Sequence
  Synthetic
ucucucacuuuuugaauuaugag

SEQ ID NO: 51646 - RNA, 24 nt, Artificial Sequence
  Synthetic
cucucucacuuuuugaauuaugag

SEQ ID NO: 51647 - RNA, 18 nt, Artificial Sequence
  Synthetic
aaaugaaucuauuaugag

SEQ ID NO: 51648 - RNA, 19 nt, Artificial Sequence
  Synthetic
aaaaugaaucuauuaugag

SEQ ID NO: 51649 - RNA, 21 nt, Artificial Sequence
  Synthetic
ugaaaaugaaucuauuaugag

SEQ ID NO: 51650 - RNA, 22 nt, Artificial Sequence
  Synthetic
uugaaaaugaaucuauuaugag

SEQ ID NO: 51651 - RNA, 23 nt, Artificial Sequence
  Synthetic
auugaaaaugaaucuauuaugag

SEQ ID NO: 51652 - RNA, 24 nt, Artificial Sequence
  Synthetic
uauugaaaaugaaucuauuaugag

SEQ ID NO: 51653 - RNA, 18 nt, Artificial Sequence
  Synthetic
acaaugccuccuuaugag

SEQ ID NO: 51654 - RNA, 19 nt, Artificial Sequence
  Synthetic
aacaaugccuccuuaugag

SEQ ID NO: 51655 - RNA, 20 nt, Artificial Sequence
  Synthetic
uaacaaugccuccuuaugag

SEQ ID NO: 51656 - RNA, 21 nt, Artificial Sequence
  Synthetic
uuaacaaugccuccuuaugag

SEQ ID NO: 51657 - RNA, 22 nt, Artificial Sequence
  Synthetic
cuuaacaaugccuccuuaugag

SEQ ID NO: 51658 - RNA, 23 nt, Artificial Sequence
  Synthetic
ccuuaacaaugccuccuuaugag

SEQ ID NO: 51659 - RNA, 24 nt, Artificial Sequence
  Synthetic
accuuaacaaugccuccuuaugag

SEQ ID NO: 51660 - RNA, 18 nt, Artificial Sequence
  Synthetic
aacgaaaacuuuuaugag

SEQ ID NO: 51661 - RNA, 19 nt, Artificial Sequence
  Synthetic
aaacgaaaacuuuuaugag

SEQ ID NO: 51662 - RNA, 20 nt, Artificial Sequence
  Synthetic
uaaacgaaaacuuuuaugag

SEQ ID NO: 51663 - RNA, 22 nt, Artificial Sequence
  Synthetic
uguaaacgaaaacuuuuaugag

SEQ ID NO: 51664 - RNA, 23 nt, Artificial Sequence
  Synthetic
auguaaacgaaaacuuuuaugag

SEQ ID NO: 51665 - RNA, 24 nt, Artificial Sequence
  Synthetic
uauguaaacgaaaacuuuuaugag

SEQ ID NO: 51666 - RNA, 18 nt, Artificial Sequence
  Synthetic
cuuauaaaugacacugag

SEQ ID NO: 51667 - RNA, 19 nt, Artificial Sequence
  Synthetic
ucuuauaaaugacacugag

SEQ ID NO: 51668 - RNA, 20 nt, Artificial Sequence
  Synthetic
uucuuauaaaugacacugag

SEQ ID NO: 51669 - RNA, 21 nt, Artificial Sequence
  Synthetic
uuucuuauaaaugacacugag

SEQ ID NO: 51670 - RNA, 23 nt, Artificial Sequence
  Synthetic
aguuucuuauaaaugacacugag

SEQ ID NO: 51671 - RNA, 24 nt, Artificial Sequence
  Synthetic
aaguuucuuauaaaugacacugag

SEQ ID NO: 51672 - RNA, 18 nt, Artificial Sequence
  Synthetic
cuuuggacagagacugag

SEQ ID NO: 51673 - RNA, 19 nt, Artificial Sequence
  Synthetic
ccuuuggacagagacugag

SEQ ID NO: 51674 - RNA, 20 nt, Artificial Sequence
  Synthetic
cccuuuggacagagacugag

SEQ ID NO: 51675 - RNA, 22 nt, Artificial Sequence
  Synthetic
agcccuuuggacagagacugag

SEQ ID NO: 51676 - RNA, 23 nt, Artificial Sequence
  Synthetic
cagcccuuuggacagagacugag

SEQ ID NO: 51677 - RNA, 24 nt, Artificial Sequence
  Synthetic
acagcccuuuggacagagacugag

SEQ ID NO: 51678 - RNA, 19 nt, Artificial Sequence
  Synthetic
aguacaucucaauacugag

SEQ ID NO: 51679 - RNA, 20 nt, Artificial Sequence
  Synthetic
uaguacaucucaauacugag

SEQ ID NO: 51680 - RNA, 21 nt, Artificial Sequence
  Synthetic
uuaguacaucucaauacugag

SEQ ID NO: 51681 - RNA, 23 nt, Artificial Sequence
  Synthetic
aguuaguacaucucaauacugag

SEQ ID NO: 51682 - RNA, 18 nt, Artificial Sequence
  Synthetic
uauaaacuaauaccugag

SEQ ID NO: 51683 - RNA, 19 nt, Artificial Sequence
  Synthetic
auauaaacuaauaccugag

SEQ ID NO: 51684 - RNA, 20 nt, Artificial Sequence
  Synthetic
uauauaaacuaauaccugag

SEQ ID NO: 51685 - RNA, 21 nt, Artificial Sequence
  Synthetic
uuauauaaacuaauaccugag

SEQ ID NO: 51686 - RNA, 22 nt, Artificial Sequence
  Synthetic
uuuauauaaacuaauaccugag

SEQ ID NO: 51687 - RNA, 23 nt, Artificial Sequence
  Synthetic
uuuuauauaaacuaauaccugag

SEQ ID NO: 51688 - RNA, 24 nt, Artificial Sequence
  Synthetic
auuuuauauaaacuaauaccugag

SEQ ID NO: 51689 - RNA, 18 nt, Artificial Sequence
  Synthetic
acucauucuccuccugag

SEQ ID NO: 51690 - RNA, 19 nt, Artificial Sequence
  Synthetic
cacucauucuccuccugag

SEQ ID NO: 51691 - RNA, 20 nt, Artificial Sequence
  Synthetic
ucacucauucuccuccugag

SEQ ID NO: 51692 - RNA, 22 nt, Artificial Sequence
  Synthetic
ugucacucauucuccuccugag

SEQ ID NO: 51693 - RNA, 23 nt, Artificial Sequence
  Synthetic
augucacucauucuccuccugag

SEQ ID NO: 51694 - RNA, 24 nt, Artificial Sequence
  Synthetic
uaugucacucauucuccuccugag

SEQ ID NO: 51695 - RNA, 18 nt, Artificial Sequence
  Synthetic
ugucucgugucagcugag

SEQ ID NO: 51696 - RNA, 19 nt, Artificial Sequence
  Synthetic
cugucucgugucagcugag

SEQ ID NO: 51697 - RNA, 20 nt, Artificial Sequence
  Synthetic
ucugucucgugucagcugag

SEQ ID NO: 51698 - RNA, 21 nt, Artificial Sequence
  Synthetic
uucugucucgugucagcugag

SEQ ID NO: 51699 - RNA, 22 nt, Artificial Sequence
  Synthetic
uuucugucucgugucagcugag

SEQ ID NO: 51700 - RNA, 23 nt, Artificial Sequence
  Synthetic
auuucugucucgugucagcugag

SEQ ID NO: 51701 - RNA, 24 nt, Artificial Sequence
  Synthetic
uauuucugucucgugucagcugag

SEQ ID NO: 51702 - RNA, 18 nt, Artificial Sequence
  Synthetic
aaccaucccagggcugag

SEQ ID NO: 51703 - RNA, 19 nt, Artificial Sequence
  Synthetic
uaaccaucccagggcugag

SEQ ID NO: 51704 - RNA, 20 nt, Artificial Sequence
  Synthetic
cuaaccaucccagggcugag

SEQ ID NO: 51705 - RNA, 21 nt, Artificial Sequence
  Synthetic
ccuaaccaucccagggcugag

SEQ ID NO: 51706 - RNA, 23 nt, Artificial Sequence
  Synthetic
ugccuaaccaucccagggcugag

SEQ ID NO: 51707 - RNA, 24 nt, Artificial Sequence
  Synthetic
cugccuaaccaucccagggcugag

SEQ ID NO: 51708 - RNA, 19 nt, Artificial Sequence
  Synthetic
agagccucuaagugcugag

SEQ ID NO: 51709 - RNA, 22 nt, Artificial Sequence
  Synthetic
aggagagccucuaagugcugag

SEQ ID NO: 51710 - RNA, 23 nt, Artificial Sequence
  Synthetic
caggagagccucuaagugcugag

SEQ ID NO: 51711 - RNA, 21 nt, Artificial Sequence
  Synthetic
acccaauaaaaguuugcugag

SEQ ID NO: 51712 - RNA, 23 nt, Artificial Sequence
  Synthetic
agacccaauaaaaguuugcugag

SEQ ID NO: 51713 - RNA, 18 nt, Artificial Sequence
  Synthetic
aauuaaaaauucucugag

SEQ ID NO: 51714 - RNA, 19 nt, Artificial Sequence
  Synthetic
caauuaaaaauucucugag

SEQ ID NO: 51715 - RNA, 20 nt, Artificial Sequence
  Synthetic
acaauuaaaaauucucugag

SEQ ID NO: 51716 - RNA, 22 nt, Artificial Sequence
  Synthetic
agacaauuaaaaauucucugag

SEQ ID NO: 51717 - RNA, 23 nt, Artificial Sequence
  Synthetic
cagacaauuaaaaauucucugag

SEQ ID NO: 51718 - RNA, 24 nt, Artificial Sequence
  Synthetic
acagacaauuaaaaauucucugag

SEQ ID NO: 51719 - RNA, 18 nt, Artificial Sequence
  Synthetic
agaauggagcuaagugag

SEQ ID NO: 51720 - RNA, 20 nt, Artificial Sequence
  Synthetic
ugagaauggagcuaagugag

SEQ ID NO: 51721 - RNA, 21 nt, Artificial Sequence
  Synthetic
uugagaauggagcuaagugag

SEQ ID NO: 51722 - RNA, 22 nt, Artificial Sequence
  Synthetic
auugagaauggagcuaagugag

SEQ ID NO: 51723 - RNA, 23 nt, Artificial Sequence
  Synthetic
cauugagaauggagcuaagugag

SEQ ID NO: 51724 - RNA, 24 nt, Artificial Sequence
  Synthetic
ccauugagaauggagcuaagugag

SEQ ID NO: 51725 - RNA, 18 nt, Artificial Sequence
  Synthetic
cagaaacaauauagugag

SEQ ID NO: 51726 - RNA, 19 nt, Artificial Sequence
  Synthetic
acagaaacaauauagugag

SEQ ID NO: 51727 - RNA, 20 nt, Artificial Sequence
  Synthetic
aacagaaacaauauagugag

SEQ ID NO: 51728 - RNA, 21 nt, Artificial Sequence
  Synthetic
caacagaaacaauauagugag

SEQ ID NO: 51729 - RNA, 22 nt, Artificial Sequence
  Synthetic
acaacagaaacaauauagugag

SEQ ID NO: 51730 - RNA, 23 nt, Artificial Sequence
  Synthetic
uacaacagaaacaauauagugag

SEQ ID NO: 51731 - RNA, 24 nt, Artificial Sequence
  Synthetic
cuacaacagaaacaauauagugag

SEQ ID NO: 51732 - RNA, 19 nt, Artificial Sequence
  Synthetic
ugcuuuguggggaggugag

SEQ ID NO: 51733 - RNA, 21 nt, Artificial Sequence
  Synthetic
ugugcuuuguggggaggugag

SEQ ID NO: 51734 - RNA, 22 nt, Artificial Sequence
  Synthetic
uugugcuuuguggggaggugag

SEQ ID NO: 51735 - RNA, 23 nt, Artificial Sequence
  Synthetic
cuugugcuuuguggggaggugag

SEQ ID NO: 51736 - RNA, 18 nt, Artificial Sequence
  Synthetic
acauauuguuauggugag

SEQ ID NO: 51737 - RNA, 19 nt, Artificial Sequence
  Synthetic
uacauauuguuauggugag

SEQ ID NO: 51738 - RNA, 22 nt, Artificial Sequence
  Synthetic
ugguacauauuguuauggugag

SEQ ID NO: 51739 - RNA, 23 nt, Artificial Sequence
  Synthetic
augguacauauuguuauggugag

SEQ ID NO: 51740 - RNA, 24 nt, Artificial Sequence
  Synthetic
aaugguacauauuguuauggugag

SEQ ID NO: 51741 - RNA, 18 nt, Artificial Sequence
  Synthetic
ucucgacuuuucugugag

SEQ ID NO: 51742 - RNA, 19 nt, Artificial Sequence
  Synthetic
cucucgacuuuucugugag

SEQ ID NO: 51743 - RNA, 21 nt, Artificial Sequence
  Synthetic
ugcucucgacuuuucugugag

SEQ ID NO: 51744 - RNA, 22 nt, Artificial Sequence
  Synthetic
augcucucgacuuuucugugag

SEQ ID NO: 51745 - RNA, 23 nt, Artificial Sequence
  Synthetic
aaugcucucgacuuuucugugag

SEQ ID NO: 51746 - RNA, 24 nt, Artificial Sequence
  Synthetic
uaaugcucucgacuuuucugugag

SEQ ID NO: 51747 - RNA, 18 nt, Artificial Sequence
  Synthetic
aaaaagguaaacauugag

SEQ ID NO: 51748 - RNA, 19 nt, Artificial Sequence
  Synthetic
caaaaagguaaacauugag

SEQ ID NO: 51749 - RNA, 20 nt, Artificial Sequence
  Synthetic
ccaaaaagguaaacauugag

SEQ ID NO: 51750 - RNA, 21 nt, Artificial Sequence
  Synthetic
uccaaaaagguaaacauugag

SEQ ID NO: 51751 - RNA, 22 nt, Artificial Sequence
  Synthetic
uuccaaaaagguaaacauugag

SEQ ID NO: 51752 - RNA, 23 nt, Artificial Sequence
  Synthetic
cuuccaaaaagguaaacauugag

SEQ ID NO: 51753 - RNA, 18 nt, Artificial Sequence
  Synthetic
agaaaagcacucauugag

SEQ ID NO: 51754 - RNA, 19 nt, Artificial Sequence
  Synthetic
uagaaaagcacucauugag

SEQ ID NO: 51755 - RNA, 20 nt, Artificial Sequence
  Synthetic
auagaaaagcacucauugag

SEQ ID NO: 51756 - RNA, 21 nt, Artificial Sequence
  Synthetic
uauagaaaagcacucauugag

SEQ ID NO: 51757 - RNA, 22 nt, Artificial Sequence
  Synthetic
auauagaaaagcacucauugag

SEQ ID NO: 51758 - RNA, 23 nt, Artificial Sequence
  Synthetic
cauauagaaaagcacucauugag

SEQ ID NO: 51759 - RNA, 24 nt, Artificial Sequence
  Synthetic
acauauagaaaagcacucauugag

SEQ ID NO: 51760 - RNA, 19 nt, Artificial Sequence
  Synthetic
uggaugcaaguggauugag

SEQ ID NO: 51761 - RNA, 20 nt, Artificial Sequence
  Synthetic
auggaugcaaguggauugag

SEQ ID NO: 51762 - RNA, 21 nt, Artificial Sequence
  Synthetic
cauggaugcaaguggauugag

SEQ ID NO: 51763 - RNA, 22 nt, Artificial Sequence
  Synthetic
ccauggaugcaaguggauugag

SEQ ID NO: 51764 - RNA, 18 nt, Artificial Sequence
  Synthetic
auugauuaauauauugag

SEQ ID NO: 51765 - RNA, 19 nt, Artificial Sequence
  Synthetic
uauugauuaauauauugag

SEQ ID NO: 51766 - RNA, 18 nt, Artificial Sequence
  Synthetic
uccuccaauggacuugag

SEQ ID NO: 51767 - RNA, 19 nt, Artificial Sequence
  Synthetic
uuccuccaauggacuugag

SEQ ID NO: 51768 - RNA, 20 nt, Artificial Sequence
  Synthetic
auuccuccaauggacuugag

SEQ ID NO: 51769 - RNA, 21 nt, Artificial Sequence
  Synthetic
aauuccuccaauggacuugag

SEQ ID NO: 51770 - RNA, 22 nt, Artificial Sequence
  Synthetic
caauuccuccaauggacuugag

SEQ ID NO: 51771 - RNA, 23 nt, Artificial Sequence
  Synthetic
acaauuccuccaauggacuugag

SEQ ID NO: 51772 - RNA, 18 nt, Artificial Sequence
  Synthetic
cuaucaguuucaguugag

SEQ ID NO: 51773 - RNA, 20 nt, Artificial Sequence
  Synthetic
agcuaucaguuucaguugag

SEQ ID NO: 51774 - RNA, 21 nt, Artificial Sequence
  Synthetic
cagcuaucaguuucaguugag

SEQ ID NO: 51775 - RNA, 22 nt, Artificial Sequence
  Synthetic
ucagcuaucaguuucaguugag

SEQ ID NO: 51776 - RNA, 23 nt, Artificial Sequence
  Synthetic
aucagcuaucaguuucaguugag

SEQ ID NO: 51777 - RNA, 24 nt, Artificial Sequence
  Synthetic
aaucagcuaucaguuucaguugag

SEQ ID NO: 51778 - RNA, 18 nt, Artificial Sequence
  Synthetic
acuaccuaccuaguugag

SEQ ID NO: 51779 - RNA, 19 nt, Artificial Sequence
  Synthetic
uacuaccuaccuaguugag

SEQ ID NO: 51780 - RNA, 20 nt, Artificial Sequence
  Synthetic
auacuaccuaccuaguugag

SEQ ID NO: 51781 - RNA, 21 nt, Artificial Sequence
  Synthetic
cauacuaccuaccuaguugag

SEQ ID NO: 51782 - RNA, 22 nt, Artificial Sequence
  Synthetic
ccauacuaccuaccuaguugag

SEQ ID NO: 51783 - RNA, 23 nt, Artificial Sequence
  Synthetic
accauacuaccuaccuaguugag

SEQ ID NO: 51784 - RNA, 24 nt, Artificial Sequence
  Synthetic
uaccauacuaccuaccuaguugag

SEQ ID NO: 51785 - RNA, 22 nt, Artificial Sequence
  Synthetic
uguggaaaugaaagcauuugag

SEQ ID NO: 51786 - RNA, 23 nt, Artificial Sequence
  Synthetic
uuguggaaaugaaagcauuugag

SEQ ID NO: 51787 - RNA, 21 nt, Artificial Sequence
  Synthetic
uuauuuccauuuucauuugag

SEQ ID NO: 51788 - RNA, 22 nt, Artificial Sequence
  Synthetic
auuauuuccauuuucauuugag

SEQ ID NO: 51789 - RNA, 23 nt, Artificial Sequence
  Synthetic
uauuauuuccauuuucauuugag

SEQ ID NO: 51790 - RNA, 24 nt, Artificial Sequence
  Synthetic
cuauuauuuccauuuucauuugag

SEQ ID NO: 51791 - RNA, 18 nt, Artificial Sequence
  Synthetic
ccuaccuggagauuugag

SEQ ID NO: 51792 - RNA, 19 nt, Artificial Sequence
  Synthetic
accuaccuggagauuugag

SEQ ID NO: 51793 - RNA, 20 nt, Artificial Sequence
  Synthetic
uaccuaccuggagauuugag

SEQ ID NO: 51794 - RNA, 21 nt, Artificial Sequence
  Synthetic
uuaccuaccuggagauuugag

SEQ ID NO: 51795 - RNA, 24 nt, Artificial Sequence
  Synthetic
ugguuaccuaccuggagauuugag

SEQ ID NO: 51796 - RNA, 18 nt, Artificial Sequence
  Synthetic
cuuccucagcaguuugag

SEQ ID NO: 51797 - RNA, 19 nt, Artificial Sequence
  Synthetic
ccuuccucagcaguuugag

SEQ ID NO: 51798 - RNA, 20 nt, Artificial Sequence
  Synthetic
accuuccucagcaguuugag

SEQ ID NO: 51799 - RNA, 21 nt, Artificial Sequence
  Synthetic
caccuuccucagcaguuugag

SEQ ID NO: 51800 - RNA, 22 nt, Artificial Sequence
  Synthetic
ucaccuuccucagcaguuugag

SEQ ID NO: 51801 - RNA, 23 nt, Artificial Sequence
  Synthetic
uucaccuuccucagcaguuugag

SEQ ID NO: 51802 - RNA, 18 nt, Artificial Sequence
  Synthetic
cccaggauuaauuuugag

SEQ ID NO: 51803 - RNA, 19 nt, Artificial Sequence
  Synthetic
acccaggauuaauuuugag

SEQ ID NO: 51804 - RNA, 20 nt, Artificial Sequence
  Synthetic
cacccaggauuaauuuugag

SEQ ID NO: 51805 - RNA, 22 nt, Artificial Sequence
  Synthetic
agcacccaggauuaauuuugag

SEQ ID NO: 51806 - RNA, 24 nt, Artificial Sequence
  Synthetic
ugagcacccaggauuaauuuugag

SEQ ID NO: 51807 - RNA, 19 nt, Artificial Sequence
  Synthetic
aguggcagugacuuuugag

SEQ ID NO: 51808 - RNA, 20 nt, Artificial Sequence
  Synthetic
uaguggcagugacuuuugag

SEQ ID NO: 51809 - RNA, 21 nt, Artificial Sequence
  Synthetic
cuaguggcagugacuuuugag

SEQ ID NO: 51810 - RNA, 22 nt, Artificial Sequence
  Synthetic
acuaguggcagugacuuuugag

SEQ ID NO: 51811 - RNA, 24 nt, Artificial Sequence
  Synthetic
ugacuaguggcagugacuuuugag

SEQ ID NO: 51812 - RNA, 18 nt, Artificial Sequence
  Synthetic
cacguuaaauaaaaauag

SEQ ID NO: 51813 - RNA, 20 nt, Artificial Sequence
  Synthetic
agcacguuaaauaaaaauag

SEQ ID NO: 51814 - RNA, 21 nt, Artificial Sequence
  Synthetic
uagcacguuaaauaaaaauag

SEQ ID NO: 51815 - RNA, 23 nt, Artificial Sequence
  Synthetic
aguagcacguuaaauaaaaauag

SEQ ID NO: 51816 - RNA, 24 nt, Artificial Sequence
  Synthetic
aaguagcacguuaaauaaaaauag

SEQ ID NO: 51817 - RNA, 22 nt, Artificial Sequence
  Synthetic
ugacauuucagaaagaaaauag

SEQ ID NO: 51818 - RNA, 23 nt, Artificial Sequence
  Synthetic
uugacauuucagaaagaaaauag

SEQ ID NO: 51819 - RNA, 24 nt, Artificial Sequence
  Synthetic
cuugacauuucagaaagaaaauag

SEQ ID NO: 51820 - RNA, 18 nt, Artificial Sequence
  Synthetic
cauuauauuauaaaauag

SEQ ID NO: 51821 - RNA, 19 nt, Artificial Sequence
  Synthetic
ucauuauauuauaaaauag

SEQ ID NO: 51822 - RNA, 21 nt, Artificial Sequence
  Synthetic
ugucauuauauuauaaaauag

SEQ ID NO: 51823 - RNA, 22 nt, Artificial Sequence
  Synthetic
uugucauuauauuauaaaauag

SEQ ID NO: 51824 - RNA, 23 nt, Artificial Sequence
  Synthetic
auugucauuauauuauaaaauag

SEQ ID NO: 51825 - RNA, 24 nt, Artificial Sequence
  Synthetic
uauugucauuauauuauaaaauag

SEQ ID NO: 51826 - RNA, 18 nt, Artificial Sequence
  Synthetic
uucaucccacugaaauag

SEQ ID NO: 51827 - RNA, 19 nt, Artificial Sequence
  Synthetic
uuucaucccacugaaauag

SEQ ID NO: 51828 - RNA, 20 nt, Artificial Sequence
  Synthetic
uuuucaucccacugaaauag

SEQ ID NO: 51829 - RNA, 22 nt, Artificial Sequence
  Synthetic
uguuuucaucccacugaaauag

SEQ ID NO: 51830 - RNA, 23 nt, Artificial Sequence
  Synthetic
cuguuuucaucccacugaaauag

SEQ ID NO: 51831 - RNA, 18 nt, Artificial Sequence
  Synthetic
aucagggaaaauaaauag

SEQ ID NO: 51832 - RNA, 20 nt, Artificial Sequence
  Synthetic
agaucagggaaaauaaauag

SEQ ID NO: 51833 - RNA, 22 nt, Artificial Sequence
  Synthetic
agagaucagggaaaauaaauag

SEQ ID NO: 51834 - RNA, 23 nt, Artificial Sequence
  Synthetic
cagagaucagggaaaauaaauag

SEQ ID NO: 51835 - RNA, 24 nt, Artificial Sequence
  Synthetic
ccagagaucagggaaaauaaauag

SEQ ID NO: 51836 - RNA, 19 nt, Artificial Sequence
  Synthetic
aggucugguuucuaaauag

SEQ ID NO: 51837 - RNA, 20 nt, Artificial Sequence
  Synthetic
caggucugguuucuaaauag

SEQ ID NO: 51838 - RNA, 21 nt, Artificial Sequence
  Synthetic
ccaggucugguuucuaaauag

SEQ ID NO: 51839 - RNA, 22 nt, Artificial Sequence
  Synthetic
uccaggucugguuucuaaauag

SEQ ID NO: 51840 - RNA, 23 nt, Artificial Sequence
  Synthetic
cuccaggucugguuucuaaauag

SEQ ID NO: 51841 - RNA, 24 nt, Artificial Sequence
  Synthetic
acuccaggucugguuucuaaauag

SEQ ID NO: 51842 - RNA, 19 nt, Artificial Sequence
  Synthetic
ugaugucccaaguaaauag

SEQ ID NO: 51843 - RNA, 20 nt, Artificial Sequence
  Synthetic
uugaugucccaaguaaauag

SEQ ID NO: 51844 - RNA, 21 nt, Artificial Sequence
  Synthetic
uuugaugucccaaguaaauag

SEQ ID NO: 51845 - RNA, 22 nt, Artificial Sequence
  Synthetic
uuuugaugucccaaguaaauag

SEQ ID NO: 51846 - RNA, 23 nt, Artificial Sequence
  Synthetic
uuuuugaugucccaaguaaauag

SEQ ID NO: 51847 - RNA, 24 nt, Artificial Sequence
  Synthetic
auuuuugaugucccaaguaaauag

SEQ ID NO: 51848 - RNA, 21 nt, Artificial Sequence
  Synthetic
uuuguuucuuuuauuaaauag

SEQ ID NO: 51849 - RNA, 22 nt, Artificial Sequence
  Synthetic
cuuuguuucuuuuauuaaauag

SEQ ID NO: 51850 - RNA, 24 nt, Artificial Sequence
  Synthetic
ugcuuuguuucuuuuauuaaauag

SEQ ID NO: 51851 - RNA, 18 nt, Artificial Sequence
  Synthetic
aggaggaucccagaauag

SEQ ID NO: 51852 - RNA, 21 nt, Artificial Sequence
  Synthetic
uggaggaggaucccagaauag

SEQ ID NO: 51853 - RNA, 23 nt, Artificial Sequence
  Synthetic
uguggaggaggaucccagaauag

SEQ ID NO: 51854 - RNA, 24 nt, Artificial Sequence
  Synthetic
auguggaggaggaucccagaauag

SEQ ID NO: 51855 - RNA, 18 nt, Artificial Sequence
  Synthetic
ucacuaaaaugagaauag

SEQ ID NO: 51856 - RNA, 19 nt, Artificial Sequence
  Synthetic
uucacuaaaaugagaauag

SEQ ID NO: 51857 - RNA, 20 nt, Artificial Sequence
  Synthetic
cuucacuaaaaugagaauag

SEQ ID NO: 51858 - RNA, 21 nt, Artificial Sequence
  Synthetic
ccuucacuaaaaugagaauag

SEQ ID NO: 51859 - RNA, 22 nt, Artificial Sequence
  Synthetic
accuucacuaaaaugagaauag

SEQ ID NO: 51860 - RNA, 23 nt, Artificial Sequence
  Synthetic
aaccuucacuaaaaugagaauag

SEQ ID NO: 51861 - RNA, 24 nt, Artificial Sequence
  Synthetic
uaaccuucacuaaaaugagaauag

SEQ ID NO: 51862 - RNA, 18 nt, Artificial Sequence
  Synthetic
uuucucuaccuggaauag

SEQ ID NO: 51863 - RNA, 19 nt, Artificial Sequence
  Synthetic
uuuucucuaccuggaauag

SEQ ID NO: 51864 - RNA, 20 nt, Artificial Sequence
  Synthetic
uuuuucucuaccuggaauag

SEQ ID NO: 51865 - RNA, 21 nt, Artificial Sequence
  Synthetic
uuuuuucucuaccuggaauag

SEQ ID NO: 51866 - RNA, 22 nt, Artificial Sequence
  Synthetic
auuuuuucucuaccuggaauag

SEQ ID NO: 51867 - RNA, 23 nt, Artificial Sequence
  Synthetic
cauuuuuucucuaccuggaauag

SEQ ID NO: 51868 - RNA, 21 nt, Artificial Sequence
  Synthetic
cuucucuugcuugcugaauag

SEQ ID NO: 51869 - RNA, 22 nt, Artificial Sequence
  Synthetic
ccuucucuugcuugcugaauag

SEQ ID NO: 51870 - RNA, 23 nt, Artificial Sequence
  Synthetic
cccuucucuugcuugcugaauag

SEQ ID NO: 51871 - RNA, 24 nt, Artificial Sequence
  Synthetic
ucccuucucuugcuugcugaauag

SEQ ID NO: 51872 - RNA, 18 nt, Artificial Sequence
  Synthetic
auuucuuaacuugaauag

SEQ ID NO: 51873 - RNA, 19 nt, Artificial Sequence
  Synthetic
uauuucuuaacuugaauag

SEQ ID NO: 51874 - RNA, 20 nt, Artificial Sequence
  Synthetic
uuauuucuuaacuugaauag

SEQ ID NO: 51875 - RNA, 21 nt, Artificial Sequence
  Synthetic
uuuauuucuuaacuugaauag

SEQ ID NO: 51876 - RNA, 22 nt, Artificial Sequence
  Synthetic
uuuuauuucuuaacuugaauag

SEQ ID NO: 51877 - RNA, 23 nt, Artificial Sequence
  Synthetic
uuuuuauuucuuaacuugaauag

SEQ ID NO: 51878 - RNA, 24 nt, Artificial Sequence
  Synthetic
auuuuuauuucuuaacuugaauag

SEQ ID NO: 51879 - RNA, 18 nt, Artificial Sequence
  Synthetic
cguuucauccaauaauag

SEQ ID NO: 51880 - RNA, 20 nt, Artificial Sequence
  Synthetic
agcguuucauccaauaauag

SEQ ID NO: 51881 - RNA, 21 nt, Artificial Sequence
  Synthetic
cagcguuucauccaauaauag

SEQ ID NO: 51882 - RNA, 22 nt, Artificial Sequence
  Synthetic
acagcguuucauccaauaauag

SEQ ID NO: 51883 - RNA, 23 nt, Artificial Sequence
  Synthetic
uacagcguuucauccaauaauag

SEQ ID NO: 51884 - RNA, 24 nt, Artificial Sequence
  Synthetic
auacagcguuucauccaauaauag

SEQ ID NO: 51885 - RNA, 21 nt, Artificial Sequence
  Synthetic
cacccaucauccacauaauag

SEQ ID NO: 51886 - RNA, 22 nt, Artificial Sequence
  Synthetic
ccacccaucauccacauaauag

SEQ ID NO: 51887 - RNA, 23 nt, Artificial Sequence
  Synthetic
cccacccaucauccacauaauag

SEQ ID NO: 51888 - RNA, 24 nt, Artificial Sequence
  Synthetic
ucccacccaucauccacauaauag

SEQ ID NO: 51889 - RNA, 18 nt, Artificial Sequence
  Synthetic
ugauauuauacauaauag

SEQ ID NO: 51890 - RNA, 19 nt, Artificial Sequence
  Synthetic
augauauuauacauaauag

SEQ ID NO: 51891 - RNA, 20 nt, Artificial Sequence
  Synthetic
aaugauauuauacauaauag

SEQ ID NO: 51892 - RNA, 21 nt, Artificial Sequence
  Synthetic
aaaugauauuauacauaauag

SEQ ID NO: 51893 - RNA, 22 nt, Artificial Sequence
  Synthetic
uaaaugauauuauacauaauag

SEQ ID NO: 51894 - RNA, 23 nt, Artificial Sequence
  Synthetic
uuaaaugauauuauacauaauag

SEQ ID NO: 51895 - RNA, 24 nt, Artificial Sequence
  Synthetic
cuuaaaugauauuauacauaauag

SEQ ID NO: 51896 - RNA, 18 nt, Artificial Sequence
  Synthetic
aguaauugcugauaauag

SEQ ID NO: 51897 - RNA, 19 nt, Artificial Sequence
  Synthetic
uaguaauugcugauaauag

SEQ ID NO: 51898 - RNA, 20 nt, Artificial Sequence
  Synthetic
uuaguaauugcugauaauag

SEQ ID NO: 51899 - RNA, 21 nt, Artificial Sequence
  Synthetic
auuaguaauugcugauaauag

SEQ ID NO: 51900 - RNA, 22 nt, Artificial Sequence
  Synthetic
aauuaguaauugcugauaauag

SEQ ID NO: 51901 - RNA, 23 nt, Artificial Sequence
  Synthetic
uaauuaguaauugcugauaauag

SEQ ID NO: 51902 - RNA, 24 nt, Artificial Sequence
  Synthetic
uuaauuaguaauugcugauaauag

SEQ ID NO: 51903 - RNA, 22 nt, Artificial Sequence
  Synthetic
uguuauuauccccauauaauag

SEQ ID NO: 51904 - RNA, 23 nt, Artificial Sequence
  Synthetic
uuguuauuauccccauauaauag

SEQ ID NO: 51905 - RNA, 24 nt, Artificial Sequence
  Synthetic
cuuguuauuauccccauauaauag

SEQ ID NO: 51906 - RNA, 18 nt, Artificial Sequence
  Synthetic
auuuuuuuuaacuaauag

SEQ ID NO: 51907 - RNA, 19 nt, Artificial Sequence
  Synthetic
cauuuuuuuuaacuaauag

SEQ ID NO: 51908 - RNA, 20 nt, Artificial Sequence
  Synthetic
ccauuuuuuuuaacuaauag

SEQ ID NO: 51909 - RNA, 21 nt, Artificial Sequence
  Synthetic
accauuuuuuuuaacuaauag

SEQ ID NO: 51910 - RNA, 23 nt, Artificial Sequence
  Synthetic
ugaccauuuuuuuuaacuaauag

SEQ ID NO: 51911 - RNA, 24 nt, Artificial Sequence
  Synthetic
uugaccauuuuuuuuaacuaauag

SEQ ID NO: 51912 - RNA, 18 nt, Artificial Sequence
  Synthetic
cauccauauaucuaauag

SEQ ID NO: 51913 - RNA, 19 nt, Artificial Sequence
  Synthetic
ucauccauauaucuaauag

SEQ ID NO: 51914 - RNA, 20 nt, Artificial Sequence
  Synthetic
uucauccauauaucuaauag

SEQ ID NO: 51915 - RNA, 21 nt, Artificial Sequence
  Synthetic
uuucauccauauaucuaauag

SEQ ID NO: 51916 - RNA, 22 nt, Artificial Sequence
  Synthetic
uuuucauccauauaucuaauag

SEQ ID NO: 51917 - RNA, 23 nt, Artificial Sequence
  Synthetic
uuuuucauccauauaucuaauag

SEQ ID NO: 51918 - RNA, 24 nt, Artificial Sequence
  Synthetic
auuuuucauccauauaucuaauag

SEQ ID NO: 51919 - RNA, 19 nt, Artificial Sequence
  Synthetic
uguugaugcuauuuaauag

SEQ ID NO: 51920 - RNA, 20 nt, Artificial Sequence
  Synthetic
auguugaugcuauuuaauag

SEQ ID NO: 51921 - RNA, 22 nt, Artificial Sequence
  Synthetic
agauguugaugcuauuuaauag

SEQ ID NO: 51922 - RNA, 23 nt, Artificial Sequence
  Synthetic
cagauguugaugcuauuuaauag

SEQ ID NO: 51923 - RNA, 24 nt, Artificial Sequence
  Synthetic
ucagauguugaugcuauuuaauag

SEQ ID NO: 51924 - RNA, 18 nt, Artificial Sequence
  Synthetic
augucagagguuuaauag

SEQ ID NO: 51925 - RNA, 19 nt, Artificial Sequence
  Synthetic
aaugucagagguuuaauag

SEQ ID NO: 51926 - RNA, 20 nt, Artificial Sequence
  Synthetic
uaaugucagagguuuaauag

SEQ ID NO: 51927 - RNA, 23 nt, Artificial Sequence
  Synthetic
ugguaaugucagagguuuaauag

SEQ ID NO: 51928 - RNA, 24 nt, Artificial Sequence
  Synthetic
uugguaaugucagagguuuaauag

SEQ ID NO: 51929 - RNA, 18 nt, Artificial Sequence
  Synthetic
uaaaccuauuuuuaauag

SEQ ID NO: 51930 - RNA, 19 nt, Artificial Sequence
  Synthetic
cuaaaccuauuuuuaauag

SEQ ID NO: 51931 - RNA, 20 nt, Artificial Sequence
  Synthetic
acuaaaccuauuuuuaauag

SEQ ID NO: 51932 - RNA, 21 nt, Artificial Sequence
  Synthetic
uacuaaaccuauuuuuaauag

SEQ ID NO: 51933 - RNA, 22 nt, Artificial Sequence
  Synthetic
auacuaaaccuauuuuuaauag

SEQ ID NO: 51934 - RNA, 23 nt, Artificial Sequence
  Synthetic
aauacuaaaccuauuuuuaauag

SEQ ID NO: 51935 - RNA, 24 nt, Artificial Sequence
  Synthetic
aaauacuaaaccuauuuuuaauag

SEQ ID NO: 51936 - RNA, 18 nt, Artificial Sequence
  Synthetic
accuacagagacacauag

SEQ ID NO: 51937 - RNA, 20 nt, Artificial Sequence
  Synthetic
ugaccuacagagacacauag

SEQ ID NO: 51938 - RNA, 21 nt, Artificial Sequence
  Synthetic
augaccuacagagacacauag

SEQ ID NO: 51939 - RNA, 22 nt, Artificial Sequence
  Synthetic
aaugaccuacagagacacauag

SEQ ID NO: 51940 - RNA, 23 nt, Artificial Sequence
  Synthetic
uaaugaccuacagagacacauag

SEQ ID NO: 51941 - RNA, 24 nt, Artificial Sequence
  Synthetic
uuaaugaccuacagagacacauag

SEQ ID NO: 51942 - RNA, 18 nt, Artificial Sequence
  Synthetic
cacuuauaggggacauag

SEQ ID NO: 51943 - RNA, 19 nt, Artificial Sequence
  Synthetic
ucacuuauaggggacauag

SEQ ID NO: 51944 - RNA, 20 nt, Artificial Sequence
  Synthetic
aucacuuauaggggacauag

SEQ ID NO: 51945 - RNA, 21 nt, Artificial Sequence
  Synthetic
aaucacuuauaggggacauag

SEQ ID NO: 51946 - RNA, 22 nt, Artificial Sequence
  Synthetic
uaaucacuuauaggggacauag

SEQ ID NO: 51947 - RNA, 23 nt, Artificial Sequence
  Synthetic
auaaucacuuauaggggacauag

SEQ ID NO: 51948 - RNA, 24 nt, Artificial Sequence
  Synthetic
aauaaucacuuauaggggacauag

SEQ ID NO: 51949 - RNA, 18 nt, Artificial Sequence
  Synthetic
uugcaacacaguacauag

SEQ ID NO: 51950 - RNA, 19 nt, Artificial Sequence
  Synthetic
cuugcaacacaguacauag

SEQ ID NO: 51951 - RNA, 20 nt, Artificial Sequence
  Synthetic
ucuugcaacacaguacauag

SEQ ID NO: 51952 - RNA, 18 nt, Artificial Sequence
  Synthetic
uucaauggaugagcauag

SEQ ID NO: 51953 - RNA, 19 nt, Artificial Sequence
  Synthetic
uuucaauggaugagcauag

SEQ ID NO: 51954 - RNA, 20 nt, Artificial Sequence
  Synthetic
uuuucaauggaugagcauag

SEQ ID NO: 51955 - RNA, 21 nt, Artificial Sequence
  Synthetic
uuuuucaauggaugagcauag

SEQ ID NO: 51956 - RNA, 22 nt, Artificial Sequence
  Synthetic
uuuuuucaauggaugagcauag

SEQ ID NO: 51957 - RNA, 18 nt, Artificial Sequence
  Synthetic
auaauuaacuuggcauag

SEQ ID NO: 51958 - RNA, 20 nt, Artificial Sequence
  Synthetic
ugauaauuaacuuggcauag

SEQ ID NO: 51959 - RNA, 21 nt, Artificial Sequence
  Synthetic
uugauaauuaacuuggcauag

SEQ ID NO: 51960 - RNA, 22 nt, Artificial Sequence
  Synthetic
cuugauaauuaacuuggcauag

SEQ ID NO: 51961 - RNA, 23 nt, Artificial Sequence
  Synthetic
ucuugauaauuaacuuggcauag

SEQ ID NO: 51962 - RNA, 24 nt, Artificial Sequence
  Synthetic
uucuugauaauuaacuuggcauag

SEQ ID NO: 51963 - RNA, 18 nt, Artificial Sequence
  Synthetic
uuuauguuaagugcauag

SEQ ID NO: 51964 - RNA, 19 nt, Artificial Sequence
  Synthetic
auuuauguuaagugcauag

SEQ ID NO: 51965 - RNA, 21 nt, Artificial Sequence
  Synthetic
ugauuuauguuaagugcauag

SEQ ID NO: 51966 - RNA, 22 nt, Artificial Sequence
  Synthetic
augauuuauguuaagugcauag

SEQ ID NO: 51967 - RNA, 24 nt, Artificial Sequence
  Synthetic
agaugauuuauguuaagugcauag

SEQ ID NO: 51968 - RNA, 18 nt, Artificial Sequence
  Synthetic
aaaaggaaaacaucauag

SEQ ID NO: 51969 - RNA, 19 nt, Artificial Sequence
  Synthetic
uaaaaggaaaacaucauag

SEQ ID NO: 51970 - RNA, 22 nt, Artificial Sequence
  Synthetic
agguaaaaggaaaacaucauag

SEQ ID NO: 51971 - RNA, 23 nt, Artificial Sequence
  Synthetic
aagguaaaaggaaaacaucauag

SEQ ID NO: 51972 - RNA, 19 nt, Artificial Sequence
  Synthetic
agguagacagaauagauag

SEQ ID NO: 51973 - RNA, 20 nt, Artificial Sequence
  Synthetic
cagguagacagaauagauag

SEQ ID NO: 51974 - RNA, 21 nt, Artificial Sequence
  Synthetic
acagguagacagaauagauag

SEQ ID NO: 51975 - RNA, 23 nt, Artificial Sequence
  Synthetic
agacagguagacagaauagauag

SEQ ID NO: 51976 - RNA, 24 nt, Artificial Sequence
  Synthetic
cagacagguagacagaauagauag

SEQ ID NO: 51977 - RNA, 19 nt, Artificial Sequence
  Synthetic
agauguguggaguagauag

SEQ ID NO: 51978 - RNA, 22 nt, Artificial Sequence
  Synthetic
aggagauguguggaguagauag

SEQ ID NO: 51979 - RNA, 23 nt, Artificial Sequence
  Synthetic
uaggagauguguggaguagauag

SEQ ID NO: 51980 - RNA, 24 nt, Artificial Sequence
  Synthetic
cuaggagauguguggaguagauag

SEQ ID NO: 51981 - RNA, 18 nt, Artificial Sequence
  Synthetic
ccaaagguaauccgauag

SEQ ID NO: 51982 - RNA, 19 nt, Artificial Sequence
  Synthetic
uccaaagguaauccgauag

SEQ ID NO: 51983 - RNA, 21 nt, Artificial Sequence
  Synthetic
aguccaaagguaauccgauag

SEQ ID NO: 51984 - RNA, 23 nt, Artificial Sequence
  Synthetic
ugaguccaaagguaauccgauag

SEQ ID NO: 51985 - RNA, 24 nt, Artificial Sequence
  Synthetic
uugaguccaaagguaauccgauag

SEQ ID NO: 51986 - RNA, 21 nt, Artificial Sequence
  Synthetic
uggggaugcacagagggauag

SEQ ID NO: 51987 - RNA, 23 nt, Artificial Sequence
  Synthetic
uguggggaugcacagagggauag

SEQ ID NO: 51988 - RNA, 18 nt, Artificial Sequence
  Synthetic
auuuugcaagugggauag

SEQ ID NO: 51989 - RNA, 19 nt, Artificial Sequence
  Synthetic
cauuuugcaagugggauag

SEQ ID NO: 51990 - RNA, 20 nt, Artificial Sequence
  Synthetic
ucauuuugcaagugggauag

SEQ ID NO: 51991 - RNA, 21 nt, Artificial Sequence
  Synthetic
uucauuuugcaagugggauag

SEQ ID NO: 51992 - RNA, 22 nt, Artificial Sequence
  Synthetic
auucauuuugcaagugggauag

SEQ ID NO: 51993 - RNA, 23 nt, Artificial Sequence
  Synthetic
cauucauuuugcaagugggauag

SEQ ID NO: 51994 - RNA, 24 nt, Artificial Sequence
  Synthetic
ccauucauuuugcaagugggauag

SEQ ID NO: 51995 - RNA, 18 nt, Artificial Sequence
  Synthetic
acacuugacagaugauag

SEQ ID NO: 51996 - RNA, 19 nt, Artificial Sequence
  Synthetic
cacacuugacagaugauag

SEQ ID NO: 51997 - RNA, 21 nt, Artificial Sequence
  Synthetic
ugcacacuugacagaugauag

SEQ ID NO: 51998 - RNA, 22 nt, Artificial Sequence
  Synthetic
uugcacacuugacagaugauag

SEQ ID NO: 51999 - RNA, 23 nt, Artificial Sequence
  Synthetic
auugcacacuugacagaugauag

SEQ ID NO: 52000 - RNA, 24 nt, Artificial Sequence
  Synthetic
uauugcacacuugacagaugauag

SEQ ID NO: 52001 - RNA, 18 nt, Artificial Sequence
  Synthetic
cuaaaauagaugugauag

SEQ ID NO: 52002 - RNA, 20 nt, Artificial Sequence
  Synthetic
ugcuaaaauagaugugauag

SEQ ID NO: 52003 - RNA, 24 nt, Artificial Sequence
  Synthetic
ugggugcuaaaauagaugugauag

SEQ ID NO: 52004 - RNA, 22 nt, Artificial Sequence
  Synthetic
cgucaucacccaugugugauag

SEQ ID NO: 52005 - RNA, 23 nt, Artificial Sequence
  Synthetic
acgucaucacccaugugugauag

SEQ ID NO: 52006 - RNA, 24 nt, Artificial Sequence
  Synthetic
aacgucaucacccaugugugauag

SEQ ID NO: 52007 - RNA, 21 nt, Artificial Sequence
  Synthetic
acuauaauaacauauugauag

SEQ ID NO: 52008 - RNA, 22 nt, Artificial Sequence
  Synthetic
aacuauaauaacauauugauag

SEQ ID NO: 52009 - RNA, 18 nt, Artificial Sequence
  Synthetic
auacacuaacaaauauag

SEQ ID NO: 52010 - RNA, 19 nt, Artificial Sequence
  Synthetic
cauacacuaacaaauauag

SEQ ID NO: 52011 - RNA, 20 nt, Artificial Sequence
  Synthetic
acauacacuaacaaauauag

SEQ ID NO: 52012 - RNA, 21 nt, Artificial Sequence
  Synthetic
uacauacacuaacaaauauag

SEQ ID NO: 52013 - RNA, 22 nt, Artificial Sequence
  Synthetic
uuacauacacuaacaaauauag

SEQ ID NO: 52014 - RNA, 24 nt, Artificial Sequence
  Synthetic
uguuacauacacuaacaaauauag

SEQ ID NO: 52015 - RNA, 18 nt, Artificial Sequence
  Synthetic
cugaaucucagaauauag

SEQ ID NO: 52016 - RNA, 20 nt, Artificial Sequence
  Synthetic
cgcugaaucucagaauauag

SEQ ID NO: 52017 - RNA, 21 nt, Artificial Sequence
  Synthetic
acgcugaaucucagaauauag

SEQ ID NO: 52018 - RNA, 22 nt, Artificial Sequence
  Synthetic
aacgcugaaucucagaauauag

SEQ ID NO: 52019 - RNA, 23 nt, Artificial Sequence
  Synthetic
uaacgcugaaucucagaauauag

SEQ ID NO: 52020 - RNA, 24 nt, Artificial Sequence
  Synthetic
auaacgcugaaucucagaauauag

SEQ ID NO: 52021 - RNA, 18 nt, Artificial Sequence
  Synthetic
agaguucauaucauauag

SEQ ID NO: 52022 - RNA, 19 nt, Artificial Sequence
  Synthetic
uagaguucauaucauauag

SEQ ID NO: 52023 - RNA, 20 nt, Artificial Sequence
  Synthetic
auagaguucauaucauauag

SEQ ID NO: 52024 - RNA, 22 nt, Artificial Sequence
  Synthetic
ugauagaguucauaucauauag

SEQ ID NO: 52025 - RNA, 23 nt, Artificial Sequence
  Synthetic
uugauagaguucauaucauauag

SEQ ID NO: 52026 - RNA, 24 nt, Artificial Sequence
  Synthetic
auugauagaguucauaucauauag

SEQ ID NO: 52027 - RNA, 18 nt, Artificial Sequence
  Synthetic
aaguuaaaagcgauauag

SEQ ID NO: 52028 - RNA, 20 nt, Artificial Sequence
  Synthetic
agaaguuaaaagcgauauag

SEQ ID NO: 52029 - RNA, 21 nt, Artificial Sequence
  Synthetic
cagaaguuaaaagcgauauag

SEQ ID NO: 52030 - RNA, 22 nt, Artificial Sequence
  Synthetic
acagaaguuaaaagcgauauag

SEQ ID NO: 52031 - RNA, 23 nt, Artificial Sequence
  Synthetic
aacagaaguuaaaagcgauauag

SEQ ID NO: 52032 - RNA, 24 nt, Artificial Sequence
  Synthetic
caacagaaguuaaaagcgauauag

SEQ ID NO: 52033 - RNA, 18 nt, Artificial Sequence
  Synthetic
accuguaaaaauauauag

SEQ ID NO: 52034 - RNA, 19 nt, Artificial Sequence
  Synthetic
caccuguaaaaauauauag

SEQ ID NO: 52035 - RNA, 20 nt, Artificial Sequence
  Synthetic
ucaccuguaaaaauauauag

SEQ ID NO: 52036 - RNA, 21 nt, Artificial Sequence
  Synthetic
uucaccuguaaaaauauauag

SEQ ID NO: 52037 - RNA, 22 nt, Artificial Sequence
  Synthetic
cuucaccuguaaaaauauauag

SEQ ID NO: 52038 - RNA, 24 nt, Artificial Sequence
  Synthetic
ugcuucaccuguaaaaauauauag

SEQ ID NO: 52039 - RNA, 19 nt, Artificial Sequence
  Synthetic
aggcuaaccaaaguuauag

SEQ ID NO: 52040 - RNA, 20 nt, Artificial Sequence
  Synthetic
aaggcuaaccaaaguuauag

SEQ ID NO: 52041 - RNA, 21 nt, Artificial Sequence
  Synthetic
caaggcuaaccaaaguuauag

SEQ ID NO: 52042 - RNA, 22 nt, Artificial Sequence
  Synthetic
ccaaggcuaaccaaaguuauag

SEQ ID NO: 52043 - RNA, 23 nt, Artificial Sequence
  Synthetic
uccaaggcuaaccaaaguuauag

SEQ ID NO: 52044 - RNA, 19 nt, Artificial Sequence
  Synthetic
agagaacagaauuuuauag

SEQ ID NO: 52045 - RNA, 20 nt, Artificial Sequence
  Synthetic
cagagaacagaauuuuauag

SEQ ID NO: 52046 - RNA, 18 nt, Artificial Sequence
  Synthetic
aauaaaaucucaaacuag

SEQ ID NO: 52047 - RNA, 19 nt, Artificial Sequence
  Synthetic
caauaaaaucucaaacuag

SEQ ID NO: 52048 - RNA, 20 nt, Artificial Sequence
  Synthetic
acaauaaaaucucaaacuag

SEQ ID NO: 52049 - RNA, 21 nt, Artificial Sequence
  Synthetic
uacaauaaaaucucaaacuag

SEQ ID NO: 52050 - RNA, 22 nt, Artificial Sequence
  Synthetic
auacaauaaaaucucaaacuag

SEQ ID NO: 52051 - RNA, 23 nt, Artificial Sequence
  Synthetic
aauacaauaaaaucucaaacuag

SEQ ID NO: 52052 - RNA, 24 nt, Artificial Sequence
  Synthetic
caauacaauaaaaucucaaacuag

SEQ ID NO: 52053 - RNA, 18 nt, Artificial Sequence
  Synthetic
ccauuguuucacaacuag

SEQ ID NO: 52054 - RNA, 19 nt, Artificial Sequence
  Synthetic
accauuguuucacaacuag

SEQ ID NO: 52055 - RNA, 20 nt, Artificial Sequence
  Synthetic
uaccauuguuucacaacuag

SEQ ID NO: 52056 - RNA, 21 nt, Artificial Sequence
  Synthetic
cuaccauuguuucacaacuag

SEQ ID NO: 52057 - RNA, 22 nt, Artificial Sequence
  Synthetic
ucuaccauuguuucacaacuag

SEQ ID NO: 52058 - RNA, 23 nt, Artificial Sequence
  Synthetic
aucuaccauuguuucacaacuag

SEQ ID NO: 52059 - RNA, 24 nt, Artificial Sequence
  Synthetic
aaucuaccauuguuucacaacuag

SEQ ID NO: 52060 - RNA, 19 nt, Artificial Sequence
  Synthetic
ugauuuacuaaguaacuag

SEQ ID NO: 52061 - RNA, 20 nt, Artificial Sequence
  Synthetic
augauuuacuaaguaacuag

SEQ ID NO: 52062 - RNA, 21 nt, Artificial Sequence
  Synthetic
caugauuuacuaaguaacuag

SEQ ID NO: 52063 - RNA, 22 nt, Artificial Sequence
  Synthetic
ucaugauuuacuaaguaacuag

SEQ ID NO: 52064 - RNA, 23 nt, Artificial Sequence
  Synthetic
aucaugauuuacuaaguaacuag

SEQ ID NO: 52065 - RNA, 24 nt, Artificial Sequence
  Synthetic
aaucaugauuuacuaaguaacuag

SEQ ID NO: 52066 - RNA, 18 nt, Artificial Sequence
  Synthetic
uauuuccuguuuaacuag

SEQ ID NO: 52067 - RNA, 19 nt, Artificial Sequence
  Synthetic
uuauuuccuguuuaacuag

SEQ ID NO: 52068 - RNA, 20 nt, Artificial Sequence
  Synthetic
cuuauuuccuguuuaacuag

SEQ ID NO: 52069 - RNA, 21 nt, Artificial Sequence
  Synthetic
ucuuauuuccuguuuaacuag

SEQ ID NO: 52070 - RNA, 23 nt, Artificial Sequence
  Synthetic
agucuuauuuccuguuuaacuag

SEQ ID NO: 52071 - RNA, 24 nt, Artificial Sequence
  Synthetic
uagucuuauuuccuguuuaacuag

SEQ ID NO: 52072 - RNA, 19 nt, Artificial Sequence
  Synthetic
aggagaucagugagacuag

SEQ ID NO: 52073 - RNA, 20 nt, Artificial Sequence
  Synthetic
aaggagaucagugagacuag

SEQ ID NO: 52074 - RNA, 21 nt, Artificial Sequence
  Synthetic
uaaggagaucagugagacuag

SEQ ID NO: 52075 - RNA, 22 nt, Artificial Sequence
  Synthetic
uuaaggagaucagugagacuag

SEQ ID NO: 52076 - RNA, 23 nt, Artificial Sequence
  Synthetic
auuaaggagaucagugagacuag

SEQ ID NO: 52077 - RNA, 24 nt, Artificial Sequence
  Synthetic
uauuaaggagaucagugagacuag

SEQ ID NO: 52078 - RNA, 18 nt, Artificial Sequence
  Synthetic
aagugagagggggacuag

SEQ ID NO: 52079 - RNA, 19 nt, Artificial Sequence
  Synthetic
aaagugagagggggacuag

SEQ ID NO: 52080 - RNA, 21 nt, Artificial Sequence
  Synthetic
agaaagugagagggggacuag

SEQ ID NO: 52081 - RNA, 22 nt, Artificial Sequence
  Synthetic
cagaaagugagagggggacuag

SEQ ID NO: 52082 - RNA, 20 nt, Artificial Sequence
  Synthetic
aggaaaacacagaauacuag

SEQ ID NO: 52083 - RNA, 21 nt, Artificial Sequence
  Synthetic
aaggaaaacacagaauacuag

SEQ ID NO: 52084 - RNA, 22 nt, Artificial Sequence
  Synthetic
caaggaaaacacagaauacuag

SEQ ID NO: 52085 - RNA, 23 nt, Artificial Sequence
  Synthetic
ccaaggaaaacacagaauacuag

SEQ ID NO: 52086 - RNA, 24 nt, Artificial Sequence
  Synthetic
accaaggaaaacacagaauacuag

SEQ ID NO: 52087 - RNA, 18 nt, Artificial Sequence
  Synthetic
uuugucuauguguacuag

SEQ ID NO: 52088 - RNA, 19 nt, Artificial Sequence
  Synthetic
auuugucuauguguacuag

SEQ ID NO: 52089 - RNA, 20 nt, Artificial Sequence
  Synthetic
uauuugucuauguguacuag

SEQ ID NO: 52090 - RNA, 21 nt, Artificial Sequence
  Synthetic
uuauuugucuauguguacuag

SEQ ID NO: 52091 - RNA, 22 nt, Artificial Sequence
  Synthetic
uuuauuugucuauguguacuag

SEQ ID NO: 52092 - RNA, 23 nt, Artificial Sequence
  Synthetic
uuuuauuugucuauguguacuag

SEQ ID NO: 52093 - RNA, 18 nt, Artificial Sequence
  Synthetic
aauuauauaaauuacuag

SEQ ID NO: 52094 - RNA, 20 nt, Artificial Sequence
  Synthetic
agaauuauauaaauuacuag

SEQ ID NO: 52095 - RNA, 21 nt, Artificial Sequence
  Synthetic
uagaauuauauaaauuacuag

SEQ ID NO: 52096 - RNA, 24 nt, Artificial Sequence
  Synthetic
agguagaauuauauaaauuacuag

SEQ ID NO: 52097 - RNA, 18 nt, Artificial Sequence
  Synthetic
cuucaaauaacuuccuag

SEQ ID NO: 52098 - RNA, 19 nt, Artificial Sequence
  Synthetic
acuucaaauaacuuccuag

SEQ ID NO: 52099 - RNA, 20 nt, Artificial Sequence
  Synthetic
uacuucaaauaacuuccuag

SEQ ID NO: 52100 - RNA, 21 nt, Artificial Sequence
  Synthetic
cuacuucaaauaacuuccuag

SEQ ID NO: 52101 - RNA, 22 nt, Artificial Sequence
  Synthetic
acuacuucaaauaacuuccuag

SEQ ID NO: 52102 - RNA, 24 nt, Artificial Sequence
  Synthetic
ugacuacuucaaauaacuuccuag

SEQ ID NO: 52103 - RNA, 18 nt, Artificial Sequence
  Synthetic
ugaugucauuguuccuag

SEQ ID NO: 52104 - RNA, 19 nt, Artificial Sequence
  Synthetic
uugaugucauuguuccuag

SEQ ID NO: 52105 - RNA, 20 nt, Artificial Sequence
  Synthetic
cuugaugucauuguuccuag

SEQ ID NO: 52106 - RNA, 21 nt, Artificial Sequence
  Synthetic
ucuugaugucauuguuccuag

SEQ ID NO: 52107 - RNA, 22 nt, Artificial Sequence
  Synthetic
uucuugaugucauuguuccuag

SEQ ID NO: 52108 - RNA, 23 nt, Artificial Sequence
  Synthetic
cuucuugaugucauuguuccuag

SEQ ID NO: 52109 - RNA, 18 nt, Artificial Sequence
  Synthetic
auauaaaggugcagcuag

SEQ ID NO: 52110 - RNA, 19 nt, Artificial Sequence
  Synthetic
aauauaaaggugcagcuag

SEQ ID NO: 52111 - RNA, 20 nt, Artificial Sequence
  Synthetic
uaauauaaaggugcagcuag

SEQ ID NO: 52112 - RNA, 21 nt, Artificial Sequence
  Synthetic
cuaauauaaaggugcagcuag

SEQ ID NO: 52113 - RNA, 22 nt, Artificial Sequence
  Synthetic
ccuaauauaaaggugcagcuag

SEQ ID NO: 52114 - RNA, 24 nt, Artificial Sequence
  Synthetic
ugccuaauauaaaggugcagcuag

SEQ ID NO: 52115 - RNA, 18 nt, Artificial Sequence
  Synthetic
ccaucuuugcucagcuag

SEQ ID NO: 52116 - RNA, 19 nt, Artificial Sequence
  Synthetic
uccaucuuugcucagcuag

SEQ ID NO: 52117 - RNA, 20 nt, Artificial Sequence
  Synthetic
cuccaucuuugcucagcuag

SEQ ID NO: 52118 - RNA, 21 nt, Artificial Sequence
  Synthetic
ccuccaucuuugcucagcuag

SEQ ID NO: 52119 - RNA, 22 nt, Artificial Sequence
  Synthetic
uccuccaucuuugcucagcuag

SEQ ID NO: 52120 - RNA, 23 nt, Artificial Sequence
  Synthetic
uuccuccaucuuugcucagcuag

SEQ ID NO: 52121 - RNA, 24 nt, Artificial Sequence
  Synthetic
uuuccuccaucuuugcucagcuag

SEQ ID NO: 52122 - RNA, 18 nt, Artificial Sequence
  Synthetic
cugaccuaaucaggcuag

SEQ ID NO: 52123 - RNA, 19 nt, Artificial Sequence
  Synthetic
ccugaccuaaucaggcuag

SEQ ID NO: 52124 - RNA, 20 nt, Artificial Sequence
  Synthetic
accugaccuaaucaggcuag

SEQ ID NO: 52125 - RNA, 21 nt, Artificial Sequence
  Synthetic
uaccugaccuaaucaggcuag

SEQ ID NO: 52126 - RNA, 24 nt, Artificial Sequence
  Synthetic
ugguaccugaccuaaucaggcuag

SEQ ID NO: 52127 - RNA, 18 nt, Artificial Sequence
  Synthetic
aauaugauagaaugcuag

SEQ ID NO: 52128 - RNA, 19 nt, Artificial Sequence
  Synthetic
aaauaugauagaaugcuag

SEQ ID NO: 52129 - RNA, 20 nt, Artificial Sequence
  Synthetic
aaaauaugauagaaugcuag

SEQ ID NO: 52130 - RNA, 21 nt, Artificial Sequence
  Synthetic
aaaaauaugauagaaugcuag

SEQ ID NO: 52131 - RNA, 22 nt, Artificial Sequence
  Synthetic
caaaaauaugauagaaugcuag

SEQ ID NO: 52132 - RNA, 23 nt, Artificial Sequence
  Synthetic
acaaaaauaugauagaaugcuag

SEQ ID NO: 52133 - RNA, 24 nt, Artificial Sequence
  Synthetic
uacaaaaauaugauagaaugcuag

SEQ ID NO: 52134 - RNA, 18 nt, Artificial Sequence
  Synthetic
uuaagagacuccugcuag

SEQ ID NO: 52135 - RNA, 19 nt, Artificial Sequence
  Synthetic
uuuaagagacuccugcuag

SEQ ID NO: 52136 - RNA, 20 nt, Artificial Sequence
  Synthetic
uuuuaagagacuccugcuag

SEQ ID NO: 52137 - RNA, 21 nt, Artificial Sequence
  Synthetic
uuuuuaagagacuccugcuag

SEQ ID NO: 52138 - RNA, 22 nt, Artificial Sequence
  Synthetic
uuuuuuaagagacuccugcuag

SEQ ID NO: 52139 - RNA, 24 nt, Artificial Sequence
  Synthetic
uguuuuuuaagagacuccugcuag

SEQ ID NO: 52140 - RNA, 18 nt, Artificial Sequence
  Synthetic
ucauaucuucucugcuag

SEQ ID NO: 52141 - RNA, 19 nt, Artificial Sequence
  Synthetic
cucauaucuucucugcuag

SEQ ID NO: 52142 - RNA, 20 nt, Artificial Sequence
  Synthetic
ccucauaucuucucugcuag

SEQ ID NO: 52143 - RNA, 23 nt, Artificial Sequence
  Synthetic
cggccucauaucuucucugcuag

SEQ ID NO: 52144 - RNA, 24 nt, Artificial Sequence
  Synthetic
acggccucauaucuucucugcuag

SEQ ID NO: 52145 - RNA, 18 nt, Artificial Sequence
  Synthetic
uaucagauaaugugcuag

SEQ ID NO: 52146 - RNA, 20 nt, Artificial Sequence
  Synthetic
uguaucagauaaugugcuag

SEQ ID NO: 52147 - RNA, 22 nt, Artificial Sequence
  Synthetic
uguguaucagauaaugugcuag

SEQ ID NO: 52148 - RNA, 23 nt, Artificial Sequence
  Synthetic
cuguguaucagauaaugugcuag

SEQ ID NO: 52149 - RNA, 24 nt, Artificial Sequence
  Synthetic
acuguguaucagauaaugugcuag

SEQ ID NO: 52150 - RNA, 18 nt, Artificial Sequence
  Synthetic
acucacaaaaguugcuag

SEQ ID NO: 52151 - RNA, 19 nt, Artificial Sequence
  Synthetic
aacucacaaaaguugcuag

SEQ ID NO: 52152 - RNA, 20 nt, Artificial Sequence
  Synthetic
caacucacaaaaguugcuag

SEQ ID NO: 52153 - RNA, 19 nt, Artificial Sequence
  Synthetic
cggcaugaacuguugcuag

SEQ ID NO: 52154 - RNA, 21 nt, Artificial Sequence
  Synthetic
agcggcaugaacuguugcuag

SEQ ID NO: 52155 - RNA, 22 nt, Artificial Sequence
  Synthetic
uagcggcaugaacuguugcuag

SEQ ID NO: 52156 - RNA, 23 nt, Artificial Sequence
  Synthetic
uuagcggcaugaacuguugcuag

SEQ ID NO: 52157 - RNA, 24 nt, Artificial Sequence
  Synthetic
auuagcggcaugaacuguugcuag

SEQ ID NO: 52158 - RNA, 19 nt, Artificial Sequence
  Synthetic
uguuggagucaaaaucuag

SEQ ID NO: 52159 - RNA, 20 nt, Artificial Sequence
  Synthetic
cuguuggagucaaaaucuag

SEQ ID NO: 52160 - RNA, 21 nt, Artificial Sequence
  Synthetic
ucuguuggagucaaaaucuag

SEQ ID NO: 52161 - RNA, 22 nt, Artificial Sequence
  Synthetic
cucuguuggagucaaaaucuag

SEQ ID NO: 52162 - RNA, 24 nt, Artificial Sequence
  Synthetic
agcucuguuggagucaaaaucuag

SEQ ID NO: 52163 - RNA, 19 nt, Artificial Sequence
  Synthetic
agcccccugcaguaucuag

SEQ ID NO: 52164 - RNA, 20 nt, Artificial Sequence
  Synthetic
uagcccccugcaguaucuag

SEQ ID NO: 52165 - RNA, 22 nt, Artificial Sequence
  Synthetic
cguagcccccugcaguaucuag

SEQ ID NO: 52166 - RNA, 23 nt, Artificial Sequence
  Synthetic
ucguagcccccugcaguaucuag

SEQ ID NO: 52167 - RNA, 24 nt, Artificial Sequence
  Synthetic
uucguagcccccugcaguaucuag

SEQ ID NO: 52168 - RNA, 18 nt, Artificial Sequence
  Synthetic
auugcaauuauuaucuag

SEQ ID NO: 52169 - RNA, 19 nt, Artificial Sequence
  Synthetic
uauugcaauuauuaucuag

SEQ ID NO: 52170 - RNA, 20 nt, Artificial Sequence
  Synthetic
uuauugcaauuauuaucuag

SEQ ID NO: 52171 - RNA, 21 nt, Artificial Sequence
  Synthetic
auuauugcaauuauuaucuag

SEQ ID NO: 52172 - RNA, 22 nt, Artificial Sequence
  Synthetic
aauuauugcaauuauuaucuag

SEQ ID NO: 52173 - RNA, 23 nt, Artificial Sequence
  Synthetic
uaauuauugcaauuauuaucuag

SEQ ID NO: 52174 - RNA, 24 nt, Artificial Sequence
  Synthetic
auaauuauugcaauuauuaucuag

SEQ ID NO: 52175 - RNA, 18 nt, Artificial Sequence
  Synthetic
uaaggcauaaugcucuag

SEQ ID NO: 52176 - RNA, 19 nt, Artificial Sequence
  Synthetic
auaaggcauaaugcucuag

SEQ ID NO: 52177 - RNA, 20 nt, Artificial Sequence
  Synthetic
uauaaggcauaaugcucuag

SEQ ID NO: 52178 - RNA, 21 nt, Artificial Sequence
  Synthetic
auauaaggcauaaugcucuag

SEQ ID NO: 52179 - RNA, 22 nt, Artificial Sequence
  Synthetic
uauauaaggcauaaugcucuag

SEQ ID NO: 52180 - RNA, 23 nt, Artificial Sequence
  Synthetic
auauauaaggcauaaugcucuag

SEQ ID NO: 52181 - RNA, 24 nt, Artificial Sequence
  Synthetic
uauauauaaggcauaaugcucuag

SEQ ID NO: 52182 - RNA, 18 nt, Artificial Sequence
  Synthetic
auuuauuugaaucucuag

SEQ ID NO: 52183 - RNA, 19 nt, Artificial Sequence
  Synthetic
uauuuauuugaaucucuag

SEQ ID NO: 52184 - RNA, 20 nt, Artificial Sequence
  Synthetic
uuauuuauuugaaucucuag

SEQ ID NO: 52185 - RNA, 21 nt, Artificial Sequence
  Synthetic
cuuauuuauuugaaucucuag

SEQ ID NO: 52186 - RNA, 23 nt, Artificial Sequence
  Synthetic
ugcuuauuuauuugaaucucuag

SEQ ID NO: 52187 - RNA, 18 nt, Artificial Sequence
  Synthetic
caacugccacuggucuag

SEQ ID NO: 52188 - RNA, 19 nt, Artificial Sequence
  Synthetic
ccaacugccacuggucuag

SEQ ID NO: 52189 - RNA, 21 nt, Artificial Sequence
  Synthetic
agccaacugccacuggucuag

SEQ ID NO: 52190 - RNA, 22 nt, Artificial Sequence
  Synthetic
aagccaacugccacuggucuag

SEQ ID NO: 52191 - RNA, 23 nt, Artificial Sequence
  Synthetic
caagccaacugccacuggucuag

SEQ ID NO: 52192 - RNA, 24 nt, Artificial Sequence
  Synthetic
ucaagccaacugccacuggucuag

SEQ ID NO: 52193 - RNA, 18 nt, Artificial Sequence
  Synthetic
uugacugccacauucuag

SEQ ID NO: 52194 - RNA, 19 nt, Artificial Sequence
  Synthetic
cuugacugccacauucuag

SEQ ID NO: 52195 - RNA, 20 nt, Artificial Sequence
  Synthetic
acuugacugccacauucuag

SEQ ID NO: 52196 - RNA, 21 nt, Artificial Sequence
  Synthetic
aacuugacugccacauucuag

SEQ ID NO: 52197 - RNA, 22 nt, Artificial Sequence
  Synthetic
uaacuugacugccacauucuag

SEQ ID NO: 52198 - RNA, 24 nt, Artificial Sequence
  Synthetic
uguaacuugacugccacauucuag

SEQ ID NO: 52199 - RNA, 18 nt, Artificial Sequence
  Synthetic
aauaccacaccauucuag

SEQ ID NO: 52200 - RNA, 19 nt, Artificial Sequence
  Synthetic
aaauaccacaccauucuag

SEQ ID NO: 52201 - RNA, 21 nt, Artificial Sequence
  Synthetic
ugaaauaccacaccauucuag

SEQ ID NO: 52202 - RNA, 22 nt, Artificial Sequence
  Synthetic
uugaaauaccacaccauucuag

SEQ ID NO: 52203 - RNA, 23 nt, Artificial Sequence
  Synthetic
cuugaaauaccacaccauucuag

SEQ ID NO: 52204 - RNA, 24 nt, Artificial Sequence
  Synthetic
acuugaaauaccacaccauucuag

SEQ ID NO: 52205 - RNA, 19 nt, Artificial Sequence
  Synthetic
uguauauucuagauucuag

SEQ ID NO: 52206 - RNA, 20 nt, Artificial Sequence
  Synthetic
cuguauauucuagauucuag

SEQ ID NO: 52207 - RNA, 21 nt, Artificial Sequence
  Synthetic
ucuguauauucuagauucuag

SEQ ID NO: 52208 - RNA, 23 nt, Artificial Sequence
  Synthetic
ugucuguauauucuagauucuag

SEQ ID NO: 52209 - RNA, 24 nt, Artificial Sequence
  Synthetic
uugucuguauauucuagauucuag

SEQ ID NO: 52210 - RNA, 18 nt, Artificial Sequence
  Synthetic
uuucaccuucuauucuag

SEQ ID NO: 52211 - RNA, 20 nt, Artificial Sequence
  Synthetic
uguuucaccuucuauucuag

SEQ ID NO: 52212 - RNA, 21 nt, Artificial Sequence
  Synthetic
uuguuucaccuucuauucuag

SEQ ID NO: 52213 - RNA, 22 nt, Artificial Sequence
  Synthetic
cuuguuucaccuucuauucuag

SEQ ID NO: 52214 - RNA, 24 nt, Artificial Sequence
  Synthetic
ugcuuguuucaccuucuauucuag

SEQ ID NO: 52215 - RNA, 18 nt, Artificial Sequence
  Synthetic
aucuucuuuugaaaguag

SEQ ID NO: 52216 - RNA, 19 nt, Artificial Sequence
  Synthetic
aaucuucuuuugaaaguag

SEQ ID NO: 52217 - RNA, 21 nt, Artificial Sequence
  Synthetic
agaaucuucuuuugaaaguag

SEQ ID NO: 52218 - RNA, 22 nt, Artificial Sequence
  Synthetic
cagaaucuucuuuugaaaguag

SEQ ID NO: 52219 - RNA, 23 nt, Artificial Sequence
  Synthetic
ucagaaucuucuuuugaaaguag

SEQ ID NO: 52220 - RNA, 24 nt, Artificial Sequence
  Synthetic
uucagaaucuucuuuugaaaguag

SEQ ID NO: 52221 - RNA, 18 nt, Artificial Sequence
  Synthetic
cacuccucccaacaguag

SEQ ID NO: 52222 - RNA, 20 nt, Artificial Sequence
  Synthetic
agcacuccucccaacaguag

SEQ ID NO: 52223 - RNA, 21 nt, Artificial Sequence
  Synthetic
aagcacuccucccaacaguag

SEQ ID NO: 52224 - RNA, 23 nt, Artificial Sequence
  Synthetic
ugaagcacuccucccaacaguag

SEQ ID NO: 52225 - RNA, 24 nt, Artificial Sequence
  Synthetic
uugaagcacuccucccaacaguag

SEQ ID NO: 52226 - RNA, 18 nt, Artificial Sequence
  Synthetic
cuagcacauacacaguag

SEQ ID NO: 52227 - RNA, 19 nt, Artificial Sequence
  Synthetic
ccuagcacauacacaguag

SEQ ID NO: 52228 - RNA, 20 nt, Artificial Sequence
  Synthetic
accuagcacauacacaguag

SEQ ID NO: 52229 - RNA, 21 nt, Artificial Sequence
  Synthetic
aaccuagcacauacacaguag

SEQ ID NO: 52230 - RNA, 22 nt, Artificial Sequence
  Synthetic
aaaccuagcacauacacaguag

SEQ ID NO: 52231 - RNA, 18 nt, Artificial Sequence
  Synthetic
cuccauuaagcacaguag

SEQ ID NO: 52232 - RNA, 19 nt, Artificial Sequence
  Synthetic
ucuccauuaagcacaguag

SEQ ID NO: 52233 - RNA, 21 nt, Artificial Sequence
  Synthetic
agucuccauuaagcacaguag

SEQ ID NO: 52234 - RNA, 22 nt, Artificial Sequence
  Synthetic
uagucuccauuaagcacaguag

SEQ ID NO: 52235 - RNA, 23 nt, Artificial Sequence
  Synthetic
cuagucuccauuaagcacaguag

SEQ ID NO: 52236 - RNA, 24 nt, Artificial Sequence
  Synthetic
ccuagucuccauuaagcacaguag

SEQ ID NO: 52237 - RNA, 18 nt, Artificial Sequence
  Synthetic
ugucucuguccccaguag

SEQ ID NO: 52238 - RNA, 19 nt, Artificial Sequence
  Synthetic
uugucucuguccccaguag

SEQ ID NO: 52239 - RNA, 20 nt, Artificial Sequence
  Synthetic
uuugucucuguccccaguag

SEQ ID NO: 52240 - RNA, 21 nt, Artificial Sequence
  Synthetic
cuuugucucuguccccaguag

SEQ ID NO: 52241 - RNA, 23 nt, Artificial Sequence
  Synthetic
ugcuuugucucuguccccaguag

SEQ ID NO: 52242 - RNA, 24 nt, Artificial Sequence
  Synthetic
uugcuuugucucuguccccaguag

SEQ ID NO: 52243 - RNA, 22 nt, Artificial Sequence
  Synthetic
ugggggguaaauuaaucaguag

SEQ ID NO: 52244 - RNA, 23 nt, Artificial Sequence
  Synthetic
uugggggguaaauuaaucaguag

SEQ ID NO: 52245 - RNA, 24 nt, Artificial Sequence
  Synthetic
uuugggggguaaauuaaucaguag

SEQ ID NO: 52246 - RNA, 18 nt, Artificial Sequence
  Synthetic
caauacaccacagaguag

SEQ ID NO: 52247 - RNA, 19 nt, Artificial Sequence
  Synthetic
acaauacaccacagaguag

SEQ ID NO: 52248 - RNA, 20 nt, Artificial Sequence
  Synthetic
uacaauacaccacagaguag

SEQ ID NO: 52249 - RNA, 22 nt, Artificial Sequence
  Synthetic
aguacaauacaccacagaguag

SEQ ID NO: 52250 - RNA, 23 nt, Artificial Sequence
  Synthetic
caguacaauacaccacagaguag

SEQ ID NO: 52251 - RNA, 24 nt, Artificial Sequence
  Synthetic
ucaguacaauacaccacagaguag

SEQ ID NO: 52252 - RNA, 18 nt, Artificial Sequence
  Synthetic
accaauaagggagaguag

SEQ ID NO: 52253 - RNA, 19 nt, Artificial Sequence
  Synthetic
aaccaauaagggagaguag

SEQ ID NO: 52254 - RNA, 20 nt, Artificial Sequence
  Synthetic
caaccaauaagggagaguag

SEQ ID NO: 52255 - RNA, 21 nt, Artificial Sequence
  Synthetic
ucaaccaauaagggagaguag

SEQ ID NO: 52256 - RNA, 22 nt, Artificial Sequence
  Synthetic
cucaaccaauaagggagaguag

SEQ ID NO: 52257 - RNA, 23 nt, Artificial Sequence
  Synthetic
acucaaccaauaagggagaguag

SEQ ID NO: 52258 - RNA, 18 nt, Artificial Sequence
  Synthetic
uauugugucaaggaguag

SEQ ID NO: 52259 - RNA, 19 nt, Artificial Sequence
  Synthetic
cuauugugucaaggaguag

SEQ ID NO: 52260 - RNA, 21 nt, Artificial Sequence
  Synthetic
ugcuauugugucaaggaguag

SEQ ID NO: 52261 - RNA, 22 nt, Artificial Sequence
  Synthetic
uugcuauugugucaaggaguag

SEQ ID NO: 52262 - RNA, 23 nt, Artificial Sequence
  Synthetic
cuugcuauugugucaaggaguag

SEQ ID NO: 52263 - RNA, 18 nt, Artificial Sequence
  Synthetic
cuuaggauuaaguaguag

SEQ ID NO: 52264 - RNA, 19 nt, Artificial Sequence
  Synthetic
ccuuaggauuaaguaguag

SEQ ID NO: 52265 - RNA, 20 nt, Artificial Sequence
  Synthetic
cccuuaggauuaaguaguag

SEQ ID NO: 52266 - RNA, 21 nt, Artificial Sequence
  Synthetic
acccuuaggauuaaguaguag

SEQ ID NO: 52267 - RNA, 22 nt, Artificial Sequence
  Synthetic
uacccuuaggauuaaguaguag

SEQ ID NO: 52268 - RNA, 23 nt, Artificial Sequence
  Synthetic
uuacccuuaggauuaaguaguag

SEQ ID NO: 52269 - RNA, 18 nt, Artificial Sequence
  Synthetic
cauagauauuauuaguag

SEQ ID NO: 52270 - RNA, 19 nt, Artificial Sequence
  Synthetic
ccauagauauuauuaguag

SEQ ID NO: 52271 - RNA, 20 nt, Artificial Sequence
  Synthetic
accauagauauuauuaguag

SEQ ID NO: 52272 - RNA, 21 nt, Artificial Sequence
  Synthetic
aaccauagauauuauuaguag

SEQ ID NO: 52273 - RNA, 23 nt, Artificial Sequence
  Synthetic
ugaaccauagauauuauuaguag

SEQ ID NO: 52274 - RNA, 24 nt, Artificial Sequence
  Synthetic
augaaccauagauauuauuaguag

SEQ ID NO: 52275 - RNA, 18 nt, Artificial Sequence
  Synthetic
uucccaccagccacguag

SEQ ID NO: 52276 - RNA, 19 nt, Artificial Sequence
  Synthetic
cuucccaccagccacguag

SEQ ID NO: 52277 - RNA, 20 nt, Artificial Sequence
  Synthetic
acuucccaccagccacguag

SEQ ID NO: 52278 - RNA, 21 nt, Artificial Sequence
  Synthetic
uacuucccaccagccacguag

SEQ ID NO: 52279 - RNA, 22 nt, Artificial Sequence
  Synthetic
auacuucccaccagccacguag

SEQ ID NO: 52280 - RNA, 23 nt, Artificial Sequence
  Synthetic
uauacuucccaccagccacguag

SEQ ID NO: 52281 - RNA, 18 nt, Artificial Sequence
  Synthetic
cuguaccuuaugccguag

SEQ ID NO: 52282 - RNA, 19 nt, Artificial Sequence
  Synthetic
acuguaccuuaugccguag

SEQ ID NO: 52283 - RNA, 20 nt, Artificial Sequence
  Synthetic
uacuguaccuuaugccguag

SEQ ID NO: 52284 - RNA, 22 nt, Artificial Sequence
  Synthetic
cguacuguaccuuaugccguag

SEQ ID NO: 52285 - RNA, 23 nt, Artificial Sequence
  Synthetic
ucguacuguaccuuaugccguag

SEQ ID NO: 52286 - RNA, 24 nt, Artificial Sequence
  Synthetic
aucguacuguaccuuaugccguag

SEQ ID NO: 52287 - RNA, 18 nt, Artificial Sequence
  Synthetic
uagcuauuuucaagguag

SEQ ID NO: 52288 - RNA, 19 nt, Artificial Sequence
  Synthetic
uuagcuauuuucaagguag

SEQ ID NO: 52289 - RNA, 20 nt, Artificial Sequence
  Synthetic
uuuagcuauuuucaagguag

SEQ ID NO: 52290 - RNA, 21 nt, Artificial Sequence
  Synthetic
auuuagcuauuuucaagguag

SEQ ID NO: 52291 - RNA, 22 nt, Artificial Sequence
  Synthetic
uauuuagcuauuuucaagguag

SEQ ID NO: 52292 - RNA, 23 nt, Artificial Sequence
  Synthetic
uuauuuagcuauuuucaagguag

SEQ ID NO: 52293 - RNA, 19 nt, Artificial Sequence
  Synthetic
aggaauaaauuggagguag

SEQ ID NO: 52294 - RNA, 20 nt, Artificial Sequence
  Synthetic
aaggaauaaauuggagguag

SEQ ID NO: 52295 - RNA, 21 nt, Artificial Sequence
  Synthetic
caaggaauaaauuggagguag

SEQ ID NO: 52296 - RNA, 22 nt, Artificial Sequence
  Synthetic
ucaaggaauaaauuggagguag

SEQ ID NO: 52297 - RNA, 23 nt, Artificial Sequence
  Synthetic
cucaaggaauaaauuggagguag

SEQ ID NO: 52298 - RNA, 24 nt, Artificial Sequence
  Synthetic
acucaaggaauaaauuggagguag

SEQ ID NO: 52299 - RNA, 21 nt, Artificial Sequence
  Synthetic
uuucucagaugccugggguag

SEQ ID NO: 52300 - RNA, 22 nt, Artificial Sequence
  Synthetic
uuuucucagaugccugggguag

SEQ ID NO: 52301 - RNA, 23 nt, Artificial Sequence
  Synthetic
cuuuucucagaugccugggguag

SEQ ID NO: 52302 - RNA, 24 nt, Artificial Sequence
  Synthetic
acuuuucucagaugccugggguag

SEQ ID NO: 52303 - RNA, 18 nt, Artificial Sequence
  Synthetic
ugaagaguuuguggguag

SEQ ID NO: 52304 - RNA, 20 nt, Artificial Sequence
  Synthetic
agugaagaguuuguggguag

SEQ ID NO: 52305 - RNA, 21 nt, Artificial Sequence
  Synthetic
uagugaagaguuuguggguag

SEQ ID NO: 52306 - RNA, 22 nt, Artificial Sequence
  Synthetic
uuagugaagaguuuguggguag

SEQ ID NO: 52307 - RNA, 23 nt, Artificial Sequence
  Synthetic
uuuagugaagaguuuguggguag

SEQ ID NO: 52308 - RNA, 24 nt, Artificial Sequence
  Synthetic
auuuagugaagaguuuguggguag

SEQ ID NO: 52309 - RNA, 18 nt, Artificial Sequence
  Synthetic
cugcaauaguuuggguag

SEQ ID NO: 52310 - RNA, 19 nt, Artificial Sequence
  Synthetic
ucugcaauaguuuggguag

SEQ ID NO: 52311 - RNA, 20 nt, Artificial Sequence
  Synthetic
uucugcaauaguuuggguag

SEQ ID NO: 52312 - RNA, 21 nt, Artificial Sequence
  Synthetic
uuucugcaauaguuuggguag

SEQ ID NO: 52313 - RNA, 22 nt, Artificial Sequence
  Synthetic
uuuucugcaauaguuuggguag

SEQ ID NO: 52314 - RNA, 23 nt, Artificial Sequence
  Synthetic
cuuuucugcaauaguuuggguag

SEQ ID NO: 52315 - RNA, 24 nt, Artificial Sequence
  Synthetic
ucuuuucugcaauaguuuggguag

SEQ ID NO: 52316 - RNA, 21 nt, Artificial Sequence
  Synthetic
auagaauugagaaaaugguag

SEQ ID NO: 52317 - RNA, 22 nt, Artificial Sequence
  Synthetic
aauagaauugagaaaaugguag

SEQ ID NO: 52318 - RNA, 24 nt, Artificial Sequence
  Synthetic
ugaauagaauugagaaaaugguag

SEQ ID NO: 52319 - RNA, 20 nt, Artificial Sequence
  Synthetic
aggaucaaguuagaugguag

SEQ ID NO: 52320 - RNA, 21 nt, Artificial Sequence
  Synthetic
aaggaucaaguuagaugguag

SEQ ID NO: 52321 - RNA, 23 nt, Artificial Sequence
  Synthetic
agaaggaucaaguuagaugguag

SEQ ID NO: 52322 - RNA, 24 nt, Artificial Sequence
  Synthetic
uagaaggaucaaguuagaugguag

SEQ ID NO: 52323 - RNA, 18 nt, Artificial Sequence
  Synthetic
uaauguagugccugguag

SEQ ID NO: 52324 - RNA, 19 nt, Artificial Sequence
  Synthetic
uuaauguagugccugguag

SEQ ID NO: 52325 - RNA, 20 nt, Artificial Sequence
  Synthetic
auuaauguagugccugguag

SEQ ID NO: 52326 - RNA, 21 nt, Artificial Sequence
  Synthetic
cauuaauguagugccugguag

SEQ ID NO: 52327 - RNA, 22 nt, Artificial Sequence
  Synthetic
ucauuaauguagugccugguag

SEQ ID NO: 52328 - RNA, 24 nt, Artificial Sequence
  Synthetic
ugucauuaauguagugccugguag

SEQ ID NO: 52329 - RNA, 18 nt, Artificial Sequence
  Synthetic
cuucagcacacuugguag

SEQ ID NO: 52330 - RNA, 20 nt, Artificial Sequence
  Synthetic
ugcuucagcacacuugguag

SEQ ID NO: 52331 - RNA, 22 nt, Artificial Sequence
  Synthetic
ugugcuucagcacacuugguag

SEQ ID NO: 52332 - RNA, 23 nt, Artificial Sequence
  Synthetic
uugugcuucagcacacuugguag

SEQ ID NO: 52333 - RNA, 24 nt, Artificial Sequence
  Synthetic
cuugugcuucagcacacuugguag

SEQ ID NO: 52334 - RNA, 18 nt, Artificial Sequence
  Synthetic
ugggcauucaaaauguag

SEQ ID NO: 52335 - RNA, 19 nt, Artificial Sequence
  Synthetic
augggcauucaaaauguag

SEQ ID NO: 52336 - RNA, 20 nt, Artificial Sequence
  Synthetic
aaugggcauucaaaauguag

SEQ ID NO: 52337 - RNA, 21 nt, Artificial Sequence
  Synthetic
caaugggcauucaaaauguag

SEQ ID NO: 52338 - RNA, 23 nt, Artificial Sequence
  Synthetic
ugcaaugggcauucaaaauguag

SEQ ID NO: 52339 - RNA, 24 nt, Artificial Sequence
  Synthetic
cugcaaugggcauucaaaauguag

SEQ ID NO: 52340 - RNA, 18 nt, Artificial Sequence
  Synthetic
uucacugagcgcauguag

SEQ ID NO: 52341 - RNA, 19 nt, Artificial Sequence
  Synthetic
uuucacugagcgcauguag

SEQ ID NO: 52342 - RNA, 20 nt, Artificial Sequence
  Synthetic
uuuucacugagcgcauguag

SEQ ID NO: 52343 - RNA, 21 nt, Artificial Sequence
  Synthetic
cuuuucacugagcgcauguag

SEQ ID NO: 52344 - RNA, 23 nt, Artificial Sequence
  Synthetic
ugcuuuucacugagcgcauguag

SEQ ID NO: 52345 - RNA, 24 nt, Artificial Sequence
  Synthetic
cugcuuuucacugagcgcauguag

SEQ ID NO: 52346 - RNA, 18 nt, Artificial Sequence
  Synthetic
uaaaucucuacucuguag

SEQ ID NO: 52347 - RNA, 19 nt, Artificial Sequence
  Synthetic
auaaaucucuacucuguag

SEQ ID NO: 52348 - RNA, 20 nt, Artificial Sequence
  Synthetic
aauaaaucucuacucuguag

SEQ ID NO: 52349 - RNA, 21 nt, Artificial Sequence
  Synthetic
uaauaaaucucuacucuguag

SEQ ID NO: 52350 - RNA, 22 nt, Artificial Sequence
  Synthetic
auaauaaaucucuacucuguag

SEQ ID NO: 52351 - RNA, 23 nt, Artificial Sequence
  Synthetic
aauaauaaaucucuacucuguag

SEQ ID NO: 52352 - RNA, 24 nt, Artificial Sequence
  Synthetic
aaauaauaaaucucuacucuguag

SEQ ID NO: 52353 - RNA, 18 nt, Artificial Sequence
  Synthetic
ccaguaaaugcucuguag

SEQ ID NO: 52354 - RNA, 19 nt, Artificial Sequence
  Synthetic
uccaguaaaugcucuguag

SEQ ID NO: 52355 - RNA, 20 nt, Artificial Sequence
  Synthetic
uuccaguaaaugcucuguag

SEQ ID NO: 52356 - RNA, 24 nt, Artificial Sequence
  Synthetic
uggguuccaguaaaugcucuguag

SEQ ID NO: 52357 - RNA, 18 nt, Artificial Sequence
  Synthetic
auguucuguaaauuguag

SEQ ID NO: 52358 - RNA, 19 nt, Artificial Sequence
  Synthetic
aauguucuguaaauuguag

SEQ ID NO: 52359 - RNA, 22 nt, Artificial Sequence
  Synthetic
uggaauguucuguaaauuguag

SEQ ID NO: 52360 - RNA, 23 nt, Artificial Sequence
  Synthetic
cuggaauguucuguaaauuguag

SEQ ID NO: 52361 - RNA, 24 nt, Artificial Sequence
  Synthetic
ucuggaauguucuguaaauuguag

SEQ ID NO: 52362 - RNA, 18 nt, Artificial Sequence
  Synthetic
cauuuauuuuacuuguag

SEQ ID NO: 52363 - RNA, 19 nt, Artificial Sequence
  Synthetic
acauuuauuuuacuuguag

SEQ ID NO: 52364 - RNA, 20 nt, Artificial Sequence
  Synthetic
aacauuuauuuuacuuguag

SEQ ID NO: 52365 - RNA, 21 nt, Artificial Sequence
  Synthetic
aaacauuuauuuuacuuguag

SEQ ID NO: 52366 - RNA, 22 nt, Artificial Sequence
  Synthetic
caaacauuuauuuuacuuguag

SEQ ID NO: 52367 - RNA, 23 nt, Artificial Sequence
  Synthetic
acaaacauuuauuuuacuuguag

SEQ ID NO: 52368 - RNA, 24 nt, Artificial Sequence
  Synthetic
aacaaacauuuauuuuacuuguag

SEQ ID NO: 52369 - RNA, 18 nt, Artificial Sequence
  Synthetic
aucguauuguguuuguag

SEQ ID NO: 52370 - RNA, 19 nt, Artificial Sequence
  Synthetic
aaucguauuguguuuguag

SEQ ID NO: 52371 - RNA, 20 nt, Artificial Sequence
  Synthetic
aaaucguauuguguuuguag

SEQ ID NO: 52372 - RNA, 21 nt, Artificial Sequence
  Synthetic
aaaaucguauuguguuuguag

SEQ ID NO: 52373 - RNA, 22 nt, Artificial Sequence
  Synthetic
caaaaucguauuguguuuguag

SEQ ID NO: 52374 - RNA, 23 nt, Artificial Sequence
  Synthetic
ucaaaaucguauuguguuuguag

SEQ ID NO: 52375 - RNA, 18 nt, Artificial Sequence
  Synthetic
acuuugagacuuuuguag

SEQ ID NO: 52376 - RNA, 19 nt, Artificial Sequence
  Synthetic
aacuuugagacuuuuguag

SEQ ID NO: 52377 - RNA, 20 nt, Artificial Sequence
  Synthetic
aaacuuugagacuuuuguag

SEQ ID NO: 52378 - RNA, 21 nt, Artificial Sequence
  Synthetic
uaaacuuugagacuuuuguag

SEQ ID NO: 52379 - RNA, 23 nt, Artificial Sequence
  Synthetic
aguaaacuuugagacuuuuguag

SEQ ID NO: 52380 - RNA, 24 nt, Artificial Sequence
  Synthetic
uaguaaacuuugagacuuuuguag

SEQ ID NO: 52381 - RNA, 21 nt, Artificial Sequence
  Synthetic
uauagaauaauaacaaauuag

SEQ ID NO: 52382 - RNA, 22 nt, Artificial Sequence
  Synthetic
auauagaauaauaacaaauuag

SEQ ID NO: 52383 - RNA, 18 nt, Artificial Sequence
  Synthetic
caugcugggacaaauuag

SEQ ID NO: 52384 - RNA, 19 nt, Artificial Sequence
  Synthetic
ucaugcugggacaaauuag

SEQ ID NO: 52385 - RNA, 20 nt, Artificial Sequence
  Synthetic
uucaugcugggacaaauuag

SEQ ID NO: 52386 - RNA, 21 nt, Artificial Sequence
  Synthetic
uuucaugcugggacaaauuag

SEQ ID NO: 52387 - RNA, 22 nt, Artificial Sequence
  Synthetic
uuuucaugcugggacaaauuag

SEQ ID NO: 52388 - RNA, 24 nt, Artificial Sequence
  Synthetic
aguuuucaugcugggacaaauuag

SEQ ID NO: 52389 - RNA, 18 nt, Artificial Sequence
  Synthetic
agugugaacauuaauuag

SEQ ID NO: 52390 - RNA, 19 nt, Artificial Sequence
  Synthetic
uagugugaacauuaauuag

SEQ ID NO: 52391 - RNA, 20 nt, Artificial Sequence
  Synthetic
auagugugaacauuaauuag

SEQ ID NO: 52392 - RNA, 21 nt, Artificial Sequence
  Synthetic
uauagugugaacauuaauuag

SEQ ID NO: 52393 - RNA, 22 nt, Artificial Sequence
  Synthetic
auauagugugaacauuaauuag

SEQ ID NO: 52394 - RNA, 18 nt, Artificial Sequence
  Synthetic
aaaagcagauaagauuag

SEQ ID NO: 52395 - RNA, 19 nt, Artificial Sequence
  Synthetic
caaaagcagauaagauuag

SEQ ID NO: 52396 - RNA, 20 nt, Artificial Sequence
  Synthetic
ccaaaagcagauaagauuag

SEQ ID NO: 52397 - RNA, 21 nt, Artificial Sequence
  Synthetic
accaaaagcagauaagauuag

SEQ ID NO: 52398 - RNA, 21 nt, Artificial Sequence
  Synthetic
aaagaaauaaaagcagauuag

SEQ ID NO: 52399 - RNA, 22 nt, Artificial Sequence
  Synthetic
uaaagaaauaaaagcagauuag

SEQ ID NO: 52400 - RNA, 23 nt, Artificial Sequence
  Synthetic
auaaagaaauaaaagcagauuag

SEQ ID NO: 52401 - RNA, 24 nt, Artificial Sequence
  Synthetic
aauaaagaaauaaaagcagauuag

SEQ ID NO: 52402 - RNA, 18 nt, Artificial Sequence
  Synthetic
auagguucucaggauuag

SEQ ID NO: 52403 - RNA, 19 nt, Artificial Sequence
  Synthetic
cauagguucucaggauuag

SEQ ID NO: 52404 - RNA, 20 nt, Artificial Sequence
  Synthetic
ucauagguucucaggauuag

SEQ ID NO: 52405 - RNA, 21 nt, Artificial Sequence
  Synthetic
uucauagguucucaggauuag

SEQ ID NO: 52406 - RNA, 23 nt, Artificial Sequence
  Synthetic
uguucauagguucucaggauuag

SEQ ID NO: 52407 - RNA, 24 nt, Artificial Sequence
  Synthetic
uuguucauagguucucaggauuag

SEQ ID NO: 52408 - RNA, 18 nt, Artificial Sequence
  Synthetic
aguuugcucugugauuag

SEQ ID NO: 52409 - RNA, 19 nt, Artificial Sequence
  Synthetic
aaguuugcucugugauuag

SEQ ID NO: 52410 - RNA, 21 nt, Artificial Sequence
  Synthetic
ugaaguuugcucugugauuag

SEQ ID NO: 52411 - RNA, 22 nt, Artificial Sequence
  Synthetic
cugaaguuugcucugugauuag

SEQ ID NO: 52412 - RNA, 23 nt, Artificial Sequence
  Synthetic
ucugaaguuugcucugugauuag

SEQ ID NO: 52413 - RNA, 20 nt, Artificial Sequence
  Synthetic
aggcacucaacguauauuag

SEQ ID NO: 52414 - RNA, 21 nt, Artificial Sequence
  Synthetic
uaggcacucaacguauauuag

SEQ ID NO: 52415 - RNA, 23 nt, Artificial Sequence
  Synthetic
uguaggcacucaacguauauuag

SEQ ID NO: 52416 - RNA, 24 nt, Artificial Sequence
  Synthetic
auguaggcacucaacguauauuag

SEQ ID NO: 52417 - RNA, 18 nt, Artificial Sequence
  Synthetic
uuucaacuuuccuauuag

SEQ ID NO: 52418 - RNA, 19 nt, Artificial Sequence
  Synthetic
uuuucaacuuuccuauuag

SEQ ID NO: 52419 - RNA, 20 nt, Artificial Sequence
  Synthetic
auuuucaacuuuccuauuag

SEQ ID NO: 52420 - RNA, 21 nt, Artificial Sequence
  Synthetic
cauuuucaacuuuccuauuag

SEQ ID NO: 52421 - RNA, 22 nt, Artificial Sequence
  Synthetic
acauuuucaacuuuccuauuag

SEQ ID NO: 52422 - RNA, 23 nt, Artificial Sequence
  Synthetic
aacauuuucaacuuuccuauuag

SEQ ID NO: 52423 - RNA, 24 nt, Artificial Sequence
  Synthetic
caacauuuucaacuuuccuauuag

SEQ ID NO: 52424 - RNA, 18 nt, Artificial Sequence
  Synthetic
augaaucacaucuauuag

SEQ ID NO: 52425 - RNA, 19 nt, Artificial Sequence
  Synthetic
uaugaaucacaucuauuag

SEQ ID NO: 52426 - RNA, 20 nt, Artificial Sequence
  Synthetic
auaugaaucacaucuauuag

SEQ ID NO: 52427 - RNA, 21 nt, Artificial Sequence
  Synthetic
aauaugaaucacaucuauuag

SEQ ID NO: 52428 - RNA, 23 nt, Artificial Sequence
  Synthetic
agaauaugaaucacaucuauuag

SEQ ID NO: 52429 - RNA, 20 nt, Artificial Sequence
  Synthetic
uggauaguuucaucuauuag

SEQ ID NO: 52430 - RNA, 22 nt, Artificial Sequence
  Synthetic
uguggauaguuucaucuauuag

SEQ ID NO: 52431 - RNA, 23 nt, Artificial Sequence
  Synthetic
uuguggauaguuucaucuauuag

SEQ ID NO: 52432 - RNA, 24 nt, Artificial Sequence
  Synthetic
uuuguggauaguuucaucuauuag

SEQ ID NO: 52433 - RNA, 18 nt, Artificial Sequence
  Synthetic
ucuguggaaccguauuag

SEQ ID NO: 52434 - RNA, 19 nt, Artificial Sequence
  Synthetic
uucuguggaaccguauuag

SEQ ID NO: 52435 - RNA, 20 nt, Artificial Sequence
  Synthetic
auucuguggaaccguauuag

SEQ ID NO: 52436 - RNA, 23 nt, Artificial Sequence
  Synthetic
uggauucuguggaaccguauuag

SEQ ID NO: 52437 - RNA, 24 nt, Artificial Sequence
  Synthetic
cuggauucuguggaaccguauuag

SEQ ID NO: 52438 - RNA, 18 nt, Artificial Sequence
  Synthetic
uuucuauucugguauuag

SEQ ID NO: 52439 - RNA, 19 nt, Artificial Sequence
  Synthetic
uuuucuauucugguauuag

SEQ ID NO: 52440 - RNA, 20 nt, Artificial Sequence
  Synthetic
cuuuucuauucugguauuag

SEQ ID NO: 52441 - RNA, 22 nt, Artificial Sequence
  Synthetic
ugcuuuucuauucugguauuag

SEQ ID NO: 52442 - RNA, 23 nt, Artificial Sequence
  Synthetic
cugcuuuucuauucugguauuag

SEQ ID NO: 52443 - RNA, 24 nt, Artificial Sequence
  Synthetic
acugcuuuucuauucugguauuag

SEQ ID NO: 52444 - RNA, 18 nt, Artificial Sequence
  Synthetic
ugaccaccauccacuuag

SEQ ID NO: 52445 - RNA, 19 nt, Artificial Sequence
  Synthetic
augaccaccauccacuuag

SEQ ID NO: 52446 - RNA, 20 nt, Artificial Sequence
  Synthetic
uaugaccaccauccacuuag

SEQ ID NO: 52447 - RNA, 21 nt, Artificial Sequence
  Synthetic
auaugaccaccauccacuuag

SEQ ID NO: 52448 - RNA, 22 nt, Artificial Sequence
  Synthetic
aauaugaccaccauccacuuag

SEQ ID NO: 52449 - RNA, 23 nt, Artificial Sequence
  Synthetic
uaauaugaccaccauccacuuag

SEQ ID NO: 52450 - RNA, 24 nt, Artificial Sequence
  Synthetic
uuaauaugaccaccauccacuuag

SEQ ID NO: 52451 - RNA, 18 nt, Artificial Sequence
  Synthetic
aguagcaaaggcacuuag

SEQ ID NO: 52452 - RNA, 19 nt, Artificial Sequence
  Synthetic
caguagcaaaggcacuuag

SEQ ID NO: 52453 - RNA, 20 nt, Artificial Sequence
  Synthetic
ucaguagcaaaggcacuuag

SEQ ID NO: 52454 - RNA, 21 nt, Artificial Sequence
  Synthetic
uucaguagcaaaggcacuuag

SEQ ID NO: 52455 - RNA, 22 nt, Artificial Sequence
  Synthetic
auucaguagcaaaggcacuuag

SEQ ID NO: 52456 - RNA, 23 nt, Artificial Sequence
  Synthetic
cauucaguagcaaaggcacuuag

SEQ ID NO: 52457 - RNA, 24 nt, Artificial Sequence
  Synthetic
acauucaguagcaaaggcacuuag

SEQ ID NO: 52458 - RNA, 18 nt, Artificial Sequence
  Synthetic
uuauuuccucauacuuag

SEQ ID NO: 52459 - RNA, 19 nt, Artificial Sequence
  Synthetic
uuuauuuccucauacuuag

SEQ ID NO: 52460 - RNA, 21 nt, Artificial Sequence
  Synthetic
aguuuauuuccucauacuuag

SEQ ID NO: 52461 - RNA, 22 nt, Artificial Sequence
  Synthetic
aaguuuauuuccucauacuuag

SEQ ID NO: 52462 - RNA, 23 nt, Artificial Sequence
  Synthetic
aaaguuuauuuccucauacuuag

SEQ ID NO: 52463 - RNA, 18 nt, Artificial Sequence
  Synthetic
uagagaaagucaccuuag

SEQ ID NO: 52464 - RNA, 19 nt, Artificial Sequence
  Synthetic
uuagagaaagucaccuuag

SEQ ID NO: 52465 - RNA, 20 nt, Artificial Sequence
  Synthetic
uuuagagaaagucaccuuag

SEQ ID NO: 52466 - RNA, 22 nt, Artificial Sequence
  Synthetic
uguuuagagaaagucaccuuag

SEQ ID NO: 52467 - RNA, 23 nt, Artificial Sequence
  Synthetic
cuguuuagagaaagucaccuuag

SEQ ID NO: 52468 - RNA, 24 nt, Artificial Sequence
  Synthetic
ucuguuuagagaaagucaccuuag

SEQ ID NO: 52469 - RNA, 18 nt, Artificial Sequence
  Synthetic
uuucuaccccugccuuag

SEQ ID NO: 52470 - RNA, 19 nt, Artificial Sequence
  Synthetic
uuuucuaccccugccuuag

SEQ ID NO: 52471 - RNA, 20 nt, Artificial Sequence
  Synthetic
cuuuucuaccccugccuuag

SEQ ID NO: 52472 - RNA, 22 nt, Artificial Sequence
  Synthetic
agcuuuucuaccccugccuuag

SEQ ID NO: 52473 - RNA, 23 nt, Artificial Sequence
  Synthetic
cagcuuuucuaccccugccuuag

SEQ ID NO: 52474 - RNA, 24 nt, Artificial Sequence
  Synthetic
acagcuuuucuaccccugccuuag

SEQ ID NO: 52475 - RNA, 18 nt, Artificial Sequence
  Synthetic
agcagcaagauuccuuag

SEQ ID NO: 52476 - RNA, 19 nt, Artificial Sequence
  Synthetic
uagcagcaagauuccuuag

SEQ ID NO: 52477 - RNA, 20 nt, Artificial Sequence
  Synthetic
uuagcagcaagauuccuuag

SEQ ID NO: 52478 - RNA, 21 nt, Artificial Sequence
  Synthetic
auuagcagcaagauuccuuag

SEQ ID NO: 52479 - RNA, 22 nt, Artificial Sequence
  Synthetic
aauuagcagcaagauuccuuag

SEQ ID NO: 52480 - RNA, 24 nt, Artificial Sequence
  Synthetic
ugaauuagcagcaagauuccuuag

SEQ ID NO: 52481 - RNA, 18 nt, Artificial Sequence
  Synthetic
uuuuaaaugagggcuuag

SEQ ID NO: 52482 - RNA, 20 nt, Artificial Sequence
  Synthetic
aguuuuaaaugagggcuuag

SEQ ID NO: 52483 - RNA, 23 nt, Artificial Sequence
  Synthetic
aggaguuuuaaaugagggcuuag

SEQ ID NO: 52484 - RNA, 19 nt, Artificial Sequence
  Synthetic
ugagagaacauuaucuuag

SEQ ID NO: 52485 - RNA, 20 nt, Artificial Sequence
  Synthetic
cugagagaacauuaucuuag

SEQ ID NO: 52486 - RNA, 22 nt, Artificial Sequence
  Synthetic
agcugagagaacauuaucuuag

SEQ ID NO: 52487 - RNA, 23 nt, Artificial Sequence
  Synthetic
cagcugagagaacauuaucuuag

SEQ ID NO: 52488 - RNA, 24 nt, Artificial Sequence
  Synthetic
acagcugagagaacauuaucuuag

SEQ ID NO: 52489 - RNA, 18 nt, Artificial Sequence
  Synthetic
cugagaugaaacaguuag

SEQ ID NO: 52490 - RNA, 19 nt, Artificial Sequence
  Synthetic
ucugagaugaaacaguuag

SEQ ID NO: 52491 - RNA, 21 nt, Artificial Sequence
  Synthetic
agucugagaugaaacaguuag

SEQ ID NO: 52492 - RNA, 23 nt, Artificial Sequence
  Synthetic
agagucugagaugaaacaguuag

SEQ ID NO: 52493 - RNA, 24 nt, Artificial Sequence
  Synthetic
aagagucugagaugaaacaguuag

SEQ ID NO: 52494 - RNA, 21 nt, Artificial Sequence
  Synthetic
uguggguagguggauaguuag

SEQ ID NO: 52495 - RNA, 22 nt, Artificial Sequence
  Synthetic
uuguggguagguggauaguuag

SEQ ID NO: 52496 - RNA, 23 nt, Artificial Sequence
  Synthetic
uuuguggguagguggauaguuag

SEQ ID NO: 52497 - RNA, 18 nt, Artificial Sequence
  Synthetic
ccaaacugugcacguuag

SEQ ID NO: 52498 - RNA, 19 nt, Artificial Sequence
  Synthetic
cccaaacugugcacguuag

SEQ ID NO: 52499 - RNA, 20 nt, Artificial Sequence
  Synthetic
ucccaaacugugcacguuag

SEQ ID NO: 52500 - RNA, 18 nt, Artificial Sequence
  Synthetic
cauucugguagugguuag

SEQ ID NO: 52501 - RNA, 19 nt, Artificial Sequence
  Synthetic
ucauucugguagugguuag

SEQ ID NO: 52502 - RNA, 20 nt, Artificial Sequence
  Synthetic
aucauucugguagugguuag

SEQ ID NO: 52503 - RNA, 22 nt, Artificial Sequence
  Synthetic
agaucauucugguagugguuag

SEQ ID NO: 52504 - RNA, 23 nt, Artificial Sequence
  Synthetic
aagaucauucugguagugguuag

SEQ ID NO: 52505 - RNA, 24 nt, Artificial Sequence
  Synthetic
aaagaucauucugguagugguuag

SEQ ID NO: 52506 - RNA, 18 nt, Artificial Sequence
  Synthetic
uaaagacuuuacuguuag

SEQ ID NO: 52507 - RNA, 19 nt, Artificial Sequence
  Synthetic
uuaaagacuuuacuguuag

SEQ ID NO: 52508 - RNA, 20 nt, Artificial Sequence
  Synthetic
auuaaagacuuuacuguuag

SEQ ID NO: 52509 - RNA, 22 nt, Artificial Sequence
  Synthetic
agauuaaagacuuuacuguuag

SEQ ID NO: 52510 - RNA, 23 nt, Artificial Sequence
  Synthetic
uagauuaaagacuuuacuguuag

SEQ ID NO: 52511 - RNA, 24 nt, Artificial Sequence
  Synthetic
uuagauuaaagacuuuacuguuag

SEQ ID NO: 52512 - RNA, 18 nt, Artificial Sequence
  Synthetic
auuaaauauaucuguuag

SEQ ID NO: 52513 - RNA, 19 nt, Artificial Sequence
  Synthetic
uauuaaauauaucuguuag

SEQ ID NO: 52514 - RNA, 20 nt, Artificial Sequence
  Synthetic
cuauuaaauauaucuguuag

SEQ ID NO: 52515 - RNA, 21 nt, Artificial Sequence
  Synthetic
acuauuaaauauaucuguuag

SEQ ID NO: 52516 - RNA, 22 nt, Artificial Sequence
  Synthetic
uacuauuaaauauaucuguuag

SEQ ID NO: 52517 - RNA, 23 nt, Artificial Sequence
  Synthetic
uuacuauuaaauauaucuguuag

SEQ ID NO: 52518 - RNA, 24 nt, Artificial Sequence
  Synthetic
auuacuauuaaauauaucuguuag

SEQ ID NO: 52519 - RNA, 18 nt, Artificial Sequence
  Synthetic
ucuaaaaauagguguuag

SEQ ID NO: 52520 - RNA, 19 nt, Artificial Sequence
  Synthetic
uucuaaaaauagguguuag

SEQ ID NO: 52521 - RNA, 20 nt, Artificial Sequence
  Synthetic
auucuaaaaauagguguuag

SEQ ID NO: 52522 - RNA, 22 nt, Artificial Sequence
  Synthetic
ugauucuaaaaauagguguuag

SEQ ID NO: 52523 - RNA, 23 nt, Artificial Sequence
  Synthetic
cugauucuaaaaauagguguuag

SEQ ID NO: 52524 - RNA, 24 nt, Artificial Sequence
  Synthetic
ucugauucuaaaaauagguguuag

SEQ ID NO: 52525 - RNA, 19 nt, Artificial Sequence
  Synthetic
uguauauggacuuuguuag

SEQ ID NO: 52526 - RNA, 20 nt, Artificial Sequence
  Synthetic
auguauauggacuuuguuag

SEQ ID NO: 52527 - RNA, 21 nt, Artificial Sequence
  Synthetic
uauguauauggacuuuguuag

SEQ ID NO: 52528 - RNA, 24 nt, Artificial Sequence
  Synthetic
ugguauguauauggacuuuguuag

SEQ ID NO: 52529 - RNA, 18 nt, Artificial Sequence
  Synthetic
aaauugcccaaaauuuag

SEQ ID NO: 52530 - RNA, 19 nt, Artificial Sequence
  Synthetic
uaaauugcccaaaauuuag

SEQ ID NO: 52531 - RNA, 20 nt, Artificial Sequence
  Synthetic
uuaaauugcccaaaauuuag

SEQ ID NO: 52532 - RNA, 21 nt, Artificial Sequence
  Synthetic
auuaaauugcccaaaauuuag

SEQ ID NO: 52533 - RNA, 22 nt, Artificial Sequence
  Synthetic
aauuaaauugcccaaaauuuag

SEQ ID NO: 52534 - RNA, 23 nt, Artificial Sequence
  Synthetic
aaauuaaauugcccaaaauuuag

SEQ ID NO: 52535 - RNA, 24 nt, Artificial Sequence
  Synthetic
aaaauuaaauugcccaaaauuuag

SEQ ID NO: 52536 - RNA, 21 nt, Artificial Sequence
  Synthetic
aggggagcuaaggaaauuuag

SEQ ID NO: 52537 - RNA, 22 nt, Artificial Sequence
  Synthetic
uaggggagcuaaggaaauuuag

SEQ ID NO: 52538 - RNA, 23 nt, Artificial Sequence
  Synthetic
cuaggggagcuaaggaaauuuag

SEQ ID NO: 52539 - RNA, 18 nt, Artificial Sequence
  Synthetic
aguugacaauaaauuuag

SEQ ID NO: 52540 - RNA, 19 nt, Artificial Sequence
  Synthetic
uaguugacaauaaauuuag

SEQ ID NO: 52541 - RNA, 22 nt, Artificial Sequence
  Synthetic
agguaguugacaauaaauuuag

SEQ ID NO: 52542 - RNA, 23 nt, Artificial Sequence
  Synthetic
aagguaguugacaauaaauuuag

SEQ ID NO: 52543 - RNA, 18 nt, Artificial Sequence
  Synthetic
auccuuuuaaccauuuag

SEQ ID NO: 52544 - RNA, 19 nt, Artificial Sequence
  Synthetic
uauccuuuuaaccauuuag

SEQ ID NO: 52545 - RNA, 20 nt, Artificial Sequence
  Synthetic
uuauccuuuuaaccauuuag

SEQ ID NO: 52546 - RNA, 21 nt, Artificial Sequence
  Synthetic
uuuauccuuuuaaccauuuag

SEQ ID NO: 52547 - RNA, 22 nt, Artificial Sequence
  Synthetic
cuuuauccuuuuaaccauuuag

SEQ ID NO: 52548 - RNA, 23 nt, Artificial Sequence
  Synthetic
ccuuuauccuuuuaaccauuuag

SEQ ID NO: 52549 - RNA, 24 nt, Artificial Sequence
  Synthetic
accuuuauccuuuuaaccauuuag

SEQ ID NO: 52550 - RNA, 18 nt, Artificial Sequence
  Synthetic
uuagaaucgaagauuuag

SEQ ID NO: 52551 - RNA, 19 nt, Artificial Sequence
  Synthetic
cuuagaaucgaagauuuag

SEQ ID NO: 52552 - RNA, 22 nt, Artificial Sequence
  Synthetic
uggcuuagaaucgaagauuuag

SEQ ID NO: 52553 - RNA, 23 nt, Artificial Sequence
  Synthetic
cuggcuuagaaucgaagauuuag

SEQ ID NO: 52554 - RNA, 24 nt, Artificial Sequence
  Synthetic
acuggcuuagaaucgaagauuuag

SEQ ID NO: 52555 - RNA, 18 nt, Artificial Sequence
  Synthetic
caauuaaaagagauuuag

SEQ ID NO: 52556 - RNA, 19 nt, Artificial Sequence
  Synthetic
ccaauuaaaagagauuuag

SEQ ID NO: 52557 - RNA, 20 nt, Artificial Sequence
  Synthetic
accaauuaaaagagauuuag

SEQ ID NO: 52558 - RNA, 21 nt, Artificial Sequence
  Synthetic
uuaaaauaaauauuuauuuag

SEQ ID NO: 52559 - RNA, 22 nt, Artificial Sequence
  Synthetic
auuaaaauaaauauuuauuuag

SEQ ID NO: 52560 - RNA, 24 nt, Artificial Sequence
  Synthetic
agauuaaaauaaauauuuauuuag

SEQ ID NO: 52561 - RNA, 18 nt, Artificial Sequence
  Synthetic
uuuucucccuuacuuuag

SEQ ID NO: 52562 - RNA, 19 nt, Artificial Sequence
  Synthetic
uuuuucucccuuacuuuag

SEQ ID NO: 52563 - RNA, 20 nt, Artificial Sequence
  Synthetic
cuuuuucucccuuacuuuag

SEQ ID NO: 52564 - RNA, 21 nt, Artificial Sequence
  Synthetic
acuuuuucucccuuacuuuag

SEQ ID NO: 52565 - RNA, 22 nt, Artificial Sequence
  Synthetic
cacuuuuucucccuuacuuuag

SEQ ID NO: 52566 - RNA, 23 nt, Artificial Sequence
  Synthetic
ccacuuuuucucccuuacuuuag

SEQ ID NO: 52567 - RNA, 18 nt, Artificial Sequence
  Synthetic
aguagcaccuugcuuuag

SEQ ID NO: 52568 - RNA, 19 nt, Artificial Sequence
  Synthetic
caguagcaccuugcuuuag

SEQ ID NO: 52569 - RNA, 21 nt, Artificial Sequence
  Synthetic
agcaguagcaccuugcuuuag

SEQ ID NO: 52570 - RNA, 22 nt, Artificial Sequence
  Synthetic
aagcaguagcaccuugcuuuag

SEQ ID NO: 52571 - RNA, 24 nt, Artificial Sequence
  Synthetic
agaagcaguagcaccuugcuuuag

SEQ ID NO: 52572 - RNA, 18 nt, Artificial Sequence
  Synthetic
cuuaacugccaucuuuag

SEQ ID NO: 52573 - RNA, 19 nt, Artificial Sequence
  Synthetic
acuuaacugccaucuuuag

SEQ ID NO: 52574 - RNA, 22 nt, Artificial Sequence
  Synthetic
cggacuuaacugccaucuuuag

SEQ ID NO: 52575 - RNA, 23 nt, Artificial Sequence
  Synthetic
acggacuuaacugccaucuuuag

SEQ ID NO: 52576 - RNA, 24 nt, Artificial Sequence
  Synthetic
uacggacuuaacugccaucuuuag

SEQ ID NO: 52577 - RNA, 18 nt, Artificial Sequence
  Synthetic
cuaggcaccucucuuuag

SEQ ID NO: 52578 - RNA, 22 nt, Artificial Sequence
  Synthetic
ugggcuaggcaccucucuuuag

SEQ ID NO: 52579 - RNA, 23 nt, Artificial Sequence
  Synthetic
uugggcuaggcaccucucuuuag

SEQ ID NO: 52580 - RNA, 24 nt, Artificial Sequence
  Synthetic
uuugggcuaggcaccucucuuuag

SEQ ID NO: 52581 - RNA, 18 nt, Artificial Sequence
  Synthetic
ucggguaucucucuuuag

SEQ ID NO: 52582 - RNA, 19 nt, Artificial Sequence
  Synthetic
aucggguaucucucuuuag

SEQ ID NO: 52583 - RNA, 20 nt, Artificial Sequence
  Synthetic
caucggguaucucucuuuag

SEQ ID NO: 52584 - RNA, 22 nt, Artificial Sequence
  Synthetic
agcaucggguaucucucuuuag

SEQ ID NO: 52585 - RNA, 23 nt, Artificial Sequence
  Synthetic
uagcaucggguaucucucuuuag

SEQ ID NO: 52586 - RNA, 18 nt, Artificial Sequence
  Synthetic
uuuuuaagcuuucuuuag

SEQ ID NO: 52587 - RNA, 19 nt, Artificial Sequence
  Synthetic
cuuuuuaagcuuucuuuag

SEQ ID NO: 52588 - RNA, 20 nt, Artificial Sequence
  Synthetic
acuuuuuaagcuuucuuuag

SEQ ID NO: 52589 - RNA, 22 nt, Artificial Sequence
  Synthetic
agacuuuuuaagcuuucuuuag

SEQ ID NO: 52590 - RNA, 23 nt, Artificial Sequence
  Synthetic
cagacuuuuuaagcuuucuuuag

SEQ ID NO: 52591 - RNA, 18 nt, Artificial Sequence
  Synthetic
uaaauacagaaaguuuag

SEQ ID NO: 52592 - RNA, 20 nt, Artificial Sequence
  Synthetic
uguaaauacagaaaguuuag

SEQ ID NO: 52593 - RNA, 21 nt, Artificial Sequence
  Synthetic
cuguaaauacagaaaguuuag

SEQ ID NO: 52594 - RNA, 22 nt, Artificial Sequence
  Synthetic
acuguaaauacagaaaguuuag

SEQ ID NO: 52595 - RNA, 23 nt, Artificial Sequence
  Synthetic
cacuguaaauacagaaaguuuag

SEQ ID NO: 52596 - RNA, 24 nt, Artificial Sequence
  Synthetic
acacuguaaauacagaaaguuuag

SEQ ID NO: 52597 - RNA, 18 nt, Artificial Sequence
  Synthetic
caaaacguaaugguuuag

SEQ ID NO: 52598 - RNA, 19 nt, Artificial Sequence
  Synthetic
ccaaaacguaaugguuuag

SEQ ID NO: 52599 - RNA, 21 nt, Artificial Sequence
  Synthetic
agccaaaacguaaugguuuag

SEQ ID NO: 52600 - RNA, 22 nt, Artificial Sequence
  Synthetic
aagccaaaacguaaugguuuag

SEQ ID NO: 52601 - RNA, 23 nt, Artificial Sequence
  Synthetic
aaagccaaaacguaaugguuuag

SEQ ID NO: 52602 - RNA, 24 nt, Artificial Sequence
  Synthetic
aaaagccaaaacguaaugguuuag

SEQ ID NO: 52603 - RNA, 20 nt, Artificial Sequence
  Synthetic
agggaaaaccacaauuuuag

SEQ ID NO: 52604 - RNA, 23 nt, Artificial Sequence
  Synthetic
uggagggaaaaccacaauuuuag

SEQ ID NO: 52605 - RNA, 24 nt, Artificial Sequence
  Synthetic
auggagggaaaaccacaauuuuag

SEQ ID NO: 52606 - RNA, 18 nt, Artificial Sequence
  Synthetic
aagaguacauaauuuuag

SEQ ID NO: 52607 - RNA, 19 nt, Artificial Sequence
  Synthetic
caagaguacauaauuuuag

SEQ ID NO: 52608 - RNA, 20 nt, Artificial Sequence
  Synthetic
acaagaguacauaauuuuag

SEQ ID NO: 52609 - RNA, 22 nt, Artificial Sequence
  Synthetic
agacaagaguacauaauuuuag

SEQ ID NO: 52610 - RNA, 23 nt, Artificial Sequence
  Synthetic
cagacaagaguacauaauuuuag

SEQ ID NO: 52611 - RNA, 24 nt, Artificial Sequence
  Synthetic
acagacaagaguacauaauuuuag

SEQ ID NO: 52612 - RNA, 18 nt, Artificial Sequence
  Synthetic
uucaaaggaacauuuuag

SEQ ID NO: 52613 - RNA, 19 nt, Artificial Sequence
  Synthetic
auucaaaggaacauuuuag

SEQ ID NO: 52614 - RNA, 21 nt, Artificial Sequence
  Synthetic
agauucaaaggaacauuuuag

SEQ ID NO: 52615 - RNA, 22 nt, Artificial Sequence
  Synthetic
uagauucaaaggaacauuuuag

SEQ ID NO: 52616 - RNA, 23 nt, Artificial Sequence
  Synthetic
auagauucaaaggaacauuuuag

SEQ ID NO: 52617 - RNA, 24 nt, Artificial Sequence
  Synthetic
cauagauucaaaggaacauuuuag

SEQ ID NO: 52618 - RNA, 22 nt, Artificial Sequence
  Synthetic
ugcugcaguuaacacauuuuag

SEQ ID NO: 52619 - RNA, 23 nt, Artificial Sequence
  Synthetic
uugcugcaguuaacacauuuuag

SEQ ID NO: 52620 - RNA, 24 nt, Artificial Sequence
  Synthetic
uuugcugcaguuaacacauuuuag

SEQ ID NO: 52621 - RNA, 18 nt, Artificial Sequence
  Synthetic
uacaccaaaaacuuuuag

SEQ ID NO: 52622 - RNA, 19 nt, Artificial Sequence
  Synthetic
uuacaccaaaaacuuuuag

SEQ ID NO: 52623 - RNA, 20 nt, Artificial Sequence
  Synthetic
uuuacaccaaaaacuuuuag

SEQ ID NO: 52624 - RNA, 21 nt, Artificial Sequence
  Synthetic
auuuacaccaaaaacuuuuag

SEQ ID NO: 52625 - RNA, 22 nt, Artificial Sequence
  Synthetic
aauuuacaccaaaaacuuuuag

SEQ ID NO: 52626 - RNA, 23 nt, Artificial Sequence
  Synthetic
uaauuuacaccaaaaacuuuuag

SEQ ID NO: 52627 - RNA, 24 nt, Artificial Sequence
  Synthetic
uuaauuuacaccaaaaacuuuuag

SEQ ID NO: 52628 - RNA, 18 nt, Artificial Sequence
  Synthetic
uuauucuccaucuuuuag

SEQ ID NO: 52629 - RNA, 21 nt, Artificial Sequence
  Synthetic
agguuauucuccaucuuuuag

SEQ ID NO: 52630 - RNA, 22 nt, Artificial Sequence
  Synthetic
uagguuauucuccaucuuuuag

SEQ ID NO: 52631 - RNA, 24 nt, Artificial Sequence
  Synthetic
uguagguuauucuccaucuuuuag

SEQ ID NO: 52632 - RNA, 18 nt, Artificial Sequence
  Synthetic
uauaccauuaucuuuuag

SEQ ID NO: 52633 - RNA, 19 nt, Artificial Sequence
  Synthetic
auauaccauuaucuuuuag

SEQ ID NO: 52634 - RNA, 20 nt, Artificial Sequence
  Synthetic
aauauaccauuaucuuuuag

SEQ ID NO: 52635 - RNA, 21 nt, Artificial Sequence
  Synthetic
aaauauaccauuaucuuuuag

SEQ ID NO: 52636 - RNA, 22 nt, Artificial Sequence
  Synthetic
aaaauauaccauuaucuuuuag

SEQ ID NO: 52637 - RNA, 24 nt, Artificial Sequence
  Synthetic
agaaaauauaccauuaucuuuuag

SEQ ID NO: 52638 - RNA, 18 nt, Artificial Sequence
  Synthetic
agcauauuuggguuuuag

SEQ ID NO: 52639 - RNA, 20 nt, Artificial Sequence
  Synthetic
ugagcauauuuggguuuuag

SEQ ID NO: 52640 - RNA, 21 nt, Artificial Sequence
  Synthetic
augagcauauuuggguuuuag

SEQ ID NO: 52641 - RNA, 22 nt, Artificial Sequence
  Synthetic
caugagcauauuuggguuuuag

SEQ ID NO: 52642 - RNA, 23 nt, Artificial Sequence
  Synthetic
acaugagcauauuuggguuuuag

SEQ ID NO: 52643 - RNA, 18 nt, Artificial Sequence
  Synthetic
cucgguaccaauaaaacg

SEQ ID NO: 52644 - RNA, 19 nt, Artificial Sequence
  Synthetic
ucucgguaccaauaaaacg

SEQ ID NO: 52645 - RNA, 20 nt, Artificial Sequence
  Synthetic
aucucgguaccaauaaaacg

SEQ ID NO: 52646 - RNA, 21 nt, Artificial Sequence
  Synthetic
aaucucgguaccaauaaaacg

SEQ ID NO: 52647 - RNA, 22 nt, Artificial Sequence
  Synthetic
aaaucucgguaccaauaaaacg

SEQ ID NO: 52648 - RNA, 23 nt, Artificial Sequence
  Synthetic
aaaaucucgguaccaauaaaacg

SEQ ID NO: 52649 - RNA, 21 nt, Artificial Sequence
  Synthetic
caacauagguguccgucaacg

SEQ ID NO: 52650 - RNA, 22 nt, Artificial Sequence
  Synthetic
ucaacauagguguccgucaacg

SEQ ID NO: 52651 - RNA, 23 nt, Artificial Sequence
  Synthetic
aucaacauagguguccgucaacg

SEQ ID NO: 52652 - RNA, 18 nt, Artificial Sequence
  Synthetic
ccacuauuaucuucaacg

SEQ ID NO: 52653 - RNA, 19 nt, Artificial Sequence
  Synthetic
uccacuauuaucuucaacg

SEQ ID NO: 52654 - RNA, 20 nt, Artificial Sequence
  Synthetic
auccacuauuaucuucaacg

SEQ ID NO: 52655 - RNA, 21 nt, Artificial Sequence
  Synthetic
aauccacuauuaucuucaacg

SEQ ID NO: 52656 - RNA, 22 nt, Artificial Sequence
  Synthetic
aaauccacuauuaucuucaacg

SEQ ID NO: 52657 - RNA, 23 nt, Artificial Sequence
  Synthetic
caaauccacuauuaucuucaacg

SEQ ID NO: 52658 - RNA, 24 nt, Artificial Sequence
  Synthetic
ccaaauccacuauuaucuucaacg

SEQ ID NO: 52659 - RNA, 18 nt, Artificial Sequence
  Synthetic
aacagugaaaacagaacg

SEQ ID NO: 52660 - RNA, 19 nt, Artificial Sequence
  Synthetic
aaacagugaaaacagaacg

SEQ ID NO: 52661 - RNA, 20 nt, Artificial Sequence
  Synthetic
uaaacagugaaaacagaacg

SEQ ID NO: 52662 - RNA, 21 nt, Artificial Sequence
  Synthetic
auaaacagugaaaacagaacg

SEQ ID NO: 52663 - RNA, 22 nt, Artificial Sequence
  Synthetic
cauaaacagugaaaacagaacg

SEQ ID NO: 52664 - RNA, 24 nt, Artificial Sequence
  Synthetic
ugcauaaacagugaaaacagaacg

SEQ ID NO: 52665 - RNA, 18 nt, Artificial Sequence
  Synthetic
cauacuguuuucagaacg

SEQ ID NO: 52666 - RNA, 19 nt, Artificial Sequence
  Synthetic
ucauacuguuuucagaacg

SEQ ID NO: 52667 - RNA, 20 nt, Artificial Sequence
  Synthetic
uucauacuguuuucagaacg

SEQ ID NO: 52668 - RNA, 21 nt, Artificial Sequence
  Synthetic
uuucauacuguuuucagaacg

SEQ ID NO: 52669 - RNA, 23 nt, Artificial Sequence
  Synthetic
uguuucauacuguuuucagaacg

SEQ ID NO: 52670 - RNA, 24 nt, Artificial Sequence
  Synthetic
cuguuucauacuguuuucagaacg

SEQ ID NO: 52671 - RNA, 19 nt, Artificial Sequence
  Synthetic
aggaaacucaccuagaacg

SEQ ID NO: 52672 - RNA, 20 nt, Artificial Sequence
  Synthetic
caggaaacucaccuagaacg

SEQ ID NO: 52673 - RNA, 21 nt, Artificial Sequence
  Synthetic
ccaggaaacucaccuagaacg

SEQ ID NO: 52674 - RNA, 24 nt, Artificial Sequence
  Synthetic
aggccaggaaacucaccuagaacg

SEQ ID NO: 52675 - RNA, 18 nt, Artificial Sequence
  Synthetic
uguuauacacauauaacg

SEQ ID NO: 52676 - RNA, 19 nt, Artificial Sequence
  Synthetic
auguuauacacauauaacg

SEQ ID NO: 52677 - RNA, 20 nt, Artificial Sequence
  Synthetic
cauguuauacacauauaacg

SEQ ID NO: 52678 - RNA, 21 nt, Artificial Sequence
  Synthetic
acauguuauacacauauaacg

SEQ ID NO: 52679 - RNA, 22 nt, Artificial Sequence
  Synthetic
aacauguuauacacauauaacg

SEQ ID NO: 52680 - RNA, 23 nt, Artificial Sequence
  Synthetic
uaacauguuauacacauauaacg

SEQ ID NO: 52681 - RNA, 24 nt, Artificial Sequence
  Synthetic
auaacauguuauacacauauaacg

SEQ ID NO: 52682 - RNA, 18 nt, Artificial Sequence
  Synthetic
aauugaaaauguauaacg

SEQ ID NO: 52683 - RNA, 19 nt, Artificial Sequence
  Synthetic
aaauugaaaauguauaacg

SEQ ID NO: 52684 - RNA, 20 nt, Artificial Sequence
  Synthetic
caaauugaaaauguauaacg

SEQ ID NO: 52685 - RNA, 21 nt, Artificial Sequence
  Synthetic
ucaaauugaaaauguauaacg

SEQ ID NO: 52686 - RNA, 22 nt, Artificial Sequence
  Synthetic
aucaaauugaaaauguauaacg

SEQ ID NO: 52687 - RNA, 23 nt, Artificial Sequence
  Synthetic
aaucaaauugaaaauguauaacg

SEQ ID NO: 52688 - RNA, 24 nt, Artificial Sequence
  Synthetic
aaaucaaauugaaaauguauaacg

SEQ ID NO: 52689 - RNA, 18 nt, Artificial Sequence
  Synthetic
uaacuaaaagaucuaacg

SEQ ID NO: 52690 - RNA, 19 nt, Artificial Sequence
  Synthetic
auaacuaaaagaucuaacg

SEQ ID NO: 52691 - RNA, 20 nt, Artificial Sequence
  Synthetic
aauaacuaaaagaucuaacg

SEQ ID NO: 52692 - RNA, 22 nt, Artificial Sequence
  Synthetic
agaauaacuaaaagaucuaacg

SEQ ID NO: 52693 - RNA, 23 nt, Artificial Sequence
  Synthetic
uagaauaacuaaaagaucuaacg

SEQ ID NO: 52694 - RNA, 18 nt, Artificial Sequence
  Synthetic
uggcccuuuagagacacg

SEQ ID NO: 52695 - RNA, 19 nt, Artificial Sequence
  Synthetic
auggcccuuuagagacacg

SEQ ID NO: 52696 - RNA, 20 nt, Artificial Sequence
  Synthetic
cauggcccuuuagagacacg

SEQ ID NO: 52697 - RNA, 22 nt, Artificial Sequence
  Synthetic
ugcauggcccuuuagagacacg

SEQ ID NO: 52698 - RNA, 23 nt, Artificial Sequence
  Synthetic
uugcauggcccuuuagagacacg

SEQ ID NO: 52699 - RNA, 24 nt, Artificial Sequence
  Synthetic
auugcauggcccuuuagagacacg

SEQ ID NO: 52700 - RNA, 18 nt, Artificial Sequence
  Synthetic
acuuguauuauagacacg

SEQ ID NO: 52701 - RNA, 19 nt, Artificial Sequence
  Synthetic
aacuuguauuauagacacg

SEQ ID NO: 52702 - RNA, 20 nt, Artificial Sequence
  Synthetic
aaacuuguauuauagacacg

SEQ ID NO: 52703 - RNA, 21 nt, Artificial Sequence
  Synthetic
uaaacuuguauuauagacacg

SEQ ID NO: 52704 - RNA, 22 nt, Artificial Sequence
  Synthetic
uuaaacuuguauuauagacacg

SEQ ID NO: 52705 - RNA, 23 nt, Artificial Sequence
  Synthetic
auuaaacuuguauuauagacacg

SEQ ID NO: 52706 - RNA, 24 nt, Artificial Sequence
  Synthetic
aauuaaacuuguauuauagacacg

SEQ ID NO: 52707 - RNA, 18 nt, Artificial Sequence
  Synthetic
uuacuuuuucuggacacg

SEQ ID NO: 52708 - RNA, 19 nt, Artificial Sequence
  Synthetic
auuacuuuuucuggacacg

SEQ ID NO: 52709 - RNA, 20 nt, Artificial Sequence
  Synthetic
cauuacuuuuucuggacacg

SEQ ID NO: 52710 - RNA, 21 nt, Artificial Sequence
  Synthetic
acauuacuuuuucuggacacg

SEQ ID NO: 52711 - RNA, 23 nt, Artificial Sequence
  Synthetic
agacauuacuuuuucuggacacg

SEQ ID NO: 52712 - RNA, 24 nt, Artificial Sequence
  Synthetic
aagacauuacuuuuucuggacacg

SEQ ID NO: 52713 - RNA, 20 nt, Artificial Sequence
  Synthetic
uggaaagaauuacuaccacg

SEQ ID NO: 52714 - RNA, 19 nt, Artificial Sequence
  Synthetic
aggcacucuucugggcacg

SEQ ID NO: 52715 - RNA, 20 nt, Artificial Sequence
  Synthetic
uaggcacucuucugggcacg

SEQ ID NO: 52716 - RNA, 21 nt, Artificial Sequence
  Synthetic
cuaggcacucuucugggcacg

SEQ ID NO: 52717 - RNA, 22 nt, Artificial Sequence
  Synthetic
acuaggcacucuucugggcacg

SEQ ID NO: 52718 - RNA, 23 nt, Artificial Sequence
  Synthetic
uacuaggcacucuucugggcacg

SEQ ID NO: 52719 - RNA, 18 nt, Artificial Sequence
  Synthetic
uuaaauaccgguugcacg

SEQ ID NO: 52720 - RNA, 19 nt, Artificial Sequence
  Synthetic
uuuaaauaccgguugcacg

SEQ ID NO: 52721 - RNA, 20 nt, Artificial Sequence
  Synthetic
uuuuaaauaccgguugcacg

SEQ ID NO: 52722 - RNA, 21 nt, Artificial Sequence
  Synthetic
auuuuaaauaccgguugcacg

SEQ ID NO: 52723 - RNA, 22 nt, Artificial Sequence
  Synthetic
aauuuuaaauaccgguugcacg

SEQ ID NO: 52724 - RNA, 23 nt, Artificial Sequence
  Synthetic
uaauuuuaaauaccgguugcacg

SEQ ID NO: 52725 - RNA, 19 nt, Artificial Sequence
  Synthetic
aggaugcugacaacucacg

SEQ ID NO: 52726 - RNA, 20 nt, Artificial Sequence
  Synthetic
caggaugcugacaacucacg

SEQ ID NO: 52727 - RNA, 21 nt, Artificial Sequence
  Synthetic
acaggaugcugacaacucacg

SEQ ID NO: 52728 - RNA, 22 nt, Artificial Sequence
  Synthetic
uacaggaugcugacaacucacg

SEQ ID NO: 52729 - RNA, 23 nt, Artificial Sequence
  Synthetic
auacaggaugcugacaacucacg

SEQ ID NO: 52730 - RNA, 24 nt, Artificial Sequence
  Synthetic
cauacaggaugcugacaacucacg

SEQ ID NO: 52731 - RNA, 19 nt, Artificial Sequence
  Synthetic
agaucaucacuaugagacg

SEQ ID NO: 52732 - RNA, 20 nt, Artificial Sequence
  Synthetic
uagaucaucacuaugagacg

SEQ ID NO: 52733 - RNA, 21 nt, Artificial Sequence
  Synthetic
auagaucaucacuaugagacg

SEQ ID NO: 52734 - RNA, 22 nt, Artificial Sequence
  Synthetic
uauagaucaucacuaugagacg

SEQ ID NO: 52735 - RNA, 24 nt, Artificial Sequence
  Synthetic
aguauagaucaucacuaugagacg

SEQ ID NO: 52736 - RNA, 19 nt, Artificial Sequence
  Synthetic
ugaccaauguuaauagacg

SEQ ID NO: 52737 - RNA, 20 nt, Artificial Sequence
  Synthetic
augaccaauguuaauagacg

SEQ ID NO: 52738 - RNA, 21 nt, Artificial Sequence
  Synthetic
caugaccaauguuaauagacg

SEQ ID NO: 52739 - RNA, 22 nt, Artificial Sequence
  Synthetic
ccaugaccaauguuaauagacg

SEQ ID NO: 52740 - RNA, 23 nt, Artificial Sequence
  Synthetic
accaugaccaauguuaauagacg

SEQ ID NO: 52741 - RNA, 24 nt, Artificial Sequence
  Synthetic
caccaugaccaauguuaauagacg

SEQ ID NO: 52742 - RNA, 19 nt, Artificial Sequence
  Synthetic
aggaacaagaaugaugacg

SEQ ID NO: 52743 - RNA, 20 nt, Artificial Sequence
  Synthetic
caggaacaagaaugaugacg

SEQ ID NO: 52744 - RNA, 21 nt, Artificial Sequence
  Synthetic
acaggaacaagaaugaugacg

SEQ ID NO: 52745 - RNA, 22 nt, Artificial Sequence
  Synthetic
cacaggaacaagaaugaugacg

SEQ ID NO: 52746 - RNA, 23 nt, Artificial Sequence
  Synthetic
acacaggaacaagaaugaugacg

SEQ ID NO: 52747 - RNA, 24 nt, Artificial Sequence
  Synthetic
aacacaggaacaagaaugaugacg

SEQ ID NO: 52748 - RNA, 18 nt, Artificial Sequence
  Synthetic
uguuuucauagaaauacg

SEQ ID NO: 52749 - RNA, 19 nt, Artificial Sequence
  Synthetic
uuguuuucauagaaauacg

SEQ ID NO: 52750 - RNA, 20 nt, Artificial Sequence
  Synthetic
auuguuuucauagaaauacg

SEQ ID NO: 52751 - RNA, 21 nt, Artificial Sequence
  Synthetic
uauuguuuucauagaaauacg

SEQ ID NO: 52752 - RNA, 22 nt, Artificial Sequence
  Synthetic
uuauuguuuucauagaaauacg

SEQ ID NO: 52753 - RNA, 23 nt, Artificial Sequence
  Synthetic
uuuauuguuuucauagaaauacg

SEQ ID NO: 52754 - RNA, 24 nt, Artificial Sequence
  Synthetic
uuuuauuguuuucauagaaauacg

SEQ ID NO: 52755 - RNA, 19 nt, Artificial Sequence
  Synthetic
ugugaccaagauacauacg

SEQ ID NO: 52756 - RNA, 20 nt, Artificial Sequence
  Synthetic
cugugaccaagauacauacg

SEQ ID NO: 52757 - RNA, 21 nt, Artificial Sequence
  Synthetic
ucugugaccaagauacauacg

SEQ ID NO: 52758 - RNA, 22 nt, Artificial Sequence
  Synthetic
aucugugaccaagauacauacg

SEQ ID NO: 52759 - RNA, 23 nt, Artificial Sequence
  Synthetic
uaucugugaccaagauacauacg

SEQ ID NO: 52760 - RNA, 24 nt, Artificial Sequence
  Synthetic
auaucugugaccaagauacauacg

SEQ ID NO: 52761 - RNA, 18 nt, Artificial Sequence
  Synthetic
uguuuuccagaugauacg

SEQ ID NO: 52762 - RNA, 19 nt, Artificial Sequence
  Synthetic
cuguuuuccagaugauacg

SEQ ID NO: 52763 - RNA, 20 nt, Artificial Sequence
  Synthetic
acuguuuuccagaugauacg

SEQ ID NO: 52764 - RNA, 22 nt, Artificial Sequence
  Synthetic
agacuguuuuccagaugauacg

SEQ ID NO: 52765 - RNA, 23 nt, Artificial Sequence
  Synthetic
cagacuguuuuccagaugauacg

SEQ ID NO: 52766 - RNA, 24 nt, Artificial Sequence
  Synthetic
ccagacuguuuuccagaugauacg

SEQ ID NO: 52767 - RNA, 18 nt, Artificial Sequence
  Synthetic
aagcaaaaauugacuacg

SEQ ID NO: 52768 - RNA, 19 nt, Artificial Sequence
  Synthetic
aaagcaaaaauugacuacg

SEQ ID NO: 52769 - RNA, 20 nt, Artificial Sequence
  Synthetic
aaaagcaaaaauugacuacg

SEQ ID NO: 52770 - RNA, 21 nt, Artificial Sequence
  Synthetic
aaaaagcaaaaauugacuacg

SEQ ID NO: 52771 - RNA, 23 nt, Artificial Sequence
  Synthetic
agaaaaagcaaaaauugacuacg

SEQ ID NO: 52772 - RNA, 24 nt, Artificial Sequence
  Synthetic
aagaaaaagcaaaaauugacuacg

SEQ ID NO: 52773 - RNA, 18 nt, Artificial Sequence
  Synthetic
uucugauaaugaccuacg

SEQ ID NO: 52774 - RNA, 19 nt, Artificial Sequence
  Synthetic
auucugauaaugaccuacg

SEQ ID NO: 52775 - RNA, 21 nt, Artificial Sequence
  Synthetic
ugauucugauaaugaccuacg

SEQ ID NO: 52776 - RNA, 22 nt, Artificial Sequence
  Synthetic
cugauucugauaaugaccuacg

SEQ ID NO: 52777 - RNA, 23 nt, Artificial Sequence
  Synthetic
ucugauucugauaaugaccuacg

SEQ ID NO: 52778 - RNA, 24 nt, Artificial Sequence
  Synthetic
uucugauucugauaaugaccuacg

SEQ ID NO: 52779 - RNA, 18 nt, Artificial Sequence
  Synthetic
acaauuuucaacuguacg

SEQ ID NO: 52780 - RNA, 19 nt, Artificial Sequence
  Synthetic
cacaauuuucaacuguacg

SEQ ID NO: 52781 - RNA, 20 nt, Artificial Sequence
  Synthetic
ccacaauuuucaacuguacg

SEQ ID NO: 52782 - RNA, 21 nt, Artificial Sequence
  Synthetic
uccacaauuuucaacuguacg

SEQ ID NO: 52783 - RNA, 22 nt, Artificial Sequence
  Synthetic
auccacaauuuucaacuguacg

SEQ ID NO: 52784 - RNA, 23 nt, Artificial Sequence
  Synthetic
aauccacaauuuucaacuguacg

SEQ ID NO: 52785 - RNA, 24 nt, Artificial Sequence
  Synthetic
uaauccacaauuuucaacuguacg

SEQ ID NO: 52786 - RNA, 18 nt, Artificial Sequence
  Synthetic
cuaucauacuuuauuacg

SEQ ID NO: 52787 - RNA, 19 nt, Artificial Sequence
  Synthetic
acuaucauacuuuauuacg

SEQ ID NO: 52788 - RNA, 20 nt, Artificial Sequence
  Synthetic
uacuaucauacuuuauuacg

SEQ ID NO: 52789 - RNA, 21 nt, Artificial Sequence
  Synthetic
auacuaucauacuuuauuacg

SEQ ID NO: 52790 - RNA, 22 nt, Artificial Sequence
  Synthetic
uauacuaucauacuuuauuacg

SEQ ID NO: 52791 - RNA, 23 nt, Artificial Sequence
  Synthetic
auauacuaucauacuuuauuacg

SEQ ID NO: 52792 - RNA, 24 nt, Artificial Sequence
  Synthetic
uauauacuaucauacuuuauuacg

SEQ ID NO: 52793 - RNA, 18 nt, Artificial Sequence
  Synthetic
uuccagauugaacuuacg

SEQ ID NO: 52794 - RNA, 19 nt, Artificial Sequence
  Synthetic
auuccagauugaacuuacg

SEQ ID NO: 52795 - RNA, 20 nt, Artificial Sequence
  Synthetic
cauuccagauugaacuuacg

SEQ ID NO: 52796 - RNA, 21 nt, Artificial Sequence
  Synthetic
acauuccagauugaacuuacg

SEQ ID NO: 52797 - RNA, 22 nt, Artificial Sequence
  Synthetic
uacauuccagauugaacuuacg

SEQ ID NO: 52798 - RNA, 23 nt, Artificial Sequence
  Synthetic
auacauuccagauugaacuuacg

SEQ ID NO: 52799 - RNA, 24 nt, Artificial Sequence
  Synthetic
uauacauuccagauugaacuuacg

SEQ ID NO: 52800 - RNA, 18 nt, Artificial Sequence
  Synthetic
agugcuggccugcuuacg

SEQ ID NO: 52801 - RNA, 19 nt, Artificial Sequence
  Synthetic
cagugcuggccugcuuacg

SEQ ID NO: 52802 - RNA, 20 nt, Artificial Sequence
  Synthetic
ucagugcuggccugcuuacg

SEQ ID NO: 52803 - RNA, 21 nt, Artificial Sequence
  Synthetic
aucagugcuggccugcuuacg

SEQ ID NO: 52804 - RNA, 22 nt, Artificial Sequence
  Synthetic
uaucagugcuggccugcuuacg

SEQ ID NO: 52805 - RNA, 23 nt, Artificial Sequence
  Synthetic
uuaucagugcuggccugcuuacg

SEQ ID NO: 52806 - RNA, 18 nt, Artificial Sequence
  Synthetic
aggauuucagaguuuacg

SEQ ID NO: 52807 - RNA, 19 nt, Artificial Sequence
  Synthetic
uaggauuucagaguuuacg

SEQ ID NO: 52808 - RNA, 20 nt, Artificial Sequence
  Synthetic
uuaggauuucagaguuuacg

SEQ ID NO: 52809 - RNA, 21 nt, Artificial Sequence
  Synthetic
uuuaggauuucagaguuuacg

SEQ ID NO: 52810 - RNA, 23 nt, Artificial Sequence
  Synthetic
uguuuaggauuucagaguuuacg

SEQ ID NO: 52811 - RNA, 24 nt, Artificial Sequence
  Synthetic
uuguuuaggauuucagaguuuacg

SEQ ID NO: 52812 - RNA, 19 nt, Artificial Sequence
  Synthetic
agugcuuucaaauggaccg

SEQ ID NO: 52813 - RNA, 20 nt, Artificial Sequence
  Synthetic
uagugcuuucaaauggaccg

SEQ ID NO: 52814 - RNA, 21 nt, Artificial Sequence
  Synthetic
uuagugcuuucaaauggaccg

SEQ ID NO: 52815 - RNA, 23 nt, Artificial Sequence
  Synthetic
aguuagugcuuucaaauggaccg

SEQ ID NO: 52816 - RNA, 24 nt, Artificial Sequence
  Synthetic
aaguuagugcuuucaaauggaccg

SEQ ID NO: 52817 - RNA, 19 nt, Artificial Sequence
  Synthetic
ugacugagaugcuggaccg

SEQ ID NO: 52818 - RNA, 20 nt, Artificial Sequence
  Synthetic
augacugagaugcuggaccg

SEQ ID NO: 52819 - RNA, 21 nt, Artificial Sequence
  Synthetic
aaugacugagaugcuggaccg

SEQ ID NO: 52820 - RNA, 22 nt, Artificial Sequence
  Synthetic
uaaugacugagaugcuggaccg

SEQ ID NO: 52821 - RNA, 23 nt, Artificial Sequence
  Synthetic
uuaaugacugagaugcuggaccg

SEQ ID NO: 52822 - RNA, 18 nt, Artificial Sequence
  Synthetic
cauuuggaagaaauaccg

SEQ ID NO: 52823 - RNA, 19 nt, Artificial Sequence
  Synthetic
acauuuggaagaaauaccg

SEQ ID NO: 52824 - RNA, 20 nt, Artificial Sequence
  Synthetic
uacauuuggaagaaauaccg

SEQ ID NO: 52825 - RNA, 21 nt, Artificial Sequence
  Synthetic
cuacauuuggaagaaauaccg

SEQ ID NO: 52826 - RNA, 22 nt, Artificial Sequence
  Synthetic
acuacauuuggaagaaauaccg

SEQ ID NO: 52827 - RNA, 23 nt, Artificial Sequence
  Synthetic
cacuacauuuggaagaaauaccg

SEQ ID NO: 52828 - RNA, 24 nt, Artificial Sequence
  Synthetic
acacuacauuuggaagaaauaccg

SEQ ID NO: 52829 - RNA, 18 nt, Artificial Sequence
  Synthetic
augggggaaagguuaccg

SEQ ID NO: 52830 - RNA, 19 nt, Artificial Sequence
  Synthetic
aaugggggaaagguuaccg

SEQ ID NO: 52831 - RNA, 20 nt, Artificial Sequence
  Synthetic
uaaugggggaaagguuaccg

SEQ ID NO: 52832 - RNA, 22 nt, Artificial Sequence
  Synthetic
uguaaugggggaaagguuaccg

SEQ ID NO: 52833 - RNA, 23 nt, Artificial Sequence
  Synthetic
uuguaaugggggaaagguuaccg

SEQ ID NO: 52834 - RNA, 24 nt, Artificial Sequence
  Synthetic
uuuguaaugggggaaagguuaccg

SEQ ID NO: 52835 - RNA, 18 nt, Artificial Sequence
  Synthetic
uuuauaaaccauuuaccg

SEQ ID NO: 52836 - RNA, 19 nt, Artificial Sequence
  Synthetic
uuuuauaaaccauuuaccg

SEQ ID NO: 52837 - RNA, 21 nt, Artificial Sequence
  Synthetic
aguuuuauaaaccauuuaccg

SEQ ID NO: 52838 - RNA, 22 nt, Artificial Sequence
  Synthetic
aaguuuuauaaaccauuuaccg

SEQ ID NO: 52839 - RNA, 23 nt, Artificial Sequence
  Synthetic
aaaguuuuauaaaccauuuaccg

SEQ ID NO: 52840 - RNA, 18 nt, Artificial Sequence
  Synthetic
uuuccuucccacaacccg

SEQ ID NO: 52841 - RNA, 19 nt, Artificial Sequence
  Synthetic
uuuuccuucccacaacccg

SEQ ID NO: 52842 - RNA, 20 nt, Artificial Sequence
  Synthetic
auuuuccuucccacaacccg

SEQ ID NO: 52843 - RNA, 21 nt, Artificial Sequence
  Synthetic
cauuuuccuucccacaacccg

SEQ ID NO: 52844 - RNA, 22 nt, Artificial Sequence
  Synthetic
ucauuuuccuucccacaacccg

SEQ ID NO: 52845 - RNA, 23 nt, Artificial Sequence
  Synthetic
cucauuuuccuucccacaacccg

SEQ ID NO: 52846 - RNA, 24 nt, Artificial Sequence
  Synthetic
ccucauuuuccuucccacaacccg

SEQ ID NO: 52847 - RNA, 18 nt, Artificial Sequence
  Synthetic
cccagaagucuucccccg

SEQ ID NO: 52848 - RNA, 21 nt, Artificial Sequence
  Synthetic
aggcccagaagucuucccccg

SEQ ID NO: 52849 - RNA, 22 nt, Artificial Sequence
  Synthetic
caggcccagaagucuucccccg

SEQ ID NO: 52850 - RNA, 23 nt, Artificial Sequence
  Synthetic
ucaggcccagaagucuucccccg

SEQ ID NO: 52851 - RNA, 24 nt, Artificial Sequence
  Synthetic
cucaggcccagaagucuucccccg

SEQ ID NO: 52852 - RNA, 18 nt, Artificial Sequence
  Synthetic
aguuuagaauguaucccg

SEQ ID NO: 52853 - RNA, 19 nt, Artificial Sequence
  Synthetic
caguuuagaauguaucccg

SEQ ID NO: 52854 - RNA, 20 nt, Artificial Sequence
  Synthetic
acaguuuagaauguaucccg

SEQ ID NO: 52855 - RNA, 21 nt, Artificial Sequence
  Synthetic
uacaguuuagaauguaucccg

SEQ ID NO: 52856 - RNA, 23 nt, Artificial Sequence
  Synthetic
aguacaguuuagaauguaucccg

SEQ ID NO: 52857 - RNA, 24 nt, Artificial Sequence
  Synthetic
uaguacaguuuagaauguaucccg

SEQ ID NO: 52858 - RNA, 18 nt, Artificial Sequence
  Synthetic
uuguuccguucugagccg

SEQ ID NO: 52859 - RNA, 19 nt, Artificial Sequence
  Synthetic
uuuguuccguucugagccg

SEQ ID NO: 52860 - RNA, 20 nt, Artificial Sequence
  Synthetic
cuuuguuccguucugagccg

SEQ ID NO: 52861 - RNA, 21 nt, Artificial Sequence
  Synthetic
acuuuguuccguucugagccg

SEQ ID NO: 52862 - RNA, 22 nt, Artificial Sequence
  Synthetic
uacuuuguuccguucugagccg

SEQ ID NO: 52863 - RNA, 23 nt, Artificial Sequence
  Synthetic
cuacuuuguuccguucugagccg

SEQ ID NO: 52864 - RNA, 24 nt, Artificial Sequence
  Synthetic
acuacuuuguuccguucugagccg

SEQ ID NO: 52865 - RNA, 19 nt, Artificial Sequence
  Synthetic
ugugauaaauuccuagccg

SEQ ID NO: 52866 - RNA, 20 nt, Artificial Sequence
  Synthetic
augugauaaauuccuagccg

SEQ ID NO: 52867 - RNA, 21 nt, Artificial Sequence
  Synthetic
uaugugauaaauuccuagccg

SEQ ID NO: 52868 - RNA, 22 nt, Artificial Sequence
  Synthetic
cuaugugauaaauuccuagccg

SEQ ID NO: 52869 - RNA, 23 nt, Artificial Sequence
  Synthetic
ucuaugugauaaauuccuagccg

SEQ ID NO: 52870 - RNA, 24 nt, Artificial Sequence
  Synthetic
aucuaugugauaaauuccuagccg

SEQ ID NO: 52871 - RNA, 18 nt, Artificial Sequence
  Synthetic
uacaacauguauuagccg

SEQ ID NO: 52872 - RNA, 19 nt, Artificial Sequence
  Synthetic
cuacaacauguauuagccg

SEQ ID NO: 52873 - RNA, 20 nt, Artificial Sequence
  Synthetic
ccuacaacauguauuagccg

SEQ ID NO: 52874 - RNA, 21 nt, Artificial Sequence
  Synthetic
cccuacaacauguauuagccg

SEQ ID NO: 52875 - RNA, 22 nt, Artificial Sequence
  Synthetic
acccuacaacauguauuagccg

SEQ ID NO: 52876 - RNA, 23 nt, Artificial Sequence
  Synthetic
aacccuacaacauguauuagccg

SEQ ID NO: 52877 - RNA, 20 nt, Artificial Sequence
  Synthetic
aggauggcaguagcaauccg

SEQ ID NO: 52878 - RNA, 22 nt, Artificial Sequence
  Synthetic
ugaggauggcaguagcaauccg

SEQ ID NO: 52879 - RNA, 24 nt, Artificial Sequence
  Synthetic
agugaggauggcaguagcaauccg

SEQ ID NO: 52880 - RNA, 18 nt, Artificial Sequence
  Synthetic
aaccuaaaugcagcuccg

SEQ ID NO: 52881 - RNA, 19 nt, Artificial Sequence
  Synthetic
uaaccuaaaugcagcuccg

SEQ ID NO: 52882 - RNA, 21 nt, Artificial Sequence
  Synthetic
aguaaccuaaaugcagcuccg

SEQ ID NO: 52883 - RNA, 21 nt, Artificial Sequence
  Synthetic
uauauuuaccccaauuuuccg

SEQ ID NO: 52884 - RNA, 22 nt, Artificial Sequence
  Synthetic
auauauuuaccccaauuuuccg

SEQ ID NO: 52885 - RNA, 23 nt, Artificial Sequence
  Synthetic
cauauauuuaccccaauuuuccg

SEQ ID NO: 52886 - RNA, 24 nt, Artificial Sequence
  Synthetic
ucauauauuuaccccaauuuuccg

SEQ ID NO: 52887 - RNA, 18 nt, Artificial Sequence
  Synthetic
caccucuuuuauuuuccg

SEQ ID NO: 52888 - RNA, 19 nt, Artificial Sequence
  Synthetic
ccaccucuuuuauuuuccg

SEQ ID NO: 52889 - RNA, 20 nt, Artificial Sequence
  Synthetic
accaccucuuuuauuuuccg

SEQ ID NO: 52890 - RNA, 21 nt, Artificial Sequence
  Synthetic
aaccaccucuuuuauuuuccg

SEQ ID NO: 52891 - RNA, 23 nt, Artificial Sequence
  Synthetic
ugaaccaccucuuuuauuuuccg

SEQ ID NO: 52892 - RNA, 24 nt, Artificial Sequence
  Synthetic
uugaaccaccucuuuuauuuuccg

SEQ ID NO: 52893 - RNA, 18 nt, Artificial Sequence
  Synthetic
aaugaucuagcaagggcg

SEQ ID NO: 52894 - RNA, 19 nt, Artificial Sequence
  Synthetic
aaaugaucuagcaagggcg

SEQ ID NO: 52895 - RNA, 20 nt, Artificial Sequence
  Synthetic
uaaaugaucuagcaagggcg

SEQ ID NO: 52896 - RNA, 21 nt, Artificial Sequence
  Synthetic
uuaaaugaucuagcaagggcg

SEQ ID NO: 52897 - RNA, 22 nt, Artificial Sequence
  Synthetic
cuuaaaugaucuagcaagggcg

SEQ ID NO: 52898 - RNA, 23 nt, Artificial Sequence
  Synthetic
acuuaaaugaucuagcaagggcg

SEQ ID NO: 52899 - RNA, 24 nt, Artificial Sequence
  Synthetic
aacuuaaaugaucuagcaagggcg

SEQ ID NO: 52900 - RNA, 18 nt, Artificial Sequence
  Synthetic
uucucaaaauggggggcg

SEQ ID NO: 52901 - RNA, 21 nt, Artificial Sequence
  Synthetic
ugguucucaaaauggggggcg

SEQ ID NO: 52902 - RNA, 22 nt, Artificial Sequence
  Synthetic
augguucucaaaauggggggcg

SEQ ID NO: 52903 - RNA, 23 nt, Artificial Sequence
  Synthetic
aaugguucucaaaauggggggcg

SEQ ID NO: 52904 - RNA, 24 nt, Artificial Sequence
  Synthetic
caaugguucucaaaauggggggcg

SEQ ID NO: 52905 - RNA, 18 nt, Artificial Sequence
  Synthetic
uuuuuauuuugccuggcg

SEQ ID NO: 52906 - RNA, 19 nt, Artificial Sequence
  Synthetic
auuuuuauuuugccuggcg

SEQ ID NO: 52907 - RNA, 20 nt, Artificial Sequence
  Synthetic
uauuuuuauuuugccuggcg

SEQ ID NO: 52908 - RNA, 21 nt, Artificial Sequence
  Synthetic
auauuuuuauuuugccuggcg

SEQ ID NO: 52909 - RNA, 23 nt, Artificial Sequence
  Synthetic
ugauauuuuuauuuugccuggcg

SEQ ID NO: 52910 - RNA, 24 nt, Artificial Sequence
  Synthetic
uugauauuuuuauuuugccuggcg

SEQ ID NO: 52911 - RNA, 19 nt, Artificial Sequence
  Synthetic
ugguuuguuguuguuggcg

SEQ ID NO: 52912 - RNA, 20 nt, Artificial Sequence
  Synthetic
augguuuguuguuguuggcg

SEQ ID NO: 52913 - RNA, 21 nt, Artificial Sequence
  Synthetic
aaugguuuguuguuguuggcg

SEQ ID NO: 52914 - RNA, 22 nt, Artificial Sequence
  Synthetic
aaaugguuuguuguuguuggcg

SEQ ID NO: 52915 - RNA, 24 nt, Artificial Sequence
  Synthetic
agaaaugguuuguuguuguuggcg

SEQ ID NO: 52916 - RNA, 18 nt, Artificial Sequence
  Synthetic
uucuuccaccuucaugcg

SEQ ID NO: 52917 - RNA, 19 nt, Artificial Sequence
  Synthetic
uuucuuccaccuucaugcg

SEQ ID NO: 52918 - RNA, 20 nt, Artificial Sequence
  Synthetic
cuuucuuccaccuucaugcg

SEQ ID NO: 52919 - RNA, 21 nt, Artificial Sequence
  Synthetic
ccuuucuuccaccuucaugcg

SEQ ID NO: 52920 - RNA, 22 nt, Artificial Sequence
  Synthetic
uccuuucuuccaccuucaugcg

SEQ ID NO: 52921 - RNA, 23 nt, Artificial Sequence
  Synthetic
cuccuuucuuccaccuucaugcg

SEQ ID NO: 52922 - RNA, 24 nt, Artificial Sequence
  Synthetic
ucuccuuucuuccaccuucaugcg

SEQ ID NO: 52923 - RNA, 18 nt, Artificial Sequence
  Synthetic
ucauccaaacuuuaugcg

SEQ ID NO: 52924 - RNA, 19 nt, Artificial Sequence
  Synthetic
aucauccaaacuuuaugcg

SEQ ID NO: 52925 - RNA, 20 nt, Artificial Sequence
  Synthetic
aaucauccaaacuuuaugcg

SEQ ID NO: 52926 - RNA, 21 nt, Artificial Sequence
  Synthetic
uaaucauccaaacuuuaugcg

SEQ ID NO: 52927 - RNA, 23 nt, Artificial Sequence
  Synthetic
uguaaucauccaaacuuuaugcg

SEQ ID NO: 52928 - RNA, 24 nt, Artificial Sequence
  Synthetic
auguaaucauccaaacuuuaugcg

SEQ ID NO: 52929 - RNA, 18 nt, Artificial Sequence
  Synthetic
accuuuuaaugggcugcg

SEQ ID NO: 52930 - RNA, 19 nt, Artificial Sequence
  Synthetic
uaccuuuuaaugggcugcg

SEQ ID NO: 52931 - RNA, 21 nt, Artificial Sequence
  Synthetic
aguaccuuuuaaugggcugcg

SEQ ID NO: 52932 - RNA, 23 nt, Artificial Sequence
  Synthetic
agaguaccuuuuaaugggcugcg

SEQ ID NO: 52933 - RNA, 24 nt, Artificial Sequence
  Synthetic
cagaguaccuuuuaaugggcugcg

SEQ ID NO: 52934 - RNA, 18 nt, Artificial Sequence
  Synthetic
uuugcacccuuuugugcg

SEQ ID NO: 52935 - RNA, 20 nt, Artificial Sequence
  Synthetic
uguuugcacccuuuugugcg

SEQ ID NO: 52936 - RNA, 22 nt, Artificial Sequence
  Synthetic
cguguuugcacccuuuugugcg

SEQ ID NO: 52937 - RNA, 23 nt, Artificial Sequence
  Synthetic
ucguguuugcacccuuuugugcg

SEQ ID NO: 52938 - RNA, 24 nt, Artificial Sequence
  Synthetic
uucguguuugcacccuuuugugcg

SEQ ID NO: 52939 - RNA, 18 nt, Artificial Sequence
  Synthetic
cuucguagagguauugcg

SEQ ID NO: 52940 - RNA, 19 nt, Artificial Sequence
  Synthetic
acuucguagagguauugcg

SEQ ID NO: 52941 - RNA, 20 nt, Artificial Sequence
  Synthetic
aacuucguagagguauugcg

SEQ ID NO: 52942 - RNA, 21 nt, Artificial Sequence
  Synthetic
caacuucguagagguauugcg

SEQ ID NO: 52943 - RNA, 22 nt, Artificial Sequence
  Synthetic
ccaacuucguagagguauugcg

SEQ ID NO: 52944 - RNA, 24 nt, Artificial Sequence
  Synthetic
agccaacuucguagagguauugcg

SEQ ID NO: 52945 - RNA, 18 nt, Artificial Sequence
  Synthetic
uaggacagcuugcuugcg

SEQ ID NO: 52946 - RNA, 21 nt, Artificial Sequence
  Synthetic
ugguaggacagcuugcuugcg

SEQ ID NO: 52947 - RNA, 22 nt, Artificial Sequence
  Synthetic
augguaggacagcuugcuugcg

SEQ ID NO: 52948 - RNA, 23 nt, Artificial Sequence
  Synthetic
aaugguaggacagcuugcuugcg

SEQ ID NO: 52949 - RNA, 24 nt, Artificial Sequence
  Synthetic
uaaugguaggacagcuugcuugcg

SEQ ID NO: 52950 - RNA, 18 nt, Artificial Sequence
  Synthetic
ucacugugcaaguaaucg

SEQ ID NO: 52951 - RNA, 20 nt, Artificial Sequence
  Synthetic
ugucacugugcaaguaaucg

SEQ ID NO: 52952 - RNA, 21 nt, Artificial Sequence
  Synthetic
cugucacugugcaaguaaucg

SEQ ID NO: 52953 - RNA, 22 nt, Artificial Sequence
  Synthetic
ucugucacugugcaaguaaucg

SEQ ID NO: 52954 - RNA, 23 nt, Artificial Sequence
  Synthetic
uucugucacugugcaaguaaucg

SEQ ID NO: 52955 - RNA, 24 nt, Artificial Sequence
  Synthetic
auucugucacugugcaaguaaucg

SEQ ID NO: 52956 - RNA, 19 nt, Artificial Sequence
  Synthetic
aguucuacuucauccaucg

SEQ ID NO: 52957 - RNA, 20 nt, Artificial Sequence
  Synthetic
aaguucuacuucauccaucg

SEQ ID NO: 52958 - RNA, 21 nt, Artificial Sequence
  Synthetic
aaaguucuacuucauccaucg

SEQ ID NO: 52959 - RNA, 24 nt, Artificial Sequence
  Synthetic
uggaaaguucuacuucauccaucg

SEQ ID NO: 52960 - RNA, 18 nt, Artificial Sequence
  Synthetic
cugaguuggaaaagaucg

SEQ ID NO: 52961 - RNA, 20 nt, Artificial Sequence
  Synthetic
ugcugaguuggaaaagaucg

SEQ ID NO: 52962 - RNA, 21 nt, Artificial Sequence
  Synthetic
augcugaguuggaaaagaucg

SEQ ID NO: 52963 - RNA, 22 nt, Artificial Sequence
  Synthetic
aaugcugaguuggaaaagaucg

SEQ ID NO: 52964 - RNA, 23 nt, Artificial Sequence
  Synthetic
aaaugcugaguuggaaaagaucg

SEQ ID NO: 52965 - RNA, 18 nt, Artificial Sequence
  Synthetic
ucuugaaauucaagaucg

SEQ ID NO: 52966 - RNA, 19 nt, Artificial Sequence
  Synthetic
cucuugaaauucaagaucg

SEQ ID NO: 52967 - RNA, 20 nt, Artificial Sequence
  Synthetic
ucucuugaaauucaagaucg

SEQ ID NO: 52968 - RNA, 21 nt, Artificial Sequence
  Synthetic
uucucuugaaauucaagaucg

SEQ ID NO: 52969 - RNA, 22 nt, Artificial Sequence
  Synthetic
uuucucuugaaauucaagaucg

SEQ ID NO: 52970 - RNA, 23 nt, Artificial Sequence
  Synthetic
uuuucucuugaaauucaagaucg

SEQ ID NO: 52971 - RNA, 24 nt, Artificial Sequence
  Synthetic
auuuucucuugaaauucaagaucg

SEQ ID NO: 52972 - RNA, 18 nt, Artificial Sequence
  Synthetic
uuacuuaucuaucuaucg

SEQ ID NO: 52973 - RNA, 19 nt, Artificial Sequence
  Synthetic
uuuacuuaucuaucuaucg

SEQ ID NO: 52974 - RNA, 20 nt, Artificial Sequence
  Synthetic
cuuuacuuaucuaucuaucg

SEQ ID NO: 52975 - RNA, 21 nt, Artificial Sequence
  Synthetic
ccuuuacuuaucuaucuaucg

SEQ ID NO: 52976 - RNA, 22 nt, Artificial Sequence
  Synthetic
uccuuuacuuaucuaucuaucg

SEQ ID NO: 52977 - RNA, 23 nt, Artificial Sequence
  Synthetic
cuccuuuacuuaucuaucuaucg

SEQ ID NO: 52978 - RNA, 24 nt, Artificial Sequence
  Synthetic
ucuccuuuacuuaucuaucuaucg

SEQ ID NO: 52979 - RNA, 18 nt, Artificial Sequence
  Synthetic
ugagacguggauuuaucg

SEQ ID NO: 52980 - RNA, 19 nt, Artificial Sequence
  Synthetic
cugagacguggauuuaucg

SEQ ID NO: 52981 - RNA, 20 nt, Artificial Sequence
  Synthetic
ucugagacguggauuuaucg

SEQ ID NO: 52982 - RNA, 21 nt, Artificial Sequence
  Synthetic
uucugagacguggauuuaucg

SEQ ID NO: 52983 - RNA, 22 nt, Artificial Sequence
  Synthetic
auucugagacguggauuuaucg

SEQ ID NO: 52984 - RNA, 23 nt, Artificial Sequence
  Synthetic
aauucugagacguggauuuaucg

SEQ ID NO: 52985 - RNA, 24 nt, Artificial Sequence
  Synthetic
aaauucugagacguggauuuaucg

SEQ ID NO: 52986 - RNA, 18 nt, Artificial Sequence
  Synthetic
uucaucgcaacgaacucg

SEQ ID NO: 52987 - RNA, 19 nt, Artificial Sequence
  Synthetic
auucaucgcaacgaacucg

SEQ ID NO: 52988 - RNA, 20 nt, Artificial Sequence
  Synthetic
uauucaucgcaacgaacucg

SEQ ID NO: 52989 - RNA, 22 nt, Artificial Sequence
  Synthetic
uguauucaucgcaacgaacucg

SEQ ID NO: 52990 - RNA, 23 nt, Artificial Sequence
  Synthetic
cuguauucaucgcaacgaacucg

SEQ ID NO: 52991 - RNA, 24 nt, Artificial Sequence
  Synthetic
acuguauucaucgcaacgaacucg

SEQ ID NO: 52992 - RNA, 19 nt, Artificial Sequence
  Synthetic
cgcgaucuuuguauacucg

SEQ ID NO: 52993 - RNA, 20 nt, Artificial Sequence
  Synthetic
ccgcgaucuuuguauacucg

SEQ ID NO: 52994 - RNA, 21 nt, Artificial Sequence
  Synthetic
uccgcgaucuuuguauacucg

SEQ ID NO: 52995 - RNA, 22 nt, Artificial Sequence
  Synthetic
auccgcgaucuuuguauacucg

SEQ ID NO: 52996 - RNA, 23 nt, Artificial Sequence
  Synthetic
uauccgcgaucuuuguauacucg

SEQ ID NO: 52997 - RNA, 24 nt, Artificial Sequence
  Synthetic
auauccgcgaucuuuguauacucg

SEQ ID NO: 52998 - RNA, 18 nt, Artificial Sequence
  Synthetic
uuauggcaacaauccucg

SEQ ID NO: 52999 - RNA, 23 nt, Artificial Sequence
  Synthetic
ugggguuauggcaacaauccucg

SEQ ID NO: 53000 - RNA, 24 nt, Artificial Sequence
  Synthetic
augggguuauggcaacaauccucg

SEQ ID NO: 53001 - RNA, 18 nt, Artificial Sequence
  Synthetic
auugacuuccuaugcucg

SEQ ID NO: 53002 - RNA, 19 nt, Artificial Sequence
  Synthetic
uauugacuuccuaugcucg

SEQ ID NO: 53003 - RNA, 20 nt, Artificial Sequence
  Synthetic
auauugacuuccuaugcucg

SEQ ID NO: 53004 - RNA, 21 nt, Artificial Sequence
  Synthetic
aauauugacuuccuaugcucg

SEQ ID NO: 53005 - RNA, 23 nt, Artificial Sequence
  Synthetic
agaauauugacuuccuaugcucg

SEQ ID NO: 53006 - RNA, 18 nt, Artificial Sequence
  Synthetic
uacacagaccuggucucg

SEQ ID NO: 53007 - RNA, 19 nt, Artificial Sequence
  Synthetic
auacacagaccuggucucg

SEQ ID NO: 53008 - RNA, 20 nt, Artificial Sequence
  Synthetic
cauacacagaccuggucucg

SEQ ID NO: 53009 - RNA, 21 nt, Artificial Sequence
  Synthetic
ucauacacagaccuggucucg

SEQ ID NO: 53010 - RNA, 22 nt, Artificial Sequence
  Synthetic
uucauacacagaccuggucucg

SEQ ID NO: 53011 - RNA, 23 nt, Artificial Sequence
  Synthetic
auucauacacagaccuggucucg

SEQ ID NO: 53012 - RNA, 20 nt, Artificial Sequence
  Synthetic
aggagaagacauaccagucg

SEQ ID NO: 53013 - RNA, 21 nt, Artificial Sequence
  Synthetic
uaggagaagacauaccagucg

SEQ ID NO: 53014 - RNA, 22 nt, Artificial Sequence
  Synthetic
cuaggagaagacauaccagucg

SEQ ID NO: 53015 - RNA, 23 nt, Artificial Sequence
  Synthetic
ucuaggagaagacauaccagucg

SEQ ID NO: 53016 - RNA, 24 nt, Artificial Sequence
  Synthetic
uucuaggagaagacauaccagucg

SEQ ID NO: 53017 - RNA, 18 nt, Artificial Sequence
  Synthetic
ugagaggagagugagucg

SEQ ID NO: 53018 - RNA, 19 nt, Artificial Sequence
  Synthetic
augagaggagagugagucg

SEQ ID NO: 53019 - RNA, 22 nt, Artificial Sequence
  Synthetic
uggaugagaggagagugagucg

SEQ ID NO: 53020 - RNA, 23 nt, Artificial Sequence
  Synthetic
auggaugagaggagagugagucg

SEQ ID NO: 53021 - RNA, 24 nt, Artificial Sequence
  Synthetic
aauggaugagaggagagugagucg

SEQ ID NO: 53022 - RNA, 18 nt, Artificial Sequence
  Synthetic
cucucuggggaugggucg

SEQ ID NO: 53023 - RNA, 20 nt, Artificial Sequence
  Synthetic
agcucucuggggaugggucg

SEQ ID NO: 53024 - RNA, 21 nt, Artificial Sequence
  Synthetic
aagcucucuggggaugggucg

SEQ ID NO: 53025 - RNA, 23 nt, Artificial Sequence
  Synthetic
agaagcucucuggggaugggucg

SEQ ID NO: 53026 - RNA, 24 nt, Artificial Sequence
  Synthetic
cagaagcucucuggggaugggucg

SEQ ID NO: 53027 - RNA, 18 nt, Artificial Sequence
  Synthetic
auugguuuauuaaauucg

SEQ ID NO: 53028 - RNA, 19 nt, Artificial Sequence
  Synthetic
aauugguuuauuaaauucg

SEQ ID NO: 53029 - RNA, 20 nt, Artificial Sequence
  Synthetic
aaauugguuuauuaaauucg

SEQ ID NO: 53030 - RNA, 21 nt, Artificial Sequence
  Synthetic
caaauugguuuauuaaauucg

SEQ ID NO: 53031 - RNA, 22 nt, Artificial Sequence
  Synthetic
ucaaauugguuuauuaaauucg

SEQ ID NO: 53032 - RNA, 23 nt, Artificial Sequence
  Synthetic
cucaaauugguuuauuaaauucg

SEQ ID NO: 53033 - RNA, 24 nt, Artificial Sequence
  Synthetic
acucaaauugguuuauuaaauucg

SEQ ID NO: 53034 - RNA, 18 nt, Artificial Sequence
  Synthetic
ucgguauauaauaauucg

SEQ ID NO: 53035 - RNA, 20 nt, Artificial Sequence
  Synthetic
agucgguauauaauaauucg

SEQ ID NO: 53036 - RNA, 21 nt, Artificial Sequence
  Synthetic
uagucgguauauaauaauucg

SEQ ID NO: 53037 - RNA, 22 nt, Artificial Sequence
  Synthetic
auagucgguauauaauaauucg

SEQ ID NO: 53038 - RNA, 23 nt, Artificial Sequence
  Synthetic
uauagucgguauauaauaauucg

SEQ ID NO: 53039 - RNA, 24 nt, Artificial Sequence
  Synthetic
auauagucgguauauaauaauucg

SEQ ID NO: 53040 - RNA, 18 nt, Artificial Sequence
  Synthetic
uuguagcauugagauucg

SEQ ID NO: 53041 - RNA, 19 nt, Artificial Sequence
  Synthetic
auuguagcauugagauucg

SEQ ID NO: 53042 - RNA, 20 nt, Artificial Sequence
  Synthetic
aauuguagcauugagauucg

SEQ ID NO: 53043 - RNA, 21 nt, Artificial Sequence
  Synthetic
caauuguagcauugagauucg

SEQ ID NO: 53044 - RNA, 22 nt, Artificial Sequence
  Synthetic
ccaauuguagcauugagauucg

SEQ ID NO: 53045 - RNA, 23 nt, Artificial Sequence
  Synthetic
cccaauuguagcauugagauucg

SEQ ID NO: 53046 - RNA, 18 nt, Artificial Sequence
  Synthetic
uugauaaguggaaguucg

SEQ ID NO: 53047 - RNA, 19 nt, Artificial Sequence
  Synthetic
cuugauaaguggaaguucg

SEQ ID NO: 53048 - RNA, 20 nt, Artificial Sequence
  Synthetic
ucuugauaaguggaaguucg

SEQ ID NO: 53049 - RNA, 22 nt, Artificial Sequence
  Synthetic
cgucuugauaaguggaaguucg

SEQ ID NO: 53050 - RNA, 23 nt, Artificial Sequence
  Synthetic
ucgucuugauaaguggaaguucg

SEQ ID NO: 53051 - RNA, 24 nt, Artificial Sequence
  Synthetic
uucgucuugauaaguggaaguucg

SEQ ID NO: 53052 - RNA, 18 nt, Artificial Sequence
  Synthetic
aggcggcaaacaaaaagg

SEQ ID NO: 53053 - RNA, 19 nt, Artificial Sequence
  Synthetic
uaggcggcaaacaaaaagg

SEQ ID NO: 53054 - RNA, 20 nt, Artificial Sequence
  Synthetic
cuaggcggcaaacaaaaagg

SEQ ID NO: 53055 - RNA, 21 nt, Artificial Sequence
  Synthetic
ccuaggcggcaaacaaaaagg

SEQ ID NO: 53056 - RNA, 22 nt, Artificial Sequence
  Synthetic
accuaggcggcaaacaaaaagg

SEQ ID NO: 53057 - RNA, 24 nt, Artificial Sequence
  Synthetic
agaccuaggcggcaaacaaaaagg

SEQ ID NO: 53058 - RNA, 18 nt, Artificial Sequence
  Synthetic
aaauacuuuugaaaaagg

SEQ ID NO: 53059 - RNA, 19 nt, Artificial Sequence
  Synthetic
uaaauacuuuugaaaaagg

SEQ ID NO: 53060 - RNA, 20 nt, Artificial Sequence
  Synthetic
uuaaauacuuuugaaaaagg

SEQ ID NO: 53061 - RNA, 21 nt, Artificial Sequence
  Synthetic
auuaaauacuuuugaaaaagg

SEQ ID NO: 53062 - RNA, 22 nt, Artificial Sequence
  Synthetic
cauuaaauacuuuugaaaaagg

SEQ ID NO: 53063 - RNA, 23 nt, Artificial Sequence
  Synthetic
ucauuaaauacuuuugaaaaagg

SEQ ID NO: 53064 - RNA, 18 nt, Artificial Sequence
  Synthetic
aagucacaauuaaaaagg

SEQ ID NO: 53065 - RNA, 19 nt, Artificial Sequence
  Synthetic
aaagucacaauuaaaaagg

SEQ ID NO: 53066 - RNA, 21 nt, Artificial Sequence
  Synthetic
ugaaagucacaauuaaaaagg

SEQ ID NO: 53067 - RNA, 22 nt, Artificial Sequence
  Synthetic
augaaagucacaauuaaaaagg

SEQ ID NO: 53068 - RNA, 23 nt, Artificial Sequence
  Synthetic
uaugaaagucacaauuaaaaagg

SEQ ID NO: 53069 - RNA, 21 nt, Artificial Sequence
  Synthetic
aaauguauauuaaugaaaagg

SEQ ID NO: 53070 - RNA, 22 nt, Artificial Sequence
  Synthetic
uaaauguauauuaaugaaaagg

SEQ ID NO: 53071 - RNA, 23 nt, Artificial Sequence
  Synthetic
uuaaauguauauuaaugaaaagg

SEQ ID NO: 53072 - RNA, 18 nt, Artificial Sequence
  Synthetic
aaggagaauaugaaaagg

SEQ ID NO: 53073 - RNA, 19 nt, Artificial Sequence
  Synthetic
caaggagaauaugaaaagg

SEQ ID NO: 53074 - RNA, 20 nt, Artificial Sequence
  Synthetic
ccaaggagaauaugaaaagg

SEQ ID NO: 53075 - RNA, 21 nt, Artificial Sequence
  Synthetic
uccaaggagaauaugaaaagg

SEQ ID NO: 53076 - RNA, 22 nt, Artificial Sequence
  Synthetic
uuccaaggagaauaugaaaagg

SEQ ID NO: 53077 - RNA, 24 nt, Artificial Sequence
  Synthetic
aguuccaaggagaauaugaaaagg

SEQ ID NO: 53078 - RNA, 22 nt, Artificial Sequence
  Synthetic
aguuucacaaaaagugaaaagg

SEQ ID NO: 53079 - RNA, 23 nt, Artificial Sequence
  Synthetic
aaguuucacaaaaagugaaaagg

SEQ ID NO: 53080 - RNA, 24 nt, Artificial Sequence
  Synthetic
caaguuucacaaaaagugaaaagg

SEQ ID NO: 53081 - RNA, 18 nt, Artificial Sequence
  Synthetic
uuuuaaaacgugaaaagg

SEQ ID NO: 53082 - RNA, 19 nt, Artificial Sequence
  Synthetic
uuuuuaaaacgugaaaagg

SEQ ID NO: 53083 - RNA, 21 nt, Artificial Sequence
  Synthetic
uguuuuuaaaacgugaaaagg

SEQ ID NO: 53084 - RNA, 22 nt, Artificial Sequence
  Synthetic
auguuuuuaaaacgugaaaagg

SEQ ID NO: 53085 - RNA, 23 nt, Artificial Sequence
  Synthetic
aauguuuuuaaaacgugaaaagg

SEQ ID NO: 53086 - RNA, 24 nt, Artificial Sequence
  Synthetic
aaauguuuuuaaaacgugaaaagg

SEQ ID NO: 53087 - RNA, 21 nt, Artificial Sequence
  Synthetic
auuguguguggggauaaaagg

SEQ ID NO: 53088 - RNA, 22 nt, Artificial Sequence
  Synthetic
cauuguguguggggauaaaagg

SEQ ID NO: 53089 - RNA, 23 nt, Artificial Sequence
  Synthetic
ucauuguguguggggauaaaagg

SEQ ID NO: 53090 - RNA, 24 nt, Artificial Sequence
  Synthetic
aucauuguguguggggauaaaagg

SEQ ID NO: 53091 - RNA, 18 nt, Artificial Sequence
  Synthetic
cccacccaacaacaaagg

SEQ ID NO: 53092 - RNA, 19 nt, Artificial Sequence
  Synthetic
ccccacccaacaacaaagg

SEQ ID NO: 53093 - RNA, 20 nt, Artificial Sequence
  Synthetic
cccccacccaacaacaaagg

SEQ ID NO: 53094 - RNA, 21 nt, Artificial Sequence
  Synthetic
ccccccacccaacaacaaagg

SEQ ID NO: 53095 - RNA, 22 nt, Artificial Sequence
  Synthetic
cccccccacccaacaacaaagg

SEQ ID NO: 53096 - RNA, 23 nt, Artificial Sequence
  Synthetic
ucccccccacccaacaacaaagg

SEQ ID NO: 53097 - RNA, 24 nt, Artificial Sequence
  Synthetic
uucccccccacccaacaacaaagg

SEQ ID NO: 53098 - RNA, 18 nt, Artificial Sequence
  Synthetic
ugaugguugcuacaaagg

SEQ ID NO: 53099 - RNA, 19 nt, Artificial Sequence
  Synthetic
cugaugguugcuacaaagg

SEQ ID NO: 53100 - RNA, 20 nt, Artificial Sequence
  Synthetic
acugaugguugcuacaaagg

SEQ ID NO: 53101 - RNA, 22 nt, Artificial Sequence
  Synthetic
agacugaugguugcuacaaagg

SEQ ID NO: 53102 - RNA, 19 nt, Artificial Sequence
  Synthetic
uggcauacuuguacaaagg

SEQ ID NO: 53103 - RNA, 20 nt, Artificial Sequence
  Synthetic
auggcauacuuguacaaagg

SEQ ID NO: 53104 - RNA, 21 nt, Artificial Sequence
  Synthetic
aauggcauacuuguacaaagg

SEQ ID NO: 53105 - RNA, 22 nt, Artificial Sequence
  Synthetic
aaauggcauacuuguacaaagg

SEQ ID NO: 53106 - RNA, 24 nt, Artificial Sequence
  Synthetic
ugaaauggcauacuuguacaaagg

SEQ ID NO: 53107 - RNA, 18 nt, Artificial Sequence
  Synthetic
aguuuuuugcgucaaagg

SEQ ID NO: 53108 - RNA, 19 nt, Artificial Sequence
  Synthetic
caguuuuuugcgucaaagg

SEQ ID NO: 53109 - RNA, 20 nt, Artificial Sequence
  Synthetic
ucaguuuuuugcgucaaagg

SEQ ID NO: 53110 - RNA, 21 nt, Artificial Sequence
  Synthetic
uucaguuuuuugcgucaaagg

SEQ ID NO: 53111 - RNA, 22 nt, Artificial Sequence
  Synthetic
auucaguuuuuugcgucaaagg

SEQ ID NO: 53112 - RNA, 23 nt, Artificial Sequence
  Synthetic
uauucaguuuuuugcgucaaagg

SEQ ID NO: 53113 - RNA, 18 nt, Artificial Sequence
  Synthetic
uuugaaaaaugagaaagg

SEQ ID NO: 53114 - RNA, 19 nt, Artificial Sequence
  Synthetic
cuuugaaaaaugagaaagg

SEQ ID NO: 53115 - RNA, 20 nt, Artificial Sequence
  Synthetic
ucuuugaaaaaugagaaagg

SEQ ID NO: 53116 - RNA, 22 nt, Artificial Sequence
  Synthetic
agucuuugaaaaaugagaaagg

SEQ ID NO: 53117 - RNA, 23 nt, Artificial Sequence
  Synthetic
aagucuuugaaaaaugagaaagg

SEQ ID NO: 53118 - RNA, 24 nt, Artificial Sequence
  Synthetic
aaagucuuugaaaaaugagaaagg

SEQ ID NO: 53119 - RNA, 18 nt, Artificial Sequence
  Synthetic
uaggcaugucuagaaagg

SEQ ID NO: 53120 - RNA, 19 nt, Artificial Sequence
  Synthetic
cuaggcaugucuagaaagg

SEQ ID NO: 53121 - RNA, 20 nt, Artificial Sequence
  Synthetic
ccuaggcaugucuagaaagg

SEQ ID NO: 53122 - RNA, 21 nt, Artificial Sequence
  Synthetic
cccuaggcaugucuagaaagg

SEQ ID NO: 53123 - RNA, 22 nt, Artificial Sequence
  Synthetic
ucccuaggcaugucuagaaagg

SEQ ID NO: 53124 - RNA, 24 nt, Artificial Sequence
  Synthetic
agucccuaggcaugucuagaaagg

SEQ ID NO: 53125 - RNA, 18 nt, Artificial Sequence
  Synthetic
aagucacgauuagaaagg

SEQ ID NO: 53126 - RNA, 19 nt, Artificial Sequence
  Synthetic
aaagucacgauuagaaagg

SEQ ID NO: 53127 - RNA, 20 nt, Artificial Sequence
  Synthetic
caaagucacgauuagaaagg

SEQ ID NO: 53128 - RNA, 18 nt, Artificial Sequence
  Synthetic
agguaauuauaggaaagg

SEQ ID NO: 53129 - RNA, 20 nt, Artificial Sequence
  Synthetic
agagguaauuauaggaaagg

SEQ ID NO: 53130 - RNA, 21 nt, Artificial Sequence
  Synthetic
aagagguaauuauaggaaagg

SEQ ID NO: 53131 - RNA, 24 nt, Artificial Sequence
  Synthetic
uggaagagguaauuauaggaaagg

SEQ ID NO: 53132 - RNA, 22 nt, Artificial Sequence
  Synthetic
uguaauaggaguuucauaaagg

SEQ ID NO: 53133 - RNA, 23 nt, Artificial Sequence
  Synthetic
auguaauaggaguuucauaaagg

SEQ ID NO: 53134 - RNA, 24 nt, Artificial Sequence
  Synthetic
aauguaauaggaguuucauaaagg

SEQ ID NO: 53135 - RNA, 18 nt, Artificial Sequence
  Synthetic
uaucuuccaaguuaaagg

SEQ ID NO: 53136 - RNA, 19 nt, Artificial Sequence
  Synthetic
uuaucuuccaaguuaaagg

SEQ ID NO: 53137 - RNA, 20 nt, Artificial Sequence
  Synthetic
uuuaucuuccaaguuaaagg

SEQ ID NO: 53138 - RNA, 21 nt, Artificial Sequence
  Synthetic
uuuuaucuuccaaguuaaagg

SEQ ID NO: 53139 - RNA, 22 nt, Artificial Sequence
  Synthetic
cuuuuaucuuccaaguuaaagg

SEQ ID NO: 53140 - RNA, 24 nt, Artificial Sequence
  Synthetic
ugcuuuuaucuuccaaguuaaagg

SEQ ID NO: 53141 - RNA, 18 nt, Artificial Sequence
  Synthetic
ugagucaaguguuaaagg

SEQ ID NO: 53142 - RNA, 19 nt, Artificial Sequence
  Synthetic
uugagucaaguguuaaagg

SEQ ID NO: 53143 - RNA, 20 nt, Artificial Sequence
  Synthetic
uuugagucaaguguuaaagg

SEQ ID NO: 53144 - RNA, 21 nt, Artificial Sequence
  Synthetic
auuugagucaaguguuaaagg

SEQ ID NO: 53145 - RNA, 22 nt, Artificial Sequence
  Synthetic
cauuugagucaaguguuaaagg

SEQ ID NO: 53146 - RNA, 22 nt, Artificial Sequence
  Synthetic
aguacaagaaaggaaaacaagg

SEQ ID NO: 53147 - RNA, 24 nt, Artificial Sequence
  Synthetic
ugaguacaagaaaggaaaacaagg

SEQ ID NO: 53148 - RNA, 18 nt, Artificial Sequence
  Synthetic
cuugggauauaaacaagg

SEQ ID NO: 53149 - RNA, 19 nt, Artificial Sequence
  Synthetic
ucuugggauauaaacaagg

SEQ ID NO: 53150 - RNA, 21 nt, Artificial Sequence
  Synthetic
agucuugggauauaaacaagg

SEQ ID NO: 53151 - RNA, 22 nt, Artificial Sequence
  Synthetic
aagucuugggauauaaacaagg

SEQ ID NO: 53152 - RNA, 23 nt, Artificial Sequence
  Synthetic
aaagucuugggauauaaacaagg

SEQ ID NO: 53153 - RNA, 24 nt, Artificial Sequence
  Synthetic
uaaagucuugggauauaaacaagg

SEQ ID NO: 53154 - RNA, 18 nt, Artificial Sequence
  Synthetic
agagagacaugaacaagg

SEQ ID NO: 53155 - RNA, 19 nt, Artificial Sequence
  Synthetic
aagagagacaugaacaagg

SEQ ID NO: 53156 - RNA, 20 nt, Artificial Sequence
  Synthetic
uaagagagacaugaacaagg

SEQ ID NO: 53157 - RNA, 21 nt, Artificial Sequence
  Synthetic
uuaagagagacaugaacaagg

SEQ ID NO: 53158 - RNA, 22 nt, Artificial Sequence
  Synthetic
uuuaagagagacaugaacaagg

SEQ ID NO: 53159 - RNA, 24 nt, Artificial Sequence
  Synthetic
aguuuaagagagacaugaacaagg

SEQ ID NO: 53160 - RNA, 18 nt, Artificial Sequence
  Synthetic
uugucugcacuuccaagg

SEQ ID NO: 53161 - RNA, 19 nt, Artificial Sequence
  Synthetic
cuugucugcacuuccaagg

SEQ ID NO: 53162 - RNA, 20 nt, Artificial Sequence
  Synthetic
acuugucugcacuuccaagg

SEQ ID NO: 53163 - RNA, 21 nt, Artificial Sequence
  Synthetic
cacuugucugcacuuccaagg

SEQ ID NO: 53164 - RNA, 22 nt, Artificial Sequence
  Synthetic
acacuugucugcacuuccaagg

SEQ ID NO: 53165 - RNA, 23 nt, Artificial Sequence
  Synthetic
aacacuugucugcacuuccaagg

SEQ ID NO: 53166 - RNA, 24 nt, Artificial Sequence
  Synthetic
aaacacuugucugcacuuccaagg

SEQ ID NO: 53167 - RNA, 18 nt, Artificial Sequence
  Synthetic
cuugcuugccuggcaagg

SEQ ID NO: 53168 - RNA, 19 nt, Artificial Sequence
  Synthetic
ccuugcuugccuggcaagg

SEQ ID NO: 53169 - RNA, 20 nt, Artificial Sequence
  Synthetic
uccuugcuugccuggcaagg

SEQ ID NO: 53170 - RNA, 21 nt, Artificial Sequence
  Synthetic
uuccuugcuugccuggcaagg

SEQ ID NO: 53171 - RNA, 22 nt, Artificial Sequence
  Synthetic
auuccuugcuugccuggcaagg

SEQ ID NO: 53172 - RNA, 23 nt, Artificial Sequence
  Synthetic
aauuccuugcuugccuggcaagg

SEQ ID NO: 53173 - RNA, 18 nt, Artificial Sequence
  Synthetic
cauaucugaaauucaagg

SEQ ID NO: 53174 - RNA, 21 nt, Artificial Sequence
  Synthetic
uggcauaucugaaauucaagg

SEQ ID NO: 53175 - RNA, 22 nt, Artificial Sequence
  Synthetic
auggcauaucugaaauucaagg

SEQ ID NO: 53176 - RNA, 23 nt, Artificial Sequence
  Synthetic
aauggcauaucugaaauucaagg

SEQ ID NO: 53177 - RNA, 24 nt, Artificial Sequence
  Synthetic
uaauggcauaucugaaauucaagg

SEQ ID NO: 53178 - RNA, 18 nt, Artificial Sequence
  Synthetic
uuaauagaucauucaagg

SEQ ID NO: 53179 - RNA, 19 nt, Artificial Sequence
  Synthetic
uuuaauagaucauucaagg

SEQ ID NO: 53180 - RNA, 20 nt, Artificial Sequence
  Synthetic
auuuaauagaucauucaagg

SEQ ID NO: 53181 - RNA, 21 nt, Artificial Sequence
  Synthetic
aauuuaauagaucauucaagg

SEQ ID NO: 53182 - RNA, 22 nt, Artificial Sequence
  Synthetic
caauuuaauagaucauucaagg

SEQ ID NO: 53183 - RNA, 23 nt, Artificial Sequence
  Synthetic
ucaauuuaauagaucauucaagg

SEQ ID NO: 53184 - RNA, 24 nt, Artificial Sequence
  Synthetic
cucaauuuaauagaucauucaagg

SEQ ID NO: 53185 - RNA, 18 nt, Artificial Sequence
  Synthetic
caaaugcgguauucaagg

SEQ ID NO: 53186 - RNA, 20 nt, Artificial Sequence
  Synthetic
ugcaaaugcgguauucaagg

SEQ ID NO: 53187 - RNA, 21 nt, Artificial Sequence
  Synthetic
uugcaaaugcgguauucaagg

SEQ ID NO: 53188 - RNA, 22 nt, Artificial Sequence
  Synthetic
uuugcaaaugcgguauucaagg

SEQ ID NO: 53189 - RNA, 23 nt, Artificial Sequence
  Synthetic
uuuugcaaaugcgguauucaagg

SEQ ID NO: 53190 - RNA, 24 nt, Artificial Sequence
  Synthetic
uuuuugcaaaugcgguauucaagg

SEQ ID NO: 53191 - RNA, 19 nt, Artificial Sequence
  Synthetic
aggauaaaauuauucaagg

SEQ ID NO: 53192 - RNA, 20 nt, Artificial Sequence
  Synthetic
aaggauaaaauuauucaagg

SEQ ID NO: 53193 - RNA, 22 nt, Artificial Sequence
  Synthetic
agaaggauaaaauuauucaagg

SEQ ID NO: 53194 - RNA, 23 nt, Artificial Sequence
  Synthetic
cagaaggauaaaauuauucaagg

SEQ ID NO: 53195 - RNA, 24 nt, Artificial Sequence
  Synthetic
ucagaaggauaaaauuauucaagg

SEQ ID NO: 53196 - RNA, 18 nt, Artificial Sequence
  Synthetic
uuuuuuugaacuucaagg

SEQ ID NO: 53197 - RNA, 19 nt, Artificial Sequence
  Synthetic
uuuuuuuugaacuucaagg

SEQ ID NO: 53198 - RNA, 20 nt, Artificial Sequence
  Synthetic
cuuuuuuuugaacuucaagg

SEQ ID NO: 53199 - RNA, 21 nt, Artificial Sequence
  Synthetic
ccuuuuuuuugaacuucaagg

SEQ ID NO: 53200 - RNA, 22 nt, Artificial Sequence
  Synthetic
accuuuuuuuugaacuucaagg

SEQ ID NO: 53201 - RNA, 23 nt, Artificial Sequence
  Synthetic
uaccuuuuuuuugaacuucaagg

SEQ ID NO: 53202 - RNA, 24 nt, Artificial Sequence
  Synthetic
auaccuuuuuuuugaacuucaagg

SEQ ID NO: 53203 - RNA, 18 nt, Artificial Sequence
  Synthetic
cuccuuuuguaaagaagg

SEQ ID NO: 53204 - RNA, 21 nt, Artificial Sequence
  Synthetic
uggcuccuuuuguaaagaagg

SEQ ID NO: 53205 - RNA, 22 nt, Artificial Sequence
  Synthetic
cuggcuccuuuuguaaagaagg

SEQ ID NO: 53206 - RNA, 23 nt, Artificial Sequence
  Synthetic
ccuggcuccuuuuguaaagaagg

SEQ ID NO: 53207 - RNA, 18 nt, Artificial Sequence
  Synthetic
cauuacauggcaagaagg

SEQ ID NO: 53208 - RNA, 19 nt, Artificial Sequence
  Synthetic
acauuacauggcaagaagg

SEQ ID NO: 53209 - RNA, 22 nt, Artificial Sequence
  Synthetic
aggacauuacauggcaagaagg

SEQ ID NO: 53210 - RNA, 23 nt, Artificial Sequence
  Synthetic
caggacauuacauggcaagaagg

SEQ ID NO: 53211 - RNA, 21 nt, Artificial Sequence
  Synthetic
aaaguagucaaaggaagaagg

SEQ ID NO: 53212 - RNA, 22 nt, Artificial Sequence
  Synthetic
aaaaguagucaaaggaagaagg

SEQ ID NO: 53213 - RNA, 23 nt, Artificial Sequence
  Synthetic
caaaaguagucaaaggaagaagg

SEQ ID NO: 53214 - RNA, 24 nt, Artificial Sequence
  Synthetic
ucaaaaguagucaaaggaagaagg

SEQ ID NO: 53215 - RNA, 18 nt, Artificial Sequence
  Synthetic
uaccccugccuuagaagg

SEQ ID NO: 53216 - RNA, 19 nt, Artificial Sequence
  Synthetic
cuaccccugccuuagaagg

SEQ ID NO: 53217 - RNA, 20 nt, Artificial Sequence
  Synthetic
ucuaccccugccuuagaagg

SEQ ID NO: 53218 - RNA, 21 nt, Artificial Sequence
  Synthetic
uucuaccccugccuuagaagg

SEQ ID NO: 53219 - RNA, 22 nt, Artificial Sequence
  Synthetic
uuucuaccccugccuuagaagg

SEQ ID NO: 53220 - RNA, 23 nt, Artificial Sequence
  Synthetic
uuuucuaccccugccuuagaagg

SEQ ID NO: 53221 - RNA, 24 nt, Artificial Sequence
  Synthetic
cuuuucuaccccugccuuagaagg

SEQ ID NO: 53222 - RNA, 18 nt, Artificial Sequence
  Synthetic
uucuucaccucuggaagg

SEQ ID NO: 53223 - RNA, 19 nt, Artificial Sequence
  Synthetic
uuucuucaccucuggaagg

SEQ ID NO: 53224 - RNA, 21 nt, Artificial Sequence
  Synthetic
uguuucuucaccucuggaagg

SEQ ID NO: 53225 - RNA, 22 nt, Artificial Sequence
  Synthetic
cuguuucuucaccucuggaagg

SEQ ID NO: 53226 - RNA, 23 nt, Artificial Sequence
  Synthetic
ccuguuucuucaccucuggaagg

SEQ ID NO: 53227 - RNA, 18 nt, Artificial Sequence
  Synthetic
auuacauaaccaugaagg

SEQ ID NO: 53228 - RNA, 22 nt, Artificial Sequence
  Synthetic
ugggauuacauaaccaugaagg

SEQ ID NO: 53229 - RNA, 23 nt, Artificial Sequence
  Synthetic
augggauuacauaaccaugaagg

SEQ ID NO: 53230 - RNA, 24 nt, Artificial Sequence
  Synthetic
uaugggauuacauaaccaugaagg

SEQ ID NO: 53231 - RNA, 18 nt, Artificial Sequence
  Synthetic
ucccugaaggacugaagg

SEQ ID NO: 53232 - RNA, 19 nt, Artificial Sequence
  Synthetic
uucccugaaggacugaagg

SEQ ID NO: 53233 - RNA, 21 nt, Artificial Sequence
  Synthetic
uguucccugaaggacugaagg

SEQ ID NO: 53234 - RNA, 22 nt, Artificial Sequence
  Synthetic
cuguucccugaaggacugaagg

SEQ ID NO: 53235 - RNA, 23 nt, Artificial Sequence
  Synthetic
acuguucccugaaggacugaagg

SEQ ID NO: 53236 - RNA, 24 nt, Artificial Sequence
  Synthetic
cacuguucccugaaggacugaagg

SEQ ID NO: 53237 - RNA, 18 nt, Artificial Sequence
  Synthetic
caucacagcagcugaagg

SEQ ID NO: 53238 - RNA, 19 nt, Artificial Sequence
  Synthetic
ccaucacagcagcugaagg

SEQ ID NO: 53239 - RNA, 20 nt, Artificial Sequence
  Synthetic
accaucacagcagcugaagg

SEQ ID NO: 53240 - RNA, 21 nt, Artificial Sequence
  Synthetic
aaccaucacagcagcugaagg

SEQ ID NO: 53241 - RNA, 22 nt, Artificial Sequence
  Synthetic
caaccaucacagcagcugaagg

SEQ ID NO: 53242 - RNA, 23 nt, Artificial Sequence
  Synthetic
ucaaccaucacagcagcugaagg

SEQ ID NO: 53243 - RNA, 21 nt, Artificial Sequence
  Synthetic
aggaucucugaagucugaagg

SEQ ID NO: 53244 - RNA, 24 nt, Artificial Sequence
  Synthetic
aggaggaucucugaagucugaagg

SEQ ID NO: 53245 - RNA, 18 nt, Artificial Sequence
  Synthetic
uauucaaguuagugaagg

SEQ ID NO: 53246 - RNA, 19 nt, Artificial Sequence
  Synthetic
cuauucaaguuagugaagg

SEQ ID NO: 53247 - RNA, 20 nt, Artificial Sequence
  Synthetic
ucuauucaaguuagugaagg

SEQ ID NO: 53248 - RNA, 21 nt, Artificial Sequence
  Synthetic
cucuauucaaguuagugaagg

SEQ ID NO: 53249 - RNA, 22 nt, Artificial Sequence
  Synthetic
ucucuauucaaguuagugaagg

SEQ ID NO: 53250 - RNA, 23 nt, Artificial Sequence
  Synthetic
uucucuauucaaguuagugaagg

SEQ ID NO: 53251 - RNA, 24 nt, Artificial Sequence
  Synthetic
uuucucuauucaaguuagugaagg

SEQ ID NO: 53252 - RNA, 18 nt, Artificial Sequence
  Synthetic
cuggcauauacuugaagg

SEQ ID NO: 53253 - RNA, 20 nt, Artificial Sequence
  Synthetic
ugcuggcauauacuugaagg

SEQ ID NO: 53254 - RNA, 21 nt, Artificial Sequence
  Synthetic
cugcuggcauauacuugaagg

SEQ ID NO: 53255 - RNA, 22 nt, Artificial Sequence
  Synthetic
acugcuggcauauacuugaagg

SEQ ID NO: 53256 - RNA, 23 nt, Artificial Sequence
  Synthetic
cacugcuggcauauacuugaagg

SEQ ID NO: 53257 - RNA, 24 nt, Artificial Sequence
  Synthetic
acacugcuggcauauacuugaagg

SEQ ID NO: 53258 - RNA, 18 nt, Artificial Sequence
  Synthetic
aagacucaaccaauaagg

SEQ ID NO: 53259 - RNA, 19 nt, Artificial Sequence
  Synthetic
caagacucaaccaauaagg

SEQ ID NO: 53260 - RNA, 21 nt, Artificial Sequence
  Synthetic
agcaagacucaaccaauaagg

SEQ ID NO: 53261 - RNA, 24 nt, Artificial Sequence
  Synthetic
aggagcaagacucaaccaauaagg

SEQ ID NO: 53262 - RNA, 18 nt, Artificial Sequence
  Synthetic
uauaaaagccuaauaagg

SEQ ID NO: 53263 - RNA, 19 nt, Artificial Sequence
  Synthetic
uuauaaaagccuaauaagg

SEQ ID NO: 53264 - RNA, 20 nt, Artificial Sequence
  Synthetic
uuuauaaaagccuaauaagg

SEQ ID NO: 53265 - RNA, 21 nt, Artificial Sequence
  Synthetic
auuuauaaaagccuaauaagg

SEQ ID NO: 53266 - RNA, 24 nt, Artificial Sequence
  Synthetic
aggauuuauaaaagccuaauaagg

SEQ ID NO: 53267 - RNA, 18 nt, Artificial Sequence
  Synthetic
cagauuguaucacuaagg

SEQ ID NO: 53268 - RNA, 19 nt, Artificial Sequence
  Synthetic
ucagauuguaucacuaagg

SEQ ID NO: 53269 - RNA, 20 nt, Artificial Sequence
  Synthetic
aucagauuguaucacuaagg

SEQ ID NO: 53270 - RNA, 21 nt, Artificial Sequence
  Synthetic
uaucagauuguaucacuaagg

SEQ ID NO: 53271 - RNA, 22 nt, Artificial Sequence
  Synthetic
auaucagauuguaucacuaagg

SEQ ID NO: 53272 - RNA, 24 nt, Artificial Sequence
  Synthetic
ugauaucagauuguaucacuaagg

SEQ ID NO: 53273 - RNA, 18 nt, Artificial Sequence
  Synthetic
auuguagaauugcuaagg

SEQ ID NO: 53274 - RNA, 19 nt, Artificial Sequence
  Synthetic
cauuguagaauugcuaagg

SEQ ID NO: 53275 - RNA, 20 nt, Artificial Sequence
  Synthetic
acauuguagaauugcuaagg

SEQ ID NO: 53276 - RNA, 21 nt, Artificial Sequence
  Synthetic
aacauuguagaauugcuaagg

SEQ ID NO: 53277 - RNA, 24 nt, Artificial Sequence
  Synthetic
aggaacauuguagaauugcuaagg

SEQ ID NO: 53278 - RNA, 19 nt, Artificial Sequence
  Synthetic
uggcugcaugauucuaagg

SEQ ID NO: 53279 - RNA, 20 nt, Artificial Sequence
  Synthetic
cuggcugcaugauucuaagg

SEQ ID NO: 53280 - RNA, 22 nt, Artificial Sequence
  Synthetic
agcuggcugcaugauucuaagg

SEQ ID NO: 53281 - RNA, 23 nt, Artificial Sequence
  Synthetic
cagcuggcugcaugauucuaagg

SEQ ID NO: 53282 - RNA, 24 nt, Artificial Sequence
  Synthetic
ucagcuggcugcaugauucuaagg

SEQ ID NO: 53283 - RNA, 19 nt, Artificial Sequence
  Synthetic
aguugauaagcacguaagg

SEQ ID NO: 53284 - RNA, 21 nt, Artificial Sequence
  Synthetic
ugaguugauaagcacguaagg

SEQ ID NO: 53285 - RNA, 23 nt, Artificial Sequence
  Synthetic
agugaguugauaagcacguaagg

SEQ ID NO: 53286 - RNA, 24 nt, Artificial Sequence
  Synthetic
aagugaguugauaagcacguaagg

SEQ ID NO: 53287 - RNA, 21 nt, Artificial Sequence
  Synthetic
ucugaagagaaggagguaagg

SEQ ID NO: 53288 - RNA, 22 nt, Artificial Sequence
  Synthetic
aucugaagagaaggagguaagg

SEQ ID NO: 53289 - RNA, 23 nt, Artificial Sequence
  Synthetic
aaucugaagagaaggagguaagg

SEQ ID NO: 53290 - RNA, 24 nt, Artificial Sequence
  Synthetic
aaaucugaagagaaggagguaagg

SEQ ID NO: 53291 - RNA, 18 nt, Artificial Sequence
  Synthetic
uugccauacauuguaagg

SEQ ID NO: 53292 - RNA, 21 nt, Artificial Sequence
  Synthetic
ugguugccauacauuguaagg

SEQ ID NO: 53293 - RNA, 22 nt, Artificial Sequence
  Synthetic
augguugccauacauuguaagg

SEQ ID NO: 53294 - RNA, 23 nt, Artificial Sequence
  Synthetic
aaugguugccauacauuguaagg

SEQ ID NO: 53295 - RNA, 24 nt, Artificial Sequence
  Synthetic
aaaugguugccauacauuguaagg

SEQ ID NO: 53296 - RNA, 18 nt, Artificial Sequence
  Synthetic
acaauguauaaauuaagg

SEQ ID NO: 53297 - RNA, 20 nt, Artificial Sequence
  Synthetic
ugacaauguauaaauuaagg

SEQ ID NO: 53298 - RNA, 21 nt, Artificial Sequence
  Synthetic
augacaauguauaaauuaagg

SEQ ID NO: 53299 - RNA, 23 nt, Artificial Sequence
  Synthetic
ugaugacaauguauaaauuaagg

SEQ ID NO: 53300 - RNA, 24 nt, Artificial Sequence
  Synthetic
cugaugacaauguauaaauuaagg

SEQ ID NO: 53301 - RNA, 18 nt, Artificial Sequence
  Synthetic
ccuaccugaagcuuaagg

SEQ ID NO: 53302 - RNA, 19 nt, Artificial Sequence
  Synthetic
uccuaccugaagcuuaagg

SEQ ID NO: 53303 - RNA, 20 nt, Artificial Sequence
  Synthetic
uuccuaccugaagcuuaagg

SEQ ID NO: 53304 - RNA, 21 nt, Artificial Sequence
  Synthetic
auuccuaccugaagcuuaagg

SEQ ID NO: 53305 - RNA, 24 nt, Artificial Sequence
  Synthetic
aggauuccuaccugaagcuuaagg

SEQ ID NO: 53306 - RNA, 18 nt, Artificial Sequence
  Synthetic
uagugcuggauuuuaagg

SEQ ID NO: 53307 - RNA, 19 nt, Artificial Sequence
  Synthetic
auagugcuggauuuuaagg

SEQ ID NO: 53308 - RNA, 20 nt, Artificial Sequence
  Synthetic
uauagugcuggauuuuaagg

SEQ ID NO: 53309 - RNA, 21 nt, Artificial Sequence
  Synthetic
auauagugcuggauuuuaagg

SEQ ID NO: 53310 - RNA, 24 nt, Artificial Sequence
  Synthetic
uggauauagugcuggauuuuaagg

SEQ ID NO: 53311 - RNA, 20 nt, Artificial Sequence
  Synthetic
uggaacaauacagcaacagg

SEQ ID NO: 53312 - RNA, 21 nt, Artificial Sequence
  Synthetic
auggaacaauacagcaacagg

SEQ ID NO: 53313 - RNA, 22 nt, Artificial Sequence
  Synthetic
aauggaacaauacagcaacagg

SEQ ID NO: 53314 - RNA, 23 nt, Artificial Sequence
  Synthetic
aaauggaacaauacagcaacagg

SEQ ID NO: 53315 - RNA, 24 nt, Artificial Sequence
  Synthetic
aaaauggaacaauacagcaacagg

SEQ ID NO: 53316 - RNA, 18 nt, Artificial Sequence
  Synthetic
uuuucuauucaacacagg

SEQ ID NO: 53317 - RNA, 19 nt, Artificial Sequence
  Synthetic
uuuuucuauucaacacagg

SEQ ID NO: 53318 - RNA, 20 nt, Artificial Sequence
  Synthetic
cuuuuucuauucaacacagg

SEQ ID NO: 53319 - RNA, 21 nt, Artificial Sequence
  Synthetic
ccuuuuucuauucaacacagg

SEQ ID NO: 53320 - RNA, 22 nt, Artificial Sequence
  Synthetic
cccuuuuucuauucaacacagg

SEQ ID NO: 53321 - RNA, 23 nt, Artificial Sequence
  Synthetic
ucccuuuuucuauucaacacagg

SEQ ID NO: 53322 - RNA, 24 nt, Artificial Sequence
  Synthetic
aucccuuuuucuauucaacacagg

SEQ ID NO: 53323 - RNA, 18 nt, Artificial Sequence
  Synthetic
uuagaagggcuacacagg

SEQ ID NO: 53324 - RNA, 19 nt, Artificial Sequence
  Synthetic
uuuagaagggcuacacagg

SEQ ID NO: 53325 - RNA, 20 nt, Artificial Sequence
  Synthetic
uuuuagaagggcuacacagg

SEQ ID NO: 53326 - RNA, 21 nt, Artificial Sequence
  Synthetic
uuuuuagaagggcuacacagg

SEQ ID NO: 53327 - RNA, 22 nt, Artificial Sequence
  Synthetic
cuuuuuagaagggcuacacagg

SEQ ID NO: 53328 - RNA, 23 nt, Artificial Sequence
  Synthetic
ucuuuuuagaagggcuacacagg

SEQ ID NO: 53329 - RNA, 24 nt, Artificial Sequence
  Synthetic
uucuuuuuagaagggcuacacagg

SEQ ID NO: 53330 - RNA, 18 nt, Artificial Sequence
  Synthetic
aaacugaguacccacagg

SEQ ID NO: 53331 - RNA, 21 nt, Artificial Sequence
  Synthetic
uggaaacugaguacccacagg

SEQ ID NO: 53332 - RNA, 22 nt, Artificial Sequence
  Synthetic
uuggaaacugaguacccacagg

SEQ ID NO: 53333 - RNA, 23 nt, Artificial Sequence
  Synthetic
uuuggaaacugaguacccacagg

SEQ ID NO: 53334 - RNA, 18 nt, Artificial Sequence
  Synthetic
ccugcugauaagcacagg

SEQ ID NO: 53335 - RNA, 19 nt, Artificial Sequence
  Synthetic
accugcugauaagcacagg

SEQ ID NO: 53336 - RNA, 20 nt, Artificial Sequence
  Synthetic
uaccugcugauaagcacagg

SEQ ID NO: 53337 - RNA, 23 nt, Artificial Sequence
  Synthetic
ugguaccugcugauaagcacagg

SEQ ID NO: 53338 - RNA, 24 nt, Artificial Sequence
  Synthetic
cugguaccugcugauaagcacagg

SEQ ID NO: 53339 - RNA, 18 nt, Artificial Sequence
  Synthetic
ugcauccaaguagacagg

SEQ ID NO: 53340 - RNA, 20 nt, Artificial Sequence
  Synthetic
ugugcauccaaguagacagg

SEQ ID NO: 53341 - RNA, 21 nt, Artificial Sequence
  Synthetic
cugugcauccaaguagacagg

SEQ ID NO: 53342 - RNA, 23 nt, Artificial Sequence
  Synthetic
agcugugcauccaaguagacagg

SEQ ID NO: 53343 - RNA, 24 nt, Artificial Sequence
  Synthetic
cagcugugcauccaaguagacagg

SEQ ID NO: 53344 - RNA, 18 nt, Artificial Sequence
  Synthetic
agcucauauauugacagg

SEQ ID NO: 53345 - RNA, 19 nt, Artificial Sequence
  Synthetic
uagcucauauauugacagg

SEQ ID NO: 53346 - RNA, 20 nt, Artificial Sequence
  Synthetic
uuagcucauauauugacagg

SEQ ID NO: 53347 - RNA, 22 nt, Artificial Sequence
  Synthetic
uguuagcucauauauugacagg

SEQ ID NO: 53348 - RNA, 23 nt, Artificial Sequence
  Synthetic
auguuagcucauauauugacagg

SEQ ID NO: 53349 - RNA, 24 nt, Artificial Sequence
  Synthetic
aauguuagcucauauauugacagg

SEQ ID NO: 53350 - RNA, 18 nt, Artificial Sequence
  Synthetic
ucagguaugaaauacagg

SEQ ID NO: 53351 - RNA, 19 nt, Artificial Sequence
  Synthetic
aucagguaugaaauacagg

SEQ ID NO: 53352 - RNA, 20 nt, Artificial Sequence
  Synthetic
uaucagguaugaaauacagg

SEQ ID NO: 53353 - RNA, 21 nt, Artificial Sequence
  Synthetic
auaucagguaugaaauacagg

SEQ ID NO: 53354 - RNA, 22 nt, Artificial Sequence
  Synthetic
cauaucagguaugaaauacagg

SEQ ID NO: 53355 - RNA, 23 nt, Artificial Sequence
  Synthetic
acauaucagguaugaaauacagg

SEQ ID NO: 53356 - RNA, 24 nt, Artificial Sequence
  Synthetic
uacauaucagguaugaaauacagg

SEQ ID NO: 53357 - RNA, 21 nt, Artificial Sequence
  Synthetic
agcuuuaagaaauuauacagg

SEQ ID NO: 53358 - RNA, 22 nt, Artificial Sequence
  Synthetic
uagcuuuaagaaauuauacagg

SEQ ID NO: 53359 - RNA, 23 nt, Artificial Sequence
  Synthetic
uuagcuuuaagaaauuauacagg

SEQ ID NO: 53360 - RNA, 18 nt, Artificial Sequence
  Synthetic
uagcuacugaaguacagg

SEQ ID NO: 53361 - RNA, 19 nt, Artificial Sequence
  Synthetic
uuagcuacugaaguacagg

SEQ ID NO: 53362 - RNA, 20 nt, Artificial Sequence
  Synthetic
auuagcuacugaaguacagg

SEQ ID NO: 53363 - RNA, 21 nt, Artificial Sequence
  Synthetic
cauuagcuacugaaguacagg

SEQ ID NO: 53364 - RNA, 22 nt, Artificial Sequence
  Synthetic
ccauuagcuacugaaguacagg

SEQ ID NO: 53365 - RNA, 23 nt, Artificial Sequence
  Synthetic
cccauuagcuacugaaguacagg

SEQ ID NO: 53366 - RNA, 24 nt, Artificial Sequence
  Synthetic
ccccauuagcuacugaaguacagg

SEQ ID NO: 53367 - RNA, 18 nt, Artificial Sequence
  Synthetic
cuaaguagguguuacagg

SEQ ID NO: 53368 - RNA, 19 nt, Artificial Sequence
  Synthetic
acuaaguagguguuacagg

SEQ ID NO: 53369 - RNA, 20 nt, Artificial Sequence
  Synthetic
uacuaaguagguguuacagg

SEQ ID NO: 53370 - RNA, 21 nt, Artificial Sequence
  Synthetic
auacuaaguagguguuacagg

SEQ ID NO: 53371 - RNA, 22 nt, Artificial Sequence
  Synthetic
cauacuaaguagguguuacagg

SEQ ID NO: 53372 - RNA, 23 nt, Artificial Sequence
  Synthetic
acauacuaaguagguguuacagg

SEQ ID NO: 53373 - RNA, 18 nt, Artificial Sequence
  Synthetic
uaaacagaagccaccagg

SEQ ID NO: 53374 - RNA, 20 nt, Artificial Sequence
  Synthetic
uguaaacagaagccaccagg

SEQ ID NO: 53375 - RNA, 21 nt, Artificial Sequence
  Synthetic
uuguaaacagaagccaccagg

SEQ ID NO: 53376 - RNA, 23 nt, Artificial Sequence
  Synthetic
uguuguaaacagaagccaccagg

SEQ ID NO: 53377 - RNA, 24 nt, Artificial Sequence
  Synthetic
uuguuguaaacagaagccaccagg

SEQ ID NO: 53378 - RNA, 19 nt, Artificial Sequence
  Synthetic
ugaccugcaacagcccagg

SEQ ID NO: 53379 - RNA, 20 nt, Artificial Sequence
  Synthetic
cugaccugcaacagcccagg

SEQ ID NO: 53380 - RNA, 21 nt, Artificial Sequence
  Synthetic
acugaccugcaacagcccagg

SEQ ID NO: 53381 - RNA, 23 nt, Artificial Sequence
  Synthetic
agacugaccugcaacagcccagg

SEQ ID NO: 53382 - RNA, 24 nt, Artificial Sequence
  Synthetic
cagacugaccugcaacagcccagg

SEQ ID NO: 53383 - RNA, 21 nt, Artificial Sequence
  Synthetic
aaagaaagagaagagcccagg

SEQ ID NO: 53384 - RNA, 18 nt, Artificial Sequence
  Synthetic
uugguaguagagcccagg

SEQ ID NO: 53385 - RNA, 19 nt, Artificial Sequence
  Synthetic
uuugguaguagagcccagg

SEQ ID NO: 53386 - RNA, 20 nt, Artificial Sequence
  Synthetic
auuugguaguagagcccagg

SEQ ID NO: 53387 - RNA, 21 nt, Artificial Sequence
  Synthetic
aauuugguaguagagcccagg

SEQ ID NO: 53388 - RNA, 22 nt, Artificial Sequence
  Synthetic
caauuugguaguagagcccagg

SEQ ID NO: 53389 - RNA, 23 nt, Artificial Sequence
  Synthetic
ccaauuugguaguagagcccagg

SEQ ID NO: 53390 - RNA, 24 nt, Artificial Sequence
  Synthetic
accaauuugguaguagagcccagg

SEQ ID NO: 53391 - RNA, 18 nt, Artificial Sequence
  Synthetic
uugucagcauuucccagg

SEQ ID NO: 53392 - RNA, 19 nt, Artificial Sequence
  Synthetic
cuugucagcauuucccagg

SEQ ID NO: 53393 - RNA, 20 nt, Artificial Sequence
  Synthetic
acuugucagcauuucccagg

SEQ ID NO: 53394 - RNA, 21 nt, Artificial Sequence
  Synthetic
uacuugucagcauuucccagg

SEQ ID NO: 53395 - RNA, 23 nt, Artificial Sequence
  Synthetic
cguacuugucagcauuucccagg

SEQ ID NO: 53396 - RNA, 24 nt, Artificial Sequence
  Synthetic
ccguacuugucagcauuucccagg

SEQ ID NO: 53397 - RNA, 20 nt, Artificial Sequence
  Synthetic
ugggaauguaaaaggccagg

SEQ ID NO: 53398 - RNA, 21 nt, Artificial Sequence
  Synthetic
cugggaauguaaaaggccagg

SEQ ID NO: 53399 - RNA, 22 nt, Artificial Sequence
  Synthetic
ucugggaauguaaaaggccagg

SEQ ID NO: 53400 - RNA, 23 nt, Artificial Sequence
  Synthetic
cucugggaauguaaaaggccagg

SEQ ID NO: 53401 - RNA, 19 nt, Artificial Sequence
  Synthetic
agauaagguaagauccagg

SEQ ID NO: 53402 - RNA, 23 nt, Artificial Sequence
  Synthetic
ugggagauaagguaagauccagg

SEQ ID NO: 53403 - RNA, 24 nt, Artificial Sequence
  Synthetic
cugggagauaagguaagauccagg

SEQ ID NO: 53404 - RNA, 18 nt, Artificial Sequence
  Synthetic
ccuauugaccucuccagg

SEQ ID NO: 53405 - RNA, 19 nt, Artificial Sequence
  Synthetic
accuauugaccucuccagg

SEQ ID NO: 53406 - RNA, 20 nt, Artificial Sequence
  Synthetic
aaccuauugaccucuccagg

SEQ ID NO: 53407 - RNA, 21 nt, Artificial Sequence
  Synthetic
uaaccuauugaccucuccagg

SEQ ID NO: 53408 - RNA, 18 nt, Artificial Sequence
  Synthetic
uucauuauuaaaagcagg

SEQ ID NO: 53409 - RNA, 19 nt, Artificial Sequence
  Synthetic
uuucauuauuaaaagcagg

SEQ ID NO: 53410 - RNA, 20 nt, Artificial Sequence
  Synthetic
uuuucauuauuaaaagcagg

SEQ ID NO: 53411 - RNA, 21 nt, Artificial Sequence
  Synthetic
auuuucauuauuaaaagcagg

SEQ ID NO: 53412 - RNA, 22 nt, Artificial Sequence
  Synthetic
aauuuucauuauuaaaagcagg

SEQ ID NO: 53413 - RNA, 23 nt, Artificial Sequence
  Synthetic
aaauuuucauuauuaaaagcagg

SEQ ID NO: 53414 - RNA, 21 nt, Artificial Sequence
  Synthetic
augaggacacagaggagcagg

SEQ ID NO: 53415 - RNA, 22 nt, Artificial Sequence
  Synthetic
aaugaggacacagaggagcagg

SEQ ID NO: 53416 - RNA, 23 nt, Artificial Sequence
  Synthetic
aaaugaggacacagaggagcagg

SEQ ID NO: 53417 - RNA, 24 nt, Artificial Sequence
  Synthetic
caaaugaggacacagaggagcagg

SEQ ID NO: 53418 - RNA, 18 nt, Artificial Sequence
  Synthetic
uccaucaggggacgcagg

SEQ ID NO: 53419 - RNA, 19 nt, Artificial Sequence
  Synthetic
uuccaucaggggacgcagg

SEQ ID NO: 53420 - RNA, 20 nt, Artificial Sequence
  Synthetic
uuuccaucaggggacgcagg

SEQ ID NO: 53421 - RNA, 24 nt, Artificial Sequence
  Synthetic
aggguuuccaucaggggacgcagg

SEQ ID NO: 53422 - RNA, 21 nt, Artificial Sequence
  Synthetic
uggcugugguaagguugcagg

SEQ ID NO: 53423 - RNA, 22 nt, Artificial Sequence
  Synthetic
auggcugugguaagguugcagg

SEQ ID NO: 53424 - RNA, 23 nt, Artificial Sequence
  Synthetic
cauggcugugguaagguugcagg

SEQ ID NO: 53425 - RNA, 24 nt, Artificial Sequence
  Synthetic
ucauggcugugguaagguugcagg

SEQ ID NO: 53426 - RNA, 18 nt, Artificial Sequence
  Synthetic
cauuugguccuuugcagg

SEQ ID NO: 53427 - RNA, 19 nt, Artificial Sequence
  Synthetic
acauuugguccuuugcagg

SEQ ID NO: 53428 - RNA, 20 nt, Artificial Sequence
  Synthetic
aacauuugguccuuugcagg

SEQ ID NO: 53429 - RNA, 22 nt, Artificial Sequence
  Synthetic
ugaacauuugguccuuugcagg

SEQ ID NO: 53430 - RNA, 23 nt, Artificial Sequence
  Synthetic
cugaacauuugguccuuugcagg

SEQ ID NO: 53431 - RNA, 24 nt, Artificial Sequence
  Synthetic
ucugaacauuugguccuuugcagg

SEQ ID NO: 53432 - RNA, 18 nt, Artificial Sequence
  Synthetic
uacuagggaagaaucagg

SEQ ID NO: 53433 - RNA, 19 nt, Artificial Sequence
  Synthetic
auacuagggaagaaucagg

SEQ ID NO: 53434 - RNA, 20 nt, Artificial Sequence
  Synthetic
aauacuagggaagaaucagg

SEQ ID NO: 53435 - RNA, 22 nt, Artificial Sequence
  Synthetic
agaauacuagggaagaaucagg

SEQ ID NO: 53436 - RNA, 23 nt, Artificial Sequence
  Synthetic
uagaauacuagggaagaaucagg

SEQ ID NO: 53437 - RNA, 18 nt, Artificial Sequence
  Synthetic
ucuacaacaaagcucagg

SEQ ID NO: 53438 - RNA, 20 nt, Artificial Sequence
  Synthetic
agucuacaacaaagcucagg

SEQ ID NO: 53439 - RNA, 21 nt, Artificial Sequence
  Synthetic
uagucuacaacaaagcucagg

SEQ ID NO: 53440 - RNA, 22 nt, Artificial Sequence
  Synthetic
auagucuacaacaaagcucagg

SEQ ID NO: 53441 - RNA, 24 nt, Artificial Sequence
  Synthetic
agauagucuacaacaaagcucagg

SEQ ID NO: 53442 - RNA, 19 nt, Artificial Sequence
  Synthetic
aggggugugauuucucagg

SEQ ID NO: 53443 - RNA, 20 nt, Artificial Sequence
  Synthetic
uaggggugugauuucucagg

SEQ ID NO: 53444 - RNA, 22 nt, Artificial Sequence
  Synthetic
aguaggggugugauuucucagg

SEQ ID NO: 53445 - RNA, 24 nt, Artificial Sequence
  Synthetic
agaguaggggugugauuucucagg

SEQ ID NO: 53446 - RNA, 18 nt, Artificial Sequence
  Synthetic
aagccaaucugagucagg

SEQ ID NO: 53447 - RNA, 20 nt, Artificial Sequence
  Synthetic
ugaagccaaucugagucagg

SEQ ID NO: 53448 - RNA, 21 nt, Artificial Sequence
  Synthetic
cugaagccaaucugagucagg

SEQ ID NO: 53449 - RNA, 22 nt, Artificial Sequence
  Synthetic
ucugaagccaaucugagucagg

SEQ ID NO: 53450 - RNA, 23 nt, Artificial Sequence
  Synthetic
aucugaagccaaucugagucagg

SEQ ID NO: 53451 - RNA, 24 nt, Artificial Sequence
  Synthetic
caucugaagccaaucugagucagg

SEQ ID NO: 53452 - RNA, 18 nt, Artificial Sequence
  Synthetic
uuaaaaacuuuagucagg

SEQ ID NO: 53453 - RNA, 23 nt, Artificial Sequence
  Synthetic
agggguuaaaaacuuuagucagg

SEQ ID NO: 53454 - RNA, 24 nt, Artificial Sequence
  Synthetic
aagggguuaaaaacuuuagucagg

SEQ ID NO: 53455 - RNA, 18 nt, Artificial Sequence
  Synthetic
aguuuccauggggucagg

SEQ ID NO: 53456 - RNA, 20 nt, Artificial Sequence
  Synthetic
ugaguuuccauggggucagg

SEQ ID NO: 53457 - RNA, 22 nt, Artificial Sequence
  Synthetic
agugaguuuccauggggucagg

SEQ ID NO: 53458 - RNA, 23 nt, Artificial Sequence
  Synthetic
cagugaguuuccauggggucagg

SEQ ID NO: 53459 - RNA, 24 nt, Artificial Sequence
  Synthetic
ucagugaguuuccauggggucagg

SEQ ID NO: 53460 - RNA, 18 nt, Artificial Sequence
  Synthetic
aaugaauggcuauucagg

SEQ ID NO: 53461 - RNA, 21 nt, Artificial Sequence
  Synthetic
uggaaugaauggcuauucagg

SEQ ID NO: 53462 - RNA, 22 nt, Artificial Sequence
  Synthetic
uuggaaugaauggcuauucagg

SEQ ID NO: 53463 - RNA, 23 nt, Artificial Sequence
  Synthetic
cuuggaaugaauggcuauucagg

SEQ ID NO: 53464 - RNA, 24 nt, Artificial Sequence
  Synthetic
ccuuggaaugaauggcuauucagg

SEQ ID NO: 53465 - RNA, 18 nt, Artificial Sequence
  Synthetic
aguaugcaguuauucagg

SEQ ID NO: 53466 - RNA, 19 nt, Artificial Sequence
  Synthetic
uaguaugcaguuauucagg

SEQ ID NO: 53467 - RNA, 21 nt, Artificial Sequence
  Synthetic
uguaguaugcaguuauucagg

SEQ ID NO: 53468 - RNA, 22 nt, Artificial Sequence
  Synthetic
uuguaguaugcaguuauucagg

SEQ ID NO: 53469 - RNA, 24 nt, Artificial Sequence
  Synthetic
uguuguaguaugcaguuauucagg

SEQ ID NO: 53470 - RNA, 20 nt, Artificial Sequence
  Synthetic
agggacagauuagguucagg

SEQ ID NO: 53471 - RNA, 21 nt, Artificial Sequence
  Synthetic
cagggacagauuagguucagg

SEQ ID NO: 53472 - RNA, 22 nt, Artificial Sequence
  Synthetic
acagggacagauuagguucagg

SEQ ID NO: 53473 - RNA, 23 nt, Artificial Sequence
  Synthetic
aacagggacagauuagguucagg

SEQ ID NO: 53474 - RNA, 24 nt, Artificial Sequence
  Synthetic
aaacagggacagauuagguucagg

SEQ ID NO: 53475 - RNA, 18 nt, Artificial Sequence
  Synthetic
ucucgauugaauuucagg

SEQ ID NO: 53476 - RNA, 19 nt, Artificial Sequence
  Synthetic
uucucgauugaauuucagg

SEQ ID NO: 53477 - RNA, 21 nt, Artificial Sequence
  Synthetic
uguucucgauugaauuucagg

SEQ ID NO: 53478 - RNA, 22 nt, Artificial Sequence
  Synthetic
uuguucucgauugaauuucagg

SEQ ID NO: 53479 - RNA, 23 nt, Artificial Sequence
  Synthetic
cuuguucucgauugaauuucagg

SEQ ID NO: 53480 - RNA, 24 nt, Artificial Sequence
  Synthetic
acuuguucucgauugaauuucagg

SEQ ID NO: 53481 - RNA, 18 nt, Artificial Sequence
  Synthetic
uuugcuacauauuucagg

SEQ ID NO: 53482 - RNA, 19 nt, Artificial Sequence
  Synthetic
uuuugcuacauauuucagg

SEQ ID NO: 53483 - RNA, 20 nt, Artificial Sequence
  Synthetic
auuuugcuacauauuucagg

SEQ ID NO: 53484 - RNA, 21 nt, Artificial Sequence
  Synthetic
aauuuugcuacauauuucagg

SEQ ID NO: 53485 - RNA, 23 nt, Artificial Sequence
  Synthetic
ugaauuuugcuacauauuucagg

SEQ ID NO: 53486 - RNA, 24 nt, Artificial Sequence
  Synthetic
augaauuuugcuacauauuucagg

SEQ ID NO: 53487 - RNA, 21 nt, Artificial Sequence
  Synthetic
auaaaaauuucuuuuuucagg

SEQ ID NO: 53488 - RNA, 22 nt, Artificial Sequence
  Synthetic
aauaaaaauuucuuuuuucagg

SEQ ID NO: 53489 - RNA, 24 nt, Artificial Sequence
  Synthetic
agaauaaaaauuucuuuuuucagg

SEQ ID NO: 53490 - RNA, 21 nt, Artificial Sequence
  Synthetic
caaaagaagggcaaaaagagg

SEQ ID NO: 53491 - RNA, 22 nt, Artificial Sequence
  Synthetic
acaaaagaagggcaaaaagagg

SEQ ID NO: 53492 - RNA, 23 nt, Artificial Sequence
  Synthetic
aacaaaagaagggcaaaaagagg

SEQ ID NO: 53493 - RNA, 18 nt, Artificial Sequence
  Synthetic
aagguaauuaggaagagg

SEQ ID NO: 53494 - RNA, 19 nt, Artificial Sequence
  Synthetic
uaagguaauuaggaagagg

SEQ ID NO: 53495 - RNA, 20 nt, Artificial Sequence
  Synthetic
auaagguaauuaggaagagg

SEQ ID NO: 53496 - RNA, 21 nt, Artificial Sequence
  Synthetic
uauaagguaauuaggaagagg

SEQ ID NO: 53497 - RNA, 22 nt, Artificial Sequence
  Synthetic
cuauaagguaauuaggaagagg

SEQ ID NO: 53498 - RNA, 23 nt, Artificial Sequence
  Synthetic
ucuauaagguaauuaggaagagg

SEQ ID NO: 53499 - RNA, 24 nt, Artificial Sequence
  Synthetic
aucuauaagguaauuaggaagagg

SEQ ID NO: 53500 - RNA, 19 nt, Artificial Sequence
  Synthetic
agucuuggaguauaagagg

SEQ ID NO: 53501 - RNA, 20 nt, Artificial Sequence
  Synthetic
aagucuuggaguauaagagg

SEQ ID NO: 53502 - RNA, 21 nt, Artificial Sequence
  Synthetic
aaagucuuggaguauaagagg

SEQ ID NO: 53503 - RNA, 22 nt, Artificial Sequence
  Synthetic
aaaagucuuggaguauaagagg

SEQ ID NO: 53504 - RNA, 23 nt, Artificial Sequence
  Synthetic
aaaaagucuuggaguauaagagg

SEQ ID NO: 53505 - RNA, 24 nt, Artificial Sequence
  Synthetic
aaaaaagucuuggaguauaagagg

SEQ ID NO: 53506 - RNA, 21 nt, Artificial Sequence
  Synthetic
uaaugugcuaguacuaagagg

SEQ ID NO: 53507 - RNA, 22 nt, Artificial Sequence
  Synthetic
auaaugugcuaguacuaagagg

SEQ ID NO: 53508 - RNA, 24 nt, Artificial Sequence
  Synthetic
cgauaaugugcuaguacuaagagg

SEQ ID NO: 53509 - RNA, 18 nt, Artificial Sequence
  Synthetic
auagguauaguuaagagg

SEQ ID NO: 53510 - RNA, 19 nt, Artificial Sequence
  Synthetic
uauagguauaguuaagagg

SEQ ID NO: 53511 - RNA, 20 nt, Artificial Sequence
  Synthetic
uuauagguauaguuaagagg

SEQ ID NO: 53512 - RNA, 21 nt, Artificial Sequence
  Synthetic
auuauagguauaguuaagagg

SEQ ID NO: 53513 - RNA, 24 nt, Artificial Sequence
  Synthetic
aggauuauagguauaguuaagagg

SEQ ID NO: 53514 - RNA, 23 nt, Artificial Sequence
  Synthetic
agggagaacaggaaggacagagg

SEQ ID NO: 53515 - RNA, 19 nt, Artificial Sequence
  Synthetic
ugucuagauguagcagagg

SEQ ID NO: 53516 - RNA, 20 nt, Artificial Sequence
  Synthetic
uugucuagauguagcagagg

SEQ ID NO: 53517 - RNA, 21 nt, Artificial Sequence
  Synthetic
auugucuagauguagcagagg

SEQ ID NO: 53518 - RNA, 22 nt, Artificial Sequence
  Synthetic
cauugucuagauguagcagagg

SEQ ID NO: 53519 - RNA, 23 nt, Artificial Sequence
  Synthetic
ucauugucuagauguagcagagg

SEQ ID NO: 53520 - RNA, 19 nt, Artificial Sequence
  Synthetic
agaagaaguagaucagagg

SEQ ID NO: 53521 - RNA, 20 nt, Artificial Sequence
  Synthetic
uagaagaaguagaucagagg

SEQ ID NO: 53522 - RNA, 21 nt, Artificial Sequence
  Synthetic
auagaagaaguagaucagagg

SEQ ID NO: 53523 - RNA, 22 nt, Artificial Sequence
  Synthetic
cauagaagaaguagaucagagg

SEQ ID NO: 53524 - RNA, 23 nt, Artificial Sequence
  Synthetic
ucauagaagaaguagaucagagg

SEQ ID NO: 53525 - RNA, 24 nt, Artificial Sequence
  Synthetic
aucauagaagaaguagaucagagg

SEQ ID NO: 53526 - RNA, 22 nt, Artificial Sequence
  Synthetic
agaagcaucugauagucagagg

SEQ ID NO: 53527 - RNA, 23 nt, Artificial Sequence
  Synthetic
cagaagcaucugauagucagagg

SEQ ID NO: 53528 - RNA, 21 nt, Artificial Sequence
  Synthetic
agggcaguuuuccaagagagg

SEQ ID NO: 53529 - RNA, 22 nt, Artificial Sequence
  Synthetic
cagggcaguuuuccaagagagg

SEQ ID NO: 53530 - RNA, 23 nt, Artificial Sequence
  Synthetic
ucagggcaguuuuccaagagagg

SEQ ID NO: 53531 - RNA, 24 nt, Artificial Sequence
  Synthetic
cucagggcaguuuuccaagagagg

SEQ ID NO: 53532 - RNA, 18 nt, Artificial Sequence
  Synthetic
acuucucacucagagagg

SEQ ID NO: 53533 - RNA, 19 nt, Artificial Sequence
  Synthetic
cacuucucacucagagagg

SEQ ID NO: 53534 - RNA, 23 nt, Artificial Sequence
  Synthetic
agggcacuucucacucagagagg

SEQ ID NO: 53535 - RNA, 24 nt, Artificial Sequence
  Synthetic
uagggcacuucucacucagagagg

SEQ ID NO: 53536 - RNA, 22 nt, Artificial Sequence
  Synthetic
agagaagugugaaggagagagg

SEQ ID NO: 53537 - RNA, 23 nt, Artificial Sequence
  Synthetic
aagagaagugugaaggagagagg

SEQ ID NO: 53538 - RNA, 18 nt, Artificial Sequence
  Synthetic
cagugauuaggggagagg

SEQ ID NO: 53539 - RNA, 19 nt, Artificial Sequence
  Synthetic
ucagugauuaggggagagg

SEQ ID NO: 53540 - RNA, 20 nt, Artificial Sequence
  Synthetic
aucagugauuaggggagagg

SEQ ID NO: 53541 - RNA, 21 nt, Artificial Sequence
  Synthetic
uaucagugauuaggggagagg

SEQ ID NO: 53542 - RNA, 23 nt, Artificial Sequence
  Synthetic
uguaucagugauuaggggagagg

SEQ ID NO: 53543 - RNA, 18 nt, Artificial Sequence
  Synthetic
agaggaaaaacugagagg

SEQ ID NO: 53544 - RNA, 19 nt, Artificial Sequence
  Synthetic
cagaggaaaaacugagagg

SEQ ID NO: 53545 - RNA, 20 nt, Artificial Sequence
  Synthetic
acagaggaaaaacugagagg

SEQ ID NO: 53546 - RNA, 21 nt, Artificial Sequence
  Synthetic
uacagaggaaaaacugagagg

SEQ ID NO: 53547 - RNA, 23 nt, Artificial Sequence
  Synthetic
aguacagaggaaaaacugagagg

SEQ ID NO: 53548 - RNA, 24 nt, Artificial Sequence
  Synthetic
uaguacagaggaaaaacugagagg

SEQ ID NO: 53549 - RNA, 19 nt, Artificial Sequence
  Synthetic
aguguuauuccuauagagg

SEQ ID NO: 53550 - RNA, 21 nt, Artificial Sequence
  Synthetic
ugaguguuauuccuauagagg

SEQ ID NO: 53551 - RNA, 22 nt, Artificial Sequence
  Synthetic
augaguguuauuccuauagagg

SEQ ID NO: 53552 - RNA, 23 nt, Artificial Sequence
  Synthetic
caugaguguuauuccuauagagg

SEQ ID NO: 53553 - RNA, 24 nt, Artificial Sequence
  Synthetic
ucaugaguguuauuccuauagagg

SEQ ID NO: 53554 - RNA, 19 nt, Artificial Sequence
  Synthetic
aggaggaauuuuauagagg

SEQ ID NO: 53555 - RNA, 20 nt, Artificial Sequence
  Synthetic
uaggaggaauuuuauagagg

SEQ ID NO: 53556 - RNA, 21 nt, Artificial Sequence
  Synthetic
cuaggaggaauuuuauagagg

SEQ ID NO: 53557 - RNA, 22 nt, Artificial Sequence
  Synthetic
acuaggaggaauuuuauagagg

SEQ ID NO: 53558 - RNA, 23 nt, Artificial Sequence
  Synthetic
aacuaggaggaauuuuauagagg

SEQ ID NO: 53559 - RNA, 24 nt, Artificial Sequence
  Synthetic
aaacuaggaggaauuuuauagagg

SEQ ID NO: 53560 - RNA, 21 nt, Artificial Sequence
  Synthetic
auguugagagaaaacuagagg

SEQ ID NO: 53561 - RNA, 22 nt, Artificial Sequence
  Synthetic
aauguugagagaaaacuagagg

SEQ ID NO: 53562 - RNA, 23 nt, Artificial Sequence
  Synthetic
aaauguugagagaaaacuagagg

SEQ ID NO: 53563 - RNA, 24 nt, Artificial Sequence
  Synthetic
aaaauguugagagaaaacuagagg

SEQ ID NO: 53564 - RNA, 18 nt, Artificial Sequence
  Synthetic
uauuccagaaucuagagg

SEQ ID NO: 53565 - RNA, 19 nt, Artificial Sequence
  Synthetic
auauuccagaaucuagagg

SEQ ID NO: 53566 - RNA, 20 nt, Artificial Sequence
  Synthetic
aauauuccagaaucuagagg

SEQ ID NO: 53567 - RNA, 22 nt, Artificial Sequence
  Synthetic
agaauauuccagaaucuagagg

SEQ ID NO: 53568 - RNA, 24 nt, Artificial Sequence
  Synthetic
ugagaauauuccagaaucuagagg

SEQ ID NO: 53569 - RNA, 19 nt, Artificial Sequence
  Synthetic
uguaauagcuaguuagagg

SEQ ID NO: 53570 - RNA, 20 nt, Artificial Sequence
  Synthetic
uuguaauagcuaguuagagg

SEQ ID NO: 53571 - RNA, 21 nt, Artificial Sequence
  Synthetic
auuguaauagcuaguuagagg

SEQ ID NO: 53572 - RNA, 22 nt, Artificial Sequence
  Synthetic
uauuguaauagcuaguuagagg

SEQ ID NO: 53573 - RNA, 18 nt, Artificial Sequence
  Synthetic
agcuauggcuuaacgagg

SEQ ID NO: 53574 - RNA, 19 nt, Artificial Sequence
  Synthetic
uagcuauggcuuaacgagg

SEQ ID NO: 53575 - RNA, 20 nt, Artificial Sequence
  Synthetic
cuagcuauggcuuaacgagg

SEQ ID NO: 53576 - RNA, 21 nt, Artificial Sequence
  Synthetic
ucuagcuauggcuuaacgagg

SEQ ID NO: 53577 - RNA, 22 nt, Artificial Sequence
  Synthetic
aucuagcuauggcuuaacgagg

SEQ ID NO: 53578 - RNA, 23 nt, Artificial Sequence
  Synthetic
aaucuagcuauggcuuaacgagg

SEQ ID NO: 53579 - RNA, 24 nt, Artificial Sequence
  Synthetic
aaaucuagcuauggcuuaacgagg

SEQ ID NO: 53580 - RNA, 18 nt, Artificial Sequence
  Synthetic
caaauggauuucacgagg

SEQ ID NO: 53581 - RNA, 19 nt, Artificial Sequence
  Synthetic
ucaaauggauuucacgagg

SEQ ID NO: 53582 - RNA, 20 nt, Artificial Sequence
  Synthetic
aucaaauggauuucacgagg

SEQ ID NO: 53583 - RNA, 21 nt, Artificial Sequence
  Synthetic
caucaaauggauuucacgagg

SEQ ID NO: 53584 - RNA, 21 nt, Artificial Sequence
  Synthetic
cauaaaaagagaacaaggagg

SEQ ID NO: 53585 - RNA, 22 nt, Artificial Sequence
  Synthetic
ucauaaaaagagaacaaggagg

SEQ ID NO: 53586 - RNA, 23 nt, Artificial Sequence
  Synthetic
cucauaaaaagagaacaaggagg

SEQ ID NO: 53587 - RNA, 24 nt, Artificial Sequence
  Synthetic
ccucauaaaaagagaacaaggagg

SEQ ID NO: 53588 - RNA, 18 nt, Artificial Sequence
  Synthetic
auggaguauuacaggagg

SEQ ID NO: 53589 - RNA, 19 nt, Artificial Sequence
  Synthetic
aauggaguauuacaggagg

SEQ ID NO: 53590 - RNA, 20 nt, Artificial Sequence
  Synthetic
caauggaguauuacaggagg

SEQ ID NO: 53591 - RNA, 22 nt, Artificial Sequence
  Synthetic
ugcaauggaguauuacaggagg

SEQ ID NO: 53592 - RNA, 23 nt, Artificial Sequence
  Synthetic
cugcaauggaguauuacaggagg

SEQ ID NO: 53593 - RNA, 24 nt, Artificial Sequence
  Synthetic
acugcaauggaguauuacaggagg

SEQ ID NO: 53594 - RNA, 21 nt, Artificial Sequence
  Synthetic
agacuuauuugggagaggagg

SEQ ID NO: 53595 - RNA, 22 nt, Artificial Sequence
  Synthetic
cagacuuauuugggagaggagg

SEQ ID NO: 53596 - RNA, 23 nt, Artificial Sequence
  Synthetic
acagacuuauuugggagaggagg

SEQ ID NO: 53597 - RNA, 24 nt, Artificial Sequence
  Synthetic
aacagacuuauuugggagaggagg

SEQ ID NO: 53598 - RNA, 21 nt, Artificial Sequence
  Synthetic
uggaaugcuuccaggaggagg

SEQ ID NO: 53599 - RNA, 23 nt, Artificial Sequence
  Synthetic
aguggaaugcuuccaggaggagg

SEQ ID NO: 53600 - RNA, 24 nt, Artificial Sequence
  Synthetic
uaguggaaugcuuccaggaggagg

SEQ ID NO: 53601 - RNA, 18 nt, Artificial Sequence
  Synthetic
uuggggauuuggaggagg

SEQ ID NO: 53602 - RNA, 20 nt, Artificial Sequence
  Synthetic
aguuggggauuuggaggagg

SEQ ID NO: 53603 - RNA, 21 nt, Artificial Sequence
  Synthetic
aaguuggggauuuggaggagg

SEQ ID NO: 53604 - RNA, 22 nt, Artificial Sequence
  Synthetic
caaguuggggauuuggaggagg

SEQ ID NO: 53605 - RNA, 23 nt, Artificial Sequence
  Synthetic
ucaaguuggggauuuggaggagg

SEQ ID NO: 53606 - RNA, 18 nt, Artificial Sequence
  Synthetic
caaggacagacggggagg

SEQ ID NO: 53607 - RNA, 19 nt, Artificial Sequence
  Synthetic
ucaaggacagacggggagg

SEQ ID NO: 53608 - RNA, 20 nt, Artificial Sequence
  Synthetic
aucaaggacagacggggagg

SEQ ID NO: 53609 - RNA, 21 nt, Artificial Sequence
  Synthetic
uaucaaggacagacggggagg

SEQ ID NO: 53610 - RNA, 23 nt, Artificial Sequence
  Synthetic
aguaucaaggacagacggggagg

SEQ ID NO: 53611 - RNA, 18 nt, Artificial Sequence
  Synthetic
auuagcucaucugggagg

SEQ ID NO: 53612 - RNA, 20 nt, Artificial Sequence
  Synthetic
agauuagcucaucugggagg

SEQ ID NO: 53613 - RNA, 21 nt, Artificial Sequence
  Synthetic
uagauuagcucaucugggagg

SEQ ID NO: 53614 - RNA, 24 nt, Artificial Sequence
  Synthetic
ugguagauuagcucaucugggagg

SEQ ID NO: 53615 - RNA, 22 nt, Artificial Sequence
  Synthetic
ugguuaacagaggcuugggagg

SEQ ID NO: 53616 - RNA, 23 nt, Artificial Sequence
  Synthetic
augguuaacagaggcuugggagg

SEQ ID NO: 53617 - RNA, 24 nt, Artificial Sequence
  Synthetic
caugguuaacagaggcuugggagg

SEQ ID NO: 53618 - RNA, 18 nt, Artificial Sequence
  Synthetic
aaauauaaugaauggagg

SEQ ID NO: 53619 - RNA, 19 nt, Artificial Sequence
  Synthetic
uaaauauaaugaauggagg

SEQ ID NO: 53620 - RNA, 20 nt, Artificial Sequence
  Synthetic
cuaaauauaaugaauggagg

SEQ ID NO: 53621 - RNA, 22 nt, Artificial Sequence
  Synthetic
agcuaaauauaaugaauggagg

SEQ ID NO: 53622 - RNA, 24 nt, Artificial Sequence
  Synthetic
agagcuaaauauaaugaauggagg

SEQ ID NO: 53623 - RNA, 19 nt, Artificial Sequence
  Synthetic
ugucacaagugaguggagg

SEQ ID NO: 53624 - RNA, 20 nt, Artificial Sequence
  Synthetic
cugucacaagugaguggagg

SEQ ID NO: 53625 - RNA, 23 nt, Artificial Sequence
  Synthetic
aggcugucacaagugaguggagg

SEQ ID NO: 53626 - RNA, 24 nt, Artificial Sequence
  Synthetic
caggcugucacaagugaguggagg

SEQ ID NO: 53627 - RNA, 21 nt, Artificial Sequence
  Synthetic
aguaugugugugagguggagg

SEQ ID NO: 53628 - RNA, 22 nt, Artificial Sequence
  Synthetic
aaguaugugugugagguggagg

SEQ ID NO: 53629 - RNA, 23 nt, Artificial Sequence
  Synthetic
uaaguaugugugugagguggagg

SEQ ID NO: 53630 - RNA, 24 nt, Artificial Sequence
  Synthetic
auaaguaugugugugagguggagg

SEQ ID NO: 53631 - RNA, 19 nt, Artificial Sequence
  Synthetic
ugguggugguuauuggagg

SEQ ID NO: 53632 - RNA, 21 nt, Artificial Sequence
  Synthetic
ugugguggugguuauuggagg

SEQ ID NO: 53633 - RNA, 22 nt, Artificial Sequence
  Synthetic
augugguggugguuauuggagg

SEQ ID NO: 53634 - RNA, 23 nt, Artificial Sequence
  Synthetic
uaugugguggugguuauuggagg

SEQ ID NO: 53635 - RNA, 24 nt, Artificial Sequence
  Synthetic
auaugugguggugguuauuggagg

SEQ ID NO: 53636 - RNA, 21 nt, Artificial Sequence
  Synthetic
aaaaaacaaaacaaaaugagg

SEQ ID NO: 53637 - RNA, 22 nt, Artificial Sequence
  Synthetic
uaaaaaacaaaacaaaaugagg

SEQ ID NO: 53638 - RNA, 23 nt, Artificial Sequence
  Synthetic
uuaaaaaacaaaacaaaaugagg

SEQ ID NO: 53639 - RNA, 22 nt, Artificial Sequence
  Synthetic
uguuuucuaaaugaaaaugagg

SEQ ID NO: 53640 - RNA, 23 nt, Artificial Sequence
  Synthetic
uuguuuucuaaaugaaaaugagg

SEQ ID NO: 53641 - RNA, 24 nt, Artificial Sequence
  Synthetic
auuguuuucuaaaugaaaaugagg

SEQ ID NO: 53642 - RNA, 21 nt, Artificial Sequence
  Synthetic
augaggaagaaauugaugagg

SEQ ID NO: 53643 - RNA, 23 nt, Artificial Sequence
  Synthetic
ugaugaggaagaaauugaugagg

SEQ ID NO: 53644 - RNA, 24 nt, Artificial Sequence
  Synthetic
augaugaggaagaaauugaugagg

SEQ ID NO: 53645 - RNA, 18 nt, Artificial Sequence
  Synthetic
ccaucuccagaacugagg

SEQ ID NO: 53646 - RNA, 19 nt, Artificial Sequence
  Synthetic
uccaucuccagaacugagg

SEQ ID NO: 53647 - RNA, 20 nt, Artificial Sequence
  Synthetic
auccaucuccagaacugagg

SEQ ID NO: 53648 - RNA, 21 nt, Artificial Sequence
  Synthetic
aauccaucuccagaacugagg

SEQ ID NO: 53649 - RNA, 22 nt, Artificial Sequence
  Synthetic
aaauccaucuccagaacugagg

SEQ ID NO: 53650 - RNA, 23 nt, Artificial Sequence
  Synthetic
uaaauccaucuccagaacugagg

SEQ ID NO: 53651 - RNA, 24 nt, Artificial Sequence
  Synthetic
cuaaauccaucuccagaacugagg

SEQ ID NO: 53652 - RNA, 18 nt, Artificial Sequence
  Synthetic
ugucgacuagcucugagg

SEQ ID NO: 53653 - RNA, 19 nt, Artificial Sequence
  Synthetic
uugucgacuagcucugagg

SEQ ID NO: 53654 - RNA, 20 nt, Artificial Sequence
  Synthetic
uuugucgacuagcucugagg

SEQ ID NO: 53655 - RNA, 21 nt, Artificial Sequence
  Synthetic
auuugucgacuagcucugagg

SEQ ID NO: 53656 - RNA, 22 nt, Artificial Sequence
  Synthetic
uauuugucgacuagcucugagg

SEQ ID NO: 53657 - RNA, 23 nt, Artificial Sequence
  Synthetic
auauuugucgacuagcucugagg

SEQ ID NO: 53658 - RNA, 24 nt, Artificial Sequence
  Synthetic
aauauuugucgacuagcucugagg

SEQ ID NO: 53659 - RNA, 18 nt, Artificial Sequence
  Synthetic
auaaggagaaaggugagg

SEQ ID NO: 53660 - RNA, 19 nt, Artificial Sequence
  Synthetic
cauaaggagaaaggugagg

SEQ ID NO: 53661 - RNA, 20 nt, Artificial Sequence
  Synthetic
ucauaaggagaaaggugagg

SEQ ID NO: 53662 - RNA, 21 nt, Artificial Sequence
  Synthetic
uucauaaggagaaaggugagg

SEQ ID NO: 53663 - RNA, 22 nt, Artificial Sequence
  Synthetic
uuucauaaggagaaaggugagg

SEQ ID NO: 53664 - RNA, 23 nt, Artificial Sequence
  Synthetic
auuucauaaggagaaaggugagg

SEQ ID NO: 53665 - RNA, 24 nt, Artificial Sequence
  Synthetic
uauuucauaaggagaaaggugagg

SEQ ID NO: 53666 - RNA, 18 nt, Artificial Sequence
  Synthetic
ccguaaagguuggugagg

SEQ ID NO: 53667 - RNA, 22 nt, Artificial Sequence
  Synthetic
agggccguaaagguuggugagg

SEQ ID NO: 53668 - RNA, 23 nt, Artificial Sequence
  Synthetic
aagggccguaaagguuggugagg

SEQ ID NO: 53669 - RNA, 18 nt, Artificial Sequence
  Synthetic
ugcaaaagaccugugagg

SEQ ID NO: 53670 - RNA, 19 nt, Artificial Sequence
  Synthetic
cugcaaaagaccugugagg

SEQ ID NO: 53671 - RNA, 20 nt, Artificial Sequence
  Synthetic
acugcaaaagaccugugagg

SEQ ID NO: 53672 - RNA, 21 nt, Artificial Sequence
  Synthetic
cacugcaaaagaccugugagg

SEQ ID NO: 53673 - RNA, 23 nt, Artificial Sequence
  Synthetic
ugcacugcaaaagaccugugagg

SEQ ID NO: 53674 - RNA, 24 nt, Artificial Sequence
  Synthetic
uugcacugcaaaagaccugugagg

SEQ ID NO: 53675 - RNA, 18 nt, Artificial Sequence
  Synthetic
agggaguuaucugugagg

SEQ ID NO: 53676 - RNA, 19 nt, Artificial Sequence
  Synthetic
aagggaguuaucugugagg

SEQ ID NO: 53677 - RNA, 20 nt, Artificial Sequence
  Synthetic
aaagggaguuaucugugagg

SEQ ID NO: 53678 - RNA, 21 nt, Artificial Sequence
  Synthetic
caaagggaguuaucugugagg

SEQ ID NO: 53679 - RNA, 22 nt, Artificial Sequence
  Synthetic
acaaagggaguuaucugugagg

SEQ ID NO: 53680 - RNA, 23 nt, Artificial Sequence
  Synthetic
aacaaagggaguuaucugugagg

SEQ ID NO: 53681 - RNA, 24 nt, Artificial Sequence
  Synthetic
aaacaaagggaguuaucugugagg

SEQ ID NO: 53682 - RNA, 22 nt, Artificial Sequence
  Synthetic
ugggguaaagacuugugugagg

SEQ ID NO: 53683 - RNA, 23 nt, Artificial Sequence
  Synthetic
uugggguaaagacuugugugagg

SEQ ID NO: 53684 - RNA, 24 nt, Artificial Sequence
  Synthetic
uuugggguaaagacuugugugagg

SEQ ID NO: 53685 - RNA, 18 nt, Artificial Sequence
  Synthetic
auggcuaagacauugagg

SEQ ID NO: 53686 - RNA, 19 nt, Artificial Sequence
  Synthetic
uauggcuaagacauugagg

SEQ ID NO: 53687 - RNA, 20 nt, Artificial Sequence
  Synthetic
auauggcuaagacauugagg

SEQ ID NO: 53688 - RNA, 21 nt, Artificial Sequence
  Synthetic
aauauggcuaagacauugagg

SEQ ID NO: 53689 - RNA, 22 nt, Artificial Sequence
  Synthetic
caauauggcuaagacauugagg

SEQ ID NO: 53690 - RNA, 23 nt, Artificial Sequence
  Synthetic
ccaauauggcuaagacauugagg

SEQ ID NO: 53691 - RNA, 19 nt, Artificial Sequence
  Synthetic
ugaggaguggccaaauagg

SEQ ID NO: 53692 - RNA, 21 nt, Artificial Sequence
  Synthetic
agugaggaguggccaaauagg

SEQ ID NO: 53693 - RNA, 23 nt, Artificial Sequence
  Synthetic
agagugaggaguggccaaauagg

SEQ ID NO: 53694 - RNA, 19 nt, Artificial Sequence
  Synthetic
cggagauugaagacauagg

SEQ ID NO: 53695 - RNA, 20 nt, Artificial Sequence
  Synthetic
acggagauugaagacauagg

SEQ ID NO: 53696 - RNA, 22 nt, Artificial Sequence
  Synthetic
agacggagauugaagacauagg

SEQ ID NO: 53697 - RNA, 23 nt, Artificial Sequence
  Synthetic
uagacggagauugaagacauagg

SEQ ID NO: 53698 - RNA, 21 nt, Artificial Sequence
  Synthetic
cuuugcuuuuaggcagauagg

SEQ ID NO: 53699 - RNA, 22 nt, Artificial Sequence
  Synthetic
ucuuugcuuuuaggcagauagg

SEQ ID NO: 53700 - RNA, 23 nt, Artificial Sequence
  Synthetic
aucuuugcuuuuaggcagauagg

SEQ ID NO: 53701 - RNA, 24 nt, Artificial Sequence
  Synthetic
aaucuuugcuuuuaggcagauagg

SEQ ID NO: 53702 - RNA, 19 nt, Artificial Sequence
  Synthetic
agaauuuuuaucauauagg

SEQ ID NO: 53703 - RNA, 20 nt, Artificial Sequence
  Synthetic
aagaauuuuuaucauauagg

SEQ ID NO: 53704 - RNA, 21 nt, Artificial Sequence
  Synthetic
uaagaauuuuuaucauauagg

SEQ ID NO: 53705 - RNA, 22 nt, Artificial Sequence
  Synthetic
uuaagaauuuuuaucauauagg

SEQ ID NO: 53706 - RNA, 24 nt, Artificial Sequence
  Synthetic
uguuaagaauuuuuaucauauagg

SEQ ID NO: 53707 - RNA, 18 nt, Artificial Sequence
  Synthetic
uaauaacaaugauauagg

SEQ ID NO: 53708 - RNA, 20 nt, Artificial Sequence
  Synthetic
aguaauaacaaugauauagg

SEQ ID NO: 53709 - RNA, 21 nt, Artificial Sequence
  Synthetic
uaguaauaacaaugauauagg

SEQ ID NO: 53710 - RNA, 22 nt, Artificial Sequence
  Synthetic
auaguaauaacaaugauauagg

SEQ ID NO: 53711 - RNA, 24 nt, Artificial Sequence
  Synthetic
cgauaguaauaacaaugauauagg

SEQ ID NO: 53712 - RNA, 18 nt, Artificial Sequence
  Synthetic
ucaugguugugguauagg

SEQ ID NO: 53713 - RNA, 19 nt, Artificial Sequence
  Synthetic
uucaugguugugguauagg

SEQ ID NO: 53714 - RNA, 21 nt, Artificial Sequence
  Synthetic
aguucaugguugugguauagg

SEQ ID NO: 53715 - RNA, 22 nt, Artificial Sequence
  Synthetic
aaguucaugguugugguauagg

SEQ ID NO: 53716 - RNA, 23 nt, Artificial Sequence
  Synthetic
aaaguucaugguugugguauagg

SEQ ID NO: 53717 - RNA, 24 nt, Artificial Sequence
  Synthetic
aaaaguucaugguugugguauagg

SEQ ID NO: 53718 - RNA, 18 nt, Artificial Sequence
  Synthetic
caaaaagcagaaacuagg

SEQ ID NO: 53719 - RNA, 19 nt, Artificial Sequence
  Synthetic
acaaaaagcagaaacuagg

SEQ ID NO: 53720 - RNA, 20 nt, Artificial Sequence
  Synthetic
cacaaaaagcagaaacuagg

SEQ ID NO: 53721 - RNA, 22 nt, Artificial Sequence
  Synthetic
agcacaaaaagcagaaacuagg

SEQ ID NO: 53722 - RNA, 23 nt, Artificial Sequence
  Synthetic
cagcacaaaaagcagaaacuagg

SEQ ID NO: 53723 - RNA, 18 nt, Artificial Sequence
  Synthetic
cacguuagaaucacuagg

SEQ ID NO: 53724 - RNA, 20 nt, Artificial Sequence
  Synthetic
ugcacguuagaaucacuagg

SEQ ID NO: 53725 - RNA, 18 nt, Artificial Sequence
  Synthetic
aacaaaauucguacuagg

SEQ ID NO: 53726 - RNA, 19 nt, Artificial Sequence
  Synthetic
uaacaaaauucguacuagg

SEQ ID NO: 53727 - RNA, 20 nt, Artificial Sequence
  Synthetic
auaacaaaauucguacuagg

SEQ ID NO: 53728 - RNA, 21 nt, Artificial Sequence
  Synthetic
aauaacaaaauucguacuagg

SEQ ID NO: 53729 - RNA, 22 nt, Artificial Sequence
  Synthetic
aaauaacaaaauucguacuagg

SEQ ID NO: 53730 - RNA, 23 nt, Artificial Sequence
  Synthetic
aaaauaacaaaauucguacuagg

SEQ ID NO: 53731 - RNA, 24 nt, Artificial Sequence
  Synthetic
caaaauaacaaaauucguacuagg

SEQ ID NO: 53732 - RNA, 18 nt, Artificial Sequence
  Synthetic
caaggcucacaaccuagg

SEQ ID NO: 53733 - RNA, 19 nt, Artificial Sequence
  Synthetic
acaaggcucacaaccuagg

SEQ ID NO: 53734 - RNA, 20 nt, Artificial Sequence
  Synthetic
aacaaggcucacaaccuagg

SEQ ID NO: 53735 - RNA, 22 nt, Artificial Sequence
  Synthetic
agaacaaggcucacaaccuagg

SEQ ID NO: 53736 - RNA, 24 nt, Artificial Sequence
  Synthetic
ugagaacaaggcucacaaccuagg

SEQ ID NO: 53737 - RNA, 18 nt, Artificial Sequence
  Synthetic
cugaaaauggagccuagg

SEQ ID NO: 53738 - RNA, 19 nt, Artificial Sequence
  Synthetic
ucugaaaauggagccuagg

SEQ ID NO: 53739 - RNA, 20 nt, Artificial Sequence
  Synthetic
aucugaaaauggagccuagg

SEQ ID NO: 53740 - RNA, 21 nt, Artificial Sequence
  Synthetic
uaucugaaaauggagccuagg

SEQ ID NO: 53741 - RNA, 22 nt, Artificial Sequence
  Synthetic
auaucugaaaauggagccuagg

SEQ ID NO: 53742 - RNA, 23 nt, Artificial Sequence
  Synthetic
aauaucugaaaauggagccuagg

SEQ ID NO: 53743 - RNA, 24 nt, Artificial Sequence
  Synthetic
aaauaucugaaaauggagccuagg

SEQ ID NO: 53744 - RNA, 18 nt, Artificial Sequence
  Synthetic
auauaguacccagcuagg

SEQ ID NO: 53745 - RNA, 19 nt, Artificial Sequence
  Synthetic
aauauaguacccagcuagg

SEQ ID NO: 53746 - RNA, 21 nt, Artificial Sequence
  Synthetic
ugaauauaguacccagcuagg

SEQ ID NO: 53747 - RNA, 22 nt, Artificial Sequence
  Synthetic
augaauauaguacccagcuagg

SEQ ID NO: 53748 - RNA, 23 nt, Artificial Sequence
  Synthetic
aaugaauauaguacccagcuagg

SEQ ID NO: 53749 - RNA, 24 nt, Artificial Sequence
  Synthetic
aaaugaauauaguacccagcuagg

SEQ ID NO: 53750 - RNA, 18 nt, Artificial Sequence
  Synthetic
caucgauagcaugcuagg

SEQ ID NO: 53751 - RNA, 20 nt, Artificial Sequence
  Synthetic
agcaucgauagcaugcuagg

SEQ ID NO: 53752 - RNA, 21 nt, Artificial Sequence
  Synthetic
aagcaucgauagcaugcuagg

SEQ ID NO: 53753 - RNA, 23 nt, Artificial Sequence
  Synthetic
ugaagcaucgauagcaugcuagg

SEQ ID NO: 53754 - RNA, 24 nt, Artificial Sequence
  Synthetic
cugaagcaucgauagcaugcuagg

SEQ ID NO: 53755 - RNA, 18 nt, Artificial Sequence
  Synthetic
auuauuauugacucuagg

SEQ ID NO: 53756 - RNA, 19 nt, Artificial Sequence
  Synthetic
cauuauuauugacucuagg

SEQ ID NO: 53757 - RNA, 20 nt, Artificial Sequence
  Synthetic
acauuauuauugacucuagg

SEQ ID NO: 53758 - RNA, 21 nt, Artificial Sequence
  Synthetic
uacauuauuauugacucuagg

SEQ ID NO: 53759 - RNA, 22 nt, Artificial Sequence
  Synthetic
auacauuauuauugacucuagg

SEQ ID NO: 53760 - RNA, 23 nt, Artificial Sequence
  Synthetic
aauacauuauuauugacucuagg

SEQ ID NO: 53761 - RNA, 24 nt, Artificial Sequence
  Synthetic
caauacauuauuauugacucuagg

SEQ ID NO: 53762 - RNA, 18 nt, Artificial Sequence
  Synthetic
cuccagacugcuucuagg

SEQ ID NO: 53763 - RNA, 19 nt, Artificial Sequence
  Synthetic
ucuccagacugcuucuagg

SEQ ID NO: 53764 - RNA, 20 nt, Artificial Sequence
  Synthetic
cucuccagacugcuucuagg

SEQ ID NO: 53765 - RNA, 21 nt, Artificial Sequence
  Synthetic
ccucuccagacugcuucuagg

SEQ ID NO: 53766 - RNA, 23 nt, Artificial Sequence
  Synthetic
ugccucuccagacugcuucuagg

SEQ ID NO: 53767 - RNA, 24 nt, Artificial Sequence
  Synthetic
augccucuccagacugcuucuagg

SEQ ID NO: 53768 - RNA, 19 nt, Artificial Sequence
  Synthetic
cgcuuuggggacaaguagg

SEQ ID NO: 53769 - RNA, 20 nt, Artificial Sequence
  Synthetic
acgcuuuggggacaaguagg

SEQ ID NO: 53770 - RNA, 21 nt, Artificial Sequence
  Synthetic
uacgcuuuggggacaaguagg

SEQ ID NO: 53771 - RNA, 22 nt, Artificial Sequence
  Synthetic
auacgcuuuggggacaaguagg

SEQ ID NO: 53772 - RNA, 23 nt, Artificial Sequence
  Synthetic
aauacgcuuuggggacaaguagg

SEQ ID NO: 53773 - RNA, 24 nt, Artificial Sequence
  Synthetic
aaauacgcuuuggggacaaguagg

SEQ ID NO: 53774 - RNA, 18 nt, Artificial Sequence
  Synthetic
auuuauaaaguaaguagg

SEQ ID NO: 53775 - RNA, 19 nt, Artificial Sequence
  Synthetic
cauuuauaaaguaaguagg

SEQ ID NO: 53776 - RNA, 20 nt, Artificial Sequence
  Synthetic
acauuuauaaaguaaguagg

SEQ ID NO: 53777 - RNA, 21 nt, Artificial Sequence
  Synthetic
aacauuuauaaaguaaguagg

SEQ ID NO: 53778 - RNA, 22 nt, Artificial Sequence
  Synthetic
aaacauuuauaaaguaaguagg

SEQ ID NO: 53779 - RNA, 23 nt, Artificial Sequence
  Synthetic
aaaacauuuauaaaguaaguagg

SEQ ID NO: 53780 - RNA, 24 nt, Artificial Sequence
  Synthetic
uaaaacauuuauaaaguaaguagg

SEQ ID NO: 53781 - RNA, 18 nt, Artificial Sequence
  Synthetic
aagguccagaggaguagg

SEQ ID NO: 53782 - RNA, 21 nt, Artificial Sequence
  Synthetic
uggaagguccagaggaguagg

SEQ ID NO: 53783 - RNA, 22 nt, Artificial Sequence
  Synthetic
auggaagguccagaggaguagg

SEQ ID NO: 53784 - RNA, 23 nt, Artificial Sequence
  Synthetic
uauggaagguccagaggaguagg

SEQ ID NO: 53785 - RNA, 24 nt, Artificial Sequence
  Synthetic
auauggaagguccagaggaguagg

SEQ ID NO: 53786 - RNA, 21 nt, Artificial Sequence
  Synthetic
cggguaucucucuuuaguagg

SEQ ID NO: 53787 - RNA, 22 nt, Artificial Sequence
  Synthetic
ucggguaucucucuuuaguagg

SEQ ID NO: 53788 - RNA, 23 nt, Artificial Sequence
  Synthetic
aucggguaucucucuuuaguagg

SEQ ID NO: 53789 - RNA, 24 nt, Artificial Sequence
  Synthetic
caucggguaucucucuuuaguagg

SEQ ID NO: 53790 - RNA, 18 nt, Artificial Sequence
  Synthetic
uauauauacagccguagg

SEQ ID NO: 53791 - RNA, 20 nt, Artificial Sequence
  Synthetic
uguauauauacagccguagg

SEQ ID NO: 53792 - RNA, 21 nt, Artificial Sequence
  Synthetic
cuguauauauacagccguagg

SEQ ID NO: 53793 - RNA, 22 nt, Artificial Sequence
  Synthetic
ccuguauauauacagccguagg

SEQ ID NO: 53794 - RNA, 24 nt, Artificial Sequence
  Synthetic
ugccuguauauauacagccguagg

SEQ ID NO: 53795 - RNA, 18 nt, Artificial Sequence
  Synthetic
caugcugucuuucguagg

SEQ ID NO: 53796 - RNA, 22 nt, Artificial Sequence
  Synthetic
agggcaugcugucuuucguagg

SEQ ID NO: 53797 - RNA, 23 nt, Artificial Sequence
  Synthetic
aagggcaugcugucuuucguagg

SEQ ID NO: 53798 - RNA, 24 nt, Artificial Sequence
  Synthetic
caagggcaugcugucuuucguagg

SEQ ID NO: 53799 - RNA, 18 nt, Artificial Sequence
  Synthetic
uauagcuuuuuagguagg

SEQ ID NO: 53800 - RNA, 19 nt, Artificial Sequence
  Synthetic
cuauagcuuuuuagguagg

SEQ ID NO: 53801 - RNA, 20 nt, Artificial Sequence
  Synthetic
acuauagcuuuuuagguagg

SEQ ID NO: 53802 - RNA, 21 nt, Artificial Sequence
  Synthetic
aacuauagcuuuuuagguagg

SEQ ID NO: 53803 - RNA, 22 nt, Artificial Sequence
  Synthetic
uaacuauagcuuuuuagguagg

SEQ ID NO: 53804 - RNA, 24 nt, Artificial Sequence
  Synthetic
uguaacuauagcuuuuuagguagg

SEQ ID NO: 53805 - RNA, 18 nt, Artificial Sequence
  Synthetic
acaaguuggacugguagg

SEQ ID NO: 53806 - RNA, 19 nt, Artificial Sequence
  Synthetic
aacaaguuggacugguagg

SEQ ID NO: 53807 - RNA, 20 nt, Artificial Sequence
  Synthetic
caacaaguuggacugguagg

SEQ ID NO: 53808 - RNA, 21 nt, Artificial Sequence
  Synthetic
ucaacaaguuggacugguagg

SEQ ID NO: 53809 - RNA, 22 nt, Artificial Sequence
  Synthetic
uucaacaaguuggacugguagg

SEQ ID NO: 53810 - RNA, 23 nt, Artificial Sequence
  Synthetic
uuucaacaaguuggacugguagg

SEQ ID NO: 53811 - RNA, 24 nt, Artificial Sequence
  Synthetic
uuuucaacaaguuggacugguagg

SEQ ID NO: 53812 - RNA, 18 nt, Artificial Sequence
  Synthetic
auuucccccugugguagg

SEQ ID NO: 53813 - RNA, 19 nt, Artificial Sequence
  Synthetic
uauuucccccugugguagg

SEQ ID NO: 53814 - RNA, 20 nt, Artificial Sequence
  Synthetic
uuauuucccccugugguagg

SEQ ID NO: 53815 - RNA, 21 nt, Artificial Sequence
  Synthetic
uuuauuucccccugugguagg

SEQ ID NO: 53816 - RNA, 22 nt, Artificial Sequence
  Synthetic
uuuuauuucccccugugguagg

SEQ ID NO: 53817 - RNA, 24 nt, Artificial Sequence
  Synthetic
aguuuuauuucccccugugguagg

SEQ ID NO: 53818 - RNA, 18 nt, Artificial Sequence
  Synthetic
uacuucccuaucuguagg

SEQ ID NO: 53819 - RNA, 20 nt, Artificial Sequence
  Synthetic
aguacuucccuaucuguagg

SEQ ID NO: 53820 - RNA, 21 nt, Artificial Sequence
  Synthetic
aaguacuucccuaucuguagg

SEQ ID NO: 53821 - RNA, 22 nt, Artificial Sequence
  Synthetic
aaaguacuucccuaucuguagg

SEQ ID NO: 53822 - RNA, 24 nt, Artificial Sequence
  Synthetic
agaaaguacuucccuaucuguagg

SEQ ID NO: 53823 - RNA, 18 nt, Artificial Sequence
  Synthetic
ccccuguggaauuguagg

SEQ ID NO: 53824 - RNA, 19 nt, Artificial Sequence
  Synthetic
cccccuguggaauuguagg

SEQ ID NO: 53825 - RNA, 20 nt, Artificial Sequence
  Synthetic
ucccccuguggaauuguagg

SEQ ID NO: 53826 - RNA, 21 nt, Artificial Sequence
  Synthetic
uucccccuguggaauuguagg

SEQ ID NO: 53827 - RNA, 22 nt, Artificial Sequence
  Synthetic
uuucccccuguggaauuguagg

SEQ ID NO: 53828 - RNA, 23 nt, Artificial Sequence
  Synthetic
auuucccccuguggaauuguagg

SEQ ID NO: 53829 - RNA, 24 nt, Artificial Sequence
  Synthetic
aauuucccccuguggaauuguagg

SEQ ID NO: 53830 - RNA, 18 nt, Artificial Sequence
  Synthetic
uuaggaugcaaaauuagg

SEQ ID NO: 53831 - RNA, 19 nt, Artificial Sequence
  Synthetic
uuuaggaugcaaaauuagg

SEQ ID NO: 53832 - RNA, 20 nt, Artificial Sequence
  Synthetic
cuuuaggaugcaaaauuagg

SEQ ID NO: 53833 - RNA, 21 nt, Artificial Sequence
  Synthetic
ucuuuaggaugcaaaauuagg

SEQ ID NO: 53834 - RNA, 22 nt, Artificial Sequence
  Synthetic
aucuuuaggaugcaaaauuagg

SEQ ID NO: 53835 - RNA, 23 nt, Artificial Sequence
  Synthetic
uaucuuuaggaugcaaaauuagg

SEQ ID NO: 53836 - RNA, 18 nt, Artificial Sequence
  Synthetic
ugaguuaacugaauuagg

SEQ ID NO: 53837 - RNA, 19 nt, Artificial Sequence
  Synthetic
uugaguuaacugaauuagg

SEQ ID NO: 53838 - RNA, 20 nt, Artificial Sequence
  Synthetic
auugaguuaacugaauuagg

SEQ ID NO: 53839 - RNA, 21 nt, Artificial Sequence
  Synthetic
aauugaguuaacugaauuagg

SEQ ID NO: 53840 - RNA, 22 nt, Artificial Sequence
  Synthetic
uaauugaguuaacugaauuagg

SEQ ID NO: 53841 - RNA, 23 nt, Artificial Sequence
  Synthetic
auaauugaguuaacugaauuagg

SEQ ID NO: 53842 - RNA, 24 nt, Artificial Sequence
  Synthetic
aauaauugaguuaacugaauuagg

SEQ ID NO: 53843 - RNA, 18 nt, Artificial Sequence
  Synthetic
uagauauagaccauuagg

SEQ ID NO: 53844 - RNA, 19 nt, Artificial Sequence
  Synthetic
uuagauauagaccauuagg

SEQ ID NO: 53845 - RNA, 20 nt, Artificial Sequence
  Synthetic
auuagauauagaccauuagg

SEQ ID NO: 53846 - RNA, 22 nt, Artificial Sequence
  Synthetic
ugauuagauauagaccauuagg

SEQ ID NO: 53847 - RNA, 23 nt, Artificial Sequence
  Synthetic
cugauuagauauagaccauuagg

SEQ ID NO: 53848 - RNA, 24 nt, Artificial Sequence
  Synthetic
ccugauuagauauagaccauuagg

SEQ ID NO: 53849 - RNA, 18 nt, Artificial Sequence
  Synthetic
ugccacucacaacuuagg

SEQ ID NO: 53850 - RNA, 20 nt, Artificial Sequence
  Synthetic
ugugccacucacaacuuagg

SEQ ID NO: 53851 - RNA, 21 nt, Artificial Sequence
  Synthetic
cugugccacucacaacuuagg

SEQ ID NO: 53852 - RNA, 22 nt, Artificial Sequence
  Synthetic
ucugugccacucacaacuuagg

SEQ ID NO: 53853 - RNA, 23 nt, Artificial Sequence
  Synthetic
aucugugccacucacaacuuagg

SEQ ID NO: 53854 - RNA, 24 nt, Artificial Sequence
  Synthetic
aaucugugccacucacaacuuagg

SEQ ID NO: 53855 - RNA, 18 nt, Artificial Sequence
  Synthetic
aagagacuuuuccuuagg

SEQ ID NO: 53856 - RNA, 19 nt, Artificial Sequence
  Synthetic
caagagacuuuuccuuagg

SEQ ID NO: 53857 - RNA, 20 nt, Artificial Sequence
  Synthetic
acaagagacuuuuccuuagg

SEQ ID NO: 53858 - RNA, 21 nt, Artificial Sequence
  Synthetic
uacaagagacuuuuccuuagg

SEQ ID NO: 53859 - RNA, 22 nt, Artificial Sequence
  Synthetic
uuacaagagacuuuuccuuagg

SEQ ID NO: 53860 - RNA, 23 nt, Artificial Sequence
  Synthetic
cuuacaagagacuuuuccuuagg

SEQ ID NO: 53861 - RNA, 19 nt, Artificial Sequence
  Synthetic
agccaaaggggaucuuagg

SEQ ID NO: 53862 - RNA, 20 nt, Artificial Sequence
  Synthetic
aagccaaaggggaucuuagg

SEQ ID NO: 53863 - RNA, 21 nt, Artificial Sequence
  Synthetic
aaagccaaaggggaucuuagg

SEQ ID NO: 53864 - RNA, 24 nt, Artificial Sequence
  Synthetic
aggaaagccaaaggggaucuuagg

SEQ ID NO: 53865 - RNA, 18 nt, Artificial Sequence
  Synthetic
cuuuauaguuaaguuagg

SEQ ID NO: 53866 - RNA, 19 nt, Artificial Sequence
  Synthetic
ucuuuauaguuaaguuagg

SEQ ID NO: 53867 - RNA, 21 nt, Artificial Sequence
  Synthetic
agucuuuauaguuaaguuagg

SEQ ID NO: 53868 - RNA, 22 nt, Artificial Sequence
  Synthetic
aagucuuuauaguuaaguuagg

SEQ ID NO: 53869 - RNA, 23 nt, Artificial Sequence
  Synthetic
uaagucuuuauaguuaaguuagg

SEQ ID NO: 53870 - RNA, 24 nt, Artificial Sequence
  Synthetic
cuaagucuuuauaguuaaguuagg

SEQ ID NO: 53871 - RNA, 18 nt, Artificial Sequence
  Synthetic
ugaaacauuccaguuagg

SEQ ID NO: 53872 - RNA, 19 nt, Artificial Sequence
  Synthetic
augaaacauuccaguuagg

SEQ ID NO: 53873 - RNA, 20 nt, Artificial Sequence
  Synthetic
uaugaaacauuccaguuagg

SEQ ID NO: 53874 - RNA, 21 nt, Artificial Sequence
  Synthetic
auaugaaacauuccaguuagg

SEQ ID NO: 53875 - RNA, 22 nt, Artificial Sequence
  Synthetic
uauaugaaacauuccaguuagg

SEQ ID NO: 53876 - RNA, 24 nt, Artificial Sequence
  Synthetic
uguauaugaaacauuccaguuagg

SEQ ID NO: 53877 - RNA, 19 nt, Artificial Sequence
  Synthetic
ugggaaaguaggaguuagg

SEQ ID NO: 53878 - RNA, 20 nt, Artificial Sequence
  Synthetic
cugggaaaguaggaguuagg

SEQ ID NO: 53879 - RNA, 21 nt, Artificial Sequence
  Synthetic
ccugggaaaguaggaguuagg

SEQ ID NO: 53880 - RNA, 23 nt, Artificial Sequence
  Synthetic
ugccugggaaaguaggaguuagg

SEQ ID NO: 53881 - RNA, 18 nt, Artificial Sequence
  Synthetic
aauaaugaauuaguuagg

SEQ ID NO: 53882 - RNA, 19 nt, Artificial Sequence
  Synthetic
aaauaaugaauuaguuagg

SEQ ID NO: 53883 - RNA, 20 nt, Artificial Sequence
  Synthetic
uaaauaaugaauuaguuagg

SEQ ID NO: 53884 - RNA, 21 nt, Artificial Sequence
  Synthetic
uuaaauaaugaauuaguuagg

SEQ ID NO: 53885 - RNA, 22 nt, Artificial Sequence
  Synthetic
uuuaaauaaugaauuaguuagg

SEQ ID NO: 53886 - RNA, 23 nt, Artificial Sequence
  Synthetic
auuuaaauaaugaauuaguuagg

SEQ ID NO: 53887 - RNA, 24 nt, Artificial Sequence
  Synthetic
cauuuaaauaaugaauuaguuagg

SEQ ID NO: 53888 - RNA, 18 nt, Artificial Sequence
  Synthetic
auuugaguauuauuuagg

SEQ ID NO: 53889 - RNA, 19 nt, Artificial Sequence
  Synthetic
uauuugaguauuauuuagg

SEQ ID NO: 53890 - RNA, 20 nt, Artificial Sequence
  Synthetic
uuauuugaguauuauuuagg

SEQ ID NO: 53891 - RNA, 21 nt, Artificial Sequence
  Synthetic
uuuauuugaguauuauuuagg

SEQ ID NO: 53892 - RNA, 22 nt, Artificial Sequence
  Synthetic
uuuuauuugaguauuauuuagg

SEQ ID NO: 53893 - RNA, 23 nt, Artificial Sequence
  Synthetic
uuuuuauuugaguauuauuuagg

SEQ ID NO: 53894 - RNA, 19 nt, Artificial Sequence
  Synthetic
ugacucuaguuacuuuagg

SEQ ID NO: 53895 - RNA, 21 nt, Artificial Sequence
  Synthetic
agugacucuaguuacuuuagg

SEQ ID NO: 53896 - RNA, 22 nt, Artificial Sequence
  Synthetic
aagugacucuaguuacuuuagg

SEQ ID NO: 53897 - RNA, 23 nt, Artificial Sequence
  Synthetic
aaagugacucuaguuacuuuagg

SEQ ID NO: 53898 - RNA, 19 nt, Artificial Sequence
  Synthetic
ugagacccagagcuuuagg

SEQ ID NO: 53899 - RNA, 20 nt, Artificial Sequence
  Synthetic
uugagacccagagcuuuagg

SEQ ID NO: 53900 - RNA, 21 nt, Artificial Sequence
  Synthetic
uuugagacccagagcuuuagg

SEQ ID NO: 53901 - RNA, 23 nt, Artificial Sequence
  Synthetic
aguuugagacccagagcuuuagg

SEQ ID NO: 53902 - RNA, 24 nt, Artificial Sequence
  Synthetic
uaguuugagacccagagcuuuagg

SEQ ID NO: 53903 - RNA, 19 nt, Artificial Sequence
  Synthetic
ugcuauugacuucuuuagg

SEQ ID NO: 53904 - RNA, 20 nt, Artificial Sequence
  Synthetic
augcuauugacuucuuuagg

SEQ ID NO: 53905 - RNA, 21 nt, Artificial Sequence
  Synthetic
aaugcuauugacuucuuuagg

SEQ ID NO: 53906 - RNA, 22 nt, Artificial Sequence
  Synthetic
uaaugcuauugacuucuuuagg

SEQ ID NO: 53907 - RNA, 23 nt, Artificial Sequence
  Synthetic
auaaugcuauugacuucuuuagg

SEQ ID NO: 53908 - RNA, 24 nt, Artificial Sequence
  Synthetic
aauaaugcuauugacuucuuuagg

SEQ ID NO: 53909 - RNA, 18 nt, Artificial Sequence
  Synthetic
uuccuguacauguuuagg

SEQ ID NO: 53910 - RNA, 19 nt, Artificial Sequence
  Synthetic
uuuccuguacauguuuagg

SEQ ID NO: 53911 - RNA, 21 nt, Artificial Sequence
  Synthetic
uguuuccuguacauguuuagg

SEQ ID NO: 53912 - RNA, 22 nt, Artificial Sequence
  Synthetic
cuguuuccuguacauguuuagg

SEQ ID NO: 53913 - RNA, 24 nt, Artificial Sequence
  Synthetic
ugcuguuuccuguacauguuuagg

SEQ ID NO: 53914 - RNA, 19 nt, Artificial Sequence
  Synthetic
agcagguuaagauuuuagg

SEQ ID NO: 53915 - RNA, 20 nt, Artificial Sequence
  Synthetic
uagcagguuaagauuuuagg

SEQ ID NO: 53916 - RNA, 21 nt, Artificial Sequence
  Synthetic
uuagcagguuaagauuuuagg

SEQ ID NO: 53917 - RNA, 23 nt, Artificial Sequence
  Synthetic
aguuagcagguuaagauuuuagg

SEQ ID NO: 53918 - RNA, 18 nt, Artificial Sequence
  Synthetic
caagagagcauaaaacgg

SEQ ID NO: 53919 - RNA, 20 nt, Artificial Sequence
  Synthetic
agcaagagagcauaaaacgg

SEQ ID NO: 53920 - RNA, 21 nt, Artificial Sequence
  Synthetic
aagcaagagagcauaaaacgg

SEQ ID NO: 53921 - RNA, 22 nt, Artificial Sequence
  Synthetic
aaagcaagagagcauaaaacgg

SEQ ID NO: 53922 - RNA, 18 nt, Artificial Sequence
  Synthetic
uaggacugcuuccaacgg

SEQ ID NO: 53923 - RNA, 19 nt, Artificial Sequence
  Synthetic
uuaggacugcuuccaacgg

SEQ ID NO: 53924 - RNA, 20 nt, Artificial Sequence
  Synthetic
uuuaggacugcuuccaacgg

SEQ ID NO: 53925 - RNA, 23 nt, Artificial Sequence
  Synthetic
ugguuuaggacugcuuccaacgg

SEQ ID NO: 53926 - RNA, 24 nt, Artificial Sequence
  Synthetic
uugguuuaggacugcuuccaacgg

SEQ ID NO: 53927 - RNA, 19 nt, Artificial Sequence
  Synthetic
agagggcgcagaagcacgg

SEQ ID NO: 53928 - RNA, 20 nt, Artificial Sequence
  Synthetic
cagagggcgcagaagcacgg

SEQ ID NO: 53929 - RNA, 18 nt, Artificial Sequence
  Synthetic
auagaagccagaagacgg

SEQ ID NO: 53930 - RNA, 20 nt, Artificial Sequence
  Synthetic
ugauagaagccagaagacgg

SEQ ID NO: 53931 - RNA, 21 nt, Artificial Sequence
  Synthetic
augauagaagccagaagacgg

SEQ ID NO: 53932 - RNA, 22 nt, Artificial Sequence
  Synthetic
aaugauagaagccagaagacgg

SEQ ID NO: 53933 - RNA, 23 nt, Artificial Sequence
  Synthetic
caaugauagaagccagaagacgg

SEQ ID NO: 53934 - RNA, 18 nt, Artificial Sequence
  Synthetic
agguuacugaggugacgg

SEQ ID NO: 53935 - RNA, 19 nt, Artificial Sequence
  Synthetic
uagguuacugaggugacgg

SEQ ID NO: 53936 - RNA, 20 nt, Artificial Sequence
  Synthetic
auagguuacugaggugacgg

SEQ ID NO: 53937 - RNA, 21 nt, Artificial Sequence
  Synthetic
cauagguuacugaggugacgg

SEQ ID NO: 53938 - RNA, 22 nt, Artificial Sequence
  Synthetic
acauagguuacugaggugacgg

SEQ ID NO: 53939 - RNA, 24 nt, Artificial Sequence
  Synthetic
agacauagguuacugaggugacgg

SEQ ID NO: 53940 - RNA, 19 nt, Artificial Sequence
  Synthetic
agcaucuaguaauugacgg

SEQ ID NO: 53941 - RNA, 20 nt, Artificial Sequence
  Synthetic
aagcaucuaguaauugacgg

SEQ ID NO: 53942 - RNA, 21 nt, Artificial Sequence
  Synthetic
caagcaucuaguaauugacgg

SEQ ID NO: 53943 - RNA, 22 nt, Artificial Sequence
  Synthetic
acaagcaucuaguaauugacgg

SEQ ID NO: 53944 - RNA, 24 nt, Artificial Sequence
  Synthetic
agacaagcaucuaguaauugacgg

SEQ ID NO: 53945 - RNA, 18 nt, Artificial Sequence
  Synthetic
uucaugcauugaauacgg

SEQ ID NO: 53946 - RNA, 19 nt, Artificial Sequence
  Synthetic
cuucaugcauugaauacgg

SEQ ID NO: 53947 - RNA, 20 nt, Artificial Sequence
  Synthetic
ucuucaugcauugaauacgg

SEQ ID NO: 53948 - RNA, 21 nt, Artificial Sequence
  Synthetic
uucuucaugcauugaauacgg

SEQ ID NO: 53949 - RNA, 22 nt, Artificial Sequence
  Synthetic
uuucuucaugcauugaauacgg

SEQ ID NO: 53950 - RNA, 23 nt, Artificial Sequence
  Synthetic
cuuucuucaugcauugaauacgg

SEQ ID NO: 53951 - RNA, 18 nt, Artificial Sequence
  Synthetic
cuagaauguaaguuacgg

SEQ ID NO: 53952 - RNA, 19 nt, Artificial Sequence
  Synthetic
acuagaauguaaguuacgg

SEQ ID NO: 53953 - RNA, 20 nt, Artificial Sequence
  Synthetic
uacuagaauguaaguuacgg

SEQ ID NO: 53954 - RNA, 21 nt, Artificial Sequence
  Synthetic
cuacuagaauguaaguuacgg

SEQ ID NO: 53955 - RNA, 22 nt, Artificial Sequence
  Synthetic
ccuacuagaauguaaguuacgg

SEQ ID NO: 53956 - RNA, 24 nt, Artificial Sequence
  Synthetic
ugccuacuagaauguaaguuacgg

SEQ ID NO: 53957 - RNA, 21 nt, Artificial Sequence
  Synthetic
uuguaaacuguauagaaccgg

SEQ ID NO: 53958 - RNA, 22 nt, Artificial Sequence
  Synthetic
cuuguaaacuguauagaaccgg

SEQ ID NO: 53959 - RNA, 23 nt, Artificial Sequence
  Synthetic
ucuuguaaacuguauagaaccgg

SEQ ID NO: 53960 - RNA, 19 nt, Artificial Sequence
  Synthetic
ugaucauauuuagccccgg

SEQ ID NO: 53961 - RNA, 21 nt, Artificial Sequence
  Synthetic
agugaucauauuuagccccgg

SEQ ID NO: 53962 - RNA, 22 nt, Artificial Sequence
  Synthetic
aagugaucauauuuagccccgg

SEQ ID NO: 53963 - RNA, 24 nt, Artificial Sequence
  Synthetic
ugaagugaucauauuuagccccgg

SEQ ID NO: 53964 - RNA, 18 nt, Artificial Sequence
  Synthetic
uaugggugcaacucccgg

SEQ ID NO: 53965 - RNA, 19 nt, Artificial Sequence
  Synthetic
uuaugggugcaacucccgg

SEQ ID NO: 53966 - RNA, 20 nt, Artificial Sequence
  Synthetic
cuuaugggugcaacucccgg

SEQ ID NO: 53967 - RNA, 21 nt, Artificial Sequence
  Synthetic
ccuuaugggugcaacucccgg

SEQ ID NO: 53968 - RNA, 23 nt, Artificial Sequence
  Synthetic
ugccuuaugggugcaacucccgg

SEQ ID NO: 53969 - RNA, 24 nt, Artificial Sequence
  Synthetic
cugccuuaugggugcaacucccgg

SEQ ID NO: 53970 - RNA, 18 nt, Artificial Sequence
  Synthetic
uuagaacugaauucccgg

SEQ ID NO: 53971 - RNA, 19 nt, Artificial Sequence
  Synthetic
uuuagaacugaauucccgg

SEQ ID NO: 53972 - RNA, 20 nt, Artificial Sequence
  Synthetic
cuuuagaacugaauucccgg

SEQ ID NO: 53973 - RNA, 21 nt, Artificial Sequence
  Synthetic
ccuuuagaacugaauucccgg

SEQ ID NO: 53974 - RNA, 22 nt, Artificial Sequence
  Synthetic
uccuuuagaacugaauucccgg

SEQ ID NO: 53975 - RNA, 23 nt, Artificial Sequence
  Synthetic
auccuuuagaacugaauucccgg

SEQ ID NO: 53976 - RNA, 18 nt, Artificial Sequence
  Synthetic
ugcugcucaggccagcgg

SEQ ID NO: 53977 - RNA, 19 nt, Artificial Sequence
  Synthetic
cugcugcucaggccagcgg

SEQ ID NO: 53978 - RNA, 20 nt, Artificial Sequence
  Synthetic
ccugcugcucaggccagcgg

SEQ ID NO: 53979 - RNA, 21 nt, Artificial Sequence
  Synthetic
accugcugcucaggccagcgg

SEQ ID NO: 53980 - RNA, 22 nt, Artificial Sequence
  Synthetic
caccugcugcucaggccagcgg

SEQ ID NO: 53981 - RNA, 24 nt, Artificial Sequence
  Synthetic
agcaccugcugcucaggccagcgg

SEQ ID NO: 53982 - RNA, 18 nt, Artificial Sequence
  Synthetic
aauccaaacuccuugcgg

SEQ ID NO: 53983 - RNA, 19 nt, Artificial Sequence
  Synthetic
caauccaaacuccuugcgg

SEQ ID NO: 53984 - RNA, 20 nt, Artificial Sequence
  Synthetic
ccaauccaaacuccuugcgg

SEQ ID NO: 53985 - RNA, 21 nt, Artificial Sequence
  Synthetic
uccaauccaaacuccuugcgg

SEQ ID NO: 53986 - RNA, 22 nt, Artificial Sequence
  Synthetic
uuccaauccaaacuccuugcgg

SEQ ID NO: 53987 - RNA, 23 nt, Artificial Sequence
  Synthetic
auuccaauccaaacuccuugcgg

SEQ ID NO: 53988 - RNA, 24 nt, Artificial Sequence
  Synthetic
aauuccaauccaaacuccuugcgg

SEQ ID NO: 53989 - RNA, 18 nt, Artificial Sequence
  Synthetic
aggaaauaaaaguaucgg

SEQ ID NO: 53990 - RNA, 19 nt, Artificial Sequence
  Synthetic
uaggaaauaaaaguaucgg

SEQ ID NO: 53991 - RNA, 20 nt, Artificial Sequence
  Synthetic
cuaggaaauaaaaguaucgg

SEQ ID NO: 53992 - RNA, 21 nt, Artificial Sequence
  Synthetic
ccuaggaaauaaaaguaucgg

SEQ ID NO: 53993 - RNA, 22 nt, Artificial Sequence
  Synthetic
cccuaggaaauaaaaguaucgg

SEQ ID NO: 53994 - RNA, 23 nt, Artificial Sequence
  Synthetic
acccuaggaaauaaaaguaucgg

SEQ ID NO: 53995 - RNA, 24 nt, Artificial Sequence
  Synthetic
cacccuaggaaauaaaaguaucgg

SEQ ID NO: 53996 - RNA, 19 nt, Artificial Sequence
  Synthetic
aguuuucauugauuuucgg

SEQ ID NO: 53997 - RNA, 20 nt, Artificial Sequence
  Synthetic
caguuuucauugauuuucgg

SEQ ID NO: 53998 - RNA, 21 nt, Artificial Sequence
  Synthetic
ucaguuuucauugauuuucgg

SEQ ID NO: 53999 - RNA, 22 nt, Artificial Sequence
  Synthetic
uucaguuuucauugauuuucgg

SEQ ID NO: 54000 - RNA, 23 nt, Artificial Sequence
  Synthetic
auucaguuuucauugauuuucgg

SEQ ID NO: 54001 - RNA, 24 nt, Artificial Sequence
  Synthetic
aauucaguuuucauugauuuucgg

SEQ ID NO: 54002 - RNA, 18 nt, Artificial Sequence
  Synthetic
uuuucuucugcaaaaggg

SEQ ID NO: 54003 - RNA, 19 nt, Artificial Sequence
  Synthetic
auuuucuucugcaaaaggg

SEQ ID NO: 54004 - RNA, 20 nt, Artificial Sequence
  Synthetic
cauuuucuucugcaaaaggg

SEQ ID NO: 54005 - RNA, 21 nt, Artificial Sequence
  Synthetic
ccauuuucuucugcaaaaggg

SEQ ID NO: 54006 - RNA, 24 nt, Artificial Sequence
  Synthetic
uggccauuuucuucugcaaaaggg

SEQ ID NO: 54007 - RNA, 18 nt, Artificial Sequence
  Synthetic
cuucggccgucaaaaggg

SEQ ID NO: 54008 - RNA, 19 nt, Artificial Sequence
  Synthetic
ccuucggccgucaaaaggg

SEQ ID NO: 54009 - RNA, 20 nt, Artificial Sequence
  Synthetic
cccuucggccgucaaaaggg

SEQ ID NO: 54010 - RNA, 21 nt, Artificial Sequence
  Synthetic
ccccuucggccgucaaaaggg

SEQ ID NO: 54011 - RNA, 22 nt, Artificial Sequence
  Synthetic
uccccuucggccgucaaaaggg

SEQ ID NO: 54012 - RNA, 24 nt, Artificial Sequence
  Synthetic
cguccccuucggccgucaaaaggg

SEQ ID NO: 54013 - RNA, 21 nt, Artificial Sequence
  Synthetic
uaaguacuauaaagaaaaggg

SEQ ID NO: 54014 - RNA, 22 nt, Artificial Sequence
  Synthetic
auaaguacuauaaagaaaaggg

SEQ ID NO: 54015 - RNA, 23 nt, Artificial Sequence
  Synthetic
aauaaguacuauaaagaaaaggg

SEQ ID NO: 54016 - RNA, 24 nt, Artificial Sequence
  Synthetic
uaauaaguacuauaaagaaaaggg

SEQ ID NO: 54017 - RNA, 21 nt, Artificial Sequence
  Synthetic
aaauagacacugaagaaaggg

SEQ ID NO: 54018 - RNA, 22 nt, Artificial Sequence
  Synthetic
aaaauagacacugaagaaaggg

SEQ ID NO: 54019 - RNA, 24 nt, Artificial Sequence
  Synthetic
agaaaauagacacugaagaaaggg

SEQ ID NO: 54020 - RNA, 18 nt, Artificial Sequence
  Synthetic
cucccuuauaagaaaggg

SEQ ID NO: 54021 - RNA, 19 nt, Artificial Sequence
  Synthetic
ccucccuuauaagaaaggg

SEQ ID NO: 54022 - RNA, 20 nt, Artificial Sequence
  Synthetic
cccucccuuauaagaaaggg

SEQ ID NO: 54023 - RNA, 21 nt, Artificial Sequence
  Synthetic
ucccucccuuauaagaaaggg

SEQ ID NO: 54024 - RNA, 22 nt, Artificial Sequence
  Synthetic
cucccucccuuauaagaaaggg

SEQ ID NO: 54025 - RNA, 23 nt, Artificial Sequence
  Synthetic
ucucccucccuuauaagaaaggg

SEQ ID NO: 54026 - RNA, 24 nt, Artificial Sequence
  Synthetic
uucucccucccuuauaagaaaggg

SEQ ID NO: 54027 - RNA, 18 nt, Artificial Sequence
  Synthetic
caccgcauagcuaaaggg

SEQ ID NO: 54028 - RNA, 19 nt, Artificial Sequence
  Synthetic
ucaccgcauagcuaaaggg

SEQ ID NO: 54029 - RNA, 20 nt, Artificial Sequence
  Synthetic
aucaccgcauagcuaaaggg

SEQ ID NO: 54030 - RNA, 22 nt, Artificial Sequence
  Synthetic
agaucaccgcauagcuaaaggg

SEQ ID NO: 54031 - RNA, 23 nt, Artificial Sequence
  Synthetic
uagaucaccgcauagcuaaaggg

SEQ ID NO: 54032 - RNA, 24 nt, Artificial Sequence
  Synthetic
auagaucaccgcauagcuaaaggg

SEQ ID NO: 54033 - RNA, 18 nt, Artificial Sequence
  Synthetic
cuguggggaacacaaggg

SEQ ID NO: 54034 - RNA, 20 nt, Artificial Sequence
  Synthetic
ugcuguggggaacacaaggg

SEQ ID NO: 54035 - RNA, 22 nt, Artificial Sequence
  Synthetic
ugugcuguggggaacacaaggg

SEQ ID NO: 54036 - RNA, 23 nt, Artificial Sequence
  Synthetic
uugugcuguggggaacacaaggg

SEQ ID NO: 54037 - RNA, 24 nt, Artificial Sequence
  Synthetic
auugugcuguggggaacacaaggg

SEQ ID NO: 54038 - RNA, 18 nt, Artificial Sequence
  Synthetic
uacagggccauagaaggg

SEQ ID NO: 54039 - RNA, 19 nt, Artificial Sequence
  Synthetic
auacagggccauagaaggg

SEQ ID NO: 54040 - RNA, 20 nt, Artificial Sequence
  Synthetic
uauacagggccauagaaggg

SEQ ID NO: 54041 - RNA, 23 nt, Artificial Sequence
  Synthetic
ugguauacagggccauagaaggg

SEQ ID NO: 54042 - RNA, 24 nt, Artificial Sequence
  Synthetic
cugguauacagggccauagaaggg

SEQ ID NO: 54043 - RNA, 18 nt, Artificial Sequence
  Synthetic
uaaguguucauagaaggg

SEQ ID NO: 54044 - RNA, 19 nt, Artificial Sequence
  Synthetic
auaaguguucauagaaggg

SEQ ID NO: 54045 - RNA, 20 nt, Artificial Sequence
  Synthetic
aauaaguguucauagaaggg

SEQ ID NO: 54046 - RNA, 22 nt, Artificial Sequence
  Synthetic
agaauaaguguucauagaaggg

SEQ ID NO: 54047 - RNA, 23 nt, Artificial Sequence
  Synthetic
cagaauaaguguucauagaaggg

SEQ ID NO: 54048 - RNA, 24 nt, Artificial Sequence
  Synthetic
ccagaauaaguguucauagaaggg

SEQ ID NO: 54049 - RNA, 21 nt, Artificial Sequence
  Synthetic
uggaugugugugugggaaggg

SEQ ID NO: 54050 - RNA, 22 nt, Artificial Sequence
  Synthetic
uuggaugugugugugggaaggg

SEQ ID NO: 54051 - RNA, 24 nt, Artificial Sequence
  Synthetic
uguuggaugugugugugggaaggg

SEQ ID NO: 54052 - RNA, 18 nt, Artificial Sequence
  Synthetic
cuuuguuucauugaaggg

SEQ ID NO: 54053 - RNA, 19 nt, Artificial Sequence
  Synthetic
ucuuuguuucauugaaggg

SEQ ID NO: 54054 - RNA, 22 nt, Artificial Sequence
  Synthetic
uggucuuuguuucauugaaggg

SEQ ID NO: 54055 - RNA, 23 nt, Artificial Sequence
  Synthetic
auggucuuuguuucauugaaggg

SEQ ID NO: 54056 - RNA, 18 nt, Artificial Sequence
  Synthetic
uuagugugguaauaaggg

SEQ ID NO: 54057 - RNA, 19 nt, Artificial Sequence
  Synthetic
uuuagugugguaauaaggg

SEQ ID NO: 54058 - RNA, 20 nt, Artificial Sequence
  Synthetic
uuuuagugugguaauaaggg

SEQ ID NO: 54059 - RNA, 23 nt, Artificial Sequence
  Synthetic
ugguuuuagugugguaauaaggg

SEQ ID NO: 54060 - RNA, 24 nt, Artificial Sequence
  Synthetic
augguuuuagugugguaauaaggg

SEQ ID NO: 54061 - RNA, 18 nt, Artificial Sequence
  Synthetic
uacuuugaaauuuaaggg

SEQ ID NO: 54062 - RNA, 19 nt, Artificial Sequence
  Synthetic
uuacuuugaaauuuaaggg

SEQ ID NO: 54063 - RNA, 20 nt, Artificial Sequence
  Synthetic
uuuacuuugaaauuuaaggg

SEQ ID NO: 54064 - RNA, 21 nt, Artificial Sequence
  Synthetic
uuuuacuuugaaauuuaaggg

SEQ ID NO: 54065 - RNA, 22 nt, Artificial Sequence
  Synthetic
auuuuacuuugaaauuuaaggg

SEQ ID NO: 54066 - RNA, 24 nt, Artificial Sequence
  Synthetic
agauuuuacuuugaaauuuaaggg

SEQ ID NO: 54067 - RNA, 18 nt, Artificial Sequence
  Synthetic
cuaagauugucuacaggg

SEQ ID NO: 54068 - RNA, 21 nt, Artificial Sequence
  Synthetic
uggcuaagauugucuacaggg

SEQ ID NO: 54069 - RNA, 22 nt, Artificial Sequence
  Synthetic
auggcuaagauugucuacaggg

SEQ ID NO: 54070 - RNA, 23 nt, Artificial Sequence
  Synthetic
aauggcuaagauugucuacaggg

SEQ ID NO: 54071 - RNA, 24 nt, Artificial Sequence
  Synthetic
aaauggcuaagauugucuacaggg

SEQ ID NO: 54072 - RNA, 21 nt, Artificial Sequence
  Synthetic
caugguugccagggaccaggg

SEQ ID NO: 54073 - RNA, 23 nt, Artificial Sequence
  Synthetic
ugcaugguugccagggaccaggg

SEQ ID NO: 54074 - RNA, 24 nt, Artificial Sequence
  Synthetic
uugcaugguugccagggaccaggg

SEQ ID NO: 54075 - RNA, 18 nt, Artificial Sequence
  Synthetic
aaagaauuuuuuccaggg

SEQ ID NO: 54076 - RNA, 19 nt, Artificial Sequence
  Synthetic
caaagaauuuuuuccaggg

SEQ ID NO: 54077 - RNA, 20 nt, Artificial Sequence
  Synthetic
ucaaagaauuuuuuccaggg

SEQ ID NO: 54078 - RNA, 21 nt, Artificial Sequence
  Synthetic
cucaaagaauuuuuuccaggg

SEQ ID NO: 54079 - RNA, 22 nt, Artificial Sequence
  Synthetic
ucucaaagaauuuuuuccaggg

SEQ ID NO: 54080 - RNA, 23 nt, Artificial Sequence
  Synthetic
aucucaaagaauuuuuuccaggg

SEQ ID NO: 54081 - RNA, 24 nt, Artificial Sequence
  Synthetic
aaucucaaagaauuuuuuccaggg

SEQ ID NO: 54082 - RNA, 21 nt, Artificial Sequence
  Synthetic
aaaugaagaaugaaagcaggg

SEQ ID NO: 54083 - RNA, 22 nt, Artificial Sequence
  Synthetic
aaaaugaagaaugaaagcaggg

SEQ ID NO: 54084 - RNA, 23 nt, Artificial Sequence
  Synthetic
caaaaugaagaaugaaagcaggg

SEQ ID NO: 54085 - RNA, 24 nt, Artificial Sequence
  Synthetic
ccaaaaugaagaaugaaagcaggg

SEQ ID NO: 54086 - RNA, 20 nt, Artificial Sequence
  Synthetic
ugggaaacuacugggcaggg

SEQ ID NO: 54087 - RNA, 21 nt, Artificial Sequence
  Synthetic
cugggaaacuacugggcaggg

SEQ ID NO: 54088 - RNA, 22 nt, Artificial Sequence
  Synthetic
acugggaaacuacugggcaggg

SEQ ID NO: 54089 - RNA, 23 nt, Artificial Sequence
  Synthetic
uacugggaaacuacugggcaggg

SEQ ID NO: 54090 - RNA, 18 nt, Artificial Sequence
  Synthetic
uucaaaaaccuaucaggg

SEQ ID NO: 54091 - RNA, 19 nt, Artificial Sequence
  Synthetic
uuucaaaaaccuaucaggg

SEQ ID NO: 54092 - RNA, 20 nt, Artificial Sequence
  Synthetic
auuucaaaaaccuaucaggg

SEQ ID NO: 54093 - RNA, 21 nt, Artificial Sequence
  Synthetic
cauuucaaaaaccuaucaggg

SEQ ID NO: 54094 - RNA, 22 nt, Artificial Sequence
  Synthetic
ccauuucaaaaaccuaucaggg

SEQ ID NO: 54095 - RNA, 23 nt, Artificial Sequence
  Synthetic
uccauuucaaaaaccuaucaggg

SEQ ID NO: 54096 - RNA, 24 nt, Artificial Sequence
  Synthetic
cuccauuucaaaaaccuaucaggg

SEQ ID NO: 54097 - RNA, 21 nt, Artificial Sequence
  Synthetic
uaaaagagaauagacagaggg

SEQ ID NO: 54098 - RNA, 22 nt, Artificial Sequence
  Synthetic
uuaaaagagaauagacagaggg

SEQ ID NO: 54099 - RNA, 23 nt, Artificial Sequence
  Synthetic
uuuaaaagagaauagacagaggg

SEQ ID NO: 54100 - RNA, 24 nt, Artificial Sequence
  Synthetic
auuuaaaagagaauagacagaggg

SEQ ID NO: 54101 - RNA, 22 nt, Artificial Sequence
  Synthetic
ugggggauuggggggcagaggg

SEQ ID NO: 54102 - RNA, 23 nt, Artificial Sequence
  Synthetic
uugggggauuggggggcagaggg

SEQ ID NO: 54103 - RNA, 18 nt, Artificial Sequence
  Synthetic
aacacagaugagagaggg

SEQ ID NO: 54104 - RNA, 19 nt, Artificial Sequence
  Synthetic
caacacagaugagagaggg

SEQ ID NO: 54105 - RNA, 23 nt, Artificial Sequence
  Synthetic
agggcaacacagaugagagaggg

SEQ ID NO: 54106 - RNA, 24 nt, Artificial Sequence
  Synthetic
cagggcaacacagaugagagaggg

SEQ ID NO: 54107 - RNA, 18 nt, Artificial Sequence
  Synthetic
uuaugcaccuugagaggg

SEQ ID NO: 54108 - RNA, 20 nt, Artificial Sequence
  Synthetic
aguuaugcaccuugagaggg

SEQ ID NO: 54109 - RNA, 21 nt, Artificial Sequence
  Synthetic
aaguuaugcaccuugagaggg

SEQ ID NO: 54110 - RNA, 22 nt, Artificial Sequence
  Synthetic
uaaguuaugcaccuugagaggg

SEQ ID NO: 54111 - RNA, 23 nt, Artificial Sequence
  Synthetic
uuaaguuaugcaccuugagaggg

SEQ ID NO: 54112 - RNA, 24 nt, Artificial Sequence
  Synthetic
auuaaguuaugcaccuugagaggg

SEQ ID NO: 54113 - RNA, 19 nt, Artificial Sequence
  Synthetic
ugcauaaacuuugagaggg

SEQ ID NO: 54114 - RNA, 20 nt, Artificial Sequence
  Synthetic
cugcauaaacuuugagaggg

SEQ ID NO: 54115 - RNA, 21 nt, Artificial Sequence
  Synthetic
ccugcauaaacuuugagaggg

SEQ ID NO: 54116 - RNA, 22 nt, Artificial Sequence
  Synthetic
accugcauaaacuuugagaggg

SEQ ID NO: 54117 - RNA, 23 nt, Artificial Sequence
  Synthetic
caccugcauaaacuuugagaggg

SEQ ID NO: 54118 - RNA, 24 nt, Artificial Sequence
  Synthetic
ucaccugcauaaacuuugagaggg

SEQ ID NO: 54119 - RNA, 18 nt, Artificial Sequence
  Synthetic
cucaggccagcgggaggg

SEQ ID NO: 54120 - RNA, 20 nt, Artificial Sequence
  Synthetic
ugcucaggccagcgggaggg

SEQ ID NO: 54121 - RNA, 21 nt, Artificial Sequence
  Synthetic
cugcucaggccagcgggaggg

SEQ ID NO: 54122 - RNA, 23 nt, Artificial Sequence
  Synthetic
ugcugcucaggccagcgggaggg

SEQ ID NO: 54123 - RNA, 24 nt, Artificial Sequence
  Synthetic
cugcugcucaggccagcgggaggg

SEQ ID NO: 54124 - RNA, 19 nt, Artificial Sequence
  Synthetic
cgaagauauauuuggaggg

SEQ ID NO: 54125 - RNA, 20 nt, Artificial Sequence
  Synthetic
ucgaagauauauuuggaggg

SEQ ID NO: 54126 - RNA, 21 nt, Artificial Sequence
  Synthetic
aucgaagauauauuuggaggg

SEQ ID NO: 54127 - RNA, 23 nt, Artificial Sequence
  Synthetic
ugaucgaagauauauuuggaggg

SEQ ID NO: 54128 - RNA, 24 nt, Artificial Sequence
  Synthetic
uugaucgaagauauauuuggaggg

SEQ ID NO: 54129 - RNA, 19 nt, Artificial Sequence
  Synthetic
agaucaugcagaaugaggg

SEQ ID NO: 54130 - RNA, 20 nt, Artificial Sequence
  Synthetic
aagaucaugcagaaugaggg

SEQ ID NO: 54131 - RNA, 21 nt, Artificial Sequence
  Synthetic
uaagaucaugcagaaugaggg

SEQ ID NO: 54132 - RNA, 22 nt, Artificial Sequence
  Synthetic
cuaagaucaugcagaaugaggg

SEQ ID NO: 54133 - RNA, 23 nt, Artificial Sequence
  Synthetic
ccuaagaucaugcagaaugaggg

SEQ ID NO: 54134 - RNA, 24 nt, Artificial Sequence
  Synthetic
cccuaagaucaugcagaaugaggg

SEQ ID NO: 54135 - RNA, 18 nt, Artificial Sequence
  Synthetic
uuagaaauuugcugaggg

SEQ ID NO: 54136 - RNA, 19 nt, Artificial Sequence
  Synthetic
auuagaaauuugcugaggg

SEQ ID NO: 54137 - RNA, 20 nt, Artificial Sequence
  Synthetic
aauuagaaauuugcugaggg

SEQ ID NO: 54138 - RNA, 21 nt, Artificial Sequence
  Synthetic
caauuagaaauuugcugaggg

SEQ ID NO: 54139 - RNA, 22 nt, Artificial Sequence
  Synthetic
acaauuagaaauuugcugaggg

SEQ ID NO: 54140 - RNA, 23 nt, Artificial Sequence
  Synthetic
uacaauuagaaauuugcugaggg

SEQ ID NO: 54141 - RNA, 18 nt, Artificial Sequence
  Synthetic
auagcuguuaugugaggg

SEQ ID NO: 54142 - RNA, 20 nt, Artificial Sequence
  Synthetic
ugauagcuguuaugugaggg

SEQ ID NO: 54143 - RNA, 21 nt, Artificial Sequence
  Synthetic
cugauagcuguuaugugaggg

SEQ ID NO: 54144 - RNA, 22 nt, Artificial Sequence
  Synthetic
ccugauagcuguuaugugaggg

SEQ ID NO: 54145 - RNA, 23 nt, Artificial Sequence
  Synthetic
uccugauagcuguuaugugaggg

SEQ ID NO: 54146 - RNA, 24 nt, Artificial Sequence
  Synthetic
auccugauagcuguuaugugaggg

SEQ ID NO: 54147 - RNA, 21 nt, Artificial Sequence
  Synthetic
auauuuuauauacacauaggg

SEQ ID NO: 54148 - RNA, 22 nt, Artificial Sequence
  Synthetic
aauauuuuauauacacauaggg

SEQ ID NO: 54149 - RNA, 24 nt, Artificial Sequence
  Synthetic
ugaauauuuuauauacacauaggg

SEQ ID NO: 54150 - RNA, 18 nt, Artificial Sequence
  Synthetic
aggugguucagacuaggg

SEQ ID NO: 54151 - RNA, 20 nt, Artificial Sequence
  Synthetic
agaggugguucagacuaggg

SEQ ID NO: 54152 - RNA, 21 nt, Artificial Sequence
  Synthetic
cagaggugguucagacuaggg

SEQ ID NO: 54153 - RNA, 22 nt, Artificial Sequence
  Synthetic
ucagaggugguucagacuaggg

SEQ ID NO: 54154 - RNA, 23 nt, Artificial Sequence
  Synthetic
aucagaggugguucagacuaggg

SEQ ID NO: 54155 - RNA, 24 nt, Artificial Sequence
  Synthetic
caucagaggugguucagacuaggg

SEQ ID NO: 54156 - RNA, 19 nt, Artificial Sequence
  Synthetic
aggauguagaauacuaggg

SEQ ID NO: 54157 - RNA, 20 nt, Artificial Sequence
  Synthetic
uaggauguagaauacuaggg

SEQ ID NO: 54158 - RNA, 21 nt, Artificial Sequence
  Synthetic
cuaggauguagaauacuaggg

SEQ ID NO: 54159 - RNA, 22 nt, Artificial Sequence
  Synthetic
acuaggauguagaauacuaggg

SEQ ID NO: 54160 - RNA, 23 nt, Artificial Sequence
  Synthetic
uacuaggauguagaauacuaggg

SEQ ID NO: 54161 - RNA, 24 nt, Artificial Sequence
  Synthetic
auacuaggauguagaauacuaggg

SEQ ID NO: 54162 - RNA, 18 nt, Artificial Sequence
  Synthetic
cuaggcaaacaaguaggg

SEQ ID NO: 54163 - RNA, 19 nt, Artificial Sequence
  Synthetic
ccuaggcaaacaaguaggg

SEQ ID NO: 54164 - RNA, 20 nt, Artificial Sequence
  Synthetic
accuaggcaaacaaguaggg

SEQ ID NO: 54165 - RNA, 21 nt, Artificial Sequence
  Synthetic
uaccuaggcaaacaaguaggg

SEQ ID NO: 54166 - RNA, 23 nt, Artificial Sequence
  Synthetic
uguaccuaggcaaacaaguaggg

SEQ ID NO: 54167 - RNA, 18 nt, Artificial Sequence
  Synthetic
caugauugcuaauuaggg

SEQ ID NO: 54168 - RNA, 19 nt, Artificial Sequence
  Synthetic
ccaugauugcuaauuaggg

SEQ ID NO: 54169 - RNA, 20 nt, Artificial Sequence
  Synthetic
cccaugauugcuaauuaggg

SEQ ID NO: 54170 - RNA, 21 nt, Artificial Sequence
  Synthetic
acccaugauugcuaauuaggg

SEQ ID NO: 54171 - RNA, 22 nt, Artificial Sequence
  Synthetic
cacccaugauugcuaauuaggg

SEQ ID NO: 54172 - RNA, 23 nt, Artificial Sequence
  Synthetic
ccacccaugauugcuaauuaggg

SEQ ID NO: 54173 - RNA, 24 nt, Artificial Sequence
  Synthetic
uccacccaugauugcuaauuaggg

SEQ ID NO: 54174 - RNA, 18 nt, Artificial Sequence
  Synthetic
cucagaaucccauuaggg

SEQ ID NO: 54175 - RNA, 19 nt, Artificial Sequence
  Synthetic
ucucagaaucccauuaggg

SEQ ID NO: 54176 - RNA, 20 nt, Artificial Sequence
  Synthetic
cucucagaaucccauuaggg

SEQ ID NO: 54177 - RNA, 21 nt, Artificial Sequence
  Synthetic
ucucucagaaucccauuaggg

SEQ ID NO: 54178 - RNA, 22 nt, Artificial Sequence
  Synthetic
aucucucagaaucccauuaggg

SEQ ID NO: 54179 - RNA, 23 nt, Artificial Sequence
  Synthetic
caucucucagaaucccauuaggg

SEQ ID NO: 54180 - RNA, 24 nt, Artificial Sequence
  Synthetic
ccaucucucagaaucccauuaggg

SEQ ID NO: 54181 - RNA, 18 nt, Artificial Sequence
  Synthetic
aucaggcugauguuaggg

SEQ ID NO: 54182 - RNA, 22 nt, Artificial Sequence
  Synthetic
ugggaucaggcugauguuaggg

SEQ ID NO: 54183 - RNA, 24 nt, Artificial Sequence
  Synthetic
agugggaucaggcugauguuaggg

SEQ ID NO: 54184 - RNA, 18 nt, Artificial Sequence
  Synthetic
acaaagcuagguuuaggg

SEQ ID NO: 54185 - RNA, 19 nt, Artificial Sequence
  Synthetic
uacaaagcuagguuuaggg

SEQ ID NO: 54186 - RNA, 20 nt, Artificial Sequence
  Synthetic
auacaaagcuagguuuaggg

SEQ ID NO: 54187 - RNA, 21 nt, Artificial Sequence
  Synthetic
aauacaaagcuagguuuaggg

SEQ ID NO: 54188 - RNA, 22 nt, Artificial Sequence
  Synthetic
uaauacaaagcuagguuuaggg

SEQ ID NO: 54189 - RNA, 23 nt, Artificial Sequence
  Synthetic
auaauacaaagcuagguuuaggg

SEQ ID NO: 54190 - RNA, 24 nt, Artificial Sequence
  Synthetic
aauaauacaaagcuagguuuaggg

SEQ ID NO: 54191 - RNA, 18 nt, Artificial Sequence
  Synthetic
auuauauaagaaaacggg

SEQ ID NO: 54192 - RNA, 19 nt, Artificial Sequence
  Synthetic
uauuauauaagaaaacggg

SEQ ID NO: 54193 - RNA, 20 nt, Artificial Sequence
  Synthetic
cuauuauauaagaaaacggg

SEQ ID NO: 54194 - RNA, 22 nt, Artificial Sequence
  Synthetic
cgcuauuauauaagaaaacggg

SEQ ID NO: 54195 - RNA, 23 nt, Artificial Sequence
  Synthetic
acgcuauuauauaagaaaacggg

SEQ ID NO: 54196 - RNA, 24 nt, Artificial Sequence
  Synthetic
aacgcuauuauauaagaaaacggg

SEQ ID NO: 54197 - RNA, 18 nt, Artificial Sequence
  Synthetic
aggggcauaagaaacggg

SEQ ID NO: 54198 - RNA, 19 nt, Artificial Sequence
  Synthetic
uaggggcauaagaaacggg

SEQ ID NO: 54199 - RNA, 20 nt, Artificial Sequence
  Synthetic
auaggggcauaagaaacggg

SEQ ID NO: 54200 - RNA, 22 nt, Artificial Sequence
  Synthetic
agauaggggcauaagaaacggg

SEQ ID NO: 54201 - RNA, 23 nt, Artificial Sequence
  Synthetic
aagauaggggcauaagaaacggg

SEQ ID NO: 54202 - RNA, 24 nt, Artificial Sequence
  Synthetic
caagauaggggcauaagaaacggg

SEQ ID NO: 54203 - RNA, 19 nt, Artificial Sequence
  Synthetic
aguaucaaggacagacggg

SEQ ID NO: 54204 - RNA, 21 nt, Artificial Sequence
  Synthetic
agaguaucaaggacagacggg

SEQ ID NO: 54205 - RNA, 22 nt, Artificial Sequence
  Synthetic
aagaguaucaaggacagacggg

SEQ ID NO: 54206 - RNA, 23 nt, Artificial Sequence
  Synthetic
caagaguaucaaggacagacggg

SEQ ID NO: 54207 - RNA, 24 nt, Artificial Sequence
  Synthetic
acaagaguaucaaggacagacggg

SEQ ID NO: 54208 - RNA, 18 nt, Artificial Sequence
  Synthetic
cuaagaaauuguaccggg

SEQ ID NO: 54209 - RNA, 19 nt, Artificial Sequence
  Synthetic
ccuaagaaauuguaccggg

SEQ ID NO: 54210 - RNA, 21 nt, Artificial Sequence
  Synthetic
agccuaagaaauuguaccggg

SEQ ID NO: 54211 - RNA, 22 nt, Artificial Sequence
  Synthetic
aagccuaagaaauuguaccggg

SEQ ID NO: 54212 - RNA, 24 nt, Artificial Sequence
  Synthetic
ugaagccuaagaaauuguaccggg

SEQ ID NO: 54213 - RNA, 19 nt, Artificial Sequence
  Synthetic
agaaaucuuaugggccggg

SEQ ID NO: 54214 - RNA, 20 nt, Artificial Sequence
  Synthetic
aagaaaucuuaugggccggg

SEQ ID NO: 54215 - RNA, 21 nt, Artificial Sequence
  Synthetic
aaagaaaucuuaugggccggg

SEQ ID NO: 54216 - RNA, 22 nt, Artificial Sequence
  Synthetic
uaaagaaaucuuaugggccggg

SEQ ID NO: 54217 - RNA, 23 nt, Artificial Sequence
  Synthetic
uuaaagaaaucuuaugggccggg

SEQ ID NO: 54218 - RNA, 24 nt, Artificial Sequence
  Synthetic
auuaaagaaaucuuaugggccggg

SEQ ID NO: 54219 - RNA, 18 nt, Artificial Sequence
  Synthetic
caaauuuuagccggcggg

SEQ ID NO: 54220 - RNA, 19 nt, Artificial Sequence
  Synthetic
acaaauuuuagccggcggg

SEQ ID NO: 54221 - RNA, 20 nt, Artificial Sequence
  Synthetic
uacaaauuuuagccggcggg

SEQ ID NO: 54222 - RNA, 21 nt, Artificial Sequence
  Synthetic
auacaaauuuuagccggcggg

SEQ ID NO: 54223 - RNA, 22 nt, Artificial Sequence
  Synthetic
cauacaaauuuuagccggcggg

SEQ ID NO: 54224 - RNA, 23 nt, Artificial Sequence
  Synthetic
acauacaaauuuuagccggcggg

SEQ ID NO: 54225 - RNA, 24 nt, Artificial Sequence
  Synthetic
aacauacaaauuuuagccggcggg

SEQ ID NO: 54226 - RNA, 18 nt, Artificial Sequence
  Synthetic
aaacccaaggugggcggg

SEQ ID NO: 54227 - RNA, 19 nt, Artificial Sequence
  Synthetic
aaaacccaaggugggcggg

SEQ ID NO: 54228 - RNA, 20 nt, Artificial Sequence
  Synthetic
uaaaacccaaggugggcggg

SEQ ID NO: 54229 - RNA, 24 nt, Artificial Sequence
  Synthetic
uggguaaaacccaaggugggcggg

SEQ ID NO: 54230 - RNA, 18 nt, Artificial Sequence
  Synthetic
uuuugguuuucccucggg

SEQ ID NO: 54231 - RNA, 20 nt, Artificial Sequence
  Synthetic
uguuuugguuuucccucggg

SEQ ID NO: 54232 - RNA, 21 nt, Artificial Sequence
  Synthetic
uuguuuugguuuucccucggg

SEQ ID NO: 54233 - RNA, 22 nt, Artificial Sequence
  Synthetic
uuuguuuugguuuucccucggg

SEQ ID NO: 54234 - RNA, 23 nt, Artificial Sequence
  Synthetic
uuuuguuuugguuuucccucggg

SEQ ID NO: 54235 - RNA, 18 nt, Artificial Sequence
  Synthetic
auagaaacauggcagggg

SEQ ID NO: 54236 - RNA, 19 nt, Artificial Sequence
  Synthetic
aauagaaacauggcagggg

SEQ ID NO: 54237 - RNA, 20 nt, Artificial Sequence
  Synthetic
uaauagaaacauggcagggg

SEQ ID NO: 54238 - RNA, 21 nt, Artificial Sequence
  Synthetic
uuaauagaaacauggcagggg

SEQ ID NO: 54239 - RNA, 22 nt, Artificial Sequence
  Synthetic
auuaauagaaacauggcagggg

SEQ ID NO: 54240 - RNA, 23 nt, Artificial Sequence
  Synthetic
cauuaauagaaacauggcagggg

SEQ ID NO: 54241 - RNA, 24 nt, Artificial Sequence
  Synthetic
ucauuaauagaaacauggcagggg

SEQ ID NO: 54242 - RNA, 18 nt, Artificial Sequence
  Synthetic
cugauggcaaugcagggg

SEQ ID NO: 54243 - RNA, 19 nt, Artificial Sequence
  Synthetic
ucugauggcaaugcagggg

SEQ ID NO: 54244 - RNA, 21 nt, Artificial Sequence
  Synthetic
agucugauggcaaugcagggg

SEQ ID NO: 54245 - RNA, 22 nt, Artificial Sequence
  Synthetic
cagucugauggcaaugcagggg

SEQ ID NO: 54246 - RNA, 23 nt, Artificial Sequence
  Synthetic
ucagucugauggcaaugcagggg

SEQ ID NO: 54247 - RNA, 24 nt, Artificial Sequence
  Synthetic
cucagucugauggcaaugcagggg

SEQ ID NO: 54248 - RNA, 18 nt, Artificial Sequence
  Synthetic
aggcucuguguucagggg

SEQ ID NO: 54249 - RNA, 20 nt, Artificial Sequence
  Synthetic
ugaggcucuguguucagggg

SEQ ID NO: 54250 - RNA, 21 nt, Artificial Sequence
  Synthetic
uugaggcucuguguucagggg

SEQ ID NO: 54251 - RNA, 22 nt, Artificial Sequence
  Synthetic
cuugaggcucuguguucagggg

SEQ ID NO: 54252 - RNA, 23 nt, Artificial Sequence
  Synthetic
ccuugaggcucuguguucagggg

SEQ ID NO: 54253 - RNA, 24 nt, Artificial Sequence
  Synthetic
cccuugaggcucuguguucagggg

SEQ ID NO: 54254 - RNA, 18 nt, Artificial Sequence
  Synthetic
aguguuauuaaagagggg

SEQ ID NO: 54255 - RNA, 20 nt, Artificial Sequence
  Synthetic
agaguguuauuaaagagggg

SEQ ID NO: 54256 - RNA, 21 nt, Artificial Sequence
  Synthetic
aagaguguuauuaaagagggg

SEQ ID NO: 54257 - RNA, 22 nt, Artificial Sequence
  Synthetic
aaagaguguuauuaaagagggg

SEQ ID NO: 54258 - RNA, 23 nt, Artificial Sequence
  Synthetic
aaaagaguguuauuaaagagggg

SEQ ID NO: 54259 - RNA, 24 nt, Artificial Sequence
  Synthetic
aaaaagaguguuauuaaagagggg

SEQ ID NO: 54260 - RNA, 18 nt, Artificial Sequence
  Synthetic
agauuauguugggagggg

SEQ ID NO: 54261 - RNA, 19 nt, Artificial Sequence
  Synthetic
uagauuauguugggagggg

SEQ ID NO: 54262 - RNA, 20 nt, Artificial Sequence
  Synthetic
uuagauuauguugggagggg

SEQ ID NO: 54263 - RNA, 21 nt, Artificial Sequence
  Synthetic
cuuagauuauguugggagggg

SEQ ID NO: 54264 - RNA, 22 nt, Artificial Sequence
  Synthetic
acuuagauuauguugggagggg

SEQ ID NO: 54265 - RNA, 24 nt, Artificial Sequence
  Synthetic
agacuuagauuauguugggagggg

SEQ ID NO: 54266 - RNA, 19 nt, Artificial Sequence
  Synthetic
agauuuaucuacugagggg

SEQ ID NO: 54267 - RNA, 21 nt, Artificial Sequence
  Synthetic
agagauuuaucuacugagggg

SEQ ID NO: 54268 - RNA, 22 nt, Artificial Sequence
  Synthetic
cagagauuuaucuacugagggg

SEQ ID NO: 54269 - RNA, 23 nt, Artificial Sequence
  Synthetic
acagagauuuaucuacugagggg

SEQ ID NO: 54270 - RNA, 24 nt, Artificial Sequence
  Synthetic
uacagagauuuaucuacugagggg

SEQ ID NO: 54271 - RNA, 18 nt, Artificial Sequence
  Synthetic
aaaaauccaagugagggg

SEQ ID NO: 54272 - RNA, 20 nt, Artificial Sequence
  Synthetic
ugaaaaauccaagugagggg

SEQ ID NO: 54273 - RNA, 21 nt, Artificial Sequence
  Synthetic
uugaaaaauccaagugagggg

SEQ ID NO: 54274 - RNA, 22 nt, Artificial Sequence
  Synthetic
uuugaaaaauccaagugagggg

SEQ ID NO: 54275 - RNA, 23 nt, Artificial Sequence
  Synthetic
cuuugaaaaauccaagugagggg

SEQ ID NO: 54276 - RNA, 24 nt, Artificial Sequence
  Synthetic
ccuuugaaaaauccaagugagggg

SEQ ID NO: 54277 - RNA, 18 nt, Artificial Sequence
  Synthetic
uucuuauagaauuagggg

SEQ ID NO: 54278 - RNA, 19 nt, Artificial Sequence
  Synthetic
uuucuuauagaauuagggg

SEQ ID NO: 54279 - RNA, 20 nt, Artificial Sequence
  Synthetic
uuuucuuauagaauuagggg

SEQ ID NO: 54280 - RNA, 21 nt, Artificial Sequence
  Synthetic
cuuuucuuauagaauuagggg

SEQ ID NO: 54281 - RNA, 22 nt, Artificial Sequence
  Synthetic
ucuuuucuuauagaauuagggg

SEQ ID NO: 54282 - RNA, 23 nt, Artificial Sequence
  Synthetic
aucuuuucuuauagaauuagggg

SEQ ID NO: 54283 - RNA, 24 nt, Artificial Sequence
  Synthetic
uaucuuuucuuauagaauuagggg

SEQ ID NO: 54284 - RNA, 18 nt, Artificial Sequence
  Synthetic
cuucacagagccaggggg

SEQ ID NO: 54285 - RNA, 19 nt, Artificial Sequence
  Synthetic
acuucacagagccaggggg

SEQ ID NO: 54286 - RNA, 20 nt, Artificial Sequence
  Synthetic
uacuucacagagccaggggg

SEQ ID NO: 54287 - RNA, 22 nt, Artificial Sequence
  Synthetic
uguacuucacagagccaggggg

SEQ ID NO: 54288 - RNA, 23 nt, Artificial Sequence
  Synthetic
auguacuucacagagccaggggg

SEQ ID NO: 54289 - RNA, 18 nt, Artificial Sequence
  Synthetic
cuccuuguuggggggggg

SEQ ID NO: 54290 - RNA, 19 nt, Artificial Sequence
  Synthetic
ccuccuuguuggggggggg

SEQ ID NO: 54291 - RNA, 22 nt, Artificial Sequence
  Synthetic
uggccuccuuguuggggggggg

SEQ ID NO: 54292 - RNA, 23 nt, Artificial Sequence
  Synthetic
auggccuccuuguuggggggggg

SEQ ID NO: 54293 - RNA, 24 nt, Artificial Sequence
  Synthetic
uauggccuccuuguuggggggggg

SEQ ID NO: 54294 - RNA, 19 nt, Artificial Sequence
  Synthetic
agagcuaugccacuggggg

SEQ ID NO: 54295 - RNA, 21 nt, Artificial Sequence
  Synthetic
cgagagcuaugccacuggggg

SEQ ID NO: 54296 - RNA, 22 nt, Artificial Sequence
  Synthetic
ccgagagcuaugccacuggggg

SEQ ID NO: 54297 - RNA, 23 nt, Artificial Sequence
  Synthetic
uccgagagcuaugccacuggggg

SEQ ID NO: 54298 - RNA, 24 nt, Artificial Sequence
  Synthetic
uuccgagagcuaugccacuggggg

SEQ ID NO: 54299 - RNA, 18 nt, Artificial Sequence
  Synthetic
cacaagcugacuuggggg

SEQ ID NO: 54300 - RNA, 19 nt, Artificial Sequence
  Synthetic
ccacaagcugacuuggggg

SEQ ID NO: 54301 - RNA, 20 nt, Artificial Sequence
  Synthetic
accacaagcugacuuggggg

SEQ ID NO: 54302 - RNA, 23 nt, Artificial Sequence
  Synthetic
aggaccacaagcugacuuggggg

SEQ ID NO: 54303 - RNA, 18 nt, Artificial Sequence
  Synthetic
cuggaucaagaaaugggg

SEQ ID NO: 54304 - RNA, 19 nt, Artificial Sequence
  Synthetic
ccuggaucaagaaaugggg

SEQ ID NO: 54305 - RNA, 20 nt, Artificial Sequence
  Synthetic
cccuggaucaagaaaugggg

SEQ ID NO: 54306 - RNA, 23 nt, Artificial Sequence
  Synthetic
aggcccuggaucaagaaaugggg

SEQ ID NO: 54307 - RNA, 18 nt, Artificial Sequence
  Synthetic
ugguuaagagaaaugggg

SEQ ID NO: 54308 - RNA, 19 nt, Artificial Sequence
  Synthetic
uugguuaagagaaaugggg

SEQ ID NO: 54309 - RNA, 21 nt, Artificial Sequence
  Synthetic
uguugguuaagagaaaugggg

SEQ ID NO: 54310 - RNA, 23 nt, Artificial Sequence
  Synthetic
uguguugguuaagagaaaugggg

SEQ ID NO: 54311 - RNA, 18 nt, Artificial Sequence
  Synthetic
uuuuuacaagcaaugggg

SEQ ID NO: 54312 - RNA, 20 nt, Artificial Sequence
  Synthetic
aguuuuuacaagcaaugggg

SEQ ID NO: 54313 - RNA, 21 nt, Artificial Sequence
  Synthetic
caguuuuuacaagcaaugggg

SEQ ID NO: 54314 - RNA, 22 nt, Artificial Sequence
  Synthetic
acaguuuuuacaagcaaugggg

SEQ ID NO: 54315 - RNA, 18 nt, Artificial Sequence
  Synthetic
aaagaaugaggcaugggg

SEQ ID NO: 54316 - RNA, 19 nt, Artificial Sequence
  Synthetic
caaagaaugaggcaugggg

SEQ ID NO: 54317 - RNA, 20 nt, Artificial Sequence
  Synthetic
ucaaagaaugaggcaugggg

SEQ ID NO: 54318 - RNA, 21 nt, Artificial Sequence
  Synthetic
cucaaagaaugaggcaugggg

SEQ ID NO: 54319 - RNA, 22 nt, Artificial Sequence
  Synthetic
ucucaaagaaugaggcaugggg

SEQ ID NO: 54320 - RNA, 23 nt, Artificial Sequence
  Synthetic
aucucaaagaaugaggcaugggg

SEQ ID NO: 54321 - RNA, 18 nt, Artificial Sequence
  Synthetic
ucuugucuccaacugggg

SEQ ID NO: 54322 - RNA, 19 nt, Artificial Sequence
  Synthetic
cucuugucuccaacugggg

SEQ ID NO: 54323 - RNA, 21 nt, Artificial Sequence
  Synthetic
ugcucuugucuccaacugggg

SEQ ID NO: 54324 - RNA, 22 nt, Artificial Sequence
  Synthetic
cugcucuugucuccaacugggg

SEQ ID NO: 54325 - RNA, 23 nt, Artificial Sequence
  Synthetic
ucugcucuugucuccaacugggg

SEQ ID NO: 54326 - RNA, 24 nt, Artificial Sequence
  Synthetic
uucugcucuugucuccaacugggg

SEQ ID NO: 54327 - RNA, 19 nt, Artificial Sequence
  Synthetic
ugcgcaauuguuccugggg

SEQ ID NO: 54328 - RNA, 20 nt, Artificial Sequence
  Synthetic
uugcgcaauuguuccugggg

SEQ ID NO: 54329 - RNA, 21 nt, Artificial Sequence
  Synthetic
uuugcgcaauuguuccugggg

SEQ ID NO: 54330 - RNA, 22 nt, Artificial Sequence
  Synthetic
auuugcgcaauuguuccugggg

SEQ ID NO: 54331 - RNA, 23 nt, Artificial Sequence
  Synthetic
cauuugcgcaauuguuccugggg

SEQ ID NO: 54332 - RNA, 18 nt, Artificial Sequence
  Synthetic
uccccccauuggcugggg

SEQ ID NO: 54333 - RNA, 19 nt, Artificial Sequence
  Synthetic
uuccccccauuggcugggg

SEQ ID NO: 54334 - RNA, 20 nt, Artificial Sequence
  Synthetic
uuuccccccauuggcugggg

SEQ ID NO: 54335 - RNA, 21 nt, Artificial Sequence
  Synthetic
cuuuccccccauuggcugggg

SEQ ID NO: 54336 - RNA, 22 nt, Artificial Sequence
  Synthetic
ccuuuccccccauuggcugggg

SEQ ID NO: 54337 - RNA, 23 nt, Artificial Sequence
  Synthetic
cccuuuccccccauuggcugggg

SEQ ID NO: 54338 - RNA, 24 nt, Artificial Sequence
  Synthetic
acccuuuccccccauuggcugggg

SEQ ID NO: 54339 - RNA, 19 nt, Artificial Sequence
  Synthetic
ugucagaagcucucugggg

SEQ ID NO: 54340 - RNA, 21 nt, Artificial Sequence
  Synthetic
ugugucagaagcucucugggg

SEQ ID NO: 54341 - RNA, 22 nt, Artificial Sequence
  Synthetic
uugugucagaagcucucugggg

SEQ ID NO: 54342 - RNA, 23 nt, Artificial Sequence
  Synthetic
auugugucagaagcucucugggg

SEQ ID NO: 54343 - RNA, 24 nt, Artificial Sequence
  Synthetic
cauugugucagaagcucucugggg

SEQ ID NO: 54344 - RNA, 19 nt, Artificial Sequence
  Synthetic
agacauacagugagugggg

SEQ ID NO: 54345 - RNA, 20 nt, Artificial Sequence
  Synthetic
cagacauacagugagugggg

SEQ ID NO: 54346 - RNA, 21 nt, Artificial Sequence
  Synthetic
acagacauacagugagugggg

SEQ ID NO: 54347 - RNA, 22 nt, Artificial Sequence
  Synthetic
cacagacauacagugagugggg

SEQ ID NO: 54348 - RNA, 23 nt, Artificial Sequence
  Synthetic
ccacagacauacagugagugggg

SEQ ID NO: 54349 - RNA, 24 nt, Artificial Sequence
  Synthetic
accacagacauacagugagugggg

SEQ ID NO: 54350 - RNA, 18 nt, Artificial Sequence
  Synthetic
uuuaaucuuuaauugggg

SEQ ID NO: 54351 - RNA, 19 nt, Artificial Sequence
  Synthetic
uuuuaaucuuuaauugggg

SEQ ID NO: 54352 - RNA, 21 nt, Artificial Sequence
  Synthetic
aguuuuaaucuuuaauugggg

SEQ ID NO: 54353 - RNA, 22 nt, Artificial Sequence
  Synthetic
uaguuuuaaucuuuaauugggg

SEQ ID NO: 54354 - RNA, 23 nt, Artificial Sequence
  Synthetic
uuaguuuuaaucuuuaauugggg

SEQ ID NO: 54355 - RNA, 18 nt, Artificial Sequence
  Synthetic
uggguaucaggauugggg

SEQ ID NO: 54356 - RNA, 20 nt, Artificial Sequence
  Synthetic
aguggguaucaggauugggg

SEQ ID NO: 54357 - RNA, 22 nt, Artificial Sequence
  Synthetic
ugaguggguaucaggauugggg

SEQ ID NO: 54358 - RNA, 18 nt, Artificial Sequence
  Synthetic
uucucggccgacuugggg

SEQ ID NO: 54359 - RNA, 19 nt, Artificial Sequence
  Synthetic
auucucggccgacuugggg

SEQ ID NO: 54360 - RNA, 20 nt, Artificial Sequence
  Synthetic
cauucucggccgacuugggg

SEQ ID NO: 54361 - RNA, 21 nt, Artificial Sequence
  Synthetic
ccauucucggccgacuugggg

SEQ ID NO: 54362 - RNA, 22 nt, Artificial Sequence
  Synthetic
cccauucucggccgacuugggg

SEQ ID NO: 54363 - RNA, 23 nt, Artificial Sequence
  Synthetic
acccauucucggccgacuugggg

SEQ ID NO: 54364 - RNA, 24 nt, Artificial Sequence
  Synthetic
aacccauucucggccgacuugggg

SEQ ID NO: 54365 - RNA, 18 nt, Artificial Sequence
  Synthetic
uaaaaccagauguugggg

SEQ ID NO: 54366 - RNA, 19 nt, Artificial Sequence
  Synthetic
uuaaaaccagauguugggg

SEQ ID NO: 54367 - RNA, 20 nt, Artificial Sequence
  Synthetic
uuuaaaaccagauguugggg

SEQ ID NO: 54368 - RNA, 21 nt, Artificial Sequence
  Synthetic
auuuaaaaccagauguugggg

SEQ ID NO: 54369 - RNA, 22 nt, Artificial Sequence
  Synthetic
cauuuaaaaccagauguugggg

SEQ ID NO: 54370 - RNA, 24 nt, Artificial Sequence
  Synthetic
agcauuuaaaaccagauguugggg

SEQ ID NO: 54371 - RNA, 18 nt, Artificial Sequence
  Synthetic
auuaugagaacaaauggg

SEQ ID NO: 54372 - RNA, 19 nt, Artificial Sequence
  Synthetic
aauuaugagaacaaauggg

SEQ ID NO: 54373 - RNA, 20 nt, Artificial Sequence
  Synthetic
aaauuaugagaacaaauggg

SEQ ID NO: 54374 - RNA, 21 nt, Artificial Sequence
  Synthetic
aaaauuaugagaacaaauggg

SEQ ID NO: 54375 - RNA, 22 nt, Artificial Sequence
  Synthetic
uaaaauuaugagaacaaauggg

SEQ ID NO: 54376 - RNA, 23 nt, Artificial Sequence
  Synthetic
uuaaaauuaugagaacaaauggg

SEQ ID NO: 54377 - RNA, 24 nt, Artificial Sequence
  Synthetic
uuuaaaauuaugagaacaaauggg

SEQ ID NO: 54378 - RNA, 18 nt, Artificial Sequence
  Synthetic
aagcauuuggccaauggg

SEQ ID NO: 54379 - RNA, 20 nt, Artificial Sequence
  Synthetic
agaagcauuuggccaauggg

SEQ ID NO: 54380 - RNA, 21 nt, Artificial Sequence
  Synthetic
aagaagcauuuggccaauggg

SEQ ID NO: 54381 - RNA, 22 nt, Artificial Sequence
  Synthetic
aaagaagcauuuggccaauggg

SEQ ID NO: 54382 - RNA, 24 nt, Artificial Sequence
  Synthetic
agaaagaagcauuuggccaauggg

SEQ ID NO: 54383 - RNA, 21 nt, Artificial Sequence
  Synthetic
aagcaacauuuuaagaauggg

SEQ ID NO: 54384 - RNA, 22 nt, Artificial Sequence
  Synthetic
uaagcaacauuuuaagaauggg

SEQ ID NO: 54385 - RNA, 23 nt, Artificial Sequence
  Synthetic
cuaagcaacauuuuaagaauggg

SEQ ID NO: 54386 - RNA, 24 nt, Artificial Sequence
  Synthetic
ccuaagcaacauuuuaagaauggg

SEQ ID NO: 54387 - RNA, 18 nt, Artificial Sequence
  Synthetic
uccuauccauuuaauggg

SEQ ID NO: 54388 - RNA, 19 nt, Artificial Sequence
  Synthetic
cuccuauccauuuaauggg

SEQ ID NO: 54389 - RNA, 20 nt, Artificial Sequence
  Synthetic
acuccuauccauuuaauggg

SEQ ID NO: 54390 - RNA, 21 nt, Artificial Sequence
  Synthetic
cacuccuauccauuuaauggg

SEQ ID NO: 54391 - RNA, 22 nt, Artificial Sequence
  Synthetic
acacuccuauccauuuaauggg

SEQ ID NO: 54392 - RNA, 23 nt, Artificial Sequence
  Synthetic
uacacuccuauccauuuaauggg

SEQ ID NO: 54393 - RNA, 24 nt, Artificial Sequence
  Synthetic
auacacuccuauccauuuaauggg

SEQ ID NO: 54394 - RNA, 18 nt, Artificial Sequence
  Synthetic
ugacuucaaauacauggg

SEQ ID NO: 54395 - RNA, 20 nt, Artificial Sequence
  Synthetic
agugacuucaaauacauggg

SEQ ID NO: 54396 - RNA, 21 nt, Artificial Sequence
  Synthetic
aagugacuucaaauacauggg

SEQ ID NO: 54397 - RNA, 22 nt, Artificial Sequence
  Synthetic
aaagugacuucaaauacauggg

SEQ ID NO: 54398 - RNA, 23 nt, Artificial Sequence
  Synthetic
caaagugacuucaaauacauggg

SEQ ID NO: 54399 - RNA, 18 nt, Artificial Sequence
  Synthetic
acuucauaggaucauggg

SEQ ID NO: 54400 - RNA, 19 nt, Artificial Sequence
  Synthetic
uacuucauaggaucauggg

SEQ ID NO: 54401 - RNA, 21 nt, Artificial Sequence
  Synthetic
uguacuucauaggaucauggg

SEQ ID NO: 54402 - RNA, 22 nt, Artificial Sequence
  Synthetic
auguacuucauaggaucauggg

SEQ ID NO: 54403 - RNA, 23 nt, Artificial Sequence
  Synthetic
uauguacuucauaggaucauggg

SEQ ID NO: 54404 - RNA, 24 nt, Artificial Sequence
  Synthetic
uuauguacuucauaggaucauggg

SEQ ID NO: 54405 - RNA, 18 nt, Artificial Sequence
  Synthetic
aaaaaggggugauauggg

SEQ ID NO: 54406 - RNA, 22 nt, Artificial Sequence
  Synthetic
ugggaaaaaggggugauauggg

SEQ ID NO: 54407 - RNA, 23 nt, Artificial Sequence
  Synthetic
uugggaaaaaggggugauauggg

SEQ ID NO: 54408 - RNA, 24 nt, Artificial Sequence
  Synthetic
uuugggaaaaaggggugauauggg

SEQ ID NO: 54409 - RNA, 21 nt, Artificial Sequence
  Synthetic
agaaggauaaguaaguauggg

SEQ ID NO: 54410 - RNA, 22 nt, Artificial Sequence
  Synthetic
aagaaggauaaguaaguauggg

SEQ ID NO: 54411 - RNA, 23 nt, Artificial Sequence
  Synthetic
uaagaaggauaaguaaguauggg

SEQ ID NO: 54412 - RNA, 24 nt, Artificial Sequence
  Synthetic
auaagaaggauaaguaaguauggg

SEQ ID NO: 54413 - RNA, 20 nt, Artificial Sequence
  Synthetic
uggagagcgggaguuauggg

SEQ ID NO: 54414 - RNA, 21 nt, Artificial Sequence
  Synthetic
uuggagagcgggaguuauggg

SEQ ID NO: 54415 - RNA, 22 nt, Artificial Sequence
  Synthetic
uuuggagagcgggaguuauggg

SEQ ID NO: 54416 - RNA, 23 nt, Artificial Sequence
  Synthetic
cuuuggagagcgggaguuauggg

SEQ ID NO: 54417 - RNA, 24 nt, Artificial Sequence
  Synthetic
acuuuggagagcgggaguuauggg

SEQ ID NO: 54418 - RNA, 21 nt, Artificial Sequence
  Synthetic
uuuguucaucuaggcacuggg

SEQ ID NO: 54419 - RNA, 22 nt, Artificial Sequence
  Synthetic
auuuguucaucuaggcacuggg

SEQ ID NO: 54420 - RNA, 23 nt, Artificial Sequence
  Synthetic
cauuuguucaucuaggcacuggg

SEQ ID NO: 54421 - RNA, 24 nt, Artificial Sequence
  Synthetic
ucauuuguucaucuaggcacuggg

SEQ ID NO: 54422 - RNA, 18 nt, Artificial Sequence
  Synthetic
uucauucacaucccuggg

SEQ ID NO: 54423 - RNA, 19 nt, Artificial Sequence
  Synthetic
auucauucacaucccuggg

SEQ ID NO: 54424 - RNA, 21 nt, Artificial Sequence
  Synthetic
ugauucauucacaucccuggg

SEQ ID NO: 54425 - RNA, 22 nt, Artificial Sequence
  Synthetic
cugauucauucacaucccuggg

SEQ ID NO: 54426 - RNA, 23 nt, Artificial Sequence
  Synthetic
acugauucauucacaucccuggg

SEQ ID NO: 54427 - RNA, 24 nt, Artificial Sequence
  Synthetic
uacugauucauucacaucccuggg

SEQ ID NO: 54428 - RNA, 18 nt, Artificial Sequence
  Synthetic
ucugguucugauccuggg

SEQ ID NO: 54429 - RNA, 19 nt, Artificial Sequence
  Synthetic
cucugguucugauccuggg

SEQ ID NO: 54430 - RNA, 22 nt, Artificial Sequence
  Synthetic
aggcucugguucugauccuggg

SEQ ID NO: 54431 - RNA, 23 nt, Artificial Sequence
  Synthetic
aaggcucugguucugauccuggg

SEQ ID NO: 54432 - RNA, 18 nt, Artificial Sequence
  Synthetic
uuucauugguauccuggg

SEQ ID NO: 54433 - RNA, 19 nt, Artificial Sequence
  Synthetic
uuuucauugguauccuggg

SEQ ID NO: 54434 - RNA, 20 nt, Artificial Sequence
  Synthetic
auuuucauugguauccuggg

SEQ ID NO: 54435 - RNA, 22 nt, Artificial Sequence
  Synthetic
agauuuucauugguauccuggg

SEQ ID NO: 54436 - RNA, 23 nt, Artificial Sequence
  Synthetic
uagauuuucauugguauccuggg

SEQ ID NO: 54437 - RNA, 24 nt, Artificial Sequence
  Synthetic
auagauuuucauugguauccuggg

SEQ ID NO: 54438 - RNA, 18 nt, Artificial Sequence
  Synthetic
cauuagagagaggcuggg

SEQ ID NO: 54439 - RNA, 20 nt, Artificial Sequence
  Synthetic
ugcauuagagagaggcuggg

SEQ ID NO: 54440 - RNA, 21 nt, Artificial Sequence
  Synthetic
uugcauuagagagaggcuggg

SEQ ID NO: 54441 - RNA, 22 nt, Artificial Sequence
  Synthetic
auugcauuagagagaggcuggg

SEQ ID NO: 54442 - RNA, 23 nt, Artificial Sequence
  Synthetic
cauugcauuagagagaggcuggg

SEQ ID NO: 54443 - RNA, 24 nt, Artificial Sequence
  Synthetic
acauugcauuagagagaggcuggg

SEQ ID NO: 54444 - RNA, 19 nt, Artificial Sequence
  Synthetic
agggaacgugaucucuggg

SEQ ID NO: 54445 - RNA, 20 nt, Artificial Sequence
  Synthetic
uagggaacgugaucucuggg

SEQ ID NO: 54446 - RNA, 21 nt, Artificial Sequence
  Synthetic
uuagggaacgugaucucuggg

SEQ ID NO: 54447 - RNA, 23 nt, Artificial Sequence
  Synthetic
uguuagggaacgugaucucuggg

SEQ ID NO: 54448 - RNA, 24 nt, Artificial Sequence
  Synthetic
uuguuagggaacgugaucucuggg

SEQ ID NO: 54449 - RNA, 18 nt, Artificial Sequence
  Synthetic
cugguuauuuggucuggg

SEQ ID NO: 54450 - RNA, 19 nt, Artificial Sequence
  Synthetic
ccugguuauuuggucuggg

SEQ ID NO: 54451 - RNA, 20 nt, Artificial Sequence
  Synthetic
uccugguuauuuggucuggg

SEQ ID NO: 54452 - RNA, 21 nt, Artificial Sequence
  Synthetic
auccugguuauuuggucuggg

SEQ ID NO: 54453 - RNA, 22 nt, Artificial Sequence
  Synthetic
uauccugguuauuuggucuggg

SEQ ID NO: 54454 - RNA, 23 nt, Artificial Sequence
  Synthetic
auauccugguuauuuggucuggg

SEQ ID NO: 54455 - RNA, 18 nt, Artificial Sequence
  Synthetic
aaauaggcauauucuggg

SEQ ID NO: 54456 - RNA, 19 nt, Artificial Sequence
  Synthetic
caaauaggcauauucuggg

SEQ ID NO: 54457 - RNA, 20 nt, Artificial Sequence
  Synthetic
ccaaauaggcauauucuggg

SEQ ID NO: 54458 - RNA, 18 nt, Artificial Sequence
  Synthetic
auacaaauuuacaguggg

SEQ ID NO: 54459 - RNA, 19 nt, Artificial Sequence
  Synthetic
aauacaaauuuacaguggg

SEQ ID NO: 54460 - RNA, 20 nt, Artificial Sequence
  Synthetic
uaauacaaauuuacaguggg

SEQ ID NO: 54461 - RNA, 21 nt, Artificial Sequence
  Synthetic
uuaauacaaauuuacaguggg

SEQ ID NO: 54462 - RNA, 22 nt, Artificial Sequence
  Synthetic
auuaauacaaauuuacaguggg

SEQ ID NO: 54463 - RNA, 24 nt, Artificial Sequence
  Synthetic
ugauuaauacaaauuuacaguggg

SEQ ID NO: 54464 - RNA, 18 nt, Artificial Sequence
  Synthetic
ugaaaauaaagcaguggg

SEQ ID NO: 54465 - RNA, 19 nt, Artificial Sequence
  Synthetic
uugaaaauaaagcaguggg

SEQ ID NO: 54466 - RNA, 20 nt, Artificial Sequence
  Synthetic
cuugaaaauaaagcaguggg

SEQ ID NO: 54467 - RNA, 22 nt, Artificial Sequence
  Synthetic
ugcuugaaaauaaagcaguggg

SEQ ID NO: 54468 - RNA, 23 nt, Artificial Sequence
  Synthetic
cugcuugaaaauaaagcaguggg

SEQ ID NO: 54469 - RNA, 24 nt, Artificial Sequence
  Synthetic
ucugcuugaaaauaaagcaguggg

SEQ ID NO: 54470 - RNA, 18 nt, Artificial Sequence
  Synthetic
uuauuaaaucuccguggg

SEQ ID NO: 54471 - RNA, 19 nt, Artificial Sequence
  Synthetic
uuuauuaaaucuccguggg

SEQ ID NO: 54472 - RNA, 20 nt, Artificial Sequence
  Synthetic
uuuuauuaaaucuccguggg

SEQ ID NO: 54473 - RNA, 21 nt, Artificial Sequence
  Synthetic
cuuuuauuaaaucuccguggg

SEQ ID NO: 54474 - RNA, 22 nt, Artificial Sequence
  Synthetic
ucuuuuauuaaaucuccguggg

SEQ ID NO: 54475 - RNA, 23 nt, Artificial Sequence
  Synthetic
aucuuuuauuaaaucuccguggg

SEQ ID NO: 54476 - RNA, 24 nt, Artificial Sequence
  Synthetic
aaucuuuuauuaaaucuccguggg

SEQ ID NO: 54477 - RNA, 18 nt, Artificial Sequence
  Synthetic
auacacaaaucagguggg

SEQ ID NO: 54478 - RNA, 19 nt, Artificial Sequence
  Synthetic
cauacacaaaucagguggg

SEQ ID NO: 54479 - RNA, 22 nt, Artificial Sequence
  Synthetic
uggcauacacaaaucagguggg

SEQ ID NO: 54480 - RNA, 23 nt, Artificial Sequence
  Synthetic
auggcauacacaaaucagguggg

SEQ ID NO: 54481 - RNA, 18 nt, Artificial Sequence
  Synthetic
uaaagauacagagguggg

SEQ ID NO: 54482 - RNA, 19 nt, Artificial Sequence
  Synthetic
cuaaagauacagagguggg

SEQ ID NO: 54483 - RNA, 20 nt, Artificial Sequence
  Synthetic
ccuaaagauacagagguggg

SEQ ID NO: 54484 - RNA, 21 nt, Artificial Sequence
  Synthetic
cccuaaagauacagagguggg

SEQ ID NO: 54485 - RNA, 22 nt, Artificial Sequence
  Synthetic
ucccuaaagauacagagguggg

SEQ ID NO: 54486 - RNA, 23 nt, Artificial Sequence
  Synthetic
uucccuaaagauacagagguggg

SEQ ID NO: 54487 - RNA, 24 nt, Artificial Sequence
  Synthetic
cuucccuaaagauacagagguggg

SEQ ID NO: 54488 - RNA, 19 nt, Artificial Sequence
  Synthetic
cgacuagcucugagguggg

SEQ ID NO: 54489 - RNA, 20 nt, Artificial Sequence
  Synthetic
ucgacuagcucugagguggg

SEQ ID NO: 54490 - RNA, 22 nt, Artificial Sequence
  Synthetic
ugucgacuagcucugagguggg

SEQ ID NO: 54491 - RNA, 23 nt, Artificial Sequence
  Synthetic
uugucgacuagcucugagguggg

SEQ ID NO: 54492 - RNA, 24 nt, Artificial Sequence
  Synthetic
uuugucgacuagcucugagguggg

SEQ ID NO: 54493 - RNA, 18 nt, Artificial Sequence
  Synthetic
aaguuaaacaaggguggg

SEQ ID NO: 54494 - RNA, 19 nt, Artificial Sequence
  Synthetic
uaaguuaaacaaggguggg

SEQ ID NO: 54495 - RNA, 20 nt, Artificial Sequence
  Synthetic
cuaaguuaaacaaggguggg

SEQ ID NO: 54496 - RNA, 21 nt, Artificial Sequence
  Synthetic
acuaaguuaaacaaggguggg

SEQ ID NO: 54497 - RNA, 22 nt, Artificial Sequence
  Synthetic
uacuaaguuaaacaaggguggg

SEQ ID NO: 54498 - RNA, 24 nt, Artificial Sequence
  Synthetic
aguacuaaguuaaacaaggguggg

SEQ ID NO: 54499 - RNA, 18 nt, Artificial Sequence
  Synthetic
aaaacaugaaggauuggg

SEQ ID NO: 54500 - RNA, 19 nt, Artificial Sequence
  Synthetic
caaaacaugaaggauuggg

SEQ ID NO: 54501 - RNA, 20 nt, Artificial Sequence
  Synthetic
ccaaaacaugaaggauuggg

SEQ ID NO: 54502 - RNA, 21 nt, Artificial Sequence
  Synthetic
cccaaaacaugaaggauuggg

SEQ ID NO: 54503 - RNA, 22 nt, Artificial Sequence
  Synthetic
acccaaaacaugaaggauuggg

SEQ ID NO: 54504 - RNA, 23 nt, Artificial Sequence
  Synthetic
uacccaaaacaugaaggauuggg

SEQ ID NO: 54505 - RNA, 24 nt, Artificial Sequence
  Synthetic
uuacccaaaacaugaaggauuggg

SEQ ID NO: 54506 - RNA, 18 nt, Artificial Sequence
  Synthetic
uacauacucaggauuggg

SEQ ID NO: 54507 - RNA, 19 nt, Artificial Sequence
  Synthetic
cuacauacucaggauuggg

SEQ ID NO: 54508 - RNA, 20 nt, Artificial Sequence
  Synthetic
acuacauacucaggauuggg

SEQ ID NO: 54509 - RNA, 21 nt, Artificial Sequence
  Synthetic
cacuacauacucaggauuggg

SEQ ID NO: 54510 - RNA, 24 nt, Artificial Sequence
  Synthetic
aggcacuacauacucaggauuggg

SEQ ID NO: 54511 - RNA, 18 nt, Artificial Sequence
  Synthetic
augaauuuucagcuuggg

SEQ ID NO: 54512 - RNA, 19 nt, Artificial Sequence
  Synthetic
caugaauuuucagcuuggg

SEQ ID NO: 54513 - RNA, 20 nt, Artificial Sequence
  Synthetic
ucaugaauuuucagcuuggg

SEQ ID NO: 54514 - RNA, 21 nt, Artificial Sequence
  Synthetic
uucaugaauuuucagcuuggg

SEQ ID NO: 54515 - RNA, 22 nt, Artificial Sequence
  Synthetic
uuucaugaauuuucagcuuggg

SEQ ID NO: 54516 - RNA, 23 nt, Artificial Sequence
  Synthetic
cuuucaugaauuuucagcuuggg

SEQ ID NO: 54517 - RNA, 24 nt, Artificial Sequence
  Synthetic
ccuuucaugaauuuucagcuuggg

SEQ ID NO: 54518 - RNA, 18 nt, Artificial Sequence
  Synthetic
aggggagguaugguuggg

SEQ ID NO: 54519 - RNA, 19 nt, Artificial Sequence
  Synthetic
uaggggagguaugguuggg

SEQ ID NO: 54520 - RNA, 21 nt, Artificial Sequence
  Synthetic
uguaggggagguaugguuggg

SEQ ID NO: 54521 - RNA, 22 nt, Artificial Sequence
  Synthetic
auguaggggagguaugguuggg

SEQ ID NO: 54522 - RNA, 23 nt, Artificial Sequence
  Synthetic
cauguaggggagguaugguuggg

SEQ ID NO: 54523 - RNA, 24 nt, Artificial Sequence
  Synthetic
acauguaggggagguaugguuggg

SEQ ID NO: 54524 - RNA, 18 nt, Artificial Sequence
  Synthetic
auuauccaucccuuuggg

SEQ ID NO: 54525 - RNA, 19 nt, Artificial Sequence
  Synthetic
cauuauccaucccuuuggg

SEQ ID NO: 54526 - RNA, 22 nt, Artificial Sequence
  Synthetic
aggcauuauccaucccuuuggg

SEQ ID NO: 54527 - RNA, 23 nt, Artificial Sequence
  Synthetic
aaggcauuauccaucccuuuggg

SEQ ID NO: 54528 - RNA, 24 nt, Artificial Sequence
  Synthetic
aaaggcauuauccaucccuuuggg

SEQ ID NO: 54529 - RNA, 18 nt, Artificial Sequence
  Synthetic
ugaacugaaugcuuuggg

SEQ ID NO: 54530 - RNA, 19 nt, Artificial Sequence
  Synthetic
cugaacugaaugcuuuggg

SEQ ID NO: 54531 - RNA, 20 nt, Artificial Sequence
  Synthetic
acugaacugaaugcuuuggg

SEQ ID NO: 54532 - RNA, 21 nt, Artificial Sequence
  Synthetic
aacugaacugaaugcuuuggg

SEQ ID NO: 54533 - RNA, 23 nt, Artificial Sequence
  Synthetic
ugaacugaacugaaugcuuuggg

SEQ ID NO: 54534 - RNA, 24 nt, Artificial Sequence
  Synthetic
cugaacugaacugaaugcuuuggg

SEQ ID NO: 54535 - RNA, 21 nt, Artificial Sequence
  Synthetic
cuuuuaugagaagaguuuggg

SEQ ID NO: 54536 - RNA, 22 nt, Artificial Sequence
  Synthetic
acuuuuaugagaagaguuuggg

SEQ ID NO: 54537 - RNA, 23 nt, Artificial Sequence
  Synthetic
aacuuuuaugagaagaguuuggg

SEQ ID NO: 54538 - RNA, 24 nt, Artificial Sequence
  Synthetic
aaacuuuuaugagaagaguuuggg

SEQ ID NO: 54539 - RNA, 21 nt, Artificial Sequence
  Synthetic
uuuauucaggaaggaaaaugg

SEQ ID NO: 54540 - RNA, 22 nt, Artificial Sequence
  Synthetic
auuuauucaggaaggaaaaugg

SEQ ID NO: 54541 - RNA, 23 nt, Artificial Sequence
  Synthetic
cauuuauucaggaaggaaaaugg

SEQ ID NO: 54542 - RNA, 24 nt, Artificial Sequence
  Synthetic
acauuuauucaggaaggaaaaugg

SEQ ID NO: 54543 - RNA, 18 nt, Artificial Sequence
  Synthetic
caaaagcauggaaaaugg

SEQ ID NO: 54544 - RNA, 19 nt, Artificial Sequence
  Synthetic
ccaaaagcauggaaaaugg

SEQ ID NO: 54545 - RNA, 21 nt, Artificial Sequence
  Synthetic
agccaaaagcauggaaaaugg

SEQ ID NO: 54546 - RNA, 22 nt, Artificial Sequence
  Synthetic
uagccaaaagcauggaaaaugg

SEQ ID NO: 54547 - RNA, 23 nt, Artificial Sequence
  Synthetic
auagccaaaagcauggaaaaugg

SEQ ID NO: 54548 - RNA, 24 nt, Artificial Sequence
  Synthetic
aauagccaaaagcauggaaaaugg

SEQ ID NO: 54549 - RNA, 20 nt, Artificial Sequence
  Synthetic
agggauaauccuuaaaaugg

SEQ ID NO: 54550 - RNA, 21 nt, Artificial Sequence
  Synthetic
cagggauaauccuuaaaaugg

SEQ ID NO: 54551 - RNA, 22 nt, Artificial Sequence
  Synthetic
ucagggauaauccuuaaaaugg

SEQ ID NO: 54552 - RNA, 18 nt, Artificial Sequence
  Synthetic
ucaaucuacagcaaaugg

SEQ ID NO: 54553 - RNA, 19 nt, Artificial Sequence
  Synthetic
aucaaucuacagcaaaugg

SEQ ID NO: 54554 - RNA, 21 nt, Artificial Sequence
  Synthetic
ugaucaaucuacagcaaaugg

SEQ ID NO: 54555 - RNA, 22 nt, Artificial Sequence
  Synthetic
uugaucaaucuacagcaaaugg

SEQ ID NO: 54556 - RNA, 23 nt, Artificial Sequence
  Synthetic
auugaucaaucuacagcaaaugg

SEQ ID NO: 54557 - RNA, 24 nt, Artificial Sequence
  Synthetic
uauugaucaaucuacagcaaaugg

SEQ ID NO: 54558 - RNA, 18 nt, Artificial Sequence
  Synthetic
auuuuucuuagcaaaugg

SEQ ID NO: 54559 - RNA, 19 nt, Artificial Sequence
  Synthetic
uauuuuucuuagcaaaugg

SEQ ID NO: 54560 - RNA, 20 nt, Artificial Sequence
  Synthetic
uuauuuuucuuagcaaaugg

SEQ ID NO: 54561 - RNA, 21 nt, Artificial Sequence
  Synthetic
cuuauuuuucuuagcaaaugg

SEQ ID NO: 54562 - RNA, 22 nt, Artificial Sequence
  Synthetic
ccuuauuuuucuuagcaaaugg

SEQ ID NO: 54563 - RNA, 23 nt, Artificial Sequence
  Synthetic
accuuauuuuucuuagcaaaugg

SEQ ID NO: 54564 - RNA, 18 nt, Artificial Sequence
  Synthetic
uugaagaugaagaaaugg

SEQ ID NO: 54565 - RNA, 20 nt, Artificial Sequence
  Synthetic
uguugaagaugaagaaaugg

SEQ ID NO: 54566 - RNA, 21 nt, Artificial Sequence
  Synthetic
auguugaagaugaagaaaugg

SEQ ID NO: 54567 - RNA, 24 nt, Artificial Sequence
  Synthetic
uggauguugaagaugaagaaaugg

SEQ ID NO: 54568 - RNA, 18 nt, Artificial Sequence
  Synthetic
uuuaauuuagcuaaaugg

SEQ ID NO: 54569 - RNA, 19 nt, Artificial Sequence
  Synthetic
auuuaauuuagcuaaaugg

SEQ ID NO: 54570 - RNA, 21 nt, Artificial Sequence
  Synthetic
agauuuaauuuagcuaaaugg

SEQ ID NO: 54571 - RNA, 22 nt, Artificial Sequence
  Synthetic
uagauuuaauuuagcuaaaugg

SEQ ID NO: 54572 - RNA, 24 nt, Artificial Sequence
  Synthetic
uguagauuuaauuuagcuaaaugg

SEQ ID NO: 54573 - RNA, 19 nt, Artificial Sequence
  Synthetic
aggaauaugcagagaaugg

SEQ ID NO: 54574 - RNA, 20 nt, Artificial Sequence
  Synthetic
uaggaauaugcagagaaugg

SEQ ID NO: 54575 - RNA, 21 nt, Artificial Sequence
  Synthetic
uuaggaauaugcagagaaugg

SEQ ID NO: 54576 - RNA, 22 nt, Artificial Sequence
  Synthetic
uuuaggaauaugcagagaaugg

SEQ ID NO: 54577 - RNA, 23 nt, Artificial Sequence
  Synthetic
auuuaggaauaugcagagaaugg

SEQ ID NO: 54578 - RNA, 24 nt, Artificial Sequence
  Synthetic
aauuuaggaauaugcagagaaugg

SEQ ID NO: 54579 - RNA, 18 nt, Artificial Sequence
  Synthetic
ucuguagaaguggaaugg

SEQ ID NO: 54580 - RNA, 19 nt, Artificial Sequence
  Synthetic
cucuguagaaguggaaugg

SEQ ID NO: 54581 - RNA, 20 nt, Artificial Sequence
  Synthetic
acucuguagaaguggaaugg

SEQ ID NO: 54582 - RNA, 21 nt, Artificial Sequence
  Synthetic
aauauuuauuaaaaugaaugg

SEQ ID NO: 54583 - RNA, 22 nt, Artificial Sequence
  Synthetic
aaauauuuauuaaaaugaaugg

SEQ ID NO: 54584 - RNA, 23 nt, Artificial Sequence
  Synthetic
aaaauauuuauuaaaaugaaugg

SEQ ID NO: 54585 - RNA, 24 nt, Artificial Sequence
  Synthetic
aaaaauauuuauuaaaaugaaugg

SEQ ID NO: 54586 - RNA, 18 nt, Artificial Sequence
  Synthetic
cuauuaauuuaugaaugg

SEQ ID NO: 54587 - RNA, 19 nt, Artificial Sequence
  Synthetic
ccuauuaauuuaugaaugg

SEQ ID NO: 54588 - RNA, 20 nt, Artificial Sequence
  Synthetic
accuauuaauuuaugaaugg

SEQ ID NO: 54589 - RNA, 18 nt, Artificial Sequence
  Synthetic
ugcaaagaaagugaaugg

SEQ ID NO: 54590 - RNA, 19 nt, Artificial Sequence
  Synthetic
uugcaaagaaagugaaugg

SEQ ID NO: 54591 - RNA, 21 nt, Artificial Sequence
  Synthetic
aguugcaaagaaagugaaugg

SEQ ID NO: 54592 - RNA, 22 nt, Artificial Sequence
  Synthetic
aaguugcaaagaaagugaaugg

SEQ ID NO: 54593 - RNA, 24 nt, Artificial Sequence
  Synthetic
cgaaguugcaaagaaagugaaugg

SEQ ID NO: 54594 - RNA, 18 nt, Artificial Sequence
  Synthetic
uuggaggguuuugaaugg

SEQ ID NO: 54595 - RNA, 19 nt, Artificial Sequence
  Synthetic
auuggaggguuuugaaugg

SEQ ID NO: 54596 - RNA, 20 nt, Artificial Sequence
  Synthetic
uauuggaggguuuugaaugg

SEQ ID NO: 54597 - RNA, 21 nt, Artificial Sequence
  Synthetic
uuauuggaggguuuugaaugg

SEQ ID NO: 54598 - RNA, 23 nt, Artificial Sequence
  Synthetic
aguuauuggaggguuuugaaugg

SEQ ID NO: 54599 - RNA, 18 nt, Artificial Sequence
  Synthetic
uaccucacauacuaaugg

SEQ ID NO: 54600 - RNA, 19 nt, Artificial Sequence
  Synthetic
cuaccucacauacuaaugg

SEQ ID NO: 54601 - RNA, 21 nt, Artificial Sequence
  Synthetic
agcuaccucacauacuaaugg

SEQ ID NO: 54602 - RNA, 22 nt, Artificial Sequence
  Synthetic
aagcuaccucacauacuaaugg

SEQ ID NO: 54603 - RNA, 23 nt, Artificial Sequence
  Synthetic
aaagcuaccucacauacuaaugg

SEQ ID NO: 54604 - RNA, 24 nt, Artificial Sequence
  Synthetic
caaagcuaccucacauacuaaugg

SEQ ID NO: 54605 - RNA, 19 nt, Artificial Sequence
  Synthetic
ugucucuggcuuguaaugg

SEQ ID NO: 54606 - RNA, 20 nt, Artificial Sequence
  Synthetic
augucucuggcuuguaaugg

SEQ ID NO: 54607 - RNA, 21 nt, Artificial Sequence
  Synthetic
aaugucucuggcuuguaaugg

SEQ ID NO: 54608 - RNA, 22 nt, Artificial Sequence
  Synthetic
uaaugucucuggcuuguaaugg

SEQ ID NO: 54609 - RNA, 23 nt, Artificial Sequence
  Synthetic
auaaugucucuggcuuguaaugg

SEQ ID NO: 54610 - RNA, 24 nt, Artificial Sequence
  Synthetic
uauaaugucucuggcuuguaaugg

SEQ ID NO: 54611 - RNA, 21 nt, Artificial Sequence
  Synthetic
aaacauuuggugaauuaaugg

SEQ ID NO: 54612 - RNA, 22 nt, Artificial Sequence
  Synthetic
uaaacauuuggugaauuaaugg

SEQ ID NO: 54613 - RNA, 23 nt, Artificial Sequence
  Synthetic
uuaaacauuuggugaauuaaugg

SEQ ID NO: 54614 - RNA, 24 nt, Artificial Sequence
  Synthetic
uuuaaacauuuggugaauuaaugg

SEQ ID NO: 54615 - RNA, 19 nt, Artificial Sequence
  Synthetic
agacuauggcucuuaaugg

SEQ ID NO: 54616 - RNA, 20 nt, Artificial Sequence
  Synthetic
cagacuauggcucuuaaugg

SEQ ID NO: 54617 - RNA, 21 nt, Artificial Sequence
  Synthetic
acagacuauggcucuuaaugg

SEQ ID NO: 54618 - RNA, 22 nt, Artificial Sequence
  Synthetic
aacagacuauggcucuuaaugg

SEQ ID NO: 54619 - RNA, 23 nt, Artificial Sequence
  Synthetic
aaacagacuauggcucuuaaugg

SEQ ID NO: 54620 - RNA, 18 nt, Artificial Sequence
  Synthetic
acuguuauaauuuaaugg

SEQ ID NO: 54621 - RNA, 19 nt, Artificial Sequence
  Synthetic
uacuguuauaauuuaaugg

SEQ ID NO: 54622 - RNA, 20 nt, Artificial Sequence
  Synthetic
auacuguuauaauuuaaugg

SEQ ID NO: 54623 - RNA, 21 nt, Artificial Sequence
  Synthetic
aauacuguuauaauuuaaugg

SEQ ID NO: 54624 - RNA, 23 nt, Artificial Sequence
  Synthetic
ugaauacuguuauaauuuaaugg

SEQ ID NO: 54625 - RNA, 24 nt, Artificial Sequence
  Synthetic
cugaauacuguuauaauuuaaugg

SEQ ID NO: 54626 - RNA, 18 nt, Artificial Sequence
  Synthetic
aucuugaauguuuaaugg

SEQ ID NO: 54627 - RNA, 21 nt, Artificial Sequence
  Synthetic
aggaucuugaauguuuaaugg

SEQ ID NO: 54628 - RNA, 23 nt, Artificial Sequence
  Synthetic
agaggaucuugaauguuuaaugg

SEQ ID NO: 54629 - RNA, 24 nt, Artificial Sequence
  Synthetic
uagaggaucuugaauguuuaaugg

SEQ ID NO: 54630 - RNA, 24 nt, Artificial Sequence
  Synthetic
agggaaaagaagacauuuuaaugg

SEQ ID NO: 54631 - RNA, 18 nt, Artificial Sequence
  Synthetic
ucaauauuuaucacaugg

SEQ ID NO: 54632 - RNA, 19 nt, Artificial Sequence
  Synthetic
aucaauauuuaucacaugg

SEQ ID NO: 54633 - RNA, 20 nt, Artificial Sequence
  Synthetic
caucaauauuuaucacaugg

SEQ ID NO: 54634 - RNA, 22 nt, Artificial Sequence
  Synthetic
ugcaucaauauuuaucacaugg

SEQ ID NO: 54635 - RNA, 23 nt, Artificial Sequence
  Synthetic
uugcaucaauauuuaucacaugg

SEQ ID NO: 54636 - RNA, 24 nt, Artificial Sequence
  Synthetic
uuugcaucaauauuuaucacaugg

SEQ ID NO: 54637 - RNA, 21 nt, Artificial Sequence
  Synthetic
aaauacuuuguagggacaugg

SEQ ID NO: 54638 - RNA, 22 nt, Artificial Sequence
  Synthetic
aaaauacuuuguagggacaugg

SEQ ID NO: 54639 - RNA, 19 nt, Artificial Sequence
  Synthetic
agacuagcuggcuacaugg

SEQ ID NO: 54640 - RNA, 21 nt, Artificial Sequence
  Synthetic
agagacuagcuggcuacaugg

SEQ ID NO: 54641 - RNA, 22 nt, Artificial Sequence
  Synthetic
uagagacuagcuggcuacaugg

SEQ ID NO: 54642 - RNA, 23 nt, Artificial Sequence
  Synthetic
auagagacuagcuggcuacaugg

SEQ ID NO: 54643 - RNA, 24 nt, Artificial Sequence
  Synthetic
aauagagacuagcuggcuacaugg

SEQ ID NO: 54644 - RNA, 18 nt, Artificial Sequence
  Synthetic
ccuuguaugucuacaugg

SEQ ID NO: 54645 - RNA, 20 nt, Artificial Sequence
  Synthetic
ugccuuguaugucuacaugg

SEQ ID NO: 54646 - RNA, 21 nt, Artificial Sequence
  Synthetic
cugccuuguaugucuacaugg

SEQ ID NO: 54647 - RNA, 22 nt, Artificial Sequence
  Synthetic
ucugccuuguaugucuacaugg

SEQ ID NO: 54648 - RNA, 23 nt, Artificial Sequence
  Synthetic
cucugccuuguaugucuacaugg

SEQ ID NO: 54649 - RNA, 18 nt, Artificial Sequence
  Synthetic
aguuucacucugccaugg

SEQ ID NO: 54650 - RNA, 19 nt, Artificial Sequence
  Synthetic
aaguuucacucugccaugg

SEQ ID NO: 54651 - RNA, 20 nt, Artificial Sequence
  Synthetic
uaaguuucacucugccaugg

SEQ ID NO: 54652 - RNA, 21 nt, Artificial Sequence
  Synthetic
cuaaguuucacucugccaugg

SEQ ID NO: 54653 - RNA, 22 nt, Artificial Sequence
  Synthetic
ucuaaguuucacucugccaugg

SEQ ID NO: 54654 - RNA, 23 nt, Artificial Sequence
  Synthetic
cucuaaguuucacucugccaugg

SEQ ID NO: 54655 - RNA, 24 nt, Artificial Sequence
  Synthetic
ucucuaaguuucacucugccaugg

SEQ ID NO: 54656 - RNA, 20 nt, Artificial Sequence
  Synthetic
uggggcacauuccuccaugg

SEQ ID NO: 54657 - RNA, 21 nt, Artificial Sequence
  Synthetic
uuggggcacauuccuccaugg

SEQ ID NO: 54658 - RNA, 22 nt, Artificial Sequence
  Synthetic
uuuggggcacauuccuccaugg

SEQ ID NO: 54659 - RNA, 23 nt, Artificial Sequence
  Synthetic
auuuggggcacauuccuccaugg

SEQ ID NO: 54660 - RNA, 24 nt, Artificial Sequence
  Synthetic
uauuuggggcacauuccuccaugg

SEQ ID NO: 54661 - RNA, 18 nt, Artificial Sequence
  Synthetic
uacggaauggaugcaugg

SEQ ID NO: 54662 - RNA, 21 nt, Artificial Sequence
  Synthetic
agguacggaauggaugcaugg

SEQ ID NO: 54663 - RNA, 22 nt, Artificial Sequence
  Synthetic
uagguacggaauggaugcaugg

SEQ ID NO: 54664 - RNA, 23 nt, Artificial Sequence
  Synthetic
auagguacggaauggaugcaugg

SEQ ID NO: 54665 - RNA, 24 nt, Artificial Sequence
  Synthetic
aauagguacggaauggaugcaugg

SEQ ID NO: 54666 - RNA, 18 nt, Artificial Sequence
  Synthetic
cagcauagcugugcaugg

SEQ ID NO: 54667 - RNA, 19 nt, Artificial Sequence
  Synthetic
acagcauagcugugcaugg

SEQ ID NO: 54668 - RNA, 20 nt, Artificial Sequence
  Synthetic
uacagcauagcugugcaugg

SEQ ID NO: 54669 - RNA, 21 nt, Artificial Sequence
  Synthetic
auacagcauagcugugcaugg

SEQ ID NO: 54670 - RNA, 22 nt, Artificial Sequence
  Synthetic
aauacagcauagcugugcaugg

SEQ ID NO: 54671 - RNA, 23 nt, Artificial Sequence
  Synthetic
caauacagcauagcugugcaugg

SEQ ID NO: 54672 - RNA, 24 nt, Artificial Sequence
  Synthetic
ucaauacagcauagcugugcaugg

SEQ ID NO: 54673 - RNA, 20 nt, Artificial Sequence
  Synthetic
aggaaaaagacacaucaugg

SEQ ID NO: 54674 - RNA, 21 nt, Artificial Sequence
  Synthetic
uaggaaaaagacacaucaugg

SEQ ID NO: 54675 - RNA, 22 nt, Artificial Sequence
  Synthetic
cuaggaaaaagacacaucaugg

SEQ ID NO: 54676 - RNA, 23 nt, Artificial Sequence
  Synthetic
ccuaggaaaaagacacaucaugg

SEQ ID NO: 54677 - RNA, 24 nt, Artificial Sequence
  Synthetic
uccuaggaaaaagacacaucaugg

SEQ ID NO: 54678 - RNA, 18 nt, Artificial Sequence
  Synthetic
agcuauaugucaucaugg

SEQ ID NO: 54679 - RNA, 19 nt, Artificial Sequence
  Synthetic
aagcuauaugucaucaugg

SEQ ID NO: 54680 - RNA, 20 nt, Artificial Sequence
  Synthetic
aaagcuauaugucaucaugg

SEQ ID NO: 54681 - RNA, 21 nt, Artificial Sequence
  Synthetic
aaaagcuauaugucaucaugg

SEQ ID NO: 54682 - RNA, 22 nt, Artificial Sequence
  Synthetic
aaaaagcuauaugucaucaugg

SEQ ID NO: 54683 - RNA, 23 nt, Artificial Sequence
  Synthetic
caaaaagcuauaugucaucaugg

SEQ ID NO: 54684 - RNA, 24 nt, Artificial Sequence
  Synthetic
ccaaaaagcuauaugucaucaugg

SEQ ID NO: 54685 - RNA, 21 nt, Artificial Sequence
  Synthetic
uagaaaagcaaaaaaagaugg

SEQ ID NO: 54686 - RNA, 22 nt, Artificial Sequence
  Synthetic
auagaaaagcaaaaaaagaugg

SEQ ID NO: 54687 - RNA, 24 nt, Artificial Sequence
  Synthetic
ugauagaaaagcaaaaaaagaugg

SEQ ID NO: 54688 - RNA, 21 nt, Artificial Sequence
  Synthetic
aagaaguggcuggcaagaugg

SEQ ID NO: 54689 - RNA, 22 nt, Artificial Sequence
  Synthetic
aaagaaguggcuggcaagaugg

SEQ ID NO: 54690 - RNA, 23 nt, Artificial Sequence
  Synthetic
caaagaaguggcuggcaagaugg

SEQ ID NO: 54691 - RNA, 24 nt, Artificial Sequence
  Synthetic
ccaaagaaguggcuggcaagaugg

SEQ ID NO: 54692 - RNA, 18 nt, Artificial Sequence
  Synthetic
agcaaguauagcagaugg

SEQ ID NO: 54693 - RNA, 19 nt, Artificial Sequence
  Synthetic
uagcaaguauagcagaugg

SEQ ID NO: 54694 - RNA, 20 nt, Artificial Sequence
  Synthetic
cuagcaaguauagcagaugg

SEQ ID NO: 54695 - RNA, 21 nt, Artificial Sequence
  Synthetic
acuagcaaguauagcagaugg

SEQ ID NO: 54696 - RNA, 22 nt, Artificial Sequence
  Synthetic
cacuagcaaguauagcagaugg

SEQ ID NO: 54697 - RNA, 23 nt, Artificial Sequence
  Synthetic
acacuagcaaguauagcagaugg

SEQ ID NO: 54698 - RNA, 24 nt, Artificial Sequence
  Synthetic
aacacuagcaaguauagcagaugg

SEQ ID NO: 54699 - RNA, 19 nt, Artificial Sequence
  Synthetic
uguaggcauucucagaugg

SEQ ID NO: 54700 - RNA, 20 nt, Artificial Sequence
  Synthetic
cuguaggcauucucagaugg

SEQ ID NO: 54701 - RNA, 24 nt, Artificial Sequence
  Synthetic
ugggcuguaggcauucucagaugg

SEQ ID NO: 54702 - RNA, 18 nt, Artificial Sequence
  Synthetic
agagagaacuggagaugg

SEQ ID NO: 54703 - RNA, 19 nt, Artificial Sequence
  Synthetic
cagagagaacuggagaugg

SEQ ID NO: 54704 - RNA, 20 nt, Artificial Sequence
  Synthetic
acagagagaacuggagaugg

SEQ ID NO: 54705 - RNA, 21 nt, Artificial Sequence
  Synthetic
uacagagagaacuggagaugg

SEQ ID NO: 54706 - RNA, 24 nt, Artificial Sequence
  Synthetic
ugguacagagagaacuggagaugg

SEQ ID NO: 54707 - RNA, 22 nt, Artificial Sequence
  Synthetic
ugugaaaauaagaaugagaugg

SEQ ID NO: 54708 - RNA, 23 nt, Artificial Sequence
  Synthetic
cugugaaaauaagaaugagaugg

SEQ ID NO: 54709 - RNA, 24 nt, Artificial Sequence
  Synthetic
ucugugaaaauaagaaugagaugg

SEQ ID NO: 54710 - RNA, 19 nt, Artificial Sequence
  Synthetic
ugaaucuauuaugagaugg

SEQ ID NO: 54711 - RNA, 20 nt, Artificial Sequence
  Synthetic
augaaucuauuaugagaugg

SEQ ID NO: 54712 - RNA, 21 nt, Artificial Sequence
  Synthetic
aaugaaucuauuaugagaugg

SEQ ID NO: 54713 - RNA, 22 nt, Artificial Sequence
  Synthetic
aaaugaaucuauuaugagaugg

SEQ ID NO: 54714 - RNA, 23 nt, Artificial Sequence
  Synthetic
aaaaugaaucuauuaugagaugg

SEQ ID NO: 54715 - RNA, 18 nt, Artificial Sequence
  Synthetic
ucauauuagucuagaugg

SEQ ID NO: 54716 - RNA, 19 nt, Artificial Sequence
  Synthetic
aucauauuagucuagaugg

SEQ ID NO: 54717 - RNA, 21 nt, Artificial Sequence
  Synthetic
agaucauauuagucuagaugg

SEQ ID NO: 54718 - RNA, 24 nt, Artificial Sequence
  Synthetic
uggagaucauauuagucuagaugg

SEQ ID NO: 54719 - RNA, 18 nt, Artificial Sequence
  Synthetic
ugauuuuuaguuagaugg

SEQ ID NO: 54720 - RNA, 19 nt, Artificial Sequence
  Synthetic
cugauuuuuaguuagaugg

SEQ ID NO: 54721 - RNA, 20 nt, Artificial Sequence
  Synthetic
ccugauuuuuaguuagaugg

SEQ ID NO: 54722 - RNA, 21 nt, Artificial Sequence
  Synthetic
uccugauuuuuaguuagaugg

SEQ ID NO: 54723 - RNA, 22 nt, Artificial Sequence
  Synthetic
cuccugauuuuuaguuagaugg

SEQ ID NO: 54724 - RNA, 23 nt, Artificial Sequence
  Synthetic
acuccugauuuuuaguuagaugg

SEQ ID NO: 54725 - RNA, 24 nt, Artificial Sequence
  Synthetic
aacuccugauuuuuaguuagaugg

SEQ ID NO: 54726 - RNA, 19 nt, Artificial Sequence
  Synthetic
uguauuggccuggggaugg

SEQ ID NO: 54727 - RNA, 21 nt, Artificial Sequence
  Synthetic
uguguauuggccuggggaugg

SEQ ID NO: 54728 - RNA, 22 nt, Artificial Sequence
  Synthetic
auguguauuggccuggggaugg

SEQ ID NO: 54729 - RNA, 24 nt, Artificial Sequence
  Synthetic
ugauguguauuggccuggggaugg

SEQ ID NO: 54730 - RNA, 18 nt, Artificial Sequence
  Synthetic
acuugaauaguuggaugg

SEQ ID NO: 54731 - RNA, 19 nt, Artificial Sequence
  Synthetic
aacuugaauaguuggaugg

SEQ ID NO: 54732 - RNA, 20 nt, Artificial Sequence
  Synthetic
uaacuugaauaguuggaugg

SEQ ID NO: 54733 - RNA, 21 nt, Artificial Sequence
  Synthetic
uuaacuugaauaguuggaugg

SEQ ID NO: 54734 - RNA, 22 nt, Artificial Sequence
  Synthetic
cuuaacuugaauaguuggaugg

SEQ ID NO: 54735 - RNA, 23 nt, Artificial Sequence
  Synthetic
ucuuaacuugaauaguuggaugg

SEQ ID NO: 54736 - RNA, 24 nt, Artificial Sequence
  Synthetic
uucuuaacuugaauaguuggaugg

SEQ ID NO: 54737 - RNA, 20 nt, Artificial Sequence
  Synthetic
ugggaaugucuuuuggaugg

SEQ ID NO: 54738 - RNA, 21 nt, Artificial Sequence
  Synthetic
cugggaaugucuuuuggaugg

SEQ ID NO: 54739 - RNA, 22 nt, Artificial Sequence
  Synthetic
acugggaaugucuuuuggaugg

SEQ ID NO: 54740 - RNA, 23 nt, Artificial Sequence
  Synthetic
uacugggaaugucuuuuggaugg

SEQ ID NO: 54741 - RNA, 24 nt, Artificial Sequence
  Synthetic
uuacugggaaugucuuuuggaugg

SEQ ID NO: 54742 - RNA, 18 nt, Artificial Sequence
  Synthetic
cauucaaaauaaugaugg

SEQ ID NO: 54743 - RNA, 19 nt, Artificial Sequence
  Synthetic
acauucaaaauaaugaugg

SEQ ID NO: 54744 - RNA, 20 nt, Artificial Sequence
  Synthetic
uacauucaaaauaaugaugg

SEQ ID NO: 54745 - RNA, 21 nt, Artificial Sequence
  Synthetic
uuacauucaaaauaaugaugg

SEQ ID NO: 54746 - RNA, 22 nt, Artificial Sequence
  Synthetic
uuuacauucaaaauaaugaugg

SEQ ID NO: 54747 - RNA, 23 nt, Artificial Sequence
  Synthetic
auuuacauucaaaauaaugaugg

SEQ ID NO: 54748 - RNA, 24 nt, Artificial Sequence
  Synthetic
uauuuacauucaaaauaaugaugg

SEQ ID NO: 54749 - RNA, 19 nt, Artificial Sequence
  Synthetic
agagaugaauuacugaugg

SEQ ID NO: 54750 - RNA, 20 nt, Artificial Sequence
  Synthetic
aagagaugaauuacugaugg

SEQ ID NO: 54751 - RNA, 21 nt, Artificial Sequence
  Synthetic
aaagagaugaauuacugaugg

SEQ ID NO: 54752 - RNA, 22 nt, Artificial Sequence
  Synthetic
caaagagaugaauuacugaugg

SEQ ID NO: 54753 - RNA, 23 nt, Artificial Sequence
  Synthetic
acaaagagaugaauuacugaugg

SEQ ID NO: 54754 - RNA, 21 nt, Artificial Sequence
  Synthetic
acaaaggaaagagaaauaugg

SEQ ID NO: 54755 - RNA, 22 nt, Artificial Sequence
  Synthetic
aacaaaggaaagagaaauaugg

SEQ ID NO: 54756 - RNA, 23 nt, Artificial Sequence
  Synthetic
aaacaaaggaaagagaaauaugg

SEQ ID NO: 54757 - RNA, 18 nt, Artificial Sequence
  Synthetic
aaagaugagcuaauaugg

SEQ ID NO: 54758 - RNA, 19 nt, Artificial Sequence
  Synthetic
aaaagaugagcuaauaugg

SEQ ID NO: 54759 - RNA, 20 nt, Artificial Sequence
  Synthetic
caaaagaugagcuaauaugg

SEQ ID NO: 54760 - RNA, 21 nt, Artificial Sequence
  Synthetic
ucaaaagaugagcuaauaugg

SEQ ID NO: 54761 - RNA, 22 nt, Artificial Sequence
  Synthetic
aucaaaagaugagcuaauaugg

SEQ ID NO: 54762 - RNA, 23 nt, Artificial Sequence
  Synthetic
aaucaaaagaugagcuaauaugg

SEQ ID NO: 54763 - RNA, 24 nt, Artificial Sequence
  Synthetic
aaaucaaaagaugagcuaauaugg

SEQ ID NO: 54764 - RNA, 18 nt, Artificial Sequence
  Synthetic
uuaaaggagcagauaugg

SEQ ID NO: 54765 - RNA, 19 nt, Artificial Sequence
  Synthetic
uuuaaaggagcagauaugg

SEQ ID NO: 54766 - RNA, 20 nt, Artificial Sequence
  Synthetic
uuuuaaaggagcagauaugg

SEQ ID NO: 54767 - RNA, 21 nt, Artificial Sequence
  Synthetic
uuuuuaaaggagcagauaugg

SEQ ID NO: 54768 - RNA, 22 nt, Artificial Sequence
  Synthetic
uuuuuuaaaggagcagauaugg

SEQ ID NO: 54769 - RNA, 23 nt, Artificial Sequence
  Synthetic
auuuuuuaaaggagcagauaugg

SEQ ID NO: 54770 - RNA, 24 nt, Artificial Sequence
  Synthetic
cauuuuuuaaaggagcagauaugg

SEQ ID NO: 54771 - RNA, 18 nt, Artificial Sequence
  Synthetic
acuauuacauagauaugg

SEQ ID NO: 54772 - RNA, 19 nt, Artificial Sequence
  Synthetic
uacuauuacauagauaugg

SEQ ID NO: 54773 - RNA, 20 nt, Artificial Sequence
  Synthetic
auacuauuacauagauaugg

SEQ ID NO: 54774 - RNA, 23 nt, Artificial Sequence
  Synthetic
uggauacuauuacauagauaugg

SEQ ID NO: 54775 - RNA, 24 nt, Artificial Sequence
  Synthetic
auggauacuauuacauagauaugg

SEQ ID NO: 54776 - RNA, 18 nt, Artificial Sequence
  Synthetic
ucuuauaaugaucuaugg

SEQ ID NO: 54777 - RNA, 19 nt, Artificial Sequence
  Synthetic
uucuuauaaugaucuaugg

SEQ ID NO: 54778 - RNA, 20 nt, Artificial Sequence
  Synthetic
cuucuuauaaugaucuaugg

SEQ ID NO: 54779 - RNA, 21 nt, Artificial Sequence
  Synthetic
ccuucuuauaaugaucuaugg

SEQ ID NO: 54780 - RNA, 22 nt, Artificial Sequence
  Synthetic
uccuucuuauaaugaucuaugg

SEQ ID NO: 54781 - RNA, 23 nt, Artificial Sequence
  Synthetic
uuccuucuuauaaugaucuaugg

SEQ ID NO: 54782 - RNA, 24 nt, Artificial Sequence
  Synthetic
cuuccuucuuauaaugaucuaugg

SEQ ID NO: 54783 - RNA, 18 nt, Artificial Sequence
  Synthetic
cgaaauaugugaguaugg

SEQ ID NO: 54784 - RNA, 19 nt, Artificial Sequence
  Synthetic
ucgaaauaugugaguaugg

SEQ ID NO: 54785 - RNA, 20 nt, Artificial Sequence
  Synthetic
cucgaaauaugugaguaugg

SEQ ID NO: 54786 - RNA, 21 nt, Artificial Sequence
  Synthetic
acucgaaauaugugaguaugg

SEQ ID NO: 54787 - RNA, 22 nt, Artificial Sequence
  Synthetic
aacucgaaauaugugaguaugg

SEQ ID NO: 54788 - RNA, 23 nt, Artificial Sequence
  Synthetic
aaacucgaaauaugugaguaugg

SEQ ID NO: 54789 - RNA, 24 nt, Artificial Sequence
  Synthetic
caaacucgaaauaugugaguaugg

SEQ ID NO: 54790 - RNA, 18 nt, Artificial Sequence
  Synthetic
aaggaagggauaguaugg

SEQ ID NO: 54791 - RNA, 19 nt, Artificial Sequence
  Synthetic
caaggaagggauaguaugg

SEQ ID NO: 54792 - RNA, 20 nt, Artificial Sequence
  Synthetic
acaaggaagggauaguaugg

SEQ ID NO: 54793 - RNA, 21 nt, Artificial Sequence
  Synthetic
uacaaggaagggauaguaugg

SEQ ID NO: 54794 - RNA, 22 nt, Artificial Sequence
  Synthetic
uuacaaggaagggauaguaugg

SEQ ID NO: 54795 - RNA, 23 nt, Artificial Sequence
  Synthetic
auuacaaggaagggauaguaugg

SEQ ID NO: 54796 - RNA, 24 nt, Artificial Sequence
  Synthetic
uauuacaaggaagggauaguaugg

SEQ ID NO: 54797 - RNA, 18 nt, Artificial Sequence
  Synthetic
caugucuccaguguaugg

SEQ ID NO: 54798 - RNA, 19 nt, Artificial Sequence
  Synthetic
ucaugucuccaguguaugg

SEQ ID NO: 54799 - RNA, 20 nt, Artificial Sequence
  Synthetic
aucaugucuccaguguaugg

SEQ ID NO: 54800 - RNA, 22 nt, Artificial Sequence
  Synthetic
ugaucaugucuccaguguaugg

SEQ ID NO: 54801 - RNA, 23 nt, Artificial Sequence
  Synthetic
uugaucaugucuccaguguaugg

SEQ ID NO: 54802 - RNA, 24 nt, Artificial Sequence
  Synthetic
auugaucaugucuccaguguaugg

SEQ ID NO: 54803 - RNA, 19 nt, Artificial Sequence
  Synthetic
uguaaacaaaauauuaugg

SEQ ID NO: 54804 - RNA, 20 nt, Artificial Sequence
  Synthetic
cuguaaacaaaauauuaugg

SEQ ID NO: 54805 - RNA, 21 nt, Artificial Sequence
  Synthetic
acuguaaacaaaauauuaugg

SEQ ID NO: 54806 - RNA, 23 nt, Artificial Sequence
  Synthetic
agacuguaaacaaaauauuaugg

SEQ ID NO: 54807 - RNA, 19 nt, Artificial Sequence
  Synthetic
aggaauuucuaauuuaugg

SEQ ID NO: 54808 - RNA, 20 nt, Artificial Sequence
  Synthetic
aaggaauuucuaauuuaugg

SEQ ID NO: 54809 - RNA, 22 nt, Artificial Sequence
  Synthetic
agaaggaauuucuaauuuaugg

SEQ ID NO: 54810 - RNA, 23 nt, Artificial Sequence
  Synthetic
aagaaggaauuucuaauuuaugg

SEQ ID NO: 54811 - RNA, 24 nt, Artificial Sequence
  Synthetic
caagaaggaauuucuaauuuaugg

SEQ ID NO: 54812 - RNA, 18 nt, Artificial Sequence
  Synthetic
agagauucuuuuuuaugg

SEQ ID NO: 54813 - RNA, 19 nt, Artificial Sequence
  Synthetic
aagagauucuuuuuuaugg

SEQ ID NO: 54814 - RNA, 20 nt, Artificial Sequence
  Synthetic
aaagagauucuuuuuuaugg

SEQ ID NO: 54815 - RNA, 21 nt, Artificial Sequence
  Synthetic
aaaagagauucuuuuuuaugg

SEQ ID NO: 54816 - RNA, 22 nt, Artificial Sequence
  Synthetic
caaaagagauucuuuuuuaugg

SEQ ID NO: 54817 - RNA, 24 nt, Artificial Sequence
  Synthetic
ugcaaaagagauucuuuuuuaugg

SEQ ID NO: 54818 - RNA, 18 nt, Artificial Sequence
  Synthetic
uccaaccuguccaacugg

SEQ ID NO: 54819 - RNA, 19 nt, Artificial Sequence
  Synthetic
uuccaaccuguccaacugg

SEQ ID NO: 54820 - RNA, 20 nt, Artificial Sequence
  Synthetic
uuuccaaccuguccaacugg

SEQ ID NO: 54821 - RNA, 21 nt, Artificial Sequence
  Synthetic
auuuccaaccuguccaacugg

SEQ ID NO: 54822 - RNA, 22 nt, Artificial Sequence
  Synthetic
aauuuccaaccuguccaacugg

SEQ ID NO: 54823 - RNA, 23 nt, Artificial Sequence
  Synthetic
uaauuuccaaccuguccaacugg

SEQ ID NO: 54824 - RNA, 24 nt, Artificial Sequence
  Synthetic
uuaauuuccaaccuguccaacugg

SEQ ID NO: 54825 - RNA, 18 nt, Artificial Sequence
  Synthetic
aacaaucccagcaacugg

SEQ ID NO: 54826 - RNA, 19 nt, Artificial Sequence
  Synthetic
uaacaaucccagcaacugg

SEQ ID NO: 54827 - RNA, 20 nt, Artificial Sequence
  Synthetic
auaacaaucccagcaacugg

SEQ ID NO: 54828 - RNA, 22 nt, Artificial Sequence
  Synthetic
agauaacaaucccagcaacugg

SEQ ID NO: 54829 - RNA, 23 nt, Artificial Sequence
  Synthetic
uagauaacaaucccagcaacugg

SEQ ID NO: 54830 - RNA, 18 nt, Artificial Sequence
  Synthetic
aagauugugaagaacugg

SEQ ID NO: 54831 - RNA, 19 nt, Artificial Sequence
  Synthetic
aaagauugugaagaacugg

SEQ ID NO: 54832 - RNA, 21 nt, Artificial Sequence
  Synthetic
ugaaagauugugaagaacugg

SEQ ID NO: 54833 - RNA, 22 nt, Artificial Sequence
  Synthetic
uugaaagauugugaagaacugg

SEQ ID NO: 54834 - RNA, 18 nt, Artificial Sequence
  Synthetic
agaaaaauacugaacugg

SEQ ID NO: 54835 - RNA, 19 nt, Artificial Sequence
  Synthetic
uagaaaaauacugaacugg

SEQ ID NO: 54836 - RNA, 21 nt, Artificial Sequence
  Synthetic
aguagaaaaauacugaacugg

SEQ ID NO: 54837 - RNA, 22 nt, Artificial Sequence
  Synthetic
aaguagaaaaauacugaacugg

SEQ ID NO: 54838 - RNA, 23 nt, Artificial Sequence
  Synthetic
caaguagaaaaauacugaacugg

SEQ ID NO: 54839 - RNA, 24 nt, Artificial Sequence
  Synthetic
ucaaguagaaaaauacugaacugg

SEQ ID NO: 54840 - RNA, 18 nt, Artificial Sequence
  Synthetic
agaauagaauaacacugg

SEQ ID NO: 54841 - RNA, 19 nt, Artificial Sequence
  Synthetic
uagaauagaauaacacugg

SEQ ID NO: 54842 - RNA, 20 nt, Artificial Sequence
  Synthetic
auagaauagaauaacacugg

SEQ ID NO: 54843 - RNA, 21 nt, Artificial Sequence
  Synthetic
aauagaauagaauaacacugg

SEQ ID NO: 54844 - RNA, 22 nt, Artificial Sequence
  Synthetic
aaauagaauagaauaacacugg

SEQ ID NO: 54845 - RNA, 24 nt, Artificial Sequence
  Synthetic
ugaaauagaauagaauaacacugg

SEQ ID NO: 54846 - RNA, 18 nt, Artificial Sequence
  Synthetic
uuguuuacuucccacugg

SEQ ID NO: 54847 - RNA, 19 nt, Artificial Sequence
  Synthetic
auuguuuacuucccacugg

SEQ ID NO: 54848 - RNA, 20 nt, Artificial Sequence
  Synthetic
uauuguuuacuucccacugg

SEQ ID NO: 54849 - RNA, 21 nt, Artificial Sequence
  Synthetic
uuauuguuuacuucccacugg

SEQ ID NO: 54850 - RNA, 22 nt, Artificial Sequence
  Synthetic
cuuauuguuuacuucccacugg

SEQ ID NO: 54851 - RNA, 23 nt, Artificial Sequence
  Synthetic
ccuuauuguuuacuucccacugg

SEQ ID NO: 54852 - RNA, 24 nt, Artificial Sequence
  Synthetic
cccuuauuguuuacuucccacugg

SEQ ID NO: 54853 - RNA, 19 nt, Artificial Sequence
  Synthetic
uggcauguuuauagacugg

SEQ ID NO: 54854 - RNA, 20 nt, Artificial Sequence
  Synthetic
auggcauguuuauagacugg

SEQ ID NO: 54855 - RNA, 21 nt, Artificial Sequence
  Synthetic
uauggcauguuuauagacugg

SEQ ID NO: 54856 - RNA, 22 nt, Artificial Sequence
  Synthetic
auauggcauguuuauagacugg

SEQ ID NO: 54857 - RNA, 23 nt, Artificial Sequence
  Synthetic
uauauggcauguuuauagacugg

SEQ ID NO: 54858 - RNA, 24 nt, Artificial Sequence
  Synthetic
uuauauggcauguuuauagacugg

SEQ ID NO: 54859 - RNA, 18 nt, Artificial Sequence
  Synthetic
auccaauuauaauacugg

SEQ ID NO: 54860 - RNA, 19 nt, Artificial Sequence
  Synthetic
aauccaauuauaauacugg

SEQ ID NO: 54861 - RNA, 20 nt, Artificial Sequence
  Synthetic
uaauccaauuauaauacugg

SEQ ID NO: 54862 - RNA, 21 nt, Artificial Sequence
  Synthetic
uuaauccaauuauaauacugg

SEQ ID NO: 54863 - RNA, 22 nt, Artificial Sequence
  Synthetic
cuuaauccaauuauaauacugg

SEQ ID NO: 54864 - RNA, 23 nt, Artificial Sequence
  Synthetic
acuuaauccaauuauaauacugg

SEQ ID NO: 54865 - RNA, 24 nt, Artificial Sequence
  Synthetic
aacuuaauccaauuauaauacugg

SEQ ID NO: 54866 - RNA, 20 nt, Artificial Sequence
  Synthetic
agguaacacacaaguacugg

SEQ ID NO: 54867 - RNA, 21 nt, Artificial Sequence
  Synthetic
aagguaacacacaaguacugg

SEQ ID NO: 54868 - RNA, 22 nt, Artificial Sequence
  Synthetic
uaagguaacacacaaguacugg

SEQ ID NO: 54869 - RNA, 23 nt, Artificial Sequence
  Synthetic
cuaagguaacacacaaguacugg

SEQ ID NO: 54870 - RNA, 24 nt, Artificial Sequence
  Synthetic
acuaagguaacacacaaguacugg

SEQ ID NO: 54871 - RNA, 18 nt, Artificial Sequence
  Synthetic
ccuuuaaaaugguacugg

SEQ ID NO: 54872 - RNA, 19 nt, Artificial Sequence
  Synthetic
uccuuuaaaaugguacugg

SEQ ID NO: 54873 - RNA, 20 nt, Artificial Sequence
  Synthetic
cuccuuuaaaaugguacugg

SEQ ID NO: 54874 - RNA, 21 nt, Artificial Sequence
  Synthetic
ucuccuuuaaaaugguacugg

SEQ ID NO: 54875 - RNA, 22 nt, Artificial Sequence
  Synthetic
uucuccuuuaaaaugguacugg

SEQ ID NO: 54876 - RNA, 18 nt, Artificial Sequence
  Synthetic
ugaaaugaaacuuacugg

SEQ ID NO: 54877 - RNA, 20 nt, Artificial Sequence
  Synthetic
agugaaaugaaacuuacugg

SEQ ID NO: 54878 - RNA, 21 nt, Artificial Sequence
  Synthetic
aagugaaaugaaacuuacugg

SEQ ID NO: 54879 - RNA, 23 nt, Artificial Sequence
  Synthetic
ugaagugaaaugaaacuuacugg

SEQ ID NO: 54880 - RNA, 24 nt, Artificial Sequence
  Synthetic
cugaagugaaaugaaacuuacugg

SEQ ID NO: 54881 - RNA, 18 nt, Artificial Sequence
  Synthetic
aagucuaauuccaccugg

SEQ ID NO: 54882 - RNA, 20 nt, Artificial Sequence
  Synthetic
ugaagucuaauuccaccugg

SEQ ID NO: 54883 - RNA, 22 nt, Artificial Sequence
  Synthetic
ugugaagucuaauuccaccugg

SEQ ID NO: 54884 - RNA, 23 nt, Artificial Sequence
  Synthetic
augugaagucuaauuccaccugg

SEQ ID NO: 54885 - RNA, 24 nt, Artificial Sequence
  Synthetic
caugugaagucuaauuccaccugg

SEQ ID NO: 54886 - RNA, 18 nt, Artificial Sequence
  Synthetic
cgaaauccccuuaccugg

SEQ ID NO: 54887 - RNA, 19 nt, Artificial Sequence
  Synthetic
ucgaaauccccuuaccugg

SEQ ID NO: 54888 - RNA, 20 nt, Artificial Sequence
  Synthetic
uucgaaauccccuuaccugg

SEQ ID NO: 54889 - RNA, 21 nt, Artificial Sequence
  Synthetic
auucgaaauccccuuaccugg

SEQ ID NO: 54890 - RNA, 22 nt, Artificial Sequence
  Synthetic
uauucgaaauccccuuaccugg

SEQ ID NO: 54891 - RNA, 23 nt, Artificial Sequence
  Synthetic
uuauucgaaauccccuuaccugg

SEQ ID NO: 54892 - RNA, 24 nt, Artificial Sequence
  Synthetic
cuuauucgaaauccccuuaccugg

SEQ ID NO: 54893 - RNA, 18 nt, Artificial Sequence
  Synthetic
ccacaggcaggccccugg

SEQ ID NO: 54894 - RNA, 19 nt, Artificial Sequence
  Synthetic
uccacaggcaggccccugg

SEQ ID NO: 54895 - RNA, 20 nt, Artificial Sequence
  Synthetic
uuccacaggcaggccccugg

SEQ ID NO: 54896 - RNA, 21 nt, Artificial Sequence
  Synthetic
cuuccacaggcaggccccugg

SEQ ID NO: 54897 - RNA, 22 nt, Artificial Sequence
  Synthetic
ccuuccacaggcaggccccugg

SEQ ID NO: 54898 - RNA, 23 nt, Artificial Sequence
  Synthetic
uccuuccacaggcaggccccugg

SEQ ID NO: 54899 - RNA, 18 nt, Artificial Sequence
  Synthetic
uguguaguauagcccugg

SEQ ID NO: 54900 - RNA, 19 nt, Artificial Sequence
  Synthetic
uuguguaguauagcccugg

SEQ ID NO: 54901 - RNA, 20 nt, Artificial Sequence
  Synthetic
cuuguguaguauagcccugg

SEQ ID NO: 54902 - RNA, 21 nt, Artificial Sequence
  Synthetic
acuuguguaguauagcccugg

SEQ ID NO: 54903 - RNA, 22 nt, Artificial Sequence
  Synthetic
aacuuguguaguauagcccugg

SEQ ID NO: 54904 - RNA, 23 nt, Artificial Sequence
  Synthetic
caacuuguguaguauagcccugg

SEQ ID NO: 54905 - RNA, 24 nt, Artificial Sequence
  Synthetic
acaacuuguguaguauagcccugg

SEQ ID NO: 54906 - RNA, 18 nt, Artificial Sequence
  Synthetic
cuguauagcuuucccugg

SEQ ID NO: 54907 - RNA, 20 nt, Artificial Sequence
  Synthetic
ugcuguauagcuuucccugg

SEQ ID NO: 54908 - RNA, 21 nt, Artificial Sequence
  Synthetic
uugcuguauagcuuucccugg

SEQ ID NO: 54909 - RNA, 22 nt, Artificial Sequence
  Synthetic
cuugcuguauagcuuucccugg

SEQ ID NO: 54910 - RNA, 23 nt, Artificial Sequence
  Synthetic
acuugcuguauagcuuucccugg

SEQ ID NO: 54911 - RNA, 24 nt, Artificial Sequence
  Synthetic
cacuugcuguauagcuuucccugg

SEQ ID NO: 54912 - RNA, 18 nt, Artificial Sequence
  Synthetic
uaaaauccaaaagccugg

SEQ ID NO: 54913 - RNA, 20 nt, Artificial Sequence
  Synthetic
uguaaaauccaaaagccugg

SEQ ID NO: 54914 - RNA, 21 nt, Artificial Sequence
  Synthetic
cuguaaaauccaaaagccugg

SEQ ID NO: 54915 - RNA, 22 nt, Artificial Sequence
  Synthetic
ucuguaaaauccaaaagccugg

SEQ ID NO: 54916 - RNA, 23 nt, Artificial Sequence
  Synthetic
aucuguaaaauccaaaagccugg

SEQ ID NO: 54917 - RNA, 24 nt, Artificial Sequence
  Synthetic
aaucuguaaaauccaaaagccugg

SEQ ID NO: 54918 - RNA, 18 nt, Artificial Sequence
  Synthetic
uaacauccaaaugccugg

SEQ ID NO: 54919 - RNA, 19 nt, Artificial Sequence
  Synthetic
auaacauccaaaugccugg

SEQ ID NO: 54920 - RNA, 21 nt, Artificial Sequence
  Synthetic
ugauaacauccaaaugccugg

SEQ ID NO: 54921 - RNA, 23 nt, Artificial Sequence
  Synthetic
agugauaacauccaaaugccugg

SEQ ID NO: 54922 - RNA, 24 nt, Artificial Sequence
  Synthetic
cagugauaacauccaaaugccugg

SEQ ID NO: 54923 - RNA, 18 nt, Artificial Sequence
  Synthetic
uaaaaaaccgggagcugg

SEQ ID NO: 54924 - RNA, 19 nt, Artificial Sequence
  Synthetic
uuaaaaaaccgggagcugg

SEQ ID NO: 54925 - RNA, 20 nt, Artificial Sequence
  Synthetic
cuuaaaaaaccgggagcugg

SEQ ID NO: 54926 - RNA, 22 nt, Artificial Sequence
  Synthetic
agcuuaaaaaaccgggagcugg

SEQ ID NO: 54927 - RNA, 23 nt, Artificial Sequence
  Synthetic
cagcuuaaaaaaccgggagcugg

SEQ ID NO: 54928 - RNA, 24 nt, Artificial Sequence
  Synthetic
ucagcuuaaaaaaccgggagcugg

SEQ ID NO: 54929 - RNA, 18 nt, Artificial Sequence
  Synthetic
cuguuuggugauagcugg

SEQ ID NO: 54930 - RNA, 20 nt, Artificial Sequence
  Synthetic
agcuguuuggugauagcugg

SEQ ID NO: 54931 - RNA, 21 nt, Artificial Sequence
  Synthetic
aagcuguuuggugauagcugg

SEQ ID NO: 54932 - RNA, 22 nt, Artificial Sequence
  Synthetic
aaagcuguuuggugauagcugg

SEQ ID NO: 54933 - RNA, 23 nt, Artificial Sequence
  Synthetic
caaagcuguuuggugauagcugg

SEQ ID NO: 54934 - RNA, 24 nt, Artificial Sequence
  Synthetic
ucaaagcuguuuggugauagcugg

SEQ ID NO: 54935 - RNA, 21 nt, Artificial Sequence
  Synthetic
cggggucauuccauaggcugg

SEQ ID NO: 54936 - RNA, 22 nt, Artificial Sequence
  Synthetic
ccggggucauuccauaggcugg

SEQ ID NO: 54937 - RNA, 23 nt, Artificial Sequence
  Synthetic
accggggucauuccauaggcugg

SEQ ID NO: 54938 - RNA, 24 nt, Artificial Sequence
  Synthetic
aaccggggucauuccauaggcugg

SEQ ID NO: 54939 - RNA, 18 nt, Artificial Sequence
  Synthetic
aucuaggcacugggcugg

SEQ ID NO: 54940 - RNA, 19 nt, Artificial Sequence
  Synthetic
caucuaggcacugggcugg

SEQ ID NO: 54941 - RNA, 20 nt, Artificial Sequence
  Synthetic
ucaucuaggcacugggcugg

SEQ ID NO: 54942 - RNA, 21 nt, Artificial Sequence
  Synthetic
uucaucuaggcacugggcugg

SEQ ID NO: 54943 - RNA, 23 nt, Artificial Sequence
  Synthetic
uguucaucuaggcacugggcugg

SEQ ID NO: 54944 - RNA, 24 nt, Artificial Sequence
  Synthetic
uuguucaucuaggcacugggcugg

SEQ ID NO: 54945 - RNA, 18 nt, Artificial Sequence
  Synthetic
uuccuuauuuauggcugg

SEQ ID NO: 54946 - RNA, 19 nt, Artificial Sequence
  Synthetic
cuuccuuauuuauggcugg

SEQ ID NO: 54947 - RNA, 20 nt, Artificial Sequence
  Synthetic
acuuccuuauuuauggcugg

SEQ ID NO: 54948 - RNA, 21 nt, Artificial Sequence
  Synthetic
cacuuccuuauuuauggcugg

SEQ ID NO: 54949 - RNA, 22 nt, Artificial Sequence
  Synthetic
ccacuuccuuauuuauggcugg

SEQ ID NO: 54950 - RNA, 23 nt, Artificial Sequence
  Synthetic
accacuuccuuauuuauggcugg

SEQ ID NO: 54951 - RNA, 24 nt, Artificial Sequence
  Synthetic
aaccacuuccuuauuuauggcugg

SEQ ID NO: 54952 - RNA, 18 nt, Artificial Sequence
  Synthetic
uaauaguacuuaugcugg

SEQ ID NO: 54953 - RNA, 19 nt, Artificial Sequence
  Synthetic
auaauaguacuuaugcugg

SEQ ID NO: 54954 - RNA, 20 nt, Artificial Sequence
  Synthetic
aauaauaguacuuaugcugg

SEQ ID NO: 54955 - RNA, 21 nt, Artificial Sequence
  Synthetic
uaauaauaguacuuaugcugg

SEQ ID NO: 54956 - RNA, 22 nt, Artificial Sequence
  Synthetic
cuaauaauaguacuuaugcugg

SEQ ID NO: 54957 - RNA, 20 nt, Artificial Sequence
  Synthetic
aggagcaggcacugugcugg

SEQ ID NO: 54958 - RNA, 22 nt, Artificial Sequence
  Synthetic
agaggagcaggcacugugcugg

SEQ ID NO: 54959 - RNA, 23 nt, Artificial Sequence
  Synthetic
cagaggagcaggcacugugcugg

SEQ ID NO: 54960 - RNA, 24 nt, Artificial Sequence
  Synthetic
ccagaggagcaggcacugugcugg

SEQ ID NO: 54961 - RNA, 18 nt, Artificial Sequence
  Synthetic
aagcagcaaacuugcugg

SEQ ID NO: 54962 - RNA, 19 nt, Artificial Sequence
  Synthetic
aaagcagcaaacuugcugg

SEQ ID NO: 54963 - RNA, 20 nt, Artificial Sequence
  Synthetic
caaagcagcaaacuugcugg

SEQ ID NO: 54964 - RNA, 21 nt, Artificial Sequence
  Synthetic
acaaagcagcaaacuugcugg

SEQ ID NO: 54965 - RNA, 22 nt, Artificial Sequence
  Synthetic
uacaaagcagcaaacuugcugg

SEQ ID NO: 54966 - RNA, 23 nt, Artificial Sequence
  Synthetic
uuacaaagcagcaaacuugcugg

SEQ ID NO: 54967 - RNA, 24 nt, Artificial Sequence
  Synthetic
uuuacaaagcagcaaacuugcugg

SEQ ID NO: 54968 - RNA, 18 nt, Artificial Sequence
  Synthetic
acaguaugauguugcugg

SEQ ID NO: 54969 - RNA, 19 nt, Artificial Sequence
  Synthetic
uacaguaugauguugcugg

SEQ ID NO: 54970 - RNA, 20 nt, Artificial Sequence
  Synthetic
auacaguaugauguugcugg

SEQ ID NO: 54971 - RNA, 21 nt, Artificial Sequence
  Synthetic
aauacaguaugauguugcugg

SEQ ID NO: 54972 - RNA, 22 nt, Artificial Sequence
  Synthetic
caauacaguaugauguugcugg

SEQ ID NO: 54973 - RNA, 23 nt, Artificial Sequence
  Synthetic
ucaauacaguaugauguugcugg

SEQ ID NO: 54974 - RNA, 24 nt, Artificial Sequence
  Synthetic
aucaauacaguaugauguugcugg

SEQ ID NO: 54975 - RNA, 18 nt, Artificial Sequence
  Synthetic
aggaaugucaaaaucugg

SEQ ID NO: 54976 - RNA, 19 nt, Artificial Sequence
  Synthetic
aaggaaugucaaaaucugg

SEQ ID NO: 54977 - RNA, 20 nt, Artificial Sequence
  Synthetic
aaaggaaugucaaaaucugg

SEQ ID NO: 54978 - RNA, 22 nt, Artificial Sequence
  Synthetic
ugaaaggaaugucaaaaucugg

SEQ ID NO: 54979 - RNA, 23 nt, Artificial Sequence
  Synthetic
uugaaaggaaugucaaaaucugg

SEQ ID NO: 54980 - RNA, 24 nt, Artificial Sequence
  Synthetic
uuugaaaggaaugucaaaaucugg

SEQ ID NO: 54981 - RNA, 18 nt, Artificial Sequence
  Synthetic
aaauggaucuggaucugg

SEQ ID NO: 54982 - RNA, 19 nt, Artificial Sequence
  Synthetic
aaaauggaucuggaucugg

SEQ ID NO: 54983 - RNA, 23 nt, Artificial Sequence
  Synthetic
agggaaaauggaucuggaucugg

SEQ ID NO: 54984 - RNA, 24 nt, Artificial Sequence
  Synthetic
aagggaaaauggaucuggaucugg

SEQ ID NO: 54985 - RNA, 18 nt, Artificial Sequence
  Synthetic
aaguuucuauguaucugg

SEQ ID NO: 54986 - RNA, 19 nt, Artificial Sequence
  Synthetic
uaaguuucuauguaucugg

SEQ ID NO: 54987 - RNA, 20 nt, Artificial Sequence
  Synthetic
auaaguuucuauguaucugg

SEQ ID NO: 54988 - RNA, 21 nt, Artificial Sequence
  Synthetic
uauaaguuucuauguaucugg

SEQ ID NO: 54989 - RNA, 22 nt, Artificial Sequence
  Synthetic
auauaaguuucuauguaucugg

SEQ ID NO: 54990 - RNA, 23 nt, Artificial Sequence
  Synthetic
uauauaaguuucuauguaucugg

SEQ ID NO: 54991 - RNA, 24 nt, Artificial Sequence
  Synthetic
auauauaaguuucuauguaucugg

SEQ ID NO: 54992 - RNA, 18 nt, Artificial Sequence
  Synthetic
uuuguauccauuaucugg

SEQ ID NO: 54993 - RNA, 19 nt, Artificial Sequence
  Synthetic
auuuguauccauuaucugg

SEQ ID NO: 54994 - RNA, 22 nt, Artificial Sequence
  Synthetic
uggauuuguauccauuaucugg

SEQ ID NO: 54995 - RNA, 23 nt, Artificial Sequence
  Synthetic
auggauuuguauccauuaucugg

SEQ ID NO: 54996 - RNA, 24 nt, Artificial Sequence
  Synthetic
cauggauuuguauccauuaucugg

SEQ ID NO: 54997 - RNA, 18 nt, Artificial Sequence
  Synthetic
uugggggucucagucugg

SEQ ID NO: 54998 - RNA, 19 nt, Artificial Sequence
  Synthetic
uuugggggucucagucugg

SEQ ID NO: 54999 - RNA, 21 nt, Artificial Sequence
  Synthetic
aguuugggggucucagucugg

SEQ ID NO: 55000 - RNA, 22 nt, Artificial Sequence
  Synthetic
caguuugggggucucagucugg

SEQ ID NO: 55001 - RNA, 23 nt, Artificial Sequence
  Synthetic
acaguuugggggucucagucugg

SEQ ID NO: 55002 - RNA, 24 nt, Artificial Sequence
  Synthetic
cacaguuugggggucucagucugg

SEQ ID NO: 55003 - RNA, 18 nt, Artificial Sequence
  Synthetic
acagagauuugggucugg

SEQ ID NO: 55004 - RNA, 19 nt, Artificial Sequence
  Synthetic
aacagagauuugggucugg

SEQ ID NO: 55005 - RNA, 20 nt, Artificial Sequence
  Synthetic
aaacagagauuugggucugg

SEQ ID NO: 55006 - RNA, 21 nt, Artificial Sequence
  Synthetic
aaaacagagauuugggucugg

SEQ ID NO: 55007 - RNA, 22 nt, Artificial Sequence
  Synthetic
uaaaacagagauuugggucugg

SEQ ID NO: 55008 - RNA, 23 nt, Artificial Sequence
  Synthetic
cuaaaacagagauuugggucugg

SEQ ID NO: 55009 - RNA, 24 nt, Artificial Sequence
  Synthetic
ucuaaaacagagauuugggucugg

SEQ ID NO: 55010 - RNA, 18 nt, Artificial Sequence
  Synthetic
cucucauuuauauucugg

SEQ ID NO: 55011 - RNA, 19 nt, Artificial Sequence
  Synthetic
ucucucauuuauauucugg

SEQ ID NO: 55012 - RNA, 20 nt, Artificial Sequence
  Synthetic
uucucucauuuauauucugg

SEQ ID NO: 55013 - RNA, 21 nt, Artificial Sequence
  Synthetic
uuucucucauuuauauucugg

SEQ ID NO: 55014 - RNA, 22 nt, Artificial Sequence
  Synthetic
uuuucucucauuuauauucugg

SEQ ID NO: 55015 - RNA, 23 nt, Artificial Sequence
  Synthetic
auuuucucucauuuauauucugg

SEQ ID NO: 55016 - RNA, 19 nt, Artificial Sequence
  Synthetic
ugauuacuguguguucugg

SEQ ID NO: 55017 - RNA, 20 nt, Artificial Sequence
  Synthetic
uugauuacuguguguucugg

SEQ ID NO: 55018 - RNA, 21 nt, Artificial Sequence
  Synthetic
auugauuacuguguguucugg

SEQ ID NO: 55019 - RNA, 22 nt, Artificial Sequence
  Synthetic
cauugauuacuguguguucugg

SEQ ID NO: 55020 - RNA, 23 nt, Artificial Sequence
  Synthetic
ccauugauuacuguguguucugg

SEQ ID NO: 55021 - RNA, 22 nt, Artificial Sequence
  Synthetic
uggggccaacaaggauuucugg

SEQ ID NO: 55022 - RNA, 24 nt, Artificial Sequence
  Synthetic
aguggggccaacaaggauuucugg

SEQ ID NO: 55023 - RNA, 19 nt, Artificial Sequence
  Synthetic
uguguugggugauuucugg

SEQ ID NO: 55024 - RNA, 21 nt, Artificial Sequence
  Synthetic
uguguguugggugauuucugg

SEQ ID NO: 55025 - RNA, 23 nt, Artificial Sequence
  Synthetic
uguguguguugggugauuucugg

SEQ ID NO: 55026 - RNA, 24 nt, Artificial Sequence
  Synthetic
auguguguguugggugauuucugg

SEQ ID NO: 55027 - RNA, 18 nt, Artificial Sequence
  Synthetic
uuaagugucugaaagugg

SEQ ID NO: 55028 - RNA, 19 nt, Artificial Sequence
  Synthetic
cuuaagugucugaaagugg

SEQ ID NO: 55029 - RNA, 18 nt, Artificial Sequence
  Synthetic
agguauaauugaaagugg

SEQ ID NO: 55030 - RNA, 19 nt, Artificial Sequence
  Synthetic
uagguauaauugaaagugg

SEQ ID NO: 55031 - RNA, 21 nt, Artificial Sequence
  Synthetic
cguagguauaauugaaagugg

SEQ ID NO: 55032 - RNA, 22 nt, Artificial Sequence
  Synthetic
acguagguauaauugaaagugg

SEQ ID NO: 55033 - RNA, 24 nt, Artificial Sequence
  Synthetic
agacguagguauaauugaaagugg

SEQ ID NO: 55034 - RNA, 18 nt, Artificial Sequence
  Synthetic
caauuucugcuuaagugg

SEQ ID NO: 55035 - RNA, 19 nt, Artificial Sequence
  Synthetic
acaauuucugcuuaagugg

SEQ ID NO: 55036 - RNA, 20 nt, Artificial Sequence
  Synthetic
aacaauuucugcuuaagugg

SEQ ID NO: 55037 - RNA, 21 nt, Artificial Sequence
  Synthetic
aaacaauuucugcuuaagugg

SEQ ID NO: 55038 - RNA, 22 nt, Artificial Sequence
  Synthetic
caaacaauuucugcuuaagugg

SEQ ID NO: 55039 - RNA, 23 nt, Artificial Sequence
  Synthetic
ucaaacaauuucugcuuaagugg

SEQ ID NO: 55040 - RNA, 24 nt, Artificial Sequence
  Synthetic
uucaaacaauuucugcuuaagugg

SEQ ID NO: 55041 - RNA, 21 nt, Artificial Sequence
  Synthetic
aaaauuaugcacuuuaagugg

SEQ ID NO: 55042 - RNA, 23 nt, Artificial Sequence
  Synthetic
agaaaauuaugcacuuuaagugg

SEQ ID NO: 55043 - RNA, 24 nt, Artificial Sequence
  Synthetic
cagaaaauuaugcacuuuaagugg

SEQ ID NO: 55044 - RNA, 18 nt, Artificial Sequence
  Synthetic
ugaugccgcacacagugg

SEQ ID NO: 55045 - RNA, 19 nt, Artificial Sequence
  Synthetic
cugaugccgcacacagugg

SEQ ID NO: 55046 - RNA, 20 nt, Artificial Sequence
  Synthetic
ccugaugccgcacacagugg

SEQ ID NO: 55047 - RNA, 21 nt, Artificial Sequence
  Synthetic
uccugaugccgcacacagugg

SEQ ID NO: 55048 - RNA, 23 nt, Artificial Sequence
  Synthetic
aguccugaugccgcacacagugg

SEQ ID NO: 55049 - RNA, 24 nt, Artificial Sequence
  Synthetic
aaguccugaugccgcacacagugg

SEQ ID NO: 55050 - RNA, 18 nt, Artificial Sequence
  Synthetic
agcaaaacaagccagugg

SEQ ID NO: 55051 - RNA, 19 nt, Artificial Sequence
  Synthetic
aagcaaaacaagccagugg

SEQ ID NO: 55052 - RNA, 21 nt, Artificial Sequence
  Synthetic
ugaagcaaaacaagccagugg

SEQ ID NO: 55053 - RNA, 22 nt, Artificial Sequence
  Synthetic
cugaagcaaaacaagccagugg

SEQ ID NO: 55054 - RNA, 18 nt, Artificial Sequence
  Synthetic
uauuauuugucucagugg

SEQ ID NO: 55055 - RNA, 20 nt, Artificial Sequence
  Synthetic
cguauuauuugucucagugg

SEQ ID NO: 55056 - RNA, 21 nt, Artificial Sequence
  Synthetic
acguauuauuugucucagugg

SEQ ID NO: 55057 - RNA, 22 nt, Artificial Sequence
  Synthetic
cacguauuauuugucucagugg

SEQ ID NO: 55058 - RNA, 23 nt, Artificial Sequence
  Synthetic
ccacguauuauuugucucagugg

SEQ ID NO: 55059 - RNA, 24 nt, Artificial Sequence
  Synthetic
uccacguauuauuugucucagugg

SEQ ID NO: 55060 - RNA, 18 nt, Artificial Sequence
  Synthetic
caaaggcagacagagugg

SEQ ID NO: 55061 - RNA, 19 nt, Artificial Sequence
  Synthetic
acaaaggcagacagagugg

SEQ ID NO: 55062 - RNA, 20 nt, Artificial Sequence
  Synthetic
cacaaaggcagacagagugg

SEQ ID NO: 55063 - RNA, 21 nt, Artificial Sequence
  Synthetic
acacaaaggcagacagagugg

SEQ ID NO: 55064 - RNA, 22 nt, Artificial Sequence
  Synthetic
uacacaaaggcagacagagugg

SEQ ID NO: 55065 - RNA, 19 nt, Artificial Sequence
  Synthetic
ugaauguggugaggagugg

SEQ ID NO: 55066 - RNA, 22 nt, Artificial Sequence
  Synthetic
aggugaauguggugaggagugg

SEQ ID NO: 55067 - RNA, 24 nt, Artificial Sequence
  Synthetic
agaggugaauguggugaggagugg

SEQ ID NO: 55068 - RNA, 18 nt, Artificial Sequence
  Synthetic
cagacuaggguggagugg

SEQ ID NO: 55069 - RNA, 19 nt, Artificial Sequence
  Synthetic
ucagacuaggguggagugg

SEQ ID NO: 55070 - RNA, 20 nt, Artificial Sequence
  Synthetic
uucagacuaggguggagugg

SEQ ID NO: 55071 - RNA, 23 nt, Artificial Sequence
  Synthetic
ugguucagacuaggguggagugg

SEQ ID NO: 55072 - RNA, 18 nt, Artificial Sequence
  Synthetic
aguugaagaggugagugg

SEQ ID NO: 55073 - RNA, 19 nt, Artificial Sequence
  Synthetic
uaguugaagaggugagugg

SEQ ID NO: 55074 - RNA, 20 nt, Artificial Sequence
  Synthetic
cuaguugaagaggugagugg

SEQ ID NO: 55075 - RNA, 21 nt, Artificial Sequence
  Synthetic
ucuaguugaagaggugagugg

SEQ ID NO: 55076 - RNA, 22 nt, Artificial Sequence
  Synthetic
aucuaguugaagaggugagugg

SEQ ID NO: 55077 - RNA, 23 nt, Artificial Sequence
  Synthetic
aaucuaguugaagaggugagugg

SEQ ID NO: 55078 - RNA, 24 nt, Artificial Sequence
  Synthetic
uaaucuaguugaagaggugagugg

SEQ ID NO: 55079 - RNA, 18 nt, Artificial Sequence
  Synthetic
auuuuccuacuugagugg

SEQ ID NO: 55080 - RNA, 19 nt, Artificial Sequence
  Synthetic
cauuuuccuacuugagugg

SEQ ID NO: 55081 - RNA, 20 nt, Artificial Sequence
  Synthetic
acauuuuccuacuugagugg

SEQ ID NO: 55082 - RNA, 21 nt, Artificial Sequence
  Synthetic
aacauuuuccuacuugagugg

SEQ ID NO: 55083 - RNA, 22 nt, Artificial Sequence
  Synthetic
aaacauuuuccuacuugagugg

SEQ ID NO: 55084 - RNA, 24 nt, Artificial Sequence
  Synthetic
ugaaacauuuuccuacuugagugg

SEQ ID NO: 55085 - RNA, 18 nt, Artificial Sequence
  Synthetic
agagagugaaacuagugg

SEQ ID NO: 55086 - RNA, 19 nt, Artificial Sequence
  Synthetic
aagagagugaaacuagugg

SEQ ID NO: 55087 - RNA, 20 nt, Artificial Sequence
  Synthetic
aaagagagugaaacuagugg

SEQ ID NO: 55088 - RNA, 21 nt, Artificial Sequence
  Synthetic
aaaagagagugaaacuagugg

SEQ ID NO: 55089 - RNA, 22 nt, Artificial Sequence
  Synthetic
aaaaagagagugaaacuagugg

SEQ ID NO: 55090 - RNA, 23 nt, Artificial Sequence
  Synthetic
aaaaaagagagugaaacuagugg

SEQ ID NO: 55091 - RNA, 24 nt, Artificial Sequence
  Synthetic
aaaaaaagagagugaaacuagugg

SEQ ID NO: 55092 - RNA, 18 nt, Artificial Sequence
  Synthetic
ugaccagcuguuuagugg

SEQ ID NO: 55093 - RNA, 19 nt, Artificial Sequence
  Synthetic
uugaccagcuguuuagugg

SEQ ID NO: 55094 - RNA, 20 nt, Artificial Sequence
  Synthetic
cuugaccagcuguuuagugg

SEQ ID NO: 55095 - RNA, 22 nt, Artificial Sequence
  Synthetic
ugcuugaccagcuguuuagugg

SEQ ID NO: 55096 - RNA, 24 nt, Artificial Sequence
  Synthetic
cgugcuugaccagcuguuuagugg

SEQ ID NO: 55097 - RNA, 18 nt, Artificial Sequence
  Synthetic
agcauacuuuacacgugg

SEQ ID NO: 55098 - RNA, 19 nt, Artificial Sequence
  Synthetic
uagcauacuuuacacgugg

SEQ ID NO: 55099 - RNA, 21 nt, Artificial Sequence
  Synthetic
aguagcauacuuuacacgugg

SEQ ID NO: 55100 - RNA, 22 nt, Artificial Sequence
  Synthetic
uaguagcauacuuuacacgugg

SEQ ID NO: 55101 - RNA, 23 nt, Artificial Sequence
  Synthetic
uuaguagcauacuuuacacgugg

SEQ ID NO: 55102 - RNA, 24 nt, Artificial Sequence
  Synthetic
uuuaguagcauacuuuacacgugg

SEQ ID NO: 55103 - RNA, 18 nt, Artificial Sequence
  Synthetic
aauuguuaacuuucgugg

SEQ ID NO: 55104 - RNA, 19 nt, Artificial Sequence
  Synthetic
aaauuguuaacuuucgugg

SEQ ID NO: 55105 - RNA, 20 nt, Artificial Sequence
  Synthetic
aaaauuguuaacuuucgugg

SEQ ID NO: 55106 - RNA, 21 nt, Artificial Sequence
  Synthetic
aaaaauuguuaacuuucgugg

SEQ ID NO: 55107 - RNA, 22 nt, Artificial Sequence
  Synthetic
aaaaaauuguuaacuuucgugg

SEQ ID NO: 55108 - RNA, 23 nt, Artificial Sequence
  Synthetic
aaaaaaauuguuaacuuucgugg

SEQ ID NO: 55109 - RNA, 24 nt, Artificial Sequence
  Synthetic
aaaaaaaauuguuaacuuucgugg

SEQ ID NO: 55110 - RNA, 18 nt, Artificial Sequence
  Synthetic
cuaguagcuguaaggugg

SEQ ID NO: 55111 - RNA, 19 nt, Artificial Sequence
  Synthetic
ucuaguagcuguaaggugg

SEQ ID NO: 55112 - RNA, 20 nt, Artificial Sequence
  Synthetic
cucuaguagcuguaaggugg

SEQ ID NO: 55113 - RNA, 21 nt, Artificial Sequence
  Synthetic
acucuaguagcuguaaggugg

SEQ ID NO: 55114 - RNA, 22 nt, Artificial Sequence
  Synthetic
cacucuaguagcuguaaggugg

SEQ ID NO: 55115 - RNA, 23 nt, Artificial Sequence
  Synthetic
ccacucuaguagcuguaaggugg

SEQ ID NO: 55116 - RNA, 24 nt, Artificial Sequence
  Synthetic
accacucuaguagcuguaaggugg

SEQ ID NO: 55117 - RNA, 18 nt, Artificial Sequence
  Synthetic
cagcuauuugagaggugg

SEQ ID NO: 55118 - RNA, 20 nt, Artificial Sequence
  Synthetic
agcagcuauuugagaggugg

SEQ ID NO: 55119 - RNA, 21 nt, Artificial Sequence
  Synthetic
aagcagcuauuugagaggugg

SEQ ID NO: 55120 - RNA, 22 nt, Artificial Sequence
  Synthetic
uaagcagcuauuugagaggugg

SEQ ID NO: 55121 - RNA, 23 nt, Artificial Sequence
  Synthetic
cuaagcagcuauuugagaggugg

SEQ ID NO: 55122 - RNA, 24 nt, Artificial Sequence
  Synthetic
ucuaagcagcuauuugagaggugg

SEQ ID NO: 55123 - RNA, 19 nt, Artificial Sequence
  Synthetic
ugguuuuauuaugaggugg

SEQ ID NO: 55124 - RNA, 20 nt, Artificial Sequence
  Synthetic
uugguuuuauuaugaggugg

SEQ ID NO: 55125 - RNA, 22 nt, Artificial Sequence
  Synthetic
uguugguuuuauuaugaggugg

SEQ ID NO: 55126 - RNA, 23 nt, Artificial Sequence
  Synthetic
auguugguuuuauuaugaggugg

SEQ ID NO: 55127 - RNA, 24 nt, Artificial Sequence
  Synthetic
uauguugguuuuauuaugaggugg

SEQ ID NO: 55128 - RNA, 19 nt, Artificial Sequence
  Synthetic
cgcaguuguauguaggugg

SEQ ID NO: 55129 - RNA, 20 nt, Artificial Sequence
  Synthetic
acgcaguuguauguaggugg

SEQ ID NO: 55130 - RNA, 21 nt, Artificial Sequence
  Synthetic
uacgcaguuguauguaggugg

SEQ ID NO: 55131 - RNA, 22 nt, Artificial Sequence
  Synthetic
uuacgcaguuguauguaggugg

SEQ ID NO: 55132 - RNA, 23 nt, Artificial Sequence
  Synthetic
uuuacgcaguuguauguaggugg

SEQ ID NO: 55133 - RNA, 24 nt, Artificial Sequence
  Synthetic
auuuacgcaguuguauguaggugg

SEQ ID NO: 55134 - RNA, 18 nt, Artificial Sequence
  Synthetic
auaguuccauagcggugg

SEQ ID NO: 55135 - RNA, 19 nt, Artificial Sequence
  Synthetic
cauaguuccauagcggugg

SEQ ID NO: 55136 - RNA, 21 nt, Artificial Sequence
  Synthetic
agcauaguuccauagcggugg

SEQ ID NO: 55137 - RNA, 22 nt, Artificial Sequence
  Synthetic
uagcauaguuccauagcggugg

SEQ ID NO: 55138 - RNA, 23 nt, Artificial Sequence
  Synthetic
cuagcauaguuccauagcggugg

SEQ ID NO: 55139 - RNA, 21 nt, Artificial Sequence
  Synthetic
agacacagaaaaggagggugg

SEQ ID NO: 55140 - RNA, 22 nt, Artificial Sequence
  Synthetic
aagacacagaaaaggagggugg

SEQ ID NO: 55141 - RNA, 24 nt, Artificial Sequence
  Synthetic
ugaagacacagaaaaggagggugg

SEQ ID NO: 55142 - RNA, 18 nt, Artificial Sequence
  Synthetic
uacaaagacauauggugg

SEQ ID NO: 55143 - RNA, 20 nt, Artificial Sequence
  Synthetic
uguacaaagacauauggugg

SEQ ID NO: 55144 - RNA, 21 nt, Artificial Sequence
  Synthetic
cuguacaaagacauauggugg

SEQ ID NO: 55145 - RNA, 22 nt, Artificial Sequence
  Synthetic
acuguacaaagacauauggugg

SEQ ID NO: 55146 - RNA, 23 nt, Artificial Sequence
  Synthetic
aacuguacaaagacauauggugg

SEQ ID NO: 55147 - RNA, 24 nt, Artificial Sequence
  Synthetic
aaacuguacaaagacauauggugg

SEQ ID NO: 55148 - RNA, 18 nt, Artificial Sequence
  Synthetic
uguuucaguuacuggugg

SEQ ID NO: 55149 - RNA, 19 nt, Artificial Sequence
  Synthetic
cuguuucaguuacuggugg

SEQ ID NO: 55150 - RNA, 20 nt, Artificial Sequence
  Synthetic
ucuguuucaguuacuggugg

SEQ ID NO: 55151 - RNA, 22 nt, Artificial Sequence
  Synthetic
ugucuguuucaguuacuggugg

SEQ ID NO: 55152 - RNA, 23 nt, Artificial Sequence
  Synthetic
uugucuguuucaguuacuggugg

SEQ ID NO: 55153 - RNA, 24 nt, Artificial Sequence
  Synthetic
uuugucuguuucaguuacuggugg

SEQ ID NO: 55154 - RNA, 18 nt, Artificial Sequence
  Synthetic
auuuuuaucaccaugugg

SEQ ID NO: 55155 - RNA, 19 nt, Artificial Sequence
  Synthetic
uauuuuuaucaccaugugg

SEQ ID NO: 55156 - RNA, 20 nt, Artificial Sequence
  Synthetic
cuauuuuuaucaccaugugg

SEQ ID NO: 55157 - RNA, 21 nt, Artificial Sequence
  Synthetic
ccuauuuuuaucaccaugugg

SEQ ID NO: 55158 - RNA, 22 nt, Artificial Sequence
  Synthetic
cccuauuuuuaucaccaugugg

SEQ ID NO: 55159 - RNA, 23 nt, Artificial Sequence
  Synthetic
ucccuauuuuuaucaccaugugg

SEQ ID NO: 55160 - RNA, 24 nt, Artificial Sequence
  Synthetic
uucccuauuuuuaucaccaugugg

SEQ ID NO: 55161 - RNA, 21 nt, Artificial Sequence
  Synthetic
aggugugauuggaucaugugg

SEQ ID NO: 55162 - RNA, 22 nt, Artificial Sequence
  Synthetic
uaggugugauuggaucaugugg

SEQ ID NO: 55163 - RNA, 21 nt, Artificial Sequence
  Synthetic
agugauucuaggaagcugugg

SEQ ID NO: 55164 - RNA, 22 nt, Artificial Sequence
  Synthetic
cagugauucuaggaagcugugg

SEQ ID NO: 55165 - RNA, 18 nt, Artificial Sequence
  Synthetic
auuuuuaguuaucugugg

SEQ ID NO: 55166 - RNA, 19 nt, Artificial Sequence
  Synthetic
cauuuuuaguuaucugugg

SEQ ID NO: 55167 - RNA, 20 nt, Artificial Sequence
  Synthetic
acauuuuuaguuaucugugg

SEQ ID NO: 55168 - RNA, 21 nt, Artificial Sequence
  Synthetic
uacauuuuuaguuaucugugg

SEQ ID NO: 55169 - RNA, 22 nt, Artificial Sequence
  Synthetic
uuacauuuuuaguuaucugugg

SEQ ID NO: 55170 - RNA, 23 nt, Artificial Sequence
  Synthetic
cuuacauuuuuaguuaucugugg

SEQ ID NO: 55171 - RNA, 24 nt, Artificial Sequence
  Synthetic
ccuuacauuuuuaguuaucugugg

SEQ ID NO: 55172 - RNA, 19 nt, Artificial Sequence
  Synthetic
agaaaagugagcagugugg

SEQ ID NO: 55173 - RNA, 20 nt, Artificial Sequence
  Synthetic
cagaaaagugagcagugugg

SEQ ID NO: 55174 - RNA, 21 nt, Artificial Sequence
  Synthetic
acagaaaagugagcagugugg

SEQ ID NO: 55175 - RNA, 22 nt, Artificial Sequence
  Synthetic
uacagaaaagugagcagugugg

SEQ ID NO: 55176 - RNA, 23 nt, Artificial Sequence
  Synthetic
auacagaaaagugagcagugugg

SEQ ID NO: 55177 - RNA, 24 nt, Artificial Sequence
  Synthetic
uauacagaaaagugagcagugugg

SEQ ID NO: 55178 - RNA, 18 nt, Artificial Sequence
  Synthetic
caaaaguaacaggugugg

SEQ ID NO: 55179 - RNA, 19 nt, Artificial Sequence
  Synthetic
ucaaaaguaacaggugugg

SEQ ID NO: 55180 - RNA, 21 nt, Artificial Sequence
  Synthetic
ugucaaaaguaacaggugugg

SEQ ID NO: 55181 - RNA, 22 nt, Artificial Sequence
  Synthetic
augucaaaaguaacaggugugg

SEQ ID NO: 55182 - RNA, 23 nt, Artificial Sequence
  Synthetic
uaugucaaaaguaacaggugugg

SEQ ID NO: 55183 - RNA, 24 nt, Artificial Sequence
  Synthetic
auaugucaaaaguaacaggugugg

SEQ ID NO: 55184 - RNA, 18 nt, Artificial Sequence
  Synthetic
cagcggauuacggugugg

SEQ ID NO: 55185 - RNA, 19 nt, Artificial Sequence
  Synthetic
ccagcggauuacggugugg

SEQ ID NO: 55186 - RNA, 20 nt, Artificial Sequence
  Synthetic
accagcggauuacggugugg

SEQ ID NO: 55187 - RNA, 21 nt, Artificial Sequence
  Synthetic
aaccagcggauuacggugugg

SEQ ID NO: 55188 - RNA, 22 nt, Artificial Sequence
  Synthetic
aaaccagcggauuacggugugg

SEQ ID NO: 55189 - RNA, 23 nt, Artificial Sequence
  Synthetic
uaaaccagcggauuacggugugg

SEQ ID NO: 55190 - RNA, 24 nt, Artificial Sequence
  Synthetic
auaaaccagcggauuacggugugg

SEQ ID NO: 55191 - RNA, 21 nt, Artificial Sequence
  Synthetic
augcucacuaccugugugugg

SEQ ID NO: 55192 - RNA, 22 nt, Artificial Sequence
  Synthetic
uaugcucacuaccugugugugg

SEQ ID NO: 55193 - RNA, 23 nt, Artificial Sequence
  Synthetic
cuaugcucacuaccugugugugg

SEQ ID NO: 55194 - RNA, 24 nt, Artificial Sequence
  Synthetic
acuaugcucacuaccugugugugg

SEQ ID NO: 55195 - RNA, 18 nt, Artificial Sequence
  Synthetic
uuguucucccuugugugg

SEQ ID NO: 55196 - RNA, 19 nt, Artificial Sequence
  Synthetic
auuguucucccuugugugg

SEQ ID NO: 55197 - RNA, 21 nt, Artificial Sequence
  Synthetic
cgauuguucucccuugugugg

SEQ ID NO: 55198 - RNA, 22 nt, Artificial Sequence
  Synthetic
ccgauuguucucccuugugugg

SEQ ID NO: 55199 - RNA, 24 nt, Artificial Sequence
  Synthetic
agccgauuguucucccuugugugg

SEQ ID NO: 55200 - RNA, 19 nt, Artificial Sequence
  Synthetic
agcacaagggagauugugg

SEQ ID NO: 55201 - RNA, 21 nt, Artificial Sequence
  Synthetic
agagcacaagggagauugugg

SEQ ID NO: 55202 - RNA, 22 nt, Artificial Sequence
  Synthetic
aagagcacaagggagauugugg

SEQ ID NO: 55203 - RNA, 24 nt, Artificial Sequence
  Synthetic
agaagagcacaagggagauugugg

SEQ ID NO: 55204 - RNA, 22 nt, Artificial Sequence
  Synthetic
uggcaagaucauuuuguugugg

SEQ ID NO: 55205 - RNA, 23 nt, Artificial Sequence
  Synthetic
uuggcaagaucauuuuguugugg

SEQ ID NO: 55206 - RNA, 24 nt, Artificial Sequence
  Synthetic
auuggcaagaucauuuuguugugg

SEQ ID NO: 55207 - RNA, 18 nt, Artificial Sequence
  Synthetic
uuaaauuagcuuuugugg

SEQ ID NO: 55208 - RNA, 19 nt, Artificial Sequence
  Synthetic
auuaaauuagcuuuugugg

SEQ ID NO: 55209 - RNA, 20 nt, Artificial Sequence
  Synthetic
uauuaaauuagcuuuugugg

SEQ ID NO: 55210 - RNA, 21 nt, Artificial Sequence
  Synthetic
auauuaaauuagcuuuugugg

SEQ ID NO: 55211 - RNA, 22 nt, Artificial Sequence
  Synthetic
aauauuaaauuagcuuuugugg

SEQ ID NO: 55212 - RNA, 24 nt, Artificial Sequence
  Synthetic
ugaauauuaaauuagcuuuugugg

SEQ ID NO: 55213 - RNA, 18 nt, Artificial Sequence
  Synthetic
aagauuuccuuuuugugg

SEQ ID NO: 55214 - RNA, 19 nt, Artificial Sequence
  Synthetic
uaagauuuccuuuuugugg

SEQ ID NO: 55215 - RNA, 22 nt, Artificial Sequence
  Synthetic
ugguaagauuuccuuuuugugg

SEQ ID NO: 55216 - RNA, 23 nt, Artificial Sequence
  Synthetic
augguaagauuuccuuuuugugg

SEQ ID NO: 55217 - RNA, 24 nt, Artificial Sequence
  Synthetic
uaugguaagauuuccuuuuugugg

SEQ ID NO: 55218 - RNA, 21 nt, Artificial Sequence
  Synthetic
auacauaaaaauaaaaauugg

SEQ ID NO: 55219 - RNA, 22 nt, Artificial Sequence
  Synthetic
uauacauaaaaauaaaaauugg

SEQ ID NO: 55220 - RNA, 23 nt, Artificial Sequence
  Synthetic
uuauacauaaaaauaaaaauugg

SEQ ID NO: 55221 - RNA, 24 nt, Artificial Sequence
  Synthetic
auuauacauaaaaauaaaaauugg

SEQ ID NO: 55222 - RNA, 18 nt, Artificial Sequence
  Synthetic
auuauucugagcaauugg

SEQ ID NO: 55223 - RNA, 19 nt, Artificial Sequence
  Synthetic
aauuauucugagcaauugg

SEQ ID NO: 55224 - RNA, 21 nt, Artificial Sequence
  Synthetic
ugaauuauucugagcaauugg

SEQ ID NO: 55225 - RNA, 24 nt, Artificial Sequence
  Synthetic
aggugaauuauucugagcaauugg

SEQ ID NO: 55226 - RNA, 21 nt, Artificial Sequence
  Synthetic
uugaaaaaagaacaacauugg

SEQ ID NO: 55227 - RNA, 22 nt, Artificial Sequence
  Synthetic
cuugaaaaaagaacaacauugg

SEQ ID NO: 55228 - RNA, 23 nt, Artificial Sequence
  Synthetic
ccuugaaaaaagaacaacauugg

SEQ ID NO: 55229 - RNA, 24 nt, Artificial Sequence
  Synthetic
accuugaaaaaagaacaacauugg

SEQ ID NO: 55230 - RNA, 21 nt, Artificial Sequence
  Synthetic
acuacuuucaugccacauugg

SEQ ID NO: 55231 - RNA, 23 nt, Artificial Sequence
  Synthetic
ugacuacuuucaugccacauugg

SEQ ID NO: 55232 - RNA, 24 nt, Artificial Sequence
  Synthetic
cugacuacuuucaugccacauugg

SEQ ID NO: 55233 - RNA, 18 nt, Artificial Sequence
  Synthetic
agguagagcucacauugg

SEQ ID NO: 55234 - RNA, 20 nt, Artificial Sequence
  Synthetic
agagguagagcucacauugg

SEQ ID NO: 55235 - RNA, 21 nt, Artificial Sequence
  Synthetic
aagagguagagcucacauugg

SEQ ID NO: 55236 - RNA, 23 nt, Artificial Sequence
  Synthetic
ugaagagguagagcucacauugg

SEQ ID NO: 55237 - RNA, 24 nt, Artificial Sequence
  Synthetic
augaagagguagagcucacauugg

SEQ ID NO: 55238 - RNA, 19 nt, Artificial Sequence
  Synthetic
ugggaccuuuuugcauugg

SEQ ID NO: 55239 - RNA, 20 nt, Artificial Sequence
  Synthetic
cugggaccuuuuugcauugg

SEQ ID NO: 55240 - RNA, 22 nt, Artificial Sequence
  Synthetic
agcugggaccuuuuugcauugg

SEQ ID NO: 55241 - RNA, 23 nt, Artificial Sequence
  Synthetic
cagcugggaccuuuuugcauugg

SEQ ID NO: 55242 - RNA, 18 nt, Artificial Sequence
  Synthetic
aacaugucuucucauugg

SEQ ID NO: 55243 - RNA, 20 nt, Artificial Sequence
  Synthetic
agaacaugucuucucauugg

SEQ ID NO: 55244 - RNA, 21 nt, Artificial Sequence
  Synthetic
uagaacaugucuucucauugg

SEQ ID NO: 55245 - RNA, 22 nt, Artificial Sequence
  Synthetic
auagaacaugucuucucauugg

SEQ ID NO: 55246 - RNA, 23 nt, Artificial Sequence
  Synthetic
uauagaacaugucuucucauugg

SEQ ID NO: 55247 - RNA, 24 nt, Artificial Sequence
  Synthetic
cuauagaacaugucuucucauugg

SEQ ID NO: 55248 - RNA, 21 nt, Artificial Sequence
  Synthetic
aauuuuccuucaguucauugg

SEQ ID NO: 55249 - RNA, 22 nt, Artificial Sequence
  Synthetic
uaauuuuccuucaguucauugg

SEQ ID NO: 55250 - RNA, 23 nt, Artificial Sequence
  Synthetic
auaauuuuccuucaguucauugg

SEQ ID NO: 55251 - RNA, 24 nt, Artificial Sequence
  Synthetic
cauaauuuuccuucaguucauugg

SEQ ID NO: 55252 - RNA, 18 nt, Artificial Sequence
  Synthetic
uggacuuguuuagauugg

SEQ ID NO: 55253 - RNA, 21 nt, Artificial Sequence
  Synthetic
agguggacuuguuuagauugg

SEQ ID NO: 55254 - RNA, 22 nt, Artificial Sequence
  Synthetic
aagguggacuuguuuagauugg

SEQ ID NO: 55255 - RNA, 24 nt, Artificial Sequence
  Synthetic
ugaagguggacuuguuuagauugg

SEQ ID NO: 55256 - RNA, 18 nt, Artificial Sequence
  Synthetic
aaauagaauuuggauugg

SEQ ID NO: 55257 - RNA, 19 nt, Artificial Sequence
  Synthetic
aaaauagaauuuggauugg

SEQ ID NO: 55258 - RNA, 20 nt, Artificial Sequence
  Synthetic
uaaaauagaauuuggauugg

SEQ ID NO: 55259 - RNA, 22 nt, Artificial Sequence
  Synthetic
aguaaaauagaauuuggauugg

SEQ ID NO: 55260 - RNA, 23 nt, Artificial Sequence
  Synthetic
caguaaaauagaauuuggauugg

SEQ ID NO: 55261 - RNA, 24 nt, Artificial Sequence
  Synthetic
ucaguaaaauagaauuuggauugg

SEQ ID NO: 55262 - RNA, 18 nt, Artificial Sequence
  Synthetic
aauucaagaagauauugg

SEQ ID NO: 55263 - RNA, 19 nt, Artificial Sequence
  Synthetic
uaauucaagaagauauugg

SEQ ID NO: 55264 - RNA, 20 nt, Artificial Sequence
  Synthetic
auaauucaagaagauauugg

SEQ ID NO: 55265 - RNA, 21 nt, Artificial Sequence
  Synthetic
uauaauucaagaagauauugg

SEQ ID NO: 55266 - RNA, 22 nt, Artificial Sequence
  Synthetic
auauaauucaagaagauauugg

SEQ ID NO: 55267 - RNA, 23 nt, Artificial Sequence
  Synthetic
uauauaauucaagaagauauugg

SEQ ID NO: 55268 - RNA, 24 nt, Artificial Sequence
  Synthetic
uuauauaauucaagaagauauugg

SEQ ID NO: 55269 - RNA, 18 nt, Artificial Sequence
  Synthetic
uagcacuaauacuauugg

SEQ ID NO: 55270 - RNA, 19 nt, Artificial Sequence
  Synthetic
uuagcacuaauacuauugg

SEQ ID NO: 55271 - RNA, 20 nt, Artificial Sequence
  Synthetic
auuagcacuaauacuauugg

SEQ ID NO: 55272 - RNA, 21 nt, Artificial Sequence
  Synthetic
cauuagcacuaauacuauugg

SEQ ID NO: 55273 - RNA, 22 nt, Artificial Sequence
  Synthetic
acauuagcacuaauacuauugg

SEQ ID NO: 55274 - RNA, 23 nt, Artificial Sequence
  Synthetic
uacauuagcacuaauacuauugg

SEQ ID NO: 55275 - RNA, 24 nt, Artificial Sequence
  Synthetic
uuacauuagcacuaauacuauugg

SEQ ID NO: 55276 - RNA, 18 nt, Artificial Sequence
  Synthetic
cuuaagauuaauuauugg

SEQ ID NO: 55277 - RNA, 19 nt, Artificial Sequence
  Synthetic
ccuuaagauuaauuauugg

SEQ ID NO: 55278 - RNA, 20 nt, Artificial Sequence
  Synthetic
accuuaagauuaauuauugg

SEQ ID NO: 55279 - RNA, 21 nt, Artificial Sequence
  Synthetic
aaccuuaagauuaauuauugg

SEQ ID NO: 55280 - RNA, 23 nt, Artificial Sequence
  Synthetic
ugaaccuuaagauuaauuauugg

SEQ ID NO: 55281 - RNA, 18 nt, Artificial Sequence
  Synthetic
ucuagacaaaguuauugg

SEQ ID NO: 55282 - RNA, 19 nt, Artificial Sequence
  Synthetic
uucuagacaaaguuauugg

SEQ ID NO: 55283 - RNA, 20 nt, Artificial Sequence
  Synthetic
auucuagacaaaguuauugg

SEQ ID NO: 55284 - RNA, 21 nt, Artificial Sequence
  Synthetic
aauucuagacaaaguuauugg

SEQ ID NO: 55285 - RNA, 22 nt, Artificial Sequence
  Synthetic
caauucuagacaaaguuauugg

SEQ ID NO: 55286 - RNA, 23 nt, Artificial Sequence
  Synthetic
ucaauucuagacaaaguuauugg

SEQ ID NO: 55287 - RNA, 24 nt, Artificial Sequence
  Synthetic
aucaauucuagacaaaguuauugg

SEQ ID NO: 55288 - RNA, 18 nt, Artificial Sequence
  Synthetic
uauaggguaauuuauugg

SEQ ID NO: 55289 - RNA, 19 nt, Artificial Sequence
  Synthetic
uuauaggguaauuuauugg

SEQ ID NO: 55290 - RNA, 20 nt, Artificial Sequence
  Synthetic
uuuauaggguaauuuauugg

SEQ ID NO: 55291 - RNA, 21 nt, Artificial Sequence
  Synthetic
uuuuauaggguaauuuauugg

SEQ ID NO: 55292 - RNA, 23 nt, Artificial Sequence
  Synthetic
aguuuuauaggguaauuuauugg

SEQ ID NO: 55293 - RNA, 24 nt, Artificial Sequence
  Synthetic
aaguuuuauaggguaauuuauugg

SEQ ID NO: 55294 - RNA, 18 nt, Artificial Sequence
  Synthetic
aaauuuuuguacacuugg

SEQ ID NO: 55295 - RNA, 19 nt, Artificial Sequence
  Synthetic
aaaauuuuuguacacuugg

SEQ ID NO: 55296 - RNA, 20 nt, Artificial Sequence
  Synthetic
caaaauuuuuguacacuugg

SEQ ID NO: 55297 - RNA, 23 nt, Artificial Sequence
  Synthetic
aggcaaaauuuuuguacacuugg

SEQ ID NO: 55298 - RNA, 24 nt, Artificial Sequence
  Synthetic
uaggcaaaauuuuuguacacuugg

SEQ ID NO: 55299 - RNA, 18 nt, Artificial Sequence
  Synthetic
aagugcugucagacuugg

SEQ ID NO: 55300 - RNA, 19 nt, Artificial Sequence
  Synthetic
aaagugcugucagacuugg

SEQ ID NO: 55301 - RNA, 20 nt, Artificial Sequence
  Synthetic
caaagugcugucagacuugg

SEQ ID NO: 55302 - RNA, 21 nt, Artificial Sequence
  Synthetic
ccaaagugcugucagacuugg

SEQ ID NO: 55303 - RNA, 22 nt, Artificial Sequence
  Synthetic
uccaaagugcugucagacuugg

SEQ ID NO: 55304 - RNA, 23 nt, Artificial Sequence
  Synthetic
uuccaaagugcugucagacuugg

SEQ ID NO: 55305 - RNA, 24 nt, Artificial Sequence
  Synthetic
auuccaaagugcugucagacuugg

SEQ ID NO: 55306 - RNA, 18 nt, Artificial Sequence
  Synthetic
aucagguggaggacuugg

SEQ ID NO: 55307 - RNA, 19 nt, Artificial Sequence
  Synthetic
uaucagguggaggacuugg

SEQ ID NO: 55308 - RNA, 22 nt, Artificial Sequence
  Synthetic
ugguaucagguggaggacuugg

SEQ ID NO: 55309 - RNA, 23 nt, Artificial Sequence
  Synthetic
uugguaucagguggaggacuugg

SEQ ID NO: 55310 - RNA, 24 nt, Artificial Sequence
  Synthetic
cuugguaucagguggaggacuugg

SEQ ID NO: 55311 - RNA, 18 nt, Artificial Sequence
  Synthetic
aaagguuugaauacuugg

SEQ ID NO: 55312 - RNA, 19 nt, Artificial Sequence
  Synthetic
aaaagguuugaauacuugg

SEQ ID NO: 55313 - RNA, 20 nt, Artificial Sequence
  Synthetic
caaaagguuugaauacuugg

SEQ ID NO: 55314 - RNA, 21 nt, Artificial Sequence
  Synthetic
acaaaagguuugaauacuugg

SEQ ID NO: 55315 - RNA, 23 nt, Artificial Sequence
  Synthetic
ugacaaaagguuugaauacuugg

SEQ ID NO: 55316 - RNA, 24 nt, Artificial Sequence
  Synthetic
augacaaaagguuugaauacuugg

SEQ ID NO: 55317 - RNA, 18 nt, Artificial Sequence
  Synthetic
ugaguuaucuuuacuugg

SEQ ID NO: 55318 - RNA, 20 nt, Artificial Sequence
  Synthetic
agugaguuaucuuuacuugg

SEQ ID NO: 55319 - RNA, 22 nt, Artificial Sequence
  Synthetic
ugagugaguuaucuuuacuugg

SEQ ID NO: 55320 - RNA, 23 nt, Artificial Sequence
  Synthetic
cugagugaguuaucuuuacuugg

SEQ ID NO: 55321 - RNA, 24 nt, Artificial Sequence
  Synthetic
acugagugaguuaucuuuacuugg

SEQ ID NO: 55322 - RNA, 18 nt, Artificial Sequence
  Synthetic
uuucuuuucuuaccuugg

SEQ ID NO: 55323 - RNA, 19 nt, Artificial Sequence
  Synthetic
uuuucuuuucuuaccuugg

SEQ ID NO: 55324 - RNA, 20 nt, Artificial Sequence
  Synthetic
auuuucuuuucuuaccuugg

SEQ ID NO: 55325 - RNA, 21 nt, Artificial Sequence
  Synthetic
uauuuucuuuucuuaccuugg

SEQ ID NO: 55326 - RNA, 22 nt, Artificial Sequence
  Synthetic
cuauuuucuuuucuuaccuugg

SEQ ID NO: 55327 - RNA, 23 nt, Artificial Sequence
  Synthetic
acuauuuucuuuucuuaccuugg

SEQ ID NO: 55328 - RNA, 24 nt, Artificial Sequence
  Synthetic
aacuauuuucuuuucuuaccuugg

SEQ ID NO: 55329 - RNA, 19 nt, Artificial Sequence
  Synthetic
aguccuccccacuccuugg

SEQ ID NO: 55330 - RNA, 20 nt, Artificial Sequence
  Synthetic
aaguccuccccacuccuugg

SEQ ID NO: 55331 - RNA, 22 nt, Artificial Sequence
  Synthetic
ugaaguccuccccacuccuugg

SEQ ID NO: 55332 - RNA, 23 nt, Artificial Sequence
  Synthetic
uugaaguccuccccacuccuugg

SEQ ID NO: 55333 - RNA, 24 nt, Artificial Sequence
  Synthetic
uuugaaguccuccccacuccuugg

SEQ ID NO: 55334 - RNA, 18 nt, Artificial Sequence
  Synthetic
agcuaaacuggagcuugg

SEQ ID NO: 55335 - RNA, 19 nt, Artificial Sequence
  Synthetic
cagcuaaacuggagcuugg

SEQ ID NO: 55336 - RNA, 20 nt, Artificial Sequence
  Synthetic
ccagcuaaacuggagcuugg

SEQ ID NO: 55337 - RNA, 21 nt, Artificial Sequence
  Synthetic
uccagcuaaacuggagcuugg

SEQ ID NO: 55338 - RNA, 22 nt, Artificial Sequence
  Synthetic
auccagcuaaacuggagcuugg

SEQ ID NO: 55339 - RNA, 23 nt, Artificial Sequence
  Synthetic
aauccagcuaaacuggagcuugg

SEQ ID NO: 55340 - RNA, 24 nt, Artificial Sequence
  Synthetic
caauccagcuaaacuggagcuugg

SEQ ID NO: 55341 - RNA, 19 nt, Artificial Sequence
  Synthetic
uguugguuucugagcuugg

SEQ ID NO: 55342 - RNA, 20 nt, Artificial Sequence
  Synthetic
cuguugguuucugagcuugg

SEQ ID NO: 55343 - RNA, 21 nt, Artificial Sequence
  Synthetic
acuguugguuucugagcuugg

SEQ ID NO: 55344 - RNA, 22 nt, Artificial Sequence
  Synthetic
uacuguugguuucugagcuugg

SEQ ID NO: 55345 - RNA, 23 nt, Artificial Sequence
  Synthetic
uuacuguugguuucugagcuugg

SEQ ID NO: 55346 - RNA, 24 nt, Artificial Sequence
  Synthetic
cuuacuguugguuucugagcuugg

SEQ ID NO: 55347 - RNA, 19 nt, Artificial Sequence
  Synthetic
agggguggguugcgcuugg

SEQ ID NO: 55348 - RNA, 20 nt, Artificial Sequence
  Synthetic
uagggguggguugcgcuugg

SEQ ID NO: 55349 - RNA, 21 nt, Artificial Sequence
  Synthetic
uuagggguggguugcgcuugg

SEQ ID NO: 55350 - RNA, 22 nt, Artificial Sequence
  Synthetic
uuuagggguggguugcgcuugg

SEQ ID NO: 55351 - RNA, 18 nt, Artificial Sequence
  Synthetic
uaauugacccuggcuugg

SEQ ID NO: 55352 - RNA, 21 nt, Artificial Sequence
  Synthetic
agguaauugacccuggcuugg

SEQ ID NO: 55353 - RNA, 22 nt, Artificial Sequence
  Synthetic
aagguaauugacccuggcuugg

SEQ ID NO: 55354 - RNA, 23 nt, Artificial Sequence
  Synthetic
caagguaauugacccuggcuugg

SEQ ID NO: 55355 - RNA, 24 nt, Artificial Sequence
  Synthetic
ucaagguaauugacccuggcuugg

SEQ ID NO: 55356 - RNA, 21 nt, Artificial Sequence
  Synthetic
auguguuuuuuggcaucuugg

SEQ ID NO: 55357 - RNA, 22 nt, Artificial Sequence
  Synthetic
uauguguuuuuuggcaucuugg

SEQ ID NO: 55358 - RNA, 23 nt, Artificial Sequence
  Synthetic
auauguguuuuuuggcaucuugg

SEQ ID NO: 55359 - RNA, 18 nt, Artificial Sequence
  Synthetic
aacuucuaaggaucuugg

SEQ ID NO: 55360 - RNA, 19 nt, Artificial Sequence
  Synthetic
uaacuucuaaggaucuugg

SEQ ID NO: 55361 - RNA, 20 nt, Artificial Sequence
  Synthetic
cuaacuucuaaggaucuugg

SEQ ID NO: 55362 - RNA, 21 nt, Artificial Sequence
  Synthetic
ccuaacuucuaaggaucuugg

SEQ ID NO: 55363 - RNA, 22 nt, Artificial Sequence
  Synthetic
uccuaacuucuaaggaucuugg

SEQ ID NO: 55364 - RNA, 23 nt, Artificial Sequence
  Synthetic
uuccuaacuucuaaggaucuugg

SEQ ID NO: 55365 - RNA, 24 nt, Artificial Sequence
  Synthetic
auuccuaacuucuaaggaucuugg

SEQ ID NO: 55366 - RNA, 18 nt, Artificial Sequence
  Synthetic
acgguuuucuucucuugg

SEQ ID NO: 55367 - RNA, 19 nt, Artificial Sequence
  Synthetic
uacgguuuucuucucuugg

SEQ ID NO: 55368 - RNA, 20 nt, Artificial Sequence
  Synthetic
uuacgguuuucuucucuugg

SEQ ID NO: 55369 - RNA, 21 nt, Artificial Sequence
  Synthetic
cuuacgguuuucuucucuugg

SEQ ID NO: 55370 - RNA, 22 nt, Artificial Sequence
  Synthetic
ccuuacgguuuucuucucuugg

SEQ ID NO: 55371 - RNA, 23 nt, Artificial Sequence
  Synthetic
cccuuacgguuuucuucucuugg

SEQ ID NO: 55372 - RNA, 24 nt, Artificial Sequence
  Synthetic
acccuuacgguuuucuucucuugg

SEQ ID NO: 55373 - RNA, 18 nt, Artificial Sequence
  Synthetic
cauuuggcggauucuugg

SEQ ID NO: 55374 - RNA, 19 nt, Artificial Sequence
  Synthetic
ucauuuggcggauucuugg

SEQ ID NO: 55375 - RNA, 20 nt, Artificial Sequence
  Synthetic
uucauuuggcggauucuugg

SEQ ID NO: 55376 - RNA, 21 nt, Artificial Sequence
  Synthetic
uuucauuuggcggauucuugg

SEQ ID NO: 55377 - RNA, 22 nt, Artificial Sequence
  Synthetic
auuucauuuggcggauucuugg

SEQ ID NO: 55378 - RNA, 23 nt, Artificial Sequence
  Synthetic
uauuucauuuggcggauucuugg

SEQ ID NO: 55379 - RNA, 24 nt, Artificial Sequence
  Synthetic
uuauuucauuuggcggauucuugg

SEQ ID NO: 55380 - RNA, 18 nt, Artificial Sequence
  Synthetic
caucuuuuaccuucuugg

SEQ ID NO: 55381 - RNA, 19 nt, Artificial Sequence
  Synthetic
acaucuuuuaccuucuugg

SEQ ID NO: 55382 - RNA, 20 nt, Artificial Sequence
  Synthetic
cacaucuuuuaccuucuugg

SEQ ID NO: 55383 - RNA, 21 nt, Artificial Sequence
  Synthetic
acacaucuuuuaccuucuugg

SEQ ID NO: 55384 - RNA, 22 nt, Artificial Sequence
  Synthetic
cacacaucuuuuaccuucuugg

SEQ ID NO: 55385 - RNA, 23 nt, Artificial Sequence
  Synthetic
acacacaucuuuuaccuucuugg

SEQ ID NO: 55386 - RNA, 24 nt, Artificial Sequence
  Synthetic
cacacacaucuuuuaccuucuugg

SEQ ID NO: 55387 - RNA, 21 nt, Artificial Sequence
  Synthetic
uuugcaagaacaggcaguugg

SEQ ID NO: 55388 - RNA, 23 nt, Artificial Sequence
  Synthetic
uguuugcaagaacaggcaguugg

SEQ ID NO: 55389 - RNA, 18 nt, Artificial Sequence
  Synthetic
aacuaucucauggguugg

SEQ ID NO: 55390 - RNA, 19 nt, Artificial Sequence
  Synthetic
uaacuaucucauggguugg

SEQ ID NO: 55391 - RNA, 20 nt, Artificial Sequence
  Synthetic
auaacuaucucauggguugg

SEQ ID NO: 55392 - RNA, 21 nt, Artificial Sequence
  Synthetic
uauaacuaucucauggguugg

SEQ ID NO: 55393 - RNA, 22 nt, Artificial Sequence
  Synthetic
uuauaacuaucucauggguugg

SEQ ID NO: 55394 - RNA, 23 nt, Artificial Sequence
  Synthetic
cuuauaacuaucucauggguugg

SEQ ID NO: 55395 - RNA, 24 nt, Artificial Sequence
  Synthetic
acuuauaacuaucucauggguugg

SEQ ID NO: 55396 - RNA, 18 nt, Artificial Sequence
  Synthetic
ccuaucuucccauguugg

SEQ ID NO: 55397 - RNA, 20 nt, Artificial Sequence
  Synthetic
ugccuaucuucccauguugg

SEQ ID NO: 55398 - RNA, 21 nt, Artificial Sequence
  Synthetic
cugccuaucuucccauguugg

SEQ ID NO: 55399 - RNA, 22 nt, Artificial Sequence
  Synthetic
acugccuaucuucccauguugg

SEQ ID NO: 55400 - RNA, 24 nt, Artificial Sequence
  Synthetic
agacugccuaucuucccauguugg

SEQ ID NO: 55401 - RNA, 18 nt, Artificial Sequence
  Synthetic
cuauguauaugauguugg

SEQ ID NO: 55402 - RNA, 19 nt, Artificial Sequence
  Synthetic
acuauguauaugauguugg

SEQ ID NO: 55403 - RNA, 20 nt, Artificial Sequence
  Synthetic
cacuauguauaugauguugg

SEQ ID NO: 55404 - RNA, 21 nt, Artificial Sequence
  Synthetic
ucacuauguauaugauguugg

SEQ ID NO: 55405 - RNA, 22 nt, Artificial Sequence
  Synthetic
uucacuauguauaugauguugg

SEQ ID NO: 55406 - RNA, 23 nt, Artificial Sequence
  Synthetic
cuucacuauguauaugauguugg

SEQ ID NO: 55407 - RNA, 24 nt, Artificial Sequence
  Synthetic
ucuucacuauguauaugauguugg

SEQ ID NO: 55408 - RNA, 18 nt, Artificial Sequence
  Synthetic
uagauauauagcuguugg

SEQ ID NO: 55409 - RNA, 19 nt, Artificial Sequence
  Synthetic
cuagauauauagcuguugg

SEQ ID NO: 55410 - RNA, 20 nt, Artificial Sequence
  Synthetic
ucuagauauauagcuguugg

SEQ ID NO: 55411 - RNA, 21 nt, Artificial Sequence
  Synthetic
uucuagauauauagcuguugg

SEQ ID NO: 55412 - RNA, 22 nt, Artificial Sequence
  Synthetic
auucuagauauauagcuguugg

SEQ ID NO: 55413 - RNA, 24 nt, Artificial Sequence
  Synthetic
ugauucuagauauauagcuguugg

SEQ ID NO: 55414 - RNA, 18 nt, Artificial Sequence
  Synthetic
cugaacccuggcuguugg

SEQ ID NO: 55415 - RNA, 19 nt, Artificial Sequence
  Synthetic
acugaacccuggcuguugg

SEQ ID NO: 55416 - RNA, 20 nt, Artificial Sequence
  Synthetic
uacugaacccuggcuguugg

SEQ ID NO: 55417 - RNA, 21 nt, Artificial Sequence
  Synthetic
auacugaacccuggcuguugg

SEQ ID NO: 55418 - RNA, 22 nt, Artificial Sequence
  Synthetic
aauacugaacccuggcuguugg

SEQ ID NO: 55419 - RNA, 23 nt, Artificial Sequence
  Synthetic
uaauacugaacccuggcuguugg

SEQ ID NO: 55420 - RNA, 24 nt, Artificial Sequence
  Synthetic
auaauacugaacccuggcuguugg

SEQ ID NO: 55421 - RNA, 18 nt, Artificial Sequence
  Synthetic
uuguucauauucuguugg

SEQ ID NO: 55422 - RNA, 19 nt, Artificial Sequence
  Synthetic
uuuguucauauucuguugg

SEQ ID NO: 55423 - RNA, 20 nt, Artificial Sequence
  Synthetic
uuuuguucauauucuguugg

SEQ ID NO: 55424 - RNA, 21 nt, Artificial Sequence
  Synthetic
auuuuguucauauucuguugg

SEQ ID NO: 55425 - RNA, 22 nt, Artificial Sequence
  Synthetic
aauuuuguucauauucuguugg

SEQ ID NO: 55426 - RNA, 23 nt, Artificial Sequence
  Synthetic
uaauuuuguucauauucuguugg

SEQ ID NO: 55427 - RNA, 24 nt, Artificial Sequence
  Synthetic
uuaauuuuguucauauucuguugg

SEQ ID NO: 55428 - RNA, 18 nt, Artificial Sequence
  Synthetic
augucguagcauuguugg

SEQ ID NO: 55429 - RNA, 19 nt, Artificial Sequence
  Synthetic
uaugucguagcauuguugg

SEQ ID NO: 55430 - RNA, 20 nt, Artificial Sequence
  Synthetic
cuaugucguagcauuguugg

SEQ ID NO: 55431 - RNA, 21 nt, Artificial Sequence
  Synthetic
ucuaugucguagcauuguugg

SEQ ID NO: 55432 - RNA, 22 nt, Artificial Sequence
  Synthetic
aucuaugucguagcauuguugg

SEQ ID NO: 55433 - RNA, 23 nt, Artificial Sequence
  Synthetic
uaucuaugucguagcauuguugg

SEQ ID NO: 55434 - RNA, 24 nt, Artificial Sequence
  Synthetic
auaucuaugucguagcauuguugg

SEQ ID NO: 55435 - RNA, 19 nt, Artificial Sequence
  Synthetic
aggagccauuaaaauuugg

SEQ ID NO: 55436 - RNA, 20 nt, Artificial Sequence
  Synthetic
caggagccauuaaaauuugg

SEQ ID NO: 55437 - RNA, 21 nt, Artificial Sequence
  Synthetic
acaggagccauuaaaauuugg

SEQ ID NO: 55438 - RNA, 22 nt, Artificial Sequence
  Synthetic
aacaggagccauuaaaauuugg

SEQ ID NO: 55439 - RNA, 23 nt, Artificial Sequence
  Synthetic
uaacaggagccauuaaaauuugg

SEQ ID NO: 55440 - RNA, 24 nt, Artificial Sequence
  Synthetic
uuaacaggagccauuaaaauuugg

SEQ ID NO: 55441 - RNA, 19 nt, Artificial Sequence
  Synthetic
ugguucacauuccauuugg

SEQ ID NO: 55442 - RNA, 20 nt, Artificial Sequence
  Synthetic
uugguucacauuccauuugg

SEQ ID NO: 55443 - RNA, 22 nt, Artificial Sequence
  Synthetic
uguugguucacauuccauuugg

SEQ ID NO: 55444 - RNA, 18 nt, Artificial Sequence
  Synthetic
aaauucacuaucauuugg

SEQ ID NO: 55445 - RNA, 19 nt, Artificial Sequence
  Synthetic
caaauucacuaucauuugg

SEQ ID NO: 55446 - RNA, 20 nt, Artificial Sequence
  Synthetic
acaaauucacuaucauuugg

SEQ ID NO: 55447 - RNA, 21 nt, Artificial Sequence
  Synthetic
cacaaauucacuaucauuugg

SEQ ID NO: 55448 - RNA, 22 nt, Artificial Sequence
  Synthetic
acacaaauucacuaucauuugg

SEQ ID NO: 55449 - RNA, 20 nt, Artificial Sequence
  Synthetic
aggcuuccucucugauuugg

SEQ ID NO: 55450 - RNA, 21 nt, Artificial Sequence
  Synthetic
caggcuuccucucugauuugg

SEQ ID NO: 55451 - RNA, 24 nt, Artificial Sequence
  Synthetic
aggcaggcuuccucucugauuugg

SEQ ID NO: 55452 - RNA, 18 nt, Artificial Sequence
  Synthetic
uguccauaugugauuugg

SEQ ID NO: 55453 - RNA, 19 nt, Artificial Sequence
  Synthetic
auguccauaugugauuugg

SEQ ID NO: 55454 - RNA, 20 nt, Artificial Sequence
  Synthetic
uauguccauaugugauuugg

SEQ ID NO: 55455 - RNA, 21 nt, Artificial Sequence
  Synthetic
uuauguccauaugugauuugg

SEQ ID NO: 55456 - RNA, 22 nt, Artificial Sequence
  Synthetic
auuauguccauaugugauuugg

SEQ ID NO: 55457 - RNA, 23 nt, Artificial Sequence
  Synthetic
aauuauguccauaugugauuugg

SEQ ID NO: 55458 - RNA, 24 nt, Artificial Sequence
  Synthetic
aaauuauguccauaugugauuugg

SEQ ID NO: 55459 - RNA, 18 nt, Artificial Sequence
  Synthetic
aaaaaccgcuuccuuugg

SEQ ID NO: 55460 - RNA, 19 nt, Artificial Sequence
  Synthetic
aaaaaaccgcuuccuuugg

SEQ ID NO: 55461 - RNA, 20 nt, Artificial Sequence
  Synthetic
aaaaaaaccgcuuccuuugg

SEQ ID NO: 55462 - RNA, 19 nt, Artificial Sequence
  Synthetic
aggaaauguuaaucuuugg

SEQ ID NO: 55463 - RNA, 20 nt, Artificial Sequence
  Synthetic
uaggaaauguuaaucuuugg

SEQ ID NO: 55464 - RNA, 22 nt, Artificial Sequence
  Synthetic
uguaggaaauguuaaucuuugg

SEQ ID NO: 55465 - RNA, 23 nt, Artificial Sequence
  Synthetic
uuguaggaaauguuaaucuuugg

SEQ ID NO: 55466 - RNA, 24 nt, Artificial Sequence
  Synthetic
cuuguaggaaauguuaaucuuugg

SEQ ID NO: 55467 - RNA, 18 nt, Artificial Sequence
  Synthetic
cauggagcugcaguuugg

SEQ ID NO: 55468 - RNA, 19 nt, Artificial Sequence
  Synthetic
ucauggagcugcaguuugg

SEQ ID NO: 55469 - RNA, 20 nt, Artificial Sequence
  Synthetic
uucauggagcugcaguuugg

SEQ ID NO: 55470 - RNA, 21 nt, Artificial Sequence
  Synthetic
auucauggagcugcaguuugg

SEQ ID NO: 55471 - RNA, 22 nt, Artificial Sequence
  Synthetic
uauucauggagcugcaguuugg

SEQ ID NO: 55472 - RNA, 23 nt, Artificial Sequence
  Synthetic
uuauucauggagcugcaguuugg

SEQ ID NO: 55473 - RNA, 24 nt, Artificial Sequence
  Synthetic
uuuauucauggagcugcaguuugg

SEQ ID NO: 55474 - RNA, 18 nt, Artificial Sequence
  Synthetic
uaggaacagcauguuugg

SEQ ID NO: 55475 - RNA, 19 nt, Artificial Sequence
  Synthetic
cuaggaacagcauguuugg

SEQ ID NO: 55476 - RNA, 20 nt, Artificial Sequence
  Synthetic
acuaggaacagcauguuugg

SEQ ID NO: 55477 - RNA, 21 nt, Artificial Sequence
  Synthetic
uacuaggaacagcauguuugg

SEQ ID NO: 55478 - RNA, 22 nt, Artificial Sequence
  Synthetic
auacuaggaacagcauguuugg

SEQ ID NO: 55479 - RNA, 23 nt, Artificial Sequence
  Synthetic
aauacuaggaacagcauguuugg

SEQ ID NO: 55480 - RNA, 24 nt, Artificial Sequence
  Synthetic
uaauacuaggaacagcauguuugg

SEQ ID NO: 55481 - RNA, 18 nt, Artificial Sequence
  Synthetic
aggugcucagaauuuugg

SEQ ID NO: 55482 - RNA, 19 nt, Artificial Sequence
  Synthetic
aaggugcucagaauuuugg

SEQ ID NO: 55483 - RNA, 20 nt, Artificial Sequence
  Synthetic
uaaggugcucagaauuuugg

SEQ ID NO: 55484 - RNA, 21 nt, Artificial Sequence
  Synthetic
uuaaggugcucagaauuuugg

SEQ ID NO: 55485 - RNA, 22 nt, Artificial Sequence
  Synthetic
uuuaaggugcucagaauuuugg

SEQ ID NO: 55486 - RNA, 23 nt, Artificial Sequence
  Synthetic
uuuuaaggugcucagaauuuugg

SEQ ID NO: 55487 - RNA, 24 nt, Artificial Sequence
  Synthetic
uuuuuaaggugcucagaauuuugg

SEQ ID NO: 55488 - RNA, 18 nt, Artificial Sequence
  Synthetic
aucuacuuuuaauuuugg

SEQ ID NO: 55489 - RNA, 20 nt, Artificial Sequence
  Synthetic
ugaucuacuuuuaauuuugg

SEQ ID NO: 55490 - RNA, 21 nt, Artificial Sequence
  Synthetic
augaucuacuuuuaauuuugg

SEQ ID NO: 55491 - RNA, 22 nt, Artificial Sequence
  Synthetic
aaugaucuacuuuuaauuuugg

SEQ ID NO: 55492 - RNA, 23 nt, Artificial Sequence
  Synthetic
uaaugaucuacuuuuaauuuugg

SEQ ID NO: 55493 - RNA, 24 nt, Artificial Sequence
  Synthetic
uuaaugaucuacuuuuaauuuugg

SEQ ID NO: 55494 - RNA, 20 nt, Artificial Sequence
  Synthetic
aggcuuucuucccauuuugg

SEQ ID NO: 55495 - RNA, 21 nt, Artificial Sequence
  Synthetic
uaggcuuucuucccauuuugg

SEQ ID NO: 55496 - RNA, 23 nt, Artificial Sequence
  Synthetic
uguaggcuuucuucccauuuugg

SEQ ID NO: 55497 - RNA, 19 nt, Artificial Sequence
  Synthetic
aggugaacugggauuuugg

SEQ ID NO: 55498 - RNA, 21 nt, Artificial Sequence
  Synthetic
ugaggugaacugggauuuugg

SEQ ID NO: 55499 - RNA, 22 nt, Artificial Sequence
  Synthetic
cugaggugaacugggauuuugg

SEQ ID NO: 55500 - RNA, 23 nt, Artificial Sequence
  Synthetic
ccugaggugaacugggauuuugg

SEQ ID NO: 55501 - RNA, 24 nt, Artificial Sequence
  Synthetic
cccugaggugaacugggauuuugg

SEQ ID NO: 55502 - RNA, 21 nt, Artificial Sequence
  Synthetic
ucuggagcagugauguuuugg

SEQ ID NO: 55503 - RNA, 22 nt, Artificial Sequence
  Synthetic
uucuggagcagugauguuuugg

SEQ ID NO: 55504 - RNA, 23 nt, Artificial Sequence
  Synthetic
auucuggagcagugauguuuugg

SEQ ID NO: 55505 - RNA, 24 nt, Artificial Sequence
  Synthetic
uauucuggagcagugauguuuugg

SEQ ID NO: 55506 - RNA, 21 nt, Artificial Sequence
  Synthetic
uauaaauaagaaauuuuuugg

SEQ ID NO: 55507 - RNA, 24 nt, Artificial Sequence
  Synthetic
agguauaaauaagaaauuuuuugg

SEQ ID NO: 55508 - RNA, 18 nt, Artificial Sequence
  Synthetic
acucaagugauuuuuugg

SEQ ID NO: 55509 - RNA, 20 nt, Artificial Sequence
  Synthetic
ugacucaagugauuuuuugg

SEQ ID NO: 55510 - RNA, 21 nt, Artificial Sequence
  Synthetic
augacucaagugauuuuuugg

SEQ ID NO: 55511 - RNA, 22 nt, Artificial Sequence
  Synthetic
aaugacucaagugauuuuuugg

SEQ ID NO: 55512 - RNA, 18 nt, Artificial Sequence
  Synthetic
cuaucauuugaaaaaaug

SEQ ID NO: 55513 - RNA, 19 nt, Artificial Sequence
  Synthetic
acuaucauuugaaaaaaug

SEQ ID NO: 55514 - RNA, 20 nt, Artificial Sequence
  Synthetic
cacuaucauuugaaaaaaug

SEQ ID NO: 55515 - RNA, 21 nt, Artificial Sequence
  Synthetic
ccacuaucauuugaaaaaaug

SEQ ID NO: 55516 - RNA, 22 nt, Artificial Sequence
  Synthetic
uccacuaucauuugaaaaaaug

SEQ ID NO: 55517 - RNA, 23 nt, Artificial Sequence
  Synthetic
uuccacuaucauuugaaaaaaug

SEQ ID NO: 55518 - RNA, 18 nt, Artificial Sequence
  Synthetic
uugacuuguacaaaaaug

SEQ ID NO: 55519 - RNA, 19 nt, Artificial Sequence
  Synthetic
auugacuuguacaaaaaug

SEQ ID NO: 55520 - RNA, 20 nt, Artificial Sequence
  Synthetic
cauugacuuguacaaaaaug

SEQ ID NO: 55521 - RNA, 21 nt, Artificial Sequence
  Synthetic
ucauugacuuguacaaaaaug

SEQ ID NO: 55522 - RNA, 24 nt, Artificial Sequence
  Synthetic
aggucauugacuuguacaaaaaug

SEQ ID NO: 55523 - RNA, 18 nt, Artificial Sequence
  Synthetic
auuuacagggcaaaaaug

SEQ ID NO: 55524 - RNA, 19 nt, Artificial Sequence
  Synthetic
cauuuacagggcaaaaaug

SEQ ID NO: 55525 - RNA, 20 nt, Artificial Sequence
  Synthetic
ccauuuacagggcaaaaaug

SEQ ID NO: 55526 - RNA, 21 nt, Artificial Sequence
  Synthetic
accauuuacagggcaaaaaug

SEQ ID NO: 55527 - RNA, 22 nt, Artificial Sequence
  Synthetic
caccauuuacagggcaaaaaug

SEQ ID NO: 55528 - RNA, 23 nt, Artificial Sequence
  Synthetic
ccaccauuuacagggcaaaaaug

SEQ ID NO: 55529 - RNA, 24 nt, Artificial Sequence
  Synthetic
uccaccauuuacagggcaaaaaug

SEQ ID NO: 55530 - RNA, 18 nt, Artificial Sequence
  Synthetic
cagcuaagaagaaaaaug

SEQ ID NO: 55531 - RNA, 19 nt, Artificial Sequence
  Synthetic
ucagcuaagaagaaaaaug

SEQ ID NO: 55532 - RNA, 20 nt, Artificial Sequence
  Synthetic
uucagcuaagaagaaaaaug

SEQ ID NO: 55533 - RNA, 21 nt, Artificial Sequence
  Synthetic
auucagcuaagaagaaaaaug

SEQ ID NO: 55534 - RNA, 22 nt, Artificial Sequence
  Synthetic
aauucagcuaagaagaaaaaug

SEQ ID NO: 55535 - RNA, 23 nt, Artificial Sequence
  Synthetic
aaauucagcuaagaagaaaaaug

SEQ ID NO: 55536 - RNA, 24 nt, Artificial Sequence
  Synthetic
caaauucagcuaagaagaaaaaug

SEQ ID NO: 55537 - RNA, 18 nt, Artificial Sequence
  Synthetic
uugaucuucugaaaaaug

SEQ ID NO: 55538 - RNA, 18 nt, Artificial Sequence
  Synthetic
aaagguggacuaaaaaug

SEQ ID NO: 55539 - RNA, 19 nt, Artificial Sequence
  Synthetic
caaagguggacuaaaaaug

SEQ ID NO: 55540 - RNA, 20 nt, Artificial Sequence
  Synthetic
ucaaagguggacuaaaaaug

SEQ ID NO: 55541 - RNA, 21 nt, Artificial Sequence
  Synthetic
uucaaagguggacuaaaaaug

SEQ ID NO: 55542 - RNA, 22 nt, Artificial Sequence
  Synthetic
auucaaagguggacuaaaaaug

SEQ ID NO: 55543 - RNA, 23 nt, Artificial Sequence
  Synthetic
aauucaaagguggacuaaaaaug

SEQ ID NO: 55544 - RNA, 24 nt, Artificial Sequence
  Synthetic
aaauucaaagguggacuaaaaaug

SEQ ID NO: 55545 - RNA, 19 nt, Artificial Sequence
  Synthetic
uggaaucagucccaaaaug

SEQ ID NO: 55546 - RNA, 21 nt, Artificial Sequence
  Synthetic
uguggaaucagucccaaaaug

SEQ ID NO: 55547 - RNA, 22 nt, Artificial Sequence
  Synthetic
cuguggaaucagucccaaaaug

SEQ ID NO: 55548 - RNA, 18 nt, Artificial Sequence
  Synthetic
uuuagauauuucaaaaug

SEQ ID NO: 55549 - RNA, 19 nt, Artificial Sequence
  Synthetic
cuuuagauauuucaaaaug

SEQ ID NO: 55550 - RNA, 20 nt, Artificial Sequence
  Synthetic
acuuuagauauuucaaaaug

SEQ ID NO: 55551 - RNA, 21 nt, Artificial Sequence
  Synthetic
uacuuuagauauuucaaaaug

SEQ ID NO: 55552 - RNA, 22 nt, Artificial Sequence
  Synthetic
auacuuuagauauuucaaaaug

SEQ ID NO: 55553 - RNA, 23 nt, Artificial Sequence
  Synthetic
aauacuuuagauauuucaaaaug

SEQ ID NO: 55554 - RNA, 24 nt, Artificial Sequence
  Synthetic
aaauacuuuagauauuucaaaaug

SEQ ID NO: 55555 - RNA, 18 nt, Artificial Sequence
  Synthetic
uauuuaacagagaaaaug

SEQ ID NO: 55556 - RNA, 19 nt, Artificial Sequence
  Synthetic
cuauuuaacagagaaaaug

SEQ ID NO: 55557 - RNA, 20 nt, Artificial Sequence
  Synthetic
ccuauuuaacagagaaaaug

SEQ ID NO: 55558 - RNA, 21 nt, Artificial Sequence
  Synthetic
uccuauuuaacagagaaaaug

SEQ ID NO: 55559 - RNA, 22 nt, Artificial Sequence
  Synthetic
auccuauuuaacagagaaaaug

SEQ ID NO: 55560 - RNA, 18 nt, Artificial Sequence
  Synthetic
ccagauggcaauaaaaug

SEQ ID NO: 55561 - RNA, 19 nt, Artificial Sequence
  Synthetic
cccagauggcaauaaaaug

SEQ ID NO: 55562 - RNA, 21 nt, Artificial Sequence
  Synthetic
ugcccagauggcaauaaaaug

SEQ ID NO: 55563 - RNA, 22 nt, Artificial Sequence
  Synthetic
cugcccagauggcaauaaaaug

SEQ ID NO: 55564 - RNA, 23 nt, Artificial Sequence
  Synthetic
ucugcccagauggcaauaaaaug

SEQ ID NO: 55565 - RNA, 24 nt, Artificial Sequence
  Synthetic
uucugcccagauggcaauaaaaug

SEQ ID NO: 55566 - RNA, 18 nt, Artificial Sequence
  Synthetic
cuuuugggauguaaaaug

SEQ ID NO: 55567 - RNA, 19 nt, Artificial Sequence
  Synthetic
ccuuuugggauguaaaaug

SEQ ID NO: 55568 - RNA, 20 nt, Artificial Sequence
  Synthetic
uccuuuugggauguaaaaug

SEQ ID NO: 55569 - RNA, 22 nt, Artificial Sequence
  Synthetic
aguccuuuugggauguaaaaug

SEQ ID NO: 55570 - RNA, 23 nt, Artificial Sequence
  Synthetic
caguccuuuugggauguaaaaug

SEQ ID NO: 55571 - RNA, 24 nt, Artificial Sequence
  Synthetic
acaguccuuuugggauguaaaaug

SEQ ID NO: 55572 - RNA, 18 nt, Artificial Sequence
  Synthetic
aaagaacugcuuaaaaug

SEQ ID NO: 55573 - RNA, 19 nt, Artificial Sequence
  Synthetic
uaaagaacugcuuaaaaug

SEQ ID NO: 55574 - RNA, 22 nt, Artificial Sequence
  Synthetic
cgguaaagaacugcuuaaaaug

SEQ ID NO: 55575 - RNA, 23 nt, Artificial Sequence
  Synthetic
acgguaaagaacugcuuaaaaug

SEQ ID NO: 55576 - RNA, 24 nt, Artificial Sequence
  Synthetic
cacgguaaagaacugcuuaaaaug

SEQ ID NO: 55577 - RNA, 18 nt, Artificial Sequence
  Synthetic
augcaguauaaacaaaug

SEQ ID NO: 55578 - RNA, 19 nt, Artificial Sequence
  Synthetic
aaugcaguauaaacaaaug

SEQ ID NO: 55579 - RNA, 20 nt, Artificial Sequence
  Synthetic
caaugcaguauaaacaaaug

SEQ ID NO: 55580 - RNA, 21 nt, Artificial Sequence
  Synthetic
ucaaugcaguauaaacaaaug

SEQ ID NO: 55581 - RNA, 22 nt, Artificial Sequence
  Synthetic
aucaaugcaguauaaacaaaug

SEQ ID NO: 55582 - RNA, 23 nt, Artificial Sequence
  Synthetic
uaucaaugcaguauaaacaaaug

SEQ ID NO: 55583 - RNA, 24 nt, Artificial Sequence
  Synthetic
cuaucaaugcaguauaaacaaaug

SEQ ID NO: 55584 - RNA, 18 nt, Artificial Sequence
  Synthetic
aagaacacuuaacaaaug

SEQ ID NO: 55585 - RNA, 19 nt, Artificial Sequence
  Synthetic
aaagaacacuuaacaaaug

SEQ ID NO: 55586 - RNA, 20 nt, Artificial Sequence
  Synthetic
uaaagaacacuuaacaaaug

SEQ ID NO: 55587 - RNA, 21 nt, Artificial Sequence
  Synthetic
auaaagaacacuuaacaaaug

SEQ ID NO: 55588 - RNA, 22 nt, Artificial Sequence
  Synthetic
aauaaagaacacuuaacaaaug

SEQ ID NO: 55589 - RNA, 23 nt, Artificial Sequence
  Synthetic
aaauaaagaacacuuaacaaaug

SEQ ID NO: 55590 - RNA, 24 nt, Artificial Sequence
  Synthetic
aaaauaaagaacacuuaacaaaug

SEQ ID NO: 55591 - RNA, 18 nt, Artificial Sequence
  Synthetic
auguuaaauacacaaaug

SEQ ID NO: 55592 - RNA, 20 nt, Artificial Sequence
  Synthetic
agauguuaaauacacaaaug

SEQ ID NO: 55593 - RNA, 21 nt, Artificial Sequence
  Synthetic
aagauguuaaauacacaaaug

SEQ ID NO: 55594 - RNA, 22 nt, Artificial Sequence
  Synthetic
caagauguuaaauacacaaaug

SEQ ID NO: 55595 - RNA, 23 nt, Artificial Sequence
  Synthetic
ucaagauguuaaauacacaaaug

SEQ ID NO: 55596 - RNA, 18 nt, Artificial Sequence
  Synthetic
ucuggccuaggacaaaug

SEQ ID NO: 55597 - RNA, 19 nt, Artificial Sequence
  Synthetic
aucuggccuaggacaaaug

SEQ ID NO: 55598 - RNA, 22 nt, Artificial Sequence
  Synthetic
uggaucuggccuaggacaaaug

SEQ ID NO: 55599 - RNA, 23 nt, Artificial Sequence
  Synthetic
cuggaucuggccuaggacaaaug

SEQ ID NO: 55600 - RNA, 24 nt, Artificial Sequence
  Synthetic
acuggaucuggccuaggacaaaug

SEQ ID NO: 55601 - RNA, 19 nt, Artificial Sequence
  Synthetic
agaaaagggauaccaaaug

SEQ ID NO: 55602 - RNA, 20 nt, Artificial Sequence
  Synthetic
uagaaaagggauaccaaaug

SEQ ID NO: 55603 - RNA, 21 nt, Artificial Sequence
  Synthetic
auagaaaagggauaccaaaug

SEQ ID NO: 55604 - RNA, 22 nt, Artificial Sequence
  Synthetic
cauagaaaagggauaccaaaug

SEQ ID NO: 55605 - RNA, 23 nt, Artificial Sequence
  Synthetic
ccauagaaaagggauaccaaaug

SEQ ID NO: 55606 - RNA, 24 nt, Artificial Sequence
  Synthetic
accauagaaaagggauaccaaaug

SEQ ID NO: 55607 - RNA, 19 nt, Artificial Sequence
  Synthetic
aguagauuuccuccaaaug

SEQ ID NO: 55608 - RNA, 20 nt, Artificial Sequence
  Synthetic
aaguagauuuccuccaaaug

SEQ ID NO: 55609 - RNA, 21 nt, Artificial Sequence
  Synthetic
caaguagauuuccuccaaaug

SEQ ID NO: 55610 - RNA, 22 nt, Artificial Sequence
  Synthetic
acaaguagauuuccuccaaaug

SEQ ID NO: 55611 - RNA, 23 nt, Artificial Sequence
  Synthetic
aacaaguagauuuccuccaaaug

SEQ ID NO: 55612 - RNA, 24 nt, Artificial Sequence
  Synthetic
caacaaguagauuuccuccaaaug

SEQ ID NO: 55613 - RNA, 18 nt, Artificial Sequence
  Synthetic
ccauaaaaucuccaaaug

SEQ ID NO: 55614 - RNA, 19 nt, Artificial Sequence
  Synthetic
cccauaaaaucuccaaaug

SEQ ID NO: 55615 - RNA, 20 nt, Artificial Sequence
  Synthetic
acccauaaaaucuccaaaug

SEQ ID NO: 55616 - RNA, 21 nt, Artificial Sequence
  Synthetic
cacccauaaaaucuccaaaug

SEQ ID NO: 55617 - RNA, 22 nt, Artificial Sequence
  Synthetic
acacccauaaaaucuccaaaug

SEQ ID NO: 55618 - RNA, 24 nt, Artificial Sequence
  Synthetic
agacacccauaaaaucuccaaaug

SEQ ID NO: 55619 - RNA, 20 nt, Artificial Sequence
  Synthetic
aggaugagaagaggcaaaug

SEQ ID NO: 55620 - RNA, 21 nt, Artificial Sequence
  Synthetic
aaggaugagaagaggcaaaug

SEQ ID NO: 55621 - RNA, 22 nt, Artificial Sequence
  Synthetic
aaaggaugagaagaggcaaaug

SEQ ID NO: 55622 - RNA, 23 nt, Artificial Sequence
  Synthetic
uaaaggaugagaagaggcaaaug

SEQ ID NO: 55623 - RNA, 24 nt, Artificial Sequence
  Synthetic
uuaaaggaugagaagaggcaaaug

SEQ ID NO: 55624 - RNA, 18 nt, Artificial Sequence
  Synthetic
auaagggcaaugcaaaug

SEQ ID NO: 55625 - RNA, 19 nt, Artificial Sequence
  Synthetic
uauaagggcaaugcaaaug

SEQ ID NO: 55626 - RNA, 20 nt, Artificial Sequence
  Synthetic
auauaagggcaaugcaaaug

SEQ ID NO: 55627 - RNA, 21 nt, Artificial Sequence
  Synthetic
aauauaagggcaaugcaaaug

SEQ ID NO: 55628 - RNA, 23 nt, Artificial Sequence
  Synthetic
agaauauaagggcaaugcaaaug

SEQ ID NO: 55629 - RNA, 24 nt, Artificial Sequence
  Synthetic
uagaauauaagggcaaugcaaaug

SEQ ID NO: 55630 - RNA, 21 nt, Artificial Sequence
  Synthetic
aucuuccaucuuuuucaaaug

SEQ ID NO: 55631 - RNA, 22 nt, Artificial Sequence
  Synthetic
uaucuuccaucuuuuucaaaug

SEQ ID NO: 55632 - RNA, 23 nt, Artificial Sequence
  Synthetic
uuaucuuccaucuuuuucaaaug

SEQ ID NO: 55633 - RNA, 24 nt, Artificial Sequence
  Synthetic
cuuaucuuccaucuuuuucaaaug

SEQ ID NO: 55634 - RNA, 19 nt, Artificial Sequence
  Synthetic
ugggaguugcuaagaaaug

SEQ ID NO: 55635 - RNA, 20 nt, Artificial Sequence
  Synthetic
cugggaguugcuaagaaaug

SEQ ID NO: 55636 - RNA, 21 nt, Artificial Sequence
  Synthetic
ccugggaguugcuaagaaaug

SEQ ID NO: 55637 - RNA, 22 nt, Artificial Sequence
  Synthetic
accugggaguugcuaagaaaug

SEQ ID NO: 55638 - RNA, 23 nt, Artificial Sequence
  Synthetic
caccugggaguugcuaagaaaug

SEQ ID NO: 55639 - RNA, 24 nt, Artificial Sequence
  Synthetic
ucaccugggaguugcuaagaaaug

SEQ ID NO: 55640 - RNA, 18 nt, Artificial Sequence
  Synthetic
uaggaaaugugagaaaug

SEQ ID NO: 55641 - RNA, 19 nt, Artificial Sequence
  Synthetic
uuaggaaaugugagaaaug

SEQ ID NO: 55642 - RNA, 20 nt, Artificial Sequence
  Synthetic
cuuaggaaaugugagaaaug

SEQ ID NO: 55643 - RNA, 22 nt, Artificial Sequence
  Synthetic
ugcuuaggaaaugugagaaaug

SEQ ID NO: 55644 - RNA, 23 nt, Artificial Sequence
  Synthetic
cugcuuaggaaaugugagaaaug

SEQ ID NO: 55645 - RNA, 24 nt, Artificial Sequence
  Synthetic
acugcuuaggaaaugugagaaaug

SEQ ID NO: 55646 - RNA, 21 nt, Artificial Sequence
  Synthetic
uuuugaaguuuguaggaaaug

SEQ ID NO: 55647 - RNA, 22 nt, Artificial Sequence
  Synthetic
uuuuugaaguuuguaggaaaug

SEQ ID NO: 55648 - RNA, 23 nt, Artificial Sequence
  Synthetic
uuuuuugaaguuuguaggaaaug

SEQ ID NO: 55649 - RNA, 24 nt, Artificial Sequence
  Synthetic
uuuuuuugaaguuuguaggaaaug

SEQ ID NO: 55650 - RNA, 18 nt, Artificial Sequence
  Synthetic
auucugcuacaugaaaug

SEQ ID NO: 55651 - RNA, 19 nt, Artificial Sequence
  Synthetic
cauucugcuacaugaaaug

SEQ ID NO: 55652 - RNA, 20 nt, Artificial Sequence
  Synthetic
acauucugcuacaugaaaug

SEQ ID NO: 55653 - RNA, 21 nt, Artificial Sequence
  Synthetic
uacauucugcuacaugaaaug

SEQ ID NO: 55654 - RNA, 22 nt, Artificial Sequence
  Synthetic
auacauucugcuacaugaaaug

SEQ ID NO: 55655 - RNA, 18 nt, Artificial Sequence
  Synthetic
uucuccuucacugaaaug

SEQ ID NO: 55656 - RNA, 19 nt, Artificial Sequence
  Synthetic
uuucuccuucacugaaaug

SEQ ID NO: 55657 - RNA, 20 nt, Artificial Sequence
  Synthetic
uuuucuccuucacugaaaug

SEQ ID NO: 55658 - RNA, 21 nt, Artificial Sequence
  Synthetic
auuuucuccuucacugaaaug

SEQ ID NO: 55659 - RNA, 22 nt, Artificial Sequence
  Synthetic
aauuuucuccuucacugaaaug

SEQ ID NO: 55660 - RNA, 23 nt, Artificial Sequence
  Synthetic
caauuuucuccuucacugaaaug

SEQ ID NO: 55661 - RNA, 24 nt, Artificial Sequence
  Synthetic
ucaauuuucuccuucacugaaaug

SEQ ID NO: 55662 - RNA, 19 nt, Artificial Sequence
  Synthetic
uguacaggauccugaaaug

SEQ ID NO: 55663 - RNA, 22 nt, Artificial Sequence
  Synthetic
agguguacaggauccugaaaug

SEQ ID NO: 55664 - RNA, 24 nt, Artificial Sequence
  Synthetic
ugagguguacaggauccugaaaug

SEQ ID NO: 55665 - RNA, 18 nt, Artificial Sequence
  Synthetic
ucauguuauucugaaaug

SEQ ID NO: 55666 - RNA, 19 nt, Artificial Sequence
  Synthetic
uucauguuauucugaaaug

SEQ ID NO: 55667 - RNA, 20 nt, Artificial Sequence
  Synthetic
uuucauguuauucugaaaug

SEQ ID NO: 55668 - RNA, 21 nt, Artificial Sequence
  Synthetic
uuuucauguuauucugaaaug

SEQ ID NO: 55669 - RNA, 22 nt, Artificial Sequence
  Synthetic
auuuucauguuauucugaaaug

SEQ ID NO: 55670 - RNA, 23 nt, Artificial Sequence
  Synthetic
uauuuucauguuauucugaaaug

SEQ ID NO: 55671 - RNA, 24 nt, Artificial Sequence
  Synthetic
auauuuucauguuauucugaaaug

SEQ ID NO: 55672 - RNA, 18 nt, Artificial Sequence
  Synthetic
caugcuuugauugaaaug

SEQ ID NO: 55673 - RNA, 19 nt, Artificial Sequence
  Synthetic
ucaugcuuugauugaaaug

SEQ ID NO: 55674 - RNA, 20 nt, Artificial Sequence
  Synthetic
cucaugcuuugauugaaaug

SEQ ID NO: 55675 - RNA, 22 nt, Artificial Sequence
  Synthetic
ugcucaugcuuugauugaaaug

SEQ ID NO: 55676 - RNA, 23 nt, Artificial Sequence
  Synthetic
uugcucaugcuuugauugaaaug

SEQ ID NO: 55677 - RNA, 24 nt, Artificial Sequence
  Synthetic
cuugcucaugcuuugauugaaaug

SEQ ID NO: 55678 - RNA, 18 nt, Artificial Sequence
  Synthetic
uuaaguucuguugaaaug

SEQ ID NO: 55679 - RNA, 19 nt, Artificial Sequence
  Synthetic
uuuaaguucuguugaaaug

SEQ ID NO: 55680 - RNA, 20 nt, Artificial Sequence
  Synthetic
auuuaaguucuguugaaaug

SEQ ID NO: 55681 - RNA, 22 nt, Artificial Sequence
  Synthetic
ugauuuaaguucuguugaaaug

SEQ ID NO: 55682 - RNA, 24 nt, Artificial Sequence
  Synthetic
ugugauuuaaguucuguugaaaug

SEQ ID NO: 55683 - RNA, 18 nt, Artificial Sequence
  Synthetic
aaaccuggcaacuaaaug

SEQ ID NO: 55684 - RNA, 19 nt, Artificial Sequence
  Synthetic
uaaaccuggcaacuaaaug

SEQ ID NO: 55685 - RNA, 20 nt, Artificial Sequence
  Synthetic
auaaaccuggcaacuaaaug

SEQ ID NO: 55686 - RNA, 21 nt, Artificial Sequence
  Synthetic
cauaaaccuggcaacuaaaug

SEQ ID NO: 55687 - RNA, 22 nt, Artificial Sequence
  Synthetic
acauaaaccuggcaacuaaaug

SEQ ID NO: 55688 - RNA, 23 nt, Artificial Sequence
  Synthetic
uacauaaaccuggcaacuaaaug

SEQ ID NO: 55689 - RNA, 24 nt, Artificial Sequence
  Synthetic
uuacauaaaccuggcaacuaaaug

SEQ ID NO: 55690 - RNA, 19 nt, Artificial Sequence
  Synthetic
aggcuuuaaagccuaaaug

SEQ ID NO: 55691 - RNA, 20 nt, Artificial Sequence
  Synthetic
uaggcuuuaaagccuaaaug

SEQ ID NO: 55692 - RNA, 21 nt, Artificial Sequence
  Synthetic
auaggcuuuaaagccuaaaug

SEQ ID NO: 55693 - RNA, 22 nt, Artificial Sequence
  Synthetic
cauaggcuuuaaagccuaaaug

SEQ ID NO: 55694 - RNA, 23 nt, Artificial Sequence
  Synthetic
ccauaggcuuuaaagccuaaaug

SEQ ID NO: 55695 - RNA, 24 nt, Artificial Sequence
  Synthetic
cccauaggcuuuaaagccuaaaug

SEQ ID NO: 55696 - RNA, 21 nt, Artificial Sequence
  Synthetic
aaacuuaccuaaugguaaaug

SEQ ID NO: 55697 - RNA, 22 nt, Artificial Sequence
  Synthetic
aaaacuuaccuaaugguaaaug

SEQ ID NO: 55698 - RNA, 23 nt, Artificial Sequence
  Synthetic
aaaaacuuaccuaaugguaaaug

SEQ ID NO: 55699 - RNA, 24 nt, Artificial Sequence
  Synthetic
uaaaaacuuaccuaaugguaaaug

SEQ ID NO: 55700 - RNA, 18 nt, Artificial Sequence
  Synthetic
uaauuaagagauuaaaug

SEQ ID NO: 55701 - RNA, 19 nt, Artificial Sequence
  Synthetic
auaauuaagagauuaaaug

SEQ ID NO: 55702 - RNA, 20 nt, Artificial Sequence
  Synthetic
aauaauuaagagauuaaaug

SEQ ID NO: 55703 - RNA, 22 nt, Artificial Sequence
  Synthetic
agaauaauuaagagauuaaaug

SEQ ID NO: 55704 - RNA, 23 nt, Artificial Sequence
  Synthetic
uagaauaauuaagagauuaaaug

SEQ ID NO: 55705 - RNA, 24 nt, Artificial Sequence
  Synthetic
uuagaauaauuaagagauuaaaug

SEQ ID NO: 55706 - RNA, 18 nt, Artificial Sequence
  Synthetic
acauauauauauuaaaug

SEQ ID NO: 55707 - RNA, 19 nt, Artificial Sequence
  Synthetic
cacauauauauauuaaaug

SEQ ID NO: 55708 - RNA, 21 nt, Artificial Sequence
  Synthetic
agcacauauauauauuaaaug

SEQ ID NO: 55709 - RNA, 22 nt, Artificial Sequence
  Synthetic
cagcacauauauauauuaaaug

SEQ ID NO: 55710 - RNA, 23 nt, Artificial Sequence
  Synthetic
ucagcacauauauauauuaaaug

SEQ ID NO: 55711 - RNA, 24 nt, Artificial Sequence
  Synthetic
aucagcacauauauauauuaaaug

SEQ ID NO: 55712 - RNA, 18 nt, Artificial Sequence
  Synthetic
ucagagugaauuuaaaug

SEQ ID NO: 55713 - RNA, 19 nt, Artificial Sequence
  Synthetic
aucagagugaauuuaaaug

SEQ ID NO: 55714 - RNA, 20 nt, Artificial Sequence
  Synthetic
caucagagugaauuuaaaug

SEQ ID NO: 55715 - RNA, 21 nt, Artificial Sequence
  Synthetic
acaucagagugaauuuaaaug

SEQ ID NO: 55716 - RNA, 23 nt, Artificial Sequence
  Synthetic
agacaucagagugaauuuaaaug

SEQ ID NO: 55717 - RNA, 24 nt, Artificial Sequence
  Synthetic
aagacaucagagugaauuuaaaug

SEQ ID NO: 55718 - RNA, 18 nt, Artificial Sequence
  Synthetic
agguguagucuuuaaaug

SEQ ID NO: 55719 - RNA, 20 nt, Artificial Sequence
  Synthetic
ugagguguagucuuuaaaug

SEQ ID NO: 55720 - RNA, 21 nt, Artificial Sequence
  Synthetic
cugagguguagucuuuaaaug

SEQ ID NO: 55721 - RNA, 22 nt, Artificial Sequence
  Synthetic
ucugagguguagucuuuaaaug

SEQ ID NO: 55722 - RNA, 24 nt, Artificial Sequence
  Synthetic
agucugagguguagucuuuaaaug

SEQ ID NO: 55723 - RNA, 18 nt, Artificial Sequence
  Synthetic
ccagaggccaaaacaaug

SEQ ID NO: 55724 - RNA, 19 nt, Artificial Sequence
  Synthetic
uccagaggccaaaacaaug

SEQ ID NO: 55725 - RNA, 21 nt, Artificial Sequence
  Synthetic
aguccagaggccaaaacaaug

SEQ ID NO: 55726 - RNA, 22 nt, Artificial Sequence
  Synthetic
uaguccagaggccaaaacaaug

SEQ ID NO: 55727 - RNA, 23 nt, Artificial Sequence
  Synthetic
auaguccagaggccaaaacaaug

SEQ ID NO: 55728 - RNA, 24 nt, Artificial Sequence
  Synthetic
aauaguccagaggccaaaacaaug

SEQ ID NO: 55729 - RNA, 18 nt, Artificial Sequence
  Synthetic
uucuuacaggcaacaaug

SEQ ID NO: 55730 - RNA, 20 nt, Artificial Sequence
  Synthetic
uguucuuacaggcaacaaug

SEQ ID NO: 55731 - RNA, 21 nt, Artificial Sequence
  Synthetic
uuguucuuacaggcaacaaug

SEQ ID NO: 55732 - RNA, 22 nt, Artificial Sequence
  Synthetic
uuuguucuuacaggcaacaaug

SEQ ID NO: 55733 - RNA, 23 nt, Artificial Sequence
  Synthetic
auuuguucuuacaggcaacaaug

SEQ ID NO: 55734 - RNA, 24 nt, Artificial Sequence
  Synthetic
uauuuguucuuacaggcaacaaug

SEQ ID NO: 55735 - RNA, 18 nt, Artificial Sequence
  Synthetic
caagaaaugugaacaaug

SEQ ID NO: 55736 - RNA, 19 nt, Artificial Sequence
  Synthetic
ucaagaaaugugaacaaug

SEQ ID NO: 55737 - RNA, 20 nt, Artificial Sequence
  Synthetic
uucaagaaaugugaacaaug

SEQ ID NO: 55738 - RNA, 21 nt, Artificial Sequence
  Synthetic
uuucaagaaaugugaacaaug

SEQ ID NO: 55739 - RNA, 23 nt, Artificial Sequence
  Synthetic
aguuucaagaaaugugaacaaug

SEQ ID NO: 55740 - RNA, 18 nt, Artificial Sequence
  Synthetic
auaaauagugagacaaug

SEQ ID NO: 55741 - RNA, 19 nt, Artificial Sequence
  Synthetic
cauaaauagugagacaaug

SEQ ID NO: 55742 - RNA, 20 nt, Artificial Sequence
  Synthetic
acauaaauagugagacaaug

SEQ ID NO: 55743 - RNA, 21 nt, Artificial Sequence
  Synthetic
aacauaaauagugagacaaug

SEQ ID NO: 55744 - RNA, 22 nt, Artificial Sequence
  Synthetic
aaacauaaauagugagacaaug

SEQ ID NO: 55745 - RNA, 23 nt, Artificial Sequence
  Synthetic
aaaacauaaauagugagacaaug

SEQ ID NO: 55746 - RNA, 24 nt, Artificial Sequence
  Synthetic
caaaacauaaauagugagacaaug

SEQ ID NO: 55747 - RNA, 18 nt, Artificial Sequence
  Synthetic
agcaaaguauauacaaug

SEQ ID NO: 55748 - RNA, 19 nt, Artificial Sequence
  Synthetic
aagcaaaguauauacaaug

SEQ ID NO: 55749 - RNA, 20 nt, Artificial Sequence
  Synthetic
caagcaaaguauauacaaug

SEQ ID NO: 55750 - RNA, 21 nt, Artificial Sequence
  Synthetic
ucaagcaaaguauauacaaug

SEQ ID NO: 55751 - RNA, 22 nt, Artificial Sequence
  Synthetic
uucaagcaaaguauauacaaug

SEQ ID NO: 55752 - RNA, 23 nt, Artificial Sequence
  Synthetic
uuucaagcaaaguauauacaaug

SEQ ID NO: 55753 - RNA, 24 nt, Artificial Sequence
  Synthetic
uuuucaagcaaaguauauacaaug

SEQ ID NO: 55754 - RNA, 18 nt, Artificial Sequence
  Synthetic
agucugguauagccaaug

SEQ ID NO: 55755 - RNA, 19 nt, Artificial Sequence
  Synthetic
uagucugguauagccaaug

SEQ ID NO: 55756 - RNA, 21 nt, Artificial Sequence
  Synthetic
cguagucugguauagccaaug

SEQ ID NO: 55757 - RNA, 22 nt, Artificial Sequence
  Synthetic
acguagucugguauagccaaug

SEQ ID NO: 55758 - RNA, 23 nt, Artificial Sequence
  Synthetic
cacguagucugguauagccaaug

SEQ ID NO: 55759 - RNA, 24 nt, Artificial Sequence
  Synthetic
ucacguagucugguauagccaaug

SEQ ID NO: 55760 - RNA, 18 nt, Artificial Sequence
  Synthetic
uucauuuaaccuccaaug

SEQ ID NO: 55761 - RNA, 19 nt, Artificial Sequence
  Synthetic
uuucauuuaaccuccaaug

SEQ ID NO: 55762 - RNA, 20 nt, Artificial Sequence
  Synthetic
auuucauuuaaccuccaaug

SEQ ID NO: 55763 - RNA, 21 nt, Artificial Sequence
  Synthetic
uauuucauuuaaccuccaaug

SEQ ID NO: 55764 - RNA, 22 nt, Artificial Sequence
  Synthetic
uuauuucauuuaaccuccaaug

SEQ ID NO: 55765 - RNA, 23 nt, Artificial Sequence
  Synthetic
cuuauuucauuuaaccuccaaug

SEQ ID NO: 55766 - RNA, 24 nt, Artificial Sequence
  Synthetic
ccuuauuucauuuaaccuccaaug

SEQ ID NO: 55767 - RNA, 18 nt, Artificial Sequence
  Synthetic
auaaucagcaguccaaug

SEQ ID NO: 55768 - RNA, 19 nt, Artificial Sequence
  Synthetic
aauaaucagcaguccaaug

SEQ ID NO: 55769 - RNA, 20 nt, Artificial Sequence
  Synthetic
aaauaaucagcaguccaaug

SEQ ID NO: 55770 - RNA, 22 nt, Artificial Sequence
  Synthetic
ugaaauaaucagcaguccaaug

SEQ ID NO: 55771 - RNA, 23 nt, Artificial Sequence
  Synthetic
augaaauaaucagcaguccaaug

SEQ ID NO: 55772 - RNA, 18 nt, Artificial Sequence
  Synthetic
caauucucaauuccaaug

SEQ ID NO: 55773 - RNA, 19 nt, Artificial Sequence
  Synthetic
acaauucucaauuccaaug

SEQ ID NO: 55774 - RNA, 22 nt, Artificial Sequence
  Synthetic
uggacaauucucaauuccaaug

SEQ ID NO: 55775 - RNA, 24 nt, Artificial Sequence
  Synthetic
uguggacaauucucaauuccaaug

SEQ ID NO: 55776 - RNA, 19 nt, Artificial Sequence
  Synthetic
uguggauuccauggcaaug

SEQ ID NO: 55777 - RNA, 20 nt, Artificial Sequence
  Synthetic
uuguggauuccauggcaaug

SEQ ID NO: 55778 - RNA, 21 nt, Artificial Sequence
  Synthetic
auuguggauuccauggcaaug

SEQ ID NO: 55779 - RNA, 22 nt, Artificial Sequence
  Synthetic
cauuguggauuccauggcaaug

SEQ ID NO: 55780 - RNA, 23 nt, Artificial Sequence
  Synthetic
ccauuguggauuccauggcaaug

SEQ ID NO: 55781 - RNA, 24 nt, Artificial Sequence
  Synthetic
uccauuguggauuccauggcaaug

SEQ ID NO: 55782 - RNA, 18 nt, Artificial Sequence
  Synthetic
auugcauguaaugcaaug

SEQ ID NO: 55783 - RNA, 19 nt, Artificial Sequence
  Synthetic
aauugcauguaaugcaaug

SEQ ID NO: 55784 - RNA, 20 nt, Artificial Sequence
  Synthetic
caauugcauguaaugcaaug

SEQ ID NO: 55785 - RNA, 21 nt, Artificial Sequence
  Synthetic
acaauugcauguaaugcaaug

SEQ ID NO: 55786 - RNA, 22 nt, Artificial Sequence
  Synthetic
aacaauugcauguaaugcaaug

SEQ ID NO: 55787 - RNA, 21 nt, Artificial Sequence
  Synthetic
ccugggucucugcuaucaaug

SEQ ID NO: 55788 - RNA, 23 nt, Artificial Sequence
  Synthetic
agccugggucucugcuaucaaug

SEQ ID NO: 55789 - RNA, 20 nt, Artificial Sequence
  Synthetic
agguuaugugucucucaaug

SEQ ID NO: 55790 - RNA, 21 nt, Artificial Sequence
  Synthetic
cagguuaugugucucucaaug

SEQ ID NO: 55791 - RNA, 23 nt, Artificial Sequence
  Synthetic
agcagguuaugugucucucaaug

SEQ ID NO: 55792 - RNA, 24 nt, Artificial Sequence
  Synthetic
cagcagguuaugugucucucaaug

SEQ ID NO: 55793 - RNA, 18 nt, Artificial Sequence
  Synthetic
uucaguaaacagucaaug

SEQ ID NO: 55794 - RNA, 22 nt, Artificial Sequence
  Synthetic
uggguucaguaaacagucaaug

SEQ ID NO: 55795 - RNA, 23 nt, Artificial Sequence
  Synthetic
uuggguucaguaaacagucaaug

SEQ ID NO: 55796 - RNA, 24 nt, Artificial Sequence
  Synthetic
uuuggguucaguaaacagucaaug

SEQ ID NO: 55797 - RNA, 21 nt, Artificial Sequence
  Synthetic
caugucuuguuuuggucaaug

SEQ ID NO: 55798 - RNA, 22 nt, Artificial Sequence
  Synthetic
ucaugucuuguuuuggucaaug

SEQ ID NO: 55799 - RNA, 23 nt, Artificial Sequence
  Synthetic
uucaugucuuguuuuggucaaug

SEQ ID NO: 55800 - RNA, 24 nt, Artificial Sequence
  Synthetic
auucaugucuuguuuuggucaaug

SEQ ID NO: 55801 - RNA, 18 nt, Artificial Sequence
  Synthetic
agagaucugccuucaaug

SEQ ID NO: 55802 - RNA, 19 nt, Artificial Sequence
  Synthetic
cagagaucugccuucaaug

SEQ ID NO: 55803 - RNA, 20 nt, Artificial Sequence
  Synthetic
ccagagaucugccuucaaug

SEQ ID NO: 55804 - RNA, 21 nt, Artificial Sequence
  Synthetic
uccagagaucugccuucaaug

SEQ ID NO: 55805 - RNA, 22 nt, Artificial Sequence
  Synthetic
uuccagagaucugccuucaaug

SEQ ID NO: 55806 - RNA, 23 nt, Artificial Sequence
  Synthetic
auuccagagaucugccuucaaug

SEQ ID NO: 55807 - RNA, 24 nt, Artificial Sequence
  Synthetic
uauuccagagaucugccuucaaug

SEQ ID NO: 55808 - RNA, 21 nt, Artificial Sequence
  Synthetic
ccauaguauuuuuaaagaaug

SEQ ID NO: 55809 - RNA, 23 nt, Artificial Sequence
  Synthetic
ugccauaguauuuuuaaagaaug

SEQ ID NO: 55810 - RNA, 24 nt, Artificial Sequence
  Synthetic
augccauaguauuuuuaaagaaug

SEQ ID NO: 55811 - RNA, 21 nt, Artificial Sequence
  Synthetic
cauaaaaaaaugauaagaaug

SEQ ID NO: 55812 - RNA, 22 nt, Artificial Sequence
  Synthetic
ccauaaaaaaaugauaagaaug

SEQ ID NO: 55813 - RNA, 23 nt, Artificial Sequence
  Synthetic
accauaaaaaaaugauaagaaug

SEQ ID NO: 55814 - RNA, 24 nt, Artificial Sequence
  Synthetic
caccauaaaaaaaugauaagaaug

SEQ ID NO: 55815 - RNA, 19 nt, Artificial Sequence
  Synthetic
agcuaucuuacuaagaaug

SEQ ID NO: 55816 - RNA, 20 nt, Artificial Sequence
  Synthetic
aagcuaucuuacuaagaaug

SEQ ID NO: 55817 - RNA, 22 nt, Artificial Sequence
  Synthetic
ugaagcuaucuuacuaagaaug

SEQ ID NO: 55818 - RNA, 23 nt, Artificial Sequence
  Synthetic
augaagcuaucuuacuaagaaug

SEQ ID NO: 55819 - RNA, 24 nt, Artificial Sequence
  Synthetic
aaugaagcuaucuuacuaagaaug

SEQ ID NO: 55820 - RNA, 18 nt, Artificial Sequence
  Synthetic
agcaauuugaacagaaug

SEQ ID NO: 55821 - RNA, 20 nt, Artificial Sequence
  Synthetic
agagcaauuugaacagaaug

SEQ ID NO: 55822 - RNA, 21 nt, Artificial Sequence
  Synthetic
aagagcaauuugaacagaaug

SEQ ID NO: 55823 - RNA, 22 nt, Artificial Sequence
  Synthetic
caagagcaauuugaacagaaug

SEQ ID NO: 55824 - RNA, 23 nt, Artificial Sequence
  Synthetic
acaagagcaauuugaacagaaug

SEQ ID NO: 55825 - RNA, 18 nt, Artificial Sequence
  Synthetic
ucaaagaagaauagaaug

SEQ ID NO: 55826 - RNA, 19 nt, Artificial Sequence
  Synthetic
uucaaagaagaauagaaug

SEQ ID NO: 55827 - RNA, 20 nt, Artificial Sequence
  Synthetic
uuucaaagaagaauagaaug

SEQ ID NO: 55828 - RNA, 21 nt, Artificial Sequence
  Synthetic
auuucaaagaagaauagaaug

SEQ ID NO: 55829 - RNA, 22 nt, Artificial Sequence
  Synthetic
uauuucaaagaagaauagaaug

SEQ ID NO: 55830 - RNA, 23 nt, Artificial Sequence
  Synthetic
auauuucaaagaagaauagaaug

SEQ ID NO: 55831 - RNA, 24 nt, Artificial Sequence
  Synthetic
cauauuucaaagaagaauagaaug

SEQ ID NO: 55832 - RNA, 18 nt, Artificial Sequence
  Synthetic
cuuaagauagauagaaug

SEQ ID NO: 55833 - RNA, 19 nt, Artificial Sequence
  Synthetic
acuuaagauagauagaaug

SEQ ID NO: 55834 - RNA, 20 nt, Artificial Sequence
  Synthetic
aacuuaagauagauagaaug

SEQ ID NO: 55835 - RNA, 22 nt, Artificial Sequence
  Synthetic
agaacuuaagauagauagaaug

SEQ ID NO: 55836 - RNA, 23 nt, Artificial Sequence
  Synthetic
uagaacuuaagauagauagaaug

SEQ ID NO: 55837 - RNA, 24 nt, Artificial Sequence
  Synthetic
auagaacuuaagauagauagaaug

SEQ ID NO: 55838 - RNA, 18 nt, Artificial Sequence
  Synthetic
cccccgccauguagaaug

SEQ ID NO: 55839 - RNA, 19 nt, Artificial Sequence
  Synthetic
ccccccgccauguagaaug

SEQ ID NO: 55840 - RNA, 20 nt, Artificial Sequence
  Synthetic
cccccccgccauguagaaug

SEQ ID NO: 55841 - RNA, 21 nt, Artificial Sequence
  Synthetic
ccccccccgccauguagaaug

SEQ ID NO: 55842 - RNA, 22 nt, Artificial Sequence
  Synthetic
cccccccccgccauguagaaug

SEQ ID NO: 55843 - RNA, 18 nt, Artificial Sequence
  Synthetic
ucugaagauaaaugaaug

SEQ ID NO: 55844 - RNA, 20 nt, Artificial Sequence
  Synthetic
ugucugaagauaaaugaaug

SEQ ID NO: 55845 - RNA, 22 nt, Artificial Sequence
  Synthetic
agugucugaagauaaaugaaug

SEQ ID NO: 55846 - RNA, 23 nt, Artificial Sequence
  Synthetic
cagugucugaagauaaaugaaug

SEQ ID NO: 55847 - RNA, 18 nt, Artificial Sequence
  Synthetic
aauugacuuaauugaaug

SEQ ID NO: 55848 - RNA, 20 nt, Artificial Sequence
  Synthetic
ugaauugacuuaauugaaug

SEQ ID NO: 55849 - RNA, 21 nt, Artificial Sequence
  Synthetic
cugaauugacuuaauugaaug

SEQ ID NO: 55850 - RNA, 23 nt, Artificial Sequence
  Synthetic
agcugaauugacuuaauugaaug

SEQ ID NO: 55851 - RNA, 24 nt, Artificial Sequence
  Synthetic
aagcugaauugacuuaauugaaug

SEQ ID NO: 55852 - RNA, 18 nt, Artificial Sequence
  Synthetic
aaauaucagucuugaaug

SEQ ID NO: 55853 - RNA, 19 nt, Artificial Sequence
  Synthetic
aaaauaucagucuugaaug

SEQ ID NO: 55854 - RNA, 20 nt, Artificial Sequence
  Synthetic
uaaaauaucagucuugaaug

SEQ ID NO: 55855 - RNA, 21 nt, Artificial Sequence
  Synthetic
auaaaauaucagucuugaaug

SEQ ID NO: 55856 - RNA, 23 nt, Artificial Sequence
  Synthetic
agauaaaauaucagucuugaaug

SEQ ID NO: 55857 - RNA, 24 nt, Artificial Sequence
  Synthetic
cagauaaaauaucagucuugaaug

SEQ ID NO: 55858 - RNA, 21 nt, Artificial Sequence
  Synthetic
cuauuuacauucaaaauaaug

SEQ ID NO: 55859 - RNA, 22 nt, Artificial Sequence
  Synthetic
ucuauuuacauucaaaauaaug

SEQ ID NO: 55860 - RNA, 23 nt, Artificial Sequence
  Synthetic
aucuauuuacauucaaaauaaug

SEQ ID NO: 55861 - RNA, 24 nt, Artificial Sequence
  Synthetic
aaucuauuuacauucaaaauaaug

SEQ ID NO: 55862 - RNA, 18 nt, Artificial Sequence
  Synthetic
uggugaaaaacaauaaug

SEQ ID NO: 55863 - RNA, 19 nt, Artificial Sequence
  Synthetic
cuggugaaaaacaauaaug

SEQ ID NO: 55864 - RNA, 20 nt, Artificial Sequence
  Synthetic
acuggugaaaaacaauaaug

SEQ ID NO: 55865 - RNA, 21 nt, Artificial Sequence
  Synthetic
uacuggugaaaaacaauaaug

SEQ ID NO: 55866 - RNA, 22 nt, Artificial Sequence
  Synthetic
auacuggugaaaaacaauaaug

SEQ ID NO: 55867 - RNA, 23 nt, Artificial Sequence
  Synthetic
uauacuggugaaaaacaauaaug

SEQ ID NO: 55868 - RNA, 24 nt, Artificial Sequence
  Synthetic
auauacuggugaaaaacaauaaug

SEQ ID NO: 55869 - RNA, 22 nt, Artificial Sequence
  Synthetic
ugacaggggaauuauaauaaug

SEQ ID NO: 55870 - RNA, 23 nt, Artificial Sequence
  Synthetic
cugacaggggaauuauaauaaug

SEQ ID NO: 55871 - RNA, 24 nt, Artificial Sequence
  Synthetic
ucugacaggggaauuauaauaaug

SEQ ID NO: 55872 - RNA, 18 nt, Artificial Sequence
  Synthetic
uacaauguacugauaaug

SEQ ID NO: 55873 - RNA, 20 nt, Artificial Sequence
  Synthetic
uguacaauguacugauaaug

SEQ ID NO: 55874 - RNA, 21 nt, Artificial Sequence
  Synthetic
uuguacaauguacugauaaug

SEQ ID NO: 55875 - RNA, 22 nt, Artificial Sequence
  Synthetic
auuguacaauguacugauaaug

SEQ ID NO: 55876 - RNA, 23 nt, Artificial Sequence
  Synthetic
uauuguacaauguacugauaaug

SEQ ID NO: 55877 - RNA, 24 nt, Artificial Sequence
  Synthetic
auauuguacaauguacugauaaug

SEQ ID NO: 55878 - RNA, 18 nt, Artificial Sequence
  Synthetic
auauaucuggugcuaaug

SEQ ID NO: 55879 - RNA, 19 nt, Artificial Sequence
  Synthetic
uauauaucuggugcuaaug

SEQ ID NO: 55880 - RNA, 20 nt, Artificial Sequence
  Synthetic
uuauauaucuggugcuaaug

SEQ ID NO: 55881 - RNA, 22 nt, Artificial Sequence
  Synthetic
uguuauauaucuggugcuaaug

SEQ ID NO: 55882 - RNA, 24 nt, Artificial Sequence
  Synthetic
uguguuauauaucuggugcuaaug

SEQ ID NO: 55883 - RNA, 21 nt, Artificial Sequence
  Synthetic
auuuuaauuagaaaaguaaug

SEQ ID NO: 55884 - RNA, 22 nt, Artificial Sequence
  Synthetic
uauuuuaauuagaaaaguaaug

SEQ ID NO: 55885 - RNA, 23 nt, Artificial Sequence
  Synthetic
cuauuuuaauuagaaaaguaaug

SEQ ID NO: 55886 - RNA, 24 nt, Artificial Sequence
  Synthetic
acuauuuuaauuagaaaaguaaug

SEQ ID NO: 55887 - RNA, 18 nt, Artificial Sequence
  Synthetic
uuugaguagauaguaaug

SEQ ID NO: 55888 - RNA, 19 nt, Artificial Sequence
  Synthetic
auuugaguagauaguaaug

SEQ ID NO: 55889 - RNA, 20 nt, Artificial Sequence
  Synthetic
cauuugaguagauaguaaug

SEQ ID NO: 55890 - RNA, 21 nt, Artificial Sequence
  Synthetic
acauuugaguagauaguaaug

SEQ ID NO: 55891 - RNA, 22 nt, Artificial Sequence
  Synthetic
aacauuugaguagauaguaaug

SEQ ID NO: 55892 - RNA, 24 nt, Artificial Sequence
  Synthetic
agaacauuugaguagauaguaaug

SEQ ID NO: 55893 - RNA, 18 nt, Artificial Sequence
  Synthetic
uauucaauugacguaaug

SEQ ID NO: 55894 - RNA, 19 nt, Artificial Sequence
  Synthetic
uuauucaauugacguaaug

SEQ ID NO: 55895 - RNA, 21 nt, Artificial Sequence
  Synthetic
uguuauucaauugacguaaug

SEQ ID NO: 55896 - RNA, 23 nt, Artificial Sequence
  Synthetic
aguguuauucaauugacguaaug

SEQ ID NO: 55897 - RNA, 24 nt, Artificial Sequence
  Synthetic
aaguguuauucaauugacguaaug

SEQ ID NO: 55898 - RNA, 18 nt, Artificial Sequence
  Synthetic
aacgcacugauuguaaug

SEQ ID NO: 55899 - RNA, 19 nt, Artificial Sequence
  Synthetic
aaacgcacugauuguaaug

SEQ ID NO: 55900 - RNA, 20 nt, Artificial Sequence
  Synthetic
aaaacgcacugauuguaaug

SEQ ID NO: 55901 - RNA, 18 nt, Artificial Sequence
  Synthetic
ucuaccuuccuuguaaug

SEQ ID NO: 55902 - RNA, 19 nt, Artificial Sequence
  Synthetic
uucuaccuuccuuguaaug

SEQ ID NO: 55903 - RNA, 20 nt, Artificial Sequence
  Synthetic
auucuaccuuccuuguaaug

SEQ ID NO: 55904 - RNA, 21 nt, Artificial Sequence
  Synthetic
uauucuaccuuccuuguaaug

SEQ ID NO: 55905 - RNA, 22 nt, Artificial Sequence
  Synthetic
auauucuaccuuccuuguaaug

SEQ ID NO: 55906 - RNA, 23 nt, Artificial Sequence
  Synthetic
aauauucuaccuuccuuguaaug

SEQ ID NO: 55907 - RNA, 24 nt, Artificial Sequence
  Synthetic
aaauauucuaccuuccuuguaaug

SEQ ID NO: 55908 - RNA, 22 nt, Artificial Sequence
  Synthetic
uguauucaauaaauuauuaaug

SEQ ID NO: 55909 - RNA, 24 nt, Artificial Sequence
  Synthetic
aguguauucaauaaauuauuaaug

SEQ ID NO: 55910 - RNA, 21 nt, Artificial Sequence
  Synthetic
auauuauauaaauauuuaaug

SEQ ID NO: 55911 - RNA, 22 nt, Artificial Sequence
  Synthetic
uauauuauauaaauauuuaaug

SEQ ID NO: 55912 - RNA, 23 nt, Artificial Sequence
  Synthetic
uuauauuauauaaauauuuaaug

SEQ ID NO: 55913 - RNA, 24 nt, Artificial Sequence
  Synthetic
auuauauuauauaaauauuuaaug

SEQ ID NO: 55914 - RNA, 18 nt, Artificial Sequence
  Synthetic
uuuauuacccaaaacaug

SEQ ID NO: 55915 - RNA, 19 nt, Artificial Sequence
  Synthetic
uuuuauuacccaaaacaug

SEQ ID NO: 55916 - RNA, 20 nt, Artificial Sequence
  Synthetic
cuuuuauuacccaaaacaug

SEQ ID NO: 55917 - RNA, 21 nt, Artificial Sequence
  Synthetic
acuuuuauuacccaaaacaug

SEQ ID NO: 55918 - RNA, 22 nt, Artificial Sequence
  Synthetic
aacuuuuauuacccaaaacaug

SEQ ID NO: 55919 - RNA, 18 nt, Artificial Sequence
  Synthetic
acagaacauuaaaacaug

SEQ ID NO: 55920 - RNA, 19 nt, Artificial Sequence
  Synthetic
aacagaacauuaaaacaug

SEQ ID NO: 55921 - RNA, 20 nt, Artificial Sequence
  Synthetic
aaacagaacauuaaaacaug

SEQ ID NO: 55922 - RNA, 21 nt, Artificial Sequence
  Synthetic
caaacagaacauuaaaacaug

SEQ ID NO: 55923 - RNA, 23 nt, Artificial Sequence
  Synthetic
agcaaacagaacauuaaaacaug

SEQ ID NO: 55924 - RNA, 24 nt, Artificial Sequence
  Synthetic
uagcaaacagaacauuaaaacaug

SEQ ID NO: 55925 - RNA, 18 nt, Artificial Sequence
  Synthetic
aacucagucaagaacaug

SEQ ID NO: 55926 - RNA, 20 nt, Artificial Sequence
  Synthetic
ugaacucagucaagaacaug

SEQ ID NO: 55927 - RNA, 21 nt, Artificial Sequence
  Synthetic
cugaacucagucaagaacaug

SEQ ID NO: 55928 - RNA, 22 nt, Artificial Sequence
  Synthetic
acugaacucagucaagaacaug

SEQ ID NO: 55929 - RNA, 23 nt, Artificial Sequence
  Synthetic
cacugaacucagucaagaacaug

SEQ ID NO: 55930 - RNA, 24 nt, Artificial Sequence
  Synthetic
ccacugaacucagucaagaacaug

SEQ ID NO: 55931 - RNA, 18 nt, Artificial Sequence
  Synthetic
uauauguacagacacaug

SEQ ID NO: 55932 - RNA, 19 nt, Artificial Sequence
  Synthetic
uuauauguacagacacaug

SEQ ID NO: 55933 - RNA, 21 nt, Artificial Sequence
  Synthetic
uguuauauguacagacacaug

SEQ ID NO: 55934 - RNA, 22 nt, Artificial Sequence
  Synthetic
auguuauauguacagacacaug

SEQ ID NO: 55935 - RNA, 18 nt, Artificial Sequence
  Synthetic
cguaaaucaggacacaug

SEQ ID NO: 55936 - RNA, 19 nt, Artificial Sequence
  Synthetic
ucguaaaucaggacacaug

SEQ ID NO: 55937 - RNA, 20 nt, Artificial Sequence
  Synthetic
uucguaaaucaggacacaug

SEQ ID NO: 55938 - RNA, 23 nt, Artificial Sequence
  Synthetic
agguucguaaaucaggacacaug

SEQ ID NO: 55939 - RNA, 18 nt, Artificial Sequence
  Synthetic
uuuaaauugcaucacaug

SEQ ID NO: 55940 - RNA, 19 nt, Artificial Sequence
  Synthetic
uuuuaaauugcaucacaug

SEQ ID NO: 55941 - RNA, 20 nt, Artificial Sequence
  Synthetic
uuuuuaaauugcaucacaug

SEQ ID NO: 55942 - RNA, 21 nt, Artificial Sequence
  Synthetic
uuuuuuaaauugcaucacaug

SEQ ID NO: 55943 - RNA, 23 nt, Artificial Sequence
  Synthetic
uguuuuuuaaauugcaucacaug

SEQ ID NO: 55944 - RNA, 24 nt, Artificial Sequence
  Synthetic
uuguuuuuuaaauugcaucacaug

SEQ ID NO: 55945 - RNA, 21 nt, Artificial Sequence
  Synthetic
aaaauacuauaacaauacaug

SEQ ID NO: 55946 - RNA, 22 nt, Artificial Sequence
  Synthetic
uaaaauacuauaacaauacaug

SEQ ID NO: 55947 - RNA, 24 nt, Artificial Sequence
  Synthetic
uguaaaauacuauaacaauacaug

SEQ ID NO: 55948 - RNA, 18 nt, Artificial Sequence
  Synthetic
auugaucugcaauacaug

SEQ ID NO: 55949 - RNA, 19 nt, Artificial Sequence
  Synthetic
aauugaucugcaauacaug

SEQ ID NO: 55950 - RNA, 20 nt, Artificial Sequence
  Synthetic
aaauugaucugcaauacaug

SEQ ID NO: 55951 - RNA, 22 nt, Artificial Sequence
  Synthetic
agaaauugaucugcaauacaug

SEQ ID NO: 55952 - RNA, 23 nt, Artificial Sequence
  Synthetic
cagaaauugaucugcaauacaug

SEQ ID NO: 55953 - RNA, 19 nt, Artificial Sequence
  Synthetic
aggacaauacaaaaccaug

SEQ ID NO: 55954 - RNA, 21 nt, Artificial Sequence
  Synthetic
ugaggacaauacaaaaccaug

SEQ ID NO: 55955 - RNA, 22 nt, Artificial Sequence
  Synthetic
cugaggacaauacaaaaccaug

SEQ ID NO: 55956 - RNA, 23 nt, Artificial Sequence
  Synthetic
acugaggacaauacaaaaccaug

SEQ ID NO: 55957 - RNA, 24 nt, Artificial Sequence
  Synthetic
cacugaggacaauacaaaaccaug

SEQ ID NO: 55958 - RNA, 18 nt, Artificial Sequence
  Synthetic
ugcaaguaaucaaccaug

SEQ ID NO: 55959 - RNA, 19 nt, Artificial Sequence
  Synthetic
augcaaguaaucaaccaug

SEQ ID NO: 55960 - RNA, 20 nt, Artificial Sequence
  Synthetic
uaugcaaguaaucaaccaug

SEQ ID NO: 55961 - RNA, 21 nt, Artificial Sequence
  Synthetic
uuaugcaaguaaucaaccaug

SEQ ID NO: 55962 - RNA, 22 nt, Artificial Sequence
  Synthetic
uuuaugcaaguaaucaaccaug

SEQ ID NO: 55963 - RNA, 23 nt, Artificial Sequence
  Synthetic
cuuuaugcaaguaaucaaccaug

SEQ ID NO: 55964 - RNA, 24 nt, Artificial Sequence
  Synthetic
acuuuaugcaaguaaucaaccaug

SEQ ID NO: 55965 - RNA, 18 nt, Artificial Sequence
  Synthetic
ccucucuuuucuaccaug

SEQ ID NO: 55966 - RNA, 19 nt, Artificial Sequence
  Synthetic
uccucucuuuucuaccaug

SEQ ID NO: 55967 - RNA, 20 nt, Artificial Sequence
  Synthetic
cuccucucuuuucuaccaug

SEQ ID NO: 55968 - RNA, 21 nt, Artificial Sequence
  Synthetic
ccuccucucuuuucuaccaug

SEQ ID NO: 55969 - RNA, 22 nt, Artificial Sequence
  Synthetic
uccuccucucuuuucuaccaug

SEQ ID NO: 55970 - RNA, 23 nt, Artificial Sequence
  Synthetic
uuccuccucucuuuucuaccaug

SEQ ID NO: 55971 - RNA, 24 nt, Artificial Sequence
  Synthetic
cuuccuccucucuuuucuaccaug

SEQ ID NO: 55972 - RNA, 19 nt, Artificial Sequence
  Synthetic
agcaaaaaccucacccaug

SEQ ID NO: 55973 - RNA, 20 nt, Artificial Sequence
  Synthetic
cagcaaaaaccucacccaug

SEQ ID NO: 55974 - RNA, 21 nt, Artificial Sequence
  Synthetic
ucagcaaaaaccucacccaug

SEQ ID NO: 55975 - RNA, 22 nt, Artificial Sequence
  Synthetic
cucagcaaaaaccucacccaug

SEQ ID NO: 55976 - RNA, 24 nt, Artificial Sequence
  Synthetic
ugcucagcaaaaaccucacccaug

SEQ ID NO: 55977 - RNA, 18 nt, Artificial Sequence
  Synthetic
agugcuugccagcccaug

SEQ ID NO: 55978 - RNA, 19 nt, Artificial Sequence
  Synthetic
aagugcuugccagcccaug

SEQ ID NO: 55979 - RNA, 20 nt, Artificial Sequence
  Synthetic
aaagugcuugccagcccaug

SEQ ID NO: 55980 - RNA, 21 nt, Artificial Sequence
  Synthetic
caaagugcuugccagcccaug

SEQ ID NO: 55981 - RNA, 22 nt, Artificial Sequence
  Synthetic
ccaaagugcuugccagcccaug

SEQ ID NO: 55982 - RNA, 23 nt, Artificial Sequence
  Synthetic
uccaaagugcuugccagcccaug

SEQ ID NO: 55983 - RNA, 24 nt, Artificial Sequence
  Synthetic
uuccaaagugcuugccagcccaug

SEQ ID NO: 55984 - RNA, 18 nt, Artificial Sequence
  Synthetic
aucuuaucuggucccaug

SEQ ID NO: 55985 - RNA, 20 nt, Artificial Sequence
  Synthetic
agaucuuaucuggucccaug

SEQ ID NO: 55986 - RNA, 21 nt, Artificial Sequence
  Synthetic
aagaucuuaucuggucccaug

SEQ ID NO: 55987 - RNA, 24 nt, Artificial Sequence
  Synthetic
uggaagaucuuaucuggucccaug

SEQ ID NO: 55988 - RNA, 18 nt, Artificial Sequence
  Synthetic
aguauuggcuaggccaug

SEQ ID NO: 55989 - RNA, 19 nt, Artificial Sequence
  Synthetic
aaguauuggcuaggccaug

SEQ ID NO: 55990 - RNA, 20 nt, Artificial Sequence
  Synthetic
aaaguauuggcuaggccaug

SEQ ID NO: 55991 - RNA, 21 nt, Artificial Sequence
  Synthetic
caaaguauuggcuaggccaug

SEQ ID NO: 55992 - RNA, 23 nt, Artificial Sequence
  Synthetic
agcaaaguauuggcuaggccaug

SEQ ID NO: 55993 - RNA, 24 nt, Artificial Sequence
  Synthetic
aagcaaaguauuggcuaggccaug

SEQ ID NO: 55994 - RNA, 18 nt, Artificial Sequence
  Synthetic
acauuuuuuuuugccaug

SEQ ID NO: 55995 - RNA, 19 nt, Artificial Sequence
  Synthetic
cacauuuuuuuuugccaug

SEQ ID NO: 55996 - RNA, 20 nt, Artificial Sequence
  Synthetic
ccacauuuuuuuuugccaug

SEQ ID NO: 55997 - RNA, 21 nt, Artificial Sequence
  Synthetic
cccacauuuuuuuuugccaug

SEQ ID NO: 55998 - RNA, 22 nt, Artificial Sequence
  Synthetic
ccccacauuuuuuuuugccaug

SEQ ID NO: 55999 - RNA, 23 nt, Artificial Sequence
  Synthetic
cccccacauuuuuuuuugccaug

SEQ ID NO: 56000 - RNA, 24 nt, Artificial Sequence
  Synthetic
ucccccacauuuuuuuuugccaug

SEQ ID NO: 56001 - RNA, 18 nt, Artificial Sequence
  Synthetic
cagcuaguggaauccaug

SEQ ID NO: 56002 - RNA, 19 nt, Artificial Sequence
  Synthetic
ucagcuaguggaauccaug

SEQ ID NO: 56003 - RNA, 20 nt, Artificial Sequence
  Synthetic
cucagcuaguggaauccaug

SEQ ID NO: 56004 - RNA, 22 nt, Artificial Sequence
  Synthetic
ugcucagcuaguggaauccaug

SEQ ID NO: 56005 - RNA, 23 nt, Artificial Sequence
  Synthetic
uugcucagcuaguggaauccaug

SEQ ID NO: 56006 - RNA, 24 nt, Artificial Sequence
  Synthetic
uuugcucagcuaguggaauccaug

SEQ ID NO: 56007 - RNA, 18 nt, Artificial Sequence
  Synthetic
auuauuuggcaaagcaug

SEQ ID NO: 56008 - RNA, 19 nt, Artificial Sequence
  Synthetic
aauuauuuggcaaagcaug

SEQ ID NO: 56009 - RNA, 20 nt, Artificial Sequence
  Synthetic
uaauuauuuggcaaagcaug

SEQ ID NO: 56010 - RNA, 21 nt, Artificial Sequence
  Synthetic
uuaauuauuuggcaaagcaug

SEQ ID NO: 56011 - RNA, 22 nt, Artificial Sequence
  Synthetic
cuuaauuauuuggcaaagcaug

SEQ ID NO: 56012 - RNA, 23 nt, Artificial Sequence
  Synthetic
ucuuaauuauuuggcaaagcaug

SEQ ID NO: 56013 - RNA, 18 nt, Artificial Sequence
  Synthetic
caugacuagcucagcaug

SEQ ID NO: 56014 - RNA, 19 nt, Artificial Sequence
  Synthetic
ucaugacuagcucagcaug

SEQ ID NO: 56015 - RNA, 20 nt, Artificial Sequence
  Synthetic
cucaugacuagcucagcaug

SEQ ID NO: 56016 - RNA, 21 nt, Artificial Sequence
  Synthetic
ucucaugacuagcucagcaug

SEQ ID NO: 56017 - RNA, 22 nt, Artificial Sequence
  Synthetic
uucucaugacuagcucagcaug

SEQ ID NO: 56018 - RNA, 23 nt, Artificial Sequence
  Synthetic
cuucucaugacuagcucagcaug

SEQ ID NO: 56019 - RNA, 24 nt, Artificial Sequence
  Synthetic
ccuucucaugacuagcucagcaug

SEQ ID NO: 56020 - RNA, 18 nt, Artificial Sequence
  Synthetic
ugauacauuuagagcaug

SEQ ID NO: 56021 - RNA, 19 nt, Artificial Sequence
  Synthetic
augauacauuuagagcaug

SEQ ID NO: 56022 - RNA, 20 nt, Artificial Sequence
  Synthetic
uaugauacauuuagagcaug

SEQ ID NO: 56023 - RNA, 21 nt, Artificial Sequence
  Synthetic
auaugauacauuuagagcaug

SEQ ID NO: 56024 - RNA, 22 nt, Artificial Sequence
  Synthetic
uauaugauacauuuagagcaug

SEQ ID NO: 56025 - RNA, 23 nt, Artificial Sequence
  Synthetic
cuauaugauacauuuagagcaug

SEQ ID NO: 56026 - RNA, 24 nt, Artificial Sequence
  Synthetic
acuauaugauacauuuagagcaug

SEQ ID NO: 56027 - RNA, 18 nt, Artificial Sequence
  Synthetic
uuauccugaaugagcaug

SEQ ID NO: 56028 - RNA, 19 nt, Artificial Sequence
  Synthetic
uuuauccugaaugagcaug

SEQ ID NO: 56029 - RNA, 20 nt, Artificial Sequence
  Synthetic
uuuuauccugaaugagcaug

SEQ ID NO: 56030 - RNA, 21 nt, Artificial Sequence
  Synthetic
auuuuauccugaaugagcaug

SEQ ID NO: 56031 - RNA, 22 nt, Artificial Sequence
  Synthetic
aauuuuauccugaaugagcaug

SEQ ID NO: 56032 - RNA, 23 nt, Artificial Sequence
  Synthetic
uaauuuuauccugaaugagcaug

SEQ ID NO: 56033 - RNA, 24 nt, Artificial Sequence
  Synthetic
auaauuuuauccugaaugagcaug

SEQ ID NO: 56034 - RNA, 18 nt, Artificial Sequence
  Synthetic
cuuuuaugacgaggcaug

SEQ ID NO: 56035 - RNA, 19 nt, Artificial Sequence
  Synthetic
acuuuuaugacgaggcaug

SEQ ID NO: 56036 - RNA, 20 nt, Artificial Sequence
  Synthetic
uacuuuuaugacgaggcaug

SEQ ID NO: 56037 - RNA, 21 nt, Artificial Sequence
  Synthetic
cuacuuuuaugacgaggcaug

SEQ ID NO: 56038 - RNA, 23 nt, Artificial Sequence
  Synthetic
agcuacuuuuaugacgaggcaug

SEQ ID NO: 56039 - RNA, 24 nt, Artificial Sequence
  Synthetic
aagcuacuuuuaugacgaggcaug

SEQ ID NO: 56040 - RNA, 18 nt, Artificial Sequence
  Synthetic
uagguuccaugaugcaug

SEQ ID NO: 56041 - RNA, 19 nt, Artificial Sequence
  Synthetic
cuagguuccaugaugcaug

SEQ ID NO: 56042 - RNA, 21 nt, Artificial Sequence
  Synthetic
agcuagguuccaugaugcaug

SEQ ID NO: 56043 - RNA, 23 nt, Artificial Sequence
  Synthetic
agagcuagguuccaugaugcaug

SEQ ID NO: 56044 - RNA, 24 nt, Artificial Sequence
  Synthetic
uagagcuagguuccaugaugcaug

SEQ ID NO: 56045 - RNA, 18 nt, Artificial Sequence
  Synthetic
uuaaaaugugccugcaug

SEQ ID NO: 56046 - RNA, 19 nt, Artificial Sequence
  Synthetic
cuuaaaaugugccugcaug

SEQ ID NO: 56047 - RNA, 20 nt, Artificial Sequence
  Synthetic
acuuaaaaugugccugcaug

SEQ ID NO: 56048 - RNA, 21 nt, Artificial Sequence
  Synthetic
aacuuaaaaugugccugcaug

SEQ ID NO: 56049 - RNA, 22 nt, Artificial Sequence
  Synthetic
aaacuuaaaaugugccugcaug

SEQ ID NO: 56050 - RNA, 23 nt, Artificial Sequence
  Synthetic
aaaacuuaaaaugugccugcaug

SEQ ID NO: 56051 - RNA, 18 nt, Artificial Sequence
  Synthetic
auugcugggaucugcaug

SEQ ID NO: 56052 - RNA, 19 nt, Artificial Sequence
  Synthetic
aauugcugggaucugcaug

SEQ ID NO: 56053 - RNA, 20 nt, Artificial Sequence
  Synthetic
uaauugcugggaucugcaug

SEQ ID NO: 56054 - RNA, 21 nt, Artificial Sequence
  Synthetic
auaauugcugggaucugcaug

SEQ ID NO: 56055 - RNA, 22 nt, Artificial Sequence
  Synthetic
uauaauugcugggaucugcaug

SEQ ID NO: 56056 - RNA, 23 nt, Artificial Sequence
  Synthetic
uuauaauugcugggaucugcaug

SEQ ID NO: 56057 - RNA, 24 nt, Artificial Sequence
  Synthetic
uuuauaauugcugggaucugcaug

SEQ ID NO: 56058 - RNA, 18 nt, Artificial Sequence
  Synthetic
cagcuaaaaucuugcaug

SEQ ID NO: 56059 - RNA, 19 nt, Artificial Sequence
  Synthetic
acagcuaaaaucuugcaug

SEQ ID NO: 56060 - RNA, 20 nt, Artificial Sequence
  Synthetic
aacagcuaaaaucuugcaug

SEQ ID NO: 56061 - RNA, 21 nt, Artificial Sequence
  Synthetic
aaacagcuaaaaucuugcaug

SEQ ID NO: 56062 - RNA, 22 nt, Artificial Sequence
  Synthetic
uaaacagcuaaaaucuugcaug

SEQ ID NO: 56063 - RNA, 23 nt, Artificial Sequence
  Synthetic
uuaaacagcuaaaaucuugcaug

SEQ ID NO: 56064 - RNA, 24 nt, Artificial Sequence
  Synthetic
auuaaacagcuaaaaucuugcaug

SEQ ID NO: 56065 - RNA, 18 nt, Artificial Sequence
  Synthetic
ugcuuugcagucaucaug

SEQ ID NO: 56066 - RNA, 19 nt, Artificial Sequence
  Synthetic
uugcuuugcagucaucaug

SEQ ID NO: 56067 - RNA, 20 nt, Artificial Sequence
  Synthetic
uuugcuuugcagucaucaug

SEQ ID NO: 56068 - RNA, 21 nt, Artificial Sequence
  Synthetic
cuuugcuuugcagucaucaug

SEQ ID NO: 56069 - RNA, 22 nt, Artificial Sequence
  Synthetic
ucuuugcuuugcagucaucaug

SEQ ID NO: 56070 - RNA, 23 nt, Artificial Sequence
  Synthetic
aucuuugcuuugcagucaucaug

SEQ ID NO: 56071 - RNA, 18 nt, Artificial Sequence
  Synthetic
auauuacauuucaucaug

SEQ ID NO: 56072 - RNA, 19 nt, Artificial Sequence
  Synthetic
uauauuacauuucaucaug

SEQ ID NO: 56073 - RNA, 20 nt, Artificial Sequence
  Synthetic
cuauauuacauuucaucaug

SEQ ID NO: 56074 - RNA, 21 nt, Artificial Sequence
  Synthetic
ucuauauuacauuucaucaug

SEQ ID NO: 56075 - RNA, 23 nt, Artificial Sequence
  Synthetic
ugucuauauuacauuucaucaug

SEQ ID NO: 56076 - RNA, 24 nt, Artificial Sequence
  Synthetic
cugucuauauuacauuucaucaug

SEQ ID NO: 56077 - RNA, 19 nt, Artificial Sequence
  Synthetic
aggucccccuaagaucaug

SEQ ID NO: 56078 - RNA, 20 nt, Artificial Sequence
  Synthetic
uaggucccccuaagaucaug

SEQ ID NO: 56079 - RNA, 21 nt, Artificial Sequence
  Synthetic
auaggucccccuaagaucaug

SEQ ID NO: 56080 - RNA, 22 nt, Artificial Sequence
  Synthetic
uauaggucccccuaagaucaug

SEQ ID NO: 56081 - RNA, 23 nt, Artificial Sequence
  Synthetic
uuauaggucccccuaagaucaug

SEQ ID NO: 56082 - RNA, 24 nt, Artificial Sequence
  Synthetic
auuauaggucccccuaagaucaug

SEQ ID NO: 56083 - RNA, 18 nt, Artificial Sequence
  Synthetic
ugagcauugaguaucaug

SEQ ID NO: 56084 - RNA, 19 nt, Artificial Sequence
  Synthetic
augagcauugaguaucaug

SEQ ID NO: 56085 - RNA, 20 nt, Artificial Sequence
  Synthetic
uaugagcauugaguaucaug

SEQ ID NO: 56086 - RNA, 21 nt, Artificial Sequence
  Synthetic
auaugagcauugaguaucaug

SEQ ID NO: 56087 - RNA, 22 nt, Artificial Sequence
  Synthetic
cauaugagcauugaguaucaug

SEQ ID NO: 56088 - RNA, 23 nt, Artificial Sequence
  Synthetic
ucauaugagcauugaguaucaug

SEQ ID NO: 56089 - RNA, 18 nt, Artificial Sequence
  Synthetic
uugucauucauuaucaug

SEQ ID NO: 56090 - RNA, 19 nt, Artificial Sequence
  Synthetic
auugucauucauuaucaug

SEQ ID NO: 56091 - RNA, 20 nt, Artificial Sequence
  Synthetic
uauugucauucauuaucaug

SEQ ID NO: 56092 - RNA, 21 nt, Artificial Sequence
  Synthetic
uuauugucauucauuaucaug

SEQ ID NO: 56093 - RNA, 22 nt, Artificial Sequence
  Synthetic
uuuauugucauucauuaucaug

SEQ ID NO: 56094 - RNA, 23 nt, Artificial Sequence
  Synthetic
cuuuauugucauucauuaucaug

SEQ ID NO: 56095 - RNA, 24 nt, Artificial Sequence
  Synthetic
acuuuauugucauucauuaucaug

SEQ ID NO: 56096 - RNA, 21 nt, Artificial Sequence
  Synthetic
ugggauacuacuguacucaug

SEQ ID NO: 56097 - RNA, 22 nt, Artificial Sequence
  Synthetic
uugggauacuacuguacucaug

SEQ ID NO: 56098 - RNA, 23 nt, Artificial Sequence
  Synthetic
cuugggauacuacuguacucaug

SEQ ID NO: 56099 - RNA, 24 nt, Artificial Sequence
  Synthetic
ucuugggauacuacuguacucaug

SEQ ID NO: 56100 - RNA, 18 nt, Artificial Sequence
  Synthetic
cuuuaccuguuccucaug

SEQ ID NO: 56101 - RNA, 19 nt, Artificial Sequence
  Synthetic
acuuuaccuguuccucaug

SEQ ID NO: 56102 - RNA, 20 nt, Artificial Sequence
  Synthetic
cacuuuaccuguuccucaug

SEQ ID NO: 56103 - RNA, 23 nt, Artificial Sequence
  Synthetic
uggcacuuuaccuguuccucaug

SEQ ID NO: 56104 - RNA, 24 nt, Artificial Sequence
  Synthetic
auggcacuuuaccuguuccucaug

SEQ ID NO: 56105 - RNA, 18 nt, Artificial Sequence
  Synthetic
ccccauacacuucucaug

SEQ ID NO: 56106 - RNA, 19 nt, Artificial Sequence
  Synthetic
cccccauacacuucucaug

SEQ ID NO: 56107 - RNA, 20 nt, Artificial Sequence
  Synthetic
acccccauacacuucucaug

SEQ ID NO: 56108 - RNA, 21 nt, Artificial Sequence
  Synthetic
aacccccauacacuucucaug

SEQ ID NO: 56109 - RNA, 22 nt, Artificial Sequence
  Synthetic
aaacccccauacacuucucaug

SEQ ID NO: 56110 - RNA, 23 nt, Artificial Sequence
  Synthetic
uaaacccccauacacuucucaug

SEQ ID NO: 56111 - RNA, 18 nt, Artificial Sequence
  Synthetic
cauguuuaaugagucaug

SEQ ID NO: 56112 - RNA, 19 nt, Artificial Sequence
  Synthetic
ucauguuuaaugagucaug

SEQ ID NO: 56113 - RNA, 20 nt, Artificial Sequence
  Synthetic
cucauguuuaaugagucaug

SEQ ID NO: 56114 - RNA, 22 nt, Artificial Sequence
  Synthetic
agcucauguuuaaugagucaug

SEQ ID NO: 56115 - RNA, 24 nt, Artificial Sequence
  Synthetic
agagcucauguuuaaugagucaug

SEQ ID NO: 56116 - RNA, 18 nt, Artificial Sequence
  Synthetic
cuucugugaagugucaug

SEQ ID NO: 56117 - RNA, 19 nt, Artificial Sequence
  Synthetic
ccuucugugaagugucaug

SEQ ID NO: 56118 - RNA, 20 nt, Artificial Sequence
  Synthetic
accuucugugaagugucaug

SEQ ID NO: 56119 - RNA, 21 nt, Artificial Sequence
  Synthetic
caccuucugugaagugucaug

SEQ ID NO: 56120 - RNA, 22 nt, Artificial Sequence
  Synthetic
ucaccuucugugaagugucaug

SEQ ID NO: 56121 - RNA, 23 nt, Artificial Sequence
  Synthetic
uucaccuucugugaagugucaug

SEQ ID NO: 56122 - RNA, 24 nt, Artificial Sequence
  Synthetic
cuucaccuucugugaagugucaug

SEQ ID NO: 56123 - RNA, 18 nt, Artificial Sequence
  Synthetic
cuuaaaagcuaauucaug

SEQ ID NO: 56124 - RNA, 19 nt, Artificial Sequence
  Synthetic
acuuaaaagcuaauucaug

SEQ ID NO: 56125 - RNA, 21 nt, Artificial Sequence
  Synthetic
agacuuaaaagcuaauucaug

SEQ ID NO: 56126 - RNA, 21 nt, Artificial Sequence
  Synthetic
aauacacuaauaaaguucaug

SEQ ID NO: 56127 - RNA, 22 nt, Artificial Sequence
  Synthetic
uaauacacuaauaaaguucaug

SEQ ID NO: 56128 - RNA, 23 nt, Artificial Sequence
  Synthetic
auaauacacuaauaaaguucaug

SEQ ID NO: 56129 - RNA, 24 nt, Artificial Sequence
  Synthetic
aauaauacacuaauaaaguucaug

SEQ ID NO: 56130 - RNA, 18 nt, Artificial Sequence
  Synthetic
cucuccuccccguucaug

SEQ ID NO: 56131 - RNA, 19 nt, Artificial Sequence
  Synthetic
ucucuccuccccguucaug

SEQ ID NO: 56132 - RNA, 20 nt, Artificial Sequence
  Synthetic
aucucuccuccccguucaug

SEQ ID NO: 56133 - RNA, 21 nt, Artificial Sequence
  Synthetic
aaucucuccuccccguucaug

SEQ ID NO: 56134 - RNA, 22 nt, Artificial Sequence
  Synthetic
caaucucuccuccccguucaug

SEQ ID NO: 56135 - RNA, 24 nt, Artificial Sequence
  Synthetic
agcaaucucuccuccccguucaug

SEQ ID NO: 56136 - RNA, 18 nt, Artificial Sequence
  Synthetic
auuuggucuucuuucaug

SEQ ID NO: 56137 - RNA, 19 nt, Artificial Sequence
  Synthetic
cauuuggucuucuuucaug

SEQ ID NO: 56138 - RNA, 20 nt, Artificial Sequence
  Synthetic
ucauuuggucuucuuucaug

SEQ ID NO: 56139 - RNA, 22 nt, Artificial Sequence
  Synthetic
ugucauuuggucuucuuucaug

SEQ ID NO: 56140 - RNA, 23 nt, Artificial Sequence
  Synthetic
uugucauuuggucuucuuucaug

SEQ ID NO: 56141 - RNA, 18 nt, Artificial Sequence
  Synthetic
uagcuggaaguuuucaug

SEQ ID NO: 56142 - RNA, 19 nt, Artificial Sequence
  Synthetic
uuagcuggaaguuuucaug

SEQ ID NO: 56143 - RNA, 20 nt, Artificial Sequence
  Synthetic
auuagcuggaaguuuucaug

SEQ ID NO: 56144 - RNA, 22 nt, Artificial Sequence
  Synthetic
ugauuagcuggaaguuuucaug

SEQ ID NO: 56145 - RNA, 24 nt, Artificial Sequence
  Synthetic
ugugauuagcuggaaguuuucaug

SEQ ID NO: 56146 - RNA, 21 nt, Artificial Sequence
  Synthetic
aaagccauguccuaaaagaug

SEQ ID NO: 56147 - RNA, 23 nt, Artificial Sequence
  Synthetic
agaaagccauguccuaaaagaug

SEQ ID NO: 56148 - RNA, 24 nt, Artificial Sequence
  Synthetic
uagaaagccauguccuaaaagaug

SEQ ID NO: 56149 - RNA, 18 nt, Artificial Sequence
  Synthetic
ugcucuggaccuaagaug

SEQ ID NO: 56150 - RNA, 19 nt, Artificial Sequence
  Synthetic
uugcucuggaccuaagaug

SEQ ID NO: 56151 - RNA, 20 nt, Artificial Sequence
  Synthetic
uuugcucuggaccuaagaug

SEQ ID NO: 56152 - RNA, 21 nt, Artificial Sequence
  Synthetic
cuuugcucuggaccuaagaug

SEQ ID NO: 56153 - RNA, 22 nt, Artificial Sequence
  Synthetic
ucuuugcucuggaccuaagaug

SEQ ID NO: 56154 - RNA, 24 nt, Artificial Sequence
  Synthetic
ugucuuugcucuggaccuaagaug

SEQ ID NO: 56155 - RNA, 22 nt, Artificial Sequence
  Synthetic
cguuuagauaaauauccagaug

SEQ ID NO: 56156 - RNA, 23 nt, Artificial Sequence
  Synthetic
ucguuuagauaaauauccagaug

SEQ ID NO: 56157 - RNA, 24 nt, Artificial Sequence
  Synthetic
uucguuuagauaaauauccagaug

SEQ ID NO: 56158 - RNA, 18 nt, Artificial Sequence
  Synthetic
aucccaggccuccagaug

SEQ ID NO: 56159 - RNA, 22 nt, Artificial Sequence
  Synthetic
ugggaucccaggccuccagaug

SEQ ID NO: 56160 - RNA, 23 nt, Artificial Sequence
  Synthetic
uugggaucccaggccuccagaug

SEQ ID NO: 56161 - RNA, 24 nt, Artificial Sequence
  Synthetic
uuugggaucccaggccuccagaug

SEQ ID NO: 56162 - RNA, 19 nt, Artificial Sequence
  Synthetic
ugcauuuaaugggcagaug

SEQ ID NO: 56163 - RNA, 20 nt, Artificial Sequence
  Synthetic
augcauuuaaugggcagaug

SEQ ID NO: 56164 - RNA, 21 nt, Artificial Sequence
  Synthetic
uaugcauuuaaugggcagaug

SEQ ID NO: 56165 - RNA, 22 nt, Artificial Sequence
  Synthetic
auaugcauuuaaugggcagaug

SEQ ID NO: 56166 - RNA, 23 nt, Artificial Sequence
  Synthetic
cauaugcauuuaaugggcagaug

SEQ ID NO: 56167 - RNA, 24 nt, Artificial Sequence
  Synthetic
ucauaugcauuuaaugggcagaug

SEQ ID NO: 56168 - RNA, 21 nt, Artificial Sequence
  Synthetic
auguuuuuaaaaaugcagaug

SEQ ID NO: 56169 - RNA, 23 nt, Artificial Sequence
  Synthetic
ugauguuuuuaaaaaugcagaug

SEQ ID NO: 56170 - RNA, 18 nt, Artificial Sequence
  Synthetic
cugaucaagacucagaug

SEQ ID NO: 56171 - RNA, 19 nt, Artificial Sequence
  Synthetic
acugaucaagacucagaug

SEQ ID NO: 56172 - RNA, 20 nt, Artificial Sequence
  Synthetic
aacugaucaagacucagaug

SEQ ID NO: 56173 - RNA, 22 nt, Artificial Sequence
  Synthetic
ugaacugaucaagacucagaug

SEQ ID NO: 56174 - RNA, 23 nt, Artificial Sequence
  Synthetic
augaacugaucaagacucagaug

SEQ ID NO: 56175 - RNA, 24 nt, Artificial Sequence
  Synthetic
caugaacugaucaagacucagaug

SEQ ID NO: 56176 - RNA, 21 nt, Artificial Sequence
  Synthetic
aaaguugaauucauagagaug

SEQ ID NO: 56177 - RNA, 22 nt, Artificial Sequence
  Synthetic
aaaaguugaauucauagagaug

SEQ ID NO: 56178 - RNA, 24 nt, Artificial Sequence
  Synthetic
agaaaaguugaauucauagagaug

SEQ ID NO: 56179 - RNA, 18 nt, Artificial Sequence
  Synthetic
ccuagcaagcuagagaug

SEQ ID NO: 56180 - RNA, 19 nt, Artificial Sequence
  Synthetic
accuagcaagcuagagaug

SEQ ID NO: 56181 - RNA, 20 nt, Artificial Sequence
  Synthetic
uaccuagcaagcuagagaug

SEQ ID NO: 56182 - RNA, 21 nt, Artificial Sequence
  Synthetic
auaccuagcaagcuagagaug

SEQ ID NO: 56183 - RNA, 22 nt, Artificial Sequence
  Synthetic
uauaccuagcaagcuagagaug

SEQ ID NO: 56184 - RNA, 23 nt, Artificial Sequence
  Synthetic
uuauaccuagcaagcuagagaug

SEQ ID NO: 56185 - RNA, 24 nt, Artificial Sequence
  Synthetic
uuuauaccuagcaagcuagagaug

SEQ ID NO: 56186 - RNA, 18 nt, Artificial Sequence
  Synthetic
aggaaacaaaucgagaug

SEQ ID NO: 56187 - RNA, 19 nt, Artificial Sequence
  Synthetic
aaggaaacaaaucgagaug

SEQ ID NO: 56188 - RNA, 22 nt, Artificial Sequence
  Synthetic
aggaaggaaacaaaucgagaug

SEQ ID NO: 56189 - RNA, 23 nt, Artificial Sequence
  Synthetic
caggaaggaaacaaaucgagaug

SEQ ID NO: 56190 - RNA, 24 nt, Artificial Sequence
  Synthetic
acaggaaggaaacaaaucgagaug

SEQ ID NO: 56191 - RNA, 18 nt, Artificial Sequence
  Synthetic
uucuuaccagcugagaug

SEQ ID NO: 56192 - RNA, 19 nt, Artificial Sequence
  Synthetic
uuucuuaccagcugagaug

SEQ ID NO: 56193 - RNA, 20 nt, Artificial Sequence
  Synthetic
auuucuuaccagcugagaug

SEQ ID NO: 56194 - RNA, 21 nt, Artificial Sequence
  Synthetic
aauuucuuaccagcugagaug

SEQ ID NO: 56195 - RNA, 22 nt, Artificial Sequence
  Synthetic
uaauuucuuaccagcugagaug

SEQ ID NO: 56196 - RNA, 23 nt, Artificial Sequence
  Synthetic
uuaauuucuuaccagcugagaug

SEQ ID NO: 56197 - RNA, 24 nt, Artificial Sequence
  Synthetic
uuuaauuucuuaccagcugagaug

SEQ ID NO: 56198 - RNA, 18 nt, Artificial Sequence
  Synthetic
uaacacaucucauagaug

SEQ ID NO: 56199 - RNA, 20 nt, Artificial Sequence
  Synthetic
uguaacacaucucauagaug

SEQ ID NO: 56200 - RNA, 21 nt, Artificial Sequence
  Synthetic
uuguaacacaucucauagaug

SEQ ID NO: 56201 - RNA, 22 nt, Artificial Sequence
  Synthetic
auuguaacacaucucauagaug

SEQ ID NO: 56202 - RNA, 23 nt, Artificial Sequence
  Synthetic
uauuguaacacaucucauagaug

SEQ ID NO: 56203 - RNA, 24 nt, Artificial Sequence
  Synthetic
uuauuguaacacaucucauagaug

SEQ ID NO: 56204 - RNA, 21 nt, Artificial Sequence
  Synthetic
aaguuagucauuuuauagaug

SEQ ID NO: 56205 - RNA, 22 nt, Artificial Sequence
  Synthetic
aaaguuagucauuuuauagaug

SEQ ID NO: 56206 - RNA, 23 nt, Artificial Sequence
  Synthetic
aaaaguuagucauuuuauagaug

SEQ ID NO: 56207 - RNA, 18 nt, Artificial Sequence
  Synthetic
uugugaaagucuuagaug

SEQ ID NO: 56208 - RNA, 19 nt, Artificial Sequence
  Synthetic
uuugugaaagucuuagaug

SEQ ID NO: 56209 - RNA, 20 nt, Artificial Sequence
  Synthetic
cuuugugaaagucuuagaug

SEQ ID NO: 56210 - RNA, 21 nt, Artificial Sequence
  Synthetic
ucuuugugaaagucuuagaug

SEQ ID NO: 56211 - RNA, 22 nt, Artificial Sequence
  Synthetic
uucuuugugaaagucuuagaug

SEQ ID NO: 56212 - RNA, 23 nt, Artificial Sequence
  Synthetic
auucuuugugaaagucuuagaug

SEQ ID NO: 56213 - RNA, 24 nt, Artificial Sequence
  Synthetic
cauucuuugugaaagucuuagaug

SEQ ID NO: 56214 - RNA, 19 nt, Artificial Sequence
  Synthetic
uggggucuuuauuuagaug

SEQ ID NO: 56215 - RNA, 20 nt, Artificial Sequence
  Synthetic
uuggggucuuuauuuagaug

SEQ ID NO: 56216 - RNA, 21 nt, Artificial Sequence
  Synthetic
cuuggggucuuuauuuagaug

SEQ ID NO: 56217 - RNA, 23 nt, Artificial Sequence
  Synthetic
ugcuuggggucuuuauuuagaug

SEQ ID NO: 56218 - RNA, 18 nt, Artificial Sequence
  Synthetic
ugaauggugaugacgaug

SEQ ID NO: 56219 - RNA, 19 nt, Artificial Sequence
  Synthetic
augaauggugaugacgaug

SEQ ID NO: 56220 - RNA, 21 nt, Artificial Sequence
  Synthetic
ugaugaauggugaugacgaug

SEQ ID NO: 56221 - RNA, 22 nt, Artificial Sequence
  Synthetic
uugaugaauggugaugacgaug

SEQ ID NO: 56222 - RNA, 18 nt, Artificial Sequence
  Synthetic
auuuggccaaauacgaug

SEQ ID NO: 56223 - RNA, 20 nt, Artificial Sequence
  Synthetic
ugauuuggccaaauacgaug

SEQ ID NO: 56224 - RNA, 21 nt, Artificial Sequence
  Synthetic
cugauuuggccaaauacgaug

SEQ ID NO: 56225 - RNA, 22 nt, Artificial Sequence
  Synthetic
ucugauuuggccaaauacgaug

SEQ ID NO: 56226 - RNA, 24 nt, Artificial Sequence
  Synthetic
ugucugauuuggccaaauacgaug

SEQ ID NO: 56227 - RNA, 18 nt, Artificial Sequence
  Synthetic
cagaaacugaauucgaug

SEQ ID NO: 56228 - RNA, 19 nt, Artificial Sequence
  Synthetic
ccagaaacugaauucgaug

SEQ ID NO: 56229 - RNA, 20 nt, Artificial Sequence
  Synthetic
cccagaaacugaauucgaug

SEQ ID NO: 56230 - RNA, 21 nt, Artificial Sequence
  Synthetic
acccagaaacugaauucgaug

SEQ ID NO: 56231 - RNA, 22 nt, Artificial Sequence
  Synthetic
uacccagaaacugaauucgaug

SEQ ID NO: 56232 - RNA, 23 nt, Artificial Sequence
  Synthetic
uuacccagaaacugaauucgaug

SEQ ID NO: 56233 - RNA, 24 nt, Artificial Sequence
  Synthetic
uuuacccagaaacugaauucgaug

SEQ ID NO: 56234 - RNA, 20 nt, Artificial Sequence
  Synthetic
cggggaaauuuaaaaggaug

SEQ ID NO: 56235 - RNA, 21 nt, Artificial Sequence
  Synthetic
ucggggaaauuuaaaaggaug

SEQ ID NO: 56236 - RNA, 22 nt, Artificial Sequence
  Synthetic
uucggggaaauuuaaaaggaug

SEQ ID NO: 56237 - RNA, 19 nt, Artificial Sequence
  Synthetic
agaguuuuaaagaaggaug

SEQ ID NO: 56238 - RNA, 20 nt, Artificial Sequence
  Synthetic
uagaguuuuaaagaaggaug

SEQ ID NO: 56239 - RNA, 21 nt, Artificial Sequence
  Synthetic
cuagaguuuuaaagaaggaug

SEQ ID NO: 56240 - RNA, 22 nt, Artificial Sequence
  Synthetic
acuagaguuuuaaagaaggaug

SEQ ID NO: 56241 - RNA, 24 nt, Artificial Sequence
  Synthetic
ugacuagaguuuuaaagaaggaug

SEQ ID NO: 56242 - RNA, 18 nt, Artificial Sequence
  Synthetic
aauaucagugccaggaug

SEQ ID NO: 56243 - RNA, 19 nt, Artificial Sequence
  Synthetic
uaauaucagugccaggaug

SEQ ID NO: 56244 - RNA, 21 nt, Artificial Sequence
  Synthetic
uguaauaucagugccaggaug

SEQ ID NO: 56245 - RNA, 22 nt, Artificial Sequence
  Synthetic
uuguaauaucagugccaggaug

SEQ ID NO: 56246 - RNA, 23 nt, Artificial Sequence
  Synthetic
cuuguaauaucagugccaggaug

SEQ ID NO: 56247 - RNA, 24 nt, Artificial Sequence
  Synthetic
acuuguaauaucagugccaggaug

SEQ ID NO: 56248 - RNA, 18 nt, Artificial Sequence
  Synthetic
ccgucacauugcaggaug

SEQ ID NO: 56249 - RNA, 19 nt, Artificial Sequence
  Synthetic
cccgucacauugcaggaug

SEQ ID NO: 56250 - RNA, 20 nt, Artificial Sequence
  Synthetic
ucccgucacauugcaggaug

SEQ ID NO: 56251 - RNA, 21 nt, Artificial Sequence
  Synthetic
cucccgucacauugcaggaug

SEQ ID NO: 56252 - RNA, 22 nt, Artificial Sequence
  Synthetic
ucucccgucacauugcaggaug

SEQ ID NO: 56253 - RNA, 18 nt, Artificial Sequence
  Synthetic
cacacaugauggaggaug

SEQ ID NO: 56254 - RNA, 19 nt, Artificial Sequence
  Synthetic
acacacaugauggaggaug

SEQ ID NO: 56255 - RNA, 21 nt, Artificial Sequence
  Synthetic
agacacacaugauggaggaug

SEQ ID NO: 56256 - RNA, 22 nt, Artificial Sequence
  Synthetic
aagacacacaugauggaggaug

SEQ ID NO: 56257 - RNA, 23 nt, Artificial Sequence
  Synthetic
aaagacacacaugauggaggaug

SEQ ID NO: 56258 - RNA, 24 nt, Artificial Sequence
  Synthetic
uaaagacacacaugauggaggaug

SEQ ID NO: 56259 - RNA, 19 nt, Artificial Sequence
  Synthetic
cgugacaaauacuaggaug

SEQ ID NO: 56260 - RNA, 20 nt, Artificial Sequence
  Synthetic
acgugacaaauacuaggaug

SEQ ID NO: 56261 - RNA, 21 nt, Artificial Sequence
  Synthetic
uacgugacaaauacuaggaug

SEQ ID NO: 56262 - RNA, 23 nt, Artificial Sequence
  Synthetic
uguacgugacaaauacuaggaug

SEQ ID NO: 56263 - RNA, 24 nt, Artificial Sequence
  Synthetic
cuguacgugacaaauacuaggaug

SEQ ID NO: 56264 - RNA, 18 nt, Artificial Sequence
  Synthetic
auugaaaugcaagggaug

SEQ ID NO: 56265 - RNA, 19 nt, Artificial Sequence
  Synthetic
uauugaaaugcaagggaug

SEQ ID NO: 56266 - RNA, 20 nt, Artificial Sequence
  Synthetic
cuauugaaaugcaagggaug

SEQ ID NO: 56267 - RNA, 21 nt, Artificial Sequence
  Synthetic
ucuauugaaaugcaagggaug

SEQ ID NO: 56268 - RNA, 22 nt, Artificial Sequence
  Synthetic
uucuauugaaaugcaagggaug

SEQ ID NO: 56269 - RNA, 23 nt, Artificial Sequence
  Synthetic
uuucuauugaaaugcaagggaug

SEQ ID NO: 56270 - RNA, 24 nt, Artificial Sequence
  Synthetic
auuucuauugaaaugcaagggaug

SEQ ID NO: 56271 - RNA, 18 nt, Artificial Sequence
  Synthetic
cagucauauuuagggaug

SEQ ID NO: 56272 - RNA, 20 nt, Artificial Sequence
  Synthetic
ugcagucauauuuagggaug

SEQ ID NO: 56273 - RNA, 21 nt, Artificial Sequence
  Synthetic
augcagucauauuuagggaug

SEQ ID NO: 56274 - RNA, 22 nt, Artificial Sequence
  Synthetic
uaugcagucauauuuagggaug

SEQ ID NO: 56275 - RNA, 23 nt, Artificial Sequence
  Synthetic
cuaugcagucauauuuagggaug

SEQ ID NO: 56276 - RNA, 24 nt, Artificial Sequence
  Synthetic
ccuaugcagucauauuuagggaug

SEQ ID NO: 56277 - RNA, 21 nt, Artificial Sequence
  Synthetic
agaccuggggggagggggaug

SEQ ID NO: 56278 - RNA, 22 nt, Artificial Sequence
  Synthetic
cagaccuggggggagggggaug

SEQ ID NO: 56279 - RNA, 23 nt, Artificial Sequence
  Synthetic
acagaccuggggggagggggaug

SEQ ID NO: 56280 - RNA, 24 nt, Artificial Sequence
  Synthetic
cacagaccuggggggagggggaug

SEQ ID NO: 56281 - RNA, 18 nt, Artificial Sequence
  Synthetic
uacuccuuuccugggaug

SEQ ID NO: 56282 - RNA, 19 nt, Artificial Sequence
  Synthetic
auacuccuuuccugggaug

SEQ ID NO: 56283 - RNA, 21 nt, Artificial Sequence
  Synthetic
agauacuccuuuccugggaug

SEQ ID NO: 56284 - RNA, 22 nt, Artificial Sequence
  Synthetic
uagauacuccuuuccugggaug

SEQ ID NO: 56285 - RNA, 23 nt, Artificial Sequence
  Synthetic
auagauacuccuuuccugggaug

SEQ ID NO: 56286 - RNA, 24 nt, Artificial Sequence
  Synthetic
cauagauacuccuuuccugggaug

SEQ ID NO: 56287 - RNA, 18 nt, Artificial Sequence
  Synthetic
ugcacugaagcauggaug

SEQ ID NO: 56288 - RNA, 19 nt, Artificial Sequence
  Synthetic
uugcacugaagcauggaug

SEQ ID NO: 56289 - RNA, 20 nt, Artificial Sequence
  Synthetic
auugcacugaagcauggaug

SEQ ID NO: 56290 - RNA, 21 nt, Artificial Sequence
  Synthetic
aauugcacugaagcauggaug

SEQ ID NO: 56291 - RNA, 22 nt, Artificial Sequence
  Synthetic
uaauugcacugaagcauggaug

SEQ ID NO: 56292 - RNA, 23 nt, Artificial Sequence
  Synthetic
cuaauugcacugaagcauggaug

SEQ ID NO: 56293 - RNA, 24 nt, Artificial Sequence
  Synthetic
ucuaauugcacugaagcauggaug

SEQ ID NO: 56294 - RNA, 19 nt, Artificial Sequence
  Synthetic
uggauauccagccuggaug

SEQ ID NO: 56295 - RNA, 20 nt, Artificial Sequence
  Synthetic
uuggauauccagccuggaug

SEQ ID NO: 56296 - RNA, 21 nt, Artificial Sequence
  Synthetic
uuuggauauccagccuggaug

SEQ ID NO: 56297 - RNA, 22 nt, Artificial Sequence
  Synthetic
uuuuggauauccagccuggaug

SEQ ID NO: 56298 - RNA, 24 nt, Artificial Sequence
  Synthetic
uguuuuggauauccagccuggaug

SEQ ID NO: 56299 - RNA, 18 nt, Artificial Sequence
  Synthetic
acauugucugucuggaug

SEQ ID NO: 56300 - RNA, 19 nt, Artificial Sequence
  Synthetic
uacauugucugucuggaug

SEQ ID NO: 56301 - RNA, 20 nt, Artificial Sequence
  Synthetic
uuacauugucugucuggaug

SEQ ID NO: 56302 - RNA, 21 nt, Artificial Sequence
  Synthetic
cuuacauugucugucuggaug

SEQ ID NO: 56303 - RNA, 22 nt, Artificial Sequence
  Synthetic
ucuuacauugucugucuggaug

SEQ ID NO: 56304 - RNA, 23 nt, Artificial Sequence
  Synthetic
aucuuacauugucugucuggaug

SEQ ID NO: 56305 - RNA, 18 nt, Artificial Sequence
  Synthetic
uguaaauagcuguggaug

SEQ ID NO: 56306 - RNA, 19 nt, Artificial Sequence
  Synthetic
uuguaaauagcuguggaug

SEQ ID NO: 56307 - RNA, 20 nt, Artificial Sequence
  Synthetic
auuguaaauagcuguggaug

SEQ ID NO: 56308 - RNA, 21 nt, Artificial Sequence
  Synthetic
aauuguaaauagcuguggaug

SEQ ID NO: 56309 - RNA, 23 nt, Artificial Sequence
  Synthetic
ugaauuguaaauagcuguggaug

SEQ ID NO: 56310 - RNA, 24 nt, Artificial Sequence
  Synthetic
uugaauuguaaauagcuguggaug

SEQ ID NO: 56311 - RNA, 19 nt, Artificial Sequence
  Synthetic
ugauggauuuaaaaugaug

SEQ ID NO: 56312 - RNA, 20 nt, Artificial Sequence
  Synthetic
augauggauuuaaaaugaug

SEQ ID NO: 56313 - RNA, 21 nt, Artificial Sequence
  Synthetic
caugauggauuuaaaaugaug

SEQ ID NO: 56314 - RNA, 22 nt, Artificial Sequence
  Synthetic
ucaugauggauuuaaaaugaug

SEQ ID NO: 56315 - RNA, 23 nt, Artificial Sequence
  Synthetic
uucaugauggauuuaaaaugaug

SEQ ID NO: 56316 - RNA, 18 nt, Artificial Sequence
  Synthetic
uauuuggagccaaugaug

SEQ ID NO: 56317 - RNA, 19 nt, Artificial Sequence
  Synthetic
auauuuggagccaaugaug

SEQ ID NO: 56318 - RNA, 20 nt, Artificial Sequence
  Synthetic
cauauuuggagccaaugaug

SEQ ID NO: 56319 - RNA, 22 nt, Artificial Sequence
  Synthetic
ugcauauuuggagccaaugaug

SEQ ID NO: 56320 - RNA, 23 nt, Artificial Sequence
  Synthetic
augcauauuuggagccaaugaug

SEQ ID NO: 56321 - RNA, 24 nt, Artificial Sequence
  Synthetic
aaugcauauuuggagccaaugaug

SEQ ID NO: 56322 - RNA, 20 nt, Artificial Sequence
  Synthetic
agguaaagacacacaugaug

SEQ ID NO: 56323 - RNA, 22 nt, Artificial Sequence
  Synthetic
agagguaaagacacacaugaug

SEQ ID NO: 56324 - RNA, 23 nt, Artificial Sequence
  Synthetic
uagagguaaagacacacaugaug

SEQ ID NO: 56325 - RNA, 18 nt, Artificial Sequence
  Synthetic
cacacaaucggcaugaug

SEQ ID NO: 56326 - RNA, 19 nt, Artificial Sequence
  Synthetic
acacacaaucggcaugaug

SEQ ID NO: 56327 - RNA, 20 nt, Artificial Sequence
  Synthetic
cacacacaaucggcaugaug

SEQ ID NO: 56328 - RNA, 22 nt, Artificial Sequence
  Synthetic
cgcacacacaaucggcaugaug

SEQ ID NO: 56329 - RNA, 23 nt, Artificial Sequence
  Synthetic
acgcacacacaaucggcaugaug

SEQ ID NO: 56330 - RNA, 24 nt, Artificial Sequence
  Synthetic
cacgcacacacaaucggcaugaug

SEQ ID NO: 56331 - RNA, 21 nt, Artificial Sequence
  Synthetic
agagaugaaauagagaugaug

SEQ ID NO: 56332 - RNA, 22 nt, Artificial Sequence
  Synthetic
uagagaugaaauagagaugaug

SEQ ID NO: 56333 - RNA, 23 nt, Artificial Sequence
  Synthetic
auagagaugaaauagagaugaug

SEQ ID NO: 56334 - RNA, 24 nt, Artificial Sequence
  Synthetic
aauagagaugaaauagagaugaug

SEQ ID NO: 56335 - RNA, 18 nt, Artificial Sequence
  Synthetic
cuagaaaaaaugaugaug

SEQ ID NO: 56336 - RNA, 21 nt, Artificial Sequence
  Synthetic
uggcuagaaaaaaugaugaug

SEQ ID NO: 56337 - RNA, 23 nt, Artificial Sequence
  Synthetic
uguggcuagaaaaaaugaugaug

SEQ ID NO: 56338 - RNA, 24 nt, Artificial Sequence
  Synthetic
uuguggcuagaaaaaaugaugaug

SEQ ID NO: 56339 - RNA, 18 nt, Artificial Sequence
  Synthetic
augccaccagugaugaug

SEQ ID NO: 56340 - RNA, 19 nt, Artificial Sequence
  Synthetic
aaugccaccagugaugaug

SEQ ID NO: 56341 - RNA, 20 nt, Artificial Sequence
  Synthetic
caaugccaccagugaugaug

SEQ ID NO: 56342 - RNA, 22 nt, Artificial Sequence
  Synthetic
ugcaaugccaccagugaugaug

SEQ ID NO: 56343 - RNA, 23 nt, Artificial Sequence
  Synthetic
uugcaaugccaccagugaugaug

SEQ ID NO: 56344 - RNA, 24 nt, Artificial Sequence
  Synthetic
uuugcaaugccaccagugaugaug

SEQ ID NO: 56345 - RNA, 18 nt, Artificial Sequence
  Synthetic
uucacuauguauaugaug

SEQ ID NO: 56346 - RNA, 19 nt, Artificial Sequence
  Synthetic
cuucacuauguauaugaug

SEQ ID NO: 56347 - RNA, 20 nt, Artificial Sequence
  Synthetic
ucuucacuauguauaugaug

SEQ ID NO: 56348 - RNA, 21 nt, Artificial Sequence
  Synthetic
uucuucacuauguauaugaug

SEQ ID NO: 56349 - RNA, 22 nt, Artificial Sequence
  Synthetic
cuucuucacuauguauaugaug

SEQ ID NO: 56350 - RNA, 24 nt, Artificial Sequence
  Synthetic
agcuucuucacuauguauaugaug

SEQ ID NO: 56351 - RNA, 18 nt, Artificial Sequence
  Synthetic
ucauuuaccauuaugaug

SEQ ID NO: 56352 - RNA, 19 nt, Artificial Sequence
  Synthetic
aucauuuaccauuaugaug

SEQ ID NO: 56353 - RNA, 20 nt, Artificial Sequence
  Synthetic
uaucauuuaccauuaugaug

SEQ ID NO: 56354 - RNA, 21 nt, Artificial Sequence
  Synthetic
uuaucauuuaccauuaugaug

SEQ ID NO: 56355 - RNA, 22 nt, Artificial Sequence
  Synthetic
uuuaucauuuaccauuaugaug

SEQ ID NO: 56356 - RNA, 23 nt, Artificial Sequence
  Synthetic
auuuaucauuuaccauuaugaug

SEQ ID NO: 56357 - RNA, 24 nt, Artificial Sequence
  Synthetic
aauuuaucauuuaccauuaugaug

SEQ ID NO: 56358 - RNA, 18 nt, Artificial Sequence
  Synthetic
acccaccccugacugaug

SEQ ID NO: 56359 - RNA, 19 nt, Artificial Sequence
  Synthetic
uacccaccccugacugaug

SEQ ID NO: 56360 - RNA, 20 nt, Artificial Sequence
  Synthetic
uuacccaccccugacugaug

SEQ ID NO: 56361 - RNA, 21 nt, Artificial Sequence
  Synthetic
auuacccaccccugacugaug

SEQ ID NO: 56362 - RNA, 22 nt, Artificial Sequence
  Synthetic
uauuacccaccccugacugaug

SEQ ID NO: 56363 - RNA, 23 nt, Artificial Sequence
  Synthetic
uuauuacccaccccugacugaug

SEQ ID NO: 56364 - RNA, 20 nt, Artificial Sequence
  Synthetic
aggucaggaacugucugaug

SEQ ID NO: 56365 - RNA, 21 nt, Artificial Sequence
  Synthetic
aaggucaggaacugucugaug

SEQ ID NO: 56366 - RNA, 22 nt, Artificial Sequence
  Synthetic
uaaggucaggaacugucugaug

SEQ ID NO: 56367 - RNA, 23 nt, Artificial Sequence
  Synthetic
cuaaggucaggaacugucugaug

SEQ ID NO: 56368 - RNA, 24 nt, Artificial Sequence
  Synthetic
ccuaaggucaggaacugucugaug

SEQ ID NO: 56369 - RNA, 18 nt, Artificial Sequence
  Synthetic
uguagaauuagaaauaug

SEQ ID NO: 56370 - RNA, 19 nt, Artificial Sequence
  Synthetic
auguagaauuagaaauaug

SEQ ID NO: 56371 - RNA, 21 nt, Artificial Sequence
  Synthetic
ugauguagaauuagaaauaug

SEQ ID NO: 56372 - RNA, 22 nt, Artificial Sequence
  Synthetic
augauguagaauuagaaauaug

SEQ ID NO: 56373 - RNA, 23 nt, Artificial Sequence
  Synthetic
caugauguagaauuagaaauaug

SEQ ID NO: 56374 - RNA, 18 nt, Artificial Sequence
  Synthetic
aaucaaagaugaaauaug

SEQ ID NO: 56375 - RNA, 19 nt, Artificial Sequence
  Synthetic
uaaucaaagaugaaauaug

SEQ ID NO: 56376 - RNA, 20 nt, Artificial Sequence
  Synthetic
cuaaucaaagaugaaauaug

SEQ ID NO: 56377 - RNA, 21 nt, Artificial Sequence
  Synthetic
ccuaaucaaagaugaaauaug

SEQ ID NO: 56378 - RNA, 22 nt, Artificial Sequence
  Synthetic
accuaaucaaagaugaaauaug

SEQ ID NO: 56379 - RNA, 23 nt, Artificial Sequence
  Synthetic
caccuaaucaaagaugaaauaug

SEQ ID NO: 56380 - RNA, 24 nt, Artificial Sequence
  Synthetic
ucaccuaaucaaagaugaaauaug

SEQ ID NO: 56381 - RNA, 18 nt, Artificial Sequence
  Synthetic
auggcaauuaccaauaug

SEQ ID NO: 56382 - RNA, 21 nt, Artificial Sequence
  Synthetic
aggauggcaauuaccaauaug

SEQ ID NO: 56383 - RNA, 23 nt, Artificial Sequence
  Synthetic
agaggauggcaauuaccaauaug

SEQ ID NO: 56384 - RNA, 24 nt, Artificial Sequence
  Synthetic
uagaggauggcaauuaccaauaug

SEQ ID NO: 56385 - RNA, 18 nt, Artificial Sequence
  Synthetic
uggagaugggagaauaug

SEQ ID NO: 56386 - RNA, 19 nt, Artificial Sequence
  Synthetic
cuggagaugggagaauaug

SEQ ID NO: 56387 - RNA, 20 nt, Artificial Sequence
  Synthetic
acuggagaugggagaauaug

SEQ ID NO: 56388 - RNA, 21 nt, Artificial Sequence
  Synthetic
aacuggagaugggagaauaug

SEQ ID NO: 56389 - RNA, 23 nt, Artificial Sequence
  Synthetic
agaacuggagaugggagaauaug

SEQ ID NO: 56390 - RNA, 18 nt, Artificial Sequence
  Synthetic
ucacaagguuguaauaug

SEQ ID NO: 56391 - RNA, 20 nt, Artificial Sequence
  Synthetic
ugucacaagguuguaauaug

SEQ ID NO: 56392 - RNA, 22 nt, Artificial Sequence
  Synthetic
agugucacaagguuguaauaug

SEQ ID NO: 56393 - RNA, 24 nt, Artificial Sequence
  Synthetic
ugagugucacaagguuguaauaug

SEQ ID NO: 56394 - RNA, 18 nt, Artificial Sequence
  Synthetic
aaaauaaaguuuaauaug

SEQ ID NO: 56395 - RNA, 19 nt, Artificial Sequence
  Synthetic
uaaaauaaaguuuaauaug

SEQ ID NO: 56396 - RNA, 20 nt, Artificial Sequence
  Synthetic
cuaaaauaaaguuuaauaug

SEQ ID NO: 56397 - RNA, 21 nt, Artificial Sequence
  Synthetic
ucuaaaauaaaguuuaauaug

SEQ ID NO: 56398 - RNA, 22 nt, Artificial Sequence
  Synthetic
cucuaaaauaaaguuuaauaug

SEQ ID NO: 56399 - RNA, 23 nt, Artificial Sequence
  Synthetic
acucuaaaauaaaguuuaauaug

SEQ ID NO: 56400 - RNA, 19 nt, Artificial Sequence
  Synthetic
cggccuuauuuuuaauaug

SEQ ID NO: 56401 - RNA, 20 nt, Artificial Sequence
  Synthetic
acggccuuauuuuuaauaug

SEQ ID NO: 56402 - RNA, 21 nt, Artificial Sequence
  Synthetic
aacggccuuauuuuuaauaug

SEQ ID NO: 56403 - RNA, 24 nt, Artificial Sequence
  Synthetic
uggaacggccuuauuuuuaauaug

SEQ ID NO: 56404 - RNA, 18 nt, Artificial Sequence
  Synthetic
cagggccagcaacauaug

SEQ ID NO: 56405 - RNA, 19 nt, Artificial Sequence
  Synthetic
ccagggccagcaacauaug

SEQ ID NO: 56406 - RNA, 20 nt, Artificial Sequence
  Synthetic
cccagggccagcaacauaug

SEQ ID NO: 56407 - RNA, 22 nt, Artificial Sequence
  Synthetic
agcccagggccagcaacauaug

SEQ ID NO: 56408 - RNA, 23 nt, Artificial Sequence
  Synthetic
uagcccagggccagcaacauaug

SEQ ID NO: 56409 - RNA, 24 nt, Artificial Sequence
  Synthetic
cuagcccagggccagcaacauaug

SEQ ID NO: 56410 - RNA, 18 nt, Artificial Sequence
  Synthetic
cagguaauaaagcauaug

SEQ ID NO: 56411 - RNA, 19 nt, Artificial Sequence
  Synthetic
ucagguaauaaagcauaug

SEQ ID NO: 56412 - RNA, 20 nt, Artificial Sequence
  Synthetic
uucagguaauaaagcauaug

SEQ ID NO: 56413 - RNA, 21 nt, Artificial Sequence
  Synthetic
uuucagguaauaaagcauaug

SEQ ID NO: 56414 - RNA, 22 nt, Artificial Sequence
  Synthetic
auuucagguaauaaagcauaug

SEQ ID NO: 56415 - RNA, 23 nt, Artificial Sequence
  Synthetic
uauuucagguaauaaagcauaug

SEQ ID NO: 56416 - RNA, 18 nt, Artificial Sequence
  Synthetic
ucuacuuagucagauaug

SEQ ID NO: 56417 - RNA, 19 nt, Artificial Sequence
  Synthetic
uucuacuuagucagauaug

SEQ ID NO: 56418 - RNA, 20 nt, Artificial Sequence
  Synthetic
auucuacuuagucagauaug

SEQ ID NO: 56419 - RNA, 21 nt, Artificial Sequence
  Synthetic
aauucuacuuagucagauaug

SEQ ID NO: 56420 - RNA, 24 nt, Artificial Sequence
  Synthetic
uggaauucuacuuagucagauaug

SEQ ID NO: 56421 - RNA, 19 nt, Artificial Sequence
  Synthetic
ugcaugacaacgggauaug

SEQ ID NO: 56422 - RNA, 20 nt, Artificial Sequence
  Synthetic
uugcaugacaacgggauaug

SEQ ID NO: 56423 - RNA, 22 nt, Artificial Sequence
  Synthetic
uguugcaugacaacgggauaug

SEQ ID NO: 56424 - RNA, 24 nt, Artificial Sequence
  Synthetic
aguguugcaugacaacgggauaug

SEQ ID NO: 56425 - RNA, 18 nt, Artificial Sequence
  Synthetic
ucccugaaaugggauaug

SEQ ID NO: 56426 - RNA, 19 nt, Artificial Sequence
  Synthetic
aucccugaaaugggauaug

SEQ ID NO: 56427 - RNA, 20 nt, Artificial Sequence
  Synthetic
caucccugaaaugggauaug

SEQ ID NO: 56428 - RNA, 21 nt, Artificial Sequence
  Synthetic
ucaucccugaaaugggauaug

SEQ ID NO: 56429 - RNA, 23 nt, Artificial Sequence
  Synthetic
agucaucccugaaaugggauaug

SEQ ID NO: 56430 - RNA, 24 nt, Artificial Sequence
  Synthetic
aagucaucccugaaaugggauaug

SEQ ID NO: 56431 - RNA, 18 nt, Artificial Sequence
  Synthetic
cuuggauuccuggauaug

SEQ ID NO: 56432 - RNA, 20 nt, Artificial Sequence
  Synthetic
ugcuuggauuccuggauaug

SEQ ID NO: 56433 - RNA, 21 nt, Artificial Sequence
  Synthetic
augcuuggauuccuggauaug

SEQ ID NO: 56434 - RNA, 22 nt, Artificial Sequence
  Synthetic
aaugcuuggauuccuggauaug

SEQ ID NO: 56435 - RNA, 23 nt, Artificial Sequence
  Synthetic
caaugcuuggauuccuggauaug

SEQ ID NO: 56436 - RNA, 24 nt, Artificial Sequence
  Synthetic
ccaaugcuuggauuccuggauaug

SEQ ID NO: 56437 - RNA, 18 nt, Artificial Sequence
  Synthetic
cuuauuggaggugauaug

SEQ ID NO: 56438 - RNA, 20 nt, Artificial Sequence
  Synthetic
agcuuauuggaggugauaug

SEQ ID NO: 56439 - RNA, 21 nt, Artificial Sequence
  Synthetic
aagcuuauuggaggugauaug

SEQ ID NO: 56440 - RNA, 23 nt, Artificial Sequence
  Synthetic
agaagcuuauuggaggugauaug

SEQ ID NO: 56441 - RNA, 24 nt, Artificial Sequence
  Synthetic
cagaagcuuauuggaggugauaug

SEQ ID NO: 56442 - RNA, 18 nt, Artificial Sequence
  Synthetic
auuuaaacuacauauaug

SEQ ID NO: 56443 - RNA, 19 nt, Artificial Sequence
  Synthetic
aauuuaaacuacauauaug

SEQ ID NO: 56444 - RNA, 20 nt, Artificial Sequence
  Synthetic
aaauuuaaacuacauauaug

SEQ ID NO: 56445 - RNA, 22 nt, Artificial Sequence
  Synthetic
agaaauuuaaacuacauauaug

SEQ ID NO: 56446 - RNA, 24 nt, Artificial Sequence
  Synthetic
agagaaauuuaaacuacauauaug

SEQ ID NO: 56447 - RNA, 18 nt, Artificial Sequence
  Synthetic
uuguacaugagauauaug

SEQ ID NO: 56448 - RNA, 19 nt, Artificial Sequence
  Synthetic
auuguacaugagauauaug

SEQ ID NO: 56449 - RNA, 20 nt, Artificial Sequence
  Synthetic
aauuguacaugagauauaug

SEQ ID NO: 56450 - RNA, 21 nt, Artificial Sequence
  Synthetic
aaauuguacaugagauauaug

SEQ ID NO: 56451 - RNA, 23 nt, Artificial Sequence
  Synthetic
ugaaauuguacaugagauauaug

SEQ ID NO: 56452 - RNA, 24 nt, Artificial Sequence
  Synthetic
augaaauuguacaugagauauaug

SEQ ID NO: 56453 - RNA, 18 nt, Artificial Sequence
  Synthetic
auacauaguguauauaug

SEQ ID NO: 56454 - RNA, 19 nt, Artificial Sequence
  Synthetic
cauacauaguguauauaug

SEQ ID NO: 56455 - RNA, 20 nt, Artificial Sequence
  Synthetic
acauacauaguguauauaug

SEQ ID NO: 56456 - RNA, 21 nt, Artificial Sequence
  Synthetic
cacauacauaguguauauaug

SEQ ID NO: 56457 - RNA, 22 nt, Artificial Sequence
  Synthetic
acacauacauaguguauauaug

SEQ ID NO: 56458 - RNA, 23 nt, Artificial Sequence
  Synthetic
cacacauacauaguguauauaug

SEQ ID NO: 56459 - RNA, 24 nt, Artificial Sequence
  Synthetic
acacacauacauaguguauauaug

SEQ ID NO: 56460 - RNA, 18 nt, Artificial Sequence
  Synthetic
cgauccuuuuauuauaug

SEQ ID NO: 56461 - RNA, 19 nt, Artificial Sequence
  Synthetic
acgauccuuuuauuauaug

SEQ ID NO: 56462 - RNA, 20 nt, Artificial Sequence
  Synthetic
cacgauccuuuuauuauaug

SEQ ID NO: 56463 - RNA, 21 nt, Artificial Sequence
  Synthetic
acacgauccuuuuauuauaug

SEQ ID NO: 56464 - RNA, 22 nt, Artificial Sequence
  Synthetic
uacacgauccuuuuauuauaug

SEQ ID NO: 56465 - RNA, 24 nt, Artificial Sequence
  Synthetic
uguacacgauccuuuuauuauaug

SEQ ID NO: 56466 - RNA, 18 nt, Artificial Sequence
  Synthetic
acuucauucuguuauaug

SEQ ID NO: 56467 - RNA, 19 nt, Artificial Sequence
  Synthetic
uacuucauucuguuauaug

SEQ ID NO: 56468 - RNA, 18 nt, Artificial Sequence
  Synthetic
auauaaaucucaacuaug

SEQ ID NO: 56469 - RNA, 19 nt, Artificial Sequence
  Synthetic
cauauaaaucucaacuaug

SEQ ID NO: 56470 - RNA, 20 nt, Artificial Sequence
  Synthetic
acauauaaaucucaacuaug

SEQ ID NO: 56471 - RNA, 21 nt, Artificial Sequence
  Synthetic
uacauauaaaucucaacuaug

SEQ ID NO: 56472 - RNA, 22 nt, Artificial Sequence
  Synthetic
auacauauaaaucucaacuaug

SEQ ID NO: 56473 - RNA, 23 nt, Artificial Sequence
  Synthetic
aauacauauaaaucucaacuaug

SEQ ID NO: 56474 - RNA, 24 nt, Artificial Sequence
  Synthetic
uaauacauauaaaucucaacuaug

SEQ ID NO: 56475 - RNA, 18 nt, Artificial Sequence
  Synthetic
auaagcuuucuaacuaug

SEQ ID NO: 56476 - RNA, 19 nt, Artificial Sequence
  Synthetic
aauaagcuuucuaacuaug

SEQ ID NO: 56477 - RNA, 20 nt, Artificial Sequence
  Synthetic
caauaagcuuucuaacuaug

SEQ ID NO: 56478 - RNA, 21 nt, Artificial Sequence
  Synthetic
acaauaagcuuucuaacuaug

SEQ ID NO: 56479 - RNA, 22 nt, Artificial Sequence
  Synthetic
cacaauaagcuuucuaacuaug

SEQ ID NO: 56480 - RNA, 23 nt, Artificial Sequence
  Synthetic
acacaauaagcuuucuaacuaug

SEQ ID NO: 56481 - RNA, 24 nt, Artificial Sequence
  Synthetic
aacacaauaagcuuucuaacuaug

SEQ ID NO: 56482 - RNA, 18 nt, Artificial Sequence
  Synthetic
acuccggccuugccuaug

SEQ ID NO: 56483 - RNA, 19 nt, Artificial Sequence
  Synthetic
uacuccggccuugccuaug

SEQ ID NO: 56484 - RNA, 21 nt, Artificial Sequence
  Synthetic
aguacuccggccuugccuaug

SEQ ID NO: 56485 - RNA, 22 nt, Artificial Sequence
  Synthetic
caguacuccggccuugccuaug

SEQ ID NO: 56486 - RNA, 23 nt, Artificial Sequence
  Synthetic
ccaguacuccggccuugccuaug

SEQ ID NO: 56487 - RNA, 24 nt, Artificial Sequence
  Synthetic
uccaguacuccggccuugccuaug

SEQ ID NO: 56488 - RNA, 18 nt, Artificial Sequence
  Synthetic
acaaugcaucauccuaug

SEQ ID NO: 56489 - RNA, 20 nt, Artificial Sequence
  Synthetic
agacaaugcaucauccuaug

SEQ ID NO: 56490 - RNA, 21 nt, Artificial Sequence
  Synthetic
aagacaaugcaucauccuaug

SEQ ID NO: 56491 - RNA, 22 nt, Artificial Sequence
  Synthetic
aaagacaaugcaucauccuaug

SEQ ID NO: 56492 - RNA, 23 nt, Artificial Sequence
  Synthetic
caaagacaaugcaucauccuaug

SEQ ID NO: 56493 - RNA, 18 nt, Artificial Sequence
  Synthetic
uugacucuugcugcuaug

SEQ ID NO: 56494 - RNA, 20 nt, Artificial Sequence
  Synthetic
aguugacucuugcugcuaug

SEQ ID NO: 56495 - RNA, 21 nt, Artificial Sequence
  Synthetic
aaguugacucuugcugcuaug

SEQ ID NO: 56496 - RNA, 23 nt, Artificial Sequence
  Synthetic
agaaguugacucuugcugcuaug

SEQ ID NO: 56497 - RNA, 24 nt, Artificial Sequence
  Synthetic
uagaaguugacucuugcugcuaug

SEQ ID NO: 56498 - RNA, 18 nt, Artificial Sequence
  Synthetic
cuuuuccuuaccucuaug

SEQ ID NO: 56499 - RNA, 20 nt, Artificial Sequence
  Synthetic
ugcuuuuccuuaccucuaug

SEQ ID NO: 56500 - RNA, 22 nt, Artificial Sequence
  Synthetic
agugcuuuuccuuaccucuaug

SEQ ID NO: 56501 - RNA, 23 nt, Artificial Sequence
  Synthetic
aagugcuuuuccuuaccucuaug

SEQ ID NO: 56502 - RNA, 24 nt, Artificial Sequence
  Synthetic
uaagugcuuuuccuuaccucuaug

SEQ ID NO: 56503 - RNA, 18 nt, Artificial Sequence
  Synthetic
aggggggcacugucuaug

SEQ ID NO: 56504 - RNA, 19 nt, Artificial Sequence
  Synthetic
uaggggggcacugucuaug

SEQ ID NO: 56505 - RNA, 20 nt, Artificial Sequence
  Synthetic
cuaggggggcacugucuaug

SEQ ID NO: 56506 - RNA, 22 nt, Artificial Sequence
  Synthetic
agcuaggggggcacugucuaug

SEQ ID NO: 56507 - RNA, 23 nt, Artificial Sequence
  Synthetic
cagcuaggggggcacugucuaug

SEQ ID NO: 56508 - RNA, 24 nt, Artificial Sequence
  Synthetic
ucagcuaggggggcacugucuaug

SEQ ID NO: 56509 - RNA, 19 nt, Artificial Sequence
  Synthetic
ugguggaaauuuuucuaug

SEQ ID NO: 56510 - RNA, 22 nt, Artificial Sequence
  Synthetic
aggugguggaaauuuuucuaug

SEQ ID NO: 56511 - RNA, 23 nt, Artificial Sequence
  Synthetic
aaggugguggaaauuuuucuaug

SEQ ID NO: 56512 - RNA, 18 nt, Artificial Sequence
  Synthetic
cacauugcugccaguaug

SEQ ID NO: 56513 - RNA, 19 nt, Artificial Sequence
  Synthetic
ccacauugcugccaguaug

SEQ ID NO: 56514 - RNA, 20 nt, Artificial Sequence
  Synthetic
uccacauugcugccaguaug

SEQ ID NO: 56515 - RNA, 21 nt, Artificial Sequence
  Synthetic
cuccacauugcugccaguaug

SEQ ID NO: 56516 - RNA, 22 nt, Artificial Sequence
  Synthetic
ccuccacauugcugccaguaug

SEQ ID NO: 56517 - RNA, 23 nt, Artificial Sequence
  Synthetic
uccuccacauugcugccaguaug

SEQ ID NO: 56518 - RNA, 19 nt, Artificial Sequence
  Synthetic
aguggaaaugauagguaug

SEQ ID NO: 56519 - RNA, 21 nt, Artificial Sequence
  Synthetic
agaguggaaaugauagguaug

SEQ ID NO: 56520 - RNA, 22 nt, Artificial Sequence
  Synthetic
uagaguggaaaugauagguaug

SEQ ID NO: 56521 - RNA, 23 nt, Artificial Sequence
  Synthetic
cuagaguggaaaugauagguaug

SEQ ID NO: 56522 - RNA, 24 nt, Artificial Sequence
  Synthetic
acuagaguggaaaugauagguaug

SEQ ID NO: 56523 - RNA, 18 nt, Artificial Sequence
  Synthetic
uguuuaagauuggguaug

SEQ ID NO: 56524 - RNA, 19 nt, Artificial Sequence
  Synthetic
cuguuuaagauuggguaug

SEQ ID NO: 56525 - RNA, 20 nt, Artificial Sequence
  Synthetic
acuguuuaagauuggguaug

SEQ ID NO: 56526 - RNA, 21 nt, Artificial Sequence
  Synthetic
aacuguuuaagauuggguaug

SEQ ID NO: 56527 - RNA, 22 nt, Artificial Sequence
  Synthetic
caacuguuuaagauuggguaug

SEQ ID NO: 56528 - RNA, 23 nt, Artificial Sequence
  Synthetic
acaacuguuuaagauuggguaug

SEQ ID NO: 56529 - RNA, 19 nt, Artificial Sequence
  Synthetic
agcauaguaauuauguaug

SEQ ID NO: 56530 - RNA, 20 nt, Artificial Sequence
  Synthetic
uagcauaguaauuauguaug

SEQ ID NO: 56531 - RNA, 22 nt, Artificial Sequence
  Synthetic
uguagcauaguaauuauguaug

SEQ ID NO: 56532 - RNA, 23 nt, Artificial Sequence
  Synthetic
cuguagcauaguaauuauguaug

SEQ ID NO: 56533 - RNA, 24 nt, Artificial Sequence
  Synthetic
ccuguagcauaguaauuauguaug

SEQ ID NO: 56534 - RNA, 19 nt, Artificial Sequence
  Synthetic
aguaaucacaaucuguaug

SEQ ID NO: 56535 - RNA, 20 nt, Artificial Sequence
  Synthetic
aaguaaucacaaucuguaug

SEQ ID NO: 56536 - RNA, 21 nt, Artificial Sequence
  Synthetic
aaaguaaucacaaucuguaug

SEQ ID NO: 56537 - RNA, 22 nt, Artificial Sequence
  Synthetic
uaaaguaaucacaaucuguaug

SEQ ID NO: 56538 - RNA, 23 nt, Artificial Sequence
  Synthetic
auaaaguaaucacaaucuguaug

SEQ ID NO: 56539 - RNA, 24 nt, Artificial Sequence
  Synthetic
aauaaaguaaucacaaucuguaug

SEQ ID NO: 56540 - RNA, 21 nt, Artificial Sequence
  Synthetic
ugaauuguccaaaguuguaug

SEQ ID NO: 56541 - RNA, 22 nt, Artificial Sequence
  Synthetic
augaauuguccaaaguuguaug

SEQ ID NO: 56542 - RNA, 24 nt, Artificial Sequence
  Synthetic
agaugaauuguccaaaguuguaug

SEQ ID NO: 56543 - RNA, 18 nt, Artificial Sequence
  Synthetic
uuaauauaugaaauuaug

SEQ ID NO: 56544 - RNA, 19 nt, Artificial Sequence
  Synthetic
auuaauauaugaaauuaug

SEQ ID NO: 56545 - RNA, 20 nt, Artificial Sequence
  Synthetic
aauuaauauaugaaauuaug

SEQ ID NO: 56546 - RNA, 21 nt, Artificial Sequence
  Synthetic
aaauuaauauaugaaauuaug

SEQ ID NO: 56547 - RNA, 22 nt, Artificial Sequence
  Synthetic
uaaauuaauauaugaaauuaug

SEQ ID NO: 56548 - RNA, 23 nt, Artificial Sequence
  Synthetic
auaaauuaauauaugaaauuaug

SEQ ID NO: 56549 - RNA, 24 nt, Artificial Sequence
  Synthetic
cauaaauuaauauaugaaauuaug

SEQ ID NO: 56550 - RNA, 18 nt, Artificial Sequence
  Synthetic
ccucacuuccauauuaug

SEQ ID NO: 56551 - RNA, 19 nt, Artificial Sequence
  Synthetic
accucacuuccauauuaug

SEQ ID NO: 56552 - RNA, 20 nt, Artificial Sequence
  Synthetic
uaccucacuuccauauuaug

SEQ ID NO: 56553 - RNA, 21 nt, Artificial Sequence
  Synthetic
cuaccucacuuccauauuaug

SEQ ID NO: 56554 - RNA, 22 nt, Artificial Sequence
  Synthetic
ccuaccucacuuccauauuaug

SEQ ID NO: 56555 - RNA, 23 nt, Artificial Sequence
  Synthetic
accuaccucacuuccauauuaug

SEQ ID NO: 56556 - RNA, 24 nt, Artificial Sequence
  Synthetic
caccuaccucacuuccauauuaug

SEQ ID NO: 56557 - RNA, 18 nt, Artificial Sequence
  Synthetic
aguaauuuuuaccuuaug

SEQ ID NO: 56558 - RNA, 19 nt, Artificial Sequence
  Synthetic
uaguaauuuuuaccuuaug

SEQ ID NO: 56559 - RNA, 20 nt, Artificial Sequence
  Synthetic
cuaguaauuuuuaccuuaug

SEQ ID NO: 56560 - RNA, 21 nt, Artificial Sequence
  Synthetic
ucuaguaauuuuuaccuuaug

SEQ ID NO: 56561 - RNA, 22 nt, Artificial Sequence
  Synthetic
uucuaguaauuuuuaccuuaug

SEQ ID NO: 56562 - RNA, 23 nt, Artificial Sequence
  Synthetic
uuucuaguaauuuuuaccuuaug

SEQ ID NO: 56563 - RNA, 24 nt, Artificial Sequence
  Synthetic
auuucuaguaauuuuuaccuuaug

SEQ ID NO: 56564 - RNA, 18 nt, Artificial Sequence
  Synthetic
cacaccagugaaguuaug

SEQ ID NO: 56565 - RNA, 19 nt, Artificial Sequence
  Synthetic
acacaccagugaaguuaug

SEQ ID NO: 56566 - RNA, 20 nt, Artificial Sequence
  Synthetic
cacacaccagugaaguuaug

SEQ ID NO: 56567 - RNA, 21 nt, Artificial Sequence
  Synthetic
acacacaccagugaaguuaug

SEQ ID NO: 56568 - RNA, 22 nt, Artificial Sequence
  Synthetic
cacacacaccagugaaguuaug

SEQ ID NO: 56569 - RNA, 23 nt, Artificial Sequence
  Synthetic
acacacacaccagugaaguuaug

SEQ ID NO: 56570 - RNA, 24 nt, Artificial Sequence
  Synthetic
cacacacacaccagugaaguuaug

SEQ ID NO: 56571 - RNA, 18 nt, Artificial Sequence
  Synthetic
uaugaaucuuaaguuaug

SEQ ID NO: 56572 - RNA, 19 nt, Artificial Sequence
  Synthetic
auaugaaucuuaaguuaug

SEQ ID NO: 56573 - RNA, 20 nt, Artificial Sequence
  Synthetic
uauaugaaucuuaaguuaug

SEQ ID NO: 56574 - RNA, 21 nt, Artificial Sequence
  Synthetic
auauaugaaucuuaaguuaug

SEQ ID NO: 56575 - RNA, 24 nt, Artificial Sequence
  Synthetic
uggauauaugaaucuuaaguuaug

SEQ ID NO: 56576 - RNA, 21 nt, Artificial Sequence
  Synthetic
uuuucucuuaaaaaauuuaug

SEQ ID NO: 56577 - RNA, 22 nt, Artificial Sequence
  Synthetic
uuuuucucuuaaaaaauuuaug

SEQ ID NO: 56578 - RNA, 23 nt, Artificial Sequence
  Synthetic
auuuuucucuuaaaaaauuuaug

SEQ ID NO: 56579 - RNA, 24 nt, Artificial Sequence
  Synthetic
cauuuuucucuuaaaaaauuuaug

SEQ ID NO: 56580 - RNA, 20 nt, Artificial Sequence
  Synthetic
uggcaguaagaagauuuaug

SEQ ID NO: 56581 - RNA, 21 nt, Artificial Sequence
  Synthetic
auggcaguaagaagauuuaug

SEQ ID NO: 56582 - RNA, 22 nt, Artificial Sequence
  Synthetic
cauggcaguaagaagauuuaug

SEQ ID NO: 56583 - RNA, 24 nt, Artificial Sequence
  Synthetic
agcauggcaguaagaagauuuaug

SEQ ID NO: 56584 - RNA, 18 nt, Artificial Sequence
  Synthetic
uacuuaaagcucuuuaug

SEQ ID NO: 56585 - RNA, 20 nt, Artificial Sequence
  Synthetic
aguacuuaaagcucuuuaug

SEQ ID NO: 56586 - RNA, 21 nt, Artificial Sequence
  Synthetic
uaguacuuaaagcucuuuaug

SEQ ID NO: 56587 - RNA, 23 nt, Artificial Sequence
  Synthetic
uguaguacuuaaagcucuuuaug

SEQ ID NO: 56588 - RNA, 24 nt, Artificial Sequence
  Synthetic
auguaguacuuaaagcucuuuaug

SEQ ID NO: 56589 - RNA, 18 nt, Artificial Sequence
  Synthetic
uacaacaugcaguuuaug

SEQ ID NO: 56590 - RNA, 19 nt, Artificial Sequence
  Synthetic
cuacaacaugcaguuuaug

SEQ ID NO: 56591 - RNA, 20 nt, Artificial Sequence
  Synthetic
acuacaacaugcaguuuaug

SEQ ID NO: 56592 - RNA, 21 nt, Artificial Sequence
  Synthetic
uacuacaacaugcaguuuaug

SEQ ID NO: 56593 - RNA, 22 nt, Artificial Sequence
  Synthetic
auacuacaacaugcaguuuaug

SEQ ID NO: 56594 - RNA, 23 nt, Artificial Sequence
  Synthetic
uauacuacaacaugcaguuuaug

SEQ ID NO: 56595 - RNA, 24 nt, Artificial Sequence
  Synthetic
uuauacuacaacaugcaguuuaug

SEQ ID NO: 56596 - RNA, 19 nt, Artificial Sequence
  Synthetic
ugugcuucagacaaaacug

SEQ ID NO: 56597 - RNA, 21 nt, Artificial Sequence
  Synthetic
agugugcuucagacaaaacug

SEQ ID NO: 56598 - RNA, 22 nt, Artificial Sequence
  Synthetic
cagugugcuucagacaaaacug

SEQ ID NO: 56599 - RNA, 24 nt, Artificial Sequence
  Synthetic
agcagugugcuucagacaaaacug

SEQ ID NO: 56600 - RNA, 18 nt, Artificial Sequence
  Synthetic
caucauguuaugaaacug

SEQ ID NO: 56601 - RNA, 19 nt, Artificial Sequence
  Synthetic
acaucauguuaugaaacug

SEQ ID NO: 56602 - RNA, 22 nt, Artificial Sequence
  Synthetic
aggacaucauguuaugaaacug

SEQ ID NO: 56603 - RNA, 23 nt, Artificial Sequence
  Synthetic
uaggacaucauguuaugaaacug

SEQ ID NO: 56604 - RNA, 24 nt, Artificial Sequence
  Synthetic
auaggacaucauguuaugaaacug

SEQ ID NO: 56605 - RNA, 18 nt, Artificial Sequence
  Synthetic
cauauauucaaacaacug

SEQ ID NO: 56606 - RNA, 20 nt, Artificial Sequence
  Synthetic
agcauauauucaaacaacug

SEQ ID NO: 56607 - RNA, 21 nt, Artificial Sequence
  Synthetic
cagcauauauucaaacaacug

SEQ ID NO: 56608 - RNA, 23 nt, Artificial Sequence
  Synthetic
agcagcauauauucaaacaacug

SEQ ID NO: 56609 - RNA, 24 nt, Artificial Sequence
  Synthetic
aagcagcauauauucaaacaacug

SEQ ID NO: 56610 - RNA, 18 nt, Artificial Sequence
  Synthetic
cguauagaaacgcaacug

SEQ ID NO: 56611 - RNA, 20 nt, Artificial Sequence
  Synthetic
agcguauagaaacgcaacug

SEQ ID NO: 56612 - RNA, 21 nt, Artificial Sequence
  Synthetic
uagcguauagaaacgcaacug

SEQ ID NO: 56613 - RNA, 22 nt, Artificial Sequence
  Synthetic
cuagcguauagaaacgcaacug

SEQ ID NO: 56614 - RNA, 24 nt, Artificial Sequence
  Synthetic
ugcuagcguauagaaacgcaacug

SEQ ID NO: 56615 - RNA, 21 nt, Artificial Sequence
  Synthetic
uuuguugaaugaacagaacug

SEQ ID NO: 56616 - RNA, 22 nt, Artificial Sequence
  Synthetic
auuuguugaaugaacagaacug

SEQ ID NO: 56617 - RNA, 23 nt, Artificial Sequence
  Synthetic
cauuuguugaaugaacagaacug

SEQ ID NO: 56618 - RNA, 24 nt, Artificial Sequence
  Synthetic
ccauuuguugaaugaacagaacug

SEQ ID NO: 56619 - RNA, 19 nt, Artificial Sequence
  Synthetic
cguauuuuaauuagaacug

SEQ ID NO: 56620 - RNA, 20 nt, Artificial Sequence
  Synthetic
ucguauuuuaauuagaacug

SEQ ID NO: 56621 - RNA, 21 nt, Artificial Sequence
  Synthetic
aucguauuuuaauuagaacug

SEQ ID NO: 56622 - RNA, 22 nt, Artificial Sequence
  Synthetic
caucguauuuuaauuagaacug

SEQ ID NO: 56623 - RNA, 18 nt, Artificial Sequence
  Synthetic
uuuguuuucagggaacug

SEQ ID NO: 56624 - RNA, 19 nt, Artificial Sequence
  Synthetic
auuuguuuucagggaacug

SEQ ID NO: 56625 - RNA, 21 nt, Artificial Sequence
  Synthetic
ugauuuguuuucagggaacug

SEQ ID NO: 56626 - RNA, 22 nt, Artificial Sequence
  Synthetic
augauuuguuuucagggaacug

SEQ ID NO: 56627 - RNA, 23 nt, Artificial Sequence
  Synthetic
aaugauuuguuuucagggaacug

SEQ ID NO: 56628 - RNA, 24 nt, Artificial Sequence
  Synthetic
aaaugauuuguuuucagggaacug

SEQ ID NO: 56629 - RNA, 18 nt, Artificial Sequence
  Synthetic
cccuauugaaaugaacug

SEQ ID NO: 56630 - RNA, 19 nt, Artificial Sequence
  Synthetic
ucccuauugaaaugaacug

SEQ ID NO: 56631 - RNA, 20 nt, Artificial Sequence
  Synthetic
uucccuauugaaaugaacug

SEQ ID NO: 56632 - RNA, 21 nt, Artificial Sequence
  Synthetic
uuucccuauugaaaugaacug

SEQ ID NO: 56633 - RNA, 22 nt, Artificial Sequence
  Synthetic
uuuucccuauugaaaugaacug

SEQ ID NO: 56634 - RNA, 24 nt, Artificial Sequence
  Synthetic
uguuuucccuauugaaaugaacug

SEQ ID NO: 56635 - RNA, 18 nt, Artificial Sequence
  Synthetic
aucggugaagcauaacug

SEQ ID NO: 56636 - RNA, 19 nt, Artificial Sequence
  Synthetic
aaucggugaagcauaacug

SEQ ID NO: 56637 - RNA, 20 nt, Artificial Sequence
  Synthetic
uaaucggugaagcauaacug

SEQ ID NO: 56638 - RNA, 21 nt, Artificial Sequence
  Synthetic
uuaaucggugaagcauaacug

SEQ ID NO: 56639 - RNA, 22 nt, Artificial Sequence
  Synthetic
uuuaaucggugaagcauaacug

SEQ ID NO: 56640 - RNA, 23 nt, Artificial Sequence
  Synthetic
auuuaaucggugaagcauaacug

SEQ ID NO: 56641 - RNA, 24 nt, Artificial Sequence
  Synthetic
aauuuaaucggugaagcauaacug

SEQ ID NO: 56642 - RNA, 18 nt, Artificial Sequence
  Synthetic
cuuaguguccugacacug

SEQ ID NO: 56643 - RNA, 19 nt, Artificial Sequence
  Synthetic
ucuuaguguccugacacug

SEQ ID NO: 56644 - RNA, 20 nt, Artificial Sequence
  Synthetic
uucuuaguguccugacacug

SEQ ID NO: 56645 - RNA, 21 nt, Artificial Sequence
  Synthetic
auucuuaguguccugacacug

SEQ ID NO: 56646 - RNA, 22 nt, Artificial Sequence
  Synthetic
aauucuuaguguccugacacug

SEQ ID NO: 56647 - RNA, 23 nt, Artificial Sequence
  Synthetic
uaauucuuaguguccugacacug

SEQ ID NO: 56648 - RNA, 24 nt, Artificial Sequence
  Synthetic
auaauucuuaguguccugacacug

SEQ ID NO: 56649 - RNA, 19 nt, Artificial Sequence
  Synthetic
agaaucuuacaacccacug

SEQ ID NO: 56650 - RNA, 21 nt, Artificial Sequence
  Synthetic
agagaaucuuacaacccacug

SEQ ID NO: 56651 - RNA, 18 nt, Artificial Sequence
  Synthetic
auuguggugaguccacug

SEQ ID NO: 56652 - RNA, 19 nt, Artificial Sequence
  Synthetic
uauuguggugaguccacug

SEQ ID NO: 56653 - RNA, 20 nt, Artificial Sequence
  Synthetic
auauuguggugaguccacug

SEQ ID NO: 56654 - RNA, 21 nt, Artificial Sequence
  Synthetic
uauauuguggugaguccacug

SEQ ID NO: 56655 - RNA, 22 nt, Artificial Sequence
  Synthetic
cuauauuguggugaguccacug

SEQ ID NO: 56656 - RNA, 24 nt, Artificial Sequence
  Synthetic
ugcuauauuguggugaguccacug

SEQ ID NO: 56657 - RNA, 18 nt, Artificial Sequence
  Synthetic
uccuaccucuaugcacug

SEQ ID NO: 56658 - RNA, 19 nt, Artificial Sequence
  Synthetic
cuccuaccucuaugcacug

SEQ ID NO: 56659 - RNA, 20 nt, Artificial Sequence
  Synthetic
ucuccuaccucuaugcacug

SEQ ID NO: 56660 - RNA, 21 nt, Artificial Sequence
  Synthetic
uucuccuaccucuaugcacug

SEQ ID NO: 56661 - RNA, 22 nt, Artificial Sequence
  Synthetic
uuucuccuaccucuaugcacug

SEQ ID NO: 56662 - RNA, 23 nt, Artificial Sequence
  Synthetic
auuucuccuaccucuaugcacug

SEQ ID NO: 56663 - RNA, 24 nt, Artificial Sequence
  Synthetic
uauuucuccuaccucuaugcacug

SEQ ID NO: 56664 - RNA, 18 nt, Artificial Sequence
  Synthetic
uuaaguucuguaucacug

SEQ ID NO: 56665 - RNA, 19 nt, Artificial Sequence
  Synthetic
auuaaguucuguaucacug

SEQ ID NO: 56666 - RNA, 20 nt, Artificial Sequence
  Synthetic
uauuaaguucuguaucacug

SEQ ID NO: 56667 - RNA, 21 nt, Artificial Sequence
  Synthetic
auauuaaguucuguaucacug

SEQ ID NO: 56668 - RNA, 22 nt, Artificial Sequence
  Synthetic
uauauuaaguucuguaucacug

SEQ ID NO: 56669 - RNA, 24 nt, Artificial Sequence
  Synthetic
aguauauuaaguucuguaucacug

SEQ ID NO: 56670 - RNA, 18 nt, Artificial Sequence
  Synthetic
ugugcuauucauucacug

SEQ ID NO: 56671 - RNA, 20 nt, Artificial Sequence
  Synthetic
agugugcuauucauucacug

SEQ ID NO: 56672 - RNA, 21 nt, Artificial Sequence
  Synthetic
aagugugcuauucauucacug

SEQ ID NO: 56673 - RNA, 23 nt, Artificial Sequence
  Synthetic
ugaagugugcuauucauucacug

SEQ ID NO: 56674 - RNA, 24 nt, Artificial Sequence
  Synthetic
augaagugugcuauucauucacug

SEQ ID NO: 56675 - RNA, 18 nt, Artificial Sequence
  Synthetic
acuuccggcccuucacug

SEQ ID NO: 56676 - RNA, 19 nt, Artificial Sequence
  Synthetic
aacuuccggcccuucacug

SEQ ID NO: 56677 - RNA, 21 nt, Artificial Sequence
  Synthetic
agaacuuccggcccuucacug

SEQ ID NO: 56678 - RNA, 22 nt, Artificial Sequence
  Synthetic
aagaacuuccggcccuucacug

SEQ ID NO: 56679 - RNA, 23 nt, Artificial Sequence
  Synthetic
aaagaacuuccggcccuucacug

SEQ ID NO: 56680 - RNA, 24 nt, Artificial Sequence
  Synthetic
aaaagaacuuccggcccuucacug

SEQ ID NO: 56681 - RNA, 18 nt, Artificial Sequence
  Synthetic
uuugcuuaguuuucacug

SEQ ID NO: 56682 - RNA, 19 nt, Artificial Sequence
  Synthetic
uuuugcuuaguuuucacug

SEQ ID NO: 56683 - RNA, 20 nt, Artificial Sequence
  Synthetic
auuuugcuuaguuuucacug

SEQ ID NO: 56684 - RNA, 21 nt, Artificial Sequence
  Synthetic
cauuuugcuuaguuuucacug

SEQ ID NO: 56685 - RNA, 22 nt, Artificial Sequence
  Synthetic
ucauuuugcuuaguuuucacug

SEQ ID NO: 56686 - RNA, 23 nt, Artificial Sequence
  Synthetic
cucauuuugcuuaguuuucacug

SEQ ID NO: 56687 - RNA, 24 nt, Artificial Sequence
  Synthetic
ccucauuuugcuuaguuuucacug

SEQ ID NO: 56688 - RNA, 18 nt, Artificial Sequence
  Synthetic
caaaauaaaagaagacug

SEQ ID NO: 56689 - RNA, 20 nt, Artificial Sequence
  Synthetic
ugcaaaauaaaagaagacug

SEQ ID NO: 56690 - RNA, 21 nt, Artificial Sequence
  Synthetic
augcaaaauaaaagaagacug

SEQ ID NO: 56691 - RNA, 23 nt, Artificial Sequence
  Synthetic
ugaugcaaaauaaaagaagacug

SEQ ID NO: 56692 - RNA, 18 nt, Artificial Sequence
  Synthetic
acgaucuggaacagacug

SEQ ID NO: 56693 - RNA, 19 nt, Artificial Sequence
  Synthetic
cacgaucuggaacagacug

SEQ ID NO: 56694 - RNA, 20 nt, Artificial Sequence
  Synthetic
ccacgaucuggaacagacug

SEQ ID NO: 56695 - RNA, 21 nt, Artificial Sequence
  Synthetic
cccacgaucuggaacagacug

SEQ ID NO: 56696 - RNA, 24 nt, Artificial Sequence
  Synthetic
uggcccacgaucuggaacagacug

SEQ ID NO: 56697 - RNA, 18 nt, Artificial Sequence
  Synthetic
uccuuuguugccagacug

SEQ ID NO: 56698 - RNA, 19 nt, Artificial Sequence
  Synthetic
auccuuuguugccagacug

SEQ ID NO: 56699 - RNA, 20 nt, Artificial Sequence
  Synthetic
aauccuuuguugccagacug

SEQ ID NO: 56700 - RNA, 24 nt, Artificial Sequence
  Synthetic
ugggaauccuuuguugccagacug

SEQ ID NO: 56701 - RNA, 18 nt, Artificial Sequence
  Synthetic
uccuuuguccaaggacug

SEQ ID NO: 56702 - RNA, 19 nt, Artificial Sequence
  Synthetic
cuccuuuguccaaggacug

SEQ ID NO: 56703 - RNA, 20 nt, Artificial Sequence
  Synthetic
acuccuuuguccaaggacug

SEQ ID NO: 56704 - RNA, 22 nt, Artificial Sequence
  Synthetic
ugacuccuuuguccaaggacug

SEQ ID NO: 56705 - RNA, 23 nt, Artificial Sequence
  Synthetic
augacuccuuuguccaaggacug

SEQ ID NO: 56706 - RNA, 24 nt, Artificial Sequence
  Synthetic
aaugacuccuuuguccaaggacug

SEQ ID NO: 56707 - RNA, 18 nt, Artificial Sequence
  Synthetic
agggcauauuuaggacug

SEQ ID NO: 56708 - RNA, 19 nt, Artificial Sequence
  Synthetic
aagggcauauuuaggacug

SEQ ID NO: 56709 - RNA, 20 nt, Artificial Sequence
  Synthetic
caagggcauauuuaggacug

SEQ ID NO: 56710 - RNA, 21 nt, Artificial Sequence
  Synthetic
ucaagggcauauuuaggacug

SEQ ID NO: 56711 - RNA, 23 nt, Artificial Sequence
  Synthetic
agucaagggcauauuuaggacug

SEQ ID NO: 56712 - RNA, 24 nt, Artificial Sequence
  Synthetic
aagucaagggcauauuuaggacug

SEQ ID NO: 56713 - RNA, 18 nt, Artificial Sequence
  Synthetic
cacaaaaagacuggacug

SEQ ID NO: 56714 - RNA, 19 nt, Artificial Sequence
  Synthetic
acacaaaaagacuggacug

SEQ ID NO: 56715 - RNA, 20 nt, Artificial Sequence
  Synthetic
uacacaaaaagacuggacug

SEQ ID NO: 56716 - RNA, 21 nt, Artificial Sequence
  Synthetic
uuacacaaaaagacuggacug

SEQ ID NO: 56717 - RNA, 22 nt, Artificial Sequence
  Synthetic
auuacacaaaaagacuggacug

SEQ ID NO: 56718 - RNA, 24 nt, Artificial Sequence
  Synthetic
ugauuacacaaaaagacuggacug

SEQ ID NO: 56719 - RNA, 18 nt, Artificial Sequence
  Synthetic
cauuucuuauauugacug

SEQ ID NO: 56720 - RNA, 20 nt, Artificial Sequence
  Synthetic
ugcauuucuuauauugacug

SEQ ID NO: 56721 - RNA, 21 nt, Artificial Sequence
  Synthetic
cugcauuucuuauauugacug

SEQ ID NO: 56722 - RNA, 22 nt, Artificial Sequence
  Synthetic
ucugcauuucuuauauugacug

SEQ ID NO: 56723 - RNA, 23 nt, Artificial Sequence
  Synthetic
uucugcauuucuuauauugacug

SEQ ID NO: 56724 - RNA, 24 nt, Artificial Sequence
  Synthetic
uuucugcauuucuuauauugacug

SEQ ID NO: 56725 - RNA, 18 nt, Artificial Sequence
  Synthetic
accaaugauaaacuacug

SEQ ID NO: 56726 - RNA, 19 nt, Artificial Sequence
  Synthetic
aaccaaugauaaacuacug

SEQ ID NO: 56727 - RNA, 21 nt, Artificial Sequence
  Synthetic
agaaccaaugauaaacuacug

SEQ ID NO: 56728 - RNA, 22 nt, Artificial Sequence
  Synthetic
uagaaccaaugauaaacuacug

SEQ ID NO: 56729 - RNA, 23 nt, Artificial Sequence
  Synthetic
uuagaaccaaugauaaacuacug

SEQ ID NO: 56730 - RNA, 24 nt, Artificial Sequence
  Synthetic
uuuagaaccaaugauaaacuacug

SEQ ID NO: 56731 - RNA, 18 nt, Artificial Sequence
  Synthetic
ccgcucauacaauuacug

SEQ ID NO: 56732 - RNA, 21 nt, Artificial Sequence
  Synthetic
uggccgcucauacaauuacug

SEQ ID NO: 56733 - RNA, 22 nt, Artificial Sequence
  Synthetic
auggccgcucauacaauuacug

SEQ ID NO: 56734 - RNA, 23 nt, Artificial Sequence
  Synthetic
uauggccgcucauacaauuacug

SEQ ID NO: 56735 - RNA, 24 nt, Artificial Sequence
  Synthetic
uuauggccgcucauacaauuacug

SEQ ID NO: 56736 - RNA, 18 nt, Artificial Sequence
  Synthetic
ugucuuuccuguuuacug

SEQ ID NO: 56737 - RNA, 19 nt, Artificial Sequence
  Synthetic
augucuuuccuguuuacug

SEQ ID NO: 56738 - RNA, 20 nt, Artificial Sequence
  Synthetic
uaugucuuuccuguuuacug

SEQ ID NO: 56739 - RNA, 21 nt, Artificial Sequence
  Synthetic
cuaugucuuuccuguuuacug

SEQ ID NO: 56740 - RNA, 22 nt, Artificial Sequence
  Synthetic
acuaugucuuuccuguuuacug

SEQ ID NO: 56741 - RNA, 18 nt, Artificial Sequence
  Synthetic
agauggggcuagaaccug

SEQ ID NO: 56742 - RNA, 21 nt, Artificial Sequence
  Synthetic
aggagauggggcuagaaccug

SEQ ID NO: 56743 - RNA, 23 nt, Artificial Sequence
  Synthetic
agaggagauggggcuagaaccug

SEQ ID NO: 56744 - RNA, 24 nt, Artificial Sequence
  Synthetic
aagaggagauggggcuagaaccug

SEQ ID NO: 56745 - RNA, 18 nt, Artificial Sequence
  Synthetic
ucuccagguaugaaccug

SEQ ID NO: 56746 - RNA, 19 nt, Artificial Sequence
  Synthetic
uucuccagguaugaaccug

SEQ ID NO: 56747 - RNA, 20 nt, Artificial Sequence
  Synthetic
cuucuccagguaugaaccug

SEQ ID NO: 56748 - RNA, 21 nt, Artificial Sequence
  Synthetic
ccuucuccagguaugaaccug

SEQ ID NO: 56749 - RNA, 22 nt, Artificial Sequence
  Synthetic
uccuucuccagguaugaaccug

SEQ ID NO: 56750 - RNA, 23 nt, Artificial Sequence
  Synthetic
cuccuucuccagguaugaaccug

SEQ ID NO: 56751 - RNA, 24 nt, Artificial Sequence
  Synthetic
ucuccuucuccagguaugaaccug

SEQ ID NO: 56752 - RNA, 18 nt, Artificial Sequence
  Synthetic
uugacugcauuuaaccug

SEQ ID NO: 56753 - RNA, 19 nt, Artificial Sequence
  Synthetic
cuugacugcauuuaaccug

SEQ ID NO: 56754 - RNA, 21 nt, Artificial Sequence
  Synthetic
ugcuugacugcauuuaaccug

SEQ ID NO: 56755 - RNA, 23 nt, Artificial Sequence
  Synthetic
agugcuugacugcauuuaaccug

SEQ ID NO: 56756 - RNA, 24 nt, Artificial Sequence
  Synthetic
uagugcuugacugcauuuaaccug

SEQ ID NO: 56757 - RNA, 19 nt, Artificial Sequence
  Synthetic
ugugccuuuugaauaccug

SEQ ID NO: 56758 - RNA, 20 nt, Artificial Sequence
  Synthetic
uugugccuuuugaauaccug

SEQ ID NO: 56759 - RNA, 21 nt, Artificial Sequence
  Synthetic
uuugugccuuuugaauaccug

SEQ ID NO: 56760 - RNA, 22 nt, Artificial Sequence
  Synthetic
auuugugccuuuugaauaccug

SEQ ID NO: 56761 - RNA, 23 nt, Artificial Sequence
  Synthetic
uauuugugccuuuugaauaccug

SEQ ID NO: 56762 - RNA, 24 nt, Artificial Sequence
  Synthetic
cuauuugugccuuuugaauaccug

SEQ ID NO: 56763 - RNA, 18 nt, Artificial Sequence
  Synthetic
cuuauauucauauaccug

SEQ ID NO: 56764 - RNA, 20 nt, Artificial Sequence
  Synthetic
ugcuuauauucauauaccug

SEQ ID NO: 56765 - RNA, 19 nt, Artificial Sequence
  Synthetic
ugagcauaguaccuaccug

SEQ ID NO: 56766 - RNA, 21 nt, Artificial Sequence
  Synthetic
agugagcauaguaccuaccug

SEQ ID NO: 56767 - RNA, 22 nt, Artificial Sequence
  Synthetic
cagugagcauaguaccuaccug

SEQ ID NO: 56768 - RNA, 23 nt, Artificial Sequence
  Synthetic
acagugagcauaguaccuaccug

SEQ ID NO: 56769 - RNA, 24 nt, Artificial Sequence
  Synthetic
aacagugagcauaguaccuaccug

SEQ ID NO: 56770 - RNA, 18 nt, Artificial Sequence
  Synthetic
auggaggggcucuaccug

SEQ ID NO: 56771 - RNA, 19 nt, Artificial Sequence
  Synthetic
ugguucuggagcuuaccug

SEQ ID NO: 56772 - RNA, 20 nt, Artificial Sequence
  Synthetic
augguucuggagcuuaccug

SEQ ID NO: 56773 - RNA, 21 nt, Artificial Sequence
  Synthetic
aaugguucuggagcuuaccug

SEQ ID NO: 56774 - RNA, 23 nt, Artificial Sequence
  Synthetic
agaaugguucuggagcuuaccug

SEQ ID NO: 56775 - RNA, 24 nt, Artificial Sequence
  Synthetic
aagaaugguucuggagcuuaccug

SEQ ID NO: 56776 - RNA, 18 nt, Artificial Sequence
  Synthetic
auuauuuguuuuuaccug

SEQ ID NO: 56777 - RNA, 19 nt, Artificial Sequence
  Synthetic
uauuauuuguuuuuaccug

SEQ ID NO: 56778 - RNA, 21 nt, Artificial Sequence
  Synthetic
uguauuauuuguuuuuaccug

SEQ ID NO: 56779 - RNA, 22 nt, Artificial Sequence
  Synthetic
cuguauuauuuguuuuuaccug

SEQ ID NO: 56780 - RNA, 21 nt, Artificial Sequence
  Synthetic
aagcaaagacaacaaacccug

SEQ ID NO: 56781 - RNA, 22 nt, Artificial Sequence
  Synthetic
aaagcaaagacaacaaacccug

SEQ ID NO: 56782 - RNA, 24 nt, Artificial Sequence
  Synthetic
ugaaagcaaagacaacaaacccug

SEQ ID NO: 56783 - RNA, 19 nt, Artificial Sequence
  Synthetic
uggcaaaaauuacacccug

SEQ ID NO: 56784 - RNA, 21 nt, Artificial Sequence
  Synthetic
uguggcaaaaauuacacccug

SEQ ID NO: 56785 - RNA, 22 nt, Artificial Sequence
  Synthetic
uuguggcaaaaauuacacccug

SEQ ID NO: 56786 - RNA, 23 nt, Artificial Sequence
  Synthetic
auuguggcaaaaauuacacccug

SEQ ID NO: 56787 - RNA, 24 nt, Artificial Sequence
  Synthetic
uauuguggcaaaaauuacacccug

SEQ ID NO: 56788 - RNA, 18 nt, Artificial Sequence
  Synthetic
aguucaguugccacccug

SEQ ID NO: 56789 - RNA, 19 nt, Artificial Sequence
  Synthetic
aaguucaguugccacccug

SEQ ID NO: 56790 - RNA, 21 nt, Artificial Sequence
  Synthetic
ugaaguucaguugccacccug

SEQ ID NO: 56791 - RNA, 22 nt, Artificial Sequence
  Synthetic
cugaaguucaguugccacccug

SEQ ID NO: 56792 - RNA, 23 nt, Artificial Sequence
  Synthetic
ccugaaguucaguugccacccug

SEQ ID NO: 56793 - RNA, 24 nt, Artificial Sequence
  Synthetic
uccugaaguucaguugccacccug

SEQ ID NO: 56794 - RNA, 18 nt, Artificial Sequence
  Synthetic
uuuaagcuggucacccug

SEQ ID NO: 56795 - RNA, 19 nt, Artificial Sequence
  Synthetic
auuuaagcuggucacccug

SEQ ID NO: 56796 - RNA, 20 nt, Artificial Sequence
  Synthetic
aauuuaagcuggucacccug

SEQ ID NO: 56797 - RNA, 22 nt, Artificial Sequence
  Synthetic
ugaauuuaagcuggucacccug

SEQ ID NO: 56798 - RNA, 23 nt, Artificial Sequence
  Synthetic
cugaauuuaagcuggucacccug

SEQ ID NO: 56799 - RNA, 18 nt, Artificial Sequence
  Synthetic
agcaaggaucagacccug

SEQ ID NO: 56800 - RNA, 19 nt, Artificial Sequence
  Synthetic
aagcaaggaucagacccug

SEQ ID NO: 56801 - RNA, 20 nt, Artificial Sequence
  Synthetic
aaagcaaggaucagacccug

SEQ ID NO: 56802 - RNA, 21 nt, Artificial Sequence
  Synthetic
uaaagcaaggaucagacccug

SEQ ID NO: 56803 - RNA, 22 nt, Artificial Sequence
  Synthetic
uuaaagcaaggaucagacccug

SEQ ID NO: 56804 - RNA, 23 nt, Artificial Sequence
  Synthetic
auuaaagcaaggaucagacccug

SEQ ID NO: 56805 - RNA, 24 nt, Artificial Sequence
  Synthetic
aauuaaagcaaggaucagacccug

SEQ ID NO: 56806 - RNA, 18 nt, Artificial Sequence
  Synthetic
auauuaaauuucccccug

SEQ ID NO: 56807 - RNA, 19 nt, Artificial Sequence
  Synthetic
uauauuaaauuucccccug

SEQ ID NO: 56808 - RNA, 20 nt, Artificial Sequence
  Synthetic
auauauuaaauuucccccug

SEQ ID NO: 56809 - RNA, 22 nt, Artificial Sequence
  Synthetic
ugauauauuaaauuucccccug

SEQ ID NO: 56810 - RNA, 23 nt, Artificial Sequence
  Synthetic
uugauauauuaaauuucccccug

SEQ ID NO: 56811 - RNA, 24 nt, Artificial Sequence
  Synthetic
uuugauauauuaaauuucccccug

SEQ ID NO: 56812 - RNA, 18 nt, Artificial Sequence
  Synthetic
uaauugagcuuggcccug

SEQ ID NO: 56813 - RNA, 20 nt, Artificial Sequence
  Synthetic
aguaauugagcuuggcccug

SEQ ID NO: 56814 - RNA, 21 nt, Artificial Sequence
  Synthetic
uaguaauugagcuuggcccug

SEQ ID NO: 56815 - RNA, 22 nt, Artificial Sequence
  Synthetic
auaguaauugagcuuggcccug

SEQ ID NO: 56816 - RNA, 24 nt, Artificial Sequence
  Synthetic
ugauaguaauugagcuuggcccug

SEQ ID NO: 56817 - RNA, 21 nt, Artificial Sequence
  Synthetic
agggcaagaacaagaucccug

SEQ ID NO: 56818 - RNA, 23 nt, Artificial Sequence
  Synthetic
agagggcaagaacaagaucccug

SEQ ID NO: 56819 - RNA, 24 nt, Artificial Sequence
  Synthetic
aagagggcaagaacaagaucccug

SEQ ID NO: 56820 - RNA, 18 nt, Artificial Sequence
  Synthetic
caaaaguguuuaucccug

SEQ ID NO: 56821 - RNA, 19 nt, Artificial Sequence
  Synthetic
ucaaaaguguuuaucccug

SEQ ID NO: 56822 - RNA, 20 nt, Artificial Sequence
  Synthetic
uucaaaaguguuuaucccug

SEQ ID NO: 56823 - RNA, 21 nt, Artificial Sequence
  Synthetic
uuucaaaaguguuuaucccug

SEQ ID NO: 56824 - RNA, 22 nt, Artificial Sequence
  Synthetic
uuuucaaaaguguuuaucccug

SEQ ID NO: 56825 - RNA, 23 nt, Artificial Sequence
  Synthetic
cuuuucaaaaguguuuaucccug

SEQ ID NO: 56826 - RNA, 24 nt, Artificial Sequence
  Synthetic
ucuuuucaaaaguguuuaucccug

SEQ ID NO: 56827 - RNA, 19 nt, Artificial Sequence
  Synthetic
aguaacucgauauucccug

SEQ ID NO: 56828 - RNA, 20 nt, Artificial Sequence
  Synthetic
aaguaacucgauauucccug

SEQ ID NO: 56829 - RNA, 21 nt, Artificial Sequence
  Synthetic
uaaguaacucgauauucccug

SEQ ID NO: 56830 - RNA, 22 nt, Artificial Sequence
  Synthetic
uuaaguaacucgauauucccug

SEQ ID NO: 56831 - RNA, 23 nt, Artificial Sequence
  Synthetic
cuuaaguaacucgauauucccug

SEQ ID NO: 56832 - RNA, 18 nt, Artificial Sequence
  Synthetic
ucacauucaaauagccug

SEQ ID NO: 56833 - RNA, 19 nt, Artificial Sequence
  Synthetic
uucacauucaaauagccug

SEQ ID NO: 56834 - RNA, 20 nt, Artificial Sequence
  Synthetic
uuucacauucaaauagccug

SEQ ID NO: 56835 - RNA, 21 nt, Artificial Sequence
  Synthetic
auuucacauucaaauagccug

SEQ ID NO: 56836 - RNA, 22 nt, Artificial Sequence
  Synthetic
aauuucacauucaaauagccug

SEQ ID NO: 56837 - RNA, 23 nt, Artificial Sequence
  Synthetic
aaauuucacauucaaauagccug

SEQ ID NO: 56838 - RNA, 24 nt, Artificial Sequence
  Synthetic
aaaauuucacauucaaauagccug

SEQ ID NO: 56839 - RNA, 21 nt, Artificial Sequence
  Synthetic
uaaauuauuuaacuuagccug

SEQ ID NO: 56840 - RNA, 22 nt, Artificial Sequence
  Synthetic
uuaaauuauuuaacuuagccug

SEQ ID NO: 56841 - RNA, 23 nt, Artificial Sequence
  Synthetic
uuuaaauuauuuaacuuagccug

SEQ ID NO: 56842 - RNA, 24 nt, Artificial Sequence
  Synthetic
auuuaaauuauuuaacuuagccug

SEQ ID NO: 56843 - RNA, 18 nt, Artificial Sequence
  Synthetic
accagaaauacuggccug

SEQ ID NO: 56844 - RNA, 20 nt, Artificial Sequence
  Synthetic
agaccagaaauacuggccug

SEQ ID NO: 56845 - RNA, 21 nt, Artificial Sequence
  Synthetic
aagaccagaaauacuggccug

SEQ ID NO: 56846 - RNA, 23 nt, Artificial Sequence
  Synthetic
agaagaccagaaauacuggccug

SEQ ID NO: 56847 - RNA, 21 nt, Artificial Sequence
  Synthetic
uuuaauccuaaaacaauccug

SEQ ID NO: 56848 - RNA, 22 nt, Artificial Sequence
  Synthetic
cuuuaauccuaaaacaauccug

SEQ ID NO: 56849 - RNA, 23 nt, Artificial Sequence
  Synthetic
ccuuuaauccuaaaacaauccug

SEQ ID NO: 56850 - RNA, 24 nt, Artificial Sequence
  Synthetic
uccuuuaauccuaaaacaauccug

SEQ ID NO: 56851 - RNA, 19 nt, Artificial Sequence
  Synthetic
aggcaagagaauaauccug

SEQ ID NO: 56852 - RNA, 20 nt, Artificial Sequence
  Synthetic
aaggcaagagaauaauccug

SEQ ID NO: 56853 - RNA, 22 nt, Artificial Sequence
  Synthetic
agaaggcaagagaauaauccug

SEQ ID NO: 56854 - RNA, 23 nt, Artificial Sequence
  Synthetic
cagaaggcaagagaauaauccug

SEQ ID NO: 56855 - RNA, 24 nt, Artificial Sequence
  Synthetic
ccagaaggcaagagaauaauccug

SEQ ID NO: 56856 - RNA, 21 nt, Artificial Sequence
  Synthetic
ucccuaacuauaauaauccug

SEQ ID NO: 56857 - RNA, 22 nt, Artificial Sequence
  Synthetic
cucccuaacuauaauaauccug

SEQ ID NO: 56858 - RNA, 23 nt, Artificial Sequence
  Synthetic
ccucccuaacuauaauaauccug

SEQ ID NO: 56859 - RNA, 24 nt, Artificial Sequence
  Synthetic
cccucccuaacuauaauaauccug

SEQ ID NO: 56860 - RNA, 18 nt, Artificial Sequence
  Synthetic
acccagacagauauccug

SEQ ID NO: 56861 - RNA, 19 nt, Artificial Sequence
  Synthetic
uacccagacagauauccug

SEQ ID NO: 56862 - RNA, 20 nt, Artificial Sequence
  Synthetic
uuacccagacagauauccug

SEQ ID NO: 56863 - RNA, 21 nt, Artificial Sequence
  Synthetic
uuuacccagacagauauccug

SEQ ID NO: 56864 - RNA, 22 nt, Artificial Sequence
  Synthetic
uuuuacccagacagauauccug

SEQ ID NO: 56865 - RNA, 24 nt, Artificial Sequence
  Synthetic
uguuuuacccagacagauauccug

SEQ ID NO: 56866 - RNA, 19 nt, Artificial Sequence
  Synthetic
ugcuacccaaguuauccug

SEQ ID NO: 56867 - RNA, 20 nt, Artificial Sequence
  Synthetic
cugcuacccaaguuauccug

SEQ ID NO: 56868 - RNA, 22 nt, Artificial Sequence
  Synthetic
agcugcuacccaaguuauccug

SEQ ID NO: 56869 - RNA, 23 nt, Artificial Sequence
  Synthetic
uagcugcuacccaaguuauccug

SEQ ID NO: 56870 - RNA, 21 nt, Artificial Sequence
  Synthetic
agggcuaacucccuccuccug

SEQ ID NO: 56871 - RNA, 22 nt, Artificial Sequence
  Synthetic
aagggcuaacucccuccuccug

SEQ ID NO: 56872 - RNA, 23 nt, Artificial Sequence
  Synthetic
aaagggcuaacucccuccuccug

SEQ ID NO: 56873 - RNA, 24 nt, Artificial Sequence
  Synthetic
caaagggcuaacucccuccuccug

SEQ ID NO: 56874 - RNA, 18 nt, Artificial Sequence
  Synthetic
ucauguuuaacucuccug

SEQ ID NO: 56875 - RNA, 19 nt, Artificial Sequence
  Synthetic
uucauguuuaacucuccug

SEQ ID NO: 56876 - RNA, 20 nt, Artificial Sequence
  Synthetic
cuucauguuuaacucuccug

SEQ ID NO: 56877 - RNA, 21 nt, Artificial Sequence
  Synthetic
acuucauguuuaacucuccug

SEQ ID NO: 56878 - RNA, 22 nt, Artificial Sequence
  Synthetic
cacuucauguuuaacucuccug

SEQ ID NO: 56879 - RNA, 23 nt, Artificial Sequence
  Synthetic
ucacuucauguuuaacucuccug

SEQ ID NO: 56880 - RNA, 21 nt, Artificial Sequence
  Synthetic
uuaaccaauggacaaaagcug

SEQ ID NO: 56881 - RNA, 22 nt, Artificial Sequence
  Synthetic
cuuaaccaauggacaaaagcug

SEQ ID NO: 56882 - RNA, 23 nt, Artificial Sequence
  Synthetic
acuuaaccaauggacaaaagcug

SEQ ID NO: 56883 - RNA, 24 nt, Artificial Sequence
  Synthetic
cacuuaaccaauggacaaaagcug

SEQ ID NO: 56884 - RNA, 22 nt, Artificial Sequence
  Synthetic
agguuucucuucagaaaagcug

SEQ ID NO: 56885 - RNA, 23 nt, Artificial Sequence
  Synthetic
cagguuucucuucagaaaagcug

SEQ ID NO: 56886 - RNA, 24 nt, Artificial Sequence
  Synthetic
ucagguuucucuucagaaaagcug

SEQ ID NO: 56887 - RNA, 21 nt, Artificial Sequence
  Synthetic
agucaaccaucacagcagcug

SEQ ID NO: 56888 - RNA, 22 nt, Artificial Sequence
  Synthetic
uagucaaccaucacagcagcug

SEQ ID NO: 56889 - RNA, 23 nt, Artificial Sequence
  Synthetic
auagucaaccaucacagcagcug

SEQ ID NO: 56890 - RNA, 24 nt, Artificial Sequence
  Synthetic
aauagucaaccaucacagcagcug

SEQ ID NO: 56891 - RNA, 20 nt, Artificial Sequence
  Synthetic
agggugagaaauagcagcug

SEQ ID NO: 56892 - RNA, 21 nt, Artificial Sequence
  Synthetic
uagggugagaaauagcagcug

SEQ ID NO: 56893 - RNA, 22 nt, Artificial Sequence
  Synthetic
uuagggugagaaauagcagcug

SEQ ID NO: 56894 - RNA, 24 nt, Artificial Sequence
  Synthetic
uguuagggugagaaauagcagcug

SEQ ID NO: 56895 - RNA, 18 nt, Artificial Sequence
  Synthetic
agauucaauugucagcug

SEQ ID NO: 56896 - RNA, 19 nt, Artificial Sequence
  Synthetic
uagauucaauugucagcug

SEQ ID NO: 56897 - RNA, 21 nt, Artificial Sequence
  Synthetic
uguagauucaauugucagcug

SEQ ID NO: 56898 - RNA, 22 nt, Artificial Sequence
  Synthetic
uuguagauucaauugucagcug

SEQ ID NO: 56899 - RNA, 23 nt, Artificial Sequence
  Synthetic
uuuguagauucaauugucagcug

SEQ ID NO: 56900 - RNA, 21 nt, Artificial Sequence
  Synthetic
ccccaggagaaaagagagcug

SEQ ID NO: 56901 - RNA, 23 nt, Artificial Sequence
  Synthetic
agccccaggagaaaagagagcug

SEQ ID NO: 56902 - RNA, 24 nt, Artificial Sequence
  Synthetic
uagccccaggagaaaagagagcug

SEQ ID NO: 56903 - RNA, 21 nt, Artificial Sequence
  Synthetic
ugggcauuccuuaaauagcug

SEQ ID NO: 56904 - RNA, 22 nt, Artificial Sequence
  Synthetic
augggcauuccuuaaauagcug

SEQ ID NO: 56905 - RNA, 23 nt, Artificial Sequence
  Synthetic
aaugggcauuccuuaaauagcug

SEQ ID NO: 56906 - RNA, 24 nt, Artificial Sequence
  Synthetic
uaaugggcauuccuuaaauagcug

SEQ ID NO: 56907 - RNA, 19 nt, Artificial Sequence
  Synthetic
aguucugauaagguagcug

SEQ ID NO: 56908 - RNA, 22 nt, Artificial Sequence
  Synthetic
aggaguucugauaagguagcug

SEQ ID NO: 56909 - RNA, 23 nt, Artificial Sequence
  Synthetic
uaggaguucugauaagguagcug

SEQ ID NO: 56910 - RNA, 18 nt, Artificial Sequence
  Synthetic
aggcuguggauaacgcug

SEQ ID NO: 56911 - RNA, 20 nt, Artificial Sequence
  Synthetic
ugaggcuguggauaacgcug

SEQ ID NO: 56912 - RNA, 21 nt, Artificial Sequence
  Synthetic
cugaggcuguggauaacgcug

SEQ ID NO: 56913 - RNA, 22 nt, Artificial Sequence
  Synthetic
ccugaggcuguggauaacgcug

SEQ ID NO: 56914 - RNA, 23 nt, Artificial Sequence
  Synthetic
cccugaggcuguggauaacgcug

SEQ ID NO: 56915 - RNA, 24 nt, Artificial Sequence
  Synthetic
ucccugaggcuguggauaacgcug

SEQ ID NO: 56916 - RNA, 23 nt, Artificial Sequence
  Synthetic
aggggugauucugcugcacgcug

SEQ ID NO: 56917 - RNA, 24 nt, Artificial Sequence
  Synthetic
caggggugauucugcugcacgcug

SEQ ID NO: 56918 - RNA, 18 nt, Artificial Sequence
  Synthetic
cgagcagaaaccucgcug

SEQ ID NO: 56919 - RNA, 19 nt, Artificial Sequence
  Synthetic
ucgagcagaaaccucgcug

SEQ ID NO: 56920 - RNA, 20 nt, Artificial Sequence
  Synthetic
cucgagcagaaaccucgcug

SEQ ID NO: 56921 - RNA, 21 nt, Artificial Sequence
  Synthetic
ccucgagcagaaaccucgcug

SEQ ID NO: 56922 - RNA, 22 nt, Artificial Sequence
  Synthetic
cccucgagcagaaaccucgcug

SEQ ID NO: 56923 - RNA, 24 nt, Artificial Sequence
  Synthetic
agcccucgagcagaaaccucgcug

SEQ ID NO: 56924 - RNA, 18 nt, Artificial Sequence
  Synthetic
cacugggaaaucaggcug

SEQ ID NO: 56925 - RNA, 21 nt, Artificial Sequence
  Synthetic
uggcacugggaaaucaggcug

SEQ ID NO: 56926 - RNA, 22 nt, Artificial Sequence
  Synthetic
cuggcacugggaaaucaggcug

SEQ ID NO: 56927 - RNA, 24 nt, Artificial Sequence
  Synthetic
ugcuggcacugggaaaucaggcug

SEQ ID NO: 56928 - RNA, 18 nt, Artificial Sequence
  Synthetic
augauacccaagaggcug

SEQ ID NO: 56929 - RNA, 19 nt, Artificial Sequence
  Synthetic
uaugauacccaagaggcug

SEQ ID NO: 56930 - RNA, 20 nt, Artificial Sequence
  Synthetic
cuaugauacccaagaggcug

SEQ ID NO: 56931 - RNA, 22 nt, Artificial Sequence
  Synthetic
ugcuaugauacccaagaggcug

SEQ ID NO: 56932 - RNA, 23 nt, Artificial Sequence
  Synthetic
augcuaugauacccaagaggcug

SEQ ID NO: 56933 - RNA, 24 nt, Artificial Sequence
  Synthetic
caugcuaugauacccaagaggcug

SEQ ID NO: 56934 - RNA, 18 nt, Artificial Sequence
  Synthetic
cuucuguaugagaggcug

SEQ ID NO: 56935 - RNA, 19 nt, Artificial Sequence
  Synthetic
acuucuguaugagaggcug

SEQ ID NO: 56936 - RNA, 20 nt, Artificial Sequence
  Synthetic
cacuucuguaugagaggcug

SEQ ID NO: 56937 - RNA, 23 nt, Artificial Sequence
  Synthetic
uggcacuucuguaugagaggcug

SEQ ID NO: 56938 - RNA, 24 nt, Artificial Sequence
  Synthetic
cuggcacuucuguaugagaggcug

SEQ ID NO: 56939 - RNA, 18 nt, Artificial Sequence
  Synthetic
uuaaccagaaugaggcug

SEQ ID NO: 56940 - RNA, 19 nt, Artificial Sequence
  Synthetic
cuuaaccagaaugaggcug

SEQ ID NO: 56941 - RNA, 20 nt, Artificial Sequence
  Synthetic
ucuuaaccagaaugaggcug

SEQ ID NO: 56942 - RNA, 21 nt, Artificial Sequence
  Synthetic
cucuuaaccagaaugaggcug

SEQ ID NO: 56943 - RNA, 22 nt, Artificial Sequence
  Synthetic
ucucuuaaccagaaugaggcug

SEQ ID NO: 56944 - RNA, 23 nt, Artificial Sequence
  Synthetic
uucucuuaaccagaaugaggcug

SEQ ID NO: 56945 - RNA, 24 nt, Artificial Sequence
  Synthetic
auucucuuaaccagaaugaggcug

SEQ ID NO: 56946 - RNA, 19 nt, Artificial Sequence
  Synthetic
ugauggccacccagggcug

SEQ ID NO: 56947 - RNA, 21 nt, Artificial Sequence
  Synthetic
ugugauggccacccagggcug

SEQ ID NO: 56948 - RNA, 18 nt, Artificial Sequence
  Synthetic
uuuuaaaaucaauggcug

SEQ ID NO: 56949 - RNA, 19 nt, Artificial Sequence
  Synthetic
uuuuuaaaaucaauggcug

SEQ ID NO: 56950 - RNA, 20 nt, Artificial Sequence
  Synthetic
uuuuuuaaaaucaauggcug

SEQ ID NO: 56951 - RNA, 21 nt, Artificial Sequence
  Synthetic
auuuuuuaaaaucaauggcug

SEQ ID NO: 56952 - RNA, 22 nt, Artificial Sequence
  Synthetic
uauuuuuuaaaaucaauggcug

SEQ ID NO: 56953 - RNA, 23 nt, Artificial Sequence
  Synthetic
auauuuuuuaaaaucaauggcug

SEQ ID NO: 56954 - RNA, 24 nt, Artificial Sequence
  Synthetic
aauauuuuuuaaaaucaauggcug

SEQ ID NO: 56955 - RNA, 18 nt, Artificial Sequence
  Synthetic
uuuuaaaucucauggcug

SEQ ID NO: 56956 - RNA, 21 nt, Artificial Sequence
  Synthetic
ugguuuuaaaucucauggcug

SEQ ID NO: 56957 - RNA, 22 nt, Artificial Sequence
  Synthetic
uugguuuuaaaucucauggcug

SEQ ID NO: 56958 - RNA, 23 nt, Artificial Sequence
  Synthetic
cuugguuuuaaaucucauggcug

SEQ ID NO: 56959 - RNA, 24 nt, Artificial Sequence
  Synthetic
ucuugguuuuaaaucucauggcug

SEQ ID NO: 56960 - RNA, 19 nt, Artificial Sequence
  Synthetic
ugauuucaccagcuggcug

SEQ ID NO: 56961 - RNA, 21 nt, Artificial Sequence
  Synthetic
ugugauuucaccagcuggcug

SEQ ID NO: 56962 - RNA, 22 nt, Artificial Sequence
  Synthetic
uugugauuucaccagcuggcug

SEQ ID NO: 56963 - RNA, 23 nt, Artificial Sequence
  Synthetic
auugugauuucaccagcuggcug

SEQ ID NO: 56964 - RNA, 24 nt, Artificial Sequence
  Synthetic
cauugugauuucaccagcuggcug

SEQ ID NO: 56965 - RNA, 21 nt, Artificial Sequence
  Synthetic
uuagagggauuacucuggcug

SEQ ID NO: 56966 - RNA, 22 nt, Artificial Sequence
  Synthetic
uuuagagggauuacucuggcug

SEQ ID NO: 56967 - RNA, 23 nt, Artificial Sequence
  Synthetic
uuuuagagggauuacucuggcug

SEQ ID NO: 56968 - RNA, 18 nt, Artificial Sequence
  Synthetic
cuaaauauuuucuggcug

SEQ ID NO: 56969 - RNA, 19 nt, Artificial Sequence
  Synthetic
ucuaaauauuuucuggcug

SEQ ID NO: 56970 - RNA, 20 nt, Artificial Sequence
  Synthetic
aucuaaauauuuucuggcug

SEQ ID NO: 56971 - RNA, 21 nt, Artificial Sequence
  Synthetic
aaucuaaauauuuucuggcug

SEQ ID NO: 56972 - RNA, 23 nt, Artificial Sequence
  Synthetic
ugaaucuaaauauuuucuggcug

SEQ ID NO: 56973 - RNA, 18 nt, Artificial Sequence
  Synthetic
uuuuaugaaauaaugcug

SEQ ID NO: 56974 - RNA, 20 nt, Artificial Sequence
  Synthetic
uguuuuaugaaauaaugcug

SEQ ID NO: 56975 - RNA, 21 nt, Artificial Sequence
  Synthetic
cuguuuuaugaaauaaugcug

SEQ ID NO: 56976 - RNA, 22 nt, Artificial Sequence
  Synthetic
ucuguuuuaugaaauaaugcug

SEQ ID NO: 56977 - RNA, 23 nt, Artificial Sequence
  Synthetic
aucuguuuuaugaaauaaugcug

SEQ ID NO: 56978 - RNA, 24 nt, Artificial Sequence
  Synthetic
caucuguuuuaugaaauaaugcug

SEQ ID NO: 56979 - RNA, 19 nt, Artificial Sequence
  Synthetic
agcuaaaauuaucaugcug

SEQ ID NO: 56980 - RNA, 20 nt, Artificial Sequence
  Synthetic
uagcuaaaauuaucaugcug

SEQ ID NO: 56981 - RNA, 21 nt, Artificial Sequence
  Synthetic
uuagcuaaaauuaucaugcug

SEQ ID NO: 56982 - RNA, 22 nt, Artificial Sequence
  Synthetic
uuuagcuaaaauuaucaugcug

SEQ ID NO: 56983 - RNA, 23 nt, Artificial Sequence
  Synthetic
uuuuagcuaaaauuaucaugcug

SEQ ID NO: 56984 - RNA, 24 nt, Artificial Sequence
  Synthetic
uuuuuagcuaaaauuaucaugcug

SEQ ID NO: 56985 - RNA, 18 nt, Artificial Sequence
  Synthetic
ccaggaauuuggaugcug

SEQ ID NO: 56986 - RNA, 20 nt, Artificial Sequence
  Synthetic
agccaggaauuuggaugcug

SEQ ID NO: 56987 - RNA, 21 nt, Artificial Sequence
  Synthetic
aagccaggaauuuggaugcug

SEQ ID NO: 56988 - RNA, 24 nt, Artificial Sequence
  Synthetic
uggaagccaggaauuuggaugcug

SEQ ID NO: 56989 - RNA, 22 nt, Artificial Sequence
  Synthetic
ugggguagauugccugaugcug

SEQ ID NO: 56990 - RNA, 23 nt, Artificial Sequence
  Synthetic
uugggguagauugccugaugcug

SEQ ID NO: 56991 - RNA, 18 nt, Artificial Sequence
  Synthetic
uugaagaggaauaugcug

SEQ ID NO: 56992 - RNA, 19 nt, Artificial Sequence
  Synthetic
uuugaagaggaauaugcug

SEQ ID NO: 56993 - RNA, 23 nt, Artificial Sequence
  Synthetic
cggguuugaagaggaauaugcug

SEQ ID NO: 56994 - RNA, 24 nt, Artificial Sequence
  Synthetic
acggguuugaagaggaauaugcug

SEQ ID NO: 56995 - RNA, 18 nt, Artificial Sequence
  Synthetic
auaauaauuguuaugcug

SEQ ID NO: 56996 - RNA, 19 nt, Artificial Sequence
  Synthetic
aauaauaauuguuaugcug

SEQ ID NO: 56997 - RNA, 23 nt, Artificial Sequence
  Synthetic
ugggaauaauaauuguuaugcug

SEQ ID NO: 56998 - RNA, 24 nt, Artificial Sequence
  Synthetic
augggaauaauaauuguuaugcug

SEQ ID NO: 56999 - RNA, 21 nt, Artificial Sequence
  Synthetic
aaggauuagaaaagacugcug

SEQ ID NO: 57000 - RNA, 22 nt, Artificial Sequence
  Synthetic
caaggauuagaaaagacugcug

SEQ ID NO: 57001 - RNA, 23 nt, Artificial Sequence
  Synthetic
ccaaggauuagaaaagacugcug

SEQ ID NO: 57002 - RNA, 24 nt, Artificial Sequence
  Synthetic
accaaggauuagaaaagacugcug

SEQ ID NO: 57003 - RNA, 18 nt, Artificial Sequence
  Synthetic
caauaauuauaagugcug

SEQ ID NO: 57004 - RNA, 19 nt, Artificial Sequence
  Synthetic
ucaauaauuauaagugcug

SEQ ID NO: 57005 - RNA, 20 nt, Artificial Sequence
  Synthetic
cucaauaauuauaagugcug

SEQ ID NO: 57006 - RNA, 21 nt, Artificial Sequence
  Synthetic
ucucaauaauuauaagugcug

SEQ ID NO: 57007 - RNA, 23 nt, Artificial Sequence
  Synthetic
ugucucaauaauuauaagugcug

SEQ ID NO: 57008 - RNA, 24 nt, Artificial Sequence
  Synthetic
cugucucaauaauuauaagugcug

SEQ ID NO: 57009 - RNA, 18 nt, Artificial Sequence
  Synthetic
accuaccccaaggugcug

SEQ ID NO: 57010 - RNA, 19 nt, Artificial Sequence
  Synthetic
uaccuaccccaaggugcug

SEQ ID NO: 57011 - RNA, 21 nt, Artificial Sequence
  Synthetic
aguaccuaccccaaggugcug

SEQ ID NO: 57012 - RNA, 22 nt, Artificial Sequence
  Synthetic
uaguaccuaccccaaggugcug

SEQ ID NO: 57013 - RNA, 23 nt, Artificial Sequence
  Synthetic
auaguaccuaccccaaggugcug

SEQ ID NO: 57014 - RNA, 18 nt, Artificial Sequence
  Synthetic
aaaaaaaccacggugcug

SEQ ID NO: 57015 - RNA, 19 nt, Artificial Sequence
  Synthetic
aaaaaaaaccacggugcug

SEQ ID NO: 57016 - RNA, 20 nt, Artificial Sequence
  Synthetic
aaaaaaaaaccacggugcug

SEQ ID NO: 57017 - RNA, 21 nt, Artificial Sequence
  Synthetic
uagaggaugaagagggugcug

SEQ ID NO: 57018 - RNA, 22 nt, Artificial Sequence
  Synthetic
auagaggaugaagagggugcug

SEQ ID NO: 57019 - RNA, 23 nt, Artificial Sequence
  Synthetic
aauagaggaugaagagggugcug

SEQ ID NO: 57020 - RNA, 24 nt, Artificial Sequence
  Synthetic
uaauagaggaugaagagggugcug

SEQ ID NO: 57021 - RNA, 19 nt, Artificial Sequence
  Synthetic
agcacuaccagguuugcug

SEQ ID NO: 57022 - RNA, 20 nt, Artificial Sequence
  Synthetic
uagcacuaccagguuugcug

SEQ ID NO: 57023 - RNA, 23 nt, Artificial Sequence
  Synthetic
agguagcacuaccagguuugcug

SEQ ID NO: 57024 - RNA, 24 nt, Artificial Sequence
  Synthetic
aagguagcacuaccagguuugcug

SEQ ID NO: 57025 - RNA, 19 nt, Artificial Sequence
  Synthetic
uguucucaacaaaaaucug

SEQ ID NO: 57026 - RNA, 22 nt, Artificial Sequence
  Synthetic
ugguguucucaacaaaaaucug

SEQ ID NO: 57027 - RNA, 24 nt, Artificial Sequence
  Synthetic
ugugguguucucaacaaaaaucug

SEQ ID NO: 57028 - RNA, 20 nt, Artificial Sequence
  Synthetic
ugggcucccuugggaaucug

SEQ ID NO: 57029 - RNA, 21 nt, Artificial Sequence
  Synthetic
cugggcucccuugggaaucug

SEQ ID NO: 57030 - RNA, 22 nt, Artificial Sequence
  Synthetic
acugggcucccuugggaaucug

SEQ ID NO: 57031 - RNA, 24 nt, Artificial Sequence
  Synthetic
ugacugggcucccuugggaaucug

SEQ ID NO: 57032 - RNA, 18 nt, Artificial Sequence
  Synthetic
uaugagacgaugaaucug

SEQ ID NO: 57033 - RNA, 19 nt, Artificial Sequence
  Synthetic
cuaugagacgaugaaucug

SEQ ID NO: 57034 - RNA, 20 nt, Artificial Sequence
  Synthetic
acuaugagacgaugaaucug

SEQ ID NO: 57035 - RNA, 21 nt, Artificial Sequence
  Synthetic
cacuaugagacgaugaaucug

SEQ ID NO: 57036 - RNA, 22 nt, Artificial Sequence
  Synthetic
ucacuaugagacgaugaaucug

SEQ ID NO: 57037 - RNA, 23 nt, Artificial Sequence
  Synthetic
aucacuaugagacgaugaaucug

SEQ ID NO: 57038 - RNA, 24 nt, Artificial Sequence
  Synthetic
caucacuaugagacgaugaaucug

SEQ ID NO: 57039 - RNA, 19 nt, Artificial Sequence
  Synthetic
aggcugccacgguaaucug

SEQ ID NO: 57040 - RNA, 21 nt, Artificial Sequence
  Synthetic
agaggcugccacgguaaucug

SEQ ID NO: 57041 - RNA, 22 nt, Artificial Sequence
  Synthetic
aagaggcugccacgguaaucug

SEQ ID NO: 57042 - RNA, 23 nt, Artificial Sequence
  Synthetic
uaagaggcugccacgguaaucug

SEQ ID NO: 57043 - RNA, 24 nt, Artificial Sequence
  Synthetic
auaagaggcugccacgguaaucug

SEQ ID NO: 57044 - RNA, 18 nt, Artificial Sequence
  Synthetic
accauagccgguaaucug

SEQ ID NO: 57045 - RNA, 19 nt, Artificial Sequence
  Synthetic
caccauagccgguaaucug

SEQ ID NO: 57046 - RNA, 21 nt, Artificial Sequence
  Synthetic
agcaccauagccgguaaucug

SEQ ID NO: 57047 - RNA, 22 nt, Artificial Sequence
  Synthetic
cagcaccauagccgguaaucug

SEQ ID NO: 57048 - RNA, 20 nt, Artificial Sequence
  Synthetic
agguacugaauguacaucug

SEQ ID NO: 57049 - RNA, 21 nt, Artificial Sequence
  Synthetic
aagguacugaauguacaucug

SEQ ID NO: 57050 - RNA, 22 nt, Artificial Sequence
  Synthetic
aaagguacugaauguacaucug

SEQ ID NO: 57051 - RNA, 23 nt, Artificial Sequence
  Synthetic
uaaagguacugaauguacaucug

SEQ ID NO: 57052 - RNA, 24 nt, Artificial Sequence
  Synthetic
uuaaagguacugaauguacaucug

SEQ ID NO: 57053 - RNA, 18 nt, Artificial Sequence
  Synthetic
agaagaacuaugcaucug

SEQ ID NO: 57054 - RNA, 19 nt, Artificial Sequence
  Synthetic
cagaagaacuaugcaucug

SEQ ID NO: 57055 - RNA, 20 nt, Artificial Sequence
  Synthetic
ccagaagaacuaugcaucug

SEQ ID NO: 57056 - RNA, 21 nt, Artificial Sequence
  Synthetic
accagaagaacuaugcaucug

SEQ ID NO: 57057 - RNA, 22 nt, Artificial Sequence
  Synthetic
caccagaagaacuaugcaucug

SEQ ID NO: 57058 - RNA, 23 nt, Artificial Sequence
  Synthetic
ccaccagaagaacuaugcaucug

SEQ ID NO: 57059 - RNA, 24 nt, Artificial Sequence
  Synthetic
uccaccagaagaacuaugcaucug

SEQ ID NO: 57060 - RNA, 18 nt, Artificial Sequence
  Synthetic
aacuuccucugucaucug

SEQ ID NO: 57061 - RNA, 19 nt, Artificial Sequence
  Synthetic
aaacuuccucugucaucug

SEQ ID NO: 57062 - RNA, 20 nt, Artificial Sequence
  Synthetic
uaaacuuccucugucaucug

SEQ ID NO: 57063 - RNA, 21 nt, Artificial Sequence
  Synthetic
auaaacuuccucugucaucug

SEQ ID NO: 57064 - RNA, 23 nt, Artificial Sequence
  Synthetic
ugauaaacuuccucugucaucug

SEQ ID NO: 57065 - RNA, 24 nt, Artificial Sequence
  Synthetic
augauaaacuuccucugucaucug

SEQ ID NO: 57066 - RNA, 18 nt, Artificial Sequence
  Synthetic
acuaggccugcagaucug

SEQ ID NO: 57067 - RNA, 19 nt, Artificial Sequence
  Synthetic
uacuaggccugcagaucug

SEQ ID NO: 57068 - RNA, 20 nt, Artificial Sequence
  Synthetic
uuacuaggccugcagaucug

SEQ ID NO: 57069 - RNA, 22 nt, Artificial Sequence
  Synthetic
uguuacuaggccugcagaucug

SEQ ID NO: 57070 - RNA, 23 nt, Artificial Sequence
  Synthetic
uuguuacuaggccugcagaucug

SEQ ID NO: 57071 - RNA, 24 nt, Artificial Sequence
  Synthetic
uuuguuacuaggccugcagaucug

SEQ ID NO: 57072 - RNA, 18 nt, Artificial Sequence
  Synthetic
aacaacugcuuagaucug

SEQ ID NO: 57073 - RNA, 19 nt, Artificial Sequence
  Synthetic
aaacaacugcuuagaucug

SEQ ID NO: 57074 - RNA, 20 nt, Artificial Sequence
  Synthetic
uaaacaacugcuuagaucug

SEQ ID NO: 57075 - RNA, 21 nt, Artificial Sequence
  Synthetic
auaaacaacugcuuagaucug

SEQ ID NO: 57076 - RNA, 22 nt, Artificial Sequence
  Synthetic
cauaaacaacugcuuagaucug

SEQ ID NO: 57077 - RNA, 23 nt, Artificial Sequence
  Synthetic
ccauaaacaacugcuuagaucug

SEQ ID NO: 57078 - RNA, 24 nt, Artificial Sequence
  Synthetic
uccauaaacaacugcuuagaucug

SEQ ID NO: 57079 - RNA, 19 nt, Artificial Sequence
  Synthetic
uggguccuggccauaucug

SEQ ID NO: 57080 - RNA, 24 nt, Artificial Sequence
  Synthetic
ugggguggguccuggccauaucug

SEQ ID NO: 57081 - RNA, 18 nt, Artificial Sequence
  Synthetic
cuucuaaauauguaucug

SEQ ID NO: 57082 - RNA, 20 nt, Artificial Sequence
  Synthetic
ugcuucuaaauauguaucug

SEQ ID NO: 57083 - RNA, 21 nt, Artificial Sequence
  Synthetic
uugcuucuaaauauguaucug

SEQ ID NO: 57084 - RNA, 23 nt, Artificial Sequence
  Synthetic
uguugcuucuaaauauguaucug

SEQ ID NO: 57085 - RNA, 24 nt, Artificial Sequence
  Synthetic
auguugcuucuaaauauguaucug

SEQ ID NO: 57086 - RNA, 18 nt, Artificial Sequence
  Synthetic
auauuagagcuuuaucug

SEQ ID NO: 57087 - RNA, 19 nt, Artificial Sequence
  Synthetic
cauauuagagcuuuaucug

SEQ ID NO: 57088 - RNA, 20 nt, Artificial Sequence
  Synthetic
ucauauuagagcuuuaucug

SEQ ID NO: 57089 - RNA, 21 nt, Artificial Sequence
  Synthetic
cucauauuagagcuuuaucug

SEQ ID NO: 57090 - RNA, 22 nt, Artificial Sequence
  Synthetic
ucucauauuagagcuuuaucug

SEQ ID NO: 57091 - RNA, 23 nt, Artificial Sequence
  Synthetic
uucucauauuagagcuuuaucug

SEQ ID NO: 57092 - RNA, 24 nt, Artificial Sequence
  Synthetic
uuucucauauuagagcuuuaucug

SEQ ID NO: 57093 - RNA, 18 nt, Artificial Sequence
  Synthetic
cccaagcccugaacucug

SEQ ID NO: 57094 - RNA, 19 nt, Artificial Sequence
  Synthetic
ucccaagcccugaacucug

SEQ ID NO: 57095 - RNA, 20 nt, Artificial Sequence
  Synthetic
cucccaagcccugaacucug

SEQ ID NO: 57096 - RNA, 21 nt, Artificial Sequence
  Synthetic
acucccaagcccugaacucug

SEQ ID NO: 57097 - RNA, 22 nt, Artificial Sequence
  Synthetic
cacucccaagcccugaacucug

SEQ ID NO: 57098 - RNA, 23 nt, Artificial Sequence
  Synthetic
ccacucccaagcccugaacucug

SEQ ID NO: 57099 - RNA, 24 nt, Artificial Sequence
  Synthetic
cccacucccaagcccugaacucug

SEQ ID NO: 57100 - RNA, 19 nt, Artificial Sequence
  Synthetic
ugguuuccaauuaacucug

SEQ ID NO: 57101 - RNA, 20 nt, Artificial Sequence
  Synthetic
augguuuccaauuaacucug

SEQ ID NO: 57102 - RNA, 21 nt, Artificial Sequence
  Synthetic
caugguuuccaauuaacucug

SEQ ID NO: 57103 - RNA, 22 nt, Artificial Sequence
  Synthetic
ucaugguuuccaauuaacucug

SEQ ID NO: 57104 - RNA, 19 nt, Artificial Sequence
  Synthetic
agaacacgaauucacucug

SEQ ID NO: 57105 - RNA, 20 nt, Artificial Sequence
  Synthetic
uagaacacgaauucacucug

SEQ ID NO: 57106 - RNA, 23 nt, Artificial Sequence
  Synthetic
ugguagaacacgaauucacucug

SEQ ID NO: 57107 - RNA, 24 nt, Artificial Sequence
  Synthetic
uugguagaacacgaauucacucug

SEQ ID NO: 57108 - RNA, 18 nt, Artificial Sequence
  Synthetic
agagccauuuucacucug

SEQ ID NO: 57109 - RNA, 19 nt, Artificial Sequence
  Synthetic
aagagccauuuucacucug

SEQ ID NO: 57110 - RNA, 20 nt, Artificial Sequence
  Synthetic
caagagccauuuucacucug

SEQ ID NO: 57111 - RNA, 21 nt, Artificial Sequence
  Synthetic
ccaagagccauuuucacucug

SEQ ID NO: 57112 - RNA, 22 nt, Artificial Sequence
  Synthetic
accaagagccauuuucacucug

SEQ ID NO: 57113 - RNA, 23 nt, Artificial Sequence
  Synthetic
uaccaagagccauuuucacucug

SEQ ID NO: 57114 - RNA, 24 nt, Artificial Sequence
  Synthetic
uuaccaagagccauuuucacucug

SEQ ID NO: 57115 - RNA, 20 nt, Artificial Sequence
  Synthetic
uggaacucuggcguacucug

SEQ ID NO: 57116 - RNA, 21 nt, Artificial Sequence
  Synthetic
cuggaacucuggcguacucug

SEQ ID NO: 57117 - RNA, 22 nt, Artificial Sequence
  Synthetic
ccuggaacucuggcguacucug

SEQ ID NO: 57118 - RNA, 23 nt, Artificial Sequence
  Synthetic
accuggaacucuggcguacucug

SEQ ID NO: 57119 - RNA, 24 nt, Artificial Sequence
  Synthetic
uaccuggaacucuggcguacucug

SEQ ID NO: 57120 - RNA, 18 nt, Artificial Sequence
  Synthetic
auaauuuuaucaccucug

SEQ ID NO: 57121 - RNA, 19 nt, Artificial Sequence
  Synthetic
aauaauuuuaucaccucug

SEQ ID NO: 57122 - RNA, 20 nt, Artificial Sequence
  Synthetic
caauaauuuuaucaccucug

SEQ ID NO: 57123 - RNA, 21 nt, Artificial Sequence
  Synthetic
ccaauaauuuuaucaccucug

SEQ ID NO: 57124 - RNA, 23 nt, Artificial Sequence
  Synthetic
ugccaauaauuuuaucaccucug

SEQ ID NO: 57125 - RNA, 24 nt, Artificial Sequence
  Synthetic
uugccaauaauuuuaucaccucug

SEQ ID NO: 57126 - RNA, 18 nt, Artificial Sequence
  Synthetic
ccuguaaaucuaccucug

SEQ ID NO: 57127 - RNA, 19 nt, Artificial Sequence
  Synthetic
accuguaaaucuaccucug

SEQ ID NO: 57128 - RNA, 20 nt, Artificial Sequence
  Synthetic
caccuguaaaucuaccucug

SEQ ID NO: 57129 - RNA, 21 nt, Artificial Sequence
  Synthetic
ucaccuguaaaucuaccucug

SEQ ID NO: 57130 - RNA, 22 nt, Artificial Sequence
  Synthetic
aucaccuguaaaucuaccucug

SEQ ID NO: 57131 - RNA, 23 nt, Artificial Sequence
  Synthetic
aaucaccuguaaaucuaccucug

SEQ ID NO: 57132 - RNA, 24 nt, Artificial Sequence
  Synthetic
aaaucaccuguaaaucuaccucug

SEQ ID NO: 57133 - RNA, 18 nt, Artificial Sequence
  Synthetic
ugagguuauaauccucug

SEQ ID NO: 57134 - RNA, 19 nt, Artificial Sequence
  Synthetic
cugagguuauaauccucug

SEQ ID NO: 57135 - RNA, 21 nt, Artificial Sequence
  Synthetic
cgcugagguuauaauccucug

SEQ ID NO: 57136 - RNA, 22 nt, Artificial Sequence
  Synthetic
ccgcugagguuauaauccucug

SEQ ID NO: 57137 - RNA, 23 nt, Artificial Sequence
  Synthetic
uccgcugagguuauaauccucug

SEQ ID NO: 57138 - RNA, 24 nt, Artificial Sequence
  Synthetic
uuccgcugagguuauaauccucug

SEQ ID NO: 57139 - RNA, 18 nt, Artificial Sequence
  Synthetic
cuaccuggcccuccucug

SEQ ID NO: 57140 - RNA, 19 nt, Artificial Sequence
  Synthetic
ccuaccuggcccuccucug

SEQ ID NO: 57141 - RNA, 20 nt, Artificial Sequence
  Synthetic
accuaccuggcccuccucug

SEQ ID NO: 57142 - RNA, 21 nt, Artificial Sequence
  Synthetic
aaccuaccuggcccuccucug

SEQ ID NO: 57143 - RNA, 22 nt, Artificial Sequence
  Synthetic
aaaccuaccuggcccuccucug

SEQ ID NO: 57144 - RNA, 23 nt, Artificial Sequence
  Synthetic
aaaaccuaccuggcccuccucug

SEQ ID NO: 57145 - RNA, 24 nt, Artificial Sequence
  Synthetic
uaaaaccuaccuggcccuccucug

SEQ ID NO: 57146 - RNA, 18 nt, Artificial Sequence
  Synthetic
agcuuaucaucuccucug

SEQ ID NO: 57147 - RNA, 19 nt, Artificial Sequence
  Synthetic
uagcuuaucaucuccucug

SEQ ID NO: 57148 - RNA, 20 nt, Artificial Sequence
  Synthetic
auagcuuaucaucuccucug

SEQ ID NO: 57149 - RNA, 21 nt, Artificial Sequence
  Synthetic
aauagcuuaucaucuccucug

SEQ ID NO: 57150 - RNA, 22 nt, Artificial Sequence
  Synthetic
aaauagcuuaucaucuccucug

SEQ ID NO: 57151 - RNA, 23 nt, Artificial Sequence
  Synthetic
caaauagcuuaucaucuccucug

SEQ ID NO: 57152 - RNA, 24 nt, Artificial Sequence
  Synthetic
ucaaauagcuuaucaucuccucug

SEQ ID NO: 57153 - RNA, 18 nt, Artificial Sequence
  Synthetic
acuuccagugaagcucug

SEQ ID NO: 57154 - RNA, 19 nt, Artificial Sequence
  Synthetic
aacuuccagugaagcucug

SEQ ID NO: 57155 - RNA, 20 nt, Artificial Sequence
  Synthetic
aaacuuccagugaagcucug

SEQ ID NO: 57156 - RNA, 21 nt, Artificial Sequence
  Synthetic
aaaacuuccagugaagcucug

SEQ ID NO: 57157 - RNA, 22 nt, Artificial Sequence
  Synthetic
aaaaacuuccagugaagcucug

SEQ ID NO: 57158 - RNA, 24 nt, Artificial Sequence
  Synthetic
agaaaaacuuccagugaagcucug

SEQ ID NO: 57159 - RNA, 18 nt, Artificial Sequence
  Synthetic
uuucaaugguuggcucug

SEQ ID NO: 57160 - RNA, 19 nt, Artificial Sequence
  Synthetic
cuuucaaugguuggcucug

SEQ ID NO: 57161 - RNA, 20 nt, Artificial Sequence
  Synthetic
acuuucaaugguuggcucug

SEQ ID NO: 57162 - RNA, 21 nt, Artificial Sequence
  Synthetic
uacuuucaaugguuggcucug

SEQ ID NO: 57163 - RNA, 22 nt, Artificial Sequence
  Synthetic
uuacuuucaaugguuggcucug

SEQ ID NO: 57164 - RNA, 23 nt, Artificial Sequence
  Synthetic
cuuacuuucaaugguuggcucug

SEQ ID NO: 57165 - RNA, 24 nt, Artificial Sequence
  Synthetic
ucuuacuuucaaugguuggcucug

SEQ ID NO: 57166 - RNA, 18 nt, Artificial Sequence
  Synthetic
aaaggucaaacugcucug

SEQ ID NO: 57167 - RNA, 19 nt, Artificial Sequence
  Synthetic
aaaaggucaaacugcucug

SEQ ID NO: 57168 - RNA, 20 nt, Artificial Sequence
  Synthetic
uaaaaggucaaacugcucug

SEQ ID NO: 57169 - RNA, 21 nt, Artificial Sequence
  Synthetic
auaaaaggucaaacugcucug

SEQ ID NO: 57170 - RNA, 24 nt, Artificial Sequence
  Synthetic
aggauaaaaggucaaacugcucug

SEQ ID NO: 57171 - RNA, 18 nt, Artificial Sequence
  Synthetic
cuccauccaugaucucug

SEQ ID NO: 57172 - RNA, 20 nt, Artificial Sequence
  Synthetic
agcuccauccaugaucucug

SEQ ID NO: 57173 - RNA, 21 nt, Artificial Sequence
  Synthetic
cagcuccauccaugaucucug

SEQ ID NO: 57174 - RNA, 23 nt, Artificial Sequence
  Synthetic
ugcagcuccauccaugaucucug

SEQ ID NO: 57175 - RNA, 24 nt, Artificial Sequence
  Synthetic
cugcagcuccauccaugaucucug

SEQ ID NO: 57176 - RNA, 20 nt, Artificial Sequence
  Synthetic
ugguacccggcagcucucug

SEQ ID NO: 57177 - RNA, 21 nt, Artificial Sequence
  Synthetic
cugguacccggcagcucucug

SEQ ID NO: 57178 - RNA, 23 nt, Artificial Sequence
  Synthetic
ugcugguacccggcagcucucug

SEQ ID NO: 57179 - RNA, 24 nt, Artificial Sequence
  Synthetic
augcugguacccggcagcucucug

SEQ ID NO: 57180 - RNA, 18 nt, Artificial Sequence
  Synthetic
aagggaaagcucucucug

SEQ ID NO: 57181 - RNA, 19 nt, Artificial Sequence
  Synthetic
aaagggaaagcucucucug

SEQ ID NO: 57182 - RNA, 21 nt, Artificial Sequence
  Synthetic
agaaagggaaagcucucucug

SEQ ID NO: 57183 - RNA, 22 nt, Artificial Sequence
  Synthetic
aagaaagggaaagcucucucug

SEQ ID NO: 57184 - RNA, 24 nt, Artificial Sequence
  Synthetic
ugaagaaagggaaagcucucucug

SEQ ID NO: 57185 - RNA, 18 nt, Artificial Sequence
  Synthetic
ccagcuguguucucucug

SEQ ID NO: 57186 - RNA, 19 nt, Artificial Sequence
  Synthetic
uccagcuguguucucucug

SEQ ID NO: 57187 - RNA, 20 nt, Artificial Sequence
  Synthetic
uuccagcuguguucucucug

SEQ ID NO: 57188 - RNA, 21 nt, Artificial Sequence
  Synthetic
uuuccagcuguguucucucug

SEQ ID NO: 57189 - RNA, 22 nt, Artificial Sequence
  Synthetic
uuuuccagcuguguucucucug

SEQ ID NO: 57190 - RNA, 23 nt, Artificial Sequence
  Synthetic
cuuuuccagcuguguucucucug

SEQ ID NO: 57191 - RNA, 24 nt, Artificial Sequence
  Synthetic
ucuuuuccagcuguguucucucug

SEQ ID NO: 57192 - RNA, 18 nt, Artificial Sequence
  Synthetic
uauugauacaggucucug

SEQ ID NO: 57193 - RNA, 19 nt, Artificial Sequence
  Synthetic
uuauugauacaggucucug

SEQ ID NO: 57194 - RNA, 21 nt, Artificial Sequence
  Synthetic
uguuauugauacaggucucug

SEQ ID NO: 57195 - RNA, 22 nt, Artificial Sequence
  Synthetic
auguuauugauacaggucucug

SEQ ID NO: 57196 - RNA, 23 nt, Artificial Sequence
  Synthetic
uauguuauugauacaggucucug

SEQ ID NO: 57197 - RNA, 24 nt, Artificial Sequence
  Synthetic
uuauguuauugauacaggucucug

SEQ ID NO: 57198 - RNA, 18 nt, Artificial Sequence
  Synthetic
ugaaucuuccauucucug

SEQ ID NO: 57199 - RNA, 20 nt, Artificial Sequence
  Synthetic
ugugaaucuuccauucucug

SEQ ID NO: 57200 - RNA, 21 nt, Artificial Sequence
  Synthetic
augugaaucuuccauucucug

SEQ ID NO: 57201 - RNA, 22 nt, Artificial Sequence
  Synthetic
uaugugaaucuuccauucucug

SEQ ID NO: 57202 - RNA, 23 nt, Artificial Sequence
  Synthetic
cuaugugaaucuuccauucucug

SEQ ID NO: 57203 - RNA, 24 nt, Artificial Sequence
  Synthetic
acuaugugaaucuuccauucucug

SEQ ID NO: 57204 - RNA, 21 nt, Artificial Sequence
  Synthetic
uuuauuuugcuucauucucug

SEQ ID NO: 57205 - RNA, 22 nt, Artificial Sequence
  Synthetic
uuuuauuuugcuucauucucug

SEQ ID NO: 57206 - RNA, 23 nt, Artificial Sequence
  Synthetic
uuuuuauuuugcuucauucucug

SEQ ID NO: 57207 - RNA, 24 nt, Artificial Sequence
  Synthetic
cuuuuuauuuugcuucauucucug

SEQ ID NO: 57208 - RNA, 18 nt, Artificial Sequence
  Synthetic
uggagagagguaagucug

SEQ ID NO: 57209 - RNA, 19 nt, Artificial Sequence
  Synthetic
auggagagagguaagucug

SEQ ID NO: 57210 - RNA, 20 nt, Artificial Sequence
  Synthetic
aauggagagagguaagucug

SEQ ID NO: 57211 - RNA, 22 nt, Artificial Sequence
  Synthetic
agaauggagagagguaagucug

SEQ ID NO: 57212 - RNA, 23 nt, Artificial Sequence
  Synthetic
aagaauggagagagguaagucug

SEQ ID NO: 57213 - RNA, 24 nt, Artificial Sequence
  Synthetic
aaagaauggagagagguaagucug

SEQ ID NO: 57214 - RNA, 18 nt, Artificial Sequence
  Synthetic
aaucuaaaaaacagucug

SEQ ID NO: 57215 - RNA, 20 nt, Artificial Sequence
  Synthetic
ugaaucuaaaaaacagucug

SEQ ID NO: 57216 - RNA, 21 nt, Artificial Sequence
  Synthetic
augaaucuaaaaaacagucug

SEQ ID NO: 57217 - RNA, 22 nt, Artificial Sequence
  Synthetic
uaugaaucuaaaaaacagucug

SEQ ID NO: 57218 - RNA, 23 nt, Artificial Sequence
  Synthetic
auaugaaucuaaaaaacagucug

SEQ ID NO: 57219 - RNA, 24 nt, Artificial Sequence
  Synthetic
cauaugaaucuaaaaaacagucug

SEQ ID NO: 57220 - RNA, 18 nt, Artificial Sequence
  Synthetic
auaauugcacacagucug

SEQ ID NO: 57221 - RNA, 19 nt, Artificial Sequence
  Synthetic
uauaauugcacacagucug

SEQ ID NO: 57222 - RNA, 20 nt, Artificial Sequence
  Synthetic
uuauaauugcacacagucug

SEQ ID NO: 57223 - RNA, 21 nt, Artificial Sequence
  Synthetic
uuuauaauugcacacagucug

SEQ ID NO: 57224 - RNA, 22 nt, Artificial Sequence
  Synthetic
auuuauaauugcacacagucug

SEQ ID NO: 57225 - RNA, 23 nt, Artificial Sequence
  Synthetic
cauuuauaauugcacacagucug

SEQ ID NO: 57226 - RNA, 24 nt, Artificial Sequence
  Synthetic
ccauuuauaauugcacacagucug

SEQ ID NO: 57227 - RNA, 19 nt, Artificial Sequence
  Synthetic
ugguucaaaggagagucug

SEQ ID NO: 57228 - RNA, 20 nt, Artificial Sequence
  Synthetic
uugguucaaaggagagucug

SEQ ID NO: 57229 - RNA, 18 nt, Artificial Sequence
  Synthetic
agaauagucaaaggucug

SEQ ID NO: 57230 - RNA, 21 nt, Artificial Sequence
  Synthetic
uggagaauagucaaaggucug

SEQ ID NO: 57231 - RNA, 22 nt, Artificial Sequence
  Synthetic
auggagaauagucaaaggucug

SEQ ID NO: 57232 - RNA, 18 nt, Artificial Sequence
  Synthetic
aaguaaucggugggucug

SEQ ID NO: 57233 - RNA, 19 nt, Artificial Sequence
  Synthetic
caaguaaucggugggucug

SEQ ID NO: 57234 - RNA, 21 nt, Artificial Sequence
  Synthetic
ugcaaguaaucggugggucug

SEQ ID NO: 57235 - RNA, 23 nt, Artificial Sequence
  Synthetic
ugugcaaguaaucggugggucug

SEQ ID NO: 57236 - RNA, 24 nt, Artificial Sequence
  Synthetic
cugugcaaguaaucggugggucug

SEQ ID NO: 57237 - RNA, 18 nt, Artificial Sequence
  Synthetic
auauucacagauggucug

SEQ ID NO: 57238 - RNA, 20 nt, Artificial Sequence
  Synthetic
agauauucacagauggucug

SEQ ID NO: 57239 - RNA, 21 nt, Artificial Sequence
  Synthetic
cagauauucacagauggucug

SEQ ID NO: 57240 - RNA, 22 nt, Artificial Sequence
  Synthetic
ccagauauucacagauggucug

SEQ ID NO: 57241 - RNA, 23 nt, Artificial Sequence
  Synthetic
accagauauucacagauggucug

SEQ ID NO: 57242 - RNA, 24 nt, Artificial Sequence
  Synthetic
aaccagauauucacagauggucug

SEQ ID NO: 57243 - RNA, 18 nt, Artificial Sequence
  Synthetic
ucagucuuauuaugucug

SEQ ID NO: 57244 - RNA, 20 nt, Artificial Sequence
  Synthetic
agucagucuuauuaugucug

SEQ ID NO: 57245 - RNA, 22 nt, Artificial Sequence
  Synthetic
agagucagucuuauuaugucug

SEQ ID NO: 57246 - RNA, 23 nt, Artificial Sequence
  Synthetic
cagagucagucuuauuaugucug

SEQ ID NO: 57247 - RNA, 24 nt, Artificial Sequence
  Synthetic
ucagagucagucuuauuaugucug

SEQ ID NO: 57248 - RNA, 18 nt, Artificial Sequence
  Synthetic
aucagaaggaugugucug

SEQ ID NO: 57249 - RNA, 19 nt, Artificial Sequence
  Synthetic
uaucagaaggaugugucug

SEQ ID NO: 57250 - RNA, 21 nt, Artificial Sequence
  Synthetic
uguaucagaaggaugugucug

SEQ ID NO: 57251 - RNA, 22 nt, Artificial Sequence
  Synthetic
uuguaucagaaggaugugucug

SEQ ID NO: 57252 - RNA, 23 nt, Artificial Sequence
  Synthetic
auuguaucagaaggaugugucug

SEQ ID NO: 57253 - RNA, 24 nt, Artificial Sequence
  Synthetic
aauuguaucagaaggaugugucug

SEQ ID NO: 57254 - RNA, 18 nt, Artificial Sequence
  Synthetic
ugaauacaguugugucug

SEQ ID NO: 57255 - RNA, 19 nt, Artificial Sequence
  Synthetic
augaauacaguugugucug

SEQ ID NO: 57256 - RNA, 20 nt, Artificial Sequence
  Synthetic
aaugaauacaguugugucug

SEQ ID NO: 57257 - RNA, 21 nt, Artificial Sequence
  Synthetic
aaaugaauacaguugugucug

SEQ ID NO: 57258 - RNA, 22 nt, Artificial Sequence
  Synthetic
caaaugaauacaguugugucug

SEQ ID NO: 57259 - RNA, 23 nt, Artificial Sequence
  Synthetic
acaaaugaauacaguugugucug

SEQ ID NO: 57260 - RNA, 24 nt, Artificial Sequence
  Synthetic
cacaaaugaauacaguugugucug

SEQ ID NO: 57261 - RNA, 18 nt, Artificial Sequence
  Synthetic
uuaaaggacccaauucug

SEQ ID NO: 57262 - RNA, 19 nt, Artificial Sequence
  Synthetic
uuuaaaggacccaauucug

SEQ ID NO: 57263 - RNA, 20 nt, Artificial Sequence
  Synthetic
uuuuaaaggacccaauucug

SEQ ID NO: 57264 - RNA, 21 nt, Artificial Sequence
  Synthetic
uuuuuaaaggacccaauucug

SEQ ID NO: 57265 - RNA, 22 nt, Artificial Sequence
  Synthetic
cuuuuuaaaggacccaauucug

SEQ ID NO: 57266 - RNA, 23 nt, Artificial Sequence
  Synthetic
acuuuuuaaaggacccaauucug

SEQ ID NO: 57267 - RNA, 24 nt, Artificial Sequence
  Synthetic
cacuuuuuaaaggacccaauucug

SEQ ID NO: 57268 - RNA, 18 nt, Artificial Sequence
  Synthetic
caagaggcaggaauucug

SEQ ID NO: 57269 - RNA, 19 nt, Artificial Sequence
  Synthetic
ucaagaggcaggaauucug

SEQ ID NO: 57270 - RNA, 20 nt, Artificial Sequence
  Synthetic
uucaagaggcaggaauucug

SEQ ID NO: 57271 - RNA, 21 nt, Artificial Sequence
  Synthetic
uuucaagaggcaggaauucug

SEQ ID NO: 57272 - RNA, 22 nt, Artificial Sequence
  Synthetic
uuuucaagaggcaggaauucug

SEQ ID NO: 57273 - RNA, 23 nt, Artificial Sequence
  Synthetic
auuuucaagaggcaggaauucug

SEQ ID NO: 57274 - RNA, 24 nt, Artificial Sequence
  Synthetic
aauuuucaagaggcaggaauucug

SEQ ID NO: 57275 - RNA, 18 nt, Artificial Sequence
  Synthetic
aaacuauguaacauucug

SEQ ID NO: 57276 - RNA, 19 nt, Artificial Sequence
  Synthetic
aaaacuauguaacauucug

SEQ ID NO: 57277 - RNA, 20 nt, Artificial Sequence
  Synthetic
caaaacuauguaacauucug

SEQ ID NO: 57278 - RNA, 18 nt, Artificial Sequence
  Synthetic
aggucccaacucauucug

SEQ ID NO: 57279 - RNA, 19 nt, Artificial Sequence
  Synthetic
aaggucccaacucauucug

SEQ ID NO: 57280 - RNA, 22 nt, Artificial Sequence
  Synthetic
aggaaggucccaacucauucug

SEQ ID NO: 57281 - RNA, 23 nt, Artificial Sequence
  Synthetic
caggaaggucccaacucauucug

SEQ ID NO: 57282 - RNA, 24 nt, Artificial Sequence
  Synthetic
ucaggaaggucccaacucauucug

SEQ ID NO: 57283 - RNA, 22 nt, Artificial Sequence
  Synthetic
uguuaauuuuguucauauucug

SEQ ID NO: 57284 - RNA, 24 nt, Artificial Sequence
  Synthetic
uguguuaauuuuguucauauucug

SEQ ID NO: 57285 - RNA, 18 nt, Artificial Sequence
  Synthetic
uuugcauaaauuauucug

SEQ ID NO: 57286 - RNA, 19 nt, Artificial Sequence
  Synthetic
uuuugcauaaauuauucug

SEQ ID NO: 57287 - RNA, 20 nt, Artificial Sequence
  Synthetic
uuuuugcauaaauuauucug

SEQ ID NO: 57288 - RNA, 21 nt, Artificial Sequence
  Synthetic
uuuuuugcauaaauuauucug

SEQ ID NO: 57289 - RNA, 22 nt, Artificial Sequence
  Synthetic
auuuuuugcauaaauuauucug

SEQ ID NO: 57290 - RNA, 23 nt, Artificial Sequence
  Synthetic
aauuuuuugcauaaauuauucug

SEQ ID NO: 57291 - RNA, 24 nt, Artificial Sequence
  Synthetic
caauuuuuugcauaaauuauucug

SEQ ID NO: 57292 - RNA, 18 nt, Artificial Sequence
  Synthetic
acacagcuauuuauucug

SEQ ID NO: 57293 - RNA, 19 nt, Artificial Sequence
  Synthetic
uacacagcuauuuauucug

SEQ ID NO: 57294 - RNA, 20 nt, Artificial Sequence
  Synthetic
cuacacagcuauuuauucug

SEQ ID NO: 57295 - RNA, 21 nt, Artificial Sequence
  Synthetic
ucuacacagcuauuuauucug

SEQ ID NO: 57296 - RNA, 22 nt, Artificial Sequence
  Synthetic
uucuacacagcuauuuauucug

SEQ ID NO: 57297 - RNA, 23 nt, Artificial Sequence
  Synthetic
cuucuacacagcuauuuauucug

SEQ ID NO: 57298 - RNA, 24 nt, Artificial Sequence
  Synthetic
ucuucuacacagcuauuuauucug

SEQ ID NO: 57299 - RNA, 18 nt, Artificial Sequence
  Synthetic
ucuuaauuucuacuucug

SEQ ID NO: 57300 - RNA, 19 nt, Artificial Sequence
  Synthetic
cucuuaauuucuacuucug

SEQ ID NO: 57301 - RNA, 20 nt, Artificial Sequence
  Synthetic
ucucuuaauuucuacuucug

SEQ ID NO: 57302 - RNA, 21 nt, Artificial Sequence
  Synthetic
uucucuuaauuucuacuucug

SEQ ID NO: 57303 - RNA, 22 nt, Artificial Sequence
  Synthetic
uuucucuuaauuucuacuucug

SEQ ID NO: 57304 - RNA, 23 nt, Artificial Sequence
  Synthetic
auuucucuuaauuucuacuucug

SEQ ID NO: 57305 - RNA, 24 nt, Artificial Sequence
  Synthetic
aauuucucuuaauuucuacuucug

SEQ ID NO: 57306 - RNA, 18 nt, Artificial Sequence
  Synthetic
uguggucuacagcuucug

SEQ ID NO: 57307 - RNA, 19 nt, Artificial Sequence
  Synthetic
auguggucuacagcuucug

SEQ ID NO: 57308 - RNA, 20 nt, Artificial Sequence
  Synthetic
aauguggucuacagcuucug

SEQ ID NO: 57309 - RNA, 21 nt, Artificial Sequence
  Synthetic
caauguggucuacagcuucug

SEQ ID NO: 57310 - RNA, 22 nt, Artificial Sequence
  Synthetic
ccaauguggucuacagcuucug

SEQ ID NO: 57311 - RNA, 23 nt, Artificial Sequence
  Synthetic
accaauguggucuacagcuucug

SEQ ID NO: 57312 - RNA, 24 nt, Artificial Sequence
  Synthetic
uaccaauguggucuacagcuucug

SEQ ID NO: 57313 - RNA, 18 nt, Artificial Sequence
  Synthetic
ucccugagugagcuucug

SEQ ID NO: 57314 - RNA, 20 nt, Artificial Sequence
  Synthetic
ugucccugagugagcuucug

SEQ ID NO: 57315 - RNA, 21 nt, Artificial Sequence
  Synthetic
cugucccugagugagcuucug

SEQ ID NO: 57316 - RNA, 23 nt, Artificial Sequence
  Synthetic
ugcugucccugagugagcuucug

SEQ ID NO: 57317 - RNA, 24 nt, Artificial Sequence
  Synthetic
augcugucccugagugagcuucug

SEQ ID NO: 57318 - RNA, 21 nt, Artificial Sequence
  Synthetic
cauuauaaaaauugucuucug

SEQ ID NO: 57319 - RNA, 22 nt, Artificial Sequence
  Synthetic
ccauuauaaaaauugucuucug

SEQ ID NO: 57320 - RNA, 23 nt, Artificial Sequence
  Synthetic
cccauuauaaaaauugucuucug

SEQ ID NO: 57321 - RNA, 24 nt, Artificial Sequence
  Synthetic
ccccauuauaaaaauugucuucug

SEQ ID NO: 57322 - RNA, 21 nt, Artificial Sequence
  Synthetic
uauccugccuucuuucuucug

SEQ ID NO: 57323 - RNA, 22 nt, Artificial Sequence
  Synthetic
uuauccugccuucuuucuucug

SEQ ID NO: 57324 - RNA, 24 nt, Artificial Sequence
  Synthetic
aguuauccugccuucuuucuucug

SEQ ID NO: 57325 - RNA, 18 nt, Artificial Sequence
  Synthetic
cuuaaagaucagguucug

SEQ ID NO: 57326 - RNA, 19 nt, Artificial Sequence
  Synthetic
ucuuaaagaucagguucug

SEQ ID NO: 57327 - RNA, 20 nt, Artificial Sequence
  Synthetic
uucuuaaagaucagguucug

SEQ ID NO: 57328 - RNA, 21 nt, Artificial Sequence
  Synthetic
cuucuuaaagaucagguucug

SEQ ID NO: 57329 - RNA, 22 nt, Artificial Sequence
  Synthetic
acuucuuaaagaucagguucug

SEQ ID NO: 57330 - RNA, 23 nt, Artificial Sequence
  Synthetic
aacuucuuaaagaucagguucug

SEQ ID NO: 57331 - RNA, 24 nt, Artificial Sequence
  Synthetic
uaacuucuuaaagaucagguucug

SEQ ID NO: 57332 - RNA, 18 nt, Artificial Sequence
  Synthetic
uuuuaguuuaauguucug

SEQ ID NO: 57333 - RNA, 19 nt, Artificial Sequence
  Synthetic
uuuuuaguuuaauguucug

SEQ ID NO: 57334 - RNA, 22 nt, Artificial Sequence
  Synthetic
ugguuuuuaguuuaauguucug

SEQ ID NO: 57335 - RNA, 23 nt, Artificial Sequence
  Synthetic
augguuuuuaguuuaauguucug

SEQ ID NO: 57336 - RNA, 24 nt, Artificial Sequence
  Synthetic
aaugguuuuuaguuuaauguucug

SEQ ID NO: 57337 - RNA, 18 nt, Artificial Sequence
  Synthetic
aauaacuaugcauuucug

SEQ ID NO: 57338 - RNA, 19 nt, Artificial Sequence
  Synthetic
uaauaacuaugcauuucug

SEQ ID NO: 57339 - RNA, 20 nt, Artificial Sequence
  Synthetic
uuaauaacuaugcauuucug

SEQ ID NO: 57340 - RNA, 21 nt, Artificial Sequence
  Synthetic
auuaauaacuaugcauuucug

SEQ ID NO: 57341 - RNA, 22 nt, Artificial Sequence
  Synthetic
uauuaauaacuaugcauuucug

SEQ ID NO: 57342 - RNA, 23 nt, Artificial Sequence
  Synthetic
auauuaauaacuaugcauuucug

SEQ ID NO: 57343 - RNA, 24 nt, Artificial Sequence
  Synthetic
uauauuaauaacuaugcauuucug

SEQ ID NO: 57344 - RNA, 21 nt, Artificial Sequence
  Synthetic
ugucuuuuguauauauuucug

SEQ ID NO: 57345 - RNA, 22 nt, Artificial Sequence
  Synthetic
uugucuuuuguauauauuucug

SEQ ID NO: 57346 - RNA, 23 nt, Artificial Sequence
  Synthetic
auugucuuuuguauauauuucug

SEQ ID NO: 57347 - RNA, 24 nt, Artificial Sequence
  Synthetic
aauugucuuuuguauauauuucug

SEQ ID NO: 57348 - RNA, 18 nt, Artificial Sequence
  Synthetic
uaguguccacauuuucug

SEQ ID NO: 57349 - RNA, 19 nt, Artificial Sequence
  Synthetic
auaguguccacauuuucug

SEQ ID NO: 57350 - RNA, 21 nt, Artificial Sequence
  Synthetic
agauaguguccacauuuucug

SEQ ID NO: 57351 - RNA, 23 nt, Artificial Sequence
  Synthetic
agagauaguguccacauuuucug

SEQ ID NO: 57352 - RNA, 24 nt, Artificial Sequence
  Synthetic
uagagauaguguccacauuuucug

SEQ ID NO: 57353 - RNA, 18 nt, Artificial Sequence
  Synthetic
aacuugaccucuuuucug

SEQ ID NO: 57354 - RNA, 19 nt, Artificial Sequence
  Synthetic
aaacuugaccucuuuucug

SEQ ID NO: 57355 - RNA, 21 nt, Artificial Sequence
  Synthetic
ugaaacuugaccucuuuucug

SEQ ID NO: 57356 - RNA, 22 nt, Artificial Sequence
  Synthetic
uugaaacuugaccucuuuucug

SEQ ID NO: 57357 - RNA, 23 nt, Artificial Sequence
  Synthetic
uuugaaacuugaccucuuuucug

SEQ ID NO: 57358 - RNA, 24 nt, Artificial Sequence
  Synthetic
uuuugaaacuugaccucuuuucug

SEQ ID NO: 57359 - RNA, 18 nt, Artificial Sequence
  Synthetic
uggacauaauguuuucug

SEQ ID NO: 57360 - RNA, 19 nt, Artificial Sequence
  Synthetic
uuggacauaauguuuucug

SEQ ID NO: 57361 - RNA, 20 nt, Artificial Sequence
  Synthetic
cuuggacauaauguuuucug

SEQ ID NO: 57362 - RNA, 21 nt, Artificial Sequence
  Synthetic
ucuuggacauaauguuuucug

SEQ ID NO: 57363 - RNA, 22 nt, Artificial Sequence
  Synthetic
aucuuggacauaauguuuucug

SEQ ID NO: 57364 - RNA, 23 nt, Artificial Sequence
  Synthetic
aaucuuggacauaauguuuucug

SEQ ID NO: 57365 - RNA, 24 nt, Artificial Sequence
  Synthetic
aaaucuuggacauaauguuuucug

SEQ ID NO: 57366 - RNA, 21 nt, Artificial Sequence
  Synthetic
cucuucucuuuaauuuuucug

SEQ ID NO: 57367 - RNA, 22 nt, Artificial Sequence
  Synthetic
ucucuucucuuuaauuuuucug

SEQ ID NO: 57368 - RNA, 23 nt, Artificial Sequence
  Synthetic
uucucuucucuuuaauuuuucug

SEQ ID NO: 57369 - RNA, 18 nt, Artificial Sequence
  Synthetic
caucccaauucaaaagug

SEQ ID NO: 57370 - RNA, 19 nt, Artificial Sequence
  Synthetic
ucaucccaauucaaaagug

SEQ ID NO: 57371 - RNA, 20 nt, Artificial Sequence
  Synthetic
cucaucccaauucaaaagug

SEQ ID NO: 57372 - RNA, 21 nt, Artificial Sequence
  Synthetic
ucucaucccaauucaaaagug

SEQ ID NO: 57373 - RNA, 22 nt, Artificial Sequence
  Synthetic
cucucaucccaauucaaaagug

SEQ ID NO: 57374 - RNA, 23 nt, Artificial Sequence
  Synthetic
ucucucaucccaauucaaaagug

SEQ ID NO: 57375 - RNA, 24 nt, Artificial Sequence
  Synthetic
uucucucaucccaauucaaaagug

SEQ ID NO: 57376 - RNA, 19 nt, Artificial Sequence
  Synthetic
ugcgaggaucugaaaagug

SEQ ID NO: 57377 - RNA, 21 nt, Artificial Sequence
  Synthetic
agugcgaggaucugaaaagug

SEQ ID NO: 57378 - RNA, 22 nt, Artificial Sequence
  Synthetic
uagugcgaggaucugaaaagug

SEQ ID NO: 57379 - RNA, 23 nt, Artificial Sequence
  Synthetic
auagugcgaggaucugaaaagug

SEQ ID NO: 57380 - RNA, 24 nt, Artificial Sequence
  Synthetic
aauagugcgaggaucugaaaagug

SEQ ID NO: 57381 - RNA, 18 nt, Artificial Sequence
  Synthetic
ucuucauagcuaaaagug

SEQ ID NO: 57382 - RNA, 19 nt, Artificial Sequence
  Synthetic
cucuucauagcuaaaagug

SEQ ID NO: 57383 - RNA, 20 nt, Artificial Sequence
  Synthetic
ucucuucauagcuaaaagug

SEQ ID NO: 57384 - RNA, 21 nt, Artificial Sequence
  Synthetic
cucucuucauagcuaaaagug

SEQ ID NO: 57385 - RNA, 22 nt, Artificial Sequence
  Synthetic
acucucuucauagcuaaaagug

SEQ ID NO: 57386 - RNA, 23 nt, Artificial Sequence
  Synthetic
aacucucuucauagcuaaaagug

SEQ ID NO: 57387 - RNA, 24 nt, Artificial Sequence
  Synthetic
aaacucucuucauagcuaaaagug

SEQ ID NO: 57388 - RNA, 18 nt, Artificial Sequence
  Synthetic
ucgauagaagcuaaagug

SEQ ID NO: 57389 - RNA, 19 nt, Artificial Sequence
  Synthetic
cucgauagaagcuaaagug

SEQ ID NO: 57390 - RNA, 20 nt, Artificial Sequence
  Synthetic
ucucgauagaagcuaaagug

SEQ ID NO: 57391 - RNA, 21 nt, Artificial Sequence
  Synthetic
cucucgauagaagcuaaagug

SEQ ID NO: 57392 - RNA, 22 nt, Artificial Sequence
  Synthetic
ucucucgauagaagcuaaagug

SEQ ID NO: 57393 - RNA, 24 nt, Artificial Sequence
  Synthetic
agucucucgauagaagcuaaagug

SEQ ID NO: 57394 - RNA, 18 nt, Artificial Sequence
  Synthetic
acuuggaucaguaaagug

SEQ ID NO: 57395 - RNA, 19 nt, Artificial Sequence
  Synthetic
cacuuggaucaguaaagug

SEQ ID NO: 57396 - RNA, 20 nt, Artificial Sequence
  Synthetic
acacuuggaucaguaaagug

SEQ ID NO: 57397 - RNA, 21 nt, Artificial Sequence
  Synthetic
aacacuuggaucaguaaagug

SEQ ID NO: 57398 - RNA, 22 nt, Artificial Sequence
  Synthetic
aaacacuuggaucaguaaagug

SEQ ID NO: 57399 - RNA, 24 nt, Artificial Sequence
  Synthetic
agaaacacuuggaucaguaaagug

SEQ ID NO: 57400 - RNA, 18 nt, Artificial Sequence
  Synthetic
uuuuuaggggguaaagug

SEQ ID NO: 57401 - RNA, 21 nt, Artificial Sequence
  Synthetic
agguuuuuaggggguaaagug

SEQ ID NO: 57402 - RNA, 23 nt, Artificial Sequence
  Synthetic
ugagguuuuuaggggguaaagug

SEQ ID NO: 57403 - RNA, 24 nt, Artificial Sequence
  Synthetic
uugagguuuuuaggggguaaagug

SEQ ID NO: 57404 - RNA, 21 nt, Artificial Sequence
  Synthetic
uaccuuugaaaaauccaagug

SEQ ID NO: 57405 - RNA, 22 nt, Artificial Sequence
  Synthetic
auaccuuugaaaaauccaagug

SEQ ID NO: 57406 - RNA, 24 nt, Artificial Sequence
  Synthetic
agauaccuuugaaaaauccaagug

SEQ ID NO: 57407 - RNA, 18 nt, Artificial Sequence
  Synthetic
ugggauguauuucaagug

SEQ ID NO: 57408 - RNA, 21 nt, Artificial Sequence
  Synthetic
aggugggauguauuucaagug

SEQ ID NO: 57409 - RNA, 22 nt, Artificial Sequence
  Synthetic
aaggugggauguauuucaagug

SEQ ID NO: 57410 - RNA, 23 nt, Artificial Sequence
  Synthetic
aaaggugggauguauuucaagug

SEQ ID NO: 57411 - RNA, 22 nt, Artificial Sequence
  Synthetic
aggggagugaaaaagagaagug

SEQ ID NO: 57412 - RNA, 23 nt, Artificial Sequence
  Synthetic
aaggggagugaaaaagagaagug

SEQ ID NO: 57413 - RNA, 24 nt, Artificial Sequence
  Synthetic
aaaggggagugaaaaagagaagug

SEQ ID NO: 57414 - RNA, 18 nt, Artificial Sequence
  Synthetic
ucagauaagaaggaagug

SEQ ID NO: 57415 - RNA, 19 nt, Artificial Sequence
  Synthetic
cucagauaagaaggaagug

SEQ ID NO: 57416 - RNA, 20 nt, Artificial Sequence
  Synthetic
acucagauaagaaggaagug

SEQ ID NO: 57417 - RNA, 22 nt, Artificial Sequence
  Synthetic
agacucagauaagaaggaagug

SEQ ID NO: 57418 - RNA, 24 nt, Artificial Sequence
  Synthetic
ugagacucagauaagaaggaagug

SEQ ID NO: 57419 - RNA, 18 nt, Artificial Sequence
  Synthetic
uaguuaaauuaggaagug

SEQ ID NO: 57420 - RNA, 19 nt, Artificial Sequence
  Synthetic
auaguuaaauuaggaagug

SEQ ID NO: 57421 - RNA, 21 nt, Artificial Sequence
  Synthetic
ugauaguuaaauuaggaagug

SEQ ID NO: 57422 - RNA, 22 nt, Artificial Sequence
  Synthetic
augauaguuaaauuaggaagug

SEQ ID NO: 57423 - RNA, 24 nt, Artificial Sequence
  Synthetic
ugaugauaguuaaauuaggaagug

SEQ ID NO: 57424 - RNA, 18 nt, Artificial Sequence
  Synthetic
uaaauacaaaaugaagug

SEQ ID NO: 57425 - RNA, 19 nt, Artificial Sequence
  Synthetic
auaaauacaaaaugaagug

SEQ ID NO: 57426 - RNA, 20 nt, Artificial Sequence
  Synthetic
uauaaauacaaaaugaagug

SEQ ID NO: 57427 - RNA, 21 nt, Artificial Sequence
  Synthetic
auauaaauacaaaaugaagug

SEQ ID NO: 57428 - RNA, 24 nt, Artificial Sequence
  Synthetic
uggauauaaauacaaaaugaagug

SEQ ID NO: 57429 - RNA, 18 nt, Artificial Sequence
  Synthetic
caauaacucugugaagug

SEQ ID NO: 57430 - RNA, 20 nt, Artificial Sequence
  Synthetic
cgcaauaacucugugaagug

SEQ ID NO: 57431 - RNA, 21 nt, Artificial Sequence
  Synthetic
ccgcaauaacucugugaagug

SEQ ID NO: 57432 - RNA, 22 nt, Artificial Sequence
  Synthetic
accgcaauaacucugugaagug

SEQ ID NO: 57433 - RNA, 23 nt, Artificial Sequence
  Synthetic
uaccgcaauaacucugugaagug

SEQ ID NO: 57434 - RNA, 18 nt, Artificial Sequence
  Synthetic
cucuauuggauuuaagug

SEQ ID NO: 57435 - RNA, 19 nt, Artificial Sequence
  Synthetic
ccucuauuggauuuaagug

SEQ ID NO: 57436 - RNA, 20 nt, Artificial Sequence
  Synthetic
accucuauuggauuuaagug

SEQ ID NO: 57437 - RNA, 21 nt, Artificial Sequence
  Synthetic
uaccucuauuggauuuaagug

SEQ ID NO: 57438 - RNA, 22 nt, Artificial Sequence
  Synthetic
cuaccucuauuggauuuaagug

SEQ ID NO: 57439 - RNA, 23 nt, Artificial Sequence
  Synthetic
acuaccucuauuggauuuaagug

SEQ ID NO: 57440 - RNA, 24 nt, Artificial Sequence
  Synthetic
aacuaccucuauuggauuuaagug

SEQ ID NO: 57441 - RNA, 18 nt, Artificial Sequence
  Synthetic
ucuagcauaggaacagug

SEQ ID NO: 57442 - RNA, 19 nt, Artificial Sequence
  Synthetic
uucuagcauaggaacagug

SEQ ID NO: 57443 - RNA, 20 nt, Artificial Sequence
  Synthetic
cuucuagcauaggaacagug

SEQ ID NO: 57444 - RNA, 21 nt, Artificial Sequence
  Synthetic
acuucuagcauaggaacagug

SEQ ID NO: 57445 - RNA, 23 nt, Artificial Sequence
  Synthetic
ugacuucuagcauaggaacagug

SEQ ID NO: 57446 - RNA, 18 nt, Artificial Sequence
  Synthetic
caguuuuaaugcacagug

SEQ ID NO: 57447 - RNA, 19 nt, Artificial Sequence
  Synthetic
acaguuuuaaugcacagug

SEQ ID NO: 57448 - RNA, 20 nt, Artificial Sequence
  Synthetic
cacaguuuuaaugcacagug

SEQ ID NO: 57449 - RNA, 21 nt, Artificial Sequence
  Synthetic
ucacaguuuuaaugcacagug

SEQ ID NO: 57450 - RNA, 22 nt, Artificial Sequence
  Synthetic
cucacaguuuuaaugcacagug

SEQ ID NO: 57451 - RNA, 23 nt, Artificial Sequence
  Synthetic
acucacaguuuuaaugcacagug

SEQ ID NO: 57452 - RNA, 24 nt, Artificial Sequence
  Synthetic
aacucacaguuuuaaugcacagug

SEQ ID NO: 57453 - RNA, 18 nt, Artificial Sequence
  Synthetic
augugcaaauuuacagug

SEQ ID NO: 57454 - RNA, 20 nt, Artificial Sequence
  Synthetic
ugaugugcaaauuuacagug

SEQ ID NO: 57455 - RNA, 21 nt, Artificial Sequence
  Synthetic
uugaugugcaaauuuacagug

SEQ ID NO: 57456 - RNA, 22 nt, Artificial Sequence
  Synthetic
uuugaugugcaaauuuacagug

SEQ ID NO: 57457 - RNA, 23 nt, Artificial Sequence
  Synthetic
auuugaugugcaaauuuacagug

SEQ ID NO: 57458 - RNA, 24 nt, Artificial Sequence
  Synthetic
aauuugaugugcaaauuuacagug

SEQ ID NO: 57459 - RNA, 19 nt, Artificial Sequence
  Synthetic
ugcaccacuugcaccagug

SEQ ID NO: 57460 - RNA, 20 nt, Artificial Sequence
  Synthetic
cugcaccacuugcaccagug

SEQ ID NO: 57461 - RNA, 21 nt, Artificial Sequence
  Synthetic
ucugcaccacuugcaccagug

SEQ ID NO: 57462 - RNA, 22 nt, Artificial Sequence
  Synthetic
uucugcaccacuugcaccagug

SEQ ID NO: 57463 - RNA, 23 nt, Artificial Sequence
  Synthetic
uuucugcaccacuugcaccagug

SEQ ID NO: 57464 - RNA, 24 nt, Artificial Sequence
  Synthetic
auuucugcaccacuugcaccagug

SEQ ID NO: 57465 - RNA, 21 nt, Artificial Sequence
  Synthetic
uuauauauauauacuccagug

SEQ ID NO: 57466 - RNA, 22 nt, Artificial Sequence
  Synthetic
uuuauauauauauacuccagug

SEQ ID NO: 57467 - RNA, 23 nt, Artificial Sequence
  Synthetic
cuuuauauauauauacuccagug

SEQ ID NO: 57468 - RNA, 18 nt, Artificial Sequence
  Synthetic
ugcacugcacguccagug

SEQ ID NO: 57469 - RNA, 19 nt, Artificial Sequence
  Synthetic
cugcacugcacguccagug

SEQ ID NO: 57470 - RNA, 20 nt, Artificial Sequence
  Synthetic
ucugcacugcacguccagug

SEQ ID NO: 57471 - RNA, 21 nt, Artificial Sequence
  Synthetic
cucugcacugcacguccagug

SEQ ID NO: 57472 - RNA, 22 nt, Artificial Sequence
  Synthetic
ucucugcacugcacguccagug

SEQ ID NO: 57473 - RNA, 23 nt, Artificial Sequence
  Synthetic
cucucugcacugcacguccagug

SEQ ID NO: 57474 - RNA, 24 nt, Artificial Sequence
  Synthetic
ccucucugcacugcacguccagug

SEQ ID NO: 57475 - RNA, 18 nt, Artificial Sequence
  Synthetic
acuauccugaaagcagug

SEQ ID NO: 57476 - RNA, 19 nt, Artificial Sequence
  Synthetic
uacuauccugaaagcagug

SEQ ID NO: 57477 - RNA, 20 nt, Artificial Sequence
  Synthetic
auacuauccugaaagcagug

SEQ ID NO: 57478 - RNA, 21 nt, Artificial Sequence
  Synthetic
aauacuauccugaaagcagug

SEQ ID NO: 57479 - RNA, 22 nt, Artificial Sequence
  Synthetic
uaauacuauccugaaagcagug

SEQ ID NO: 57480 - RNA, 23 nt, Artificial Sequence
  Synthetic
uuaauacuauccugaaagcagug

SEQ ID NO: 57481 - RNA, 24 nt, Artificial Sequence
  Synthetic
uuuaauacuauccugaaagcagug

SEQ ID NO: 57482 - RNA, 18 nt, Artificial Sequence
  Synthetic
uugaauuguaaggcagug

SEQ ID NO: 57483 - RNA, 19 nt, Artificial Sequence
  Synthetic
uuugaauuguaaggcagug

SEQ ID NO: 57484 - RNA, 21 nt, Artificial Sequence
  Synthetic
aguuugaauuguaaggcagug

SEQ ID NO: 57485 - RNA, 24 nt, Artificial Sequence
  Synthetic
aggaguuugaauuguaaggcagug

SEQ ID NO: 57486 - RNA, 18 nt, Artificial Sequence
  Synthetic
uggaauuauccugcagug

SEQ ID NO: 57487 - RNA, 19 nt, Artificial Sequence
  Synthetic
cuggaauuauccugcagug

SEQ ID NO: 57488 - RNA, 20 nt, Artificial Sequence
  Synthetic
acuggaauuauccugcagug

SEQ ID NO: 57489 - RNA, 21 nt, Artificial Sequence
  Synthetic
cacuggaauuauccugcagug

SEQ ID NO: 57490 - RNA, 23 nt, Artificial Sequence
  Synthetic
ugcacuggaauuauccugcagug

SEQ ID NO: 57491 - RNA, 24 nt, Artificial Sequence
  Synthetic
uugcacuggaauuauccugcagug

SEQ ID NO: 57492 - RNA, 18 nt, Artificial Sequence
  Synthetic
uaaacaauuacaucagug

SEQ ID NO: 57493 - RNA, 20 nt, Artificial Sequence
  Synthetic
uguaaacaauuacaucagug

SEQ ID NO: 57494 - RNA, 21 nt, Artificial Sequence
  Synthetic
uuguaaacaauuacaucagug

SEQ ID NO: 57495 - RNA, 22 nt, Artificial Sequence
  Synthetic
auuguaaacaauuacaucagug

SEQ ID NO: 57496 - RNA, 23 nt, Artificial Sequence
  Synthetic
uauuguaaacaauuacaucagug

SEQ ID NO: 57497 - RNA, 24 nt, Artificial Sequence
  Synthetic
cuauuguaaacaauuacaucagug

SEQ ID NO: 57498 - RNA, 18 nt, Artificial Sequence
  Synthetic
aaaacauagccaucagug

SEQ ID NO: 57499 - RNA, 19 nt, Artificial Sequence
  Synthetic
aaaaacauagccaucagug

SEQ ID NO: 57500 - RNA, 20 nt, Artificial Sequence
  Synthetic
uaaaaacauagccaucagug

SEQ ID NO: 57501 - RNA, 21 nt, Artificial Sequence
  Synthetic
uuaaaaacauagccaucagug

SEQ ID NO: 57502 - RNA, 22 nt, Artificial Sequence
  Synthetic
auuaaaaacauagccaucagug

SEQ ID NO: 57503 - RNA, 23 nt, Artificial Sequence
  Synthetic
cauuaaaaacauagccaucagug

SEQ ID NO: 57504 - RNA, 24 nt, Artificial Sequence
  Synthetic
ccauuaaaaacauagccaucagug

SEQ ID NO: 57505 - RNA, 18 nt, Artificial Sequence
  Synthetic
aauuuucuuccaagagug

SEQ ID NO: 57506 - RNA, 19 nt, Artificial Sequence
  Synthetic
aaauuuucuuccaagagug

SEQ ID NO: 57507 - RNA, 20 nt, Artificial Sequence
  Synthetic
uaaauuuucuuccaagagug

SEQ ID NO: 57508 - RNA, 21 nt, Artificial Sequence
  Synthetic
cuaaauuuucuuccaagagug

SEQ ID NO: 57509 - RNA, 22 nt, Artificial Sequence
  Synthetic
ccuaaauuuucuuccaagagug

SEQ ID NO: 57510 - RNA, 18 nt, Artificial Sequence
  Synthetic
aaugggccuaagagagug

SEQ ID NO: 57511 - RNA, 21 nt, Artificial Sequence
  Synthetic
aggaaugggccuaagagagug

SEQ ID NO: 57512 - RNA, 22 nt, Artificial Sequence
  Synthetic
aaggaaugggccuaagagagug

SEQ ID NO: 57513 - RNA, 23 nt, Artificial Sequence
  Synthetic
uaaggaaugggccuaagagagug

SEQ ID NO: 57514 - RNA, 24 nt, Artificial Sequence
  Synthetic
uuaaggaaugggccuaagagagug

SEQ ID NO: 57515 - RNA, 18 nt, Artificial Sequence
  Synthetic
augugauaaaugcgagug

SEQ ID NO: 57516 - RNA, 19 nt, Artificial Sequence
  Synthetic
uaugugauaaaugcgagug

SEQ ID NO: 57517 - RNA, 20 nt, Artificial Sequence
  Synthetic
uuaugugauaaaugcgagug

SEQ ID NO: 57518 - RNA, 21 nt, Artificial Sequence
  Synthetic
cuuaugugauaaaugcgagug

SEQ ID NO: 57519 - RNA, 22 nt, Artificial Sequence
  Synthetic
ccuuaugugauaaaugcgagug

SEQ ID NO: 57520 - RNA, 23 nt, Artificial Sequence
  Synthetic
uccuuaugugauaaaugcgagug

SEQ ID NO: 57521 - RNA, 24 nt, Artificial Sequence
  Synthetic
uuccuuaugugauaaaugcgagug

SEQ ID NO: 57522 - RNA, 19 nt, Artificial Sequence
  Synthetic
uguacaaaaaugaugagug

SEQ ID NO: 57523 - RNA, 20 nt, Artificial Sequence
  Synthetic
uuguacaaaaaugaugagug

SEQ ID NO: 57524 - RNA, 21 nt, Artificial Sequence
  Synthetic
cuuguacaaaaaugaugagug

SEQ ID NO: 57525 - RNA, 22 nt, Artificial Sequence
  Synthetic
acuuguacaaaaaugaugagug

SEQ ID NO: 57526 - RNA, 24 nt, Artificial Sequence
  Synthetic
ugacuuguacaaaaaugaugagug

SEQ ID NO: 57527 - RNA, 18 nt, Artificial Sequence
  Synthetic
aacaggaaccuaugagug

SEQ ID NO: 57528 - RNA, 19 nt, Artificial Sequence
  Synthetic
aaacaggaaccuaugagug

SEQ ID NO: 57529 - RNA, 20 nt, Artificial Sequence
  Synthetic
caaacaggaaccuaugagug

SEQ ID NO: 57530 - RNA, 21 nt, Artificial Sequence
  Synthetic
ucaaacaggaaccuaugagug

SEQ ID NO: 57531 - RNA, 22 nt, Artificial Sequence
  Synthetic
uucaaacaggaaccuaugagug

SEQ ID NO: 57532 - RNA, 23 nt, Artificial Sequence
  Synthetic
uuucaaacaggaaccuaugagug

SEQ ID NO: 57533 - RNA, 24 nt, Artificial Sequence
  Synthetic
uuuucaaacaggaaccuaugagug

SEQ ID NO: 57534 - RNA, 18 nt, Artificial Sequence
  Synthetic
agaaaaccguguugagug

SEQ ID NO: 57535 - RNA, 19 nt, Artificial Sequence
  Synthetic
aagaaaaccguguugagug

SEQ ID NO: 57536 - RNA, 20 nt, Artificial Sequence
  Synthetic
uaagaaaaccguguugagug

SEQ ID NO: 57537 - RNA, 21 nt, Artificial Sequence
  Synthetic
auaagaaaaccguguugagug

SEQ ID NO: 57538 - RNA, 23 nt, Artificial Sequence
  Synthetic
ugauaagaaaaccguguugagug

SEQ ID NO: 57539 - RNA, 24 nt, Artificial Sequence
  Synthetic
augauaagaaaaccguguugagug

SEQ ID NO: 57540 - RNA, 18 nt, Artificial Sequence
  Synthetic
aauccacucaaaauagug

SEQ ID NO: 57541 - RNA, 19 nt, Artificial Sequence
  Synthetic
uaauccacucaaaauagug

SEQ ID NO: 57542 - RNA, 20 nt, Artificial Sequence
  Synthetic
cuaauccacucaaaauagug

SEQ ID NO: 57543 - RNA, 22 nt, Artificial Sequence
  Synthetic
agcuaauccacucaaaauagug

SEQ ID NO: 57544 - RNA, 23 nt, Artificial Sequence
  Synthetic
cagcuaauccacucaaaauagug

SEQ ID NO: 57545 - RNA, 24 nt, Artificial Sequence
  Synthetic
ucagcuaauccacucaaaauagug

SEQ ID NO: 57546 - RNA, 18 nt, Artificial Sequence
  Synthetic
uaagaucaggaaauagug

SEQ ID NO: 57547 - RNA, 19 nt, Artificial Sequence
  Synthetic
cuaagaucaggaaauagug

SEQ ID NO: 57548 - RNA, 20 nt, Artificial Sequence
  Synthetic
ccuaagaucaggaaauagug

SEQ ID NO: 57549 - RNA, 21 nt, Artificial Sequence
  Synthetic
cccuaagaucaggaaauagug

SEQ ID NO: 57550 - RNA, 22 nt, Artificial Sequence
  Synthetic
ccccuaagaucaggaaauagug

SEQ ID NO: 57551 - RNA, 23 nt, Artificial Sequence
  Synthetic
uccccuaagaucaggaaauagug

SEQ ID NO: 57552 - RNA, 24 nt, Artificial Sequence
  Synthetic
uuccccuaagaucaggaaauagug

SEQ ID NO: 57553 - RNA, 18 nt, Artificial Sequence
  Synthetic
aaggagcaaaucauagug

SEQ ID NO: 57554 - RNA, 19 nt, Artificial Sequence
  Synthetic
aaaggagcaaaucauagug

SEQ ID NO: 57555 - RNA, 20 nt, Artificial Sequence
  Synthetic
uaaaggagcaaaucauagug

SEQ ID NO: 57556 - RNA, 21 nt, Artificial Sequence
  Synthetic
uuaaaggagcaaaucauagug

SEQ ID NO: 57557 - RNA, 22 nt, Artificial Sequence
  Synthetic
uuuaaaggagcaaaucauagug

SEQ ID NO: 57558 - RNA, 23 nt, Artificial Sequence
  Synthetic
uuuuaaaggagcaaaucauagug

SEQ ID NO: 57559 - RNA, 19 nt, Artificial Sequence
  Synthetic
agaaucuuuaaugauagug

SEQ ID NO: 57560 - RNA, 20 nt, Artificial Sequence
  Synthetic
cagaaucuuuaaugauagug

SEQ ID NO: 57561 - RNA, 21 nt, Artificial Sequence
  Synthetic
acagaaucuuuaaugauagug

SEQ ID NO: 57562 - RNA, 23 nt, Artificial Sequence
  Synthetic
ugacagaaucuuuaaugauagug

SEQ ID NO: 57563 - RNA, 24 nt, Artificial Sequence
  Synthetic
uugacagaaucuuuaaugauagug

SEQ ID NO: 57564 - RNA, 18 nt, Artificial Sequence
  Synthetic
ccugauauggauauagug

SEQ ID NO: 57565 - RNA, 19 nt, Artificial Sequence
  Synthetic
uccugauauggauauagug

SEQ ID NO: 57566 - RNA, 20 nt, Artificial Sequence
  Synthetic
auccugauauggauauagug

SEQ ID NO: 57567 - RNA, 21 nt, Artificial Sequence
  Synthetic
aauccugauauggauauagug

SEQ ID NO: 57568 - RNA, 23 nt, Artificial Sequence
  Synthetic
ugaauccugauauggauauagug

SEQ ID NO: 57569 - RNA, 24 nt, Artificial Sequence
  Synthetic
augaauccugauauggauauagug

SEQ ID NO: 57570 - RNA, 18 nt, Artificial Sequence
  Synthetic
acuaggaggucccuagug

SEQ ID NO: 57571 - RNA, 19 nt, Artificial Sequence
  Synthetic
cacuaggaggucccuagug

SEQ ID NO: 57572 - RNA, 21 nt, Artificial Sequence
  Synthetic
ugcacuaggaggucccuagug

SEQ ID NO: 57573 - RNA, 22 nt, Artificial Sequence
  Synthetic
augcacuaggaggucccuagug

SEQ ID NO: 57574 - RNA, 23 nt, Artificial Sequence
  Synthetic
caugcacuaggaggucccuagug

SEQ ID NO: 57575 - RNA, 24 nt, Artificial Sequence
  Synthetic
ccaugcacuaggaggucccuagug

SEQ ID NO: 57576 - RNA, 18 nt, Artificial Sequence
  Synthetic
auaaaugaccuccuagug

SEQ ID NO: 57577 - RNA, 19 nt, Artificial Sequence
  Synthetic
aauaaaugaccuccuagug

SEQ ID NO: 57578 - RNA, 20 nt, Artificial Sequence
  Synthetic
aaauaaaugaccuccuagug

SEQ ID NO: 57579 - RNA, 21 nt, Artificial Sequence
  Synthetic
aaaauaaaugaccuccuagug

SEQ ID NO: 57580 - RNA, 23 nt, Artificial Sequence
  Synthetic
agaaaauaaaugaccuccuagug

SEQ ID NO: 57581 - RNA, 24 nt, Artificial Sequence
  Synthetic
aagaaaauaaaugaccuccuagug

SEQ ID NO: 57582 - RNA, 18 nt, Artificial Sequence
  Synthetic
agacccugccugcuagug

SEQ ID NO: 57583 - RNA, 19 nt, Artificial Sequence
  Synthetic
cagacccugccugcuagug

SEQ ID NO: 57584 - RNA, 20 nt, Artificial Sequence
  Synthetic
ucagacccugccugcuagug

SEQ ID NO: 57585 - RNA, 21 nt, Artificial Sequence
  Synthetic
cucagacccugccugcuagug

SEQ ID NO: 57586 - RNA, 22 nt, Artificial Sequence
  Synthetic
ucucagacccugccugcuagug

SEQ ID NO: 57587 - RNA, 23 nt, Artificial Sequence
  Synthetic
aucucagacccugccugcuagug

SEQ ID NO: 57588 - RNA, 24 nt, Artificial Sequence
  Synthetic
aaucucagacccugccugcuagug

SEQ ID NO: 57589 - RNA, 18 nt, Artificial Sequence
  Synthetic
aaugaggagauucuagug

SEQ ID NO: 57590 - RNA, 19 nt, Artificial Sequence
  Synthetic
aaaugaggagauucuagug

SEQ ID NO: 57591 - RNA, 20 nt, Artificial Sequence
  Synthetic
aaaaugaggagauucuagug

SEQ ID NO: 57592 - RNA, 21 nt, Artificial Sequence
  Synthetic
uaaaaugaggagauucuagug

SEQ ID NO: 57593 - RNA, 22 nt, Artificial Sequence
  Synthetic
auaaaaugaggagauucuagug

SEQ ID NO: 57594 - RNA, 23 nt, Artificial Sequence
  Synthetic
cauaaaaugaggagauucuagug

SEQ ID NO: 57595 - RNA, 18 nt, Artificial Sequence
  Synthetic
cagagugggaagguagug

SEQ ID NO: 57596 - RNA, 23 nt, Artificial Sequence
  Synthetic
aggggcagagugggaagguagug

SEQ ID NO: 57597 - RNA, 24 nt, Artificial Sequence
  Synthetic
aaggggcagagugggaagguagug

SEQ ID NO: 57598 - RNA, 21 nt, Artificial Sequence
  Synthetic
ccaaaaucacauuauuuagug

SEQ ID NO: 57599 - RNA, 22 nt, Artificial Sequence
  Synthetic
accaaaaucacauuauuuagug

SEQ ID NO: 57600 - RNA, 24 nt, Artificial Sequence
  Synthetic
ugaccaaaaucacauuauuuagug

SEQ ID NO: 57601 - RNA, 18 nt, Artificial Sequence
  Synthetic
ccuggcuacuguuuagug

SEQ ID NO: 57602 - RNA, 20 nt, Artificial Sequence
  Synthetic
cgccuggcuacuguuuagug

SEQ ID NO: 57603 - RNA, 21 nt, Artificial Sequence
  Synthetic
acgccuggcuacuguuuagug

SEQ ID NO: 57604 - RNA, 22 nt, Artificial Sequence
  Synthetic
cacgccuggcuacuguuuagug

SEQ ID NO: 57605 - RNA, 23 nt, Artificial Sequence
  Synthetic
acacgccuggcuacuguuuagug

SEQ ID NO: 57606 - RNA, 24 nt, Artificial Sequence
  Synthetic
cacacgccuggcuacuguuuagug

SEQ ID NO: 57607 - RNA, 18 nt, Artificial Sequence
  Synthetic
ugaauuacuuacaacgug

SEQ ID NO: 57608 - RNA, 19 nt, Artificial Sequence
  Synthetic
uugaauuacuuacaacgug

SEQ ID NO: 57609 - RNA, 20 nt, Artificial Sequence
  Synthetic
uuugaauuacuuacaacgug

SEQ ID NO: 57610 - RNA, 21 nt, Artificial Sequence
  Synthetic
auuugaauuacuuacaacgug

SEQ ID NO: 57611 - RNA, 22 nt, Artificial Sequence
  Synthetic
cauuugaauuacuuacaacgug

SEQ ID NO: 57612 - RNA, 24 nt, Artificial Sequence
  Synthetic
agcauuugaauuacuuacaacgug

SEQ ID NO: 57613 - RNA, 19 nt, Artificial Sequence
  Synthetic
uguguacaggaaacacgug

SEQ ID NO: 57614 - RNA, 20 nt, Artificial Sequence
  Synthetic
auguguacaggaaacacgug

SEQ ID NO: 57615 - RNA, 21 nt, Artificial Sequence
  Synthetic
cauguguacaggaaacacgug

SEQ ID NO: 57616 - RNA, 22 nt, Artificial Sequence
  Synthetic
acauguguacaggaaacacgug

SEQ ID NO: 57617 - RNA, 23 nt, Artificial Sequence
  Synthetic
uacauguguacaggaaacacgug

SEQ ID NO: 57618 - RNA, 24 nt, Artificial Sequence
  Synthetic
cuacauguguacaggaaacacgug

SEQ ID NO: 57619 - RNA, 19 nt, Artificial Sequence
  Synthetic
ugaugauaagaaaaccgug

SEQ ID NO: 57620 - RNA, 20 nt, Artificial Sequence
  Synthetic
augaugauaagaaaaccgug

SEQ ID NO: 57621 - RNA, 23 nt, Artificial Sequence
  Synthetic
aggaugaugauaagaaaaccgug

SEQ ID NO: 57622 - RNA, 24 nt, Artificial Sequence
  Synthetic
aaggaugaugauaagaaaaccgug

SEQ ID NO: 57623 - RNA, 19 nt, Artificial Sequence
  Synthetic
agacuugguggcuaccgug

SEQ ID NO: 57624 - RNA, 20 nt, Artificial Sequence
  Synthetic
cagacuugguggcuaccgug

SEQ ID NO: 57625 - RNA, 21 nt, Artificial Sequence
  Synthetic
ccagacuugguggcuaccgug

SEQ ID NO: 57626 - RNA, 22 nt, Artificial Sequence
  Synthetic
uccagacuugguggcuaccgug

SEQ ID NO: 57627 - RNA, 23 nt, Artificial Sequence
  Synthetic
uuccagacuugguggcuaccgug

SEQ ID NO: 57628 - RNA, 24 nt, Artificial Sequence
  Synthetic
uuuccagacuugguggcuaccgug

SEQ ID NO: 57629 - RNA, 18 nt, Artificial Sequence
  Synthetic
cacaaauuuggaagcgug

SEQ ID NO: 57630 - RNA, 19 nt, Artificial Sequence
  Synthetic
ucacaaauuuggaagcgug

SEQ ID NO: 57631 - RNA, 21 nt, Artificial Sequence
  Synthetic
ugucacaaauuuggaagcgug

SEQ ID NO: 57632 - RNA, 22 nt, Artificial Sequence
  Synthetic
augucacaaauuuggaagcgug

SEQ ID NO: 57633 - RNA, 23 nt, Artificial Sequence
  Synthetic
aaugucacaaauuuggaagcgug

SEQ ID NO: 57634 - RNA, 24 nt, Artificial Sequence
  Synthetic
uaaugucacaaauuuggaagcgug

SEQ ID NO: 57635 - RNA, 18 nt, Artificial Sequence
  Synthetic
auuagggaaguaagcgug

SEQ ID NO: 57636 - RNA, 21 nt, Artificial Sequence
  Synthetic
uggauuagggaaguaagcgug

SEQ ID NO: 57637 - RNA, 23 nt, Artificial Sequence
  Synthetic
uguggauuagggaaguaagcgug

SEQ ID NO: 57638 - RNA, 24 nt, Artificial Sequence
  Synthetic
auguggauuagggaaguaagcgug

SEQ ID NO: 57639 - RNA, 20 nt, Artificial Sequence
  Synthetic
aggaacucuugguaagcgug

SEQ ID NO: 57640 - RNA, 22 nt, Artificial Sequence
  Synthetic
agaggaacucuugguaagcgug

SEQ ID NO: 57641 - RNA, 24 nt, Artificial Sequence
  Synthetic
ugagaggaacucuugguaagcgug

SEQ ID NO: 57642 - RNA, 21 nt, Artificial Sequence
  Synthetic
cuuucuccuccaaaaugcgug

SEQ ID NO: 57643 - RNA, 22 nt, Artificial Sequence
  Synthetic
acuuucuccuccaaaaugcgug

SEQ ID NO: 57644 - RNA, 23 nt, Artificial Sequence
  Synthetic
cacuuucuccuccaaaaugcgug

SEQ ID NO: 57645 - RNA, 24 nt, Artificial Sequence
  Synthetic
ccacuuucuccuccaaaaugcgug

SEQ ID NO: 57646 - RNA, 18 nt, Artificial Sequence
  Synthetic
uacuucaauucaaucgug

SEQ ID NO: 57647 - RNA, 19 nt, Artificial Sequence
  Synthetic
uuacuucaauucaaucgug

SEQ ID NO: 57648 - RNA, 20 nt, Artificial Sequence
  Synthetic
auuacuucaauucaaucgug

SEQ ID NO: 57649 - RNA, 21 nt, Artificial Sequence
  Synthetic
aauuacuucaauucaaucgug

SEQ ID NO: 57650 - RNA, 22 nt, Artificial Sequence
  Synthetic
uaauuacuucaauucaaucgug

SEQ ID NO: 57651 - RNA, 23 nt, Artificial Sequence
  Synthetic
auaauuacuucaauucaaucgug

SEQ ID NO: 57652 - RNA, 24 nt, Artificial Sequence
  Synthetic
cauaauuacuucaauucaaucgug

SEQ ID NO: 57653 - RNA, 19 nt, Artificial Sequence
  Synthetic
agaaauaucgauaaaggug

SEQ ID NO: 57654 - RNA, 20 nt, Artificial Sequence
  Synthetic
aagaaauaucgauaaaggug

SEQ ID NO: 57655 - RNA, 21 nt, Artificial Sequence
  Synthetic
uaagaaauaucgauaaaggug

SEQ ID NO: 57656 - RNA, 22 nt, Artificial Sequence
  Synthetic
uuaagaaauaucgauaaaggug

SEQ ID NO: 57657 - RNA, 23 nt, Artificial Sequence
  Synthetic
uuuaagaaauaucgauaaaggug

SEQ ID NO: 57658 - RNA, 24 nt, Artificial Sequence
  Synthetic
uuuuaagaaauaucgauaaaggug

SEQ ID NO: 57659 - RNA, 19 nt, Artificial Sequence
  Synthetic
ugucuauuuuguucaggug

SEQ ID NO: 57660 - RNA, 20 nt, Artificial Sequence
  Synthetic
uugucuauuuuguucaggug

SEQ ID NO: 57661 - RNA, 22 nt, Artificial Sequence
  Synthetic
uguugucuauuuuguucaggug

SEQ ID NO: 57662 - RNA, 23 nt, Artificial Sequence
  Synthetic
auguugucuauuuuguucaggug

SEQ ID NO: 57663 - RNA, 24 nt, Artificial Sequence
  Synthetic
aauguugucuauuuuguucaggug

SEQ ID NO: 57664 - RNA, 18 nt, Artificial Sequence
  Synthetic
aacuaauuauaugaggug

SEQ ID NO: 57665 - RNA, 19 nt, Artificial Sequence
  Synthetic
uaacuaauuauaugaggug

SEQ ID NO: 57666 - RNA, 21 nt, Artificial Sequence
  Synthetic
uguaacuaauuauaugaggug

SEQ ID NO: 57667 - RNA, 22 nt, Artificial Sequence
  Synthetic
uuguaacuaauuauaugaggug

SEQ ID NO: 57668 - RNA, 23 nt, Artificial Sequence
  Synthetic
uuuguaacuaauuauaugaggug

SEQ ID NO: 57669 - RNA, 24 nt, Artificial Sequence
  Synthetic
auuuguaacuaauuauaugaggug

SEQ ID NO: 57670 - RNA, 18 nt, Artificial Sequence
  Synthetic
uuugugaaggcugaggug

SEQ ID NO: 57671 - RNA, 19 nt, Artificial Sequence
  Synthetic
uuuugugaaggcugaggug

SEQ ID NO: 57672 - RNA, 20 nt, Artificial Sequence
  Synthetic
uuuuugugaaggcugaggug

SEQ ID NO: 57673 - RNA, 21 nt, Artificial Sequence
  Synthetic
cuuuuugugaaggcugaggug

SEQ ID NO: 57674 - RNA, 22 nt, Artificial Sequence
  Synthetic
ccuuuuugugaaggcugaggug

SEQ ID NO: 57675 - RNA, 23 nt, Artificial Sequence
  Synthetic
uccuuuuugugaaggcugaggug

SEQ ID NO: 57676 - RNA, 18 nt, Artificial Sequence
  Synthetic
uguguagcuuuauaggug

SEQ ID NO: 57677 - RNA, 20 nt, Artificial Sequence
  Synthetic
uguguguagcuuuauaggug

SEQ ID NO: 57678 - RNA, 18 nt, Artificial Sequence
  Synthetic
uauauauaucucuaggug

SEQ ID NO: 57679 - RNA, 19 nt, Artificial Sequence
  Synthetic
auauauauaucucuaggug

SEQ ID NO: 57680 - RNA, 20 nt, Artificial Sequence
  Synthetic
uauauauauaucucuaggug

SEQ ID NO: 57681 - RNA, 18 nt, Artificial Sequence
  Synthetic
caaauguuuuucuaggug

SEQ ID NO: 57682 - RNA, 19 nt, Artificial Sequence
  Synthetic
ccaaauguuuuucuaggug

SEQ ID NO: 57683 - RNA, 19 nt, Artificial Sequence
  Synthetic
uguuagacacuguuaggug

SEQ ID NO: 57684 - RNA, 21 nt, Artificial Sequence
  Synthetic
uguguuagacacuguuaggug

SEQ ID NO: 57685 - RNA, 22 nt, Artificial Sequence
  Synthetic
auguguuagacacuguuaggug

SEQ ID NO: 57686 - RNA, 23 nt, Artificial Sequence
  Synthetic
aauguguuagacacuguuaggug

SEQ ID NO: 57687 - RNA, 24 nt, Artificial Sequence
  Synthetic
aaauguguuagacacuguuaggug

SEQ ID NO: 57688 - RNA, 18 nt, Artificial Sequence
  Synthetic
ucauuucuacuucgggug

SEQ ID NO: 57689 - RNA, 19 nt, Artificial Sequence
  Synthetic
aucauuucuacuucgggug

SEQ ID NO: 57690 - RNA, 20 nt, Artificial Sequence
  Synthetic
aaucauuucuacuucgggug

SEQ ID NO: 57691 - RNA, 21 nt, Artificial Sequence
  Synthetic
uaaucauuucuacuucgggug

SEQ ID NO: 57692 - RNA, 22 nt, Artificial Sequence
  Synthetic
auaaucauuucuacuucgggug

SEQ ID NO: 57693 - RNA, 23 nt, Artificial Sequence
  Synthetic
aauaaucauuucuacuucgggug

SEQ ID NO: 57694 - RNA, 24 nt, Artificial Sequence
  Synthetic
aaauaaucauuucuacuucgggug

SEQ ID NO: 57695 - RNA, 18 nt, Artificial Sequence
  Synthetic
ugauuguuucaaggggug

SEQ ID NO: 57696 - RNA, 19 nt, Artificial Sequence
  Synthetic
augauuguuucaaggggug

SEQ ID NO: 57697 - RNA, 20 nt, Artificial Sequence
  Synthetic
caugauuguuucaaggggug

SEQ ID NO: 57698 - RNA, 21 nt, Artificial Sequence
  Synthetic
ucaugauuguuucaaggggug

SEQ ID NO: 57699 - RNA, 22 nt, Artificial Sequence
  Synthetic
cucaugauuguuucaaggggug

SEQ ID NO: 57700 - RNA, 24 nt, Artificial Sequence
  Synthetic
ugcucaugauuguuucaaggggug

SEQ ID NO: 57701 - RNA, 21 nt, Artificial Sequence
  Synthetic
cugguugggguggcgggggug

SEQ ID NO: 57702 - RNA, 22 nt, Artificial Sequence
  Synthetic
ccugguugggguggcgggggug

SEQ ID NO: 57703 - RNA, 23 nt, Artificial Sequence
  Synthetic
uccugguugggguggcgggggug

SEQ ID NO: 57704 - RNA, 24 nt, Artificial Sequence
  Synthetic
uuccugguugggguggcgggggug

SEQ ID NO: 57705 - RNA, 18 nt, Artificial Sequence
  Synthetic
cacugcagacacugggug

SEQ ID NO: 57706 - RNA, 19 nt, Artificial Sequence
  Synthetic
ccacugcagacacugggug

SEQ ID NO: 57707 - RNA, 20 nt, Artificial Sequence
  Synthetic
accacugcagacacugggug

SEQ ID NO: 57708 - RNA, 21 nt, Artificial Sequence
  Synthetic
uaccacugcagacacugggug

SEQ ID NO: 57709 - RNA, 22 nt, Artificial Sequence
  Synthetic
cuaccacugcagacacugggug

SEQ ID NO: 57710 - RNA, 23 nt, Artificial Sequence
  Synthetic
ucuaccacugcagacacugggug

SEQ ID NO: 57711 - RNA, 24 nt, Artificial Sequence
  Synthetic
cucuaccacugcagacacugggug

SEQ ID NO: 57712 - RNA, 21 nt, Artificial Sequence
  Synthetic
uuuccuauaaauuaaauggug

SEQ ID NO: 57713 - RNA, 22 nt, Artificial Sequence
  Synthetic
auuuccuauaaauuaaauggug

SEQ ID NO: 57714 - RNA, 24 nt, Artificial Sequence
  Synthetic
ugauuuccuauaaauuaaauggug

SEQ ID NO: 57715 - RNA, 18 nt, Artificial Sequence
  Synthetic
uauaaauuuuaaauggug

SEQ ID NO: 57716 - RNA, 19 nt, Artificial Sequence
  Synthetic
cuauaaauuuuaaauggug

SEQ ID NO: 57717 - RNA, 20 nt, Artificial Sequence
  Synthetic
ccuauaaauuuuaaauggug

SEQ ID NO: 57718 - RNA, 21 nt, Artificial Sequence
  Synthetic
uccuauaaauuuuaaauggug

SEQ ID NO: 57719 - RNA, 22 nt, Artificial Sequence
  Synthetic
auccuauaaauuuuaaauggug

SEQ ID NO: 57720 - RNA, 23 nt, Artificial Sequence
  Synthetic
cauccuauaaauuuuaaauggug

SEQ ID NO: 57721 - RNA, 24 nt, Artificial Sequence
  Synthetic
ucauccuauaaauuuuaaauggug

SEQ ID NO: 57722 - RNA, 18 nt, Artificial Sequence
  Synthetic
aacccuuggggaauggug

SEQ ID NO: 57723 - RNA, 19 nt, Artificial Sequence
  Synthetic
caacccuuggggaauggug

SEQ ID NO: 57724 - RNA, 20 nt, Artificial Sequence
  Synthetic
acaacccuuggggaauggug

SEQ ID NO: 57725 - RNA, 22 nt, Artificial Sequence
  Synthetic
agacaacccuuggggaauggug

SEQ ID NO: 57726 - RNA, 23 nt, Artificial Sequence
  Synthetic
cagacaacccuuggggaauggug

SEQ ID NO: 57727 - RNA, 24 nt, Artificial Sequence
  Synthetic
ucagacaacccuuggggaauggug

SEQ ID NO: 57728 - RNA, 21 nt, Artificial Sequence
  Synthetic
cagccaagaagucuuauggug

SEQ ID NO: 57729 - RNA, 24 nt, Artificial Sequence
  Synthetic
cggcagccaagaagucuuauggug

SEQ ID NO: 57730 - RNA, 18 nt, Artificial Sequence
  Synthetic
cuaguaaagugucuggug

SEQ ID NO: 57731 - RNA, 19 nt, Artificial Sequence
  Synthetic
ucuaguaaagugucuggug

SEQ ID NO: 57732 - RNA, 21 nt, Artificial Sequence
  Synthetic
agucuaguaaagugucuggug

SEQ ID NO: 57733 - RNA, 23 nt, Artificial Sequence
  Synthetic
agagucuaguaaagugucuggug

SEQ ID NO: 57734 - RNA, 24 nt, Artificial Sequence
  Synthetic
uagagucuaguaaagugucuggug

SEQ ID NO: 57735 - RNA, 20 nt, Artificial Sequence
  Synthetic
ugggagaggugaauguggug

SEQ ID NO: 57736 - RNA, 21 nt, Artificial Sequence
  Synthetic
augggagaggugaauguggug

SEQ ID NO: 57737 - RNA, 22 nt, Artificial Sequence
  Synthetic
aaugggagaggugaauguggug

SEQ ID NO: 57738 - RNA, 24 nt, Artificial Sequence
  Synthetic
agaaugggagaggugaauguggug

SEQ ID NO: 57739 - RNA, 20 nt, Artificial Sequence
  Synthetic
agggcauacacuauguggug

SEQ ID NO: 57740 - RNA, 21 nt, Artificial Sequence
  Synthetic
aagggcauacacuauguggug

SEQ ID NO: 57741 - RNA, 22 nt, Artificial Sequence
  Synthetic
aaagggcauacacuauguggug

SEQ ID NO: 57742 - RNA, 18 nt, Artificial Sequence
  Synthetic
acauaauuugcuguggug

SEQ ID NO: 57743 - RNA, 19 nt, Artificial Sequence
  Synthetic
uacauaauuugcuguggug

SEQ ID NO: 57744 - RNA, 20 nt, Artificial Sequence
  Synthetic
auacauaauuugcuguggug

SEQ ID NO: 57745 - RNA, 21 nt, Artificial Sequence
  Synthetic
uauacauaauuugcuguggug

SEQ ID NO: 57746 - RNA, 22 nt, Artificial Sequence
  Synthetic
cuauacauaauuugcuguggug

SEQ ID NO: 57747 - RNA, 23 nt, Artificial Sequence
  Synthetic
ucuauacauaauuugcuguggug

SEQ ID NO: 57748 - RNA, 18 nt, Artificial Sequence
  Synthetic
aauucauguuaguuggug

SEQ ID NO: 57749 - RNA, 20 nt, Artificial Sequence
  Synthetic
ugaauucauguuaguuggug

SEQ ID NO: 57750 - RNA, 23 nt, Artificial Sequence
  Synthetic
aggugaauucauguuaguuggug

SEQ ID NO: 57751 - RNA, 24 nt, Artificial Sequence
  Synthetic
aaggugaauucauguuaguuggug

SEQ ID NO: 57752 - RNA, 21 nt, Artificial Sequence
  Synthetic
agaaauaagggaaaaaaugug

SEQ ID NO: 57753 - RNA, 23 nt, Artificial Sequence
  Synthetic
ugagaaauaagggaaaaaaugug

SEQ ID NO: 57754 - RNA, 24 nt, Artificial Sequence
  Synthetic
augagaaauaagggaaaaaaugug

SEQ ID NO: 57755 - RNA, 18 nt, Artificial Sequence
  Synthetic
agugcugaagcaaaugug

SEQ ID NO: 57756 - RNA, 19 nt, Artificial Sequence
  Synthetic
cagugcugaagcaaaugug

SEQ ID NO: 57757 - RNA, 20 nt, Artificial Sequence
  Synthetic
ucagugcugaagcaaaugug

SEQ ID NO: 57758 - RNA, 18 nt, Artificial Sequence
  Synthetic
ucuguugacugaaaugug

SEQ ID NO: 57759 - RNA, 20 nt, Artificial Sequence
  Synthetic
agucuguugacugaaaugug

SEQ ID NO: 57760 - RNA, 21 nt, Artificial Sequence
  Synthetic
cagucuguugacugaaaugug

SEQ ID NO: 57761 - RNA, 22 nt, Artificial Sequence
  Synthetic
ucagucuguugacugaaaugug

SEQ ID NO: 57762 - RNA, 24 nt, Artificial Sequence
  Synthetic
agucagucuguugacugaaaugug

SEQ ID NO: 57763 - RNA, 18 nt, Artificial Sequence
  Synthetic
uugcauggauuuaaugug

SEQ ID NO: 57764 - RNA, 19 nt, Artificial Sequence
  Synthetic
auugcauggauuuaaugug

SEQ ID NO: 57765 - RNA, 21 nt, Artificial Sequence
  Synthetic
agauugcauggauuuaaugug

SEQ ID NO: 57766 - RNA, 22 nt, Artificial Sequence
  Synthetic
uagauugcauggauuuaaugug

SEQ ID NO: 57767 - RNA, 23 nt, Artificial Sequence
  Synthetic
uuagauugcauggauuuaaugug

SEQ ID NO: 57768 - RNA, 24 nt, Artificial Sequence
  Synthetic
uuuagauugcauggauuuaaugug

SEQ ID NO: 57769 - RNA, 19 nt, Artificial Sequence
  Synthetic
aguucuugagcugcaugug

SEQ ID NO: 57770 - RNA, 20 nt, Artificial Sequence
  Synthetic
caguucuugagcugcaugug

SEQ ID NO: 57771 - RNA, 21 nt, Artificial Sequence
  Synthetic
acaguucuugagcugcaugug

SEQ ID NO: 57772 - RNA, 22 nt, Artificial Sequence
  Synthetic
uacaguucuugagcugcaugug

SEQ ID NO: 57773 - RNA, 23 nt, Artificial Sequence
  Synthetic
cuacaguucuugagcugcaugug

SEQ ID NO: 57774 - RNA, 24 nt, Artificial Sequence
  Synthetic
ccuacaguucuugagcugcaugug

SEQ ID NO: 57775 - RNA, 19 nt, Artificial Sequence
  Synthetic
agaaauaacacuucaugug

SEQ ID NO: 57776 - RNA, 20 nt, Artificial Sequence
  Synthetic
aagaaauaacacuucaugug

SEQ ID NO: 57777 - RNA, 21 nt, Artificial Sequence
  Synthetic
aaagaaauaacacuucaugug

SEQ ID NO: 57778 - RNA, 22 nt, Artificial Sequence
  Synthetic
caaagaaauaacacuucaugug

SEQ ID NO: 57779 - RNA, 23 nt, Artificial Sequence
  Synthetic
acaaagaaauaacacuucaugug

SEQ ID NO: 57780 - RNA, 24 nt, Artificial Sequence
  Synthetic
aacaaagaaauaacacuucaugug

SEQ ID NO: 57781 - RNA, 18 nt, Artificial Sequence
  Synthetic
auacaucuaggagaugug

SEQ ID NO: 57782 - RNA, 19 nt, Artificial Sequence
  Synthetic
uauacaucuaggagaugug

SEQ ID NO: 57783 - RNA, 20 nt, Artificial Sequence
  Synthetic
uuauacaucuaggagaugug

SEQ ID NO: 57784 - RNA, 21 nt, Artificial Sequence
  Synthetic
auuauacaucuaggagaugug

SEQ ID NO: 57785 - RNA, 22 nt, Artificial Sequence
  Synthetic
uauuauacaucuaggagaugug

SEQ ID NO: 57786 - RNA, 23 nt, Artificial Sequence
  Synthetic
cuauuauacaucuaggagaugug

SEQ ID NO: 57787 - RNA, 24 nt, Artificial Sequence
  Synthetic
ccuauuauacaucuaggagaugug

SEQ ID NO: 57788 - RNA, 20 nt, Artificial Sequence
  Synthetic
ugguagcuggaugggaugug

SEQ ID NO: 57789 - RNA, 21 nt, Artificial Sequence
  Synthetic
cugguagcuggaugggaugug

SEQ ID NO: 57790 - RNA, 22 nt, Artificial Sequence
  Synthetic
ccugguagcuggaugggaugug

SEQ ID NO: 57791 - RNA, 24 nt, Artificial Sequence
  Synthetic
ugccugguagcuggaugggaugug

SEQ ID NO: 57792 - RNA, 21 nt, Artificial Sequence
  Synthetic
uuauguuuuguguaugaugug

SEQ ID NO: 57793 - RNA, 22 nt, Artificial Sequence
  Synthetic
uuuauguuuuguguaugaugug

SEQ ID NO: 57794 - RNA, 23 nt, Artificial Sequence
  Synthetic
auuuauguuuuguguaugaugug

SEQ ID NO: 57795 - RNA, 24 nt, Artificial Sequence
  Synthetic
aauuuauguuuuguguaugaugug

SEQ ID NO: 57796 - RNA, 19 nt, Artificial Sequence
  Synthetic
agauauggauuuugaugug

SEQ ID NO: 57797 - RNA, 20 nt, Artificial Sequence
  Synthetic
uagauauggauuuugaugug

SEQ ID NO: 57798 - RNA, 21 nt, Artificial Sequence
  Synthetic
uuagauauggauuuugaugug

SEQ ID NO: 57799 - RNA, 22 nt, Artificial Sequence
  Synthetic
cuuagauauggauuuugaugug

SEQ ID NO: 57800 - RNA, 23 nt, Artificial Sequence
  Synthetic
ucuuagauauggauuuugaugug

SEQ ID NO: 57801 - RNA, 24 nt, Artificial Sequence
  Synthetic
uucuuagauauggauuuugaugug

SEQ ID NO: 57802 - RNA, 18 nt, Artificial Sequence
  Synthetic
ucuuauagugaauaugug

SEQ ID NO: 57803 - RNA, 19 nt, Artificial Sequence
  Synthetic
aucuuauagugaauaugug

SEQ ID NO: 57804 - RNA, 20 nt, Artificial Sequence
  Synthetic
uaucuuauagugaauaugug

SEQ ID NO: 57805 - RNA, 21 nt, Artificial Sequence
  Synthetic
uuaucuuauagugaauaugug

SEQ ID NO: 57806 - RNA, 22 nt, Artificial Sequence
  Synthetic
uuuaucuuauagugaauaugug

SEQ ID NO: 57807 - RNA, 24 nt, Artificial Sequence
  Synthetic
uguuuaucuuauagugaauaugug

SEQ ID NO: 57808 - RNA, 20 nt, Artificial Sequence
  Synthetic
uggaauauaguugauaugug

SEQ ID NO: 57809 - RNA, 21 nt, Artificial Sequence
  Synthetic
uuggaauauaguugauaugug

SEQ ID NO: 57810 - RNA, 22 nt, Artificial Sequence
  Synthetic
uuuggaauauaguugauaugug

SEQ ID NO: 57811 - RNA, 23 nt, Artificial Sequence
  Synthetic
uuuuggaauauaguugauaugug

SEQ ID NO: 57812 - RNA, 24 nt, Artificial Sequence
  Synthetic
uuuuuggaauauaguugauaugug

SEQ ID NO: 57813 - RNA, 18 nt, Artificial Sequence
  Synthetic
cuuagcugcaauuaugug

SEQ ID NO: 57814 - RNA, 19 nt, Artificial Sequence
  Synthetic
acuuagcugcaauuaugug

SEQ ID NO: 57815 - RNA, 20 nt, Artificial Sequence
  Synthetic
aacuuagcugcaauuaugug

SEQ ID NO: 57816 - RNA, 23 nt, Artificial Sequence
  Synthetic
aggaacuuagcugcaauuaugug

SEQ ID NO: 57817 - RNA, 19 nt, Artificial Sequence
  Synthetic
agaaggggcucacacugug

SEQ ID NO: 57818 - RNA, 20 nt, Artificial Sequence
  Synthetic
cagaaggggcucacacugug

SEQ ID NO: 57819 - RNA, 21 nt, Artificial Sequence
  Synthetic
ucagaaggggcucacacugug

SEQ ID NO: 57820 - RNA, 22 nt, Artificial Sequence
  Synthetic
uucagaaggggcucacacugug

SEQ ID NO: 57821 - RNA, 23 nt, Artificial Sequence
  Synthetic
auucagaaggggcucacacugug

SEQ ID NO: 57822 - RNA, 24 nt, Artificial Sequence
  Synthetic
cauucagaaggggcucacacugug

SEQ ID NO: 57823 - RNA, 18 nt, Artificial Sequence
  Synthetic
agcuauagaucaccugug

SEQ ID NO: 57824 - RNA, 19 nt, Artificial Sequence
  Synthetic
aagcuauagaucaccugug

SEQ ID NO: 57825 - RNA, 20 nt, Artificial Sequence
  Synthetic
caagcuauagaucaccugug

SEQ ID NO: 57826 - RNA, 21 nt, Artificial Sequence
  Synthetic
ucaagcuauagaucaccugug

SEQ ID NO: 57827 - RNA, 22 nt, Artificial Sequence
  Synthetic
uucaagcuauagaucaccugug

SEQ ID NO: 57828 - RNA, 24 nt, Artificial Sequence
  Synthetic
aguucaagcuauagaucaccugug

SEQ ID NO: 57829 - RNA, 18 nt, Artificial Sequence
  Synthetic
auguugaaggugccugug

SEQ ID NO: 57830 - RNA, 19 nt, Artificial Sequence
  Synthetic
aauguugaaggugccugug

SEQ ID NO: 57831 - RNA, 20 nt, Artificial Sequence
  Synthetic
caauguugaaggugccugug

SEQ ID NO: 57832 - RNA, 21 nt, Artificial Sequence
  Synthetic
ucaauguugaaggugccugug

SEQ ID NO: 57833 - RNA, 22 nt, Artificial Sequence
  Synthetic
uucaauguugaaggugccugug

SEQ ID NO: 57834 - RNA, 23 nt, Artificial Sequence
  Synthetic
uuucaauguugaaggugccugug

SEQ ID NO: 57835 - RNA, 24 nt, Artificial Sequence
  Synthetic
auuucaauguugaaggugccugug

SEQ ID NO: 57836 - RNA, 19 nt, Artificial Sequence
  Synthetic
uggugucugauugccugug

SEQ ID NO: 57837 - RNA, 20 nt, Artificial Sequence
  Synthetic
cuggugucugauugccugug

SEQ ID NO: 57838 - RNA, 21 nt, Artificial Sequence
  Synthetic
acuggugucugauugccugug

SEQ ID NO: 57839 - RNA, 22 nt, Artificial Sequence
  Synthetic
uacuggugucugauugccugug

SEQ ID NO: 57840 - RNA, 23 nt, Artificial Sequence
  Synthetic
auacuggugucugauugccugug

SEQ ID NO: 57841 - RNA, 24 nt, Artificial Sequence
  Synthetic
aauacuggugucugauugccugug

SEQ ID NO: 57842 - RNA, 18 nt, Artificial Sequence
  Synthetic
augaacugugcagcugug

SEQ ID NO: 57843 - RNA, 19 nt, Artificial Sequence
  Synthetic
aaugaacugugcagcugug

SEQ ID NO: 57844 - RNA, 20 nt, Artificial Sequence
  Synthetic
aaaugaacugugcagcugug

SEQ ID NO: 57845 - RNA, 22 nt, Artificial Sequence
  Synthetic
agaaaugaacugugcagcugug

SEQ ID NO: 57846 - RNA, 23 nt, Artificial Sequence
  Synthetic
aagaaaugaacugugcagcugug

SEQ ID NO: 57847 - RNA, 24 nt, Artificial Sequence
  Synthetic
uaagaaaugaacugugcagcugug

SEQ ID NO: 57848 - RNA, 18 nt, Artificial Sequence
  Synthetic
cuuuguucgguggcugug

SEQ ID NO: 57849 - RNA, 19 nt, Artificial Sequence
  Synthetic
ucuuuguucgguggcugug

SEQ ID NO: 57850 - RNA, 20 nt, Artificial Sequence
  Synthetic
uucuuuguucgguggcugug

SEQ ID NO: 57851 - RNA, 21 nt, Artificial Sequence
  Synthetic
uuucuuuguucgguggcugug

SEQ ID NO: 57852 - RNA, 22 nt, Artificial Sequence
  Synthetic
uuuucuuuguucgguggcugug

SEQ ID NO: 57853 - RNA, 24 nt, Artificial Sequence
  Synthetic
uguuuucuuuguucgguggcugug

SEQ ID NO: 57854 - RNA, 18 nt, Artificial Sequence
  Synthetic
cugacaggauuugcugug

SEQ ID NO: 57855 - RNA, 20 nt, Artificial Sequence
  Synthetic
agcugacaggauuugcugug

SEQ ID NO: 57856 - RNA, 21 nt, Artificial Sequence
  Synthetic
aagcugacaggauuugcugug

SEQ ID NO: 57857 - RNA, 22 nt, Artificial Sequence
  Synthetic
aaagcugacaggauuugcugug

SEQ ID NO: 57858 - RNA, 23 nt, Artificial Sequence
  Synthetic
caaagcugacaggauuugcugug

SEQ ID NO: 57859 - RNA, 24 nt, Artificial Sequence
  Synthetic
acaaagcugacaggauuugcugug

SEQ ID NO: 57860 - RNA, 18 nt, Artificial Sequence
  Synthetic
uucuuucgcugaagugug

SEQ ID NO: 57861 - RNA, 19 nt, Artificial Sequence
  Synthetic
cuucuuucgcugaagugug

SEQ ID NO: 57862 - RNA, 20 nt, Artificial Sequence
  Synthetic
acuucuuucgcugaagugug

SEQ ID NO: 57863 - RNA, 22 nt, Artificial Sequence
  Synthetic
agacuucuuucgcugaagugug

SEQ ID NO: 57864 - RNA, 24 nt, Artificial Sequence
  Synthetic
agagacuucuuucgcugaagugug

SEQ ID NO: 57865 - RNA, 18 nt, Artificial Sequence
  Synthetic
uaagcaaauuacagugug

SEQ ID NO: 57866 - RNA, 19 nt, Artificial Sequence
  Synthetic
uuaagcaaauuacagugug

SEQ ID NO: 57867 - RNA, 20 nt, Artificial Sequence
  Synthetic
uuuaagcaaauuacagugug

SEQ ID NO: 57868 - RNA, 21 nt, Artificial Sequence
  Synthetic
auuuaagcaaauuacagugug

SEQ ID NO: 57869 - RNA, 22 nt, Artificial Sequence
  Synthetic
cauuuaagcaaauuacagugug

SEQ ID NO: 57870 - RNA, 23 nt, Artificial Sequence
  Synthetic
ucauuuaagcaaauuacagugug

SEQ ID NO: 57871 - RNA, 24 nt, Artificial Sequence
  Synthetic
cucauuuaagcaaauuacagugug

SEQ ID NO: 57872 - RNA, 18 nt, Artificial Sequence
  Synthetic
agcucuugugagggugug

SEQ ID NO: 57873 - RNA, 19 nt, Artificial Sequence
  Synthetic
aagcucuugugagggugug

SEQ ID NO: 57874 - RNA, 21 nt, Artificial Sequence
  Synthetic
ugaagcucuugugagggugug

SEQ ID NO: 57875 - RNA, 22 nt, Artificial Sequence
  Synthetic
uugaagcucuugugagggugug

SEQ ID NO: 57876 - RNA, 23 nt, Artificial Sequence
  Synthetic
auugaagcucuugugagggugug

SEQ ID NO: 57877 - RNA, 24 nt, Artificial Sequence
  Synthetic
uauugaagcucuugugagggugug

SEQ ID NO: 57878 - RNA, 18 nt, Artificial Sequence
  Synthetic
ugagucuuucaaugugug

SEQ ID NO: 57879 - RNA, 19 nt, Artificial Sequence
  Synthetic
augagucuuucaaugugug

SEQ ID NO: 57880 - RNA, 20 nt, Artificial Sequence
  Synthetic
aaugagucuuucaaugugug

SEQ ID NO: 57881 - RNA, 21 nt, Artificial Sequence
  Synthetic
caaugagucuuucaaugugug

SEQ ID NO: 57882 - RNA, 22 nt, Artificial Sequence
  Synthetic
acaaugagucuuucaaugugug

SEQ ID NO: 57883 - RNA, 24 nt, Artificial Sequence
  Synthetic
agacaaugagucuuucaaugugug

SEQ ID NO: 57884 - RNA, 21 nt, Artificial Sequence
  Synthetic
aggaaaaaaaauguaugugug

SEQ ID NO: 57885 - RNA, 22 nt, Artificial Sequence
  Synthetic
uaggaaaaaaaauguaugugug

SEQ ID NO: 57886 - RNA, 23 nt, Artificial Sequence
  Synthetic
auaggaaaaaaaauguaugugug

SEQ ID NO: 57887 - RNA, 19 nt, Artificial Sequence
  Synthetic
agguaaugcagacugugug

SEQ ID NO: 57888 - RNA, 20 nt, Artificial Sequence
  Synthetic
cagguaaugcagacugugug

SEQ ID NO: 57889 - RNA, 21 nt, Artificial Sequence
  Synthetic
ucagguaaugcagacugugug

SEQ ID NO: 57890 - RNA, 22 nt, Artificial Sequence
  Synthetic
aucagguaaugcagacugugug

SEQ ID NO: 57891 - RNA, 23 nt, Artificial Sequence
  Synthetic
caucagguaaugcagacugugug

SEQ ID NO: 57892 - RNA, 24 nt, Artificial Sequence
  Synthetic
ccaucagguaaugcagacugugug

SEQ ID NO: 57893 - RNA, 18 nt, Artificial Sequence
  Synthetic
aaguucucaaccugugug

SEQ ID NO: 57894 - RNA, 20 nt, Artificial Sequence
  Synthetic
agaaguucucaaccugugug

SEQ ID NO: 57895 - RNA, 21 nt, Artificial Sequence
  Synthetic
uagaaguucucaaccugugug

SEQ ID NO: 57896 - RNA, 22 nt, Artificial Sequence
  Synthetic
auagaaguucucaaccugugug

SEQ ID NO: 57897 - RNA, 23 nt, Artificial Sequence
  Synthetic
uauagaaguucucaaccugugug

SEQ ID NO: 57898 - RNA, 24 nt, Artificial Sequence
  Synthetic
uuauagaaguucucaaccugugug

SEQ ID NO: 57899 - RNA, 19 nt, Artificial Sequence
  Synthetic
agggaaaacauucugugug

SEQ ID NO: 57900 - RNA, 20 nt, Artificial Sequence
  Synthetic
aagggaaaacauucugugug

SEQ ID NO: 57901 - RNA, 21 nt, Artificial Sequence
  Synthetic
aaagggaaaacauucugugug

SEQ ID NO: 57902 - RNA, 23 nt, Artificial Sequence
  Synthetic
agaaagggaaaacauucugugug

SEQ ID NO: 57903 - RNA, 18 nt, Artificial Sequence
  Synthetic
cuuuucggcucuugugug

SEQ ID NO: 57904 - RNA, 19 nt, Artificial Sequence
  Synthetic
ucuuuucggcucuugugug

SEQ ID NO: 57905 - RNA, 20 nt, Artificial Sequence
  Synthetic
aucuuuucggcucuugugug

SEQ ID NO: 57906 - RNA, 21 nt, Artificial Sequence
  Synthetic
aaucuuuucggcucuugugug

SEQ ID NO: 57907 - RNA, 23 nt, Artificial Sequence
  Synthetic
agaaucuuuucggcucuugugug

SEQ ID NO: 57908 - RNA, 24 nt, Artificial Sequence
  Synthetic
aagaaucuuuucggcucuugugug

SEQ ID NO: 57909 - RNA, 18 nt, Artificial Sequence
  Synthetic
cagcagugcucaauugug

SEQ ID NO: 57910 - RNA, 19 nt, Artificial Sequence
  Synthetic
acagcagugcucaauugug

SEQ ID NO: 57911 - RNA, 20 nt, Artificial Sequence
  Synthetic
cacagcagugcucaauugug

SEQ ID NO: 57912 - RNA, 21 nt, Artificial Sequence
  Synthetic
ccacagcagugcucaauugug

SEQ ID NO: 57913 - RNA, 22 nt, Artificial Sequence
  Synthetic
accacagcagugcucaauugug

SEQ ID NO: 57914 - RNA, 23 nt, Artificial Sequence
  Synthetic
aaccacagcagugcucaauugug

SEQ ID NO: 57915 - RNA, 24 nt, Artificial Sequence
  Synthetic
aaaccacagcagugcucaauugug

SEQ ID NO: 57916 - RNA, 18 nt, Artificial Sequence
  Synthetic
uuauguacaggaauugug

SEQ ID NO: 57917 - RNA, 19 nt, Artificial Sequence
  Synthetic
uuuauguacaggaauugug

SEQ ID NO: 57918 - RNA, 20 nt, Artificial Sequence
  Synthetic
auuuauguacaggaauugug

SEQ ID NO: 57919 - RNA, 21 nt, Artificial Sequence
  Synthetic
aauuuauguacaggaauugug

SEQ ID NO: 57920 - RNA, 22 nt, Artificial Sequence
  Synthetic
aaauuuauguacaggaauugug

SEQ ID NO: 57921 - RNA, 23 nt, Artificial Sequence
  Synthetic
aaaauuuauguacaggaauugug

SEQ ID NO: 57922 - RNA, 24 nt, Artificial Sequence
  Synthetic
caaaauuuauguacaggaauugug

SEQ ID NO: 57923 - RNA, 18 nt, Artificial Sequence
  Synthetic
cuuaauagguucauugug

SEQ ID NO: 57924 - RNA, 19 nt, Artificial Sequence
  Synthetic
acuuaauagguucauugug

SEQ ID NO: 57925 - RNA, 20 nt, Artificial Sequence
  Synthetic
uacuuaauagguucauugug

SEQ ID NO: 57926 - RNA, 21 nt, Artificial Sequence
  Synthetic
cuacuuaauagguucauugug

SEQ ID NO: 57927 - RNA, 22 nt, Artificial Sequence
  Synthetic
ucuacuuaauagguucauugug

SEQ ID NO: 57928 - RNA, 23 nt, Artificial Sequence
  Synthetic
aucuacuuaauagguucauugug

SEQ ID NO: 57929 - RNA, 24 nt, Artificial Sequence
  Synthetic
caucuacuuaauagguucauugug

SEQ ID NO: 57930 - RNA, 18 nt, Artificial Sequence
  Synthetic
uaaucuggaaagauugug

SEQ ID NO: 57931 - RNA, 19 nt, Artificial Sequence
  Synthetic
uuaaucuggaaagauugug

SEQ ID NO: 57932 - RNA, 20 nt, Artificial Sequence
  Synthetic
auuaaucuggaaagauugug

SEQ ID NO: 57933 - RNA, 23 nt, Artificial Sequence
  Synthetic
aggauuaaucuggaaagauugug

SEQ ID NO: 57934 - RNA, 18 nt, Artificial Sequence
  Synthetic
uauagcugcuauauugug

SEQ ID NO: 57935 - RNA, 21 nt, Artificial Sequence
  Synthetic
agguauagcugcuauauugug

SEQ ID NO: 57936 - RNA, 22 nt, Artificial Sequence
  Synthetic
aagguauagcugcuauauugug

SEQ ID NO: 57937 - RNA, 23 nt, Artificial Sequence
  Synthetic
aaagguauagcugcuauauugug

SEQ ID NO: 57938 - RNA, 24 nt, Artificial Sequence
  Synthetic
uaaagguauagcugcuauauugug

SEQ ID NO: 57939 - RNA, 19 nt, Artificial Sequence
  Synthetic
agauuuuguuaguauugug

SEQ ID NO: 57940 - RNA, 20 nt, Artificial Sequence
  Synthetic
cagauuuuguuaguauugug

SEQ ID NO: 57941 - RNA, 22 nt, Artificial Sequence
  Synthetic
ugcagauuuuguuaguauugug

SEQ ID NO: 57942 - RNA, 23 nt, Artificial Sequence
  Synthetic
augcagauuuuguuaguauugug

SEQ ID NO: 57943 - RNA, 24 nt, Artificial Sequence
  Synthetic
uaugcagauuuuguuaguauugug

SEQ ID NO: 57944 - RNA, 22 nt, Artificial Sequence
  Synthetic
agagccaagaagucuuauugug

SEQ ID NO: 57945 - RNA, 23 nt, Artificial Sequence
  Synthetic
cagagccaagaagucuuauugug

SEQ ID NO: 57946 - RNA, 24 nt, Artificial Sequence
  Synthetic
ccagagccaagaagucuuauugug

SEQ ID NO: 57947 - RNA, 18 nt, Artificial Sequence
  Synthetic
caaaaauuuaaacuugug

SEQ ID NO: 57948 - RNA, 19 nt, Artificial Sequence
  Synthetic
acaaaaauuuaaacuugug

SEQ ID NO: 57949 - RNA, 20 nt, Artificial Sequence
  Synthetic
cacaaaaauuuaaacuugug

SEQ ID NO: 57950 - RNA, 21 nt, Artificial Sequence
  Synthetic
acacaaaaauuuaaacuugug

SEQ ID NO: 57951 - RNA, 24 nt, Artificial Sequence
  Synthetic
cggacacaaaaauuuaaacuugug

SEQ ID NO: 57952 - RNA, 18 nt, Artificial Sequence
  Synthetic
aaaauacagggccuugug

SEQ ID NO: 57953 - RNA, 19 nt, Artificial Sequence
  Synthetic
aaaaauacagggccuugug

SEQ ID NO: 57954 - RNA, 20 nt, Artificial Sequence
  Synthetic
uaaaaauacagggccuugug

SEQ ID NO: 57955 - RNA, 21 nt, Artificial Sequence
  Synthetic
uuaaaaauacagggccuugug

SEQ ID NO: 57956 - RNA, 22 nt, Artificial Sequence
  Synthetic
uuuaaaaauacagggccuugug

SEQ ID NO: 57957 - RNA, 23 nt, Artificial Sequence
  Synthetic
cuuuaaaaauacagggccuugug

SEQ ID NO: 57958 - RNA, 24 nt, Artificial Sequence
  Synthetic
ccuuuaaaaauacagggccuugug

SEQ ID NO: 57959 - RNA, 18 nt, Artificial Sequence
  Synthetic
aguccacacuuccuugug

SEQ ID NO: 57960 - RNA, 19 nt, Artificial Sequence
  Synthetic
aaguccacacuuccuugug

SEQ ID NO: 57961 - RNA, 20 nt, Artificial Sequence
  Synthetic
aaaguccacacuuccuugug

SEQ ID NO: 57962 - RNA, 22 nt, Artificial Sequence
  Synthetic
agaaaguccacacuuccuugug

SEQ ID NO: 57963 - RNA, 24 nt, Artificial Sequence
  Synthetic
agagaaaguccacacuuccuugug

SEQ ID NO: 57964 - RNA, 18 nt, Artificial Sequence
  Synthetic
uacuacuggccucuugug

SEQ ID NO: 57965 - RNA, 20 nt, Artificial Sequence
  Synthetic
uguacuacuggccucuugug

SEQ ID NO: 57966 - RNA, 21 nt, Artificial Sequence
  Synthetic
auguacuacuggccucuugug

SEQ ID NO: 57967 - RNA, 24 nt, Artificial Sequence
  Synthetic
aggauguacuacuggccucuugug

SEQ ID NO: 57968 - RNA, 18 nt, Artificial Sequence
  Synthetic
ccacuggaaugucuugug

SEQ ID NO: 57969 - RNA, 19 nt, Artificial Sequence
  Synthetic
cccacuggaaugucuugug

SEQ ID NO: 57970 - RNA, 20 nt, Artificial Sequence
  Synthetic
ucccacuggaaugucuugug

SEQ ID NO: 57971 - RNA, 21 nt, Artificial Sequence
  Synthetic
aucccacuggaaugucuugug

SEQ ID NO: 57972 - RNA, 22 nt, Artificial Sequence
  Synthetic
uaucccacuggaaugucuugug

SEQ ID NO: 57973 - RNA, 23 nt, Artificial Sequence
  Synthetic
uuaucccacuggaaugucuugug

SEQ ID NO: 57974 - RNA, 24 nt, Artificial Sequence
  Synthetic
uuuaucccacuggaaugucuugug

SEQ ID NO: 57975 - RNA, 18 nt, Artificial Sequence
  Synthetic
cauuuauuacguguugug

SEQ ID NO: 57976 - RNA, 20 nt, Artificial Sequence
  Synthetic
agcauuuauuacguguugug

SEQ ID NO: 57977 - RNA, 21 nt, Artificial Sequence
  Synthetic
cagcauuuauuacguguugug

SEQ ID NO: 57978 - RNA, 24 nt, Artificial Sequence
  Synthetic
aggcagcauuuauuacguguugug

SEQ ID NO: 57979 - RNA, 18 nt, Artificial Sequence
  Synthetic
auuuucuucaaauuugug

SEQ ID NO: 57980 - RNA, 19 nt, Artificial Sequence
  Synthetic
uauuuucuucaaauuugug

SEQ ID NO: 57981 - RNA, 20 nt, Artificial Sequence
  Synthetic
cuauuuucuucaaauuugug

SEQ ID NO: 57982 - RNA, 21 nt, Artificial Sequence
  Synthetic
ucuauuuucuucaaauuugug

SEQ ID NO: 57983 - RNA, 22 nt, Artificial Sequence
  Synthetic
uucuauuuucuucaaauuugug

SEQ ID NO: 57984 - RNA, 23 nt, Artificial Sequence
  Synthetic
auucuauuuucuucaaauuugug

SEQ ID NO: 57985 - RNA, 24 nt, Artificial Sequence
  Synthetic
uauucuauuuucuucaaauuugug

SEQ ID NO: 57986 - RNA, 19 nt, Artificial Sequence
  Synthetic
agggguaguaagcuuugug

SEQ ID NO: 57987 - RNA, 20 nt, Artificial Sequence
  Synthetic
aagggguaguaagcuuugug

SEQ ID NO: 57988 - RNA, 23 nt, Artificial Sequence
  Synthetic
aggaagggguaguaagcuuugug

SEQ ID NO: 57989 - RNA, 24 nt, Artificial Sequence
  Synthetic
uaggaagggguaguaagcuuugug

SEQ ID NO: 57990 - RNA, 18 nt, Artificial Sequence
  Synthetic
auuuuacuccucuuugug

SEQ ID NO: 57991 - RNA, 19 nt, Artificial Sequence
  Synthetic
aauuuuacuccucuuugug

SEQ ID NO: 57992 - RNA, 20 nt, Artificial Sequence
  Synthetic
aaauuuuacuccucuuugug

SEQ ID NO: 57993 - RNA, 21 nt, Artificial Sequence
  Synthetic
uaaauuuuacuccucuuugug

SEQ ID NO: 57994 - RNA, 23 nt, Artificial Sequence
  Synthetic
uguaaauuuuacuccucuuugug

SEQ ID NO: 57995 - RNA, 24 nt, Artificial Sequence
  Synthetic
uuguaaauuuuacuccucuuugug

SEQ ID NO: 57996 - RNA, 18 nt, Artificial Sequence
  Synthetic
auuauaaaaaaguuugug

SEQ ID NO: 57997 - RNA, 20 nt, Artificial Sequence
  Synthetic
agauuauaaaaaaguuugug

SEQ ID NO: 57998 - RNA, 22 nt, Artificial Sequence
  Synthetic
agagauuauaaaaaaguuugug

SEQ ID NO: 57999 - RNA, 23 nt, Artificial Sequence
  Synthetic
aagagauuauaaaaaaguuugug

SEQ ID NO: 58000 - RNA, 24 nt, Artificial Sequence
  Synthetic
uaagagauuauaaaaaaguuugug

SEQ ID NO: 58001 - RNA, 18 nt, Artificial Sequence
  Synthetic
ccaacuggaauguuugug

SEQ ID NO: 58002 - RNA, 19 nt, Artificial Sequence
  Synthetic
uccaacuggaauguuugug

SEQ ID NO: 58003 - RNA, 20 nt, Artificial Sequence
  Synthetic
cuccaacuggaauguuugug

SEQ ID NO: 58004 - RNA, 21 nt, Artificial Sequence
  Synthetic
acuccaacuggaauguuugug

SEQ ID NO: 58005 - RNA, 22 nt, Artificial Sequence
  Synthetic
aacuccaacuggaauguuugug

SEQ ID NO: 58006 - RNA, 24 nt, Artificial Sequence
  Synthetic
ugaacuccaacuggaauguuugug

SEQ ID NO: 58007 - RNA, 18 nt, Artificial Sequence
  Synthetic
cugaaagcuuuguuugug

SEQ ID NO: 58008 - RNA, 19 nt, Artificial Sequence
  Synthetic
ucugaaagcuuuguuugug

SEQ ID NO: 58009 - RNA, 20 nt, Artificial Sequence
  Synthetic
uucugaaagcuuuguuugug

SEQ ID NO: 58010 - RNA, 21 nt, Artificial Sequence
  Synthetic
uuucugaaagcuuuguuugug

SEQ ID NO: 58011 - RNA, 22 nt, Artificial Sequence
  Synthetic
uuuucugaaagcuuuguuugug

SEQ ID NO: 58012 - RNA, 23 nt, Artificial Sequence
  Synthetic
auuuucugaaagcuuuguuugug

SEQ ID NO: 58013 - RNA, 19 nt, Artificial Sequence
  Synthetic
agguugccuucauuuugug

SEQ ID NO: 58014 - RNA, 20 nt, Artificial Sequence
  Synthetic
aagguugccuucauuuugug

SEQ ID NO: 58015 - RNA, 21 nt, Artificial Sequence
  Synthetic
aaagguugccuucauuuugug

SEQ ID NO: 58016 - RNA, 22 nt, Artificial Sequence
  Synthetic
uaaagguugccuucauuuugug

SEQ ID NO: 58017 - RNA, 23 nt, Artificial Sequence
  Synthetic
auaaagguugccuucauuuugug

SEQ ID NO: 58018 - RNA, 24 nt, Artificial Sequence
  Synthetic
uauaaagguugccuucauuuugug

SEQ ID NO: 58019 - RNA, 18 nt, Artificial Sequence
  Synthetic
uuaaugcacauuuuugug

SEQ ID NO: 58020 - RNA, 19 nt, Artificial Sequence
  Synthetic
cuuaaugcacauuuuugug

SEQ ID NO: 58021 - RNA, 20 nt, Artificial Sequence
  Synthetic
acuuaaugcacauuuuugug

SEQ ID NO: 58022 - RNA, 21 nt, Artificial Sequence
  Synthetic
uacuuaaugcacauuuuugug

SEQ ID NO: 58023 - RNA, 24 nt, Artificial Sequence
  Synthetic
agguacuuaaugcacauuuuugug

SEQ ID NO: 58024 - RNA, 21 nt, Artificial Sequence
  Synthetic
aaauuaauacugaaaaaauug

SEQ ID NO: 58025 - RNA, 23 nt, Artificial Sequence
  Synthetic
agaaauuaauacugaaaaaauug

SEQ ID NO: 58026 - RNA, 24 nt, Artificial Sequence
  Synthetic
aagaaauuaauacugaaaaaauug

SEQ ID NO: 58027 - RNA, 18 nt, Artificial Sequence
  Synthetic
cuuaagccacuaaaauug

SEQ ID NO: 58028 - RNA, 19 nt, Artificial Sequence
  Synthetic
ucuuaagccacuaaaauug

SEQ ID NO: 58029 - RNA, 20 nt, Artificial Sequence
  Synthetic
uucuuaagccacuaaaauug

SEQ ID NO: 58030 - RNA, 21 nt, Artificial Sequence
  Synthetic
uuucuuaagccacuaaaauug

SEQ ID NO: 58031 - RNA, 22 nt, Artificial Sequence
  Synthetic
uuuucuuaagccacuaaaauug

SEQ ID NO: 58032 - RNA, 23 nt, Artificial Sequence
  Synthetic
cuuuucuuaagccacuaaaauug

SEQ ID NO: 58033 - RNA, 24 nt, Artificial Sequence
  Synthetic
ucuuuucuuaagccacuaaaauug

SEQ ID NO: 58034 - RNA, 18 nt, Artificial Sequence
  Synthetic
agucuuaguuauaaauug

SEQ ID NO: 58035 - RNA, 19 nt, Artificial Sequence
  Synthetic
cagucuuaguuauaaauug

SEQ ID NO: 58036 - RNA, 20 nt, Artificial Sequence
  Synthetic
ccagucuuaguuauaaauug

SEQ ID NO: 58037 - RNA, 21 nt, Artificial Sequence
  Synthetic
uccagucuuaguuauaaauug

SEQ ID NO: 58038 - RNA, 22 nt, Artificial Sequence
  Synthetic
auccagucuuaguuauaaauug

SEQ ID NO: 58039 - RNA, 24 nt, Artificial Sequence
  Synthetic
agauccagucuuaguuauaaauug

SEQ ID NO: 58040 - RNA, 21 nt, Artificial Sequence
  Synthetic
aaacauaaaaaugguaaauug

SEQ ID NO: 58041 - RNA, 22 nt, Artificial Sequence
  Synthetic
uaaacauaaaaaugguaaauug

SEQ ID NO: 58042 - RNA, 23 nt, Artificial Sequence
  Synthetic
auaaacauaaaaaugguaaauug

SEQ ID NO: 58043 - RNA, 24 nt, Artificial Sequence
  Synthetic
cauaaacauaaaaaugguaaauug

SEQ ID NO: 58044 - RNA, 18 nt, Artificial Sequence
  Synthetic
uaagugaaucuuaaauug

SEQ ID NO: 58045 - RNA, 19 nt, Artificial Sequence
  Synthetic
uuaagugaaucuuaaauug

SEQ ID NO: 58046 - RNA, 20 nt, Artificial Sequence
  Synthetic
cuuaagugaaucuuaaauug

SEQ ID NO: 58047 - RNA, 22 nt, Artificial Sequence
  Synthetic
agcuuaagugaaucuuaaauug

SEQ ID NO: 58048 - RNA, 23 nt, Artificial Sequence
  Synthetic
uagcuuaagugaaucuuaaauug

SEQ ID NO: 58049 - RNA, 24 nt, Artificial Sequence
  Synthetic
auagcuuaagugaaucuuaaauug

SEQ ID NO: 58050 - RNA, 18 nt, Artificial Sequence
  Synthetic
auaauuuccuuccaauug

SEQ ID NO: 58051 - RNA, 19 nt, Artificial Sequence
  Synthetic
cauaauuuccuuccaauug

SEQ ID NO: 58052 - RNA, 20 nt, Artificial Sequence
  Synthetic
ccauaauuuccuuccaauug

SEQ ID NO: 58053 - RNA, 21 nt, Artificial Sequence
  Synthetic
uccauaauuuccuuccaauug

SEQ ID NO: 58054 - RNA, 22 nt, Artificial Sequence
  Synthetic
uuccauaauuuccuuccaauug

SEQ ID NO: 58055 - RNA, 23 nt, Artificial Sequence
  Synthetic
uuuccauaauuuccuuccaauug

SEQ ID NO: 58056 - RNA, 24 nt, Artificial Sequence
  Synthetic
auuuccauaauuuccuuccaauug

SEQ ID NO: 58057 - RNA, 18 nt, Artificial Sequence
  Synthetic
cugaagccuuuccaauug

SEQ ID NO: 58058 - RNA, 20 nt, Artificial Sequence
  Synthetic
ugcugaagccuuuccaauug

SEQ ID NO: 58059 - RNA, 21 nt, Artificial Sequence
  Synthetic
augcugaagccuuuccaauug

SEQ ID NO: 58060 - RNA, 23 nt, Artificial Sequence
  Synthetic
ugaugcugaagccuuuccaauug

SEQ ID NO: 58061 - RNA, 24 nt, Artificial Sequence
  Synthetic
uugaugcugaagccuuuccaauug

SEQ ID NO: 58062 - RNA, 18 nt, Artificial Sequence
  Synthetic
ccugauuuucaugaauug

SEQ ID NO: 58063 - RNA, 20 nt, Artificial Sequence
  Synthetic
agccugauuuucaugaauug

SEQ ID NO: 58064 - RNA, 21 nt, Artificial Sequence
  Synthetic
aagccugauuuucaugaauug

SEQ ID NO: 58065 - RNA, 23 nt, Artificial Sequence
  Synthetic
agaagccugauuuucaugaauug

SEQ ID NO: 58066 - RNA, 24 nt, Artificial Sequence
  Synthetic
cagaagccugauuuucaugaauug

SEQ ID NO: 58067 - RNA, 21 nt, Artificial Sequence
  Synthetic
caagagaaauuuauugaauug

SEQ ID NO: 58068 - RNA, 22 nt, Artificial Sequence
  Synthetic
ucaagagaaauuuauugaauug

SEQ ID NO: 58069 - RNA, 23 nt, Artificial Sequence
  Synthetic
uucaagagaaauuuauugaauug

SEQ ID NO: 58070 - RNA, 24 nt, Artificial Sequence
  Synthetic
auucaagagaaauuuauugaauug

SEQ ID NO: 58071 - RNA, 18 nt, Artificial Sequence
  Synthetic
augcuucauuuguaauug

SEQ ID NO: 58072 - RNA, 19 nt, Artificial Sequence
  Synthetic
aaugcuucauuuguaauug

SEQ ID NO: 58073 - RNA, 21 nt, Artificial Sequence
  Synthetic
ugaaugcuucauuuguaauug

SEQ ID NO: 58074 - RNA, 22 nt, Artificial Sequence
  Synthetic
augaaugcuucauuuguaauug

SEQ ID NO: 58075 - RNA, 23 nt, Artificial Sequence
  Synthetic
aaugaaugcuucauuuguaauug

SEQ ID NO: 58076 - RNA, 21 nt, Artificial Sequence
  Synthetic
auuuagcuguugacuuaauug

SEQ ID NO: 58077 - RNA, 22 nt, Artificial Sequence
  Synthetic
uauuuagcuguugacuuaauug

SEQ ID NO: 58078 - RNA, 23 nt, Artificial Sequence
  Synthetic
auauuuagcuguugacuuaauug

SEQ ID NO: 58079 - RNA, 24 nt, Artificial Sequence
  Synthetic
aauauuuagcuguugacuuaauug

SEQ ID NO: 58080 - RNA, 18 nt, Artificial Sequence
  Synthetic
uagaaaaacuguuaauug

SEQ ID NO: 58081 - RNA, 19 nt, Artificial Sequence
  Synthetic
auagaaaaacuguuaauug

SEQ ID NO: 58082 - RNA, 21 nt, Artificial Sequence
  Synthetic
agauagaaaaacuguuaauug

SEQ ID NO: 58083 - RNA, 22 nt, Artificial Sequence
  Synthetic
uagauagaaaaacuguuaauug

SEQ ID NO: 58084 - RNA, 23 nt, Artificial Sequence
  Synthetic
uuagauagaaaaacuguuaauug

SEQ ID NO: 58085 - RNA, 24 nt, Artificial Sequence
  Synthetic
auuagauagaaaaacuguuaauug

SEQ ID NO: 58086 - RNA, 18 nt, Artificial Sequence
  Synthetic
auuauuuagauuuaauug

SEQ ID NO: 58087 - RNA, 19 nt, Artificial Sequence
  Synthetic
uauuauuuagauuuaauug

SEQ ID NO: 58088 - RNA, 20 nt, Artificial Sequence
  Synthetic
uuauuauuuagauuuaauug

SEQ ID NO: 58089 - RNA, 21 nt, Artificial Sequence
  Synthetic
uuuauuauuuagauuuaauug

SEQ ID NO: 58090 - RNA, 22 nt, Artificial Sequence
  Synthetic
uuuuauuauuuagauuuaauug

SEQ ID NO: 58091 - RNA, 24 nt, Artificial Sequence
  Synthetic
aguuuuauuauuuagauuuaauug

SEQ ID NO: 58092 - RNA, 19 nt, Artificial Sequence
  Synthetic
ugcuugaucagaaacauug

SEQ ID NO: 58093 - RNA, 20 nt, Artificial Sequence
  Synthetic
cugcuugaucagaaacauug

SEQ ID NO: 58094 - RNA, 21 nt, Artificial Sequence
  Synthetic
ccugcuugaucagaaacauug

SEQ ID NO: 58095 - RNA, 22 nt, Artificial Sequence
  Synthetic
accugcuugaucagaaacauug

SEQ ID NO: 58096 - RNA, 24 nt, Artificial Sequence
  Synthetic
agaccugcuugaucagaaacauug

SEQ ID NO: 58097 - RNA, 19 nt, Artificial Sequence
  Synthetic
agacaguagggaaacauug

SEQ ID NO: 58098 - RNA, 20 nt, Artificial Sequence
  Synthetic
aagacaguagggaaacauug

SEQ ID NO: 58099 - RNA, 22 nt, Artificial Sequence
  Synthetic
agaagacaguagggaaacauug

SEQ ID NO: 58100 - RNA, 23 nt, Artificial Sequence
  Synthetic
cagaagacaguagggaaacauug

SEQ ID NO: 58101 - RNA, 24 nt, Artificial Sequence
  Synthetic
ccagaagacaguagggaaacauug

SEQ ID NO: 58102 - RNA, 18 nt, Artificial Sequence
  Synthetic
auugugaaauaaacauug

SEQ ID NO: 58103 - RNA, 19 nt, Artificial Sequence
  Synthetic
uauugugaaauaaacauug

SEQ ID NO: 58104 - RNA, 20 nt, Artificial Sequence
  Synthetic
auauugugaaauaaacauug

SEQ ID NO: 58105 - RNA, 21 nt, Artificial Sequence
  Synthetic
cauauugugaaauaaacauug

SEQ ID NO: 58106 - RNA, 22 nt, Artificial Sequence
  Synthetic
acauauugugaaauaaacauug

SEQ ID NO: 58107 - RNA, 23 nt, Artificial Sequence
  Synthetic
cacauauugugaaauaaacauug

SEQ ID NO: 58108 - RNA, 24 nt, Artificial Sequence
  Synthetic
ucacauauugugaaauaaacauug

SEQ ID NO: 58109 - RNA, 18 nt, Artificial Sequence
  Synthetic
cuaucacuaggaacauug

SEQ ID NO: 58110 - RNA, 19 nt, Artificial Sequence
  Synthetic
ucuaucacuaggaacauug

SEQ ID NO: 58111 - RNA, 21 nt, Artificial Sequence
  Synthetic
ugucuaucacuaggaacauug

SEQ ID NO: 58112 - RNA, 22 nt, Artificial Sequence
  Synthetic
cugucuaucacuaggaacauug

SEQ ID NO: 58113 - RNA, 23 nt, Artificial Sequence
  Synthetic
acugucuaucacuaggaacauug

SEQ ID NO: 58114 - RNA, 24 nt, Artificial Sequence
  Synthetic
aacugucuaucacuaggaacauug

SEQ ID NO: 58115 - RNA, 18 nt, Artificial Sequence
  Synthetic
agagcugaacccacauug

SEQ ID NO: 58116 - RNA, 19 nt, Artificial Sequence
  Synthetic
aagagcugaacccacauug

SEQ ID NO: 58117 - RNA, 20 nt, Artificial Sequence
  Synthetic
aaagagcugaacccacauug

SEQ ID NO: 58118 - RNA, 21 nt, Artificial Sequence
  Synthetic
aaaagagcugaacccacauug

SEQ ID NO: 58119 - RNA, 23 nt, Artificial Sequence
  Synthetic
ugaaaagagcugaacccacauug

SEQ ID NO: 58120 - RNA, 24 nt, Artificial Sequence
  Synthetic
uugaaaagagcugaacccacauug

SEQ ID NO: 58121 - RNA, 18 nt, Artificial Sequence
  Synthetic
uggucucccgucacauug

SEQ ID NO: 58122 - RNA, 19 nt, Artificial Sequence
  Synthetic
cuggucucccgucacauug

SEQ ID NO: 58123 - RNA, 21 nt, Artificial Sequence
  Synthetic
ugcuggucucccgucacauug

SEQ ID NO: 58124 - RNA, 22 nt, Artificial Sequence
  Synthetic
uugcuggucucccgucacauug

SEQ ID NO: 58125 - RNA, 23 nt, Artificial Sequence
  Synthetic
cuugcuggucucccgucacauug

SEQ ID NO: 58126 - RNA, 24 nt, Artificial Sequence
  Synthetic
ccuugcuggucucccgucacauug

SEQ ID NO: 58127 - RNA, 18 nt, Artificial Sequence
  Synthetic
auccauauauauacauug

SEQ ID NO: 58128 - RNA, 19 nt, Artificial Sequence
  Synthetic
aauccauauauauacauug

SEQ ID NO: 58129 - RNA, 20 nt, Artificial Sequence
  Synthetic
caauccauauauauacauug

SEQ ID NO: 58130 - RNA, 21 nt, Artificial Sequence
  Synthetic
ucaauccauauauauacauug

SEQ ID NO: 58131 - RNA, 22 nt, Artificial Sequence
  Synthetic
uucaauccauauauauacauug

SEQ ID NO: 58132 - RNA, 23 nt, Artificial Sequence
  Synthetic
uuucaauccauauauauacauug

SEQ ID NO: 58133 - RNA, 19 nt, Artificial Sequence
  Synthetic
agaagcugguauuacauug

SEQ ID NO: 58134 - RNA, 21 nt, Artificial Sequence
  Synthetic
agagaagcugguauuacauug

SEQ ID NO: 58135 - RNA, 22 nt, Artificial Sequence
  Synthetic
aagagaagcugguauuacauug

SEQ ID NO: 58136 - RNA, 18 nt, Artificial Sequence
  Synthetic
caacuccaaaaaccauug

SEQ ID NO: 58137 - RNA, 19 nt, Artificial Sequence
  Synthetic
ucaacuccaaaaaccauug

SEQ ID NO: 58138 - RNA, 20 nt, Artificial Sequence
  Synthetic
cucaacuccaaaaaccauug

SEQ ID NO: 58139 - RNA, 21 nt, Artificial Sequence
  Synthetic
acucaacuccaaaaaccauug

SEQ ID NO: 58140 - RNA, 22 nt, Artificial Sequence
  Synthetic
uacucaacuccaaaaaccauug

SEQ ID NO: 58141 - RNA, 23 nt, Artificial Sequence
  Synthetic
cuacucaacuccaaaaaccauug

SEQ ID NO: 58142 - RNA, 24 nt, Artificial Sequence
  Synthetic
ucuacucaacuccaaaaaccauug

SEQ ID NO: 58143 - RNA, 19 nt, Artificial Sequence
  Synthetic
uguaaguacagaaccauug

SEQ ID NO: 58144 - RNA, 23 nt, Artificial Sequence
  Synthetic
aggguguaaguacagaaccauug

SEQ ID NO: 58145 - RNA, 24 nt, Artificial Sequence
  Synthetic
aaggguguaaguacagaaccauug

SEQ ID NO: 58146 - RNA, 19 nt, Artificial Sequence
  Synthetic
agaggucgguacaccauug

SEQ ID NO: 58147 - RNA, 20 nt, Artificial Sequence
  Synthetic
uagaggucgguacaccauug

SEQ ID NO: 58148 - RNA, 21 nt, Artificial Sequence
  Synthetic
auagaggucgguacaccauug

SEQ ID NO: 58149 - RNA, 22 nt, Artificial Sequence
  Synthetic
aauagaggucgguacaccauug

SEQ ID NO: 58150 - RNA, 23 nt, Artificial Sequence
  Synthetic
uaauagaggucgguacaccauug

SEQ ID NO: 58151 - RNA, 24 nt, Artificial Sequence
  Synthetic
auaauagaggucgguacaccauug

SEQ ID NO: 58152 - RNA, 18 nt, Artificial Sequence
  Synthetic
uugaucgcucuaccauug

SEQ ID NO: 58153 - RNA, 20 nt, Artificial Sequence
  Synthetic
uguugaucgcucuaccauug

SEQ ID NO: 58154 - RNA, 21 nt, Artificial Sequence
  Synthetic
cuguugaucgcucuaccauug

SEQ ID NO: 58155 - RNA, 23 nt, Artificial Sequence
  Synthetic
agcuguugaucgcucuaccauug

SEQ ID NO: 58156 - RNA, 24 nt, Artificial Sequence
  Synthetic
aagcuguugaucgcucuaccauug

SEQ ID NO: 58157 - RNA, 18 nt, Artificial Sequence
  Synthetic
agaaauuaagucccauug

SEQ ID NO: 58158 - RNA, 19 nt, Artificial Sequence
  Synthetic
cagaaauuaagucccauug

SEQ ID NO: 58159 - RNA, 22 nt, Artificial Sequence
  Synthetic
aggcagaaauuaagucccauug

SEQ ID NO: 58160 - RNA, 23 nt, Artificial Sequence
  Synthetic
uaggcagaaauuaagucccauug

SEQ ID NO: 58161 - RNA, 24 nt, Artificial Sequence
  Synthetic
cuaggcagaaauuaagucccauug

SEQ ID NO: 58162 - RNA, 18 nt, Artificial Sequence
  Synthetic
aucuaugucguagcauug

SEQ ID NO: 58163 - RNA, 19 nt, Artificial Sequence
  Synthetic
uaucuaugucguagcauug

SEQ ID NO: 58164 - RNA, 20 nt, Artificial Sequence
  Synthetic
auaucuaugucguagcauug

SEQ ID NO: 58165 - RNA, 19 nt, Artificial Sequence
  Synthetic
aguugcaaagcaugcauug

SEQ ID NO: 58166 - RNA, 20 nt, Artificial Sequence
  Synthetic
uaguugcaaagcaugcauug

SEQ ID NO: 58167 - RNA, 21 nt, Artificial Sequence
  Synthetic
auaguugcaaagcaugcauug

SEQ ID NO: 58168 - RNA, 22 nt, Artificial Sequence
  Synthetic
uauaguugcaaagcaugcauug

SEQ ID NO: 58169 - RNA, 23 nt, Artificial Sequence
  Synthetic
auauaguugcaaagcaugcauug

SEQ ID NO: 58170 - RNA, 24 nt, Artificial Sequence
  Synthetic
uauauaguugcaaagcaugcauug

SEQ ID NO: 58171 - RNA, 18 nt, Artificial Sequence
  Synthetic
uucacagauuaugcauug

SEQ ID NO: 58172 - RNA, 19 nt, Artificial Sequence
  Synthetic
uuucacagauuaugcauug

SEQ ID NO: 58173 - RNA, 20 nt, Artificial Sequence
  Synthetic
auuucacagauuaugcauug

SEQ ID NO: 58174 - RNA, 22 nt, Artificial Sequence
  Synthetic
agauuucacagauuaugcauug

SEQ ID NO: 58175 - RNA, 23 nt, Artificial Sequence
  Synthetic
aagauuucacagauuaugcauug

SEQ ID NO: 58176 - RNA, 24 nt, Artificial Sequence
  Synthetic
aaagauuucacagauuaugcauug

SEQ ID NO: 58177 - RNA, 21 nt, Artificial Sequence
  Synthetic
aauuuugacaggacaucauug

SEQ ID NO: 58178 - RNA, 22 nt, Artificial Sequence
  Synthetic
uaauuuugacaggacaucauug

SEQ ID NO: 58179 - RNA, 23 nt, Artificial Sequence
  Synthetic
auaauuuugacaggacaucauug

SEQ ID NO: 58180 - RNA, 24 nt, Artificial Sequence
  Synthetic
cauaauuuugacaggacaucauug

SEQ ID NO: 58181 - RNA, 18 nt, Artificial Sequence
  Synthetic
agaguucauucaucauug

SEQ ID NO: 58182 - RNA, 19 nt, Artificial Sequence
  Synthetic
aagaguucauucaucauug

SEQ ID NO: 58183 - RNA, 20 nt, Artificial Sequence
  Synthetic
aaagaguucauucaucauug

SEQ ID NO: 58184 - RNA, 21 nt, Artificial Sequence
  Synthetic
caaagaguucauucaucauug

SEQ ID NO: 58185 - RNA, 22 nt, Artificial Sequence
  Synthetic
ucaaagaguucauucaucauug

SEQ ID NO: 58186 - RNA, 23 nt, Artificial Sequence
  Synthetic
uucaaagaguucauucaucauug

SEQ ID NO: 58187 - RNA, 24 nt, Artificial Sequence
  Synthetic
cuucaaagaguucauucaucauug

SEQ ID NO: 58188 - RNA, 18 nt, Artificial Sequence
  Synthetic
agcuagaacaacucauug

SEQ ID NO: 58189 - RNA, 19 nt, Artificial Sequence
  Synthetic
aagcuagaacaacucauug

SEQ ID NO: 58190 - RNA, 22 nt, Artificial Sequence
  Synthetic
aggaagcuagaacaacucauug

SEQ ID NO: 58191 - RNA, 23 nt, Artificial Sequence
  Synthetic
caggaagcuagaacaacucauug

SEQ ID NO: 58192 - RNA, 24 nt, Artificial Sequence
  Synthetic
ucaggaagcuagaacaacucauug

SEQ ID NO: 58193 - RNA, 18 nt, Artificial Sequence
  Synthetic
aucuguacuaugucauug

SEQ ID NO: 58194 - RNA, 19 nt, Artificial Sequence
  Synthetic
aaucuguacuaugucauug

SEQ ID NO: 58195 - RNA, 20 nt, Artificial Sequence
  Synthetic
aaaucuguacuaugucauug

SEQ ID NO: 58196 - RNA, 21 nt, Artificial Sequence
  Synthetic
aaaaucuguacuaugucauug

SEQ ID NO: 58197 - RNA, 22 nt, Artificial Sequence
  Synthetic
uaaaaucuguacuaugucauug

SEQ ID NO: 58198 - RNA, 23 nt, Artificial Sequence
  Synthetic
uuaaaaucuguacuaugucauug

SEQ ID NO: 58199 - RNA, 24 nt, Artificial Sequence
  Synthetic
cuuaaaaucuguacuaugucauug

SEQ ID NO: 58200 - RNA, 18 nt, Artificial Sequence
  Synthetic
cgcaagauaauuucauug

SEQ ID NO: 58201 - RNA, 19 nt, Artificial Sequence
  Synthetic
acgcaagauaauuucauug

SEQ ID NO: 58202 - RNA, 20 nt, Artificial Sequence
  Synthetic
cacgcaagauaauuucauug

SEQ ID NO: 58203 - RNA, 21 nt, Artificial Sequence
  Synthetic
ccacgcaagauaauuucauug

SEQ ID NO: 58204 - RNA, 22 nt, Artificial Sequence
  Synthetic
accacgcaagauaauuucauug

SEQ ID NO: 58205 - RNA, 24 nt, Artificial Sequence
  Synthetic
ugaccacgcaagauaauuucauug

SEQ ID NO: 58206 - RNA, 18 nt, Artificial Sequence
  Synthetic
augaauagagaaagauug

SEQ ID NO: 58207 - RNA, 19 nt, Artificial Sequence
  Synthetic
caugaauagagaaagauug

SEQ ID NO: 58208 - RNA, 21 nt, Artificial Sequence
  Synthetic
agcaugaauagagaaagauug

SEQ ID NO: 58209 - RNA, 22 nt, Artificial Sequence
  Synthetic
aagcaugaauagagaaagauug

SEQ ID NO: 58210 - RNA, 23 nt, Artificial Sequence
  Synthetic
aaagcaugaauagagaaagauug

SEQ ID NO: 58211 - RNA, 24 nt, Artificial Sequence
  Synthetic
caaagcaugaauagagaaagauug

SEQ ID NO: 58212 - RNA, 18 nt, Artificial Sequence
  Synthetic
aaacugaagaccagauug

SEQ ID NO: 58213 - RNA, 19 nt, Artificial Sequence
  Synthetic
aaaacugaagaccagauug

SEQ ID NO: 58214 - RNA, 20 nt, Artificial Sequence
  Synthetic
aaaaacugaagaccagauug

SEQ ID NO: 58215 - RNA, 21 nt, Artificial Sequence
  Synthetic
uaaaaacugaagaccagauug

SEQ ID NO: 58216 - RNA, 22 nt, Artificial Sequence
  Synthetic
uuaaaaacugaagaccagauug

SEQ ID NO: 58217 - RNA, 23 nt, Artificial Sequence
  Synthetic
uuuaaaaacugaagaccagauug

SEQ ID NO: 58218 - RNA, 24 nt, Artificial Sequence
  Synthetic
uuuuaaaaacugaagaccagauug

SEQ ID NO: 58219 - RNA, 18 nt, Artificial Sequence
  Synthetic
uguuaaguugaacgauug

SEQ ID NO: 58220 - RNA, 20 nt, Artificial Sequence
  Synthetic
aguguuaaguugaacgauug

SEQ ID NO: 58221 - RNA, 21 nt, Artificial Sequence
  Synthetic
uaguguuaaguugaacgauug

SEQ ID NO: 58222 - RNA, 22 nt, Artificial Sequence
  Synthetic
uuaguguuaaguugaacgauug

SEQ ID NO: 58223 - RNA, 18 nt, Artificial Sequence
  Synthetic
acuggccucauaggauug

SEQ ID NO: 58224 - RNA, 19 nt, Artificial Sequence
  Synthetic
uacuggccucauaggauug

SEQ ID NO: 58225 - RNA, 20 nt, Artificial Sequence
  Synthetic
cuacuggccucauaggauug

SEQ ID NO: 58226 - RNA, 21 nt, Artificial Sequence
  Synthetic
acuacuggccucauaggauug

SEQ ID NO: 58227 - RNA, 22 nt, Artificial Sequence
  Synthetic
aacuacuggccucauaggauug

SEQ ID NO: 58228 - RNA, 23 nt, Artificial Sequence
  Synthetic
caacuacuggccucauaggauug

SEQ ID NO: 58229 - RNA, 24 nt, Artificial Sequence
  Synthetic
ccaacuacuggccucauaggauug

SEQ ID NO: 58230 - RNA, 22 nt, Artificial Sequence
  Synthetic
cguacacccagaaaugggauug

SEQ ID NO: 58231 - RNA, 23 nt, Artificial Sequence
  Synthetic
ccguacacccagaaaugggauug

SEQ ID NO: 58232 - RNA, 24 nt, Artificial Sequence
  Synthetic
accguacacccagaaaugggauug

SEQ ID NO: 58233 - RNA, 21 nt, Artificial Sequence
  Synthetic
uauuguguagaaaauggauug

SEQ ID NO: 58234 - RNA, 22 nt, Artificial Sequence
  Synthetic
uuauuguguagaaaauggauug

SEQ ID NO: 58235 - RNA, 23 nt, Artificial Sequence
  Synthetic
uuuauuguguagaaaauggauug

SEQ ID NO: 58236 - RNA, 24 nt, Artificial Sequence
  Synthetic
uuuuauuguguagaaaauggauug

SEQ ID NO: 58237 - RNA, 18 nt, Artificial Sequence
  Synthetic
ugguucuugacaugauug

SEQ ID NO: 58238 - RNA, 20 nt, Artificial Sequence
  Synthetic
ugugguucuugacaugauug

SEQ ID NO: 58239 - RNA, 21 nt, Artificial Sequence
  Synthetic
uugugguucuugacaugauug

SEQ ID NO: 58240 - RNA, 22 nt, Artificial Sequence
  Synthetic
auugugguucuugacaugauug

SEQ ID NO: 58241 - RNA, 23 nt, Artificial Sequence
  Synthetic
uauugugguucuugacaugauug

SEQ ID NO: 58242 - RNA, 24 nt, Artificial Sequence
  Synthetic
auauugugguucuugacaugauug

SEQ ID NO: 58243 - RNA, 18 nt, Artificial Sequence
  Synthetic
aucaaagauuucugauug

SEQ ID NO: 58244 - RNA, 20 nt, Artificial Sequence
  Synthetic
agaucaaagauuucugauug

SEQ ID NO: 58245 - RNA, 21 nt, Artificial Sequence
  Synthetic
aagaucaaagauuucugauug

SEQ ID NO: 58246 - RNA, 22 nt, Artificial Sequence
  Synthetic
uaagaucaaagauuucugauug

SEQ ID NO: 58247 - RNA, 23 nt, Artificial Sequence
  Synthetic
auaagaucaaagauuucugauug

SEQ ID NO: 58248 - RNA, 24 nt, Artificial Sequence
  Synthetic
aauaagaucaaagauuucugauug

SEQ ID NO: 58249 - RNA, 18 nt, Artificial Sequence
  Synthetic
uaugguggcaagugauug

SEQ ID NO: 58250 - RNA, 19 nt, Artificial Sequence
  Synthetic
uuaugguggcaagugauug

SEQ ID NO: 58251 - RNA, 20 nt, Artificial Sequence
  Synthetic
auuaugguggcaagugauug

SEQ ID NO: 58252 - RNA, 21 nt, Artificial Sequence
  Synthetic
aauuaugguggcaagugauug

SEQ ID NO: 58253 - RNA, 22 nt, Artificial Sequence
  Synthetic
uaauuaugguggcaagugauug

SEQ ID NO: 58254 - RNA, 24 nt, Artificial Sequence
  Synthetic
uguaauuaugguggcaagugauug

SEQ ID NO: 58255 - RNA, 18 nt, Artificial Sequence
  Synthetic
acuauuuaugggugauug

SEQ ID NO: 58256 - RNA, 19 nt, Artificial Sequence
  Synthetic
aacuauuuaugggugauug

SEQ ID NO: 58257 - RNA, 22 nt, Artificial Sequence
  Synthetic
uggaacuauuuaugggugauug

SEQ ID NO: 58258 - RNA, 23 nt, Artificial Sequence
  Synthetic
uuggaacuauuuaugggugauug

SEQ ID NO: 58259 - RNA, 24 nt, Artificial Sequence
  Synthetic
uuuggaacuauuuaugggugauug

SEQ ID NO: 58260 - RNA, 18 nt, Artificial Sequence
  Synthetic
caaaaauaugauugauug

SEQ ID NO: 58261 - RNA, 19 nt, Artificial Sequence
  Synthetic
ucaaaaauaugauugauug

SEQ ID NO: 58262 - RNA, 20 nt, Artificial Sequence
  Synthetic
aucaaaaauaugauugauug

SEQ ID NO: 58263 - RNA, 21 nt, Artificial Sequence
  Synthetic
caucaaaaauaugauugauug

SEQ ID NO: 58264 - RNA, 23 nt, Artificial Sequence
  Synthetic
ugcaucaaaaauaugauugauug

SEQ ID NO: 58265 - RNA, 24 nt, Artificial Sequence
  Synthetic
augcaucaaaaauaugauugauug

SEQ ID NO: 58266 - RNA, 21 nt, Artificial Sequence
  Synthetic
acacuguaucucucuugauug

SEQ ID NO: 58267 - RNA, 23 nt, Artificial Sequence
  Synthetic
agacacuguaucucucuugauug

SEQ ID NO: 58268 - RNA, 18 nt, Artificial Sequence
  Synthetic
cuuucaugugaaauauug

SEQ ID NO: 58269 - RNA, 19 nt, Artificial Sequence
  Synthetic
ucuuucaugugaaauauug

SEQ ID NO: 58270 - RNA, 21 nt, Artificial Sequence
  Synthetic
agucuuucaugugaaauauug

SEQ ID NO: 58271 - RNA, 23 nt, Artificial Sequence
  Synthetic
agagucuuucaugugaaauauug

SEQ ID NO: 58272 - RNA, 24 nt, Artificial Sequence
  Synthetic
aagagucuuucaugugaaauauug

SEQ ID NO: 58273 - RNA, 18 nt, Artificial Sequence
  Synthetic
auuucacaaacaauauug

SEQ ID NO: 58274 - RNA, 19 nt, Artificial Sequence
  Synthetic
uauuucacaaacaauauug

SEQ ID NO: 58275 - RNA, 20 nt, Artificial Sequence
  Synthetic
uuauuucacaaacaauauug

SEQ ID NO: 58276 - RNA, 21 nt, Artificial Sequence
  Synthetic
uuuauuucacaaacaauauug

SEQ ID NO: 58277 - RNA, 23 nt, Artificial Sequence
  Synthetic
uguuuauuucacaaacaauauug

SEQ ID NO: 58278 - RNA, 24 nt, Artificial Sequence
  Synthetic
cuguuuauuucacaaacaauauug

SEQ ID NO: 58279 - RNA, 18 nt, Artificial Sequence
  Synthetic
uauucuggaagaauauug

SEQ ID NO: 58280 - RNA, 19 nt, Artificial Sequence
  Synthetic
auauucuggaagaauauug

SEQ ID NO: 58281 - RNA, 20 nt, Artificial Sequence
  Synthetic
uauauucuggaagaauauug

SEQ ID NO: 58282 - RNA, 21 nt, Artificial Sequence
  Synthetic
uuauauucuggaagaauauug

SEQ ID NO: 58283 - RNA, 22 nt, Artificial Sequence
  Synthetic
uuuauauucuggaagaauauug

SEQ ID NO: 58284 - RNA, 23 nt, Artificial Sequence
  Synthetic
auuuauauucuggaagaauauug

SEQ ID NO: 58285 - RNA, 24 nt, Artificial Sequence
  Synthetic
cauuuauauucuggaagaauauug

SEQ ID NO: 58286 - RNA, 18 nt, Artificial Sequence
  Synthetic
acgcagcccaacauauug

SEQ ID NO: 58287 - RNA, 19 nt, Artificial Sequence
  Synthetic
uacgcagcccaacauauug

SEQ ID NO: 58288 - RNA, 20 nt, Artificial Sequence
  Synthetic
cuacgcagcccaacauauug

SEQ ID NO: 58289 - RNA, 21 nt, Artificial Sequence
  Synthetic
acuacgcagcccaacauauug

SEQ ID NO: 58290 - RNA, 22 nt, Artificial Sequence
  Synthetic
cacuacgcagcccaacauauug

SEQ ID NO: 58291 - RNA, 21 nt, Artificial Sequence
  Synthetic
cauccauauuguuucauauug

SEQ ID NO: 58292 - RNA, 22 nt, Artificial Sequence
  Synthetic
ccauccauauuguuucauauug

SEQ ID NO: 58293 - RNA, 23 nt, Artificial Sequence
  Synthetic
uccauccauauuguuucauauug

SEQ ID NO: 58294 - RNA, 18 nt, Artificial Sequence
  Synthetic
cccacuccaaaccuauug

SEQ ID NO: 58295 - RNA, 19 nt, Artificial Sequence
  Synthetic
ucccacuccaaaccuauug

SEQ ID NO: 58296 - RNA, 20 nt, Artificial Sequence
  Synthetic
uucccacuccaaaccuauug

SEQ ID NO: 58297 - RNA, 21 nt, Artificial Sequence
  Synthetic
auucccacuccaaaccuauug

SEQ ID NO: 58298 - RNA, 22 nt, Artificial Sequence
  Synthetic
aauucccacuccaaaccuauug

SEQ ID NO: 58299 - RNA, 23 nt, Artificial Sequence
  Synthetic
caauucccacuccaaaccuauug

SEQ ID NO: 58300 - RNA, 24 nt, Artificial Sequence
  Synthetic
ccaauucccacuccaaaccuauug

SEQ ID NO: 58301 - RNA, 22 nt, Artificial Sequence
  Synthetic
uguagaagccauaaaucuauug

SEQ ID NO: 58302 - RNA, 23 nt, Artificial Sequence
  Synthetic
cuguagaagccauaaaucuauug

SEQ ID NO: 58303 - RNA, 24 nt, Artificial Sequence
  Synthetic
ucuguagaagccauaaaucuauug

SEQ ID NO: 58304 - RNA, 18 nt, Artificial Sequence
  Synthetic
uuuaauaaaaauguauug

SEQ ID NO: 58305 - RNA, 19 nt, Artificial Sequence
  Synthetic
cuuuaauaaaaauguauug

SEQ ID NO: 58306 - RNA, 20 nt, Artificial Sequence
  Synthetic
ucuuuaauaaaaauguauug

SEQ ID NO: 58307 - RNA, 21 nt, Artificial Sequence
  Synthetic
uucuuuaauaaaaauguauug

SEQ ID NO: 58308 - RNA, 23 nt, Artificial Sequence
  Synthetic
uguucuuuaauaaaaauguauug

SEQ ID NO: 58309 - RNA, 24 nt, Artificial Sequence
  Synthetic
uuguucuuuaauaaaaauguauug

SEQ ID NO: 58310 - RNA, 18 nt, Artificial Sequence
  Synthetic
auaaagucaaauguauug

SEQ ID NO: 58311 - RNA, 19 nt, Artificial Sequence
  Synthetic
aauaaagucaaauguauug

SEQ ID NO: 58312 - RNA, 21 nt, Artificial Sequence
  Synthetic
agaauaaagucaaauguauug

SEQ ID NO: 58313 - RNA, 22 nt, Artificial Sequence
  Synthetic
aagaauaaagucaaauguauug

SEQ ID NO: 58314 - RNA, 23 nt, Artificial Sequence
  Synthetic
caagaauaaagucaaauguauug

SEQ ID NO: 58315 - RNA, 24 nt, Artificial Sequence
  Synthetic
ccaagaauaaagucaaauguauug

SEQ ID NO: 58316 - RNA, 18 nt, Artificial Sequence
  Synthetic
augagaugggaguuauug

SEQ ID NO: 58317 - RNA, 19 nt, Artificial Sequence
  Synthetic
aaugagaugggaguuauug

SEQ ID NO: 58318 - RNA, 21 nt, Artificial Sequence
  Synthetic
ugaaugagaugggaguuauug

SEQ ID NO: 58319 - RNA, 22 nt, Artificial Sequence
  Synthetic
cugaaugagaugggaguuauug

SEQ ID NO: 58320 - RNA, 23 nt, Artificial Sequence
  Synthetic
ucugaaugagaugggaguuauug

SEQ ID NO: 58321 - RNA, 24 nt, Artificial Sequence
  Synthetic
aucugaaugagaugggaguuauug

SEQ ID NO: 58322 - RNA, 21 nt, Artificial Sequence
  Synthetic
uauaaauaaauguguuuauug

SEQ ID NO: 58323 - RNA, 23 nt, Artificial Sequence
  Synthetic
uguauaaauaaauguguuuauug

SEQ ID NO: 58324 - RNA, 24 nt, Artificial Sequence
  Synthetic
auguauaaauaaauguguuuauug

SEQ ID NO: 58325 - RNA, 18 nt, Artificial Sequence
  Synthetic
caaaugcaccuuuuauug

SEQ ID NO: 58326 - RNA, 19 nt, Artificial Sequence
  Synthetic
ucaaaugcaccuuuuauug

SEQ ID NO: 58327 - RNA, 20 nt, Artificial Sequence
  Synthetic
cucaaaugcaccuuuuauug

SEQ ID NO: 58328 - RNA, 21 nt, Artificial Sequence
  Synthetic
ccucaaaugcaccuuuuauug

SEQ ID NO: 58329 - RNA, 22 nt, Artificial Sequence
  Synthetic
cccucaaaugcaccuuuuauug

SEQ ID NO: 58330 - RNA, 23 nt, Artificial Sequence
  Synthetic
ccccucaaaugcaccuuuuauug

SEQ ID NO: 58331 - RNA, 24 nt, Artificial Sequence
  Synthetic
uccccucaaaugcaccuuuuauug

SEQ ID NO: 58332 - RNA, 18 nt, Artificial Sequence
  Synthetic
aaagcaucaguuuuauug

SEQ ID NO: 58333 - RNA, 20 nt, Artificial Sequence
  Synthetic
ugaaagcaucaguuuuauug

SEQ ID NO: 58334 - RNA, 21 nt, Artificial Sequence
  Synthetic
cugaaagcaucaguuuuauug

SEQ ID NO: 58335 - RNA, 22 nt, Artificial Sequence
  Synthetic
acugaaagcaucaguuuuauug

SEQ ID NO: 58336 - RNA, 23 nt, Artificial Sequence
  Synthetic
uacugaaagcaucaguuuuauug

SEQ ID NO: 58337 - RNA, 24 nt, Artificial Sequence
  Synthetic
uuacugaaagcaucaguuuuauug

SEQ ID NO: 58338 - RNA, 23 nt, Artificial Sequence
  Synthetic
aggaaauuugaagaugagacuug

SEQ ID NO: 58339 - RNA, 24 nt, Artificial Sequence
  Synthetic
aaggaaauuugaagaugagacuug

SEQ ID NO: 58340 - RNA, 19 nt, Artificial Sequence
  Synthetic
ugacaacuguuuagacuug

SEQ ID NO: 58341 - RNA, 20 nt, Artificial Sequence
  Synthetic
uugacaacuguuuagacuug

SEQ ID NO: 58342 - RNA, 21 nt, Artificial Sequence
  Synthetic
cuugacaacuguuuagacuug

SEQ ID NO: 58343 - RNA, 18 nt, Artificial Sequence
  Synthetic
aguuaaaauacugacuug

SEQ ID NO: 58344 - RNA, 20 nt, Artificial Sequence
  Synthetic
agaguuaaaauacugacuug

SEQ ID NO: 58345 - RNA, 21 nt, Artificial Sequence
  Synthetic
cagaguuaaaauacugacuug

SEQ ID NO: 58346 - RNA, 23 nt, Artificial Sequence
  Synthetic
agcagaguuaaaauacugacuug

SEQ ID NO: 58347 - RNA, 24 nt, Artificial Sequence
  Synthetic
uagcagaguuaaaauacugacuug

SEQ ID NO: 58348 - RNA, 18 nt, Artificial Sequence
  Synthetic
cauuaucucauugacuug

SEQ ID NO: 58349 - RNA, 19 nt, Artificial Sequence
  Synthetic
ccauuaucucauugacuug

SEQ ID NO: 58350 - RNA, 21 nt, Artificial Sequence
  Synthetic
agccauuaucucauugacuug

SEQ ID NO: 58351 - RNA, 22 nt, Artificial Sequence
  Synthetic
aagccauuaucucauugacuug

SEQ ID NO: 58352 - RNA, 23 nt, Artificial Sequence
  Synthetic
uaagccauuaucucauugacuug

SEQ ID NO: 58353 - RNA, 24 nt, Artificial Sequence
  Synthetic
auaagccauuaucucauugacuug

SEQ ID NO: 58354 - RNA, 19 nt, Artificial Sequence
  Synthetic
ugauuucagguuugacuug

SEQ ID NO: 58355 - RNA, 20 nt, Artificial Sequence
  Synthetic
augauuucagguuugacuug

SEQ ID NO: 58356 - RNA, 21 nt, Artificial Sequence
  Synthetic
caugauuucagguuugacuug

SEQ ID NO: 58357 - RNA, 22 nt, Artificial Sequence
  Synthetic
ccaugauuucagguuugacuug

SEQ ID NO: 58358 - RNA, 24 nt, Artificial Sequence
  Synthetic
agccaugauuucagguuugacuug

SEQ ID NO: 58359 - RNA, 18 nt, Artificial Sequence
  Synthetic
aauaauuaugcauacuug

SEQ ID NO: 58360 - RNA, 21 nt, Artificial Sequence
  Synthetic
uggaauaauuaugcauacuug

SEQ ID NO: 58361 - RNA, 23 nt, Artificial Sequence
  Synthetic
uguggaauaauuaugcauacuug

SEQ ID NO: 58362 - RNA, 24 nt, Artificial Sequence
  Synthetic
uuguggaauaauuaugcauacuug

SEQ ID NO: 58363 - RNA, 18 nt, Artificial Sequence
  Synthetic
acugcuggcauauacuug

SEQ ID NO: 58364 - RNA, 19 nt, Artificial Sequence
  Synthetic
cacugcuggcauauacuug

SEQ ID NO: 58365 - RNA, 20 nt, Artificial Sequence
  Synthetic
acacugcuggcauauacuug

SEQ ID NO: 58366 - RNA, 23 nt, Artificial Sequence
  Synthetic
aggacacugcuggcauauacuug

SEQ ID NO: 58367 - RNA, 24 nt, Artificial Sequence
  Synthetic
uaggacacugcuggcauauacuug

SEQ ID NO: 58368 - RNA, 18 nt, Artificial Sequence
  Synthetic
cccuacguugucuacuug

SEQ ID NO: 58369 - RNA, 19 nt, Artificial Sequence
  Synthetic
ccccuacguugucuacuug

SEQ ID NO: 58370 - RNA, 20 nt, Artificial Sequence
  Synthetic
cccccuacguugucuacuug

SEQ ID NO: 58371 - RNA, 21 nt, Artificial Sequence
  Synthetic
ucccccuacguugucuacuug

SEQ ID NO: 58372 - RNA, 22 nt, Artificial Sequence
  Synthetic
aucccccuacguugucuacuug

SEQ ID NO: 58373 - RNA, 18 nt, Artificial Sequence
  Synthetic
uaaguaauaacuaccuug

SEQ ID NO: 58374 - RNA, 19 nt, Artificial Sequence
  Synthetic
cuaaguaauaacuaccuug

SEQ ID NO: 58375 - RNA, 20 nt, Artificial Sequence
  Synthetic
ucuaaguaauaacuaccuug

SEQ ID NO: 58376 - RNA, 21 nt, Artificial Sequence
  Synthetic
uucuaaguaauaacuaccuug

SEQ ID NO: 58377 - RNA, 22 nt, Artificial Sequence
  Synthetic
cuucuaaguaauaacuaccuug

SEQ ID NO: 58378 - RNA, 23 nt, Artificial Sequence
  Synthetic
ccuucuaaguaauaacuaccuug

SEQ ID NO: 58379 - RNA, 24 nt, Artificial Sequence
  Synthetic
uccuucuaaguaauaacuaccuug

SEQ ID NO: 58380 - RNA, 18 nt, Artificial Sequence
  Synthetic
cuuaucagacaacccuug

SEQ ID NO: 58381 - RNA, 19 nt, Artificial Sequence
  Synthetic
ucuuaucagacaacccuug

SEQ ID NO: 58382 - RNA, 20 nt, Artificial Sequence
  Synthetic
aucuuaucagacaacccuug

SEQ ID NO: 58383 - RNA, 21 nt, Artificial Sequence
  Synthetic
uaucuuaucagacaacccuug

SEQ ID NO: 58384 - RNA, 22 nt, Artificial Sequence
  Synthetic
uuaucuuaucagacaacccuug

SEQ ID NO: 58385 - RNA, 19 nt, Artificial Sequence
  Synthetic
aggauacugaugccccuug

SEQ ID NO: 58386 - RNA, 20 nt, Artificial Sequence
  Synthetic
caggauacugaugccccuug

SEQ ID NO: 58387 - RNA, 21 nt, Artificial Sequence
  Synthetic
ucaggauacugaugccccuug

SEQ ID NO: 58388 - RNA, 22 nt, Artificial Sequence
  Synthetic
aucaggauacugaugccccuug

SEQ ID NO: 58389 - RNA, 23 nt, Artificial Sequence
  Synthetic
uaucaggauacugaugccccuug

SEQ ID NO: 58390 - RNA, 24 nt, Artificial Sequence
  Synthetic
auaucaggauacugaugccccuug

SEQ ID NO: 58391 - RNA, 19 nt, Artificial Sequence
  Synthetic
ugugagagagauucccuug

SEQ ID NO: 58392 - RNA, 21 nt, Artificial Sequence
  Synthetic
ugugugagagagauucccuug

SEQ ID NO: 58393 - RNA, 22 nt, Artificial Sequence
  Synthetic
cugugugagagagauucccuug

SEQ ID NO: 58394 - RNA, 23 nt, Artificial Sequence
  Synthetic
acugugugagagagauucccuug

SEQ ID NO: 58395 - RNA, 18 nt, Artificial Sequence
  Synthetic
uuuugagauaaagccuug

SEQ ID NO: 58396 - RNA, 19 nt, Artificial Sequence
  Synthetic
auuuugagauaaagccuug

SEQ ID NO: 58397 - RNA, 20 nt, Artificial Sequence
  Synthetic
uauuuugagauaaagccuug

SEQ ID NO: 58398 - RNA, 21 nt, Artificial Sequence
  Synthetic
cuauuuugagauaaagccuug

SEQ ID NO: 58399 - RNA, 22 nt, Artificial Sequence
  Synthetic
ucuauuuugagauaaagccuug

SEQ ID NO: 58400 - RNA, 23 nt, Artificial Sequence
  Synthetic
cucuauuuugagauaaagccuug

SEQ ID NO: 58401 - RNA, 24 nt, Artificial Sequence
  Synthetic
acucuauuuugagauaaagccuug

SEQ ID NO: 58402 - RNA, 19 nt, Artificial Sequence
  Synthetic
ugccagugcaacauccuug

SEQ ID NO: 58403 - RNA, 20 nt, Artificial Sequence
  Synthetic
cugccagugcaacauccuug

SEQ ID NO: 58404 - RNA, 22 nt, Artificial Sequence
  Synthetic
agcugccagugcaacauccuug

SEQ ID NO: 58405 - RNA, 23 nt, Artificial Sequence
  Synthetic
cagcugccagugcaacauccuug

SEQ ID NO: 58406 - RNA, 24 nt, Artificial Sequence
  Synthetic
ucagcugccagugcaacauccuug

SEQ ID NO: 58407 - RNA, 18 nt, Artificial Sequence
  Synthetic
ucacauaccucauccuug

SEQ ID NO: 58408 - RNA, 19 nt, Artificial Sequence
  Synthetic
uucacauaccucauccuug

SEQ ID NO: 58409 - RNA, 21 nt, Artificial Sequence
  Synthetic
aguucacauaccucauccuug

SEQ ID NO: 58410 - RNA, 22 nt, Artificial Sequence
  Synthetic
caguucacauaccucauccuug

SEQ ID NO: 58411 - RNA, 23 nt, Artificial Sequence
  Synthetic
ccaguucacauaccucauccuug

SEQ ID NO: 58412 - RNA, 24 nt, Artificial Sequence
  Synthetic
uccaguucacauaccucauccuug

SEQ ID NO: 58413 - RNA, 18 nt, Artificial Sequence
  Synthetic
aguaccagaaucuccuug

SEQ ID NO: 58414 - RNA, 19 nt, Artificial Sequence
  Synthetic
uaguaccagaaucuccuug

SEQ ID NO: 58415 - RNA, 21 nt, Artificial Sequence
  Synthetic
uguaguaccagaaucuccuug

SEQ ID NO: 58416 - RNA, 22 nt, Artificial Sequence
  Synthetic
cuguaguaccagaaucuccuug

SEQ ID NO: 58417 - RNA, 23 nt, Artificial Sequence
  Synthetic
ucuguaguaccagaaucuccuug

SEQ ID NO: 58418 - RNA, 24 nt, Artificial Sequence
  Synthetic
uucuguaguaccagaaucuccuug

SEQ ID NO: 58419 - RNA, 21 nt, Artificial Sequence
  Synthetic
agaagaaguaaaauuuccuug

SEQ ID NO: 58420 - RNA, 22 nt, Artificial Sequence
  Synthetic
uagaagaaguaaaauuuccuug

SEQ ID NO: 58421 - RNA, 23 nt, Artificial Sequence
  Synthetic
auagaagaaguaaaauuuccuug

SEQ ID NO: 58422 - RNA, 24 nt, Artificial Sequence
  Synthetic
cauagaagaaguaaaauuuccuug

SEQ ID NO: 58423 - RNA, 18 nt, Artificial Sequence
  Synthetic
aaacucaguaaaagcuug

SEQ ID NO: 58424 - RNA, 19 nt, Artificial Sequence
  Synthetic
caaacucaguaaaagcuug

SEQ ID NO: 58425 - RNA, 21 nt, Artificial Sequence
  Synthetic
ugcaaacucaguaaaagcuug

SEQ ID NO: 58426 - RNA, 23 nt, Artificial Sequence
  Synthetic
agugcaaacucaguaaaagcuug

SEQ ID NO: 58427 - RNA, 24 nt, Artificial Sequence
  Synthetic
uagugcaaacucaguaaaagcuug

SEQ ID NO: 58428 - RNA, 18 nt, Artificial Sequence
  Synthetic
uaauccucucacagcuug

SEQ ID NO: 58429 - RNA, 19 nt, Artificial Sequence
  Synthetic
cuaauccucucacagcuug

SEQ ID NO: 58430 - RNA, 20 nt, Artificial Sequence
  Synthetic
acuaauccucucacagcuug

SEQ ID NO: 58431 - RNA, 22 nt, Artificial Sequence
  Synthetic
ugacuaauccucucacagcuug

SEQ ID NO: 58432 - RNA, 24 nt, Artificial Sequence
  Synthetic
ugugacuaauccucucacagcuug

SEQ ID NO: 58433 - RNA, 18 nt, Artificial Sequence
  Synthetic
cugccugcauacagcuug

SEQ ID NO: 58434 - RNA, 20 nt, Artificial Sequence
  Synthetic
ugcugccugcauacagcuug

SEQ ID NO: 58435 - RNA, 21 nt, Artificial Sequence
  Synthetic
uugcugccugcauacagcuug

SEQ ID NO: 58436 - RNA, 22 nt, Artificial Sequence
  Synthetic
uuugcugccugcauacagcuug

SEQ ID NO: 58437 - RNA, 23 nt, Artificial Sequence
  Synthetic
auuugcugccugcauacagcuug

SEQ ID NO: 58438 - RNA, 24 nt, Artificial Sequence
  Synthetic
aauuugcugccugcauacagcuug

SEQ ID NO: 58439 - RNA, 18 nt, Artificial Sequence
  Synthetic
ucuggaaaagccagcuug

SEQ ID NO: 58440 - RNA, 20 nt, Artificial Sequence
  Synthetic
agucuggaaaagccagcuug

SEQ ID NO: 58441 - RNA, 21 nt, Artificial Sequence
  Synthetic
cagucuggaaaagccagcuug

SEQ ID NO: 58442 - RNA, 22 nt, Artificial Sequence
  Synthetic
ucagucuggaaaagccagcuug

SEQ ID NO: 58443 - RNA, 23 nt, Artificial Sequence
  Synthetic
cucagucuggaaaagccagcuug

SEQ ID NO: 58444 - RNA, 24 nt, Artificial Sequence
  Synthetic
ccucagucuggaaaagccagcuug

SEQ ID NO: 58445 - RNA, 18 nt, Artificial Sequence
  Synthetic
acacaauccaucagcuug

SEQ ID NO: 58446 - RNA, 19 nt, Artificial Sequence
  Synthetic
cacacaauccaucagcuug

SEQ ID NO: 58447 - RNA, 20 nt, Artificial Sequence
  Synthetic
acacacaauccaucagcuug

SEQ ID NO: 58448 - RNA, 21 nt, Artificial Sequence
  Synthetic
aacacacaauccaucagcuug

SEQ ID NO: 58449 - RNA, 22 nt, Artificial Sequence
  Synthetic
caacacacaauccaucagcuug

SEQ ID NO: 58450 - RNA, 23 nt, Artificial Sequence
  Synthetic
acaacacacaauccaucagcuug

SEQ ID NO: 58451 - RNA, 24 nt, Artificial Sequence
  Synthetic
aacaacacacaauccaucagcuug

SEQ ID NO: 58452 - RNA, 18 nt, Artificial Sequence
  Synthetic
cuuauaucaaagagcuug

SEQ ID NO: 58453 - RNA, 19 nt, Artificial Sequence
  Synthetic
acuuauaucaaagagcuug

SEQ ID NO: 58454 - RNA, 20 nt, Artificial Sequence
  Synthetic
cacuuauaucaaagagcuug

SEQ ID NO: 58455 - RNA, 21 nt, Artificial Sequence
  Synthetic
acacuuauaucaaagagcuug

SEQ ID NO: 58456 - RNA, 22 nt, Artificial Sequence
  Synthetic
aacacuuauaucaaagagcuug

SEQ ID NO: 58457 - RNA, 24 nt, Artificial Sequence
  Synthetic
ugaacacuuauaucaaagagcuug

SEQ ID NO: 58458 - RNA, 18 nt, Artificial Sequence
  Synthetic
auaaauguggauagcuug

SEQ ID NO: 58459 - RNA, 19 nt, Artificial Sequence
  Synthetic
aauaaauguggauagcuug

SEQ ID NO: 58460 - RNA, 20 nt, Artificial Sequence
  Synthetic
caauaaauguggauagcuug

SEQ ID NO: 58461 - RNA, 21 nt, Artificial Sequence
  Synthetic
ucaauaaauguggauagcuug

SEQ ID NO: 58462 - RNA, 22 nt, Artificial Sequence
  Synthetic
cucaauaaauguggauagcuug

SEQ ID NO: 58463 - RNA, 23 nt, Artificial Sequence
  Synthetic
ucucaauaaauguggauagcuug

SEQ ID NO: 58464 - RNA, 24 nt, Artificial Sequence
  Synthetic
uucucaauaaauguggauagcuug

SEQ ID NO: 58465 - RNA, 18 nt, Artificial Sequence
  Synthetic
aguauguauguuagcuug

SEQ ID NO: 58466 - RNA, 19 nt, Artificial Sequence
  Synthetic
uaguauguauguuagcuug

SEQ ID NO: 58467 - RNA, 20 nt, Artificial Sequence
  Synthetic
uuaguauguauguuagcuug

SEQ ID NO: 58468 - RNA, 21 nt, Artificial Sequence
  Synthetic
uuuaguauguauguuagcuug

SEQ ID NO: 58469 - RNA, 22 nt, Artificial Sequence
  Synthetic
uuuuaguauguauguuagcuug

SEQ ID NO: 58470 - RNA, 23 nt, Artificial Sequence
  Synthetic
auuuuaguauguauguuagcuug

SEQ ID NO: 58471 - RNA, 24 nt, Artificial Sequence
  Synthetic
cauuuuaguauguauguuagcuug

SEQ ID NO: 58472 - RNA, 18 nt, Artificial Sequence
  Synthetic
uauuacagugcaugcuug

SEQ ID NO: 58473 - RNA, 19 nt, Artificial Sequence
  Synthetic
uuauuacagugcaugcuug

SEQ ID NO: 58474 - RNA, 20 nt, Artificial Sequence
  Synthetic
cuuauuacagugcaugcuug

SEQ ID NO: 58475 - RNA, 21 nt, Artificial Sequence
  Synthetic
ccuuauuacagugcaugcuug

SEQ ID NO: 58476 - RNA, 22 nt, Artificial Sequence
  Synthetic
cccuuauuacagugcaugcuug

SEQ ID NO: 58477 - RNA, 23 nt, Artificial Sequence
  Synthetic
acccuuauuacagugcaugcuug

SEQ ID NO: 58478 - RNA, 18 nt, Artificial Sequence
  Synthetic
ccauuuauuuagugcuug

SEQ ID NO: 58479 - RNA, 19 nt, Artificial Sequence
  Synthetic
accauuuauuuagugcuug

SEQ ID NO: 58480 - RNA, 20 nt, Artificial Sequence
  Synthetic
uaccauuuauuuagugcuug

SEQ ID NO: 58481 - RNA, 21 nt, Artificial Sequence
  Synthetic
uaaucucccuucucuugcuug

SEQ ID NO: 58482 - RNA, 22 nt, Artificial Sequence
  Synthetic
cuaaucucccuucucuugcuug

SEQ ID NO: 58483 - RNA, 23 nt, Artificial Sequence
  Synthetic
ucuaaucucccuucucuugcuug

SEQ ID NO: 58484 - RNA, 24 nt, Artificial Sequence
  Synthetic
aucuaaucucccuucucuugcuug

SEQ ID NO: 58485 - RNA, 18 nt, Artificial Sequence
  Synthetic
caucuguucucuugcuug

SEQ ID NO: 58486 - RNA, 20 nt, Artificial Sequence
  Synthetic
ugcaucuguucucuugcuug

SEQ ID NO: 58487 - RNA, 21 nt, Artificial Sequence
  Synthetic
uugcaucuguucucuugcuug

SEQ ID NO: 58488 - RNA, 23 nt, Artificial Sequence
  Synthetic
uguugcaucuguucucuugcuug

SEQ ID NO: 58489 - RNA, 18 nt, Artificial Sequence
  Synthetic
acguuauaaaagaucuug

SEQ ID NO: 58490 - RNA, 19 nt, Artificial Sequence
  Synthetic
cacguuauaaaagaucuug

SEQ ID NO: 58491 - RNA, 20 nt, Artificial Sequence
  Synthetic
ccacguuauaaaagaucuug

SEQ ID NO: 58492 - RNA, 23 nt, Artificial Sequence
  Synthetic
aggccacguuauaaaagaucuug

SEQ ID NO: 58493 - RNA, 24 nt, Artificial Sequence
  Synthetic
aaggccacguuauaaaagaucuug

SEQ ID NO: 58494 - RNA, 21 nt, Artificial Sequence
  Synthetic
uguaaauuauuuccacucuug

SEQ ID NO: 58495 - RNA, 22 nt, Artificial Sequence
  Synthetic
auguaaauuauuuccacucuug

SEQ ID NO: 58496 - RNA, 23 nt, Artificial Sequence
  Synthetic
cauguaaauuauuuccacucuug

SEQ ID NO: 58497 - RNA, 24 nt, Artificial Sequence
  Synthetic
ccauguaaauuauuuccacucuug

SEQ ID NO: 58498 - RNA, 18 nt, Artificial Sequence
  Synthetic
caggcacacagccucuug

SEQ ID NO: 58499 - RNA, 20 nt, Artificial Sequence
  Synthetic
ugcaggcacacagccucuug

SEQ ID NO: 58500 - RNA, 21 nt, Artificial Sequence
  Synthetic
augcaggcacacagccucuug

SEQ ID NO: 58501 - RNA, 22 nt, Artificial Sequence
  Synthetic
aaugcaggcacacagccucuug

SEQ ID NO: 58502 - RNA, 24 nt, Artificial Sequence
  Synthetic
ugaaugcaggcacacagccucuug

SEQ ID NO: 58503 - RNA, 18 nt, Artificial Sequence
  Synthetic
agaaaauccguagucuug

SEQ ID NO: 58504 - RNA, 19 nt, Artificial Sequence
  Synthetic
cagaaaauccguagucuug

SEQ ID NO: 58505 - RNA, 20 nt, Artificial Sequence
  Synthetic
acagaaaauccguagucuug

SEQ ID NO: 58506 - RNA, 21 nt, Artificial Sequence
  Synthetic
aacagaaaauccguagucuug

SEQ ID NO: 58507 - RNA, 22 nt, Artificial Sequence
  Synthetic
aaacagaaaauccguagucuug

SEQ ID NO: 58508 - RNA, 24 nt, Artificial Sequence
  Synthetic
agaaacagaaaauccguagucuug

SEQ ID NO: 58509 - RNA, 18 nt, Artificial Sequence
  Synthetic
cuuguaugaccugucuug

SEQ ID NO: 58510 - RNA, 19 nt, Artificial Sequence
  Synthetic
ucuuguaugaccugucuug

SEQ ID NO: 58511 - RNA, 20 nt, Artificial Sequence
  Synthetic
cucuuguaugaccugucuug

SEQ ID NO: 58512 - RNA, 21 nt, Artificial Sequence
  Synthetic
ucucuuguaugaccugucuug

SEQ ID NO: 58513 - RNA, 24 nt, Artificial Sequence
  Synthetic
uggucucuuguaugaccugucuug

SEQ ID NO: 58514 - RNA, 21 nt, Artificial Sequence
  Synthetic
aaaaauaaauauuucuucuug

SEQ ID NO: 58515 - RNA, 23 nt, Artificial Sequence
  Synthetic
agaaaaauaaauauuucuucuug

SEQ ID NO: 58516 - RNA, 24 nt, Artificial Sequence
  Synthetic
aagaaaaauaaauauuucuucuug

SEQ ID NO: 58517 - RNA, 18 nt, Artificial Sequence
  Synthetic
accucugacauguucuug

SEQ ID NO: 58518 - RNA, 19 nt, Artificial Sequence
  Synthetic
aaccucugacauguucuug

SEQ ID NO: 58519 - RNA, 20 nt, Artificial Sequence
  Synthetic
caaccucugacauguucuug

SEQ ID NO: 58520 - RNA, 23 nt, Artificial Sequence
  Synthetic
uggcaaccucugacauguucuug

SEQ ID NO: 58521 - RNA, 24 nt, Artificial Sequence
  Synthetic
uuggcaaccucugacauguucuug

SEQ ID NO: 58522 - RNA, 18 nt, Artificial Sequence
  Synthetic
uauacagacguaaaguug

SEQ ID NO: 58523 - RNA, 19 nt, Artificial Sequence
  Synthetic
uuauacagacguaaaguug

SEQ ID NO: 58524 - RNA, 20 nt, Artificial Sequence
  Synthetic
uuuauacagacguaaaguug

SEQ ID NO: 58525 - RNA, 18 nt, Artificial Sequence
  Synthetic
aacauguagaauaaguug

SEQ ID NO: 58526 - RNA, 20 nt, Artificial Sequence
  Synthetic
agaacauguagaauaaguug

SEQ ID NO: 58527 - RNA, 21 nt, Artificial Sequence
  Synthetic
aagaacauguagaauaaguug

SEQ ID NO: 58528 - RNA, 22 nt, Artificial Sequence
  Synthetic
caagaacauguagaauaaguug

SEQ ID NO: 58529 - RNA, 23 nt, Artificial Sequence
  Synthetic
ucaagaacauguagaauaaguug

SEQ ID NO: 58530 - RNA, 18 nt, Artificial Sequence
  Synthetic
ucagauuaggguaaguug

SEQ ID NO: 58531 - RNA, 19 nt, Artificial Sequence
  Synthetic
uucagauuaggguaaguug

SEQ ID NO: 58532 - RNA, 20 nt, Artificial Sequence
  Synthetic
auucagauuaggguaaguug

SEQ ID NO: 58533 - RNA, 21 nt, Artificial Sequence
  Synthetic
cauucagauuaggguaaguug

SEQ ID NO: 58534 - RNA, 22 nt, Artificial Sequence
  Synthetic
acauucagauuaggguaaguug

SEQ ID NO: 58535 - RNA, 23 nt, Artificial Sequence
  Synthetic
cacauucagauuaggguaaguug

SEQ ID NO: 58536 - RNA, 18 nt, Artificial Sequence
  Synthetic
uauuucacaauuaaguug

SEQ ID NO: 58537 - RNA, 19 nt, Artificial Sequence
  Synthetic
uuauuucacaauuaaguug

SEQ ID NO: 58538 - RNA, 20 nt, Artificial Sequence
  Synthetic
uuuauuucacaauuaaguug

SEQ ID NO: 58539 - RNA, 21 nt, Artificial Sequence
  Synthetic
auuuauuucacaauuaaguug

SEQ ID NO: 58540 - RNA, 22 nt, Artificial Sequence
  Synthetic
uauuuauuucacaauuaaguug

SEQ ID NO: 58541 - RNA, 24 nt, Artificial Sequence
  Synthetic
uguauuuauuucacaauuaaguug

SEQ ID NO: 58542 - RNA, 19 nt, Artificial Sequence
  Synthetic
agccuauaaaccacaguug

SEQ ID NO: 58543 - RNA, 20 nt, Artificial Sequence
  Synthetic
uagccuauaaaccacaguug

SEQ ID NO: 58544 - RNA, 21 nt, Artificial Sequence
  Synthetic
uuagccuauaaaccacaguug

SEQ ID NO: 58545 - RNA, 22 nt, Artificial Sequence
  Synthetic
uuuagccuauaaaccacaguug

SEQ ID NO: 58546 - RNA, 23 nt, Artificial Sequence
  Synthetic
uuuuagccuauaaaccacaguug

SEQ ID NO: 58547 - RNA, 18 nt, Artificial Sequence
  Synthetic
ugaagggacugacaguug

SEQ ID NO: 58548 - RNA, 19 nt, Artificial Sequence
  Synthetic
cugaagggacugacaguug

SEQ ID NO: 58549 - RNA, 20 nt, Artificial Sequence
  Synthetic
ccugaagggacugacaguug

SEQ ID NO: 58550 - RNA, 21 nt, Artificial Sequence
  Synthetic
aauccugaugaauuacaguug

SEQ ID NO: 58551 - RNA, 22 nt, Artificial Sequence
  Synthetic
uaauccugaugaauuacaguug

SEQ ID NO: 58552 - RNA, 23 nt, Artificial Sequence
  Synthetic
auaauccugaugaauuacaguug

SEQ ID NO: 58553 - RNA, 24 nt, Artificial Sequence
  Synthetic
aauaauccugaugaauuacaguug

SEQ ID NO: 58554 - RNA, 18 nt, Artificial Sequence
  Synthetic
cugccgaaaucgcaguug

SEQ ID NO: 58555 - RNA, 20 nt, Artificial Sequence
  Synthetic
agcugccgaaaucgcaguug

SEQ ID NO: 58556 - RNA, 21 nt, Artificial Sequence
  Synthetic
aagcugccgaaaucgcaguug

SEQ ID NO: 58557 - RNA, 23 nt, Artificial Sequence
  Synthetic
ugaagcugccgaaaucgcaguug

SEQ ID NO: 58558 - RNA, 24 nt, Artificial Sequence
  Synthetic
augaagcugccgaaaucgcaguug

SEQ ID NO: 58559 - RNA, 18 nt, Artificial Sequence
  Synthetic
caaagcacuuaagaguug

SEQ ID NO: 58560 - RNA, 19 nt, Artificial Sequence
  Synthetic
ucaaagcacuuaagaguug

SEQ ID NO: 58561 - RNA, 20 nt, Artificial Sequence
  Synthetic
uucaaagcacuuaagaguug

SEQ ID NO: 58562 - RNA, 22 nt, Artificial Sequence
  Synthetic
aguucaaagcacuuaagaguug

SEQ ID NO: 58563 - RNA, 23 nt, Artificial Sequence
  Synthetic
uaguucaaagcacuuaagaguug

SEQ ID NO: 58564 - RNA, 24 nt, Artificial Sequence
  Synthetic
auaguucaaagcacuuaagaguug

SEQ ID NO: 58565 - RNA, 18 nt, Artificial Sequence
  Synthetic
cauuugcccagggaguug

SEQ ID NO: 58566 - RNA, 19 nt, Artificial Sequence
  Synthetic
acauuugcccagggaguug

SEQ ID NO: 58567 - RNA, 20 nt, Artificial Sequence
  Synthetic
aacauuugcccagggaguug

SEQ ID NO: 58568 - RNA, 21 nt, Artificial Sequence
  Synthetic
aaacauuugcccagggaguug

SEQ ID NO: 58569 - RNA, 23 nt, Artificial Sequence
  Synthetic
ugaaacauuugcccagggaguug

SEQ ID NO: 58570 - RNA, 24 nt, Artificial Sequence
  Synthetic
uugaaacauuugcccagggaguug

SEQ ID NO: 58571 - RNA, 18 nt, Artificial Sequence
  Synthetic
uuuugagcuugggaguug

SEQ ID NO: 58572 - RNA, 19 nt, Artificial Sequence
  Synthetic
cuuuugagcuugggaguug

SEQ ID NO: 58573 - RNA, 20 nt, Artificial Sequence
  Synthetic
acuuuugagcuugggaguug

SEQ ID NO: 58574 - RNA, 21 nt, Artificial Sequence
  Synthetic
uacuuuugagcuugggaguug

SEQ ID NO: 58575 - RNA, 22 nt, Artificial Sequence
  Synthetic
cuacuuuugagcuugggaguug

SEQ ID NO: 58576 - RNA, 23 nt, Artificial Sequence
  Synthetic
acuacuuuugagcuugggaguug

SEQ ID NO: 58577 - RNA, 24 nt, Artificial Sequence
  Synthetic
cacuacuuuugagcuugggaguug

SEQ ID NO: 58578 - RNA, 18 nt, Artificial Sequence
  Synthetic
ucacucaaucaugaguug

SEQ ID NO: 58579 - RNA, 19 nt, Artificial Sequence
  Synthetic
uucacucaaucaugaguug

SEQ ID NO: 58580 - RNA, 20 nt, Artificial Sequence
  Synthetic
cuucacucaaucaugaguug

SEQ ID NO: 58581 - RNA, 21 nt, Artificial Sequence
  Synthetic
ucuucacucaaucaugaguug

SEQ ID NO: 58582 - RNA, 23 nt, Artificial Sequence
  Synthetic
ugucuucacucaaucaugaguug

SEQ ID NO: 58583 - RNA, 18 nt, Artificial Sequence
  Synthetic
caagucaguaaauaguug

SEQ ID NO: 58584 - RNA, 19 nt, Artificial Sequence
  Synthetic
acaagucaguaaauaguug

SEQ ID NO: 58585 - RNA, 20 nt, Artificial Sequence
  Synthetic
aacaagucaguaaauaguug

SEQ ID NO: 58586 - RNA, 22 nt, Artificial Sequence
  Synthetic
agaacaagucaguaaauaguug

SEQ ID NO: 58587 - RNA, 23 nt, Artificial Sequence
  Synthetic
aagaacaagucaguaaauaguug

SEQ ID NO: 58588 - RNA, 24 nt, Artificial Sequence
  Synthetic
uaagaacaagucaguaaauaguug

SEQ ID NO: 58589 - RNA, 18 nt, Artificial Sequence
  Synthetic
ccuuuagcuuaauaguug

SEQ ID NO: 58590 - RNA, 19 nt, Artificial Sequence
  Synthetic
uccuuuagcuuaauaguug

SEQ ID NO: 58591 - RNA, 22 nt, Artificial Sequence
  Synthetic
agguccuuuagcuuaauaguug

SEQ ID NO: 58592 - RNA, 23 nt, Artificial Sequence
  Synthetic
cagguccuuuagcuuaauaguug

SEQ ID NO: 58593 - RNA, 24 nt, Artificial Sequence
  Synthetic
ccagguccuuuagcuuaauaguug

SEQ ID NO: 58594 - RNA, 18 nt, Artificial Sequence
  Synthetic
augcaguuuugauaguug

SEQ ID NO: 58595 - RNA, 19 nt, Artificial Sequence
  Synthetic
aaugcaguuuugauaguug

SEQ ID NO: 58596 - RNA, 20 nt, Artificial Sequence
  Synthetic
aaaugcaguuuugauaguug

SEQ ID NO: 58597 - RNA, 23 nt, Artificial Sequence
  Synthetic
aggaaaugcaguuuugauaguug

SEQ ID NO: 58598 - RNA, 18 nt, Artificial Sequence
  Synthetic
uauaagcuccccuaguug

SEQ ID NO: 58599 - RNA, 20 nt, Artificial Sequence
  Synthetic
uguauaagcuccccuaguug

SEQ ID NO: 58600 - RNA, 21 nt, Artificial Sequence
  Synthetic
uuguauaagcuccccuaguug

SEQ ID NO: 58601 - RNA, 22 nt, Artificial Sequence
  Synthetic
cuuguauaagcuccccuaguug

SEQ ID NO: 58602 - RNA, 23 nt, Artificial Sequence
  Synthetic
ucuuguauaagcuccccuaguug

SEQ ID NO: 58603 - RNA, 18 nt, Artificial Sequence
  Synthetic
ccuguucuuccuuaguug

SEQ ID NO: 58604 - RNA, 19 nt, Artificial Sequence
  Synthetic
cccuguucuuccuuaguug

SEQ ID NO: 58605 - RNA, 21 nt, Artificial Sequence
  Synthetic
agcccuguucuuccuuaguug

SEQ ID NO: 58606 - RNA, 24 nt, Artificial Sequence
  Synthetic
uggagcccuguucuuccuuaguug

SEQ ID NO: 58607 - RNA, 18 nt, Artificial Sequence
  Synthetic
uugaaacauagaucguug

SEQ ID NO: 58608 - RNA, 19 nt, Artificial Sequence
  Synthetic
uuugaaacauagaucguug

SEQ ID NO: 58609 - RNA, 20 nt, Artificial Sequence
  Synthetic
cuuugaaacauagaucguug

SEQ ID NO: 58610 - RNA, 21 nt, Artificial Sequence
  Synthetic
ccuuugaaacauagaucguug

SEQ ID NO: 58611 - RNA, 22 nt, Artificial Sequence
  Synthetic
accuuugaaacauagaucguug

SEQ ID NO: 58612 - RNA, 23 nt, Artificial Sequence
  Synthetic
uaccuuugaaacauagaucguug

SEQ ID NO: 58613 - RNA, 24 nt, Artificial Sequence
  Synthetic
auaccuuugaaacauagaucguug

SEQ ID NO: 58614 - RNA, 18 nt, Artificial Sequence
  Synthetic
augauaugagaaggguug

SEQ ID NO: 58615 - RNA, 20 nt, Artificial Sequence
  Synthetic
ugaugauaugagaaggguug

SEQ ID NO: 58616 - RNA, 21 nt, Artificial Sequence
  Synthetic
cugaugauaugagaaggguug

SEQ ID NO: 58617 - RNA, 23 nt, Artificial Sequence
  Synthetic
agcugaugauaugagaaggguug

SEQ ID NO: 58618 - RNA, 24 nt, Artificial Sequence
  Synthetic
aagcugaugauaugagaaggguug

SEQ ID NO: 58619 - RNA, 18 nt, Artificial Sequence
  Synthetic
uacaguaaguugugguug

SEQ ID NO: 58620 - RNA, 19 nt, Artificial Sequence
  Synthetic
uuacaguaaguugugguug

SEQ ID NO: 58621 - RNA, 20 nt, Artificial Sequence
  Synthetic
uuuacaguaaguugugguug

SEQ ID NO: 58622 - RNA, 21 nt, Artificial Sequence
  Synthetic
auuuacaguaaguugugguug

SEQ ID NO: 58623 - RNA, 22 nt, Artificial Sequence
  Synthetic
aauuuacaguaaguugugguug

SEQ ID NO: 58624 - RNA, 23 nt, Artificial Sequence
  Synthetic
uaauuuacaguaaguugugguug

SEQ ID NO: 58625 - RNA, 24 nt, Artificial Sequence
  Synthetic
auaauuuacaguaaguugugguug

SEQ ID NO: 58626 - RNA, 19 nt, Artificial Sequence
  Synthetic
ugauuuauuuuauugguug

SEQ ID NO: 58627 - RNA, 20 nt, Artificial Sequence
  Synthetic
cugauuuauuuuauugguug

SEQ ID NO: 58628 - RNA, 21 nt, Artificial Sequence
  Synthetic
ucugauuuauuuuauugguug

SEQ ID NO: 58629 - RNA, 24 nt, Artificial Sequence
  Synthetic
uggucugauuuauuuuauugguug

SEQ ID NO: 58630 - RNA, 18 nt, Artificial Sequence
  Synthetic
ucaugcauugcuugguug

SEQ ID NO: 58631 - RNA, 19 nt, Artificial Sequence
  Synthetic
uucaugcauugcuugguug

SEQ ID NO: 58632 - RNA, 20 nt, Artificial Sequence
  Synthetic
auucaugcauugcuugguug

SEQ ID NO: 58633 - RNA, 23 nt, Artificial Sequence
  Synthetic
aggauucaugcauugcuugguug

SEQ ID NO: 58634 - RNA, 24 nt, Artificial Sequence
  Synthetic
caggauucaugcauugcuugguug

SEQ ID NO: 58635 - RNA, 18 nt, Artificial Sequence
  Synthetic
ugacaugucuuaauguug

SEQ ID NO: 58636 - RNA, 19 nt, Artificial Sequence
  Synthetic
uugacaugucuuaauguug

SEQ ID NO: 58637 - RNA, 20 nt, Artificial Sequence
  Synthetic
cuugacaugucuuaauguug

SEQ ID NO: 58638 - RNA, 21 nt, Artificial Sequence
  Synthetic
ucuugacaugucuuaauguug

SEQ ID NO: 58639 - RNA, 22 nt, Artificial Sequence
  Synthetic
aucuugacaugucuuaauguug

SEQ ID NO: 58640 - RNA, 23 nt, Artificial Sequence
  Synthetic
aaucuugacaugucuuaauguug

SEQ ID NO: 58641 - RNA, 24 nt, Artificial Sequence
  Synthetic
uaaucuugacaugucuuaauguug

SEQ ID NO: 58642 - RNA, 18 nt, Artificial Sequence
  Synthetic
uguuucgcuggcauguug

SEQ ID NO: 58643 - RNA, 19 nt, Artificial Sequence
  Synthetic
auguuucgcuggcauguug

SEQ ID NO: 58644 - RNA, 20 nt, Artificial Sequence
  Synthetic
cauguuucgcuggcauguug

SEQ ID NO: 58645 - RNA, 21 nt, Artificial Sequence
  Synthetic
ccauguuucgcuggcauguug

SEQ ID NO: 58646 - RNA, 22 nt, Artificial Sequence
  Synthetic
accauguuucgcuggcauguug

SEQ ID NO: 58647 - RNA, 23 nt, Artificial Sequence
  Synthetic
aaccauguuucgcuggcauguug

SEQ ID NO: 58648 - RNA, 24 nt, Artificial Sequence
  Synthetic
aaaccauguuucgcuggcauguug

SEQ ID NO: 58649 - RNA, 18 nt, Artificial Sequence
  Synthetic
auuggcacuaggauguug

SEQ ID NO: 58650 - RNA, 19 nt, Artificial Sequence
  Synthetic
cauuggcacuaggauguug

SEQ ID NO: 58651 - RNA, 20 nt, Artificial Sequence
  Synthetic
ccauuggcacuaggauguug

SEQ ID NO: 58652 - RNA, 21 nt, Artificial Sequence
  Synthetic
cccauuggcacuaggauguug

SEQ ID NO: 58653 - RNA, 22 nt, Artificial Sequence
  Synthetic
ucccauuggcacuaggauguug

SEQ ID NO: 58654 - RNA, 23 nt, Artificial Sequence
  Synthetic
aucccauuggcacuaggauguug

SEQ ID NO: 58655 - RNA, 24 nt, Artificial Sequence
  Synthetic
uaucccauuggcacuaggauguug

SEQ ID NO: 58656 - RNA, 21 nt, Artificial Sequence
  Synthetic
aucaaugauguggguauguug

SEQ ID NO: 58657 - RNA, 22 nt, Artificial Sequence
  Synthetic
uaucaaugauguggguauguug

SEQ ID NO: 58658 - RNA, 23 nt, Artificial Sequence
  Synthetic
uuaucaaugauguggguauguug

SEQ ID NO: 58659 - RNA, 24 nt, Artificial Sequence
  Synthetic
auuaucaaugauguggguauguug

SEQ ID NO: 58660 - RNA, 21 nt, Artificial Sequence
  Synthetic
auuauuuuuuuuauacuguug

SEQ ID NO: 58661 - RNA, 22 nt, Artificial Sequence
  Synthetic
uauuauuuuuuuuauacuguug

SEQ ID NO: 58662 - RNA, 23 nt, Artificial Sequence
  Synthetic
uuauuauuuuuuuuauacuguug

SEQ ID NO: 58663 - RNA, 24 nt, Artificial Sequence
  Synthetic
auuauuauuuuuuuuauacuguug

SEQ ID NO: 58664 - RNA, 18 nt, Artificial Sequence
  Synthetic
uuucucauucuccuguug

SEQ ID NO: 58665 - RNA, 21 nt, Artificial Sequence
  Synthetic
ugguuucucauucuccuguug

SEQ ID NO: 58666 - RNA, 22 nt, Artificial Sequence
  Synthetic
uugguuucucauucuccuguug

SEQ ID NO: 58667 - RNA, 24 nt, Artificial Sequence
  Synthetic
cguugguuucucauucuccuguug

SEQ ID NO: 58668 - RNA, 18 nt, Artificial Sequence
  Synthetic
ucccuaaucgcucuguug

SEQ ID NO: 58669 - RNA, 19 nt, Artificial Sequence
  Synthetic
cucccuaaucgcucuguug

SEQ ID NO: 58670 - RNA, 21 nt, Artificial Sequence
  Synthetic
agcucccuaaucgcucuguug

SEQ ID NO: 58671 - RNA, 22 nt, Artificial Sequence
  Synthetic
uagcucccuaaucgcucuguug

SEQ ID NO: 58672 - RNA, 23 nt, Artificial Sequence
  Synthetic
cuagcucccuaaucgcucuguug

SEQ ID NO: 58673 - RNA, 24 nt, Artificial Sequence
  Synthetic
acuagcucccuaaucgcucuguug

SEQ ID NO: 58674 - RNA, 20 nt, Artificial Sequence
  Synthetic
aggacugcaaggaaguguug

SEQ ID NO: 58675 - RNA, 21 nt, Artificial Sequence
  Synthetic
caggacugcaaggaaguguug

SEQ ID NO: 58676 - RNA, 22 nt, Artificial Sequence
  Synthetic
acaggacugcaaggaaguguug

SEQ ID NO: 58677 - RNA, 23 nt, Artificial Sequence
  Synthetic
aacaggacugcaaggaaguguug

SEQ ID NO: 58678 - RNA, 24 nt, Artificial Sequence
  Synthetic
aaacaggacugcaaggaaguguug

SEQ ID NO: 58679 - RNA, 18 nt, Artificial Sequence
  Synthetic
uccacacucuaaguguug

SEQ ID NO: 58680 - RNA, 19 nt, Artificial Sequence
  Synthetic
uuccacacucuaaguguug

SEQ ID NO: 58681 - RNA, 20 nt, Artificial Sequence
  Synthetic
uuuccacacucuaaguguug

SEQ ID NO: 58682 - RNA, 22 nt, Artificial Sequence
  Synthetic
uguuuccacacucuaaguguug

SEQ ID NO: 58683 - RNA, 23 nt, Artificial Sequence
  Synthetic
uuguuuccacacucuaaguguug

SEQ ID NO: 58684 - RNA, 18 nt, Artificial Sequence
  Synthetic
uuacucugcaacguguug

SEQ ID NO: 58685 - RNA, 19 nt, Artificial Sequence
  Synthetic
uuuacucugcaacguguug

SEQ ID NO: 58686 - RNA, 20 nt, Artificial Sequence
  Synthetic
uuuuacucugcaacguguug

SEQ ID NO: 58687 - RNA, 21 nt, Artificial Sequence
  Synthetic
auuuuacucugcaacguguug

SEQ ID NO: 58688 - RNA, 23 nt, Artificial Sequence
  Synthetic
agauuuuacucugcaacguguug

SEQ ID NO: 58689 - RNA, 24 nt, Artificial Sequence
  Synthetic
aagauuuuacucugcaacguguug

SEQ ID NO: 58690 - RNA, 19 nt, Artificial Sequence
  Synthetic
ugaauuuuuucauguguug

SEQ ID NO: 58691 - RNA, 20 nt, Artificial Sequence
  Synthetic
uugaauuuuuucauguguug

SEQ ID NO: 58692 - RNA, 21 nt, Artificial Sequence
  Synthetic
uuugaauuuuuucauguguug

SEQ ID NO: 58693 - RNA, 22 nt, Artificial Sequence
  Synthetic
auuugaauuuuuucauguguug

SEQ ID NO: 58694 - RNA, 23 nt, Artificial Sequence
  Synthetic
aauuugaauuuuuucauguguug

SEQ ID NO: 58695 - RNA, 18 nt, Artificial Sequence
  Synthetic
acaagaaagaccuuguug

SEQ ID NO: 58696 - RNA, 19 nt, Artificial Sequence
  Synthetic
cacaagaaagaccuuguug

SEQ ID NO: 58697 - RNA, 20 nt, Artificial Sequence
  Synthetic
ucacaagaaagaccuuguug

SEQ ID NO: 58698 - RNA, 21 nt, Artificial Sequence
  Synthetic
uucacaagaaagaccuuguug

SEQ ID NO: 58699 - RNA, 22 nt, Artificial Sequence
  Synthetic
uuucacaagaaagaccuuguug

SEQ ID NO: 58700 - RNA, 18 nt, Artificial Sequence
  Synthetic
aacaacgucccuuuguug

SEQ ID NO: 58701 - RNA, 19 nt, Artificial Sequence
  Synthetic
aaacaacgucccuuuguug

SEQ ID NO: 58702 - RNA, 20 nt, Artificial Sequence
  Synthetic
aaaacaacgucccuuuguug

SEQ ID NO: 58703 - RNA, 22 nt, Artificial Sequence
  Synthetic
agaaaacaacgucccuuuguug

SEQ ID NO: 58704 - RNA, 23 nt, Artificial Sequence
  Synthetic
aagaaaacaacgucccuuuguug

SEQ ID NO: 58705 - RNA, 24 nt, Artificial Sequence
  Synthetic
aaagaaaacaacgucccuuuguug

SEQ ID NO: 58706 - RNA, 18 nt, Artificial Sequence
  Synthetic
ugugcauaagguuuguug

SEQ ID NO: 58707 - RNA, 20 nt, Artificial Sequence
  Synthetic
ugugugcauaagguuuguug

SEQ ID NO: 58708 - RNA, 21 nt, Artificial Sequence
  Synthetic
uugugugcauaagguuuguug

SEQ ID NO: 58709 - RNA, 23 nt, Artificial Sequence
  Synthetic
aguugugugcauaagguuuguug

SEQ ID NO: 58710 - RNA, 18 nt, Artificial Sequence
  Synthetic
cauauucagauuuuguug

SEQ ID NO: 58711 - RNA, 21 nt, Artificial Sequence
  Synthetic
aggcauauucagauuuuguug

SEQ ID NO: 58712 - RNA, 22 nt, Artificial Sequence
  Synthetic
aaggcauauucagauuuuguug

SEQ ID NO: 58713 - RNA, 24 nt, Artificial Sequence
  Synthetic
ugaaggcauauucagauuuuguug

SEQ ID NO: 58714 - RNA, 18 nt, Artificial Sequence
  Synthetic
uauugauguuuuuuguug

SEQ ID NO: 58715 - RNA, 19 nt, Artificial Sequence
  Synthetic
cuauugauguuuuuuguug

SEQ ID NO: 58716 - RNA, 20 nt, Artificial Sequence
  Synthetic
ucuauugauguuuuuuguug

SEQ ID NO: 58717 - RNA, 21 nt, Artificial Sequence
  Synthetic
cucuauugauguuuuuuguug

SEQ ID NO: 58718 - RNA, 22 nt, Artificial Sequence
  Synthetic
acucuauugauguuuuuuguug

SEQ ID NO: 58719 - RNA, 23 nt, Artificial Sequence
  Synthetic
aacucuauugauguuuuuuguug

SEQ ID NO: 58720 - RNA, 22 nt, Artificial Sequence
  Synthetic
agagaagggcaaagaaaauuug

SEQ ID NO: 58721 - RNA, 23 nt, Artificial Sequence
  Synthetic
aagagaagggcaaagaaaauuug

SEQ ID NO: 58722 - RNA, 24 nt, Artificial Sequence
  Synthetic
aaagagaagggcaaagaaaauuug

SEQ ID NO: 58723 - RNA, 18 nt, Artificial Sequence
  Synthetic
ugcuauaacucaaauuug

SEQ ID NO: 58724 - RNA, 19 nt, Artificial Sequence
  Synthetic
uugcuauaacucaaauuug

SEQ ID NO: 58725 - RNA, 20 nt, Artificial Sequence
  Synthetic
auugcuauaacucaaauuug

SEQ ID NO: 58726 - RNA, 21 nt, Artificial Sequence
  Synthetic
aauugcuauaacucaaauuug

SEQ ID NO: 58727 - RNA, 22 nt, Artificial Sequence
  Synthetic
aaauugcuauaacucaaauuug

SEQ ID NO: 58728 - RNA, 23 nt, Artificial Sequence
  Synthetic
aaaauugcuauaacucaaauuug

SEQ ID NO: 58729 - RNA, 24 nt, Artificial Sequence
  Synthetic
aaaaauugcuauaacucaaauuug

SEQ ID NO: 58730 - RNA, 18 nt, Artificial Sequence
  Synthetic
cucauguugcuaaauuug

SEQ ID NO: 58731 - RNA, 19 nt, Artificial Sequence
  Synthetic
ccucauguugcuaaauuug

SEQ ID NO: 58732 - RNA, 20 nt, Artificial Sequence
  Synthetic
uccucauguugcuaaauuug

SEQ ID NO: 58733 - RNA, 23 nt, Artificial Sequence
  Synthetic
ugguccucauguugcuaaauuug

SEQ ID NO: 58734 - RNA, 24 nt, Artificial Sequence
  Synthetic
augguccucauguugcuaaauuug

SEQ ID NO: 58735 - RNA, 18 nt, Artificial Sequence
  Synthetic
aaguuuuaauacaauuug

SEQ ID NO: 58736 - RNA, 22 nt, Artificial Sequence
  Synthetic
ugggaaguuuuaauacaauuug

SEQ ID NO: 58737 - RNA, 24 nt, Artificial Sequence
  Synthetic
ugugggaaguuuuaauacaauuug

SEQ ID NO: 58738 - RNA, 18 nt, Artificial Sequence
  Synthetic
aagguuuuuaagaauuug

SEQ ID NO: 58739 - RNA, 20 nt, Artificial Sequence
  Synthetic
agaagguuuuuaagaauuug

SEQ ID NO: 58740 - RNA, 21 nt, Artificial Sequence
  Synthetic
cagaagguuuuuaagaauuug

SEQ ID NO: 58741 - RNA, 23 nt, Artificial Sequence
  Synthetic
agcagaagguuuuuaagaauuug

SEQ ID NO: 58742 - RNA, 24 nt, Artificial Sequence
  Synthetic
aagcagaagguuuuuaagaauuug

SEQ ID NO: 58743 - RNA, 18 nt, Artificial Sequence
  Synthetic
uaaaugguguggaauuug

SEQ ID NO: 58744 - RNA, 19 nt, Artificial Sequence
  Synthetic
uuaaaugguguggaauuug

SEQ ID NO: 58745 - RNA, 20 nt, Artificial Sequence
  Synthetic
uuuaaaugguguggaauuug

SEQ ID NO: 58746 - RNA, 21 nt, Artificial Sequence
  Synthetic
uuuuaaaugguguggaauuug

SEQ ID NO: 58747 - RNA, 22 nt, Artificial Sequence
  Synthetic
auuuuaaaugguguggaauuug

SEQ ID NO: 58748 - RNA, 23 nt, Artificial Sequence
  Synthetic
aauuuuaaaugguguggaauuug

SEQ ID NO: 58749 - RNA, 24 nt, Artificial Sequence
  Synthetic
aaauuuuaaaugguguggaauuug

SEQ ID NO: 58750 - RNA, 18 nt, Artificial Sequence
  Synthetic
aagacuuuggcuaauuug

SEQ ID NO: 58751 - RNA, 20 nt, Artificial Sequence
  Synthetic
ugaagacuuuggcuaauuug

SEQ ID NO: 58752 - RNA, 21 nt, Artificial Sequence
  Synthetic
augaagacuuuggcuaauuug

SEQ ID NO: 58753 - RNA, 22 nt, Artificial Sequence
  Synthetic
aaugaagacuuuggcuaauuug

SEQ ID NO: 58754 - RNA, 24 nt, Artificial Sequence
  Synthetic
agaaugaagacuuuggcuaauuug

SEQ ID NO: 58755 - RNA, 18 nt, Artificial Sequence
  Synthetic
aagucagagauuaauuug

SEQ ID NO: 58756 - RNA, 19 nt, Artificial Sequence
  Synthetic
aaagucagagauuaauuug

SEQ ID NO: 58757 - RNA, 20 nt, Artificial Sequence
  Synthetic
uaaagucagagauuaauuug

SEQ ID NO: 58758 - RNA, 21 nt, Artificial Sequence
  Synthetic
uuaaagucagagauuaauuug

SEQ ID NO: 58759 - RNA, 22 nt, Artificial Sequence
  Synthetic
auuaaagucagagauuaauuug

SEQ ID NO: 58760 - RNA, 23 nt, Artificial Sequence
  Synthetic
aauuaaagucagagauuaauuug

SEQ ID NO: 58761 - RNA, 24 nt, Artificial Sequence
  Synthetic
aaauuaaagucagagauuaauuug

SEQ ID NO: 58762 - RNA, 18 nt, Artificial Sequence
  Synthetic
augcaagaauuuaauuug

SEQ ID NO: 58763 - RNA, 19 nt, Artificial Sequence
  Synthetic
uaugcaagaauuuaauuug

SEQ ID NO: 58764 - RNA, 20 nt, Artificial Sequence
  Synthetic
uuaugcaagaauuuaauuug

SEQ ID NO: 58765 - RNA, 21 nt, Artificial Sequence
  Synthetic
cuuaugcaagaauuuaauuug

SEQ ID NO: 58766 - RNA, 22 nt, Artificial Sequence
  Synthetic
ucuuaugcaagaauuuaauuug

SEQ ID NO: 58767 - RNA, 23 nt, Artificial Sequence
  Synthetic
cucuuaugcaagaauuuaauuug

SEQ ID NO: 58768 - RNA, 24 nt, Artificial Sequence
  Synthetic
ccucuuaugcaagaauuuaauuug

SEQ ID NO: 58769 - RNA, 21 nt, Artificial Sequence
  Synthetic
auacugcauuuuaaacauuug

SEQ ID NO: 58770 - RNA, 23 nt, Artificial Sequence
  Synthetic
agauacugcauuuuaaacauuug

SEQ ID NO: 58771 - RNA, 24 nt, Artificial Sequence
  Synthetic
cagauacugcauuuuaaacauuug

SEQ ID NO: 58772 - RNA, 18 nt, Artificial Sequence
  Synthetic
cuaauuaaaagacauuug

SEQ ID NO: 58773 - RNA, 19 nt, Artificial Sequence
  Synthetic
acuaauuaaaagacauuug

SEQ ID NO: 58774 - RNA, 20 nt, Artificial Sequence
  Synthetic
cacuaauuaaaagacauuug

SEQ ID NO: 58775 - RNA, 22 nt, Artificial Sequence
  Synthetic
ugcacuaauuaaaagacauuug

SEQ ID NO: 58776 - RNA, 23 nt, Artificial Sequence
  Synthetic
augcacuaauuaaaagacauuug

SEQ ID NO: 58777 - RNA, 24 nt, Artificial Sequence
  Synthetic
caugcacuaauuaaaagacauuug

SEQ ID NO: 58778 - RNA, 18 nt, Artificial Sequence
  Synthetic
cugcucgguauccauuug

SEQ ID NO: 58779 - RNA, 19 nt, Artificial Sequence
  Synthetic
ccugcucgguauccauuug

SEQ ID NO: 58780 - RNA, 21 nt, Artificial Sequence
  Synthetic
ugccugcucgguauccauuug

SEQ ID NO: 58781 - RNA, 22 nt, Artificial Sequence
  Synthetic
augccugcucgguauccauuug

SEQ ID NO: 58782 - RNA, 23 nt, Artificial Sequence
  Synthetic
uaugccugcucgguauccauuug

SEQ ID NO: 58783 - RNA, 24 nt, Artificial Sequence
  Synthetic
cuaugccugcucgguauccauuug

SEQ ID NO: 58784 - RNA, 18 nt, Artificial Sequence
  Synthetic
uaucaauauauucauuug

SEQ ID NO: 58785 - RNA, 19 nt, Artificial Sequence
  Synthetic
auaucaauauauucauuug

SEQ ID NO: 58786 - RNA, 20 nt, Artificial Sequence
  Synthetic
cauaucaauauauucauuug

SEQ ID NO: 58787 - RNA, 21 nt, Artificial Sequence
  Synthetic
ucauaucaauauauucauuug

SEQ ID NO: 58788 - RNA, 22 nt, Artificial Sequence
  Synthetic
uucauaucaauauauucauuug

SEQ ID NO: 58789 - RNA, 23 nt, Artificial Sequence
  Synthetic
uuucauaucaauauauucauuug

SEQ ID NO: 58790 - RNA, 24 nt, Artificial Sequence
  Synthetic
uuuucauaucaauauauucauuug

SEQ ID NO: 58791 - RNA, 18 nt, Artificial Sequence
  Synthetic
acuuggaggguucauuug

SEQ ID NO: 58792 - RNA, 20 nt, Artificial Sequence
  Synthetic
ugacuuggaggguucauuug

SEQ ID NO: 58793 - RNA, 21 nt, Artificial Sequence
  Synthetic
cugacuuggaggguucauuug

SEQ ID NO: 58794 - RNA, 22 nt, Artificial Sequence
  Synthetic
acugacuuggaggguucauuug

SEQ ID NO: 58795 - RNA, 23 nt, Artificial Sequence
  Synthetic
uacugacuuggaggguucauuug

SEQ ID NO: 58796 - RNA, 24 nt, Artificial Sequence
  Synthetic
auacugacuuggaggguucauuug

SEQ ID NO: 58797 - RNA, 18 nt, Artificial Sequence
  Synthetic
uaggauuuauuucauuug

SEQ ID NO: 58798 - RNA, 19 nt, Artificial Sequence
  Synthetic
auaggauuuauuucauuug

SEQ ID NO: 58799 - RNA, 20 nt, Artificial Sequence
  Synthetic
cauaggauuuauuucauuug

SEQ ID NO: 58800 - RNA, 21 nt, Artificial Sequence
  Synthetic
ucauaggauuuauuucauuug

SEQ ID NO: 58801 - RNA, 22 nt, Artificial Sequence
  Synthetic
aucauaggauuuauuucauuug

SEQ ID NO: 58802 - RNA, 23 nt, Artificial Sequence
  Synthetic
caucauaggauuuauuucauuug

SEQ ID NO: 58803 - RNA, 24 nt, Artificial Sequence
  Synthetic
ucaucauaggauuuauuucauuug

SEQ ID NO: 58804 - RNA, 18 nt, Artificial Sequence
  Synthetic
uggggaaguuuucauuug

SEQ ID NO: 58805 - RNA, 19 nt, Artificial Sequence
  Synthetic
auggggaaguuuucauuug

SEQ ID NO: 58806 - RNA, 20 nt, Artificial Sequence
  Synthetic
aauggggaaguuuucauuug

SEQ ID NO: 58807 - RNA, 21 nt, Artificial Sequence
  Synthetic
aaauggggaaguuuucauuug

SEQ ID NO: 58808 - RNA, 22 nt, Artificial Sequence
  Synthetic
aaaauggggaaguuuucauuug

SEQ ID NO: 58809 - RNA, 23 nt, Artificial Sequence
  Synthetic
uaaaauggggaaguuuucauuug

SEQ ID NO: 58810 - RNA, 24 nt, Artificial Sequence
  Synthetic
uuaaaauggggaaguuuucauuug

SEQ ID NO: 58811 - RNA, 18 nt, Artificial Sequence
  Synthetic
uguuauuaggaagauuug

SEQ ID NO: 58812 - RNA, 19 nt, Artificial Sequence
  Synthetic
uuguuauuaggaagauuug

SEQ ID NO: 58813 - RNA, 20 nt, Artificial Sequence
  Synthetic
uuuguuauuaggaagauuug

SEQ ID NO: 58814 - RNA, 21 nt, Artificial Sequence
  Synthetic
cuuuguuauuaggaagauuug

SEQ ID NO: 58815 - RNA, 23 nt, Artificial Sequence
  Synthetic
ugcuuuguuauuaggaagauuug

SEQ ID NO: 58816 - RNA, 18 nt, Artificial Sequence
  Synthetic
uuccucaccuaagauuug

SEQ ID NO: 58817 - RNA, 19 nt, Artificial Sequence
  Synthetic
auuccucaccuaagauuug

SEQ ID NO: 58818 - RNA, 20 nt, Artificial Sequence
  Synthetic
cauuccucaccuaagauuug

SEQ ID NO: 58819 - RNA, 21 nt, Artificial Sequence
  Synthetic
acauuccucaccuaagauuug

SEQ ID NO: 58820 - RNA, 22 nt, Artificial Sequence
  Synthetic
aacauuccucaccuaagauuug

SEQ ID NO: 58821 - RNA, 23 nt, Artificial Sequence
  Synthetic
uaacauuccucaccuaagauuug

SEQ ID NO: 58822 - RNA, 24 nt, Artificial Sequence
  Synthetic
cuaacauuccucaccuaagauuug

SEQ ID NO: 58823 - RNA, 19 nt, Artificial Sequence
  Synthetic
uguuugauauauagauuug

SEQ ID NO: 58824 - RNA, 20 nt, Artificial Sequence
  Synthetic
cuguuugauauauagauuug

SEQ ID NO: 58825 - RNA, 21 nt, Artificial Sequence
  Synthetic
ucuguuugauauauagauuug

SEQ ID NO: 58826 - RNA, 22 nt, Artificial Sequence
  Synthetic
cucuguuugauauauagauuug

SEQ ID NO: 58827 - RNA, 23 nt, Artificial Sequence
  Synthetic
ucucuguuugauauauagauuug

SEQ ID NO: 58828 - RNA, 24 nt, Artificial Sequence
  Synthetic
aucucuguuugauauauagauuug

SEQ ID NO: 58829 - RNA, 18 nt, Artificial Sequence
  Synthetic
agaaaguacuuagauuug

SEQ ID NO: 58830 - RNA, 20 nt, Artificial Sequence
  Synthetic
agagaaaguacuuagauuug

SEQ ID NO: 58831 - RNA, 22 nt, Artificial Sequence
  Synthetic
agagagaaaguacuuagauuug

SEQ ID NO: 58832 - RNA, 24 nt, Artificial Sequence
  Synthetic
agagagagaaaguacuuagauuug

SEQ ID NO: 58833 - RNA, 19 nt, Artificial Sequence
  Synthetic
agggugagagggggauuug

SEQ ID NO: 58834 - RNA, 20 nt, Artificial Sequence
  Synthetic
cagggugagagggggauuug

SEQ ID NO: 58835 - RNA, 21 nt, Artificial Sequence
  Synthetic
ucagggugagagggggauuug

SEQ ID NO: 58836 - RNA, 22 nt, Artificial Sequence
  Synthetic
uucagggugagagggggauuug

SEQ ID NO: 58837 - RNA, 23 nt, Artificial Sequence
  Synthetic
auucagggugagagggggauuug

SEQ ID NO: 58838 - RNA, 24 nt, Artificial Sequence
  Synthetic
aauucagggugagagggggauuug

SEQ ID NO: 58839 - RNA, 18 nt, Artificial Sequence
  Synthetic
ccaucauccugggauuug

SEQ ID NO: 58840 - RNA, 19 nt, Artificial Sequence
  Synthetic
accaucauccugggauuug

SEQ ID NO: 58841 - RNA, 20 nt, Artificial Sequence
  Synthetic
aaccaucauccugggauuug

SEQ ID NO: 58842 - RNA, 22 nt, Artificial Sequence
  Synthetic
agaaccaucauccugggauuug

SEQ ID NO: 58843 - RNA, 18 nt, Artificial Sequence
  Synthetic
aauggaggcaaugauuug

SEQ ID NO: 58844 - RNA, 19 nt, Artificial Sequence
  Synthetic
uaauggaggcaaugauuug

SEQ ID NO: 58845 - RNA, 21 nt, Artificial Sequence
  Synthetic
aguaauggaggcaaugauuug

SEQ ID NO: 58846 - RNA, 22 nt, Artificial Sequence
  Synthetic
uaguaauggaggcaaugauuug

SEQ ID NO: 58847 - RNA, 23 nt, Artificial Sequence
  Synthetic
auaguaauggaggcaaugauuug

SEQ ID NO: 58848 - RNA, 24 nt, Artificial Sequence
  Synthetic
aauaguaauggaggcaaugauuug

SEQ ID NO: 58849 - RNA, 18 nt, Artificial Sequence
  Synthetic
ugagugaagggugauuug

SEQ ID NO: 58850 - RNA, 19 nt, Artificial Sequence
  Synthetic
uugagugaagggugauuug

SEQ ID NO: 58851 - RNA, 21 nt, Artificial Sequence
  Synthetic
uguugagugaagggugauuug

SEQ ID NO: 58852 - RNA, 23 nt, Artificial Sequence
  Synthetic
cguguugagugaagggugauuug

SEQ ID NO: 58853 - RNA, 24 nt, Artificial Sequence
  Synthetic
ccguguugagugaagggugauuug

SEQ ID NO: 58854 - RNA, 21 nt, Artificial Sequence
  Synthetic
auaguagguucucaauauuug

SEQ ID NO: 58855 - RNA, 22 nt, Artificial Sequence
  Synthetic
aauaguagguucucaauauuug

SEQ ID NO: 58856 - RNA, 23 nt, Artificial Sequence
  Synthetic
aaauaguagguucucaauauuug

SEQ ID NO: 58857 - RNA, 24 nt, Artificial Sequence
  Synthetic
caaauaguagguucucaauauuug

SEQ ID NO: 58858 - RNA, 18 nt, Artificial Sequence
  Synthetic
uuaagauaaugauauuug

SEQ ID NO: 58859 - RNA, 19 nt, Artificial Sequence
  Synthetic
uuuaagauaaugauauuug

SEQ ID NO: 58860 - RNA, 20 nt, Artificial Sequence
  Synthetic
uuuuaagauaaugauauuug

SEQ ID NO: 58861 - RNA, 21 nt, Artificial Sequence
  Synthetic
uuuuuaagauaaugauauuug

SEQ ID NO: 58862 - RNA, 22 nt, Artificial Sequence
  Synthetic
auuuuuaagauaaugauauuug

SEQ ID NO: 58863 - RNA, 23 nt, Artificial Sequence
  Synthetic
cauuuuuaagauaaugauauuug

SEQ ID NO: 58864 - RNA, 24 nt, Artificial Sequence
  Synthetic
acauuuuuaagauaaugauauuug

SEQ ID NO: 58865 - RNA, 18 nt, Artificial Sequence
  Synthetic
ugaucgaagauauauuug

SEQ ID NO: 58866 - RNA, 19 nt, Artificial Sequence
  Synthetic
uugaucgaagauauauuug

SEQ ID NO: 58867 - RNA, 20 nt, Artificial Sequence
  Synthetic
uuugaucgaagauauauuug

SEQ ID NO: 58868 - RNA, 21 nt, Artificial Sequence
  Synthetic
auuugaucgaagauauauuug

SEQ ID NO: 58869 - RNA, 22 nt, Artificial Sequence
  Synthetic
uauuugaucgaagauauauuug

SEQ ID NO: 58870 - RNA, 23 nt, Artificial Sequence
  Synthetic
uuauuugaucgaagauauauuug

SEQ ID NO: 58871 - RNA, 24 nt, Artificial Sequence
  Synthetic
auuauuugaucgaagauauauuug

SEQ ID NO: 58872 - RNA, 18 nt, Artificial Sequence
  Synthetic
aagagaguuaccuauuug

SEQ ID NO: 58873 - RNA, 22 nt, Artificial Sequence
  Synthetic
ugggaagagaguuaccuauuug

SEQ ID NO: 58874 - RNA, 23 nt, Artificial Sequence
  Synthetic
augggaagagaguuaccuauuug

SEQ ID NO: 58875 - RNA, 24 nt, Artificial Sequence
  Synthetic
caugggaagagaguuaccuauuug

SEQ ID NO: 58876 - RNA, 18 nt, Artificial Sequence
  Synthetic
caucucccucaguauuug

SEQ ID NO: 58877 - RNA, 20 nt, Artificial Sequence
  Synthetic
ugcaucucccucaguauuug

SEQ ID NO: 58878 - RNA, 21 nt, Artificial Sequence
  Synthetic
cugcaucucccucaguauuug

SEQ ID NO: 58879 - RNA, 22 nt, Artificial Sequence
  Synthetic
acugcaucucccucaguauuug

SEQ ID NO: 58880 - RNA, 23 nt, Artificial Sequence
  Synthetic
cacugcaucucccucaguauuug

SEQ ID NO: 58881 - RNA, 24 nt, Artificial Sequence
  Synthetic
ucacugcaucucccucaguauuug

SEQ ID NO: 58882 - RNA, 18 nt, Artificial Sequence
  Synthetic
ugauucacuuuguauuug

SEQ ID NO: 58883 - RNA, 19 nt, Artificial Sequence
  Synthetic
cugauucacuuuguauuug

SEQ ID NO: 58884 - RNA, 20 nt, Artificial Sequence
  Synthetic
ucugauucacuuuguauuug

SEQ ID NO: 58885 - RNA, 21 nt, Artificial Sequence
  Synthetic
uucugauucacuuuguauuug

SEQ ID NO: 58886 - RNA, 22 nt, Artificial Sequence
  Synthetic
cuucugauucacuuuguauuug

SEQ ID NO: 58887 - RNA, 23 nt, Artificial Sequence
  Synthetic
acuucugauucacuuuguauuug

SEQ ID NO: 58888 - RNA, 19 nt, Artificial Sequence
  Synthetic
agagcaagugauuuauuug

SEQ ID NO: 58889 - RNA, 20 nt, Artificial Sequence
  Synthetic
aagagcaagugauuuauuug

SEQ ID NO: 58890 - RNA, 21 nt, Artificial Sequence
  Synthetic
uaagagcaagugauuuauuug

SEQ ID NO: 58891 - RNA, 22 nt, Artificial Sequence
  Synthetic
uuaagagcaagugauuuauuug

SEQ ID NO: 58892 - RNA, 23 nt, Artificial Sequence
  Synthetic
uuuaagagcaagugauuuauuug

SEQ ID NO: 58893 - RNA, 24 nt, Artificial Sequence
  Synthetic
uuuuaagagcaagugauuuauuug

SEQ ID NO: 58894 - RNA, 21 nt, Artificial Sequence
  Synthetic
aaaucaaacacauuuuauuug

SEQ ID NO: 58895 - RNA, 23 nt, Artificial Sequence
  Synthetic
agaaaucaaacacauuuuauuug

SEQ ID NO: 58896 - RNA, 18 nt, Artificial Sequence
  Synthetic
agccauaccuuuuauuug

SEQ ID NO: 58897 - RNA, 19 nt, Artificial Sequence
  Synthetic
uagccauaccuuuuauuug

SEQ ID NO: 58898 - RNA, 20 nt, Artificial Sequence
  Synthetic
auagccauaccuuuuauuug

SEQ ID NO: 58899 - RNA, 21 nt, Artificial Sequence
  Synthetic
uauagccauaccuuuuauuug

SEQ ID NO: 58900 - RNA, 22 nt, Artificial Sequence
  Synthetic
uuauagccauaccuuuuauuug

SEQ ID NO: 58901 - RNA, 23 nt, Artificial Sequence
  Synthetic
uuuauagccauaccuuuuauuug

SEQ ID NO: 58902 - RNA, 24 nt, Artificial Sequence
  Synthetic
uuuuauagccauaccuuuuauuug

SEQ ID NO: 58903 - RNA, 18 nt, Artificial Sequence
  Synthetic
augagauggcaaacuuug

SEQ ID NO: 58904 - RNA, 19 nt, Artificial Sequence
  Synthetic
uaugagauggcaaacuuug

SEQ ID NO: 58905 - RNA, 20 nt, Artificial Sequence
  Synthetic
auaugagauggcaaacuuug

SEQ ID NO: 58906 - RNA, 21 nt, Artificial Sequence
  Synthetic
cauaugagauggcaaacuuug

SEQ ID NO: 58907 - RNA, 22 nt, Artificial Sequence
  Synthetic
ucauaugagauggcaaacuuug

SEQ ID NO: 58908 - RNA, 23 nt, Artificial Sequence
  Synthetic
cucauaugagauggcaaacuuug

SEQ ID NO: 58909 - RNA, 24 nt, Artificial Sequence
  Synthetic
acucauaugagauggcaaacuuug

SEQ ID NO: 58910 - RNA, 19 nt, Artificial Sequence
  Synthetic
aguuuugaccuacacuuug

SEQ ID NO: 58911 - RNA, 20 nt, Artificial Sequence
  Synthetic
aaguuuugaccuacacuuug

SEQ ID NO: 58912 - RNA, 21 nt, Artificial Sequence
  Synthetic
aaaguuuugaccuacacuuug

SEQ ID NO: 58913 - RNA, 22 nt, Artificial Sequence
  Synthetic
aaaaguuuugaccuacacuuug

SEQ ID NO: 58914 - RNA, 21 nt, Artificial Sequence
  Synthetic
uaaauuuuuuauaagacuuug

SEQ ID NO: 58915 - RNA, 22 nt, Artificial Sequence
  Synthetic
auaaauuuuuuauaagacuuug

SEQ ID NO: 58916 - RNA, 24 nt, Artificial Sequence
  Synthetic
ugauaaauuuuuuauaagacuuug

SEQ ID NO: 58917 - RNA, 19 nt, Artificial Sequence
  Synthetic
uggcugaaaauuuacuuug

SEQ ID NO: 58918 - RNA, 20 nt, Artificial Sequence
  Synthetic
cuggcugaaaauuuacuuug

SEQ ID NO: 58919 - RNA, 22 nt, Artificial Sequence
  Synthetic
ugcuggcugaaaauuuacuuug

SEQ ID NO: 58920 - RNA, 23 nt, Artificial Sequence
  Synthetic
uugcuggcugaaaauuuacuuug

SEQ ID NO: 58921 - RNA, 24 nt, Artificial Sequence
  Synthetic
auugcuggcugaaaauuuacuuug

SEQ ID NO: 58922 - RNA, 19 nt, Artificial Sequence
  Synthetic
ugaaugaugacucccuuug

SEQ ID NO: 58923 - RNA, 20 nt, Artificial Sequence
  Synthetic
uugaaugaugacucccuuug

SEQ ID NO: 58924 - RNA, 21 nt, Artificial Sequence
  Synthetic
uuugaaugaugacucccuuug

SEQ ID NO: 58925 - RNA, 22 nt, Artificial Sequence
  Synthetic
uuuugaaugaugacucccuuug

SEQ ID NO: 58926 - RNA, 23 nt, Artificial Sequence
  Synthetic
uuuuugaaugaugacucccuuug

SEQ ID NO: 58927 - RNA, 24 nt, Artificial Sequence
  Synthetic
uuuuuugaaugaugacucccuuug

SEQ ID NO: 58928 - RNA, 18 nt, Artificial Sequence
  Synthetic
cagaaagcuaagccuuug

SEQ ID NO: 58929 - RNA, 19 nt, Artificial Sequence
  Synthetic
acagaaagcuaagccuuug

SEQ ID NO: 58930 - RNA, 20 nt, Artificial Sequence
  Synthetic
aacagaaagcuaagccuuug

SEQ ID NO: 58931 - RNA, 21 nt, Artificial Sequence
  Synthetic
aaacagaaagcuaagccuuug

SEQ ID NO: 58932 - RNA, 22 nt, Artificial Sequence
  Synthetic
aaaacagaaagcuaagccuuug

SEQ ID NO: 58933 - RNA, 23 nt, Artificial Sequence
  Synthetic
caaaacagaaagcuaagccuuug

SEQ ID NO: 58934 - RNA, 24 nt, Artificial Sequence
  Synthetic
acaaaacagaaagcuaagccuuug

SEQ ID NO: 58935 - RNA, 18 nt, Artificial Sequence
  Synthetic
ugaacauuugguccuuug

SEQ ID NO: 58936 - RNA, 19 nt, Artificial Sequence
  Synthetic
cugaacauuugguccuuug

SEQ ID NO: 58937 - RNA, 20 nt, Artificial Sequence
  Synthetic
ucugaacauuugguccuuug

SEQ ID NO: 58938 - RNA, 21 nt, Artificial Sequence
  Synthetic
aucugaacauuugguccuuug

SEQ ID NO: 58939 - RNA, 22 nt, Artificial Sequence
  Synthetic
caucugaacauuugguccuuug

SEQ ID NO: 58940 - RNA, 24 nt, Artificial Sequence
  Synthetic
ugcaucugaacauuugguccuuug

SEQ ID NO: 58941 - RNA, 19 nt, Artificial Sequence
  Synthetic
aggcuaugucuguccuuug

SEQ ID NO: 58942 - RNA, 20 nt, Artificial Sequence
  Synthetic
caggcuaugucuguccuuug

SEQ ID NO: 58943 - RNA, 22 nt, Artificial Sequence
  Synthetic
cgcaggcuaugucuguccuuug

SEQ ID NO: 58944 - RNA, 23 nt, Artificial Sequence
  Synthetic
ucgcaggcuaugucuguccuuug

SEQ ID NO: 58945 - RNA, 24 nt, Artificial Sequence
  Synthetic
aucgcaggcuaugucuguccuuug

SEQ ID NO: 58946 - RNA, 18 nt, Artificial Sequence
  Synthetic
ccuaaucaaacagcuuug

SEQ ID NO: 58947 - RNA, 21 nt, Artificial Sequence
  Synthetic
aggccuaaucaaacagcuuug

SEQ ID NO: 58948 - RNA, 23 nt, Artificial Sequence
  Synthetic
ugaggccuaaucaaacagcuuug

SEQ ID NO: 58949 - RNA, 18 nt, Artificial Sequence
  Synthetic
uuauuaccuacugcuuug

SEQ ID NO: 58950 - RNA, 19 nt, Artificial Sequence
  Synthetic
cuuauuaccuacugcuuug

SEQ ID NO: 58951 - RNA, 20 nt, Artificial Sequence
  Synthetic
acuuauuaccuacugcuuug

SEQ ID NO: 58952 - RNA, 21 nt, Artificial Sequence
  Synthetic
aacuuauuaccuacugcuuug

SEQ ID NO: 58953 - RNA, 23 nt, Artificial Sequence
  Synthetic
ugaacuuauuaccuacugcuuug

SEQ ID NO: 58954 - RNA, 24 nt, Artificial Sequence
  Synthetic
augaacuuauuaccuacugcuuug

SEQ ID NO: 58955 - RNA, 18 nt, Artificial Sequence
  Synthetic
cagggccgugcugcuuug

SEQ ID NO: 58956 - RNA, 19 nt, Artificial Sequence
  Synthetic
acagggccgugcugcuuug

SEQ ID NO: 58957 - RNA, 20 nt, Artificial Sequence
  Synthetic
cacagggccgugcugcuuug

SEQ ID NO: 58958 - RNA, 23 nt, Artificial Sequence
  Synthetic
aggcacagggccgugcugcuuug

SEQ ID NO: 58959 - RNA, 24 nt, Artificial Sequence
  Synthetic
caggcacagggccgugcugcuuug

SEQ ID NO: 58960 - RNA, 21 nt, Artificial Sequence
  Synthetic
caaagcugugguuuaucuuug

SEQ ID NO: 58961 - RNA, 22 nt, Artificial Sequence
  Synthetic
ucaaagcugugguuuaucuuug

SEQ ID NO: 58962 - RNA, 23 nt, Artificial Sequence
  Synthetic
uucaaagcugugguuuaucuuug

SEQ ID NO: 58963 - RNA, 24 nt, Artificial Sequence
  Synthetic
cuucaaagcugugguuuaucuuug

SEQ ID NO: 58964 - RNA, 18 nt, Artificial Sequence
  Synthetic
ccuccauucuacucuuug

SEQ ID NO: 58965 - RNA, 19 nt, Artificial Sequence
  Synthetic
accuccauucuacucuuug

SEQ ID NO: 58966 - RNA, 20 nt, Artificial Sequence
  Synthetic
uaccuccauucuacucuuug

SEQ ID NO: 58967 - RNA, 22 nt, Artificial Sequence
  Synthetic
aguaccuccauucuacucuuug

SEQ ID NO: 58968 - RNA, 23 nt, Artificial Sequence
  Synthetic
aaguaccuccauucuacucuuug

SEQ ID NO: 58969 - RNA, 24 nt, Artificial Sequence
  Synthetic
aaaguaccuccauucuacucuuug

SEQ ID NO: 58970 - RNA, 18 nt, Artificial Sequence
  Synthetic
aggaaugagaugucuuug

SEQ ID NO: 58971 - RNA, 19 nt, Artificial Sequence
  Synthetic
aaggaaugagaugucuuug

SEQ ID NO: 58972 - RNA, 20 nt, Artificial Sequence
  Synthetic
caaggaaugagaugucuuug

SEQ ID NO: 58973 - RNA, 22 nt, Artificial Sequence
  Synthetic
agcaaggaaugagaugucuuug

SEQ ID NO: 58974 - RNA, 18 nt, Artificial Sequence
  Synthetic
uuuaguauucugucuuug

SEQ ID NO: 58975 - RNA, 19 nt, Artificial Sequence
  Synthetic
uuuuaguauucugucuuug

SEQ ID NO: 58976 - RNA, 20 nt, Artificial Sequence
  Synthetic
cuuuuaguauucugucuuug

SEQ ID NO: 58977 - RNA, 22 nt, Artificial Sequence
  Synthetic
ugcuuuuaguauucugucuuug

SEQ ID NO: 58978 - RNA, 23 nt, Artificial Sequence
  Synthetic
uugcuuuuaguauucugucuuug

SEQ ID NO: 58979 - RNA, 24 nt, Artificial Sequence
  Synthetic
auugcuuuuaguauucugucuuug

SEQ ID NO: 58980 - RNA, 18 nt, Artificial Sequence
  Synthetic
cugauuagaagacguuug

SEQ ID NO: 58981 - RNA, 20 nt, Artificial Sequence
  Synthetic
agcugauuagaagacguuug

SEQ ID NO: 58982 - RNA, 21 nt, Artificial Sequence
  Synthetic
uagcugauuagaagacguuug

SEQ ID NO: 58983 - RNA, 22 nt, Artificial Sequence
  Synthetic
cuagcugauuagaagacguuug

SEQ ID NO: 58984 - RNA, 23 nt, Artificial Sequence
  Synthetic
ucuagcugauuagaagacguuug

SEQ ID NO: 58985 - RNA, 24 nt, Artificial Sequence
  Synthetic
uucuagcugauuagaagacguuug

SEQ ID NO: 58986 - RNA, 18 nt, Artificial Sequence
  Synthetic
acacuaacucugcguuug

SEQ ID NO: 58987 - RNA, 19 nt, Artificial Sequence
  Synthetic
uacacuaacucugcguuug

SEQ ID NO: 58988 - RNA, 20 nt, Artificial Sequence
  Synthetic
cuacacuaacucugcguuug

SEQ ID NO: 58989 - RNA, 21 nt, Artificial Sequence
  Synthetic
acuacacuaacucugcguuug

SEQ ID NO: 58990 - RNA, 23 nt, Artificial Sequence
  Synthetic
agacuacacuaacucugcguuug

SEQ ID NO: 58991 - RNA, 24 nt, Artificial Sequence
  Synthetic
uagacuacacuaacucugcguuug

SEQ ID NO: 58992 - RNA, 18 nt, Artificial Sequence
  Synthetic
uuuguaaagugagguuug

SEQ ID NO: 58993 - RNA, 19 nt, Artificial Sequence
  Synthetic
auuuguaaagugagguuug

SEQ ID NO: 58994 - RNA, 20 nt, Artificial Sequence
  Synthetic
cauuuguaaagugagguuug

SEQ ID NO: 58995 - RNA, 21 nt, Artificial Sequence
  Synthetic
ccauuuguaaagugagguuug

SEQ ID NO: 58996 - RNA, 22 nt, Artificial Sequence
  Synthetic
uccauuuguaaagugagguuug

SEQ ID NO: 58997 - RNA, 23 nt, Artificial Sequence
  Synthetic
cuccauuuguaaagugagguuug

SEQ ID NO: 58998 - RNA, 24 nt, Artificial Sequence
  Synthetic
ucuccauuuguaaagugagguuug

SEQ ID NO: 58999 - RNA, 18 nt, Artificial Sequence
  Synthetic
uuauuuggucacuguuug

SEQ ID NO: 59000 - RNA, 19 nt, Artificial Sequence
  Synthetic
uuuauuuggucacuguuug

SEQ ID NO: 59001 - RNA, 20 nt, Artificial Sequence
  Synthetic
auuuauuuggucacuguuug

SEQ ID NO: 59002 - RNA, 21 nt, Artificial Sequence
  Synthetic
cauuuauuuggucacuguuug

SEQ ID NO: 59003 - RNA, 22 nt, Artificial Sequence
  Synthetic
acauuuauuuggucacuguuug

SEQ ID NO: 59004 - RNA, 24 nt, Artificial Sequence
  Synthetic
agacauuuauuuggucacuguuug

SEQ ID NO: 59005 - RNA, 18 nt, Artificial Sequence
  Synthetic
ccaggauguagcuguuug

SEQ ID NO: 59006 - RNA, 19 nt, Artificial Sequence
  Synthetic
accaggauguagcuguuug

SEQ ID NO: 59007 - RNA, 20 nt, Artificial Sequence
  Synthetic
caccaggauguagcuguuug

SEQ ID NO: 59008 - RNA, 22 nt, Artificial Sequence
  Synthetic
ugcaccaggauguagcuguuug

SEQ ID NO: 59009 - RNA, 23 nt, Artificial Sequence
  Synthetic
uugcaccaggauguagcuguuug

SEQ ID NO: 59010 - RNA, 19 nt, Artificial Sequence
  Synthetic
uguuaccuaaaucuguuug

SEQ ID NO: 59011 - RNA, 20 nt, Artificial Sequence
  Synthetic
uuguuaccuaaaucuguuug

SEQ ID NO: 59012 - RNA, 22 nt, Artificial Sequence
  Synthetic
uguuguuaccuaaaucuguuug

SEQ ID NO: 59013 - RNA, 23 nt, Artificial Sequence
  Synthetic
cuguuguuaccuaaaucuguuug

SEQ ID NO: 59014 - RNA, 24 nt, Artificial Sequence
  Synthetic
acuguuguuaccuaaaucuguuug

SEQ ID NO: 59015 - RNA, 18 nt, Artificial Sequence
  Synthetic
uuauuuccccuguguuug

SEQ ID NO: 59016 - RNA, 19 nt, Artificial Sequence
  Synthetic
uuuauuuccccuguguuug

SEQ ID NO: 59017 - RNA, 20 nt, Artificial Sequence
  Synthetic
cuuuauuuccccuguguuug

SEQ ID NO: 59018 - RNA, 21 nt, Artificial Sequence
  Synthetic
ucuuuauuuccccuguguuug

SEQ ID NO: 59019 - RNA, 22 nt, Artificial Sequence
  Synthetic
cucuuuauuuccccuguguuug

SEQ ID NO: 59020 - RNA, 23 nt, Artificial Sequence
  Synthetic
ccucuuuauuuccccuguguuug

SEQ ID NO: 59021 - RNA, 24 nt, Artificial Sequence
  Synthetic
uccucuuuauuuccccuguguuug

SEQ ID NO: 59022 - RNA, 20 nt, Artificial Sequence
  Synthetic
agguaucugaaauuuguuug

SEQ ID NO: 59023 - RNA, 22 nt, Artificial Sequence
  Synthetic
ugagguaucugaaauuuguuug

SEQ ID NO: 59024 - RNA, 23 nt, Artificial Sequence
  Synthetic
uugagguaucugaaauuuguuug

SEQ ID NO: 59025 - RNA, 24 nt, Artificial Sequence
  Synthetic
cuugagguaucugaaauuuguuug

SEQ ID NO: 59026 - RNA, 21 nt, Artificial Sequence
  Synthetic
ccuuaaauuuuuguuuguuug

SEQ ID NO: 59027 - RNA, 22 nt, Artificial Sequence
  Synthetic
uccuuaaauuuuuguuuguuug

SEQ ID NO: 59028 - RNA, 23 nt, Artificial Sequence
  Synthetic
cuccuuaaauuuuuguuuguuug

SEQ ID NO: 59029 - RNA, 18 nt, Artificial Sequence
  Synthetic
uguaauuagaaaauuuug

SEQ ID NO: 59030 - RNA, 19 nt, Artificial Sequence
  Synthetic
uuguaauuagaaaauuuug

SEQ ID NO: 59031 - RNA, 20 nt, Artificial Sequence
  Synthetic
cuuguaauuagaaaauuuug

SEQ ID NO: 59032 - RNA, 21 nt, Artificial Sequence
  Synthetic
ccuuguaauuagaaaauuuug

SEQ ID NO: 59033 - RNA, 22 nt, Artificial Sequence
  Synthetic
accuuguaauuagaaaauuuug

SEQ ID NO: 59034 - RNA, 24 nt, Artificial Sequence
  Synthetic
ugaccuuguaauuagaaaauuuug

SEQ ID NO: 59035 - RNA, 18 nt, Artificial Sequence
  Synthetic
cacuuuccaauaauuuug

SEQ ID NO: 59036 - RNA, 19 nt, Artificial Sequence
  Synthetic
ucacuuuccaauaauuuug

SEQ ID NO: 59037 - RNA, 21 nt, Artificial Sequence
  Synthetic
ugucacuuuccaauaauuuug

SEQ ID NO: 59038 - RNA, 22 nt, Artificial Sequence
  Synthetic
cugucacuuuccaauaauuuug

SEQ ID NO: 59039 - RNA, 23 nt, Artificial Sequence
  Synthetic
ucugucacuuuccaauaauuuug

SEQ ID NO: 59040 - RNA, 24 nt, Artificial Sequence
  Synthetic
uucugucacuuuccaauaauuuug

SEQ ID NO: 59041 - RNA, 18 nt, Artificial Sequence
  Synthetic
cagcacaagagcauuuug

SEQ ID NO: 59042 - RNA, 19 nt, Artificial Sequence
  Synthetic
acagcacaagagcauuuug

SEQ ID NO: 59043 - RNA, 22 nt, Artificial Sequence
  Synthetic
aggacagcacaagagcauuuug

SEQ ID NO: 59044 - RNA, 23 nt, Artificial Sequence
  Synthetic
aaggacagcacaagagcauuuug

SEQ ID NO: 59045 - RNA, 24 nt, Artificial Sequence
  Synthetic
uaaggacagcacaagagcauuuug

SEQ ID NO: 59046 - RNA, 18 nt, Artificial Sequence
  Synthetic
aggauguuguuuauuuug

SEQ ID NO: 59047 - RNA, 19 nt, Artificial Sequence
  Synthetic
aaggauguuguuuauuuug

SEQ ID NO: 59048 - RNA, 20 nt, Artificial Sequence
  Synthetic
aaaggauguuguuuauuuug

SEQ ID NO: 59049 - RNA, 21 nt, Artificial Sequence
  Synthetic
caaaggauguuguuuauuuug

SEQ ID NO: 59050 - RNA, 22 nt, Artificial Sequence
  Synthetic
acaaaggauguuguuuauuuug

SEQ ID NO: 59051 - RNA, 23 nt, Artificial Sequence
  Synthetic
uacaaaggauguuguuuauuuug

SEQ ID NO: 59052 - RNA, 18 nt, Artificial Sequence
  Synthetic
aauaacaaauaacuuuug

SEQ ID NO: 59053 - RNA, 19 nt, Artificial Sequence
  Synthetic
caauaacaaauaacuuuug

SEQ ID NO: 59054 - RNA, 20 nt, Artificial Sequence
  Synthetic
ccaauaacaaauaacuuuug

SEQ ID NO: 59055 - RNA, 21 nt, Artificial Sequence
  Synthetic
accaauaacaaauaacuuuug

SEQ ID NO: 59056 - RNA, 22 nt, Artificial Sequence
  Synthetic
aaccaauaacaaauaacuuuug

SEQ ID NO: 59057 - RNA, 23 nt, Artificial Sequence
  Synthetic
caaccaauaacaaauaacuuuug

SEQ ID NO: 59058 - RNA, 24 nt, Artificial Sequence
  Synthetic
ucaaccaauaacaaauaacuuuug

SEQ ID NO: 59059 - RNA, 21 nt, Artificial Sequence
  Synthetic
uaauucugauuauaacuuuug

SEQ ID NO: 59060 - RNA, 22 nt, Artificial Sequence
  Synthetic
auaauucugauuauaacuuuug

SEQ ID NO: 59061 - RNA, 23 nt, Artificial Sequence
  Synthetic
aauaauucugauuauaacuuuug

SEQ ID NO: 59062 - RNA, 18 nt, Artificial Sequence
  Synthetic
uuccucaguuuacuuuug

SEQ ID NO: 59063 - RNA, 20 nt, Artificial Sequence
  Synthetic
uguuccucaguuuacuuuug

SEQ ID NO: 59064 - RNA, 21 nt, Artificial Sequence
  Synthetic
auguuccucaguuuacuuuug

SEQ ID NO: 59065 - RNA, 22 nt, Artificial Sequence
  Synthetic
aauguuccucaguuuacuuuug

SEQ ID NO: 59066 - RNA, 23 nt, Artificial Sequence
  Synthetic
aaauguuccucaguuuacuuuug

SEQ ID NO: 59067 - RNA, 18 nt, Artificial Sequence
  Synthetic
uuacauuguuuacuuuug

SEQ ID NO: 59068 - RNA, 19 nt, Artificial Sequence
  Synthetic
uuuacauuguuuacuuuug

SEQ ID NO: 59069 - RNA, 20 nt, Artificial Sequence
  Synthetic
uuuuacauuguuuacuuuug

SEQ ID NO: 59070 - RNA, 21 nt, Artificial Sequence
  Synthetic
auuuuacauuguuuacuuuug

SEQ ID NO: 59071 - RNA, 22 nt, Artificial Sequence
  Synthetic
uauuuuacauuguuuacuuuug

SEQ ID NO: 59072 - RNA, 23 nt, Artificial Sequence
  Synthetic
cuauuuuacauuguuuacuuuug

SEQ ID NO: 59073 - RNA, 24 nt, Artificial Sequence
  Synthetic
acuauuuuacauuguuuacuuuug

SEQ ID NO: 59074 - RNA, 18 nt, Artificial Sequence
  Synthetic
agagucucugugcuuuug

SEQ ID NO: 59075 - RNA, 19 nt, Artificial Sequence
  Synthetic
cagagucucugugcuuuug

SEQ ID NO: 59076 - RNA, 20 nt, Artificial Sequence
  Synthetic
acagagucucugugcuuuug

SEQ ID NO: 59077 - RNA, 22 nt, Artificial Sequence
  Synthetic
agacagagucucugugcuuuug

SEQ ID NO: 59078 - RNA, 23 nt, Artificial Sequence
  Synthetic
aagacagagucucugugcuuuug

SEQ ID NO: 59079 - RNA, 24 nt, Artificial Sequence
  Synthetic
caagacagagucucugugcuuuug

SEQ ID NO: 59080 - RNA, 18 nt, Artificial Sequence
  Synthetic
auuaugaaaugaguuuug

SEQ ID NO: 59081 - RNA, 19 nt, Artificial Sequence
  Synthetic
uauuaugaaaugaguuuug

SEQ ID NO: 59082 - RNA, 21 nt, Artificial Sequence
  Synthetic
uguauuaugaaaugaguuuug

SEQ ID NO: 59083 - RNA, 23 nt, Artificial Sequence
  Synthetic
uguguauuaugaaaugaguuuug

SEQ ID NO: 59084 - RNA, 24 nt, Artificial Sequence
  Synthetic
auguguauuaugaaaugaguuuug

SEQ ID NO: 59085 - RNA, 18 nt, Artificial Sequence
  Synthetic
uuacaaucacuaguuuug

SEQ ID NO: 59086 - RNA, 20 nt, Artificial Sequence
  Synthetic
uguuacaaucacuaguuuug

SEQ ID NO: 59087 - RNA, 21 nt, Artificial Sequence
  Synthetic
auguuacaaucacuaguuuug

SEQ ID NO: 59088 - RNA, 22 nt, Artificial Sequence
  Synthetic
cauguuacaaucacuaguuuug

SEQ ID NO: 59089 - RNA, 23 nt, Artificial Sequence
  Synthetic
ucauguuacaaucacuaguuuug

SEQ ID NO: 59090 - RNA, 24 nt, Artificial Sequence
  Synthetic
uucauguuacaaucacuaguuuug

SEQ ID NO: 59091 - RNA, 18 nt, Artificial Sequence
  Synthetic
uagacaaauuccguuuug

SEQ ID NO: 59092 - RNA, 19 nt, Artificial Sequence
  Synthetic
uuagacaaauuccguuuug

SEQ ID NO: 59093 - RNA, 20 nt, Artificial Sequence
  Synthetic
uuuagacaaauuccguuuug

SEQ ID NO: 59094 - RNA, 21 nt, Artificial Sequence
  Synthetic
cuuuagacaaauuccguuuug

SEQ ID NO: 59095 - RNA, 22 nt, Artificial Sequence
  Synthetic
acuuuagacaaauuccguuuug

SEQ ID NO: 59096 - RNA, 23 nt, Artificial Sequence
  Synthetic
aacuuuagacaaauuccguuuug

SEQ ID NO: 59097 - RNA, 24 nt, Artificial Sequence
  Synthetic
aaacuuuagacaaauuccguuuug

SEQ ID NO: 59098 - RNA, 20 nt, Artificial Sequence
  Synthetic
aggaguuuuuccuuguuuug

SEQ ID NO: 59099 - RNA, 21 nt, Artificial Sequence
  Synthetic
uaggaguuuuuccuuguuuug

SEQ ID NO: 59100 - RNA, 22 nt, Artificial Sequence
  Synthetic
uuaggaguuuuuccuuguuuug

SEQ ID NO: 59101 - RNA, 23 nt, Artificial Sequence
  Synthetic
uuuaggaguuuuuccuuguuuug

SEQ ID NO: 59102 - RNA, 24 nt, Artificial Sequence
  Synthetic
uuuuaggaguuuuuccuuguuuug

SEQ ID NO: 59103 - RNA, 18 nt, Artificial Sequence
  Synthetic
ugcccuacuauauuuuug

SEQ ID NO: 59104 - RNA, 19 nt, Artificial Sequence
  Synthetic
uugcccuacuauauuuuug

SEQ ID NO: 59105 - RNA, 20 nt, Artificial Sequence
  Synthetic
uuugcccuacuauauuuuug

SEQ ID NO: 59106 - RNA, 21 nt, Artificial Sequence
  Synthetic
uuuugcccuacuauauuuuug

SEQ ID NO: 59107 - RNA, 24 nt, Artificial Sequence
  Synthetic
ugguuuugcccuacuauauuuuug

SEQ ID NO: 59108 - RNA, 18 nt, Artificial Sequence
  Synthetic
ucuaguacaugguuuuug

SEQ ID NO: 59109 - RNA, 20 nt, Artificial Sequence
  Synthetic
agucuaguacaugguuuuug

SEQ ID NO: 59110 - RNA, 21 nt, Artificial Sequence
  Synthetic
cagucuaguacaugguuuuug

SEQ ID NO: 59111 - RNA, 22 nt, Artificial Sequence
  Synthetic
acagucuaguacaugguuuuug

SEQ ID NO: 59112 - RNA, 23 nt, Artificial Sequence
  Synthetic
aacagucuaguacaugguuuuug

SEQ ID NO: 59113 - RNA, 24 nt, Artificial Sequence
  Synthetic
caacagucuaguacaugguuuuug

SEQ ID NO: 59114 - RNA, 18 nt, Artificial Sequence
  Synthetic
ucagguuaauuguuuuug

SEQ ID NO: 59115 - RNA, 19 nt, Artificial Sequence
  Synthetic
aucagguuaauuguuuuug

SEQ ID NO: 59116 - RNA, 20 nt, Artificial Sequence
  Synthetic
aaucagguuaauuguuuuug

SEQ ID NO: 59117 - RNA, 21 nt, Artificial Sequence
  Synthetic
aaaucagguuaauuguuuuug

SEQ ID NO: 59118 - RNA, 22 nt, Artificial Sequence
  Synthetic
aaaaucagguuaauuguuuuug

SEQ ID NO: 59119 - RNA, 23 nt, Artificial Sequence
  Synthetic
uaaaaucagguuaauuguuuuug

SEQ ID NO: 59120 - RNA, 24 nt, Artificial Sequence
  Synthetic
uuaaaaucagguuaauuguuuuug

SEQ ID NO: 59121 - RNA, 22 nt, Artificial Sequence
  Synthetic
agaugauuuucuuucuuuuuug

SEQ ID NO: 59122 - RNA, 24 nt, Artificial Sequence
  Synthetic
agagaugauuuucuuucuuuuuug

SEQ ID NO: 59123 - RNA, 21 nt, Artificial Sequence
  Synthetic
aagccauuagggaaaaaaaau

SEQ ID NO: 59124 - RNA, 22 nt, Artificial Sequence
  Synthetic
aaagccauuagggaaaaaaaau

SEQ ID NO: 59125 - RNA, 23 nt, Artificial Sequence
  Synthetic
uaaagccauuagggaaaaaaaau

SEQ ID NO: 59126 - RNA, 24 nt, Artificial Sequence
  Synthetic
cuaaagccauuagggaaaaaaaau

SEQ ID NO: 59127 - RNA, 21 nt, Artificial Sequence
  Synthetic
cuucaaacacuugaaaaaaau

SEQ ID NO: 59128 - RNA, 22 nt, Artificial Sequence
  Synthetic
ucuucaaacacuugaaaaaaau

SEQ ID NO: 59129 - RNA, 23 nt, Artificial Sequence
  Synthetic
uucuucaaacacuugaaaaaaau

SEQ ID NO: 59130 - RNA, 21 nt, Artificial Sequence
  Synthetic
aaguuucaaguugaaaaaaau

SEQ ID NO: 59131 - RNA, 22 nt, Artificial Sequence
  Synthetic
uaaguuucaaguugaaaaaaau

SEQ ID NO: 59132 - RNA, 23 nt, Artificial Sequence
  Synthetic
auaaguuucaaguugaaaaaaau

SEQ ID NO: 59133 - RNA, 24 nt, Artificial Sequence
  Synthetic
aauaaguuucaaguugaaaaaaau

SEQ ID NO: 59134 - RNA, 18 nt, Artificial Sequence
  Synthetic
auucagugcuaaaaaaau

SEQ ID NO: 59135 - RNA, 19 nt, Artificial Sequence
  Synthetic
aauucagugcuaaaaaaau

SEQ ID NO: 59136 - RNA, 20 nt, Artificial Sequence
  Synthetic
aaauucagugcuaaaaaaau

SEQ ID NO: 59137 - RNA, 21 nt, Artificial Sequence
  Synthetic
aaaauucagugcuaaaaaaau

SEQ ID NO: 59138 - RNA, 23 nt, Artificial Sequence
  Synthetic
ugaaaauucagugcuaaaaaaau

SEQ ID NO: 59139 - RNA, 24 nt, Artificial Sequence
  Synthetic
cugaaaauucagugcuaaaaaaau

SEQ ID NO: 59140 - RNA, 21 nt, Artificial Sequence
  Synthetic
aaaauacaaauggcaaaaaau

SEQ ID NO: 59141 - RNA, 22 nt, Artificial Sequence
  Synthetic
aaaaauacaaauggcaaaaaau

SEQ ID NO: 59142 - RNA, 24 nt, Artificial Sequence
  Synthetic
agaaaaauacaaauggcaaaaaau

SEQ ID NO: 59143 - RNA, 21 nt, Artificial Sequence
  Synthetic
uaucuuucuauuguaaaaaau

SEQ ID NO: 59144 - RNA, 22 nt, Artificial Sequence
  Synthetic
auaucuuucuauuguaaaaaau

SEQ ID NO: 59145 - RNA, 23 nt, Artificial Sequence
  Synthetic
uauaucuuucuauuguaaaaaau

SEQ ID NO: 59146 - RNA, 24 nt, Artificial Sequence
  Synthetic
auauaucuuucuauuguaaaaaau

SEQ ID NO: 59147 - RNA, 21 nt, Artificial Sequence
  Synthetic
aauuuuuuaaaaaacaaaaau

SEQ ID NO: 59148 - RNA, 22 nt, Artificial Sequence
  Synthetic
uaauuuuuuaaaaaacaaaaau

SEQ ID NO: 59149 - RNA, 24 nt, Artificial Sequence
  Synthetic
aguaauuuuuuaaaaaacaaaaau

SEQ ID NO: 59150 - RNA, 18 nt, Artificial Sequence
  Synthetic
caaaguggcuucaaaaau

SEQ ID NO: 59151 - RNA, 19 nt, Artificial Sequence
  Synthetic
ucaaaguggcuucaaaaau

SEQ ID NO: 59152 - RNA, 20 nt, Artificial Sequence
  Synthetic
uucaaaguggcuucaaaaau

SEQ ID NO: 59153 - RNA, 21 nt, Artificial Sequence
  Synthetic
uuucaaaguggcuucaaaaau

SEQ ID NO: 59154 - RNA, 22 nt, Artificial Sequence
  Synthetic
cuuucaaaguggcuucaaaaau

SEQ ID NO: 59155 - RNA, 23 nt, Artificial Sequence
  Synthetic
acuuucaaaguggcuucaaaaau

SEQ ID NO: 59156 - RNA, 24 nt, Artificial Sequence
  Synthetic
cacuuucaaaguggcuucaaaaau

SEQ ID NO: 59157 - RNA, 18 nt, Artificial Sequence
  Synthetic
cugcagaacaugaaaaau

SEQ ID NO: 59158 - RNA, 19 nt, Artificial Sequence
  Synthetic
ucugcagaacaugaaaaau

SEQ ID NO: 59159 - RNA, 21 nt, Artificial Sequence
  Synthetic
ugucugcagaacaugaaaaau

SEQ ID NO: 59160 - RNA, 22 nt, Artificial Sequence
  Synthetic
augucugcagaacaugaaaaau

SEQ ID NO: 59161 - RNA, 24 nt, Artificial Sequence
  Synthetic
agaugucugcagaacaugaaaaau

SEQ ID NO: 59162 - RNA, 18 nt, Artificial Sequence
  Synthetic
ucacuguuuaauaaaaau

SEQ ID NO: 59163 - RNA, 19 nt, Artificial Sequence
  Synthetic
uucacuguuuaauaaaaau

SEQ ID NO: 59164 - RNA, 21 nt, Artificial Sequence
  Synthetic
uguucacuguuuaauaaaaau

SEQ ID NO: 59165 - RNA, 22 nt, Artificial Sequence
  Synthetic
auguucacuguuuaauaaaaau

SEQ ID NO: 59166 - RNA, 23 nt, Artificial Sequence
  Synthetic
uauguucacuguuuaauaaaaau

SEQ ID NO: 59167 - RNA, 24 nt, Artificial Sequence
  Synthetic
auauguucacuguuuaauaaaaau

SEQ ID NO: 59168 - RNA, 18 nt, Artificial Sequence
  Synthetic
agaugugaucauaaaaau

SEQ ID NO: 59169 - RNA, 19 nt, Artificial Sequence
  Synthetic
aagaugugaucauaaaaau

SEQ ID NO: 59170 - RNA, 20 nt, Artificial Sequence
  Synthetic
uaagaugugaucauaaaaau

SEQ ID NO: 59171 - RNA, 21 nt, Artificial Sequence
  Synthetic
uuaagaugugaucauaaaaau

SEQ ID NO: 59172 - RNA, 22 nt, Artificial Sequence
  Synthetic
cuuaagaugugaucauaaaaau

SEQ ID NO: 59173 - RNA, 23 nt, Artificial Sequence
  Synthetic
ccuuaagaugugaucauaaaaau

SEQ ID NO: 59174 - RNA, 24 nt, Artificial Sequence
  Synthetic
accuuaagaugugaucauaaaaau

SEQ ID NO: 59175 - RNA, 18 nt, Artificial Sequence
  Synthetic
ucacauggugauaaaaau

SEQ ID NO: 59176 - RNA, 21 nt, Artificial Sequence
  Synthetic
aggucacauggugauaaaaau

SEQ ID NO: 59177 - RNA, 23 nt, Artificial Sequence
  Synthetic
cgaggucacauggugauaaaaau

SEQ ID NO: 59178 - RNA, 24 nt, Artificial Sequence
  Synthetic
ccgaggucacauggugauaaaaau

SEQ ID NO: 59179 - RNA, 21 nt, Artificial Sequence
  Synthetic
agagaaguuuaggcuaaaaau

SEQ ID NO: 59180 - RNA, 24 nt, Artificial Sequence
  Synthetic
aggagagaaguuuaggcuaaaaau

SEQ ID NO: 59181 - RNA, 19 nt, Artificial Sequence
  Synthetic
uggcuuuugugcuaaaaau

SEQ ID NO: 59182 - RNA, 20 nt, Artificial Sequence
  Synthetic
uuggcuuuugugcuaaaaau

SEQ ID NO: 59183 - RNA, 21 nt, Artificial Sequence
  Synthetic
uuuggcuuuugugcuaaaaau

SEQ ID NO: 59184 - RNA, 22 nt, Artificial Sequence
  Synthetic
uuuuggcuuuugugcuaaaaau

SEQ ID NO: 59185 - RNA, 23 nt, Artificial Sequence
  Synthetic
cuuuuggcuuuugugcuaaaaau

SEQ ID NO: 59186 - RNA, 24 nt, Artificial Sequence
  Synthetic
ccuuuuggcuuuugugcuaaaaau

SEQ ID NO: 59187 - RNA, 18 nt, Artificial Sequence
  Synthetic
aguagaauggguaaaaau

SEQ ID NO: 59188 - RNA, 19 nt, Artificial Sequence
  Synthetic
uaguagaauggguaaaaau

SEQ ID NO: 59189 - RNA, 20 nt, Artificial Sequence
  Synthetic
auaguagaauggguaaaaau

SEQ ID NO: 59190 - RNA, 21 nt, Artificial Sequence
  Synthetic
aauaguagaauggguaaaaau

SEQ ID NO: 59191 - RNA, 22 nt, Artificial Sequence
  Synthetic
aaauaguagaauggguaaaaau

SEQ ID NO: 59192 - RNA, 23 nt, Artificial Sequence
  Synthetic
aaaauaguagaauggguaaaaau

SEQ ID NO: 59193 - RNA, 20 nt, Artificial Sequence
  Synthetic
uggaguaugcuuguaaaaau

SEQ ID NO: 59194 - RNA, 23 nt, Artificial Sequence
  Synthetic
ugguggaguaugcuuguaaaaau

SEQ ID NO: 59195 - RNA, 24 nt, Artificial Sequence
  Synthetic
augguggaguaugcuuguaaaaau

SEQ ID NO: 59196 - RNA, 23 nt, Artificial Sequence
  Synthetic
aggaaauaaauaugguuaaaaau

SEQ ID NO: 59197 - RNA, 24 nt, Artificial Sequence
  Synthetic
caggaaauaaauaugguuaaaaau

SEQ ID NO: 59198 - RNA, 18 nt, Artificial Sequence
  Synthetic
acaguccguguuaaaaau

SEQ ID NO: 59199 - RNA, 19 nt, Artificial Sequence
  Synthetic
aacaguccguguuaaaaau

SEQ ID NO: 59200 - RNA, 20 nt, Artificial Sequence
  Synthetic
uaacaguccguguuaaaaau

SEQ ID NO: 59201 - RNA, 22 nt, Artificial Sequence
  Synthetic
uguaacaguccguguuaaaaau

SEQ ID NO: 59202 - RNA, 23 nt, Artificial Sequence
  Synthetic
auguaacaguccguguuaaaaau

SEQ ID NO: 59203 - RNA, 24 nt, Artificial Sequence
  Synthetic
aauguaacaguccguguuaaaaau

SEQ ID NO: 59204 - RNA, 21 nt, Artificial Sequence
  Synthetic
aguuaaaaaacaaaacaaaau

SEQ ID NO: 59205 - RNA, 22 nt, Artificial Sequence
  Synthetic
aaguuaaaaaacaaaacaaaau

SEQ ID NO: 59206 - RNA, 23 nt, Artificial Sequence
  Synthetic
uaaguuaaaaaacaaaacaaaau

SEQ ID NO: 59207 - RNA, 24 nt, Artificial Sequence
  Synthetic
uuaaguuaaaaaacaaaacaaaau

SEQ ID NO: 59208 - RNA, 18 nt, Artificial Sequence
  Synthetic
uuccagugugcacaaaau

SEQ ID NO: 59209 - RNA, 19 nt, Artificial Sequence
  Synthetic
uuuccagugugcacaaaau

SEQ ID NO: 59210 - RNA, 20 nt, Artificial Sequence
  Synthetic
uuuuccagugugcacaaaau

SEQ ID NO: 59211 - RNA, 21 nt, Artificial Sequence
  Synthetic
uuuuuccagugugcacaaaau

SEQ ID NO: 59212 - RNA, 22 nt, Artificial Sequence
  Synthetic
cuuuuuccagugugcacaaaau

SEQ ID NO: 59213 - RNA, 24 nt, Artificial Sequence
  Synthetic
ugcuuuuuccagugugcacaaaau

SEQ ID NO: 59214 - RNA, 18 nt, Artificial Sequence
  Synthetic
uauaacuuaagacaaaau

SEQ ID NO: 59215 - RNA, 19 nt, Artificial Sequence
  Synthetic
uuauaacuuaagacaaaau

SEQ ID NO: 59216 - RNA, 21 nt, Artificial Sequence
  Synthetic
uguuauaacuuaagacaaaau

SEQ ID NO: 59217 - RNA, 22 nt, Artificial Sequence
  Synthetic
auguuauaacuuaagacaaaau

SEQ ID NO: 59218 - RNA, 23 nt, Artificial Sequence
  Synthetic
uauguuauaacuuaagacaaaau

SEQ ID NO: 59219 - RNA, 24 nt, Artificial Sequence
  Synthetic
uuauguuauaacuuaagacaaaau

SEQ ID NO: 59220 - RNA, 18 nt, Artificial Sequence
  Synthetic
ucuggcaccagacaaaau

SEQ ID NO: 59221 - RNA, 20 nt, Artificial Sequence
  Synthetic
agucuggcaccagacaaaau

SEQ ID NO: 59222 - RNA, 21 nt, Artificial Sequence
  Synthetic
cagucuggcaccagacaaaau

SEQ ID NO: 59223 - RNA, 22 nt, Artificial Sequence
  Synthetic
acagucuggcaccagacaaaau

SEQ ID NO: 59224 - RNA, 23 nt, Artificial Sequence
  Synthetic
aacagucuggcaccagacaaaau

SEQ ID NO: 59225 - RNA, 24 nt, Artificial Sequence
  Synthetic
aaacagucuggcaccagacaaaau

SEQ ID NO: 59226 - RNA, 18 nt, Artificial Sequence
  Synthetic
acauugaaauuacaaaau

SEQ ID NO: 59227 - RNA, 20 nt, Artificial Sequence
  Synthetic
ugacauugaaauuacaaaau

SEQ ID NO: 59228 - RNA, 22 nt, Artificial Sequence
  Synthetic
ugugacauugaaauuacaaaau

SEQ ID NO: 59229 - RNA, 23 nt, Artificial Sequence
  Synthetic
uugugacauugaaauuacaaaau

SEQ ID NO: 59230 - RNA, 18 nt, Artificial Sequence
  Synthetic
auuuauuaguagcaaaau

SEQ ID NO: 59231 - RNA, 19 nt, Artificial Sequence
  Synthetic
cauuuauuaguagcaaaau

SEQ ID NO: 59232 - RNA, 20 nt, Artificial Sequence
  Synthetic
acauuuauuaguagcaaaau

SEQ ID NO: 59233 - RNA, 21 nt, Artificial Sequence
  Synthetic
uacauuuauuaguagcaaaau

SEQ ID NO: 59234 - RNA, 22 nt, Artificial Sequence
  Synthetic
auacauuuauuaguagcaaaau

SEQ ID NO: 59235 - RNA, 23 nt, Artificial Sequence
  Synthetic
aauacauuuauuaguagcaaaau

SEQ ID NO: 59236 - RNA, 24 nt, Artificial Sequence
  Synthetic
caauacauuuauuaguagcaaaau

SEQ ID NO: 59237 - RNA, 21 nt, Artificial Sequence
  Synthetic
acaguuagaaaauggcaaaau

SEQ ID NO: 59238 - RNA, 22 nt, Artificial Sequence
  Synthetic
uacaguuagaaaauggcaaaau

SEQ ID NO: 59239 - RNA, 23 nt, Artificial Sequence
  Synthetic
auacaguuagaaaauggcaaaau

SEQ ID NO: 59240 - RNA, 24 nt, Artificial Sequence
  Synthetic
uauacaguuagaaaauggcaaaau

SEQ ID NO: 59241 - RNA, 18 nt, Artificial Sequence
  Synthetic
auuugcaaugaucaaaau

SEQ ID NO: 59242 - RNA, 19 nt, Artificial Sequence
  Synthetic
uauuugcaaugaucaaaau

SEQ ID NO: 59243 - RNA, 20 nt, Artificial Sequence
  Synthetic
auauuugcaaugaucaaaau

SEQ ID NO: 59244 - RNA, 21 nt, Artificial Sequence
  Synthetic
aauauuugcaaugaucaaaau

SEQ ID NO: 59245 - RNA, 22 nt, Artificial Sequence
  Synthetic
uaauauuugcaaugaucaaaau

SEQ ID NO: 59246 - RNA, 23 nt, Artificial Sequence
  Synthetic
cuaauauuugcaaugaucaaaau

SEQ ID NO: 59247 - RNA, 24 nt, Artificial Sequence
  Synthetic
ucuaauauuugcaaugaucaaaau

SEQ ID NO: 59248 - RNA, 18 nt, Artificial Sequence
  Synthetic
uaccaaaauagucaaaau

SEQ ID NO: 59249 - RNA, 19 nt, Artificial Sequence
  Synthetic
auaccaaaauagucaaaau

SEQ ID NO: 59250 - RNA, 20 nt, Artificial Sequence
  Synthetic
aauaccaaaauagucaaaau

SEQ ID NO: 59251 - RNA, 21 nt, Artificial Sequence
  Synthetic
aaauaccaaaauagucaaaau

SEQ ID NO: 59252 - RNA, 22 nt, Artificial Sequence
  Synthetic
caaauaccaaaauagucaaaau

SEQ ID NO: 59253 - RNA, 24 nt, Artificial Sequence
  Synthetic
ugcaaauaccaaaauagucaaaau

SEQ ID NO: 59254 - RNA, 21 nt, Artificial Sequence
  Synthetic
ccaaaaagugggcaagaaaau

SEQ ID NO: 59255 - RNA, 22 nt, Artificial Sequence
  Synthetic
accaaaaagugggcaagaaaau

SEQ ID NO: 59256 - RNA, 23 nt, Artificial Sequence
  Synthetic
aaccaaaaagugggcaagaaaau

SEQ ID NO: 59257 - RNA, 24 nt, Artificial Sequence
  Synthetic
uaaccaaaaagugggcaagaaaau

SEQ ID NO: 59258 - RNA, 22 nt, Artificial Sequence
  Synthetic
agaaagacugaaugcagaaaau

SEQ ID NO: 59259 - RNA, 23 nt, Artificial Sequence
  Synthetic
aagaaagacugaaugcagaaaau

SEQ ID NO: 59260 - RNA, 21 nt, Artificial Sequence
  Synthetic
acauaucauugaagagaaaau

SEQ ID NO: 59261 - RNA, 22 nt, Artificial Sequence
  Synthetic
uacauaucauugaagagaaaau

SEQ ID NO: 59262 - RNA, 23 nt, Artificial Sequence
  Synthetic
auacauaucauugaagagaaaau

SEQ ID NO: 59263 - RNA, 24 nt, Artificial Sequence
  Synthetic
cauacauaucauugaagagaaaau

SEQ ID NO: 59264 - RNA, 18 nt, Artificial Sequence
  Synthetic
acugcaguuauagaaaau

SEQ ID NO: 59265 - RNA, 19 nt, Artificial Sequence
  Synthetic
uacugcaguuauagaaaau

SEQ ID NO: 59266 - RNA, 20 nt, Artificial Sequence
  Synthetic
auacugcaguuauagaaaau

SEQ ID NO: 59267 - RNA, 22 nt, Artificial Sequence
  Synthetic
agauacugcaguuauagaaaau

SEQ ID NO: 59268 - RNA, 23 nt, Artificial Sequence
  Synthetic
cagauacugcaguuauagaaaau

SEQ ID NO: 59269 - RNA, 24 nt, Artificial Sequence
  Synthetic
ucagauacugcaguuauagaaaau

SEQ ID NO: 59270 - RNA, 18 nt, Artificial Sequence
  Synthetic
cuagauuuccaggaaaau

SEQ ID NO: 59271 - RNA, 19 nt, Artificial Sequence
  Synthetic
ucuagauuuccaggaaaau

SEQ ID NO: 59272 - RNA, 20 nt, Artificial Sequence
  Synthetic
aucuagauuuccaggaaaau

SEQ ID NO: 59273 - RNA, 21 nt, Artificial Sequence
  Synthetic
uaucuagauuuccaggaaaau

SEQ ID NO: 59274 - RNA, 22 nt, Artificial Sequence
  Synthetic
auaucuagauuuccaggaaaau

SEQ ID NO: 59275 - RNA, 23 nt, Artificial Sequence
  Synthetic
cauaucuagauuuccaggaaaau

SEQ ID NO: 59276 - RNA, 24 nt, Artificial Sequence
  Synthetic
ccauaucuagauuuccaggaaaau

SEQ ID NO: 59277 - RNA, 18 nt, Artificial Sequence
  Synthetic
uguggccugugggaaaau

SEQ ID NO: 59278 - RNA, 20 nt, Artificial Sequence
  Synthetic
aguguggccugugggaaaau

SEQ ID NO: 59279 - RNA, 22 nt, Artificial Sequence
  Synthetic
ugaguguggccugugggaaaau

SEQ ID NO: 59280 - RNA, 23 nt, Artificial Sequence
  Synthetic
uugaguguggccugugggaaaau

SEQ ID NO: 59281 - RNA, 18 nt, Artificial Sequence
  Synthetic
uggcuccacauggaaaau

SEQ ID NO: 59282 - RNA, 19 nt, Artificial Sequence
  Synthetic
cuggcuccacauggaaaau

SEQ ID NO: 59283 - RNA, 20 nt, Artificial Sequence
  Synthetic
ccuggcuccacauggaaaau

SEQ ID NO: 59284 - RNA, 22 nt, Artificial Sequence
  Synthetic
agccuggcuccacauggaaaau

SEQ ID NO: 59285 - RNA, 23 nt, Artificial Sequence
  Synthetic
cagccuggcuccacauggaaaau

SEQ ID NO: 59286 - RNA, 24 nt, Artificial Sequence
  Synthetic
ucagccuggcuccacauggaaaau

SEQ ID NO: 59287 - RNA, 18 nt, Artificial Sequence
  Synthetic
aacaugaucugugaaaau

SEQ ID NO: 59288 - RNA, 19 nt, Artificial Sequence
  Synthetic
uaacaugaucugugaaaau

SEQ ID NO: 59289 - RNA, 20 nt, Artificial Sequence
  Synthetic
cuaacaugaucugugaaaau

SEQ ID NO: 59290 - RNA, 21 nt, Artificial Sequence
  Synthetic
ccuaacaugaucugugaaaau

SEQ ID NO: 59291 - RNA, 22 nt, Artificial Sequence
  Synthetic
uccuaacaugaucugugaaaau

SEQ ID NO: 59292 - RNA, 23 nt, Artificial Sequence
  Synthetic
uuccuaacaugaucugugaaaau

SEQ ID NO: 59293 - RNA, 24 nt, Artificial Sequence
  Synthetic
cuuccuaacaugaucugugaaaau

SEQ ID NO: 59294 - RNA, 18 nt, Artificial Sequence
  Synthetic
ucuauacaccuugaaaau

SEQ ID NO: 59295 - RNA, 19 nt, Artificial Sequence
  Synthetic
uucuauacaccuugaaaau

SEQ ID NO: 59296 - RNA, 20 nt, Artificial Sequence
  Synthetic
uuucuauacaccuugaaaau

SEQ ID NO: 59297 - RNA, 21 nt, Artificial Sequence
  Synthetic
uuuucuauacaccuugaaaau

SEQ ID NO: 59298 - RNA, 22 nt, Artificial Sequence
  Synthetic
auuuucuauacaccuugaaaau

SEQ ID NO: 59299 - RNA, 23 nt, Artificial Sequence
  Synthetic
aauuuucuauacaccuugaaaau

SEQ ID NO: 59300 - RNA, 24 nt, Artificial Sequence
  Synthetic
aaauuuucuauacaccuugaaaau

SEQ ID NO: 59301 - RNA, 18 nt, Artificial Sequence
  Synthetic
aaccuguugaaauaaaau

SEQ ID NO: 59302 - RNA, 19 nt, Artificial Sequence
  Synthetic
uaaccuguugaaauaaaau

SEQ ID NO: 59303 - RNA, 20 nt, Artificial Sequence
  Synthetic
cuaaccuguugaaauaaaau

SEQ ID NO: 59304 - RNA, 22 nt, Artificial Sequence
  Synthetic
agcuaaccuguugaaauaaaau

SEQ ID NO: 59305 - RNA, 23 nt, Artificial Sequence
  Synthetic
cagcuaaccuguugaaauaaaau

SEQ ID NO: 59306 - RNA, 18 nt, Artificial Sequence
  Synthetic
ccguaguuuuaauaaaau

SEQ ID NO: 59307 - RNA, 19 nt, Artificial Sequence
  Synthetic
accguaguuuuaauaaaau

SEQ ID NO: 59308 - RNA, 22 nt, Artificial Sequence
  Synthetic
uggaccguaguuuuaauaaaau

SEQ ID NO: 59309 - RNA, 24 nt, Artificial Sequence
  Synthetic
aguggaccguaguuuuaauaaaau

SEQ ID NO: 59310 - RNA, 18 nt, Artificial Sequence
  Synthetic
cuaauggaaacauaaaau

SEQ ID NO: 59311 - RNA, 19 nt, Artificial Sequence
  Synthetic
ucuaauggaaacauaaaau

SEQ ID NO: 59312 - RNA, 20 nt, Artificial Sequence
  Synthetic
aucuaauggaaacauaaaau

SEQ ID NO: 59313 - RNA, 21 nt, Artificial Sequence
  Synthetic
caucuaauggaaacauaaaau

SEQ ID NO: 59314 - RNA, 22 nt, Artificial Sequence
  Synthetic
ccaucuaauggaaacauaaaau

SEQ ID NO: 59315 - RNA, 24 nt, Artificial Sequence
  Synthetic
agccaucuaauggaaacauaaaau

SEQ ID NO: 59316 - RNA, 18 nt, Artificial Sequence
  Synthetic
uuuaaccuucacuaaaau

SEQ ID NO: 59317 - RNA, 19 nt, Artificial Sequence
  Synthetic
cuuuaaccuucacuaaaau

SEQ ID NO: 59318 - RNA, 20 nt, Artificial Sequence
  Synthetic
ucuuuaaccuucacuaaaau

SEQ ID NO: 59319 - RNA, 21 nt, Artificial Sequence
  Synthetic
cucuuuaaccuucacuaaaau

SEQ ID NO: 59320 - RNA, 22 nt, Artificial Sequence
  Synthetic
ucucuuuaaccuucacuaaaau

SEQ ID NO: 59321 - RNA, 24 nt, Artificial Sequence
  Synthetic
ugucucuuuaaccuucacuaaaau

SEQ ID NO: 59322 - RNA, 18 nt, Artificial Sequence
  Synthetic
aagugaaaugacuaaaau

SEQ ID NO: 59323 - RNA, 19 nt, Artificial Sequence
  Synthetic
uaagugaaaugacuaaaau

SEQ ID NO: 59324 - RNA, 20 nt, Artificial Sequence
  Synthetic
uuaagugaaaugacuaaaau

SEQ ID NO: 59325 - RNA, 22 nt, Artificial Sequence
  Synthetic
aguuaagugaaaugacuaaaau

SEQ ID NO: 59326 - RNA, 23 nt, Artificial Sequence
  Synthetic
aaguuaagugaaaugacuaaaau

SEQ ID NO: 59327 - RNA, 24 nt, Artificial Sequence
  Synthetic
aaaguuaagugaaaugacuaaaau

SEQ ID NO: 59328 - RNA, 21 nt, Artificial Sequence
  Synthetic
aauucugucacauccuaaaau

SEQ ID NO: 59329 - RNA, 22 nt, Artificial Sequence
  Synthetic
aaauucugucacauccuaaaau

SEQ ID NO: 59330 - RNA, 24 nt, Artificial Sequence
  Synthetic
ugaaauucugucacauccuaaaau

SEQ ID NO: 59331 - RNA, 18 nt, Artificial Sequence
  Synthetic
uagaaacagugcuaaaau

SEQ ID NO: 59332 - RNA, 19 nt, Artificial Sequence
  Synthetic
cuagaaacagugcuaaaau

SEQ ID NO: 59333 - RNA, 20 nt, Artificial Sequence
  Synthetic
acuagaaacagugcuaaaau

SEQ ID NO: 59334 - RNA, 21 nt, Artificial Sequence
  Synthetic
aacuagaaacagugcuaaaau

SEQ ID NO: 59335 - RNA, 22 nt, Artificial Sequence
  Synthetic
uaacuagaaacagugcuaaaau

SEQ ID NO: 59336 - RNA, 23 nt, Artificial Sequence
  Synthetic
uuaacuagaaacagugcuaaaau

SEQ ID NO: 59337 - RNA, 24 nt, Artificial Sequence
  Synthetic
auuaacuagaaacagugcuaaaau

SEQ ID NO: 59338 - RNA, 18 nt, Artificial Sequence
  Synthetic
cuuugaguauucuaaaau

SEQ ID NO: 59339 - RNA, 19 nt, Artificial Sequence
  Synthetic
ccuuugaguauucuaaaau

SEQ ID NO: 59340 - RNA, 20 nt, Artificial Sequence
  Synthetic
cccuuugaguauucuaaaau

SEQ ID NO: 59341 - RNA, 22 nt, Artificial Sequence
  Synthetic
agcccuuugaguauucuaaaau

SEQ ID NO: 59342 - RNA, 23 nt, Artificial Sequence
  Synthetic
cagcccuuugaguauucuaaaau

SEQ ID NO: 59343 - RNA, 20 nt, Artificial Sequence
  Synthetic
uggaggcuguguucuaaaau

SEQ ID NO: 59344 - RNA, 21 nt, Artificial Sequence
  Synthetic
auggaggcuguguucuaaaau

SEQ ID NO: 59345 - RNA, 22 nt, Artificial Sequence
  Synthetic
uauggaggcuguguucuaaaau

SEQ ID NO: 59346 - RNA, 23 nt, Artificial Sequence
  Synthetic
uuauggaggcuguguucuaaaau

SEQ ID NO: 59347 - RNA, 24 nt, Artificial Sequence
  Synthetic
uuuauggaggcuguguucuaaaau

SEQ ID NO: 59348 - RNA, 21 nt, Artificial Sequence
  Synthetic
aagcauuuauuuuucuaaaau

SEQ ID NO: 59349 - RNA, 22 nt, Artificial Sequence
  Synthetic
caagcauuuauuuuucuaaaau

SEQ ID NO: 59350 - RNA, 23 nt, Artificial Sequence
  Synthetic
acaagcauuuauuuuucuaaaau

SEQ ID NO: 59351 - RNA, 24 nt, Artificial Sequence
  Synthetic
uacaagcauuuauuuuucuaaaau

SEQ ID NO: 59352 - RNA, 18 nt, Artificial Sequence
  Synthetic
aacuuauaaaaguaaaau

SEQ ID NO: 59353 - RNA, 19 nt, Artificial Sequence
  Synthetic
caacuuauaaaaguaaaau

SEQ ID NO: 59354 - RNA, 20 nt, Artificial Sequence
  Synthetic
ccaacuuauaaaaguaaaau

SEQ ID NO: 59355 - RNA, 21 nt, Artificial Sequence
  Synthetic
uccaacuuauaaaaguaaaau

SEQ ID NO: 59356 - RNA, 22 nt, Artificial Sequence
  Synthetic
uuccaacuuauaaaaguaaaau

SEQ ID NO: 59357 - RNA, 23 nt, Artificial Sequence
  Synthetic
auuccaacuuauaaaaguaaaau

SEQ ID NO: 59358 - RNA, 24 nt, Artificial Sequence
  Synthetic
aauuccaacuuauaaaaguaaaau

SEQ ID NO: 59359 - RNA, 18 nt, Artificial Sequence
  Synthetic
acaaccagccaguaaaau

SEQ ID NO: 59360 - RNA, 19 nt, Artificial Sequence
  Synthetic
cacaaccagccaguaaaau

SEQ ID NO: 59361 - RNA, 22 nt, Artificial Sequence
  Synthetic
aggcacaaccagccaguaaaau

SEQ ID NO: 59362 - RNA, 23 nt, Artificial Sequence
  Synthetic
aaggcacaaccagccaguaaaau

SEQ ID NO: 59363 - RNA, 24 nt, Artificial Sequence
  Synthetic
aaaggcacaaccagccaguaaaau

SEQ ID NO: 59364 - RNA, 18 nt, Artificial Sequence
  Synthetic
auauccuaauauuaaaau

SEQ ID NO: 59365 - RNA, 19 nt, Artificial Sequence
  Synthetic
aauauccuaauauuaaaau

SEQ ID NO: 59366 - RNA, 20 nt, Artificial Sequence
  Synthetic
uaauauccuaauauuaaaau

SEQ ID NO: 59367 - RNA, 21 nt, Artificial Sequence
  Synthetic
auaauauccuaauauuaaaau

SEQ ID NO: 59368 - RNA, 24 nt, Artificial Sequence
  Synthetic
uggauaauauccuaauauuaaaau

SEQ ID NO: 59369 - RNA, 18 nt, Artificial Sequence
  Synthetic
aauguagagacuuaaaau

SEQ ID NO: 59370 - RNA, 19 nt, Artificial Sequence
  Synthetic
aaauguagagacuuaaaau

SEQ ID NO: 59371 - RNA, 20 nt, Artificial Sequence
  Synthetic
caaauguagagacuuaaaau

SEQ ID NO: 59372 - RNA, 21 nt, Artificial Sequence
  Synthetic
caugauguaaaauuuuaaaau

SEQ ID NO: 59373 - RNA, 22 nt, Artificial Sequence
  Synthetic
ucaugauguaaaauuuuaaaau

SEQ ID NO: 59374 - RNA, 23 nt, Artificial Sequence
  Synthetic
uucaugauguaaaauuuuaaaau

SEQ ID NO: 59375 - RNA, 24 nt, Artificial Sequence
  Synthetic
uuucaugauguaaaauuuuaaaau

SEQ ID NO: 59376 - RNA, 19 nt, Artificial Sequence
  Synthetic
agucauccuuaaaacaaau

SEQ ID NO: 59377 - RNA, 20 nt, Artificial Sequence
  Synthetic
cagucauccuuaaaacaaau

SEQ ID NO: 59378 - RNA, 21 nt, Artificial Sequence
  Synthetic
acagucauccuuaaaacaaau

SEQ ID NO: 59379 - RNA, 22 nt, Artificial Sequence
  Synthetic
aacagucauccuuaaaacaaau

SEQ ID NO: 59380 - RNA, 23 nt, Artificial Sequence
  Synthetic
uaacagucauccuuaaaacaaau

SEQ ID NO: 59381 - RNA, 24 nt, Artificial Sequence
  Synthetic
auaacagucauccuuaaaacaaau

SEQ ID NO: 59382 - RNA, 18 nt, Artificial Sequence
  Synthetic
aaagucauagacacaaau

SEQ ID NO: 59383 - RNA, 19 nt, Artificial Sequence
  Synthetic
aaaagucauagacacaaau

SEQ ID NO: 59384 - RNA, 20 nt, Artificial Sequence
  Synthetic
caaaagucauagacacaaau

SEQ ID NO: 59385 - RNA, 21 nt, Artificial Sequence
  Synthetic
ccaaaagucauagacacaaau

SEQ ID NO: 59386 - RNA, 23 nt, Artificial Sequence
  Synthetic
agccaaaagucauagacacaaau

SEQ ID NO: 59387 - RNA, 18 nt, Artificial Sequence
  Synthetic
uuacuuggggacacaaau

SEQ ID NO: 59388 - RNA, 19 nt, Artificial Sequence
  Synthetic
uuuacuuggggacacaaau

SEQ ID NO: 59389 - RNA, 20 nt, Artificial Sequence
  Synthetic
auuuacuuggggacacaaau

SEQ ID NO: 59390 - RNA, 21 nt, Artificial Sequence
  Synthetic
aauuuacuuggggacacaaau

SEQ ID NO: 59391 - RNA, 22 nt, Artificial Sequence
  Synthetic
caauuuacuuggggacacaaau

SEQ ID NO: 59392 - RNA, 23 nt, Artificial Sequence
  Synthetic
acaauuuacuuggggacacaaau

SEQ ID NO: 59393 - RNA, 18 nt, Artificial Sequence
  Synthetic
uuaacuauuuucacaaau

SEQ ID NO: 59394 - RNA, 20 nt, Artificial Sequence
  Synthetic
aguuaacuauuuucacaaau

SEQ ID NO: 59395 - RNA, 21 nt, Artificial Sequence
  Synthetic
caguuaacuauuuucacaaau

SEQ ID NO: 59396 - RNA, 22 nt, Artificial Sequence
  Synthetic
ucaguuaacuauuuucacaaau

SEQ ID NO: 59397 - RNA, 23 nt, Artificial Sequence
  Synthetic
aucaguuaacuauuuucacaaau

SEQ ID NO: 59398 - RNA, 24 nt, Artificial Sequence
  Synthetic
aaucaguuaacuauuuucacaaau

SEQ ID NO: 59399 - RNA, 18 nt, Artificial Sequence
  Synthetic
uuguugacacagacaaau

SEQ ID NO: 59400 - RNA, 19 nt, Artificial Sequence
  Synthetic
auuguugacacagacaaau

SEQ ID NO: 59401 - RNA, 21 nt, Artificial Sequence
  Synthetic
agauuguugacacagacaaau

SEQ ID NO: 59402 - RNA, 22 nt, Artificial Sequence
  Synthetic
uagauuguugacacagacaaau

SEQ ID NO: 59403 - RNA, 23 nt, Artificial Sequence
  Synthetic
uuagauuguugacacagacaaau

SEQ ID NO: 59404 - RNA, 24 nt, Artificial Sequence
  Synthetic
auuagauuguugacacagacaaau

SEQ ID NO: 59405 - RNA, 19 nt, Artificial Sequence
  Synthetic
agaacaaaaggugacaaau

SEQ ID NO: 59406 - RNA, 20 nt, Artificial Sequence
  Synthetic
uagaacaaaaggugacaaau

SEQ ID NO: 59407 - RNA, 21 nt, Artificial Sequence
  Synthetic
uuagaacaaaaggugacaaau

SEQ ID NO: 59408 - RNA, 22 nt, Artificial Sequence
  Synthetic
auuagaacaaaaggugacaaau

SEQ ID NO: 59409 - RNA, 23 nt, Artificial Sequence
  Synthetic
cauuagaacaaaaggugacaaau

SEQ ID NO: 59410 - RNA, 20 nt, Artificial Sequence
  Synthetic
aggaaguucugcuuacaaau

SEQ ID NO: 59411 - RNA, 21 nt, Artificial Sequence
  Synthetic
uaggaaguucugcuuacaaau

SEQ ID NO: 59412 - RNA, 22 nt, Artificial Sequence
  Synthetic
cuaggaaguucugcuuacaaau

SEQ ID NO: 59413 - RNA, 23 nt, Artificial Sequence
  Synthetic
ucuaggaaguucugcuuacaaau

SEQ ID NO: 59414 - RNA, 24 nt, Artificial Sequence
  Synthetic
uucuaggaaguucugcuuacaaau

SEQ ID NO: 59415 - RNA, 19 nt, Artificial Sequence
  Synthetic
ugaauaaacaaacccaaau

SEQ ID NO: 59416 - RNA, 20 nt, Artificial Sequence
  Synthetic
uugaauaaacaaacccaaau

SEQ ID NO: 59417 - RNA, 21 nt, Artificial Sequence
  Synthetic
auugaauaaacaaacccaaau

SEQ ID NO: 59418 - RNA, 22 nt, Artificial Sequence
  Synthetic
aauugaauaaacaaacccaaau

SEQ ID NO: 59419 - RNA, 23 nt, Artificial Sequence
  Synthetic
aaauugaauaaacaaacccaaau

SEQ ID NO: 59420 - RNA, 24 nt, Artificial Sequence
  Synthetic
aaaauugaauaaacaaacccaaau

SEQ ID NO: 59421 - RNA, 18 nt, Artificial Sequence
  Synthetic
caccgagaucugccaaau

SEQ ID NO: 59422 - RNA, 19 nt, Artificial Sequence
  Synthetic
ccaccgagaucugccaaau

SEQ ID NO: 59423 - RNA, 20 nt, Artificial Sequence
  Synthetic
cccaccgagaucugccaaau

SEQ ID NO: 59424 - RNA, 24 nt, Artificial Sequence
  Synthetic
ugggcccaccgagaucugccaaau

SEQ ID NO: 59425 - RNA, 18 nt, Artificial Sequence
  Synthetic
aaugugaagacuccaaau

SEQ ID NO: 59426 - RNA, 19 nt, Artificial Sequence
  Synthetic
uaaugugaagacuccaaau

SEQ ID NO: 59427 - RNA, 20 nt, Artificial Sequence
  Synthetic
uuaaugugaagacuccaaau

SEQ ID NO: 59428 - RNA, 21 nt, Artificial Sequence
  Synthetic
cuuaaugugaagacuccaaau

SEQ ID NO: 59429 - RNA, 23 nt, Artificial Sequence
  Synthetic
ugcuuaaugugaagacuccaaau

SEQ ID NO: 59430 - RNA, 24 nt, Artificial Sequence
  Synthetic
augcuuaaugugaagacuccaaau

SEQ ID NO: 59431 - RNA, 20 nt, Artificial Sequence
  Synthetic
ugguucagagagaagcaaau

SEQ ID NO: 59432 - RNA, 21 nt, Artificial Sequence
  Synthetic
augguucagagagaagcaaau

SEQ ID NO: 59433 - RNA, 22 nt, Artificial Sequence
  Synthetic
aaugguucagagagaagcaaau

SEQ ID NO: 59434 - RNA, 24 nt, Artificial Sequence
  Synthetic
agaaugguucagagagaagcaaau

SEQ ID NO: 59435 - RNA, 18 nt, Artificial Sequence
  Synthetic
cgcacacaggcagcaaau

SEQ ID NO: 59436 - RNA, 19 nt, Artificial Sequence
  Synthetic
acgcacacaggcagcaaau

SEQ ID NO: 59437 - RNA, 20 nt, Artificial Sequence
  Synthetic
uacgcacacaggcagcaaau

SEQ ID NO: 59438 - RNA, 21 nt, Artificial Sequence
  Synthetic
auacgcacacaggcagcaaau

SEQ ID NO: 59439 - RNA, 22 nt, Artificial Sequence
  Synthetic
cauacgcacacaggcagcaaau

SEQ ID NO: 59440 - RNA, 23 nt, Artificial Sequence
  Synthetic
ccauacgcacacaggcagcaaau

SEQ ID NO: 59441 - RNA, 18 nt, Artificial Sequence
  Synthetic
acgaaagcgaaggcaaau

SEQ ID NO: 59442 - RNA, 19 nt, Artificial Sequence
  Synthetic
aacgaaagcgaaggcaaau

SEQ ID NO: 59443 - RNA, 20 nt, Artificial Sequence
  Synthetic
uaacgaaagcgaaggcaaau

SEQ ID NO: 59444 - RNA, 21 nt, Artificial Sequence
  Synthetic
cuaacgaaagcgaaggcaaau

SEQ ID NO: 59445 - RNA, 22 nt, Artificial Sequence
  Synthetic
acuaacgaaagcgaaggcaaau

SEQ ID NO: 59446 - RNA, 24 nt, Artificial Sequence
  Synthetic
agacuaacgaaagcgaaggcaaau

SEQ ID NO: 59447 - RNA, 18 nt, Artificial Sequence
  Synthetic
uaaaugccaguugcaaau

SEQ ID NO: 59448 - RNA, 19 nt, Artificial Sequence
  Synthetic
uuaaaugccaguugcaaau

SEQ ID NO: 59449 - RNA, 20 nt, Artificial Sequence
  Synthetic
uuuaaaugccaguugcaaau

SEQ ID NO: 59450 - RNA, 21 nt, Artificial Sequence
  Synthetic
uuuuaaaugccaguugcaaau

SEQ ID NO: 59451 - RNA, 22 nt, Artificial Sequence
  Synthetic
auuuuaaaugccaguugcaaau

SEQ ID NO: 59452 - RNA, 23 nt, Artificial Sequence
  Synthetic
aauuuuaaaugccaguugcaaau

SEQ ID NO: 59453 - RNA, 18 nt, Artificial Sequence
  Synthetic
uggcuuccauuugcaaau

SEQ ID NO: 59454 - RNA, 19 nt, Artificial Sequence
  Synthetic
auggcuuccauuugcaaau

SEQ ID NO: 59455 - RNA, 20 nt, Artificial Sequence
  Synthetic
aauggcuuccauuugcaaau

SEQ ID NO: 59456 - RNA, 21 nt, Artificial Sequence
  Synthetic
caauggcuuccauuugcaaau

SEQ ID NO: 59457 - RNA, 22 nt, Artificial Sequence
  Synthetic
ucaauggcuuccauuugcaaau

SEQ ID NO: 59458 - RNA, 23 nt, Artificial Sequence
  Synthetic
aucaauggcuuccauuugcaaau

SEQ ID NO: 59459 - RNA, 24 nt, Artificial Sequence
  Synthetic
aaucaauggcuuccauuugcaaau

SEQ ID NO: 59460 - RNA, 18 nt, Artificial Sequence
  Synthetic
ucccacuucagcucaaau

SEQ ID NO: 59461 - RNA, 19 nt, Artificial Sequence
  Synthetic
uucccacuucagcucaaau

SEQ ID NO: 59462 - RNA, 20 nt, Artificial Sequence
  Synthetic
cuucccacuucagcucaaau

SEQ ID NO: 59463 - RNA, 21 nt, Artificial Sequence
  Synthetic
ccuucccacuucagcucaaau

SEQ ID NO: 59464 - RNA, 22 nt, Artificial Sequence
  Synthetic
uccuucccacuucagcucaaau

SEQ ID NO: 59465 - RNA, 23 nt, Artificial Sequence
  Synthetic
uuccuucccacuucagcucaaau

SEQ ID NO: 59466 - RNA, 24 nt, Artificial Sequence
  Synthetic
cuuccuucccacuucagcucaaau

SEQ ID NO: 59467 - RNA, 18 nt, Artificial Sequence
  Synthetic
aucuuaaaagagucaaau

SEQ ID NO: 59468 - RNA, 19 nt, Artificial Sequence
  Synthetic
caucuuaaaagagucaaau

SEQ ID NO: 59469 - RNA, 20 nt, Artificial Sequence
  Synthetic
ucaucuuaaaagagucaaau

SEQ ID NO: 59470 - RNA, 21 nt, Artificial Sequence
  Synthetic
aucaucuuaaaagagucaaau

SEQ ID NO: 59471 - RNA, 22 nt, Artificial Sequence
  Synthetic
uaucaucuuaaaagagucaaau

SEQ ID NO: 59472 - RNA, 23 nt, Artificial Sequence
  Synthetic
uuaucaucuuaaaagagucaaau

SEQ ID NO: 59473 - RNA, 19 nt, Artificial Sequence
  Synthetic
agaguaguaucugucaaau

SEQ ID NO: 59474 - RNA, 20 nt, Artificial Sequence
  Synthetic
cagaguaguaucugucaaau

SEQ ID NO: 59475 - RNA, 21 nt, Artificial Sequence
  Synthetic
ucagaguaguaucugucaaau

SEQ ID NO: 59476 - RNA, 22 nt, Artificial Sequence
  Synthetic
aucagaguaguaucugucaaau

SEQ ID NO: 59477 - RNA, 23 nt, Artificial Sequence
  Synthetic
uaucagaguaguaucugucaaau

SEQ ID NO: 59478 - RNA, 19 nt, Artificial Sequence
  Synthetic
aggcccuggaucaagaaau

SEQ ID NO: 59479 - RNA, 22 nt, Artificial Sequence
  Synthetic
uggaggcccuggaucaagaaau

SEQ ID NO: 59480 - RNA, 23 nt, Artificial Sequence
  Synthetic
uuggaggcccuggaucaagaaau

SEQ ID NO: 59481 - RNA, 24 nt, Artificial Sequence
  Synthetic
uuuggaggcccuggaucaagaaau

SEQ ID NO: 59482 - RNA, 21 nt, Artificial Sequence
  Synthetic
agcuuuucauccuccagaaau

SEQ ID NO: 59483 - RNA, 22 nt, Artificial Sequence
  Synthetic
uagcuuuucauccuccagaaau

SEQ ID NO: 59484 - RNA, 24 nt, Artificial Sequence
  Synthetic
uguagcuuuucauccuccagaaau

SEQ ID NO: 59485 - RNA, 18 nt, Artificial Sequence
  Synthetic
aguucacagaucagaaau

SEQ ID NO: 59486 - RNA, 19 nt, Artificial Sequence
  Synthetic
aaguucacagaucagaaau

SEQ ID NO: 59487 - RNA, 21 nt, Artificial Sequence
  Synthetic
agaaguucacagaucagaaau

SEQ ID NO: 59488 - RNA, 23 nt, Artificial Sequence
  Synthetic
agagaaguucacagaucagaaau

SEQ ID NO: 59489 - RNA, 24 nt, Artificial Sequence
  Synthetic
aagagaaguucacagaucagaaau

SEQ ID NO: 59490 - RNA, 18 nt, Artificial Sequence
  Synthetic
ucuauuuuaaagagaaau

SEQ ID NO: 59491 - RNA, 19 nt, Artificial Sequence
  Synthetic
cucuauuuuaaagagaaau

SEQ ID NO: 59492 - RNA, 20 nt, Artificial Sequence
  Synthetic
acucuauuuuaaagagaaau

SEQ ID NO: 59493 - RNA, 21 nt, Artificial Sequence
  Synthetic
aacucuauuuuaaagagaaau

SEQ ID NO: 59494 - RNA, 22 nt, Artificial Sequence
  Synthetic
uaacucuauuuuaaagagaaau

SEQ ID NO: 59495 - RNA, 24 nt, Artificial Sequence
  Synthetic
cguaacucuauuuuaaagagaaau

SEQ ID NO: 59496 - RNA, 18 nt, Artificial Sequence
  Synthetic
cuuuacgcacagagaaau

SEQ ID NO: 59497 - RNA, 19 nt, Artificial Sequence
  Synthetic
acuuuacgcacagagaaau

SEQ ID NO: 59498 - RNA, 20 nt, Artificial Sequence
  Synthetic
aacuuuacgcacagagaaau

SEQ ID NO: 59499 - RNA, 21 nt, Artificial Sequence
  Synthetic
aaacuuuacgcacagagaaau

SEQ ID NO: 59500 - RNA, 22 nt, Artificial Sequence
  Synthetic
caaacuuuacgcacagagaaau

SEQ ID NO: 59501 - RNA, 24 nt, Artificial Sequence
  Synthetic
agcaaacuuuacgcacagagaaau

SEQ ID NO: 59502 - RNA, 20 nt, Artificial Sequence
  Synthetic
agggaaccacugauagaaau

SEQ ID NO: 59503 - RNA, 21 nt, Artificial Sequence
  Synthetic
aagggaaccacugauagaaau

SEQ ID NO: 59504 - RNA, 22 nt, Artificial Sequence
  Synthetic
uaagggaaccacugauagaaau

SEQ ID NO: 59505 - RNA, 24 nt, Artificial Sequence
  Synthetic
aguaagggaaccacugauagaaau

SEQ ID NO: 59506 - RNA, 18 nt, Artificial Sequence
  Synthetic
uacuccuuuccuagaaau

SEQ ID NO: 59507 - RNA, 20 nt, Artificial Sequence
  Synthetic
aguacuccuuuccuagaaau

SEQ ID NO: 59508 - RNA, 21 nt, Artificial Sequence
  Synthetic
caguacuccuuuccuagaaau

SEQ ID NO: 59509 - RNA, 22 nt, Artificial Sequence
  Synthetic
ccaguacuccuuuccuagaaau

SEQ ID NO: 59510 - RNA, 23 nt, Artificial Sequence
  Synthetic
cccaguacuccuuuccuagaaau

SEQ ID NO: 59511 - RNA, 24 nt, Artificial Sequence
  Synthetic
ccccaguacuccuuuccuagaaau

SEQ ID NO: 59512 - RNA, 19 nt, Artificial Sequence
  Synthetic
ugguguccgaguuagaaau

SEQ ID NO: 59513 - RNA, 20 nt, Artificial Sequence
  Synthetic
cugguguccgaguuagaaau

SEQ ID NO: 59514 - RNA, 21 nt, Artificial Sequence
  Synthetic
acugguguccgaguuagaaau

SEQ ID NO: 59515 - RNA, 22 nt, Artificial Sequence
  Synthetic
cacugguguccgaguuagaaau

SEQ ID NO: 59516 - RNA, 23 nt, Artificial Sequence
  Synthetic
ccacugguguccgaguuagaaau

SEQ ID NO: 59517 - RNA, 24 nt, Artificial Sequence
  Synthetic
accacugguguccgaguuagaaau

SEQ ID NO: 59518 - RNA, 21 nt, Artificial Sequence
  Synthetic
uaaacauaaacauuuagaaau

SEQ ID NO: 59519 - RNA, 23 nt, Artificial Sequence
  Synthetic
uguaaacauaaacauuuagaaau

SEQ ID NO: 59520 - RNA, 24 nt, Artificial Sequence
  Synthetic
uuguaaacauaaacauuuagaaau

SEQ ID NO: 59521 - RNA, 19 nt, Artificial Sequence
  Synthetic
uguuaugguuacaggaaau

SEQ ID NO: 59522 - RNA, 20 nt, Artificial Sequence
  Synthetic
cuguuaugguuacaggaaau

SEQ ID NO: 59523 - RNA, 21 nt, Artificial Sequence
  Synthetic
acuguuaugguuacaggaaau

SEQ ID NO: 59524 - RNA, 22 nt, Artificial Sequence
  Synthetic
aacuguuaugguuacaggaaau

SEQ ID NO: 59525 - RNA, 18 nt, Artificial Sequence
  Synthetic
ucuuuauugaagggaaau

SEQ ID NO: 59526 - RNA, 19 nt, Artificial Sequence
  Synthetic
uucuuuauugaagggaaau

SEQ ID NO: 59527 - RNA, 21 nt, Artificial Sequence
  Synthetic
aguucuuuauugaagggaaau

SEQ ID NO: 59528 - RNA, 22 nt, Artificial Sequence
  Synthetic
aaguucuuuauugaagggaaau

SEQ ID NO: 59529 - RNA, 23 nt, Artificial Sequence
  Synthetic
caaguucuuuauugaagggaaau

SEQ ID NO: 59530 - RNA, 24 nt, Artificial Sequence
  Synthetic
acaaguucuuuauugaagggaaau

SEQ ID NO: 59531 - RNA, 18 nt, Artificial Sequence
  Synthetic
uauuguguccauggaaau

SEQ ID NO: 59532 - RNA, 19 nt, Artificial Sequence
  Synthetic
cuauuguguccauggaaau

SEQ ID NO: 59533 - RNA, 20 nt, Artificial Sequence
  Synthetic
acuauuguguccauggaaau

SEQ ID NO: 59534 - RNA, 22 nt, Artificial Sequence
  Synthetic
ugacuauuguguccauggaaau

SEQ ID NO: 59535 - RNA, 23 nt, Artificial Sequence
  Synthetic
augacuauuguguccauggaaau

SEQ ID NO: 59536 - RNA, 24 nt, Artificial Sequence
  Synthetic
uaugacuauuguguccauggaaau

SEQ ID NO: 59537 - RNA, 18 nt, Artificial Sequence
  Synthetic
auuuaccuaucuggaaau

SEQ ID NO: 59538 - RNA, 19 nt, Artificial Sequence
  Synthetic
cauuuaccuaucuggaaau

SEQ ID NO: 59539 - RNA, 20 nt, Artificial Sequence
  Synthetic
ucauuuaccuaucuggaaau

SEQ ID NO: 59540 - RNA, 21 nt, Artificial Sequence
  Synthetic
cucauuuaccuaucuggaaau

SEQ ID NO: 59541 - RNA, 22 nt, Artificial Sequence
  Synthetic
ccucauuuaccuaucuggaaau

SEQ ID NO: 59542 - RNA, 23 nt, Artificial Sequence
  Synthetic
cccucauuuaccuaucuggaaau

SEQ ID NO: 59543 - RNA, 24 nt, Artificial Sequence
  Synthetic
ccccucauuuaccuaucuggaaau

SEQ ID NO: 59544 - RNA, 18 nt, Artificial Sequence
  Synthetic
uuugugcaauguggaaau

SEQ ID NO: 59545 - RNA, 19 nt, Artificial Sequence
  Synthetic
uuuugugcaauguggaaau

SEQ ID NO: 59546 - RNA, 20 nt, Artificial Sequence
  Synthetic
cuuuugugcaauguggaaau

SEQ ID NO: 59547 - RNA, 21 nt, Artificial Sequence
  Synthetic
acuuuugugcaauguggaaau

SEQ ID NO: 59548 - RNA, 22 nt, Artificial Sequence
  Synthetic
aacuuuugugcaauguggaaau

SEQ ID NO: 59549 - RNA, 23 nt, Artificial Sequence
  Synthetic
caacuuuugugcaauguggaaau

SEQ ID NO: 59550 - RNA, 24 nt, Artificial Sequence
  Synthetic
ucaacuuuugugcaauguggaaau

SEQ ID NO: 59551 - RNA, 18 nt, Artificial Sequence
  Synthetic
ugguaggcauguggaaau

SEQ ID NO: 59552 - RNA, 19 nt, Artificial Sequence
  Synthetic
uugguaggcauguggaaau

SEQ ID NO: 59553 - RNA, 21 nt, Artificial Sequence
  Synthetic
uguugguaggcauguggaaau

SEQ ID NO: 59554 - RNA, 22 nt, Artificial Sequence
  Synthetic
auguugguaggcauguggaaau

SEQ ID NO: 59555 - RNA, 24 nt, Artificial Sequence
  Synthetic
agauguugguaggcauguggaaau

SEQ ID NO: 59556 - RNA, 18 nt, Artificial Sequence
  Synthetic
uucauucuaauuggaaau

SEQ ID NO: 59557 - RNA, 19 nt, Artificial Sequence
  Synthetic
uuucauucuaauuggaaau

SEQ ID NO: 59558 - RNA, 21 nt, Artificial Sequence
  Synthetic
uguuucauucuaauuggaaau

SEQ ID NO: 59559 - RNA, 22 nt, Artificial Sequence
  Synthetic
auguuucauucuaauuggaaau

SEQ ID NO: 59560 - RNA, 23 nt, Artificial Sequence
  Synthetic
uauguuucauucuaauuggaaau

SEQ ID NO: 59561 - RNA, 19 nt, Artificial Sequence
  Synthetic
ugauaaguguuuuggaaau

SEQ ID NO: 59562 - RNA, 20 nt, Artificial Sequence
  Synthetic
cugauaaguguuuuggaaau

SEQ ID NO: 59563 - RNA, 21 nt, Artificial Sequence
  Synthetic
acugauaaguguuuuggaaau

SEQ ID NO: 59564 - RNA, 22 nt, Artificial Sequence
  Synthetic
uacugauaaguguuuuggaaau

SEQ ID NO: 59565 - RNA, 23 nt, Artificial Sequence
  Synthetic
auacugauaaguguuuuggaaau

SEQ ID NO: 59566 - RNA, 18 nt, Artificial Sequence
  Synthetic
cucaucuucaagugaaau

SEQ ID NO: 59567 - RNA, 19 nt, Artificial Sequence
  Synthetic
ucucaucuucaagugaaau

SEQ ID NO: 59568 - RNA, 20 nt, Artificial Sequence
  Synthetic
uucucaucuucaagugaaau

SEQ ID NO: 59569 - RNA, 21 nt, Artificial Sequence
  Synthetic
cuucucaucuucaagugaaau

SEQ ID NO: 59570 - RNA, 23 nt, Artificial Sequence
  Synthetic
agcuucucaucuucaagugaaau

SEQ ID NO: 59571 - RNA, 24 nt, Artificial Sequence
  Synthetic
uagcuucucaucuucaagugaaau

SEQ ID NO: 59572 - RNA, 18 nt, Artificial Sequence
  Synthetic
uuugagugauggugaaau

SEQ ID NO: 59573 - RNA, 19 nt, Artificial Sequence
  Synthetic
auuugagugauggugaaau

SEQ ID NO: 59574 - RNA, 20 nt, Artificial Sequence
  Synthetic
uauuugagugauggugaaau

SEQ ID NO: 59575 - RNA, 21 nt, Artificial Sequence
  Synthetic
uuauuugagugauggugaaau

SEQ ID NO: 59576 - RNA, 22 nt, Artificial Sequence
  Synthetic
cuuauuugagugauggugaaau

SEQ ID NO: 59577 - RNA, 23 nt, Artificial Sequence
  Synthetic
ucuuauuugagugauggugaaau

SEQ ID NO: 59578 - RNA, 24 nt, Artificial Sequence
  Synthetic
uucuuauuugagugauggugaaau

SEQ ID NO: 59579 - RNA, 18 nt, Artificial Sequence
  Synthetic
cugacacuugauugaaau

SEQ ID NO: 59580 - RNA, 19 nt, Artificial Sequence
  Synthetic
ccugacacuugauugaaau

SEQ ID NO: 59581 - RNA, 20 nt, Artificial Sequence
  Synthetic
uccugacacuugauugaaau

SEQ ID NO: 59582 - RNA, 21 nt, Artificial Sequence
  Synthetic
uuccugacacuugauugaaau

SEQ ID NO: 59583 - RNA, 22 nt, Artificial Sequence
  Synthetic
uuuccugacacuugauugaaau

SEQ ID NO: 59584 - RNA, 23 nt, Artificial Sequence
  Synthetic
auuuccugacacuugauugaaau

SEQ ID NO: 59585 - RNA, 24 nt, Artificial Sequence
  Synthetic
uauuuccugacacuugauugaaau

SEQ ID NO: 59586 - RNA, 18 nt, Artificial Sequence
  Synthetic
aggucuuuuauuugaaau

SEQ ID NO: 59587 - RNA, 19 nt, Artificial Sequence
  Synthetic
caggucuuuuauuugaaau

SEQ ID NO: 59588 - RNA, 20 nt, Artificial Sequence
  Synthetic
ucaggucuuuuauuugaaau

SEQ ID NO: 59589 - RNA, 21 nt, Artificial Sequence
  Synthetic
uucaggucuuuuauuugaaau

SEQ ID NO: 59590 - RNA, 22 nt, Artificial Sequence
  Synthetic
cuucaggucuuuuauuugaaau

SEQ ID NO: 59591 - RNA, 23 nt, Artificial Sequence
  Synthetic
acuucaggucuuuuauuugaaau

SEQ ID NO: 59592 - RNA, 24 nt, Artificial Sequence
  Synthetic
cacuucaggucuuuuauuugaaau

SEQ ID NO: 59593 - RNA, 19 nt, Artificial Sequence
  Synthetic
ugugaccuuucaaauaaau

SEQ ID NO: 59594 - RNA, 20 nt, Artificial Sequence
  Synthetic
augugaccuuucaaauaaau

SEQ ID NO: 59595 - RNA, 21 nt, Artificial Sequence
  Synthetic
uaugugaccuuucaaauaaau

SEQ ID NO: 59596 - RNA, 22 nt, Artificial Sequence
  Synthetic
auaugugaccuuucaaauaaau

SEQ ID NO: 59597 - RNA, 23 nt, Artificial Sequence
  Synthetic
uauaugugaccuuucaaauaaau

SEQ ID NO: 59598 - RNA, 24 nt, Artificial Sequence
  Synthetic
auauaugugaccuuucaaauaaau

SEQ ID NO: 59599 - RNA, 20 nt, Artificial Sequence
  Synthetic
aggccuugguaucaauaaau

SEQ ID NO: 59600 - RNA, 21 nt, Artificial Sequence
  Synthetic
uaggccuugguaucaauaaau

SEQ ID NO: 59601 - RNA, 22 nt, Artificial Sequence
  Synthetic
uuaggccuugguaucaauaaau

SEQ ID NO: 59602 - RNA, 23 nt, Artificial Sequence
  Synthetic
auuaggccuugguaucaauaaau

SEQ ID NO: 59603 - RNA, 24 nt, Artificial Sequence
  Synthetic
aauuaggccuugguaucaauaaau

SEQ ID NO: 59604 - RNA, 18 nt, Artificial Sequence
  Synthetic
aauugguucucaauaaau

SEQ ID NO: 59605 - RNA, 19 nt, Artificial Sequence
  Synthetic
uaauugguucucaauaaau

SEQ ID NO: 59606 - RNA, 21 nt, Artificial Sequence
  Synthetic
aguaauugguucucaauaaau

SEQ ID NO: 59607 - RNA, 22 nt, Artificial Sequence
  Synthetic
caguaauugguucucaauaaau

SEQ ID NO: 59608 - RNA, 23 nt, Artificial Sequence
  Synthetic
acaguaauugguucucaauaaau

SEQ ID NO: 59609 - RNA, 24 nt, Artificial Sequence
  Synthetic
uacaguaauugguucucaauaaau

SEQ ID NO: 59610 - RNA, 18 nt, Artificial Sequence
  Synthetic
uuaguaccuugaauaaau

SEQ ID NO: 59611 - RNA, 19 nt, Artificial Sequence
  Synthetic
auuaguaccuugaauaaau

SEQ ID NO: 59612 - RNA, 20 nt, Artificial Sequence
  Synthetic
aauuaguaccuugaauaaau

SEQ ID NO: 59613 - RNA, 21 nt, Artificial Sequence
  Synthetic
caauuaguaccuugaauaaau

SEQ ID NO: 59614 - RNA, 22 nt, Artificial Sequence
  Synthetic
acaauuaguaccuugaauaaau

SEQ ID NO: 59615 - RNA, 23 nt, Artificial Sequence
  Synthetic
cacaauuaguaccuugaauaaau

SEQ ID NO: 59616 - RNA, 18 nt, Artificial Sequence
  Synthetic
cagauugcuauaauaaau

SEQ ID NO: 59617 - RNA, 19 nt, Artificial Sequence
  Synthetic
ucagauugcuauaauaaau

SEQ ID NO: 59618 - RNA, 20 nt, Artificial Sequence
  Synthetic
aucagauugcuauaauaaau

SEQ ID NO: 59619 - RNA, 21 nt, Artificial Sequence
  Synthetic
uaucagauugcuauaauaaau

SEQ ID NO: 59620 - RNA, 22 nt, Artificial Sequence
  Synthetic
auaucagauugcuauaauaaau

SEQ ID NO: 59621 - RNA, 23 nt, Artificial Sequence
  Synthetic
uauaucagauugcuauaauaaau

SEQ ID NO: 59622 - RNA, 24 nt, Artificial Sequence
  Synthetic
auauaucagauugcuauaauaaau

SEQ ID NO: 59623 - RNA, 20 nt, Artificial Sequence
  Synthetic
ugguaccugugggcauaaau

SEQ ID NO: 59624 - RNA, 21 nt, Artificial Sequence
  Synthetic
uugguaccugugggcauaaau

SEQ ID NO: 59625 - RNA, 22 nt, Artificial Sequence
  Synthetic
uuugguaccugugggcauaaau

SEQ ID NO: 59626 - RNA, 23 nt, Artificial Sequence
  Synthetic
uuuugguaccugugggcauaaau

SEQ ID NO: 59627 - RNA, 24 nt, Artificial Sequence
  Synthetic
auuuugguaccugugggcauaaau

SEQ ID NO: 59628 - RNA, 18 nt, Artificial Sequence
  Synthetic
auuuaauccuucauaaau

SEQ ID NO: 59629 - RNA, 19 nt, Artificial Sequence
  Synthetic
uauuuaauccuucauaaau

SEQ ID NO: 59630 - RNA, 20 nt, Artificial Sequence
  Synthetic
auauuuaauccuucauaaau

SEQ ID NO: 59631 - RNA, 21 nt, Artificial Sequence
  Synthetic
aauauuuaauccuucauaaau

SEQ ID NO: 59632 - RNA, 22 nt, Artificial Sequence
  Synthetic
aaauauuuaauccuucauaaau

SEQ ID NO: 59633 - RNA, 23 nt, Artificial Sequence
  Synthetic
aaaauauuuaauccuucauaaau

SEQ ID NO: 59634 - RNA, 24 nt, Artificial Sequence
  Synthetic
aaaaauauuuaauccuucauaaau

SEQ ID NO: 59635 - RNA, 21 nt, Artificial Sequence
  Synthetic
uuacacauagaaaagauaaau

SEQ ID NO: 59636 - RNA, 22 nt, Artificial Sequence
  Synthetic
auuacacauagaaaagauaaau

SEQ ID NO: 59637 - RNA, 23 nt, Artificial Sequence
  Synthetic
uauuacacauagaaaagauaaau

SEQ ID NO: 59638 - RNA, 24 nt, Artificial Sequence
  Synthetic
auauuacacauagaaaagauaaau

SEQ ID NO: 59639 - RNA, 18 nt, Artificial Sequence
  Synthetic
aauggcugagggauaaau

SEQ ID NO: 59640 - RNA, 19 nt, Artificial Sequence
  Synthetic
caauggcugagggauaaau

SEQ ID NO: 59641 - RNA, 20 nt, Artificial Sequence
  Synthetic
ucaauggcugagggauaaau

SEQ ID NO: 59642 - RNA, 21 nt, Artificial Sequence
  Synthetic
aucaauggcugagggauaaau

SEQ ID NO: 59643 - RNA, 22 nt, Artificial Sequence
  Synthetic
aaucaauggcugagggauaaau

SEQ ID NO: 59644 - RNA, 23 nt, Artificial Sequence
  Synthetic
aaaucaauggcugagggauaaau

SEQ ID NO: 59645 - RNA, 24 nt, Artificial Sequence
  Synthetic
aaaaucaauggcugagggauaaau

SEQ ID NO: 59646 - RNA, 18 nt, Artificial Sequence
  Synthetic
aauuacuuauggauaaau

SEQ ID NO: 59647 - RNA, 19 nt, Artificial Sequence
  Synthetic
aaauuacuuauggauaaau

SEQ ID NO: 59648 - RNA, 20 nt, Artificial Sequence
  Synthetic
aaaauuacuuauggauaaau

SEQ ID NO: 59649 - RNA, 21 nt, Artificial Sequence
  Synthetic
uaaaauuacuuauggauaaau

SEQ ID NO: 59650 - RNA, 22 nt, Artificial Sequence
  Synthetic
uuaaaauuacuuauggauaaau

SEQ ID NO: 59651 - RNA, 23 nt, Artificial Sequence
  Synthetic
auuaaaauuacuuauggauaaau

SEQ ID NO: 59652 - RNA, 24 nt, Artificial Sequence
  Synthetic
uauuaaaauuacuuauggauaaau

SEQ ID NO: 59653 - RNA, 21 nt, Artificial Sequence
  Synthetic
uauuuuccuuaugugauaaau

SEQ ID NO: 59654 - RNA, 22 nt, Artificial Sequence
  Synthetic
auauuuuccuuaugugauaaau

SEQ ID NO: 59655 - RNA, 23 nt, Artificial Sequence
  Synthetic
cauauuuuccuuaugugauaaau

SEQ ID NO: 59656 - RNA, 24 nt, Artificial Sequence
  Synthetic
acauauuuuccuuaugugauaaau

SEQ ID NO: 59657 - RNA, 18 nt, Artificial Sequence
  Synthetic
aggaaacugaauauaaau

SEQ ID NO: 59658 - RNA, 19 nt, Artificial Sequence
  Synthetic
uaggaaacugaauauaaau

SEQ ID NO: 59659 - RNA, 20 nt, Artificial Sequence
  Synthetic
cuaggaaacugaauauaaau

SEQ ID NO: 59660 - RNA, 21 nt, Artificial Sequence
  Synthetic
ccuaggaaacugaauauaaau

SEQ ID NO: 59661 - RNA, 22 nt, Artificial Sequence
  Synthetic
cccuaggaaacugaauauaaau

SEQ ID NO: 59662 - RNA, 23 nt, Artificial Sequence
  Synthetic
acccuaggaaacugaauauaaau

SEQ ID NO: 59663 - RNA, 18 nt, Artificial Sequence
  Synthetic
ucuaugugccauauaaau

SEQ ID NO: 59664 - RNA, 20 nt, Artificial Sequence
  Synthetic
agucuaugugccauauaaau

SEQ ID NO: 59665 - RNA, 21 nt, Artificial Sequence
  Synthetic
cagucuaugugccauauaaau

SEQ ID NO: 59666 - RNA, 22 nt, Artificial Sequence
  Synthetic
ucagucuaugugccauauaaau

SEQ ID NO: 59667 - RNA, 23 nt, Artificial Sequence
  Synthetic
cucagucuaugugccauauaaau

SEQ ID NO: 59668 - RNA, 21 nt, Artificial Sequence
  Synthetic
cuuuuuuccuguuauauaaau

SEQ ID NO: 59669 - RNA, 22 nt, Artificial Sequence
  Synthetic
ucuuuuuuccuguuauauaaau

SEQ ID NO: 59670 - RNA, 24 nt, Artificial Sequence
  Synthetic
agucuuuuuuccuguuauauaaau

SEQ ID NO: 59671 - RNA, 18 nt, Artificial Sequence
  Synthetic
agcaaguauccuauaaau

SEQ ID NO: 59672 - RNA, 19 nt, Artificial Sequence
  Synthetic
aagcaaguauccuauaaau

SEQ ID NO: 59673 - RNA, 20 nt, Artificial Sequence
  Synthetic
uaagcaaguauccuauaaau

SEQ ID NO: 59674 - RNA, 21 nt, Artificial Sequence
  Synthetic
auaagcaaguauccuauaaau

SEQ ID NO: 59675 - RNA, 23 nt, Artificial Sequence
  Synthetic
agauaagcaaguauccuauaaau

SEQ ID NO: 59676 - RNA, 24 nt, Artificial Sequence
  Synthetic
uagauaagcaaguauccuauaaau

SEQ ID NO: 59677 - RNA, 18 nt, Artificial Sequence
  Synthetic
uauuuccugucuauaaau

SEQ ID NO: 59678 - RNA, 19 nt, Artificial Sequence
  Synthetic
cuauuuccugucuauaaau

SEQ ID NO: 59679 - RNA, 20 nt, Artificial Sequence
  Synthetic
ucuauuuccugucuauaaau

SEQ ID NO: 59680 - RNA, 21 nt, Artificial Sequence
  Synthetic
uucuauuuccugucuauaaau

SEQ ID NO: 59681 - RNA, 22 nt, Artificial Sequence
  Synthetic
auucuauuuccugucuauaaau

SEQ ID NO: 59682 - RNA, 23 nt, Artificial Sequence
  Synthetic
cauucuauuuccugucuauaaau

SEQ ID NO: 59683 - RNA, 24 nt, Artificial Sequence
  Synthetic
ccauucuauuuccugucuauaaau

SEQ ID NO: 59684 - RNA, 21 nt, Artificial Sequence
  Synthetic
ucacuuucauuuucuauaaau

SEQ ID NO: 59685 - RNA, 22 nt, Artificial Sequence
  Synthetic
uucacuuucauuuucuauaaau

SEQ ID NO: 59686 - RNA, 23 nt, Artificial Sequence
  Synthetic
uuucacuuucauuuucuauaaau

SEQ ID NO: 59687 - RNA, 24 nt, Artificial Sequence
  Synthetic
uuuucacuuucauuuucuauaaau

SEQ ID NO: 59688 - RNA, 18 nt, Artificial Sequence
  Synthetic
uuagucgucaguauaaau

SEQ ID NO: 59689 - RNA, 19 nt, Artificial Sequence
  Synthetic
auuagucgucaguauaaau

SEQ ID NO: 59690 - RNA, 20 nt, Artificial Sequence
  Synthetic
uauuagucgucaguauaaau

SEQ ID NO: 59691 - RNA, 21 nt, Artificial Sequence
  Synthetic
uuauuagucgucaguauaaau

SEQ ID NO: 59692 - RNA, 22 nt, Artificial Sequence
  Synthetic
auuauuagucgucaguauaaau

SEQ ID NO: 59693 - RNA, 23 nt, Artificial Sequence
  Synthetic
cauuauuagucgucaguauaaau

SEQ ID NO: 59694 - RNA, 24 nt, Artificial Sequence
  Synthetic
ucauuauuagucgucaguauaaau

SEQ ID NO: 59695 - RNA, 18 nt, Artificial Sequence
  Synthetic
uaccccauccaacuaaau

SEQ ID NO: 59696 - RNA, 19 nt, Artificial Sequence
  Synthetic
cuaccccauccaacuaaau

SEQ ID NO: 59697 - RNA, 20 nt, Artificial Sequence
  Synthetic
ccuaccccauccaacuaaau

SEQ ID NO: 59698 - RNA, 21 nt, Artificial Sequence
  Synthetic
uccuaccccauccaacuaaau

SEQ ID NO: 59699 - RNA, 24 nt, Artificial Sequence
  Synthetic
agguccuaccccauccaacuaaau

SEQ ID NO: 59700 - RNA, 21 nt, Artificial Sequence
  Synthetic
ucauaaaaucuaaaucuaaau

SEQ ID NO: 59701 - RNA, 22 nt, Artificial Sequence
  Synthetic
aucauaaaaucuaaaucuaaau

SEQ ID NO: 59702 - RNA, 23 nt, Artificial Sequence
  Synthetic
aaucauaaaaucuaaaucuaaau

SEQ ID NO: 59703 - RNA, 18 nt, Artificial Sequence
  Synthetic
uagaugagauaucuaaau

SEQ ID NO: 59704 - RNA, 20 nt, Artificial Sequence
  Synthetic
aguagaugagauaucuaaau

SEQ ID NO: 59705 - RNA, 21 nt, Artificial Sequence
  Synthetic
aaguagaugagauaucuaaau

SEQ ID NO: 59706 - RNA, 22 nt, Artificial Sequence
  Synthetic
caaguagaugagauaucuaaau

SEQ ID NO: 59707 - RNA, 23 nt, Artificial Sequence
  Synthetic
acaaguagaugagauaucuaaau

SEQ ID NO: 59708 - RNA, 24 nt, Artificial Sequence
  Synthetic
cacaaguagaugagauaucuaaau

SEQ ID NO: 59709 - RNA, 19 nt, Artificial Sequence
  Synthetic
aguaaccaaugcucuaaau

SEQ ID NO: 59710 - RNA, 21 nt, Artificial Sequence
  Synthetic
ugaguaaccaaugcucuaaau

SEQ ID NO: 59711 - RNA, 22 nt, Artificial Sequence
  Synthetic
augaguaaccaaugcucuaaau

SEQ ID NO: 59712 - RNA, 23 nt, Artificial Sequence
  Synthetic
caugaguaaccaaugcucuaaau

SEQ ID NO: 59713 - RNA, 24 nt, Artificial Sequence
  Synthetic
acaugaguaaccaaugcucuaaau

SEQ ID NO: 59714 - RNA, 18 nt, Artificial Sequence
  Synthetic
ccuauggguaaaguaaau

SEQ ID NO: 59715 - RNA, 19 nt, Artificial Sequence
  Synthetic
cccuauggguaaaguaaau

SEQ ID NO: 59716 - RNA, 20 nt, Artificial Sequence
  Synthetic
ccccuauggguaaaguaaau

SEQ ID NO: 59717 - RNA, 21 nt, Artificial Sequence
  Synthetic
uccccuauggguaaaguaaau

SEQ ID NO: 59718 - RNA, 22 nt, Artificial Sequence
  Synthetic
uuccccuauggguaaaguaaau

SEQ ID NO: 59719 - RNA, 23 nt, Artificial Sequence
  Synthetic
cuuccccuauggguaaaguaaau

SEQ ID NO: 59720 - RNA, 24 nt, Artificial Sequence
  Synthetic
acuuccccuauggguaaaguaaau

SEQ ID NO: 59721 - RNA, 21 nt, Artificial Sequence
  Synthetic
auugagcauacagaaguaaau

SEQ ID NO: 59722 - RNA, 22 nt, Artificial Sequence
  Synthetic
cauugagcauacagaaguaaau

SEQ ID NO: 59723 - RNA, 23 nt, Artificial Sequence
  Synthetic
ucauugagcauacagaaguaaau

SEQ ID NO: 59724 - RNA, 18 nt, Artificial Sequence
  Synthetic
ugccucucacuaguaaau

SEQ ID NO: 59725 - RNA, 19 nt, Artificial Sequence
  Synthetic
augccucucacuaguaaau

SEQ ID NO: 59726 - RNA, 22 nt, Artificial Sequence
  Synthetic
aggaugccucucacuaguaaau

SEQ ID NO: 59727 - RNA, 23 nt, Artificial Sequence
  Synthetic
aaggaugccucucacuaguaaau

SEQ ID NO: 59728 - RNA, 24 nt, Artificial Sequence
  Synthetic
caaggaugccucucacuaguaaau

SEQ ID NO: 59729 - RNA, 18 nt, Artificial Sequence
  Synthetic
uacuaggcaguaguaaau

SEQ ID NO: 59730 - RNA, 19 nt, Artificial Sequence
  Synthetic
auacuaggcaguaguaaau

SEQ ID NO: 59731 - RNA, 20 nt, Artificial Sequence
  Synthetic
uauacuaggcaguaguaaau

SEQ ID NO: 59732 - RNA, 21 nt, Artificial Sequence
  Synthetic
uuauacuaggcaguaguaaau

SEQ ID NO: 59733 - RNA, 22 nt, Artificial Sequence
  Synthetic
uuuauacuaggcaguaguaaau

SEQ ID NO: 59734 - RNA, 23 nt, Artificial Sequence
  Synthetic
cuuuauacuaggcaguaguaaau

SEQ ID NO: 59735 - RNA, 24 nt, Artificial Sequence
  Synthetic
ccuuuauacuaggcaguaguaaau

SEQ ID NO: 59736 - RNA, 18 nt, Artificial Sequence
  Synthetic
ucaagcuaugagguaaau

SEQ ID NO: 59737 - RNA, 19 nt, Artificial Sequence
  Synthetic
aucaagcuaugagguaaau

SEQ ID NO: 59738 - RNA, 20 nt, Artificial Sequence
  Synthetic
uaucaagcuaugagguaaau

SEQ ID NO: 59739 - RNA, 21 nt, Artificial Sequence
  Synthetic
cuaucaagcuaugagguaaau

SEQ ID NO: 59740 - RNA, 22 nt, Artificial Sequence
  Synthetic
acuaucaagcuaugagguaaau

SEQ ID NO: 59741 - RNA, 23 nt, Artificial Sequence
  Synthetic
uacuaucaagcuaugagguaaau

SEQ ID NO: 59742 - RNA, 24 nt, Artificial Sequence
  Synthetic
cuacuaucaagcuaugagguaaau

SEQ ID NO: 59743 - RNA, 21 nt, Artificial Sequence
  Synthetic
cguaaugacacuaauguaaau

SEQ ID NO: 59744 - RNA, 22 nt, Artificial Sequence
  Synthetic
acguaaugacacuaauguaaau

SEQ ID NO: 59745 - RNA, 24 nt, Artificial Sequence
  Synthetic
agacguaaugacacuaauguaaau

SEQ ID NO: 59746 - RNA, 18 nt, Artificial Sequence
  Synthetic
ugcuuuacacauguaaau

SEQ ID NO: 59747 - RNA, 21 nt, Artificial Sequence
  Synthetic
aggugcuuuacacauguaaau

SEQ ID NO: 59748 - RNA, 22 nt, Artificial Sequence
  Synthetic
caggugcuuuacacauguaaau

SEQ ID NO: 59749 - RNA, 23 nt, Artificial Sequence
  Synthetic
ucaggugcuuuacacauguaaau

SEQ ID NO: 59750 - RNA, 24 nt, Artificial Sequence
  Synthetic
uucaggugcuuuacacauguaaau

SEQ ID NO: 59751 - RNA, 18 nt, Artificial Sequence
  Synthetic
agauugugguguguaaau

SEQ ID NO: 59752 - RNA, 19 nt, Artificial Sequence
  Synthetic
uagauugugguguguaaau

SEQ ID NO: 59753 - RNA, 20 nt, Artificial Sequence
  Synthetic
auagauugugguguguaaau

SEQ ID NO: 59754 - RNA, 21 nt, Artificial Sequence
  Synthetic
aauagauugugguguguaaau

SEQ ID NO: 59755 - RNA, 22 nt, Artificial Sequence
  Synthetic
aaauagauugugguguguaaau

SEQ ID NO: 59756 - RNA, 24 nt, Artificial Sequence
  Synthetic
ugaaauagauugugguguguaaau

SEQ ID NO: 59757 - RNA, 18 nt, Artificial Sequence
  Synthetic
aauaugucagaauuaaau

SEQ ID NO: 59758 - RNA, 19 nt, Artificial Sequence
  Synthetic
uaauaugucagaauuaaau

SEQ ID NO: 59759 - RNA, 20 nt, Artificial Sequence
  Synthetic
uuaauaugucagaauuaaau

SEQ ID NO: 59760 - RNA, 21 nt, Artificial Sequence
  Synthetic
cuuaauaugucagaauuaaau

SEQ ID NO: 59761 - RNA, 22 nt, Artificial Sequence
  Synthetic
ucuuaauaugucagaauuaaau

SEQ ID NO: 59762 - RNA, 23 nt, Artificial Sequence
  Synthetic
cucuuaauaugucagaauuaaau

SEQ ID NO: 59763 - RNA, 24 nt, Artificial Sequence
  Synthetic
ucucuuaauaugucagaauuaaau

SEQ ID NO: 59764 - RNA, 18 nt, Artificial Sequence
  Synthetic
auuagggaggcauuaaau

SEQ ID NO: 59765 - RNA, 20 nt, Artificial Sequence
  Synthetic
cgauuagggaggcauuaaau

SEQ ID NO: 59766 - RNA, 18 nt, Artificial Sequence
  Synthetic
uuaaccuaaucauuaaau

SEQ ID NO: 59767 - RNA, 19 nt, Artificial Sequence
  Synthetic
uuuaaccuaaucauuaaau

SEQ ID NO: 59768 - RNA, 20 nt, Artificial Sequence
  Synthetic
cuuuaaccuaaucauuaaau

SEQ ID NO: 59769 - RNA, 22 nt, Artificial Sequence
  Synthetic
ugcuuuaaccuaaucauuaaau

SEQ ID NO: 59770 - RNA, 23 nt, Artificial Sequence
  Synthetic
uugcuuuaaccuaaucauuaaau

SEQ ID NO: 59771 - RNA, 18 nt, Artificial Sequence
  Synthetic
auuguuauuggauuaaau

SEQ ID NO: 59772 - RNA, 19 nt, Artificial Sequence
  Synthetic
uauuguuauuggauuaaau

SEQ ID NO: 59773 - RNA, 20 nt, Artificial Sequence
  Synthetic
uuauuguuauuggauuaaau

SEQ ID NO: 59774 - RNA, 21 nt, Artificial Sequence
  Synthetic
auuauuguuauuggauuaaau

SEQ ID NO: 59775 - RNA, 22 nt, Artificial Sequence
  Synthetic
uauuauuguuauuggauuaaau

SEQ ID NO: 59776 - RNA, 23 nt, Artificial Sequence
  Synthetic
uuauuauuguuauuggauuaaau

SEQ ID NO: 59777 - RNA, 19 nt, Artificial Sequence
  Synthetic
agagguccuaaauuuaaau

SEQ ID NO: 59778 - RNA, 20 nt, Artificial Sequence
  Synthetic
cagagguccuaaauuuaaau

SEQ ID NO: 59779 - RNA, 21 nt, Artificial Sequence
  Synthetic
ucagagguccuaaauuuaaau

SEQ ID NO: 59780 - RNA, 22 nt, Artificial Sequence
  Synthetic
uucagagguccuaaauuuaaau

SEQ ID NO: 59781 - RNA, 24 nt, Artificial Sequence
  Synthetic
uguucagagguccuaaauuuaaau

SEQ ID NO: 59782 - RNA, 22 nt, Artificial Sequence
  Synthetic
agauguaaaaauauguuuaaau

SEQ ID NO: 59783 - RNA, 24 nt, Artificial Sequence
  Synthetic
ugagauguaaaaauauguuuaaau

SEQ ID NO: 59784 - RNA, 22 nt, Artificial Sequence
  Synthetic
aggggauuuauuauuuuuaaau

SEQ ID NO: 59785 - RNA, 23 nt, Artificial Sequence
  Synthetic
uaggggauuuauuauuuuuaaau

SEQ ID NO: 59786 - RNA, 18 nt, Artificial Sequence
  Synthetic
ugacaagggaaaaacaau

SEQ ID NO: 59787 - RNA, 19 nt, Artificial Sequence
  Synthetic
uugacaagggaaaaacaau

SEQ ID NO: 59788 - RNA, 20 nt, Artificial Sequence
  Synthetic
uuugacaagggaaaaacaau

SEQ ID NO: 59789 - RNA, 21 nt, Artificial Sequence
  Synthetic
auuugacaagggaaaaacaau

SEQ ID NO: 59790 - RNA, 22 nt, Artificial Sequence
  Synthetic
uauuugacaagggaaaaacaau

SEQ ID NO: 59791 - RNA, 23 nt, Artificial Sequence
  Synthetic
cuauuugacaagggaaaaacaau

SEQ ID NO: 59792 - RNA, 24 nt, Artificial Sequence
  Synthetic
ucuauuugacaagggaaaaacaau

SEQ ID NO: 59793 - RNA, 19 nt, Artificial Sequence
  Synthetic
ugcaucaaauugcaacaau

SEQ ID NO: 59794 - RNA, 20 nt, Artificial Sequence
  Synthetic
augcaucaaauugcaacaau

SEQ ID NO: 59795 - RNA, 21 nt, Artificial Sequence
  Synthetic
aaugcaucaaauugcaacaau

SEQ ID NO: 59796 - RNA, 22 nt, Artificial Sequence
  Synthetic
uaaugcaucaaauugcaacaau

SEQ ID NO: 59797 - RNA, 23 nt, Artificial Sequence
  Synthetic
auaaugcaucaaauugcaacaau

SEQ ID NO: 59798 - RNA, 24 nt, Artificial Sequence
  Synthetic
aauaaugcaucaaauugcaacaau

SEQ ID NO: 59799 - RNA, 18 nt, Artificial Sequence
  Synthetic
cuaaaggaagagaacaau

SEQ ID NO: 59800 - RNA, 19 nt, Artificial Sequence
  Synthetic
ucuaaaggaagagaacaau

SEQ ID NO: 59801 - RNA, 21 nt, Artificial Sequence
  Synthetic
agucuaaaggaagagaacaau

SEQ ID NO: 59802 - RNA, 23 nt, Artificial Sequence
  Synthetic
agagucuaaaggaagagaacaau

SEQ ID NO: 59803 - RNA, 24 nt, Artificial Sequence
  Synthetic
uagagucuaaaggaagagaacaau

SEQ ID NO: 59804 - RNA, 18 nt, Artificial Sequence
  Synthetic
acuuuguauaugaacaau

SEQ ID NO: 59805 - RNA, 19 nt, Artificial Sequence
  Synthetic
aacuuuguauaugaacaau

SEQ ID NO: 59806 - RNA, 20 nt, Artificial Sequence
  Synthetic
aaacuuuguauaugaacaau

SEQ ID NO: 59807 - RNA, 21 nt, Artificial Sequence
  Synthetic
uaaacuuuguauaugaacaau

SEQ ID NO: 59808 - RNA, 22 nt, Artificial Sequence
  Synthetic
cuaaacuuuguauaugaacaau

SEQ ID NO: 59809 - RNA, 23 nt, Artificial Sequence
  Synthetic
acuaaacuuuguauaugaacaau

SEQ ID NO: 59810 - RNA, 24 nt, Artificial Sequence
  Synthetic
uacuaaacuuuguauaugaacaau

SEQ ID NO: 59811 - RNA, 20 nt, Artificial Sequence
  Synthetic
cgggcaagaaguauaacaau

SEQ ID NO: 59812 - RNA, 21 nt, Artificial Sequence
  Synthetic
ccgggcaagaaguauaacaau

SEQ ID NO: 59813 - RNA, 22 nt, Artificial Sequence
  Synthetic
accgggcaagaaguauaacaau

SEQ ID NO: 59814 - RNA, 23 nt, Artificial Sequence
  Synthetic
aaccgggcaagaaguauaacaau

SEQ ID NO: 59815 - RNA, 24 nt, Artificial Sequence
  Synthetic
caaccgggcaagaaguauaacaau

SEQ ID NO: 59816 - RNA, 18 nt, Artificial Sequence
  Synthetic
cugacgaagagacacaau

SEQ ID NO: 59817 - RNA, 19 nt, Artificial Sequence
  Synthetic
acugacgaagagacacaau

SEQ ID NO: 59818 - RNA, 20 nt, Artificial Sequence
  Synthetic
cacugacgaagagacacaau

SEQ ID NO: 59819 - RNA, 23 nt, Artificial Sequence
  Synthetic
uggcacugacgaagagacacaau

SEQ ID NO: 59820 - RNA, 24 nt, Artificial Sequence
  Synthetic
uuggcacugacgaagagacacaau

SEQ ID NO: 59821 - RNA, 18 nt, Artificial Sequence
  Synthetic
ucacugugggggcacaau

SEQ ID NO: 59822 - RNA, 19 nt, Artificial Sequence
  Synthetic
uucacugugggggcacaau

SEQ ID NO: 59823 - RNA, 20 nt, Artificial Sequence
  Synthetic
uuucacugugggggcacaau

SEQ ID NO: 59824 - RNA, 21 nt, Artificial Sequence
  Synthetic
cuuucacugugggggcacaau

SEQ ID NO: 59825 - RNA, 22 nt, Artificial Sequence
  Synthetic
ucuuucacugugggggcacaau

SEQ ID NO: 59826 - RNA, 18 nt, Artificial Sequence
  Synthetic
cccuaagaggaagacaau

SEQ ID NO: 59827 - RNA, 19 nt, Artificial Sequence
  Synthetic
ucccuaagaggaagacaau

SEQ ID NO: 59828 - RNA, 20 nt, Artificial Sequence
  Synthetic
uucccuaagaggaagacaau

SEQ ID NO: 59829 - RNA, 21 nt, Artificial Sequence
  Synthetic
uuucccuaagaggaagacaau

SEQ ID NO: 59830 - RNA, 22 nt, Artificial Sequence
  Synthetic
uuuucccuaagaggaagacaau

SEQ ID NO: 59831 - RNA, 23 nt, Artificial Sequence
  Synthetic
uuuuucccuaagaggaagacaau

SEQ ID NO: 59832 - RNA, 24 nt, Artificial Sequence
  Synthetic
uuuuuucccuaagaggaagacaau

SEQ ID NO: 59833 - RNA, 18 nt, Artificial Sequence
  Synthetic
aaguaaguggaagacaau

SEQ ID NO: 59834 - RNA, 21 nt, Artificial Sequence
  Synthetic
aggaaguaaguggaagacaau

SEQ ID NO: 59835 - RNA, 23 nt, Artificial Sequence
  Synthetic
ugaggaaguaaguggaagacaau

SEQ ID NO: 59836 - RNA, 18 nt, Artificial Sequence
  Synthetic
uagaaacuugaagacaau

SEQ ID NO: 59837 - RNA, 20 nt, Artificial Sequence
  Synthetic
cguagaaacuugaagacaau

SEQ ID NO: 59838 - RNA, 21 nt, Artificial Sequence
  Synthetic
ccguagaaacuugaagacaau

SEQ ID NO: 59839 - RNA, 22 nt, Artificial Sequence
  Synthetic
uccguagaaacuugaagacaau

SEQ ID NO: 59840 - RNA, 23 nt, Artificial Sequence
  Synthetic
uuccguagaaacuugaagacaau

SEQ ID NO: 59841 - RNA, 24 nt, Artificial Sequence
  Synthetic
auuccguagaaacuugaagacaau

SEQ ID NO: 59842 - RNA, 21 nt, Artificial Sequence
  Synthetic
auauaaaaauauuuagacaau

SEQ ID NO: 59843 - RNA, 22 nt, Artificial Sequence
  Synthetic
aauauaaaaauauuuagacaau

SEQ ID NO: 59844 - RNA, 23 nt, Artificial Sequence
  Synthetic
aaauauaaaaauauuuagacaau

SEQ ID NO: 59845 - RNA, 24 nt, Artificial Sequence
  Synthetic
aaaauauaaaaauauuuagacaau

SEQ ID NO: 59846 - RNA, 19 nt, Artificial Sequence
  Synthetic
agggacaaaagaggacaau

SEQ ID NO: 59847 - RNA, 21 nt, Artificial Sequence
  Synthetic
ugagggacaaaagaggacaau

SEQ ID NO: 59848 - RNA, 22 nt, Artificial Sequence
  Synthetic
uugagggacaaaagaggacaau

SEQ ID NO: 59849 - RNA, 24 nt, Artificial Sequence
  Synthetic
uguugagggacaaaagaggacaau

SEQ ID NO: 59850 - RNA, 18 nt, Artificial Sequence
  Synthetic
auuuauuugugggacaau

SEQ ID NO: 59851 - RNA, 19 nt, Artificial Sequence
  Synthetic
uauuuauuugugggacaau

SEQ ID NO: 59852 - RNA, 20 nt, Artificial Sequence
  Synthetic
auauuuauuugugggacaau

SEQ ID NO: 59853 - RNA, 21 nt, Artificial Sequence
  Synthetic
uauauuuauuugugggacaau

SEQ ID NO: 59854 - RNA, 22 nt, Artificial Sequence
  Synthetic
uuauauuuauuugugggacaau

SEQ ID NO: 59855 - RNA, 23 nt, Artificial Sequence
  Synthetic
cuuauauuuauuugugggacaau

SEQ ID NO: 59856 - RNA, 24 nt, Artificial Sequence
  Synthetic
ucuuauauuuauuugugggacaau

SEQ ID NO: 59857 - RNA, 18 nt, Artificial Sequence
  Synthetic
uacaauaagccugacaau

SEQ ID NO: 59858 - RNA, 19 nt, Artificial Sequence
  Synthetic
auacaauaagccugacaau

SEQ ID NO: 59859 - RNA, 21 nt, Artificial Sequence
  Synthetic
agauacaauaagccugacaau

SEQ ID NO: 59860 - RNA, 22 nt, Artificial Sequence
  Synthetic
uagauacaauaagccugacaau

SEQ ID NO: 59861 - RNA, 18 nt, Artificial Sequence
  Synthetic
uagucucucaaauacaau

SEQ ID NO: 59862 - RNA, 19 nt, Artificial Sequence
  Synthetic
cuagucucucaaauacaau

SEQ ID NO: 59863 - RNA, 20 nt, Artificial Sequence
  Synthetic
acuagucucucaaauacaau

SEQ ID NO: 59864 - RNA, 21 nt, Artificial Sequence
  Synthetic
uacuagucucucaaauacaau

SEQ ID NO: 59865 - RNA, 22 nt, Artificial Sequence
  Synthetic
uuacuagucucucaaauacaau

SEQ ID NO: 59866 - RNA, 23 nt, Artificial Sequence
  Synthetic
uuuacuagucucucaaauacaau

SEQ ID NO: 59867 - RNA, 24 nt, Artificial Sequence
  Synthetic
cuuuacuagucucucaaauacaau

SEQ ID NO: 59868 - RNA, 18 nt, Artificial Sequence
  Synthetic
ugcccugucuaauacaau

SEQ ID NO: 59869 - RNA, 19 nt, Artificial Sequence
  Synthetic
cugcccugucuaauacaau

SEQ ID NO: 59870 - RNA, 20 nt, Artificial Sequence
  Synthetic
ucugcccugucuaauacaau

SEQ ID NO: 59871 - RNA, 21 nt, Artificial Sequence
  Synthetic
cucugcccugucuaauacaau

SEQ ID NO: 59872 - RNA, 22 nt, Artificial Sequence
  Synthetic
ucucugcccugucuaauacaau

SEQ ID NO: 59873 - RNA, 23 nt, Artificial Sequence
  Synthetic
uucucugcccugucuaauacaau

SEQ ID NO: 59874 - RNA, 24 nt, Artificial Sequence
  Synthetic
uuucucugcccugucuaauacaau

SEQ ID NO: 59875 - RNA, 18 nt, Artificial Sequence
  Synthetic
acaaagaguagauacaau

SEQ ID NO: 59876 - RNA, 19 nt, Artificial Sequence
  Synthetic
aacaaagaguagauacaau

SEQ ID NO: 59877 - RNA, 20 nt, Artificial Sequence
  Synthetic
aaacaaagaguagauacaau

SEQ ID NO: 59878 - RNA, 21 nt, Artificial Sequence
  Synthetic
caaacaaagaguagauacaau

SEQ ID NO: 59879 - RNA, 22 nt, Artificial Sequence
  Synthetic
ucaaacaaagaguagauacaau

SEQ ID NO: 59880 - RNA, 23 nt, Artificial Sequence
  Synthetic
aucaaacaaagaguagauacaau

SEQ ID NO: 59881 - RNA, 24 nt, Artificial Sequence
  Synthetic
caucaaacaaagaguagauacaau

SEQ ID NO: 59882 - RNA, 18 nt, Artificial Sequence
  Synthetic
agauucuagggauacaau

SEQ ID NO: 59883 - RNA, 19 nt, Artificial Sequence
  Synthetic
uagauucuagggauacaau

SEQ ID NO: 59884 - RNA, 20 nt, Artificial Sequence
  Synthetic
uuagauucuagggauacaau

SEQ ID NO: 59885 - RNA, 22 nt, Artificial Sequence
  Synthetic
uguuagauucuagggauacaau

SEQ ID NO: 59886 - RNA, 24 nt, Artificial Sequence
  Synthetic
uguguuagauucuagggauacaau

SEQ ID NO: 59887 - RNA, 18 nt, Artificial Sequence
  Synthetic
uacaugugagccuacaau

SEQ ID NO: 59888 - RNA, 19 nt, Artificial Sequence
  Synthetic
uuacaugugagccuacaau

SEQ ID NO: 59889 - RNA, 20 nt, Artificial Sequence
  Synthetic
cuuacaugugagccuacaau

SEQ ID NO: 59890 - RNA, 22 nt, Artificial Sequence
  Synthetic
ugcuuacaugugagccuacaau

SEQ ID NO: 59891 - RNA, 23 nt, Artificial Sequence
  Synthetic
augcuuacaugugagccuacaau

SEQ ID NO: 59892 - RNA, 24 nt, Artificial Sequence
  Synthetic
aaugcuuacaugugagccuacaau

SEQ ID NO: 59893 - RNA, 18 nt, Artificial Sequence
  Synthetic
cccgauauauuuuacaau

SEQ ID NO: 59894 - RNA, 19 nt, Artificial Sequence
  Synthetic
acccgauauauuuuacaau

SEQ ID NO: 59895 - RNA, 20 nt, Artificial Sequence
  Synthetic
aacccgauauauuuuacaau

SEQ ID NO: 59896 - RNA, 21 nt, Artificial Sequence
  Synthetic
caacccgauauauuuuacaau

SEQ ID NO: 59897 - RNA, 22 nt, Artificial Sequence
  Synthetic
ucaacccgauauauuuuacaau

SEQ ID NO: 59898 - RNA, 23 nt, Artificial Sequence
  Synthetic
uucaacccgauauauuuuacaau

SEQ ID NO: 59899 - RNA, 24 nt, Artificial Sequence
  Synthetic
auucaacccgauauauuuuacaau

SEQ ID NO: 59900 - RNA, 18 nt, Artificial Sequence
  Synthetic
agcagguuauaaaccaau

SEQ ID NO: 59901 - RNA, 19 nt, Artificial Sequence
  Synthetic
cagcagguuauaaaccaau

SEQ ID NO: 59902 - RNA, 20 nt, Artificial Sequence
  Synthetic
acagcagguuauaaaccaau

SEQ ID NO: 59903 - RNA, 21 nt, Artificial Sequence
  Synthetic
cacagcagguuauaaaccaau

SEQ ID NO: 59904 - RNA, 23 nt, Artificial Sequence
  Synthetic
agcacagcagguuauaaaccaau

SEQ ID NO: 59905 - RNA, 24 nt, Artificial Sequence
  Synthetic
cagcacagcagguuauaaaccaau

SEQ ID NO: 59906 - RNA, 18 nt, Artificial Sequence
  Synthetic
uauuuauuaagcaccaau

SEQ ID NO: 59907 - RNA, 19 nt, Artificial Sequence
  Synthetic
auauuuauuaagcaccaau

SEQ ID NO: 59908 - RNA, 20 nt, Artificial Sequence
  Synthetic
uauauuuauuaagcaccaau

SEQ ID NO: 59909 - RNA, 21 nt, Artificial Sequence
  Synthetic
cuauauuuauuaagcaccaau

SEQ ID NO: 59910 - RNA, 22 nt, Artificial Sequence
  Synthetic
acuauauuuauuaagcaccaau

SEQ ID NO: 59911 - RNA, 23 nt, Artificial Sequence
  Synthetic
uacuauauuuauuaagcaccaau

SEQ ID NO: 59912 - RNA, 24 nt, Artificial Sequence
  Synthetic
uuacuauauuuauuaagcaccaau

SEQ ID NO: 59913 - RNA, 18 nt, Artificial Sequence
  Synthetic
auguagcucagccccaau

SEQ ID NO: 59914 - RNA, 19 nt, Artificial Sequence
  Synthetic
aauguagcucagccccaau

SEQ ID NO: 59915 - RNA, 20 nt, Artificial Sequence
  Synthetic
uaauguagcucagccccaau

SEQ ID NO: 59916 - RNA, 22 nt, Artificial Sequence
  Synthetic
uguaauguagcucagccccaau

SEQ ID NO: 59917 - RNA, 23 nt, Artificial Sequence
  Synthetic
uuguaauguagcucagccccaau

SEQ ID NO: 59918 - RNA, 24 nt, Artificial Sequence
  Synthetic
uuuguaauguagcucagccccaau

SEQ ID NO: 59919 - RNA, 18 nt, Artificial Sequence
  Synthetic
uagagauuuaagcccaau

SEQ ID NO: 59920 - RNA, 19 nt, Artificial Sequence
  Synthetic
cuagagauuuaagcccaau

SEQ ID NO: 59921 - RNA, 20 nt, Artificial Sequence
  Synthetic
ucuagagauuuaagcccaau

SEQ ID NO: 59922 - RNA, 22 nt, Artificial Sequence
  Synthetic
ugucuagagauuuaagcccaau

SEQ ID NO: 59923 - RNA, 23 nt, Artificial Sequence
  Synthetic
cugucuagagauuuaagcccaau

SEQ ID NO: 59924 - RNA, 24 nt, Artificial Sequence
  Synthetic
ccugucuagagauuuaagcccaau

SEQ ID NO: 59925 - RNA, 18 nt, Artificial Sequence
  Synthetic
ugugauugguugcccaau

SEQ ID NO: 59926 - RNA, 19 nt, Artificial Sequence
  Synthetic
augugauugguugcccaau

SEQ ID NO: 59927 - RNA, 20 nt, Artificial Sequence
  Synthetic
aaugugauugguugcccaau

SEQ ID NO: 59928 - RNA, 21 nt, Artificial Sequence
  Synthetic
aaaugugauugguugcccaau

SEQ ID NO: 59929 - RNA, 22 nt, Artificial Sequence
  Synthetic
caaaugugauugguugcccaau

SEQ ID NO: 59930 - RNA, 23 nt, Artificial Sequence
  Synthetic
acaaaugugauugguugcccaau

SEQ ID NO: 59931 - RNA, 24 nt, Artificial Sequence
  Synthetic
aacaaaugugauugguugcccaau

SEQ ID NO: 59932 - RNA, 18 nt, Artificial Sequence
  Synthetic
ugcuucucuuuucccaau

SEQ ID NO: 59933 - RNA, 20 nt, Artificial Sequence
  Synthetic
ugugcuucucuuuucccaau

SEQ ID NO: 59934 - RNA, 21 nt, Artificial Sequence
  Synthetic
uugugcuucucuuuucccaau

SEQ ID NO: 59935 - RNA, 22 nt, Artificial Sequence
  Synthetic
auugugcuucucuuuucccaau

SEQ ID NO: 59936 - RNA, 23 nt, Artificial Sequence
  Synthetic
aauugugcuucucuuuucccaau

SEQ ID NO: 59937 - RNA, 24 nt, Artificial Sequence
  Synthetic
aaauugugcuucucuuuucccaau

SEQ ID NO: 59938 - RNA, 18 nt, Artificial Sequence
  Synthetic
cauacaucugaagccaau

SEQ ID NO: 59939 - RNA, 19 nt, Artificial Sequence
  Synthetic
acauacaucugaagccaau

SEQ ID NO: 59940 - RNA, 20 nt, Artificial Sequence
  Synthetic
uacauacaucugaagccaau

SEQ ID NO: 59941 - RNA, 21 nt, Artificial Sequence
  Synthetic
auacauacaucugaagccaau

SEQ ID NO: 59942 - RNA, 22 nt, Artificial Sequence
  Synthetic
uauacauacaucugaagccaau

SEQ ID NO: 59943 - RNA, 23 nt, Artificial Sequence
  Synthetic
uuauacauacaucugaagccaau

SEQ ID NO: 59944 - RNA, 24 nt, Artificial Sequence
  Synthetic
cuuauacauacaucugaagccaau

SEQ ID NO: 59945 - RNA, 19 nt, Artificial Sequence
  Synthetic
aguuuuuuaguaagccaau

SEQ ID NO: 59946 - RNA, 21 nt, Artificial Sequence
  Synthetic
ugaguuuuuuaguaagccaau

SEQ ID NO: 59947 - RNA, 22 nt, Artificial Sequence
  Synthetic
cugaguuuuuuaguaagccaau

SEQ ID NO: 59948 - RNA, 24 nt, Artificial Sequence
  Synthetic
ugcugaguuuuuuaguaagccaau

SEQ ID NO: 59949 - RNA, 18 nt, Artificial Sequence
  Synthetic
agcaaugauauauccaau

SEQ ID NO: 59950 - RNA, 19 nt, Artificial Sequence
  Synthetic
aagcaaugauauauccaau

SEQ ID NO: 59951 - RNA, 22 nt, Artificial Sequence
  Synthetic
aggaagcaaugauauauccaau

SEQ ID NO: 59952 - RNA, 23 nt, Artificial Sequence
  Synthetic
caggaagcaaugauauauccaau

SEQ ID NO: 59953 - RNA, 18 nt, Artificial Sequence
  Synthetic
uccaguucacuguccaau

SEQ ID NO: 59954 - RNA, 20 nt, Artificial Sequence
  Synthetic
aguccaguucacuguccaau

SEQ ID NO: 59955 - RNA, 21 nt, Artificial Sequence
  Synthetic
uaguccaguucacuguccaau

SEQ ID NO: 59956 - RNA, 22 nt, Artificial Sequence
  Synthetic
cuaguccaguucacuguccaau

SEQ ID NO: 59957 - RNA, 23 nt, Artificial Sequence
  Synthetic
ucuaguccaguucacuguccaau

SEQ ID NO: 59958 - RNA, 24 nt, Artificial Sequence
  Synthetic
aucuaguccaguucacuguccaau

SEQ ID NO: 59959 - RNA, 18 nt, Artificial Sequence
  Synthetic
ucuuguccauuuuccaau

SEQ ID NO: 59960 - RNA, 20 nt, Artificial Sequence
  Synthetic
ugucuuguccauuuuccaau

SEQ ID NO: 59961 - RNA, 21 nt, Artificial Sequence
  Synthetic
cugucuuguccauuuuccaau

SEQ ID NO: 59962 - RNA, 23 nt, Artificial Sequence
  Synthetic
ugcugucuuguccauuuuccaau

SEQ ID NO: 59963 - RNA, 24 nt, Artificial Sequence
  Synthetic
augcugucuuguccauuuuccaau

SEQ ID NO: 59964 - RNA, 18 nt, Artificial Sequence
  Synthetic
agcauuauaagcagcaau

SEQ ID NO: 59965 - RNA, 19 nt, Artificial Sequence
  Synthetic
uagcauuauaagcagcaau

SEQ ID NO: 59966 - RNA, 20 nt, Artificial Sequence
  Synthetic
auagcauuauaagcagcaau

SEQ ID NO: 59967 - RNA, 21 nt, Artificial Sequence
  Synthetic
uauagcauuauaagcagcaau

SEQ ID NO: 59968 - RNA, 22 nt, Artificial Sequence
  Synthetic
uuauagcauuauaagcagcaau

SEQ ID NO: 59969 - RNA, 23 nt, Artificial Sequence
  Synthetic
uuuauagcauuauaagcagcaau

SEQ ID NO: 59970 - RNA, 18 nt, Artificial Sequence
  Synthetic
accccaauuuaaugcaau

SEQ ID NO: 59971 - RNA, 19 nt, Artificial Sequence
  Synthetic
caccccaauuuaaugcaau

SEQ ID NO: 59972 - RNA, 20 nt, Artificial Sequence
  Synthetic
ucaccccaauuuaaugcaau

SEQ ID NO: 59973 - RNA, 22 nt, Artificial Sequence
  Synthetic
agucaccccaauuuaaugcaau

SEQ ID NO: 59974 - RNA, 23 nt, Artificial Sequence
  Synthetic
cagucaccccaauuuaaugcaau

SEQ ID NO: 59975 - RNA, 24 nt, Artificial Sequence
  Synthetic
ccagucaccccaauuuaaugcaau

SEQ ID NO: 59976 - RNA, 18 nt, Artificial Sequence
  Synthetic
cuuugucuuaacugcaau

SEQ ID NO: 59977 - RNA, 19 nt, Artificial Sequence
  Synthetic
ucuuugucuuaacugcaau

SEQ ID NO: 59978 - RNA, 20 nt, Artificial Sequence
  Synthetic
aucuuugucuuaacugcaau

SEQ ID NO: 59979 - RNA, 21 nt, Artificial Sequence
  Synthetic
aaucuuugucuuaacugcaau

SEQ ID NO: 59980 - RNA, 22 nt, Artificial Sequence
  Synthetic
aaaucuuugucuuaacugcaau

SEQ ID NO: 59981 - RNA, 24 nt, Artificial Sequence
  Synthetic
agaaaucuuugucuuaacugcaau

SEQ ID NO: 59982 - RNA, 18 nt, Artificial Sequence
  Synthetic
cuggaucacuugugcaau

SEQ ID NO: 59983 - RNA, 21 nt, Artificial Sequence
  Synthetic
aggcuggaucacuugugcaau

SEQ ID NO: 59984 - RNA, 22 nt, Artificial Sequence
  Synthetic
aaggcuggaucacuugugcaau

SEQ ID NO: 59985 - RNA, 23 nt, Artificial Sequence
  Synthetic
aaaggcuggaucacuugugcaau

SEQ ID NO: 59986 - RNA, 24 nt, Artificial Sequence
  Synthetic
caaaggcuggaucacuugugcaau

SEQ ID NO: 59987 - RNA, 18 nt, Artificial Sequence
  Synthetic
ccccacaaauauugcaau

SEQ ID NO: 59988 - RNA, 19 nt, Artificial Sequence
  Synthetic
accccacaaauauugcaau

SEQ ID NO: 59989 - RNA, 20 nt, Artificial Sequence
  Synthetic
uaccccacaaauauugcaau

SEQ ID NO: 59990 - RNA, 21 nt, Artificial Sequence
  Synthetic
uuaccccacaaauauugcaau

SEQ ID NO: 59991 - RNA, 22 nt, Artificial Sequence
  Synthetic
cuuaccccacaaauauugcaau

SEQ ID NO: 59992 - RNA, 24 nt, Artificial Sequence
  Synthetic
ugcuuaccccacaaauauugcaau

SEQ ID NO: 59993 - RNA, 18 nt, Artificial Sequence
  Synthetic
ccucaaucagguugcaau

SEQ ID NO: 59994 - RNA, 20 nt, Artificial Sequence
  Synthetic
ugccucaaucagguugcaau

SEQ ID NO: 59995 - RNA, 21 nt, Artificial Sequence
  Synthetic
augccucaaucagguugcaau

SEQ ID NO: 59996 - RNA, 22 nt, Artificial Sequence
  Synthetic
aaugccucaaucagguugcaau

SEQ ID NO: 59997 - RNA, 23 nt, Artificial Sequence
  Synthetic
uaaugccucaaucagguugcaau

SEQ ID NO: 59998 - RNA, 24 nt, Artificial Sequence
  Synthetic
auaaugccucaaucagguugcaau

SEQ ID NO: 59999 - RNA, 21 nt, Artificial Sequence
  Synthetic
aauccacauuaaaaaaucaau

SEQ ID NO: 60000 - RNA, 22 nt, Artificial Sequence
  Synthetic
aaauccacauuaaaaaaucaau

SEQ ID NO: 60001 - RNA, 23 nt, Artificial Sequence
  Synthetic
aaaauccacauuaaaaaaucaau

SEQ ID NO: 60002 - RNA, 18 nt, Artificial Sequence
  Synthetic
ccgaagucuauaaucaau

SEQ ID NO: 60003 - RNA, 19 nt, Artificial Sequence
  Synthetic
accgaagucuauaaucaau

SEQ ID NO: 60004 - RNA, 20 nt, Artificial Sequence
  Synthetic
caccgaagucuauaaucaau

SEQ ID NO: 60005 - RNA, 21 nt, Artificial Sequence
  Synthetic
ucaccgaagucuauaaucaau

SEQ ID NO: 60006 - RNA, 22 nt, Artificial Sequence
  Synthetic
uucaccgaagucuauaaucaau

SEQ ID NO: 60007 - RNA, 23 nt, Artificial Sequence
  Synthetic
cuucaccgaagucuauaaucaau

SEQ ID NO: 60008 - RNA, 24 nt, Artificial Sequence
  Synthetic
ucuucaccgaagucuauaaucaau

SEQ ID NO: 60009 - RNA, 18 nt, Artificial Sequence
  Synthetic
agcuuucacuguaucaau

SEQ ID NO: 60010 - RNA, 19 nt, Artificial Sequence
  Synthetic
uagcuuucacuguaucaau

SEQ ID NO: 60011 - RNA, 21 nt, Artificial Sequence
  Synthetic
uguagcuuucacuguaucaau

SEQ ID NO: 60012 - RNA, 22 nt, Artificial Sequence
  Synthetic
auguagcuuucacuguaucaau

SEQ ID NO: 60013 - RNA, 23 nt, Artificial Sequence
  Synthetic
aauguagcuuucacuguaucaau

SEQ ID NO: 60014 - RNA, 24 nt, Artificial Sequence
  Synthetic
aaauguagcuuucacuguaucaau

SEQ ID NO: 60015 - RNA, 18 nt, Artificial Sequence
  Synthetic
ugagauuauugagucaau

SEQ ID NO: 60016 - RNA, 20 nt, Artificial Sequence
  Synthetic
agugagauuauugagucaau

SEQ ID NO: 60017 - RNA, 21 nt, Artificial Sequence
  Synthetic
aagugagauuauugagucaau

SEQ ID NO: 60018 - RNA, 22 nt, Artificial Sequence
  Synthetic
aaagugagauuauugagucaau

SEQ ID NO: 60019 - RNA, 23 nt, Artificial Sequence
  Synthetic
aaaagugagauuauugagucaau

SEQ ID NO: 60020 - RNA, 24 nt, Artificial Sequence
  Synthetic
caaaagugagauuauugagucaau

SEQ ID NO: 60021 - RNA, 18 nt, Artificial Sequence
  Synthetic
uaaugugcacaggucaau

SEQ ID NO: 60022 - RNA, 19 nt, Artificial Sequence
  Synthetic
auaaugugcacaggucaau

SEQ ID NO: 60023 - RNA, 20 nt, Artificial Sequence
  Synthetic
aauaaugugcacaggucaau

SEQ ID NO: 60024 - RNA, 18 nt, Artificial Sequence
  Synthetic
cugguuguaaaugucaau

SEQ ID NO: 60025 - RNA, 19 nt, Artificial Sequence
  Synthetic
ucugguuguaaaugucaau

SEQ ID NO: 60026 - RNA, 20 nt, Artificial Sequence
  Synthetic
aucugguuguaaaugucaau

SEQ ID NO: 60027 - RNA, 21 nt, Artificial Sequence
  Synthetic
aaucugguuguaaaugucaau

SEQ ID NO: 60028 - RNA, 22 nt, Artificial Sequence
  Synthetic
aaaucugguuguaaaugucaau

SEQ ID NO: 60029 - RNA, 23 nt, Artificial Sequence
  Synthetic
caaaucugguuguaaaugucaau

SEQ ID NO: 60030 - RNA, 18 nt, Artificial Sequence
  Synthetic
ucuguaauaucugucaau

SEQ ID NO: 60031 - RNA, 19 nt, Artificial Sequence
  Synthetic
cucuguaauaucugucaau

SEQ ID NO: 60032 - RNA, 20 nt, Artificial Sequence
  Synthetic
ucucuguaauaucugucaau

SEQ ID NO: 60033 - RNA, 21 nt, Artificial Sequence
  Synthetic
aucucuguaauaucugucaau

SEQ ID NO: 60034 - RNA, 22 nt, Artificial Sequence
  Synthetic
uaucucuguaauaucugucaau

SEQ ID NO: 60035 - RNA, 24 nt, Artificial Sequence
  Synthetic
aguaucucuguaauaucugucaau

SEQ ID NO: 60036 - RNA, 18 nt, Artificial Sequence
  Synthetic
ucgcaugacugugucaau

SEQ ID NO: 60037 - RNA, 19 nt, Artificial Sequence
  Synthetic
uucgcaugacugugucaau

SEQ ID NO: 60038 - RNA, 20 nt, Artificial Sequence
  Synthetic
auucgcaugacugugucaau

SEQ ID NO: 60039 - RNA, 22 nt, Artificial Sequence
  Synthetic
agauucgcaugacugugucaau

SEQ ID NO: 60040 - RNA, 23 nt, Artificial Sequence
  Synthetic
uagauucgcaugacugugucaau

SEQ ID NO: 60041 - RNA, 24 nt, Artificial Sequence
  Synthetic
auagauucgcaugacugugucaau

SEQ ID NO: 60042 - RNA, 18 nt, Artificial Sequence
  Synthetic
aaaauugauugugucaau

SEQ ID NO: 60043 - RNA, 20 nt, Artificial Sequence
  Synthetic
ugaaaauugauugugucaau

SEQ ID NO: 60044 - RNA, 22 nt, Artificial Sequence
  Synthetic
agugaaaauugauugugucaau

SEQ ID NO: 60045 - RNA, 19 nt, Artificial Sequence
  Synthetic
uggcuccaaaguugucaau

SEQ ID NO: 60046 - RNA, 20 nt, Artificial Sequence
  Synthetic
auggcuccaaaguugucaau

SEQ ID NO: 60047 - RNA, 23 nt, Artificial Sequence
  Synthetic
aggauggcuccaaaguugucaau

SEQ ID NO: 60048 - RNA, 24 nt, Artificial Sequence
  Synthetic
aaggauggcuccaaaguugucaau

SEQ ID NO: 60049 - RNA, 22 nt, Artificial Sequence
  Synthetic
aguuuuaaauuuacaauucaau

SEQ ID NO: 60050 - RNA, 23 nt, Artificial Sequence
  Synthetic
uaguuuuaaauuuacaauucaau

SEQ ID NO: 60051 - RNA, 24 nt, Artificial Sequence
  Synthetic
auaguuuuaaauuuacaauucaau

SEQ ID NO: 60052 - RNA, 20 nt, Artificial Sequence
  Synthetic
uggccauuccugaguucaau

SEQ ID NO: 60053 - RNA, 21 nt, Artificial Sequence
  Synthetic
auggccauuccugaguucaau

SEQ ID NO: 60054 - RNA, 22 nt, Artificial Sequence
  Synthetic
cauggccauuccugaguucaau

SEQ ID NO: 60055 - RNA, 23 nt, Artificial Sequence
  Synthetic
acauggccauuccugaguucaau

SEQ ID NO: 60056 - RNA, 24 nt, Artificial Sequence
  Synthetic
cacauggccauuccugaguucaau

SEQ ID NO: 60057 - RNA, 18 nt, Artificial Sequence
  Synthetic
agauuguauauguucaau

SEQ ID NO: 60058 - RNA, 19 nt, Artificial Sequence
  Synthetic
uagauuguauauguucaau

SEQ ID NO: 60059 - RNA, 20 nt, Artificial Sequence
  Synthetic
auagauuguauauguucaau

SEQ ID NO: 60060 - RNA, 21 nt, Artificial Sequence
  Synthetic
uauagauuguauauguucaau

SEQ ID NO: 60061 - RNA, 22 nt, Artificial Sequence
  Synthetic
auauagauuguauauguucaau

SEQ ID NO: 60062 - RNA, 23 nt, Artificial Sequence
  Synthetic
uauauagauuguauauguucaau

SEQ ID NO: 60063 - RNA, 24 nt, Artificial Sequence
  Synthetic
auauauagauuguauauguucaau

SEQ ID NO: 60064 - RNA, 18 nt, Artificial Sequence
  Synthetic
caaauuuaccauuucaau

SEQ ID NO: 60065 - RNA, 19 nt, Artificial Sequence
  Synthetic
acaaauuuaccauuucaau

SEQ ID NO: 60066 - RNA, 20 nt, Artificial Sequence
  Synthetic
cacaaauuuaccauuucaau

SEQ ID NO: 60067 - RNA, 21 nt, Artificial Sequence
  Synthetic
acacaaauuuaccauuucaau

SEQ ID NO: 60068 - RNA, 22 nt, Artificial Sequence
  Synthetic
aacacaaauuuaccauuucaau

SEQ ID NO: 60069 - RNA, 23 nt, Artificial Sequence
  Synthetic
aaacacaaauuuaccauuucaau

SEQ ID NO: 60070 - RNA, 24 nt, Artificial Sequence
  Synthetic
aaaacacaaauuuaccauuucaau

SEQ ID NO: 60071 - RNA, 18 nt, Artificial Sequence
  Synthetic
accaaaugagauuucaau

SEQ ID NO: 60072 - RNA, 19 nt, Artificial Sequence
  Synthetic
aaccaaaugagauuucaau

SEQ ID NO: 60073 - RNA, 21 nt, Artificial Sequence
  Synthetic
ugaaccaaaugagauuucaau

SEQ ID NO: 60074 - RNA, 22 nt, Artificial Sequence
  Synthetic
uugaaccaaaugagauuucaau

SEQ ID NO: 60075 - RNA, 24 nt, Artificial Sequence
  Synthetic
aguugaaccaaaugagauuucaau

SEQ ID NO: 60076 - RNA, 18 nt, Artificial Sequence
  Synthetic
cuucugagaucaaagaau

SEQ ID NO: 60077 - RNA, 19 nt, Artificial Sequence
  Synthetic
acuucugagaucaaagaau

SEQ ID NO: 60078 - RNA, 20 nt, Artificial Sequence
  Synthetic
cacuucugagaucaaagaau

SEQ ID NO: 60079 - RNA, 21 nt, Artificial Sequence
  Synthetic
ucacuucugagaucaaagaau

SEQ ID NO: 60080 - RNA, 22 nt, Artificial Sequence
  Synthetic
cucacuucugagaucaaagaau

SEQ ID NO: 60081 - RNA, 23 nt, Artificial Sequence
  Synthetic
ccucacuucugagaucaaagaau

SEQ ID NO: 60082 - RNA, 24 nt, Artificial Sequence
  Synthetic
cccucacuucugagaucaaagaau

SEQ ID NO: 60083 - RNA, 18 nt, Artificial Sequence
  Synthetic
auaggcaaugccaagaau

SEQ ID NO: 60084 - RNA, 19 nt, Artificial Sequence
  Synthetic
uauaggcaaugccaagaau

SEQ ID NO: 60085 - RNA, 20 nt, Artificial Sequence
  Synthetic
auauaggcaaugccaagaau

SEQ ID NO: 60086 - RNA, 21 nt, Artificial Sequence
  Synthetic
cauauaggcaaugccaagaau

SEQ ID NO: 60087 - RNA, 22 nt, Artificial Sequence
  Synthetic
ccauauaggcaaugccaagaau

SEQ ID NO: 60088 - RNA, 23 nt, Artificial Sequence
  Synthetic
accauauaggcaaugccaagaau

SEQ ID NO: 60089 - RNA, 24 nt, Artificial Sequence
  Synthetic
uaccauauaggcaaugccaagaau

SEQ ID NO: 60090 - RNA, 19 nt, Artificial Sequence
  Synthetic
aguuaccuauuugaagaau

SEQ ID NO: 60091 - RNA, 21 nt, Artificial Sequence
  Synthetic
agaguuaccuauuugaagaau

SEQ ID NO: 60092 - RNA, 23 nt, Artificial Sequence
  Synthetic
agagaguuaccuauuugaagaau

SEQ ID NO: 60093 - RNA, 24 nt, Artificial Sequence
  Synthetic
aagagaguuaccuauuugaagaau

SEQ ID NO: 60094 - RNA, 18 nt, Artificial Sequence
  Synthetic
ugcuagucugaacagaau

SEQ ID NO: 60095 - RNA, 19 nt, Artificial Sequence
  Synthetic
uugcuagucugaacagaau

SEQ ID NO: 60096 - RNA, 20 nt, Artificial Sequence
  Synthetic
cuugcuagucugaacagaau

SEQ ID NO: 60097 - RNA, 21 nt, Artificial Sequence
  Synthetic
ccuugcuagucugaacagaau

SEQ ID NO: 60098 - RNA, 22 nt, Artificial Sequence
  Synthetic
accuugcuagucugaacagaau

SEQ ID NO: 60099 - RNA, 23 nt, Artificial Sequence
  Synthetic
aaccuugcuagucugaacagaau

SEQ ID NO: 60100 - RNA, 24 nt, Artificial Sequence
  Synthetic
aaaccuugcuagucugaacagaau

SEQ ID NO: 60101 - RNA, 19 nt, Artificial Sequence
  Synthetic
agucucaaaugcacagaau

SEQ ID NO: 60102 - RNA, 20 nt, Artificial Sequence
  Synthetic
aagucucaaaugcacagaau

SEQ ID NO: 60103 - RNA, 21 nt, Artificial Sequence
  Synthetic
caagucucaaaugcacagaau

SEQ ID NO: 60104 - RNA, 22 nt, Artificial Sequence
  Synthetic
ucaagucucaaaugcacagaau

SEQ ID NO: 60105 - RNA, 23 nt, Artificial Sequence
  Synthetic
aucaagucucaaaugcacagaau

SEQ ID NO: 60106 - RNA, 24 nt, Artificial Sequence
  Synthetic
aaucaagucucaaaugcacagaau

SEQ ID NO: 60107 - RNA, 18 nt, Artificial Sequence
  Synthetic
uaccaagacacccagaau

SEQ ID NO: 60108 - RNA, 20 nt, Artificial Sequence
  Synthetic
aguaccaagacacccagaau

SEQ ID NO: 60109 - RNA, 21 nt, Artificial Sequence
  Synthetic
caguaccaagacacccagaau

SEQ ID NO: 60110 - RNA, 22 nt, Artificial Sequence
  Synthetic
acaguaccaagacacccagaau

SEQ ID NO: 60111 - RNA, 24 nt, Artificial Sequence
  Synthetic
agacaguaccaagacacccagaau

SEQ ID NO: 60112 - RNA, 18 nt, Artificial Sequence
  Synthetic
augccacauuggcagaau

SEQ ID NO: 60113 - RNA, 19 nt, Artificial Sequence
  Synthetic
caugccacauuggcagaau

SEQ ID NO: 60114 - RNA, 20 nt, Artificial Sequence
  Synthetic
ucaugccacauuggcagaau

SEQ ID NO: 60115 - RNA, 21 nt, Artificial Sequence
  Synthetic
uucaugccacauuggcagaau

SEQ ID NO: 60116 - RNA, 22 nt, Artificial Sequence
  Synthetic
uuucaugccacauuggcagaau

SEQ ID NO: 60117 - RNA, 23 nt, Artificial Sequence
  Synthetic
cuuucaugccacauuggcagaau

SEQ ID NO: 60118 - RNA, 24 nt, Artificial Sequence
  Synthetic
acuuucaugccacauuggcagaau

SEQ ID NO: 60119 - RNA, 18 nt, Artificial Sequence
  Synthetic
caacagauagaagagaau

SEQ ID NO: 60120 - RNA, 19 nt, Artificial Sequence
  Synthetic
ucaacagauagaagagaau

SEQ ID NO: 60121 - RNA, 20 nt, Artificial Sequence
  Synthetic
uucaacagauagaagagaau

SEQ ID NO: 60122 - RNA, 21 nt, Artificial Sequence
  Synthetic
uuucaacagauagaagagaau

SEQ ID NO: 60123 - RNA, 22 nt, Artificial Sequence
  Synthetic
uuuucaacagauagaagagaau

SEQ ID NO: 60124 - RNA, 23 nt, Artificial Sequence
  Synthetic
auuuucaacagauagaagagaau

SEQ ID NO: 60125 - RNA, 21 nt, Artificial Sequence
  Synthetic
agggaagaaauaauagagaau

SEQ ID NO: 60126 - RNA, 22 nt, Artificial Sequence
  Synthetic
cagggaagaaauaauagagaau

SEQ ID NO: 60127 - RNA, 23 nt, Artificial Sequence
  Synthetic
ccagggaagaaauaauagagaau

SEQ ID NO: 60128 - RNA, 24 nt, Artificial Sequence
  Synthetic
cccagggaagaaauaauagagaau

SEQ ID NO: 60129 - RNA, 21 nt, Artificial Sequence
  Synthetic
aauacaaaaauauuagagaau

SEQ ID NO: 60130 - RNA, 23 nt, Artificial Sequence
  Synthetic
agaauacaaaaauauuagagaau

SEQ ID NO: 60131 - RNA, 18 nt, Artificial Sequence
  Synthetic
cucauucuacaugagaau

SEQ ID NO: 60132 - RNA, 19 nt, Artificial Sequence
  Synthetic
ucucauucuacaugagaau

SEQ ID NO: 60133 - RNA, 20 nt, Artificial Sequence
  Synthetic
uucucauucuacaugagaau

SEQ ID NO: 60134 - RNA, 21 nt, Artificial Sequence
  Synthetic
cuucucauucuacaugagaau

SEQ ID NO: 60135 - RNA, 22 nt, Artificial Sequence
  Synthetic
ucuucucauucuacaugagaau

SEQ ID NO: 60136 - RNA, 24 nt, Artificial Sequence
  Synthetic
ugucuucucauucuacaugagaau

SEQ ID NO: 60137 - RNA, 19 nt, Artificial Sequence
  Synthetic
uggugcgagaccugagaau

SEQ ID NO: 60138 - RNA, 20 nt, Artificial Sequence
  Synthetic
cuggugcgagaccugagaau

SEQ ID NO: 60139 - RNA, 18 nt, Artificial Sequence
  Synthetic
uauuaccaaguugagaau

SEQ ID NO: 60140 - RNA, 19 nt, Artificial Sequence
  Synthetic
auauuaccaaguugagaau

SEQ ID NO: 60141 - RNA, 20 nt, Artificial Sequence
  Synthetic
uauauuaccaaguugagaau

SEQ ID NO: 60142 - RNA, 19 nt, Artificial Sequence
  Synthetic
aggaucaguaaaauagaau

SEQ ID NO: 60143 - RNA, 20 nt, Artificial Sequence
  Synthetic
uaggaucaguaaaauagaau

SEQ ID NO: 60144 - RNA, 21 nt, Artificial Sequence
  Synthetic
uuaggaucaguaaaauagaau

SEQ ID NO: 60145 - RNA, 22 nt, Artificial Sequence
  Synthetic
auuaggaucaguaaaauagaau

SEQ ID NO: 60146 - RNA, 23 nt, Artificial Sequence
  Synthetic
aauuaggaucaguaaaauagaau

SEQ ID NO: 60147 - RNA, 24 nt, Artificial Sequence
  Synthetic
caauuaggaucaguaaaauagaau

SEQ ID NO: 60148 - RNA, 18 nt, Artificial Sequence
  Synthetic
ucaaugugguacuagaau

SEQ ID NO: 60149 - RNA, 20 nt, Artificial Sequence
  Synthetic
agucaaugugguacuagaau

SEQ ID NO: 60150 - RNA, 21 nt, Artificial Sequence
  Synthetic
aagucaaugugguacuagaau

SEQ ID NO: 60151 - RNA, 22 nt, Artificial Sequence
  Synthetic
uaagucaaugugguacuagaau

SEQ ID NO: 60152 - RNA, 23 nt, Artificial Sequence
  Synthetic
uuaagucaaugugguacuagaau

SEQ ID NO: 60153 - RNA, 24 nt, Artificial Sequence
  Synthetic
auuaagucaaugugguacuagaau

SEQ ID NO: 60154 - RNA, 20 nt, Artificial Sequence
  Synthetic
aggucuuuucauucuagaau

SEQ ID NO: 60155 - RNA, 21 nt, Artificial Sequence
  Synthetic
aaggucuuuucauucuagaau

SEQ ID NO: 60156 - RNA, 22 nt, Artificial Sequence
  Synthetic
uaaggucuuuucauucuagaau

SEQ ID NO: 60157 - RNA, 23 nt, Artificial Sequence
  Synthetic
uuaaggucuuuucauucuagaau

SEQ ID NO: 60158 - RNA, 18 nt, Artificial Sequence
  Synthetic
cacaaaaaagaguagaau

SEQ ID NO: 60159 - RNA, 19 nt, Artificial Sequence
  Synthetic
acacaaaaaagaguagaau

SEQ ID NO: 60160 - RNA, 20 nt, Artificial Sequence
  Synthetic
uacacaaaaaagaguagaau

SEQ ID NO: 60161 - RNA, 21 nt, Artificial Sequence
  Synthetic
auacacaaaaaagaguagaau

SEQ ID NO: 60162 - RNA, 22 nt, Artificial Sequence
  Synthetic
aauacacaaaaaagaguagaau

SEQ ID NO: 60163 - RNA, 23 nt, Artificial Sequence
  Synthetic
aaauacacaaaaaagaguagaau

SEQ ID NO: 60164 - RNA, 24 nt, Artificial Sequence
  Synthetic
aaaauacacaaaaaagaguagaau

SEQ ID NO: 60165 - RNA, 18 nt, Artificial Sequence
  Synthetic
cauagaaauacguagaau

SEQ ID NO: 60166 - RNA, 19 nt, Artificial Sequence
  Synthetic
ucauagaaauacguagaau

SEQ ID NO: 60167 - RNA, 20 nt, Artificial Sequence
  Synthetic
uucauagaaauacguagaau

SEQ ID NO: 60168 - RNA, 21 nt, Artificial Sequence
  Synthetic
uuucauagaaauacguagaau

SEQ ID NO: 60169 - RNA, 22 nt, Artificial Sequence
  Synthetic
uuuucauagaaauacguagaau

SEQ ID NO: 60170 - RNA, 24 nt, Artificial Sequence
  Synthetic
uguuuucauagaaauacguagaau

SEQ ID NO: 60171 - RNA, 18 nt, Artificial Sequence
  Synthetic
auauugaauguuuagaau

SEQ ID NO: 60172 - RNA, 19 nt, Artificial Sequence
  Synthetic
aauauugaauguuuagaau

SEQ ID NO: 60173 - RNA, 20 nt, Artificial Sequence
  Synthetic
uaauauugaauguuuagaau

SEQ ID NO: 60174 - RNA, 21 nt, Artificial Sequence
  Synthetic
uuaauauugaauguuuagaau

SEQ ID NO: 60175 - RNA, 23 nt, Artificial Sequence
  Synthetic
uguuaauauugaauguuuagaau

SEQ ID NO: 60176 - RNA, 24 nt, Artificial Sequence
  Synthetic
cuguuaauauugaauguuuagaau

SEQ ID NO: 60177 - RNA, 18 nt, Artificial Sequence
  Synthetic
acuguaauauuuuagaau

SEQ ID NO: 60178 - RNA, 19 nt, Artificial Sequence
  Synthetic
cacuguaauauuuuagaau

SEQ ID NO: 60179 - RNA, 21 nt, Artificial Sequence
  Synthetic
ugcacuguaauauuuuagaau

SEQ ID NO: 60180 - RNA, 23 nt, Artificial Sequence
  Synthetic
agugcacuguaauauuuuagaau

SEQ ID NO: 60181 - RNA, 18 nt, Artificial Sequence
  Synthetic
uguaacucuuuaacgaau

SEQ ID NO: 60182 - RNA, 21 nt, Artificial Sequence
  Synthetic
ugguguaacucuuuaacgaau

SEQ ID NO: 60183 - RNA, 22 nt, Artificial Sequence
  Synthetic
uugguguaacucuuuaacgaau

SEQ ID NO: 60184 - RNA, 24 nt, Artificial Sequence
  Synthetic
uguugguguaacucuuuaacgaau

SEQ ID NO: 60185 - RNA, 19 nt, Artificial Sequence
  Synthetic
ugaaaaguacauuucgaau

SEQ ID NO: 60186 - RNA, 20 nt, Artificial Sequence
  Synthetic
augaaaaguacauuucgaau

SEQ ID NO: 60187 - RNA, 21 nt, Artificial Sequence
  Synthetic
aaugaaaaguacauuucgaau

SEQ ID NO: 60188 - RNA, 23 nt, Artificial Sequence
  Synthetic
agaaugaaaaguacauuucgaau

SEQ ID NO: 60189 - RNA, 24 nt, Artificial Sequence
  Synthetic
aagaaugaaaaguacauuucgaau

SEQ ID NO: 60190 - RNA, 18 nt, Artificial Sequence
  Synthetic
uaaaaucugugaaggaau

SEQ ID NO: 60191 - RNA, 20 nt, Artificial Sequence
  Synthetic
aguaaaaucugugaaggaau

SEQ ID NO: 60192 - RNA, 21 nt, Artificial Sequence
  Synthetic
caguaaaaucugugaaggaau

SEQ ID NO: 60193 - RNA, 22 nt, Artificial Sequence
  Synthetic
acaguaaaaucugugaaggaau

SEQ ID NO: 60194 - RNA, 23 nt, Artificial Sequence
  Synthetic
uacaguaaaaucugugaaggaau

SEQ ID NO: 60195 - RNA, 18 nt, Artificial Sequence
  Synthetic
caaguaaaccuaaggaau

SEQ ID NO: 60196 - RNA, 19 nt, Artificial Sequence
  Synthetic
acaaguaaaccuaaggaau

SEQ ID NO: 60197 - RNA, 22 nt, Artificial Sequence
  Synthetic
aggacaaguaaaccuaaggaau

SEQ ID NO: 60198 - RNA, 23 nt, Artificial Sequence
  Synthetic
uaggacaaguaaaccuaaggaau

SEQ ID NO: 60199 - RNA, 24 nt, Artificial Sequence
  Synthetic
uuaggacaaguaaaccuaaggaau

SEQ ID NO: 60200 - RNA, 19 nt, Artificial Sequence
  Synthetic
ugguauaauguuaaggaau

SEQ ID NO: 60201 - RNA, 20 nt, Artificial Sequence
  Synthetic
augguauaauguuaaggaau

SEQ ID NO: 60202 - RNA, 21 nt, Artificial Sequence
  Synthetic
uaugguauaauguuaaggaau

SEQ ID NO: 60203 - RNA, 22 nt, Artificial Sequence
  Synthetic
auaugguauaauguuaaggaau

SEQ ID NO: 60204 - RNA, 23 nt, Artificial Sequence
  Synthetic
aauaugguauaauguuaaggaau

SEQ ID NO: 60205 - RNA, 24 nt, Artificial Sequence
  Synthetic
caauaugguauaauguuaaggaau

SEQ ID NO: 60206 - RNA, 18 nt, Artificial Sequence
  Synthetic
cauuguugucccaggaau

SEQ ID NO: 60207 - RNA, 19 nt, Artificial Sequence
  Synthetic
acauuguugucccaggaau

SEQ ID NO: 60208 - RNA, 20 nt, Artificial Sequence
  Synthetic
cacauuguugucccaggaau

SEQ ID NO: 60209 - RNA, 21 nt, Artificial Sequence
  Synthetic
ucacauuguugucccaggaau

SEQ ID NO: 60210 - RNA, 22 nt, Artificial Sequence
  Synthetic
aucacauuguugucccaggaau

SEQ ID NO: 60211 - RNA, 23 nt, Artificial Sequence
  Synthetic
caucacauuguugucccaggaau

SEQ ID NO: 60212 - RNA, 24 nt, Artificial Sequence
  Synthetic
ccaucacauuguugucccaggaau

SEQ ID NO: 60213 - RNA, 18 nt, Artificial Sequence
  Synthetic
acaguggaagccaggaau

SEQ ID NO: 60214 - RNA, 19 nt, Artificial Sequence
  Synthetic
aacaguggaagccaggaau

SEQ ID NO: 60215 - RNA, 20 nt, Artificial Sequence
  Synthetic
caacaguggaagccaggaau

SEQ ID NO: 60216 - RNA, 21 nt, Artificial Sequence
  Synthetic
acaacaguggaagccaggaau

SEQ ID NO: 60217 - RNA, 22 nt, Artificial Sequence
  Synthetic
aacaacaguggaagccaggaau

SEQ ID NO: 60218 - RNA, 23 nt, Artificial Sequence
  Synthetic
aaacaacaguggaagccaggaau

SEQ ID NO: 60219 - RNA, 24 nt, Artificial Sequence
  Synthetic
aaaacaacaguggaagccaggaau

SEQ ID NO: 60220 - RNA, 21 nt, Artificial Sequence
  Synthetic
cccaaucuugaaagcaggaau

SEQ ID NO: 60221 - RNA, 22 nt, Artificial Sequence
  Synthetic
ccccaaucuugaaagcaggaau

SEQ ID NO: 60222 - RNA, 23 nt, Artificial Sequence
  Synthetic
cccccaaucuugaaagcaggaau

SEQ ID NO: 60223 - RNA, 24 nt, Artificial Sequence
  Synthetic
acccccaaucuugaaagcaggaau

SEQ ID NO: 60224 - RNA, 20 nt, Artificial Sequence
  Synthetic
ugguuucuaaauagaggaau

SEQ ID NO: 60225 - RNA, 21 nt, Artificial Sequence
  Synthetic
cugguuucuaaauagaggaau

SEQ ID NO: 60226 - RNA, 22 nt, Artificial Sequence
  Synthetic
ucugguuucuaaauagaggaau

SEQ ID NO: 60227 - RNA, 18 nt, Artificial Sequence
  Synthetic
aaaauuuccuugaggaau

SEQ ID NO: 60228 - RNA, 19 nt, Artificial Sequence
  Synthetic
uaaaauuuccuugaggaau

SEQ ID NO: 60229 - RNA, 21 nt, Artificial Sequence
  Synthetic
aguaaaauuuccuugaggaau

SEQ ID NO: 60230 - RNA, 22 nt, Artificial Sequence
  Synthetic
aaguaaaauuuccuugaggaau

SEQ ID NO: 60231 - RNA, 24 nt, Artificial Sequence
  Synthetic
agaaguaaaauuuccuugaggaau

SEQ ID NO: 60232 - RNA, 18 nt, Artificial Sequence
  Synthetic
uuuauaauacaggggaau

SEQ ID NO: 60233 - RNA, 19 nt, Artificial Sequence
  Synthetic
auuuauaauacaggggaau

SEQ ID NO: 60234 - RNA, 20 nt, Artificial Sequence
  Synthetic
cauuuauaauacaggggaau

SEQ ID NO: 60235 - RNA, 21 nt, Artificial Sequence
  Synthetic
ucauuuauaauacaggggaau

SEQ ID NO: 60236 - RNA, 23 nt, Artificial Sequence
  Synthetic
agucauuuauaauacaggggaau

SEQ ID NO: 60237 - RNA, 24 nt, Artificial Sequence
  Synthetic
aagucauuuauaauacaggggaau

SEQ ID NO: 60238 - RNA, 18 nt, Artificial Sequence
  Synthetic
uuccuuguaauggggaau

SEQ ID NO: 60239 - RNA, 19 nt, Artificial Sequence
  Synthetic
cuuccuuguaauggggaau

SEQ ID NO: 60240 - RNA, 20 nt, Artificial Sequence
  Synthetic
ccuuccuuguaauggggaau

SEQ ID NO: 60241 - RNA, 21 nt, Artificial Sequence
  Synthetic
accuuccuuguaauggggaau

SEQ ID NO: 60242 - RNA, 22 nt, Artificial Sequence
  Synthetic
uaccuuccuuguaauggggaau

SEQ ID NO: 60243 - RNA, 23 nt, Artificial Sequence
  Synthetic
cuaccuuccuuguaauggggaau

SEQ ID NO: 60244 - RNA, 24 nt, Artificial Sequence
  Synthetic
ucuaccuuccuuguaauggggaau

SEQ ID NO: 60245 - RNA, 18 nt, Artificial Sequence
  Synthetic
uuaagacaaaaugggaau

SEQ ID NO: 60246 - RNA, 19 nt, Artificial Sequence
  Synthetic
cuuaagacaaaaugggaau

SEQ ID NO: 60247 - RNA, 20 nt, Artificial Sequence
  Synthetic
acuuaagacaaaaugggaau

SEQ ID NO: 60248 - RNA, 21 nt, Artificial Sequence
  Synthetic
aacuuaagacaaaaugggaau

SEQ ID NO: 60249 - RNA, 22 nt, Artificial Sequence
  Synthetic
uaacuuaagacaaaaugggaau

SEQ ID NO: 60250 - RNA, 23 nt, Artificial Sequence
  Synthetic
auaacuuaagacaaaaugggaau

SEQ ID NO: 60251 - RNA, 24 nt, Artificial Sequence
  Synthetic
uauaacuuaagacaaaaugggaau

SEQ ID NO: 60252 - RNA, 19 nt, Artificial Sequence
  Synthetic
agaagcccguaaauggaau

SEQ ID NO: 60253 - RNA, 20 nt, Artificial Sequence
  Synthetic
aagaagcccguaaauggaau

SEQ ID NO: 60254 - RNA, 23 nt, Artificial Sequence
  Synthetic
uggaagaagcccguaaauggaau

SEQ ID NO: 60255 - RNA, 24 nt, Artificial Sequence
  Synthetic
uuggaagaagcccguaaauggaau

SEQ ID NO: 60256 - RNA, 20 nt, Artificial Sequence
  Synthetic
ugguagaguguaacuggaau

SEQ ID NO: 60257 - RNA, 22 nt, Artificial Sequence
  Synthetic
ugugguagaguguaacuggaau

SEQ ID NO: 60258 - RNA, 24 nt, Artificial Sequence
  Synthetic
agugugguagaguguaacuggaau

SEQ ID NO: 60259 - RNA, 20 nt, Artificial Sequence
  Synthetic
uggauuuugauguguggaau

SEQ ID NO: 60260 - RNA, 21 nt, Artificial Sequence
  Synthetic
auggauuuugauguguggaau

SEQ ID NO: 60261 - RNA, 22 nt, Artificial Sequence
  Synthetic
uauggauuuugauguguggaau

SEQ ID NO: 60262 - RNA, 23 nt, Artificial Sequence
  Synthetic
auauggauuuugauguguggaau

SEQ ID NO: 60263 - RNA, 19 nt, Artificial Sequence
  Synthetic
aguggcaaucuguuggaau

SEQ ID NO: 60264 - RNA, 20 nt, Artificial Sequence
  Synthetic
aaguggcaaucuguuggaau

SEQ ID NO: 60265 - RNA, 21 nt, Artificial Sequence
  Synthetic
aaaguggcaaucuguuggaau

SEQ ID NO: 60266 - RNA, 22 nt, Artificial Sequence
  Synthetic
uaaaguggcaaucuguuggaau

SEQ ID NO: 60267 - RNA, 24 nt, Artificial Sequence
  Synthetic
uguaaaguggcaaucuguuggaau

SEQ ID NO: 60268 - RNA, 18 nt, Artificial Sequence
  Synthetic
cuucauuccauuuggaau

SEQ ID NO: 60269 - RNA, 19 nt, Artificial Sequence
  Synthetic
acuucauuccauuuggaau

SEQ ID NO: 60270 - RNA, 20 nt, Artificial Sequence
  Synthetic
uacuucauuccauuuggaau

SEQ ID NO: 60271 - RNA, 21 nt, Artificial Sequence
  Synthetic
uuacuucauuccauuuggaau

SEQ ID NO: 60272 - RNA, 22 nt, Artificial Sequence
  Synthetic
uuuacuucauuccauuuggaau

SEQ ID NO: 60273 - RNA, 23 nt, Artificial Sequence
  Synthetic
uuuuacuucauuccauuuggaau

SEQ ID NO: 60274 - RNA, 24 nt, Artificial Sequence
  Synthetic
uuuuuacuucauuccauuuggaau

SEQ ID NO: 60275 - RNA, 21 nt, Artificial Sequence
  Synthetic
uggguagucagagaaaugaau

SEQ ID NO: 60276 - RNA, 22 nt, Artificial Sequence
  Synthetic
uuggguagucagagaaaugaau

SEQ ID NO: 60277 - RNA, 19 nt, Artificial Sequence
  Synthetic
uguugcuuaaacaaugaau

SEQ ID NO: 60278 - RNA, 20 nt, Artificial Sequence
  Synthetic
uuguugcuuaaacaaugaau

SEQ ID NO: 60279 - RNA, 21 nt, Artificial Sequence
  Synthetic
auuguugcuuaaacaaugaau

SEQ ID NO: 60280 - RNA, 22 nt, Artificial Sequence
  Synthetic
uauuguugcuuaaacaaugaau

SEQ ID NO: 60281 - RNA, 23 nt, Artificial Sequence
  Synthetic
uuauuguugcuuaaacaaugaau

SEQ ID NO: 60282 - RNA, 24 nt, Artificial Sequence
  Synthetic
uuuauuguugcuuaaacaaugaau

SEQ ID NO: 60283 - RNA, 18 nt, Artificial Sequence
  Synthetic
ucaaaaauuccaaugaau

SEQ ID NO: 60284 - RNA, 19 nt, Artificial Sequence
  Synthetic
uucaaaaauuccaaugaau

SEQ ID NO: 60285 - RNA, 20 nt, Artificial Sequence
  Synthetic
uuucaaaaauuccaaugaau

SEQ ID NO: 60286 - RNA, 21 nt, Artificial Sequence
  Synthetic
uuuucaaaaauuccaaugaau

SEQ ID NO: 60287 - RNA, 22 nt, Artificial Sequence
  Synthetic
uuuuucaaaaauuccaaugaau

SEQ ID NO: 60288 - RNA, 23 nt, Artificial Sequence
  Synthetic
auuuuucaaaaauuccaaugaau

SEQ ID NO: 60289 - RNA, 24 nt, Artificial Sequence
  Synthetic
cauuuuucaaaaauuccaaugaau

SEQ ID NO: 60290 - RNA, 18 nt, Artificial Sequence
  Synthetic
uaaggguauucaaugaau

SEQ ID NO: 60291 - RNA, 19 nt, Artificial Sequence
  Synthetic
cuaaggguauucaaugaau

SEQ ID NO: 60292 - RNA, 20 nt, Artificial Sequence
  Synthetic
ucuaaggguauucaaugaau

SEQ ID NO: 60293 - RNA, 21 nt, Artificial Sequence
  Synthetic
cucuaaggguauucaaugaau

SEQ ID NO: 60294 - RNA, 22 nt, Artificial Sequence
  Synthetic
acucuaaggguauucaaugaau

SEQ ID NO: 60295 - RNA, 23 nt, Artificial Sequence
  Synthetic
aacucuaaggguauucaaugaau

SEQ ID NO: 60296 - RNA, 24 nt, Artificial Sequence
  Synthetic
uaacucuaaggguauucaaugaau

SEQ ID NO: 60297 - RNA, 18 nt, Artificial Sequence
  Synthetic
uagagcaugggaaugaau

SEQ ID NO: 60298 - RNA, 21 nt, Artificial Sequence
  Synthetic
ugguagagcaugggaaugaau

SEQ ID NO: 60299 - RNA, 22 nt, Artificial Sequence
  Synthetic
augguagagcaugggaaugaau

SEQ ID NO: 60300 - RNA, 23 nt, Artificial Sequence
  Synthetic
uaugguagagcaugggaaugaau

SEQ ID NO: 60301 - RNA, 24 nt, Artificial Sequence
  Synthetic
uuaugguagagcaugggaaugaau

SEQ ID NO: 60302 - RNA, 18 nt, Artificial Sequence
  Synthetic
auauauaaugucaugaau

SEQ ID NO: 60303 - RNA, 20 nt, Artificial Sequence
  Synthetic
agauauauaaugucaugaau

SEQ ID NO: 60304 - RNA, 21 nt, Artificial Sequence
  Synthetic
aagauauauaaugucaugaau

SEQ ID NO: 60305 - RNA, 22 nt, Artificial Sequence
  Synthetic
aaagauauauaaugucaugaau

SEQ ID NO: 60306 - RNA, 23 nt, Artificial Sequence
  Synthetic
aaaagauauauaaugucaugaau

SEQ ID NO: 60307 - RNA, 24 nt, Artificial Sequence
  Synthetic
aaaaagauauauaaugucaugaau

SEQ ID NO: 60308 - RNA, 19 nt, Artificial Sequence
  Synthetic
aguagaaacaaaagugaau

SEQ ID NO: 60309 - RNA, 20 nt, Artificial Sequence
  Synthetic
aaguagaaacaaaagugaau

SEQ ID NO: 60310 - RNA, 21 nt, Artificial Sequence
  Synthetic
uaaguagaaacaaaagugaau

SEQ ID NO: 60311 - RNA, 22 nt, Artificial Sequence
  Synthetic
uuaaguagaaacaaaagugaau

SEQ ID NO: 60312 - RNA, 23 nt, Artificial Sequence
  Synthetic
auuaaguagaaacaaaagugaau

SEQ ID NO: 60313 - RNA, 24 nt, Artificial Sequence
  Synthetic
aauuaaguagaaacaaaagugaau

SEQ ID NO: 60314 - RNA, 18 nt, Artificial Sequence
  Synthetic
ugucauacugaagugaau

SEQ ID NO: 60315 - RNA, 19 nt, Artificial Sequence
  Synthetic
uugucauacugaagugaau

SEQ ID NO: 60316 - RNA, 20 nt, Artificial Sequence
  Synthetic
cuugucauacugaagugaau

SEQ ID NO: 60317 - RNA, 21 nt, Artificial Sequence
  Synthetic
ucuugucauacugaagugaau

SEQ ID NO: 60318 - RNA, 22 nt, Artificial Sequence
  Synthetic
uucuugucauacugaagugaau

SEQ ID NO: 60319 - RNA, 23 nt, Artificial Sequence
  Synthetic
uuucuugucauacugaagugaau

SEQ ID NO: 60320 - RNA, 24 nt, Artificial Sequence
  Synthetic
uuuucuugucauacugaagugaau

SEQ ID NO: 60321 - RNA, 18 nt, Artificial Sequence
  Synthetic
auuacuaagugagugaau

SEQ ID NO: 60322 - RNA, 19 nt, Artificial Sequence
  Synthetic
uauuacuaagugagugaau

SEQ ID NO: 60323 - RNA, 20 nt, Artificial Sequence
  Synthetic
cuauuacuaagugagugaau

SEQ ID NO: 60324 - RNA, 22 nt, Artificial Sequence
  Synthetic
agcuauuacuaagugagugaau

SEQ ID NO: 60325 - RNA, 23 nt, Artificial Sequence
  Synthetic
aagcuauuacuaagugagugaau

SEQ ID NO: 60326 - RNA, 18 nt, Artificial Sequence
  Synthetic
uucauuuugugagugaau

SEQ ID NO: 60327 - RNA, 19 nt, Artificial Sequence
  Synthetic
auucauuuugugagugaau

SEQ ID NO: 60328 - RNA, 20 nt, Artificial Sequence
  Synthetic
uauucauuuugugagugaau

SEQ ID NO: 60329 - RNA, 21 nt, Artificial Sequence
  Synthetic
uuauucauuuugugagugaau

SEQ ID NO: 60330 - RNA, 22 nt, Artificial Sequence
  Synthetic
uuuauucauuuugugagugaau

SEQ ID NO: 60331 - RNA, 23 nt, Artificial Sequence
  Synthetic
cuuuauucauuuugugagugaau

SEQ ID NO: 60332 - RNA, 24 nt, Artificial Sequence
  Synthetic
ucuuuauucauuuugugagugaau

SEQ ID NO: 60333 - RNA, 18 nt, Artificial Sequence
  Synthetic
accgguugcacggugaau

SEQ ID NO: 60334 - RNA, 19 nt, Artificial Sequence
  Synthetic
uaccgguugcacggugaau

SEQ ID NO: 60335 - RNA, 20 nt, Artificial Sequence
  Synthetic
auaccgguugcacggugaau

SEQ ID NO: 60336 - RNA, 21 nt, Artificial Sequence
  Synthetic
aauaccgguugcacggugaau

SEQ ID NO: 60337 - RNA, 22 nt, Artificial Sequence
  Synthetic
aaauaccgguugcacggugaau

SEQ ID NO: 60338 - RNA, 23 nt, Artificial Sequence
  Synthetic
uaaauaccgguugcacggugaau

SEQ ID NO: 60339 - RNA, 24 nt, Artificial Sequence
  Synthetic
uuaaauaccgguugcacggugaau

SEQ ID NO: 60340 - RNA, 19 nt, Artificial Sequence
  Synthetic
uguuaaucuuugggugaau

SEQ ID NO: 60341 - RNA, 20 nt, Artificial Sequence
  Synthetic
auguuaaucuuugggugaau

SEQ ID NO: 60342 - RNA, 21 nt, Artificial Sequence
  Synthetic
aauguuaaucuuugggugaau

SEQ ID NO: 60343 - RNA, 22 nt, Artificial Sequence
  Synthetic
aaauguuaaucuuugggugaau

SEQ ID NO: 60344 - RNA, 18 nt, Artificial Sequence
  Synthetic
acaagagaaucugugaau

SEQ ID NO: 60345 - RNA, 19 nt, Artificial Sequence
  Synthetic
aacaagagaaucugugaau

SEQ ID NO: 60346 - RNA, 20 nt, Artificial Sequence
  Synthetic
uaacaagagaaucugugaau

SEQ ID NO: 60347 - RNA, 21 nt, Artificial Sequence
  Synthetic
auaacaagagaaucugugaau

SEQ ID NO: 60348 - RNA, 23 nt, Artificial Sequence
  Synthetic
agauaacaagagaaucugugaau

SEQ ID NO: 60349 - RNA, 24 nt, Artificial Sequence
  Synthetic
aagauaacaagagaaucugugaau

SEQ ID NO: 60350 - RNA, 21 nt, Artificial Sequence
  Synthetic
ucacaucuagaccaauugaau

SEQ ID NO: 60351 - RNA, 22 nt, Artificial Sequence
  Synthetic
aucacaucuagaccaauugaau

SEQ ID NO: 60352 - RNA, 24 nt, Artificial Sequence
  Synthetic
agaucacaucuagaccaauugaau

SEQ ID NO: 60353 - RNA, 18 nt, Artificial Sequence
  Synthetic
aguugugaccaauugaau

SEQ ID NO: 60354 - RNA, 19 nt, Artificial Sequence
  Synthetic
uaguugugaccaauugaau

SEQ ID NO: 60355 - RNA, 20 nt, Artificial Sequence
  Synthetic
cuaguugugaccaauugaau

SEQ ID NO: 60356 - RNA, 21 nt, Artificial Sequence
  Synthetic
acuaguugugaccaauugaau

SEQ ID NO: 60357 - RNA, 23 nt, Artificial Sequence
  Synthetic
ugacuaguugugaccaauugaau

SEQ ID NO: 60358 - RNA, 22 nt, Artificial Sequence
  Synthetic
agaucauggauaucaauugaau

SEQ ID NO: 60359 - RNA, 18 nt, Artificial Sequence
  Synthetic
uuuuacgucagauugaau

SEQ ID NO: 60360 - RNA, 19 nt, Artificial Sequence
  Synthetic
cuuuuacgucagauugaau

SEQ ID NO: 60361 - RNA, 20 nt, Artificial Sequence
  Synthetic
acuuuuacgucagauugaau

SEQ ID NO: 60362 - RNA, 21 nt, Artificial Sequence
  Synthetic
cacuuuuacgucagauugaau

SEQ ID NO: 60363 - RNA, 22 nt, Artificial Sequence
  Synthetic
ccacuuuuacgucagauugaau

SEQ ID NO: 60364 - RNA, 23 nt, Artificial Sequence
  Synthetic
uccacuuuuacgucagauugaau

SEQ ID NO: 60365 - RNA, 24 nt, Artificial Sequence
  Synthetic
uuccacuuuuacgucagauugaau

SEQ ID NO: 60366 - RNA, 18 nt, Artificial Sequence
  Synthetic
uuccaaagacuauugaau

SEQ ID NO: 60367 - RNA, 19 nt, Artificial Sequence
  Synthetic
auuccaaagacuauugaau

SEQ ID NO: 60368 - RNA, 20 nt, Artificial Sequence
  Synthetic
uauuccaaagacuauugaau

SEQ ID NO: 60369 - RNA, 22 nt, Artificial Sequence
  Synthetic
uguauuccaaagacuauugaau

SEQ ID NO: 60370 - RNA, 23 nt, Artificial Sequence
  Synthetic
uuguauuccaaagacuauugaau

SEQ ID NO: 60371 - RNA, 24 nt, Artificial Sequence
  Synthetic
cuuguauuccaaagacuauugaau

SEQ ID NO: 60372 - RNA, 18 nt, Artificial Sequence
  Synthetic
aaaagaaugguauugaau

SEQ ID NO: 60373 - RNA, 19 nt, Artificial Sequence
  Synthetic
aaaaagaaugguauugaau

SEQ ID NO: 60374 - RNA, 22 nt, Artificial Sequence
  Synthetic
uggaaaaagaaugguauugaau

SEQ ID NO: 60375 - RNA, 23 nt, Artificial Sequence
  Synthetic
auggaaaaagaaugguauugaau

SEQ ID NO: 60376 - RNA, 24 nt, Artificial Sequence
  Synthetic
uauggaaaaagaaugguauugaau

SEQ ID NO: 60377 - RNA, 18 nt, Artificial Sequence
  Synthetic
cuguuuuguuacuugaau

SEQ ID NO: 60378 - RNA, 20 nt, Artificial Sequence
  Synthetic
agcuguuuuguuacuugaau

SEQ ID NO: 60379 - RNA, 21 nt, Artificial Sequence
  Synthetic
aagcuguuuuguuacuugaau

SEQ ID NO: 60380 - RNA, 22 nt, Artificial Sequence
  Synthetic
uaagcuguuuuguuacuugaau

SEQ ID NO: 60381 - RNA, 23 nt, Artificial Sequence
  Synthetic
uuaagcuguuuuguuacuugaau

SEQ ID NO: 60382 - RNA, 24 nt, Artificial Sequence
  Synthetic
auuaagcuguuuuguuacuugaau

SEQ ID NO: 60383 - RNA, 19 nt, Artificial Sequence
  Synthetic
uggauaaacagccuugaau

SEQ ID NO: 60384 - RNA, 20 nt, Artificial Sequence
  Synthetic
uuggauaaacagccuugaau

SEQ ID NO: 60385 - RNA, 21 nt, Artificial Sequence
  Synthetic
cuuggauaaacagccuugaau

SEQ ID NO: 60386 - RNA, 22 nt, Artificial Sequence
  Synthetic
ucuuggauaaacagccuugaau

SEQ ID NO: 60387 - RNA, 23 nt, Artificial Sequence
  Synthetic
cucuuggauaaacagccuugaau

SEQ ID NO: 60388 - RNA, 24 nt, Artificial Sequence
  Synthetic
acucuuggauaaacagccuugaau

SEQ ID NO: 60389 - RNA, 19 nt, Artificial Sequence
  Synthetic
ugagaacaguuucuugaau

SEQ ID NO: 60390 - RNA, 20 nt, Artificial Sequence
  Synthetic
uugagaacaguuucuugaau

SEQ ID NO: 60391 - RNA, 21 nt, Artificial Sequence
  Synthetic
cuugagaacaguuucuugaau

SEQ ID NO: 60392 - RNA, 22 nt, Artificial Sequence
  Synthetic
acuugagaacaguuucuugaau

SEQ ID NO: 60393 - RNA, 23 nt, Artificial Sequence
  Synthetic
aacuugagaacaguuucuugaau

SEQ ID NO: 60394 - RNA, 24 nt, Artificial Sequence
  Synthetic
aaacuugagaacaguuucuugaau

SEQ ID NO: 60395 - RNA, 18 nt, Artificial Sequence
  Synthetic
uaguuaacauauuugaau

SEQ ID NO: 60396 - RNA, 19 nt, Artificial Sequence
  Synthetic
uuaguuaacauauuugaau

SEQ ID NO: 60397 - RNA, 20 nt, Artificial Sequence
  Synthetic
uuuaguuaacauauuugaau

SEQ ID NO: 60398 - RNA, 21 nt, Artificial Sequence
  Synthetic
cuuuaguuaacauauuugaau

SEQ ID NO: 60399 - RNA, 22 nt, Artificial Sequence
  Synthetic
acuuuaguuaacauauuugaau

SEQ ID NO: 60400 - RNA, 23 nt, Artificial Sequence
  Synthetic
uacuuuaguuaacauauuugaau

SEQ ID NO: 60401 - RNA, 24 nt, Artificial Sequence
  Synthetic
uuacuuuaguuaacauauuugaau

SEQ ID NO: 60402 - RNA, 18 nt, Artificial Sequence
  Synthetic
cuuccaaccucuuugaau

SEQ ID NO: 60403 - RNA, 19 nt, Artificial Sequence
  Synthetic
ccuuccaaccucuuugaau

SEQ ID NO: 60404 - RNA, 20 nt, Artificial Sequence
  Synthetic
cccuuccaaccucuuugaau

SEQ ID NO: 60405 - RNA, 21 nt, Artificial Sequence
  Synthetic
ccccuuccaaccucuuugaau

SEQ ID NO: 60406 - RNA, 23 nt, Artificial Sequence
  Synthetic
ugccccuuccaaccucuuugaau

SEQ ID NO: 60407 - RNA, 24 nt, Artificial Sequence
  Synthetic
cugccccuuccaaccucuuugaau

SEQ ID NO: 60408 - RNA, 18 nt, Artificial Sequence
  Synthetic
uuuuuaaguuguuugaau

SEQ ID NO: 60409 - RNA, 19 nt, Artificial Sequence
  Synthetic
uuuuuuaaguuguuugaau

SEQ ID NO: 60410 - RNA, 20 nt, Artificial Sequence
  Synthetic
cuuuuuuaaguuguuugaau

SEQ ID NO: 60411 - RNA, 21 nt, Artificial Sequence
  Synthetic
acuuuuuuaaguuguuugaau

SEQ ID NO: 60412 - RNA, 22 nt, Artificial Sequence
  Synthetic
aacuuuuuuaaguuguuugaau

SEQ ID NO: 60413 - RNA, 23 nt, Artificial Sequence
  Synthetic
uaacuuuuuuaaguuguuugaau

SEQ ID NO: 60414 - RNA, 24 nt, Artificial Sequence
  Synthetic
cuaacuuuuuuaaguuguuugaau

SEQ ID NO: 60415 - RNA, 19 nt, Artificial Sequence
  Synthetic
uggccaggaauuuuugaau

SEQ ID NO: 60416 - RNA, 20 nt, Artificial Sequence
  Synthetic
cuggccaggaauuuuugaau

SEQ ID NO: 60417 - RNA, 21 nt, Artificial Sequence
  Synthetic
ccuggccaggaauuuuugaau

SEQ ID NO: 60418 - RNA, 23 nt, Artificial Sequence
  Synthetic
cgccuggccaggaauuuuugaau

SEQ ID NO: 60419 - RNA, 21 nt, Artificial Sequence
  Synthetic
caguaauucuuuauaaauaau

SEQ ID NO: 60420 - RNA, 22 nt, Artificial Sequence
  Synthetic
acaguaauucuuuauaaauaau

SEQ ID NO: 60421 - RNA, 23 nt, Artificial Sequence
  Synthetic
uacaguaauucuuuauaaauaau

SEQ ID NO: 60422 - RNA, 19 nt, Artificial Sequence
  Synthetic
aggacuggggcuaaauaau

SEQ ID NO: 60423 - RNA, 21 nt, Artificial Sequence
  Synthetic
agaggacuggggcuaaauaau

SEQ ID NO: 60424 - RNA, 23 nt, Artificial Sequence
  Synthetic
agagaggacuggggcuaaauaau

SEQ ID NO: 60425 - RNA, 24 nt, Artificial Sequence
  Synthetic
uagagaggacuggggcuaaauaau

SEQ ID NO: 60426 - RNA, 18 nt, Artificial Sequence
  Synthetic
aaacauuugcccaauaau

SEQ ID NO: 60427 - RNA, 19 nt, Artificial Sequence
  Synthetic
aaaacauuugcccaauaau

SEQ ID NO: 60428 - RNA, 20 nt, Artificial Sequence
  Synthetic
caaaacauuugcccaauaau

SEQ ID NO: 60429 - RNA, 21 nt, Artificial Sequence
  Synthetic
ccaaaacauuugcccaauaau

SEQ ID NO: 60430 - RNA, 23 nt, Artificial Sequence
  Synthetic
agccaaaacauuugcccaauaau

SEQ ID NO: 60431 - RNA, 24 nt, Artificial Sequence
  Synthetic
aagccaaaacauuugcccaauaau

SEQ ID NO: 60432 - RNA, 18 nt, Artificial Sequence
  Synthetic
uuuaccuuuugcaauaau

SEQ ID NO: 60433 - RNA, 19 nt, Artificial Sequence
  Synthetic
cuuuaccuuuugcaauaau

SEQ ID NO: 60434 - RNA, 21 nt, Artificial Sequence
  Synthetic
ugcuuuaccuuuugcaauaau

SEQ ID NO: 60435 - RNA, 22 nt, Artificial Sequence
  Synthetic
augcuuuaccuuuugcaauaau

SEQ ID NO: 60436 - RNA, 23 nt, Artificial Sequence
  Synthetic
uaugcuuuaccuuuugcaauaau

SEQ ID NO: 60437 - RNA, 24 nt, Artificial Sequence
  Synthetic
cuaugcuuuaccuuuugcaauaau

SEQ ID NO: 60438 - RNA, 19 nt, Artificial Sequence
  Synthetic
agagccaguaccgaauaau

SEQ ID NO: 60439 - RNA, 20 nt, Artificial Sequence
  Synthetic
aagagccaguaccgaauaau

SEQ ID NO: 60440 - RNA, 21 nt, Artificial Sequence
  Synthetic
aaagagccaguaccgaauaau

SEQ ID NO: 60441 - RNA, 22 nt, Artificial Sequence
  Synthetic
aaaagagccaguaccgaauaau

SEQ ID NO: 60442 - RNA, 24 nt, Artificial Sequence
  Synthetic
agaaaagagccaguaccgaauaau

SEQ ID NO: 60443 - RNA, 18 nt, Artificial Sequence
  Synthetic
aagaccuauaauaauaau

SEQ ID NO: 60444 - RNA, 20 nt, Artificial Sequence
  Synthetic
ugaagaccuauaauaauaau

SEQ ID NO: 60445 - RNA, 21 nt, Artificial Sequence
  Synthetic
cugaagaccuauaauaauaau

SEQ ID NO: 60446 - RNA, 22 nt, Artificial Sequence
  Synthetic
acugaagaccuauaauaauaau

SEQ ID NO: 60447 - RNA, 23 nt, Artificial Sequence
  Synthetic
aacugaagaccuauaauaauaau

SEQ ID NO: 60448 - RNA, 24 nt, Artificial Sequence
  Synthetic
aaacugaagaccuauaauaauaau

SEQ ID NO: 60449 - RNA, 18 nt, Artificial Sequence
  Synthetic
agacacuagaguaauaau

SEQ ID NO: 60450 - RNA, 20 nt, Artificial Sequence
  Synthetic
agagacacuagaguaauaau

SEQ ID NO: 60451 - RNA, 21 nt, Artificial Sequence
  Synthetic
aagagacacuagaguaauaau

SEQ ID NO: 60452 - RNA, 22 nt, Artificial Sequence
  Synthetic
aaagagacacuagaguaauaau

SEQ ID NO: 60453 - RNA, 24 nt, Artificial Sequence
  Synthetic
agaaagagacacuagaguaauaau

SEQ ID NO: 60454 - RNA, 18 nt, Artificial Sequence
  Synthetic
uauuauaucuuuaauaau

SEQ ID NO: 60455 - RNA, 20 nt, Artificial Sequence
  Synthetic
uguauuauaucuuuaauaau

SEQ ID NO: 60456 - RNA, 22 nt, Artificial Sequence
  Synthetic
aguguauuauaucuuuaauaau

SEQ ID NO: 60457 - RNA, 23 nt, Artificial Sequence
  Synthetic
uaguguauuauaucuuuaauaau

SEQ ID NO: 60458 - RNA, 24 nt, Artificial Sequence
  Synthetic
uuaguguauuauaucuuuaauaau

SEQ ID NO: 60459 - RNA, 18 nt, Artificial Sequence
  Synthetic
uuauugauguuuaauaau

SEQ ID NO: 60460 - RNA, 19 nt, Artificial Sequence
  Synthetic
uuuauugauguuuaauaau

SEQ ID NO: 60461 - RNA, 20 nt, Artificial Sequence
  Synthetic
uuuuauugauguuuaauaau

SEQ ID NO: 60462 - RNA, 21 nt, Artificial Sequence
  Synthetic
auuuuauugauguuuaauaau

SEQ ID NO: 60463 - RNA, 22 nt, Artificial Sequence
  Synthetic
uauuuuauugauguuuaauaau

SEQ ID NO: 60464 - RNA, 23 nt, Artificial Sequence
  Synthetic
auauuuuauugauguuuaauaau

SEQ ID NO: 60465 - RNA, 24 nt, Artificial Sequence
  Synthetic
aauauuuuauugauguuuaauaau

SEQ ID NO: 60466 - RNA, 18 nt, Artificial Sequence
  Synthetic
aagaaauucugacauaau

SEQ ID NO: 60467 - RNA, 19 nt, Artificial Sequence
  Synthetic
uaagaaauucugacauaau

SEQ ID NO: 60468 - RNA, 20 nt, Artificial Sequence
  Synthetic
auaagaaauucugacauaau

SEQ ID NO: 60469 - RNA, 21 nt, Artificial Sequence
  Synthetic
cauaagaaauucugacauaau

SEQ ID NO: 60470 - RNA, 22 nt, Artificial Sequence
  Synthetic
acauaagaaauucugacauaau

SEQ ID NO: 60471 - RNA, 23 nt, Artificial Sequence
  Synthetic
aacauaagaaauucugacauaau

SEQ ID NO: 60472 - RNA, 24 nt, Artificial Sequence
  Synthetic
caacauaagaaauucugacauaau

SEQ ID NO: 60473 - RNA, 18 nt, Artificial Sequence
  Synthetic
cuauucacagugcauaau

SEQ ID NO: 60474 - RNA, 19 nt, Artificial Sequence
  Synthetic
ucuauucacagugcauaau

SEQ ID NO: 60475 - RNA, 20 nt, Artificial Sequence
  Synthetic
cucuauucacagugcauaau

SEQ ID NO: 60476 - RNA, 21 nt, Artificial Sequence
  Synthetic
ucucuauucacagugcauaau

SEQ ID NO: 60477 - RNA, 22 nt, Artificial Sequence
  Synthetic
uucucuauucacagugcauaau

SEQ ID NO: 60478 - RNA, 23 nt, Artificial Sequence
  Synthetic
uuucucuauucacagugcauaau

SEQ ID NO: 60479 - RNA, 24 nt, Artificial Sequence
  Synthetic
uuuucucuauucacagugcauaau

SEQ ID NO: 60480 - RNA, 19 nt, Artificial Sequence
  Synthetic
ugacucaacuucucauaau

SEQ ID NO: 60481 - RNA, 20 nt, Artificial Sequence
  Synthetic
augacucaacuucucauaau

SEQ ID NO: 60482 - RNA, 21 nt, Artificial Sequence
  Synthetic
uaugacucaacuucucauaau

SEQ ID NO: 60483 - RNA, 22 nt, Artificial Sequence
  Synthetic
cuaugacucaacuucucauaau

SEQ ID NO: 60484 - RNA, 23 nt, Artificial Sequence
  Synthetic
ccuaugacucaacuucucauaau

SEQ ID NO: 60485 - RNA, 24 nt, Artificial Sequence
  Synthetic
cccuaugacucaacuucucauaau

SEQ ID NO: 60486 - RNA, 18 nt, Artificial Sequence
  Synthetic
ugcuuuagugcagauaau

SEQ ID NO: 60487 - RNA, 19 nt, Artificial Sequence
  Synthetic
uugcuuuagugcagauaau

SEQ ID NO: 60488 - RNA, 20 nt, Artificial Sequence
  Synthetic
uuugcuuuagugcagauaau

SEQ ID NO: 60489 - RNA, 21 nt, Artificial Sequence
  Synthetic
uuuugcuuuagugcagauaau

SEQ ID NO: 60490 - RNA, 22 nt, Artificial Sequence
  Synthetic
auuuugcuuuagugcagauaau

SEQ ID NO: 60491 - RNA, 24 nt, Artificial Sequence
  Synthetic
agauuuugcuuuagugcagauaau

SEQ ID NO: 60492 - RNA, 20 nt, Artificial Sequence
  Synthetic
uggauagcuugauggauaau

SEQ ID NO: 60493 - RNA, 22 nt, Artificial Sequence
  Synthetic
uguggauagcuugauggauaau

SEQ ID NO: 60494 - RNA, 23 nt, Artificial Sequence
  Synthetic
auguggauagcuugauggauaau

SEQ ID NO: 60495 - RNA, 24 nt, Artificial Sequence
  Synthetic
aauguggauagcuugauggauaau

SEQ ID NO: 60496 - RNA, 18 nt, Artificial Sequence
  Synthetic
auuauuucuucugauaau

SEQ ID NO: 60497 - RNA, 19 nt, Artificial Sequence
  Synthetic
aauuauuucuucugauaau

SEQ ID NO: 60498 - RNA, 21 nt, Artificial Sequence
  Synthetic
ugaauuauuucuucugauaau

SEQ ID NO: 60499 - RNA, 22 nt, Artificial Sequence
  Synthetic
uugaauuauuucuucugauaau

SEQ ID NO: 60500 - RNA, 23 nt, Artificial Sequence
  Synthetic
uuugaauuauuucuucugauaau

SEQ ID NO: 60501 - RNA, 24 nt, Artificial Sequence
  Synthetic
auuugaauuauuucuucugauaau

SEQ ID NO: 60502 - RNA, 21 nt, Artificial Sequence
  Synthetic
auucuagaucuuuuauauaau

SEQ ID NO: 60503 - RNA, 22 nt, Artificial Sequence
  Synthetic
uauucuagaucuuuuauauaau

SEQ ID NO: 60504 - RNA, 23 nt, Artificial Sequence
  Synthetic
cuauucuagaucuuuuauauaau

SEQ ID NO: 60505 - RNA, 21 nt, Artificial Sequence
  Synthetic
aacauauauuuuaauuauaau

SEQ ID NO: 60506 - RNA, 22 nt, Artificial Sequence
  Synthetic
caacauauauuuuaauuauaau

SEQ ID NO: 60507 - RNA, 23 nt, Artificial Sequence
  Synthetic
acaacauauauuuuaauuauaau

SEQ ID NO: 60508 - RNA, 24 nt, Artificial Sequence
  Synthetic
aacaacauauauuuuaauuauaau

SEQ ID NO: 60509 - RNA, 18 nt, Artificial Sequence
  Synthetic
agcuugcaggauuauaau

SEQ ID NO: 60510 - RNA, 20 nt, Artificial Sequence
  Synthetic
agagcuugcaggauuauaau

SEQ ID NO: 60511 - RNA, 21 nt, Artificial Sequence
  Synthetic
aagagcuugcaggauuauaau

SEQ ID NO: 60512 - RNA, 22 nt, Artificial Sequence
  Synthetic
aaagagcuugcaggauuauaau

SEQ ID NO: 60513 - RNA, 23 nt, Artificial Sequence
  Synthetic
caaagagcuugcaggauuauaau

SEQ ID NO: 60514 - RNA, 24 nt, Artificial Sequence
  Synthetic
ucaaagagcuugcaggauuauaau

SEQ ID NO: 60515 - RNA, 18 nt, Artificial Sequence
  Synthetic
aagaacauagcuuauaau

SEQ ID NO: 60516 - RNA, 19 nt, Artificial Sequence
  Synthetic
uaagaacauagcuuauaau

SEQ ID NO: 60517 - RNA, 20 nt, Artificial Sequence
  Synthetic
auaagaacauagcuuauaau

SEQ ID NO: 60518 - RNA, 21 nt, Artificial Sequence
  Synthetic
aauaagaacauagcuuauaau

SEQ ID NO: 60519 - RNA, 22 nt, Artificial Sequence
  Synthetic
aaauaagaacauagcuuauaau

SEQ ID NO: 60520 - RNA, 23 nt, Artificial Sequence
  Synthetic
aaaauaagaacauagcuuauaau

SEQ ID NO: 60521 - RNA, 24 nt, Artificial Sequence
  Synthetic
aaaaauaagaacauagcuuauaau

SEQ ID NO: 60522 - RNA, 18 nt, Artificial Sequence
  Synthetic
auuuaauacaguuauaau

SEQ ID NO: 60523 - RNA, 19 nt, Artificial Sequence
  Synthetic
aauuuaauacaguuauaau

SEQ ID NO: 60524 - RNA, 18 nt, Artificial Sequence
  Synthetic
uagcuaccacucacuaau

SEQ ID NO: 60525 - RNA, 21 nt, Artificial Sequence
  Synthetic
agguagcuaccacucacuaau

SEQ ID NO: 60526 - RNA, 22 nt, Artificial Sequence
  Synthetic
cagguagcuaccacucacuaau

SEQ ID NO: 60527 - RNA, 23 nt, Artificial Sequence
  Synthetic
ccagguagcuaccacucacuaau

SEQ ID NO: 60528 - RNA, 24 nt, Artificial Sequence
  Synthetic
uccagguagcuaccacucacuaau

SEQ ID NO: 60529 - RNA, 18 nt, Artificial Sequence
  Synthetic
uaaugcaauaaaccuaau

SEQ ID NO: 60530 - RNA, 20 nt, Artificial Sequence
  Synthetic
aguaaugcaauaaaccuaau

SEQ ID NO: 60531 - RNA, 21 nt, Artificial Sequence
  Synthetic
aaguaaugcaauaaaccuaau

SEQ ID NO: 60532 - RNA, 22 nt, Artificial Sequence
  Synthetic
caaguaaugcaauaaaccuaau

SEQ ID NO: 60533 - RNA, 23 nt, Artificial Sequence
  Synthetic
ucaaguaaugcaauaaaccuaau

SEQ ID NO: 60534 - RNA, 24 nt, Artificial Sequence
  Synthetic
cucaaguaaugcaauaaaccuaau

SEQ ID NO: 60535 - RNA, 18 nt, Artificial Sequence
  Synthetic
ugcaagcccauuccuaau

SEQ ID NO: 60536 - RNA, 19 nt, Artificial Sequence
  Synthetic
cugcaagcccauuccuaau

SEQ ID NO: 60537 - RNA, 20 nt, Artificial Sequence
  Synthetic
ucugcaagcccauuccuaau

SEQ ID NO: 60538 - RNA, 21 nt, Artificial Sequence
  Synthetic
uucugcaagcccauuccuaau

SEQ ID NO: 60539 - RNA, 22 nt, Artificial Sequence
  Synthetic
auucugcaagcccauuccuaau

SEQ ID NO: 60540 - RNA, 23 nt, Artificial Sequence
  Synthetic
aauucugcaagcccauuccuaau

SEQ ID NO: 60541 - RNA, 24 nt, Artificial Sequence
  Synthetic
caauucugcaagcccauuccuaau

SEQ ID NO: 60542 - RNA, 18 nt, Artificial Sequence
  Synthetic
aucaaaagaugagcuaau

SEQ ID NO: 60543 - RNA, 19 nt, Artificial Sequence
  Synthetic
aaucaaaagaugagcuaau

SEQ ID NO: 60544 - RNA, 20 nt, Artificial Sequence
  Synthetic
aaaucaaaagaugagcuaau

SEQ ID NO: 60545 - RNA, 21 nt, Artificial Sequence
  Synthetic
caaaucaaaagaugagcuaau

SEQ ID NO: 60546 - RNA, 23 nt, Artificial Sequence
  Synthetic
agcaaaucaaaagaugagcuaau

SEQ ID NO: 60547 - RNA, 24 nt, Artificial Sequence
  Synthetic
cagcaaaucaaaagaugagcuaau

SEQ ID NO: 60548 - RNA, 19 nt, Artificial Sequence
  Synthetic
uguucuaucagcaucuaau

SEQ ID NO: 60549 - RNA, 21 nt, Artificial Sequence
  Synthetic
aguguucuaucagcaucuaau

SEQ ID NO: 60550 - RNA, 22 nt, Artificial Sequence
  Synthetic
uaguguucuaucagcaucuaau

SEQ ID NO: 60551 - RNA, 23 nt, Artificial Sequence
  Synthetic
uuaguguucuaucagcaucuaau

SEQ ID NO: 60552 - RNA, 24 nt, Artificial Sequence
  Synthetic
cuuaguguucuaucagcaucuaau

SEQ ID NO: 60553 - RNA, 18 nt, Artificial Sequence
  Synthetic
uagggcgacagaucuaau

SEQ ID NO: 60554 - RNA, 21 nt, Artificial Sequence
  Synthetic
agguagggcgacagaucuaau

SEQ ID NO: 60555 - RNA, 23 nt, Artificial Sequence
  Synthetic
agagguagggcgacagaucuaau

SEQ ID NO: 60556 - RNA, 24 nt, Artificial Sequence
  Synthetic
aagagguagggcgacagaucuaau

SEQ ID NO: 60557 - RNA, 18 nt, Artificial Sequence
  Synthetic
uucuaugguuguucuaau

SEQ ID NO: 60558 - RNA, 19 nt, Artificial Sequence
  Synthetic
cuucuaugguuguucuaau

SEQ ID NO: 60559 - RNA, 20 nt, Artificial Sequence
  Synthetic
ccuucuaugguuguucuaau

SEQ ID NO: 60560 - RNA, 21 nt, Artificial Sequence
  Synthetic
uccuucuaugguuguucuaau

SEQ ID NO: 60561 - RNA, 22 nt, Artificial Sequence
  Synthetic
cuccuucuaugguuguucuaau

SEQ ID NO: 60562 - RNA, 23 nt, Artificial Sequence
  Synthetic
ccuccuucuaugguuguucuaau

SEQ ID NO: 60563 - RNA, 24 nt, Artificial Sequence
  Synthetic
cccuccuucuaugguuguucuaau

SEQ ID NO: 60564 - RNA, 18 nt, Artificial Sequence
  Synthetic
caucuccuuucaaguaau

SEQ ID NO: 60565 - RNA, 19 nt, Artificial Sequence
  Synthetic
ucaucuccuuucaaguaau

SEQ ID NO: 60566 - RNA, 21 nt, Artificial Sequence
  Synthetic
ugucaucuccuuucaaguaau

SEQ ID NO: 60567 - RNA, 22 nt, Artificial Sequence
  Synthetic
augucaucuccuuucaaguaau

SEQ ID NO: 60568 - RNA, 23 nt, Artificial Sequence
  Synthetic
uaugucaucuccuuucaaguaau

SEQ ID NO: 60569 - RNA, 24 nt, Artificial Sequence
  Synthetic
uuaugucaucuccuuucaaguaau

SEQ ID NO: 60570 - RNA, 18 nt, Artificial Sequence
  Synthetic
cuagaugauugcaguaau

SEQ ID NO: 60571 - RNA, 19 nt, Artificial Sequence
  Synthetic
acuagaugauugcaguaau

SEQ ID NO: 60572 - RNA, 20 nt, Artificial Sequence
  Synthetic
aacuagaugauugcaguaau

SEQ ID NO: 60573 - RNA, 21 nt, Artificial Sequence
  Synthetic
aaacuagaugauugcaguaau

SEQ ID NO: 60574 - RNA, 22 nt, Artificial Sequence
  Synthetic
caaacuagaugauugcaguaau

SEQ ID NO: 60575 - RNA, 23 nt, Artificial Sequence
  Synthetic
acaaacuagaugauugcaguaau

SEQ ID NO: 60576 - RNA, 24 nt, Artificial Sequence
  Synthetic
cacaaacuagaugauugcaguaau

SEQ ID NO: 60577 - RNA, 18 nt, Artificial Sequence
  Synthetic
uguaacauaaagaguaau

SEQ ID NO: 60578 - RNA, 19 nt, Artificial Sequence
  Synthetic
uuguaacauaaagaguaau

SEQ ID NO: 60579 - RNA, 22 nt, Artificial Sequence
  Synthetic
agguuguaacauaaagaguaau

SEQ ID NO: 60580 - RNA, 23 nt, Artificial Sequence
  Synthetic
uagguuguaacauaaagaguaau

SEQ ID NO: 60581 - RNA, 24 nt, Artificial Sequence
  Synthetic
auagguuguaacauaaagaguaau

SEQ ID NO: 60582 - RNA, 18 nt, Artificial Sequence
  Synthetic
uuaauuuuguuuaguaau

SEQ ID NO: 60583 - RNA, 20 nt, Artificial Sequence
  Synthetic
aguuaauuuuguuuaguaau

SEQ ID NO: 60584 - RNA, 21 nt, Artificial Sequence
  Synthetic
aaguuaauuuuguuuaguaau

SEQ ID NO: 60585 - RNA, 22 nt, Artificial Sequence
  Synthetic
aaaguuaauuuuguuuaguaau

SEQ ID NO: 60586 - RNA, 23 nt, Artificial Sequence
  Synthetic
uaaaguuaauuuuguuuaguaau

SEQ ID NO: 60587 - RNA, 24 nt, Artificial Sequence
  Synthetic
uuaaaguuaauuuuguuuaguaau

SEQ ID NO: 60588 - RNA, 18 nt, Artificial Sequence
  Synthetic
ugauaauaguuugguaau

SEQ ID NO: 60589 - RNA, 19 nt, Artificial Sequence
  Synthetic
uugauaauaguuugguaau

SEQ ID NO: 60590 - RNA, 20 nt, Artificial Sequence
  Synthetic
cuugauaauaguuugguaau

SEQ ID NO: 60591 - RNA, 21 nt, Artificial Sequence
  Synthetic
ucuugauaauaguuugguaau

SEQ ID NO: 60592 - RNA, 22 nt, Artificial Sequence
  Synthetic
uucuugauaauaguuugguaau

SEQ ID NO: 60593 - RNA, 23 nt, Artificial Sequence
  Synthetic
cuucuugauaauaguuugguaau

SEQ ID NO: 60594 - RNA, 18 nt, Artificial Sequence
  Synthetic
aggguggacaaauguaau

SEQ ID NO: 60595 - RNA, 19 nt, Artificial Sequence
  Synthetic
caggguggacaaauguaau

SEQ ID NO: 60596 - RNA, 20 nt, Artificial Sequence
  Synthetic
acaggguggacaaauguaau

SEQ ID NO: 60597 - RNA, 21 nt, Artificial Sequence
  Synthetic
cacaggguggacaaauguaau

SEQ ID NO: 60598 - RNA, 23 nt, Artificial Sequence
  Synthetic
agcacaggguggacaaauguaau

SEQ ID NO: 60599 - RNA, 24 nt, Artificial Sequence
  Synthetic
aagcacaggguggacaaauguaau

SEQ ID NO: 60600 - RNA, 21 nt, Artificial Sequence
  Synthetic
uaaauuauauuucuauguaau

SEQ ID NO: 60601 - RNA, 22 nt, Artificial Sequence
  Synthetic
auaaauuauauuucuauguaau

SEQ ID NO: 60602 - RNA, 23 nt, Artificial Sequence
  Synthetic
cauaaauuauauuucuauguaau

SEQ ID NO: 60603 - RNA, 24 nt, Artificial Sequence
  Synthetic
acauaaauuauauuucuauguaau

SEQ ID NO: 60604 - RNA, 18 nt, Artificial Sequence
  Synthetic
ucugauggucuuuguaau

SEQ ID NO: 60605 - RNA, 19 nt, Artificial Sequence
  Synthetic
uucugauggucuuuguaau

SEQ ID NO: 60606 - RNA, 20 nt, Artificial Sequence
  Synthetic
uuucugauggucuuuguaau

SEQ ID NO: 60607 - RNA, 21 nt, Artificial Sequence
  Synthetic
cuuucugauggucuuuguaau

SEQ ID NO: 60608 - RNA, 23 nt, Artificial Sequence
  Synthetic
ugcuuucugauggucuuuguaau

SEQ ID NO: 60609 - RNA, 24 nt, Artificial Sequence
  Synthetic
uugcuuucugauggucuuuguaau

SEQ ID NO: 60610 - RNA, 18 nt, Artificial Sequence
  Synthetic
ugaaaaaggguuuguaau

SEQ ID NO: 60611 - RNA, 19 nt, Artificial Sequence
  Synthetic
uugaaaaaggguuuguaau

SEQ ID NO: 60612 - RNA, 21 nt, Artificial Sequence
  Synthetic
aguugaaaaaggguuuguaau

SEQ ID NO: 60613 - RNA, 22 nt, Artificial Sequence
  Synthetic
aaguugaaaaaggguuuguaau

SEQ ID NO: 60614 - RNA, 23 nt, Artificial Sequence
  Synthetic
uaaguugaaaaaggguuuguaau

SEQ ID NO: 60615 - RNA, 24 nt, Artificial Sequence
  Synthetic
auaaguugaaaaaggguuuguaau

SEQ ID NO: 60616 - RNA, 18 nt, Artificial Sequence
  Synthetic
augcaaaacaaaauuaau

SEQ ID NO: 60617 - RNA, 19 nt, Artificial Sequence
  Synthetic
uaugcaaaacaaaauuaau

SEQ ID NO: 60618 - RNA, 20 nt, Artificial Sequence
  Synthetic
uuaugcaaaacaaaauuaau

SEQ ID NO: 60619 - RNA, 21 nt, Artificial Sequence
  Synthetic
auuaugcaaaacaaaauuaau

SEQ ID NO: 60620 - RNA, 22 nt, Artificial Sequence
  Synthetic
uauuaugcaaaacaaaauuaau

SEQ ID NO: 60621 - RNA, 23 nt, Artificial Sequence
  Synthetic
cuauuaugcaaaacaaaauuaau

SEQ ID NO: 60622 - RNA, 24 nt, Artificial Sequence
  Synthetic
ucuauuaugcaaaacaaaauuaau

SEQ ID NO: 60623 - RNA, 18 nt, Artificial Sequence
  Synthetic
ugguuuaacaacauuaau

SEQ ID NO: 60624 - RNA, 19 nt, Artificial Sequence
  Synthetic
uugguuuaacaacauuaau

SEQ ID NO: 60625 - RNA, 20 nt, Artificial Sequence
  Synthetic
auugguuuaacaacauuaau

SEQ ID NO: 60626 - RNA, 21 nt, Artificial Sequence
  Synthetic
aauugguuuaacaacauuaau

SEQ ID NO: 60627 - RNA, 22 nt, Artificial Sequence
  Synthetic
caauugguuuaacaacauuaau

SEQ ID NO: 60628 - RNA, 23 nt, Artificial Sequence
  Synthetic
acaauugguuuaacaacauuaau

SEQ ID NO: 60629 - RNA, 24 nt, Artificial Sequence
  Synthetic
aacaauugguuuaacaacauuaau

SEQ ID NO: 60630 - RNA, 21 nt, Artificial Sequence
  Synthetic
ccaaaaaaaauguucauuaau

SEQ ID NO: 60631 - RNA, 22 nt, Artificial Sequence
  Synthetic
uccaaaaaaaauguucauuaau

SEQ ID NO: 60632 - RNA, 23 nt, Artificial Sequence
  Synthetic
auccaaaaaaaauguucauuaau

SEQ ID NO: 60633 - RNA, 18 nt, Artificial Sequence
  Synthetic
uuucucuuaccgauuaau

SEQ ID NO: 60634 - RNA, 19 nt, Artificial Sequence
  Synthetic
cuuucucuuaccgauuaau

SEQ ID NO: 60635 - RNA, 20 nt, Artificial Sequence
  Synthetic
acuuucucuuaccgauuaau

SEQ ID NO: 60636 - RNA, 21 nt, Artificial Sequence
  Synthetic
uacuuucucuuaccgauuaau

SEQ ID NO: 60637 - RNA, 22 nt, Artificial Sequence
  Synthetic
uuacuuucucuuaccgauuaau

SEQ ID NO: 60638 - RNA, 23 nt, Artificial Sequence
  Synthetic
uuuacuuucucuuaccgauuaau

SEQ ID NO: 60639 - RNA, 18 nt, Artificial Sequence
  Synthetic
caaaugaaaaggauuaau

SEQ ID NO: 60640 - RNA, 19 nt, Artificial Sequence
  Synthetic
ucaaaugaaaaggauuaau

SEQ ID NO: 60641 - RNA, 20 nt, Artificial Sequence
  Synthetic
uucaaaugaaaaggauuaau

SEQ ID NO: 60642 - RNA, 21 nt, Artificial Sequence
  Synthetic
auucaaaugaaaaggauuaau

SEQ ID NO: 60643 - RNA, 22 nt, Artificial Sequence
  Synthetic
aauucaaaugaaaaggauuaau

SEQ ID NO: 60644 - RNA, 23 nt, Artificial Sequence
  Synthetic
aaauucaaaugaaaaggauuaau

SEQ ID NO: 60645 - RNA, 21 nt, Artificial Sequence
  Synthetic
uguuuacuguuuuugauuaau

SEQ ID NO: 60646 - RNA, 22 nt, Artificial Sequence
  Synthetic
uuguuuacuguuuuugauuaau

SEQ ID NO: 60647 - RNA, 23 nt, Artificial Sequence
  Synthetic
uuuguuuacuguuuuugauuaau

SEQ ID NO: 60648 - RNA, 24 nt, Artificial Sequence
  Synthetic
cuuuguuuacuguuuuugauuaau

SEQ ID NO: 60649 - RNA, 18 nt, Artificial Sequence
  Synthetic
uuauauuaguauauuaau

SEQ ID NO: 60650 - RNA, 19 nt, Artificial Sequence
  Synthetic
cuuauauuaguauauuaau

SEQ ID NO: 60651 - RNA, 21 nt, Artificial Sequence
  Synthetic
agcuuauauuaguauauuaau

SEQ ID NO: 60652 - RNA, 23 nt, Artificial Sequence
  Synthetic
agagcuuauauuaguauauuaau

SEQ ID NO: 60653 - RNA, 24 nt, Artificial Sequence
  Synthetic
aagagcuuauauuaguauauuaau

SEQ ID NO: 60654 - RNA, 21 nt, Artificial Sequence
  Synthetic
caauuucaauauuuacuuaau

SEQ ID NO: 60655 - RNA, 22 nt, Artificial Sequence
  Synthetic
ccaauuucaauauuuacuuaau

SEQ ID NO: 60656 - RNA, 23 nt, Artificial Sequence
  Synthetic
accaauuucaauauuuacuuaau

SEQ ID NO: 60657 - RNA, 18 nt, Artificial Sequence
  Synthetic
ugaauuuuacagcuuaau

SEQ ID NO: 60658 - RNA, 19 nt, Artificial Sequence
  Synthetic
augaauuuuacagcuuaau

SEQ ID NO: 60659 - RNA, 20 nt, Artificial Sequence
  Synthetic
aaugaauuuuacagcuuaau

SEQ ID NO: 60660 - RNA, 21 nt, Artificial Sequence
  Synthetic
aaaugaauuuuacagcuuaau

SEQ ID NO: 60661 - RNA, 22 nt, Artificial Sequence
  Synthetic
caaaugaauuuuacagcuuaau

SEQ ID NO: 60662 - RNA, 24 nt, Artificial Sequence
  Synthetic
ugcaaaugaauuuuacagcuuaau

SEQ ID NO: 60663 - RNA, 18 nt, Artificial Sequence
  Synthetic
aauuaugccgcaguuaau

SEQ ID NO: 60664 - RNA, 20 nt, Artificial Sequence
  Synthetic
ugaauuaugccgcaguuaau

SEQ ID NO: 60665 - RNA, 18 nt, Artificial Sequence
  Synthetic
uuuucuacaaagguuaau

SEQ ID NO: 60666 - RNA, 19 nt, Artificial Sequence
  Synthetic
uuuuucuacaaagguuaau

SEQ ID NO: 60667 - RNA, 20 nt, Artificial Sequence
  Synthetic
uuuuuucuacaaagguuaau

SEQ ID NO: 60668 - RNA, 21 nt, Artificial Sequence
  Synthetic
auuuuuucuacaaagguuaau

SEQ ID NO: 60669 - RNA, 23 nt, Artificial Sequence
  Synthetic
ugauuuuuucuacaaagguuaau

SEQ ID NO: 60670 - RNA, 18 nt, Artificial Sequence
  Synthetic
acaagaagaaauguuaau

SEQ ID NO: 60671 - RNA, 19 nt, Artificial Sequence
  Synthetic
aacaagaagaaauguuaau

SEQ ID NO: 60672 - RNA, 20 nt, Artificial Sequence
  Synthetic
uaacaagaagaaauguuaau

SEQ ID NO: 60673 - RNA, 21 nt, Artificial Sequence
  Synthetic
cuaacaagaagaaauguuaau

SEQ ID NO: 60674 - RNA, 23 nt, Artificial Sequence
  Synthetic
agcuaacaagaagaaauguuaau

SEQ ID NO: 60675 - RNA, 24 nt, Artificial Sequence
  Synthetic
uagcuaacaagaagaaauguuaau

SEQ ID NO: 60676 - RNA, 18 nt, Artificial Sequence
  Synthetic
ucaacuuaucuauuuaau

SEQ ID NO: 60677 - RNA, 19 nt, Artificial Sequence
  Synthetic
aucaacuuaucuauuuaau

SEQ ID NO: 60678 - RNA, 20 nt, Artificial Sequence
  Synthetic
uaucaacuuaucuauuuaau

SEQ ID NO: 60679 - RNA, 21 nt, Artificial Sequence
  Synthetic
auaucaacuuaucuauuuaau

SEQ ID NO: 60680 - RNA, 22 nt, Artificial Sequence
  Synthetic
aauaucaacuuaucuauuuaau

SEQ ID NO: 60681 - RNA, 23 nt, Artificial Sequence
  Synthetic
aaauaucaacuuaucuauuuaau

SEQ ID NO: 60682 - RNA, 24 nt, Artificial Sequence
  Synthetic
caaauaucaacuuaucuauuuaau

SEQ ID NO: 60683 - RNA, 21 nt, Artificial Sequence
  Synthetic
uuuuauccuuuuguauuuaau

SEQ ID NO: 60684 - RNA, 23 nt, Artificial Sequence
  Synthetic
aguuuuauccuuuuguauuuaau

SEQ ID NO: 60685 - RNA, 18 nt, Artificial Sequence
  Synthetic
uuaguuuuaaucuuuaau

SEQ ID NO: 60686 - RNA, 20 nt, Artificial Sequence
  Synthetic
uguuaguuuuaaucuuuaau

SEQ ID NO: 60687 - RNA, 21 nt, Artificial Sequence
  Synthetic
auguuaguuuuaaucuuuaau

SEQ ID NO: 60688 - RNA, 22 nt, Artificial Sequence
  Synthetic
uauguuaguuuuaaucuuuaau

SEQ ID NO: 60689 - RNA, 23 nt, Artificial Sequence
  Synthetic
uuauguuaguuuuaaucuuuaau

SEQ ID NO: 60690 - RNA, 24 nt, Artificial Sequence
  Synthetic
uuuauguuaguuuuaaucuuuaau

SEQ ID NO: 60691 - RNA, 21 nt, Artificial Sequence
  Synthetic
aaucuuaugagaaauuuuaau

SEQ ID NO: 60692 - RNA, 22 nt, Artificial Sequence
  Synthetic
caaucuuaugagaaauuuuaau

SEQ ID NO: 60693 - RNA, 23 nt, Artificial Sequence
  Synthetic
acaaucuuaugagaaauuuuaau

SEQ ID NO: 60694 - RNA, 19 nt, Artificial Sequence
  Synthetic
ugauaucugucauuuuaau

SEQ ID NO: 60695 - RNA, 22 nt, Artificial Sequence
  Synthetic
uggugauaucugucauuuuaau

SEQ ID NO: 60696 - RNA, 23 nt, Artificial Sequence
  Synthetic
auggugauaucugucauuuuaau

SEQ ID NO: 60697 - RNA, 24 nt, Artificial Sequence
  Synthetic
aauggugauaucugucauuuuaau

SEQ ID NO: 60698 - RNA, 18 nt, Artificial Sequence
  Synthetic
uggacuuuagcuuuuaau

SEQ ID NO: 60699 - RNA, 20 nt, Artificial Sequence
  Synthetic
uguggacuuuagcuuuuaau

SEQ ID NO: 60700 - RNA, 21 nt, Artificial Sequence
  Synthetic
cuguggacuuuagcuuuuaau

SEQ ID NO: 60701 - RNA, 22 nt, Artificial Sequence
  Synthetic
ccuguggacuuuagcuuuuaau

SEQ ID NO: 60702 - RNA, 18 nt, Artificial Sequence
  Synthetic
uuaaucugaaguuuuaau

SEQ ID NO: 60703 - RNA, 19 nt, Artificial Sequence
  Synthetic
cuuaaucugaaguuuuaau

SEQ ID NO: 60704 - RNA, 20 nt, Artificial Sequence
  Synthetic
acuuaaucugaaguuuuaau

SEQ ID NO: 60705 - RNA, 21 nt, Artificial Sequence
  Synthetic
uacuuaaucugaaguuuuaau

SEQ ID NO: 60706 - RNA, 23 nt, Artificial Sequence
  Synthetic
uguacuuaaucugaaguuuuaau

SEQ ID NO: 60707 - RNA, 24 nt, Artificial Sequence
  Synthetic
auguacuuaaucugaaguuuuaau

SEQ ID NO: 60708 - RNA, 18 nt, Artificial Sequence
  Synthetic
uggauaugucguuuuaau

SEQ ID NO: 60709 - RNA, 19 nt, Artificial Sequence
  Synthetic
uuggauaugucguuuuaau

SEQ ID NO: 60710 - RNA, 20 nt, Artificial Sequence
  Synthetic
uuuggauaugucguuuuaau

SEQ ID NO: 60711 - RNA, 18 nt, Artificial Sequence
  Synthetic
aucaauacccuaaaacau

SEQ ID NO: 60712 - RNA, 20 nt, Artificial Sequence
  Synthetic
agaucaauacccuaaaacau

SEQ ID NO: 60713 - RNA, 22 nt, Artificial Sequence
  Synthetic
agagaucaauacccuaaaacau

SEQ ID NO: 60714 - RNA, 23 nt, Artificial Sequence
  Synthetic
aagagaucaauacccuaaaacau

SEQ ID NO: 60715 - RNA, 21 nt, Artificial Sequence
  Synthetic
aaaaauuagcaagacaaacau

SEQ ID NO: 60716 - RNA, 23 nt, Artificial Sequence
  Synthetic
ugaaaaauuagcaagacaaacau

SEQ ID NO: 60717 - RNA, 24 nt, Artificial Sequence
  Synthetic
augaaaaauuagcaagacaaacau

SEQ ID NO: 60718 - RNA, 18 nt, Artificial Sequence
  Synthetic
aacaaaacacucaaacau

SEQ ID NO: 60719 - RNA, 19 nt, Artificial Sequence
  Synthetic
aaacaaaacacucaaacau

SEQ ID NO: 60720 - RNA, 20 nt, Artificial Sequence
  Synthetic
uaaacaaaacacucaaacau

SEQ ID NO: 60721 - RNA, 22 nt, Artificial Sequence
  Synthetic
aguaaacaaaacacucaaacau

SEQ ID NO: 60722 - RNA, 23 nt, Artificial Sequence
  Synthetic
caguaaacaaaacacucaaacau

SEQ ID NO: 60723 - RNA, 24 nt, Artificial Sequence
  Synthetic
ucaguaaacaaaacacucaaacau

SEQ ID NO: 60724 - RNA, 19 nt, Artificial Sequence
  Synthetic
ugacaucaacuagaaacau

SEQ ID NO: 60725 - RNA, 20 nt, Artificial Sequence
  Synthetic
augacaucaacuagaaacau

SEQ ID NO: 60726 - RNA, 21 nt, Artificial Sequence
  Synthetic
uaugacaucaacuagaaacau

SEQ ID NO: 60727 - RNA, 22 nt, Artificial Sequence
  Synthetic
uuaugacaucaacuagaaacau

SEQ ID NO: 60728 - RNA, 23 nt, Artificial Sequence
  Synthetic
auuaugacaucaacuagaaacau

SEQ ID NO: 60729 - RNA, 24 nt, Artificial Sequence
  Synthetic
aauuaugacaucaacuagaaacau

SEQ ID NO: 60730 - RNA, 22 nt, Artificial Sequence
  Synthetic
uguguuuuugaaaauuaaacau

SEQ ID NO: 60731 - RNA, 23 nt, Artificial Sequence
  Synthetic
cuguguuuuugaaaauuaaacau

SEQ ID NO: 60732 - RNA, 24 nt, Artificial Sequence
  Synthetic
ucuguguuuuugaaaauuaaacau

SEQ ID NO: 60733 - RNA, 21 nt, Artificial Sequence
  Synthetic
auuuaaaauuuuauuaaacau

SEQ ID NO: 60734 - RNA, 22 nt, Artificial Sequence
  Synthetic
cauuuaaaauuuuauuaaacau

SEQ ID NO: 60735 - RNA, 23 nt, Artificial Sequence
  Synthetic
ccauuuaaaauuuuauuaaacau

SEQ ID NO: 60736 - RNA, 24 nt, Artificial Sequence
  Synthetic
accauuuaaaauuuuauuaaacau

SEQ ID NO: 60737 - RNA, 19 nt, Artificial Sequence
  Synthetic
aggcaagucaguuaaacau

SEQ ID NO: 60738 - RNA, 20 nt, Artificial Sequence
  Synthetic
uaggcaagucaguuaaacau

SEQ ID NO: 60739 - RNA, 21 nt, Artificial Sequence
  Synthetic
uuaggcaagucaguuaaacau

SEQ ID NO: 60740 - RNA, 22 nt, Artificial Sequence
  Synthetic
uuuaggcaagucaguuaaacau

SEQ ID NO: 60741 - RNA, 23 nt, Artificial Sequence
  Synthetic
uuuuaggcaagucaguuaaacau

SEQ ID NO: 60742 - RNA, 24 nt, Artificial Sequence
  Synthetic
cuuuuaggcaagucaguuaaacau

SEQ ID NO: 60743 - RNA, 19 nt, Artificial Sequence
  Synthetic
aguccuuuauccacaacau

SEQ ID NO: 60744 - RNA, 20 nt, Artificial Sequence
  Synthetic
caguccuuuauccacaacau

SEQ ID NO: 60745 - RNA, 21 nt, Artificial Sequence
  Synthetic
ccaguccuuuauccacaacau

SEQ ID NO: 60746 - RNA, 23 nt, Artificial Sequence
  Synthetic
ugccaguccuuuauccacaacau

SEQ ID NO: 60747 - RNA, 24 nt, Artificial Sequence
  Synthetic
cugccaguccuuuauccacaacau

SEQ ID NO: 60748 - RNA, 18 nt, Artificial Sequence
  Synthetic
cuuccuucuccccaacau

SEQ ID NO: 60749 - RNA, 19 nt, Artificial Sequence
  Synthetic
acuuccuucuccccaacau

SEQ ID NO: 60750 - RNA, 20 nt, Artificial Sequence
  Synthetic
uacuuccuucuccccaacau

SEQ ID NO: 60751 - RNA, 21 nt, Artificial Sequence
  Synthetic
cuacuuccuucuccccaacau

SEQ ID NO: 60752 - RNA, 22 nt, Artificial Sequence
  Synthetic
ccuacuuccuucuccccaacau

SEQ ID NO: 60753 - RNA, 23 nt, Artificial Sequence
  Synthetic
cccuacuuccuucuccccaacau

SEQ ID NO: 60754 - RNA, 18 nt, Artificial Sequence
  Synthetic
aguacguuuuugcaacau

SEQ ID NO: 60755 - RNA, 19 nt, Artificial Sequence
  Synthetic
aaguacguuuuugcaacau

SEQ ID NO: 60756 - RNA, 20 nt, Artificial Sequence
  Synthetic
uaaguacguuuuugcaacau

SEQ ID NO: 60757 - RNA, 22 nt, Artificial Sequence
  Synthetic
aguaaguacguuuuugcaacau

SEQ ID NO: 60758 - RNA, 23 nt, Artificial Sequence
  Synthetic
uaguaaguacguuuuugcaacau

SEQ ID NO: 60759 - RNA, 18 nt, Artificial Sequence
  Synthetic
uaagacugaaaucaacau

SEQ ID NO: 60760 - RNA, 20 nt, Artificial Sequence
  Synthetic
uguaagacugaaaucaacau

SEQ ID NO: 60761 - RNA, 21 nt, Artificial Sequence
  Synthetic
auguaagacugaaaucaacau

SEQ ID NO: 60762 - RNA, 22 nt, Artificial Sequence
  Synthetic
uauguaagacugaaaucaacau

SEQ ID NO: 60763 - RNA, 23 nt, Artificial Sequence
  Synthetic
auauguaagacugaaaucaacau

SEQ ID NO: 60764 - RNA, 24 nt, Artificial Sequence
  Synthetic
aauauguaagacugaaaucaacau

SEQ ID NO: 60765 - RNA, 18 nt, Artificial Sequence
  Synthetic
aacagcaaaauucaacau

SEQ ID NO: 60766 - RNA, 19 nt, Artificial Sequence
  Synthetic
aaacagcaaaauucaacau

SEQ ID NO: 60767 - RNA, 21 nt, Artificial Sequence
  Synthetic
agaaacagcaaaauucaacau

SEQ ID NO: 60768 - RNA, 23 nt, Artificial Sequence
  Synthetic
ugagaaacagcaaaauucaacau

SEQ ID NO: 60769 - RNA, 21 nt, Artificial Sequence
  Synthetic
cagggguuaaaacuucaacau

SEQ ID NO: 60770 - RNA, 23 nt, Artificial Sequence
  Synthetic
ugcagggguuaaaacuucaacau

SEQ ID NO: 60771 - RNA, 24 nt, Artificial Sequence
  Synthetic
uugcagggguuaaaacuucaacau

SEQ ID NO: 60772 - RNA, 18 nt, Artificial Sequence
  Synthetic
uugauacagcaagaacau

SEQ ID NO: 60773 - RNA, 19 nt, Artificial Sequence
  Synthetic
uuugauacagcaagaacau

SEQ ID NO: 60774 - RNA, 20 nt, Artificial Sequence
  Synthetic
cuuugauacagcaagaacau

SEQ ID NO: 60775 - RNA, 21 nt, Artificial Sequence
  Synthetic
ucuuugauacagcaagaacau

SEQ ID NO: 60776 - RNA, 23 nt, Artificial Sequence
  Synthetic
agucuuugauacagcaagaacau

SEQ ID NO: 60777 - RNA, 18 nt, Artificial Sequence
  Synthetic
cuuuuauuauaagaacau

SEQ ID NO: 60778 - RNA, 21 nt, Artificial Sequence
  Synthetic
cggcuuuuauuauaagaacau

SEQ ID NO: 60779 - RNA, 22 nt, Artificial Sequence
  Synthetic
ucggcuuuuauuauaagaacau

SEQ ID NO: 60780 - RNA, 23 nt, Artificial Sequence
  Synthetic
uucggcuuuuauuauaagaacau

SEQ ID NO: 60781 - RNA, 24 nt, Artificial Sequence
  Synthetic
auucggcuuuuauuauaagaacau

SEQ ID NO: 60782 - RNA, 19 nt, Artificial Sequence
  Synthetic
agaaaguguagcagaacau

SEQ ID NO: 60783 - RNA, 21 nt, Artificial Sequence
  Synthetic
cgagaaaguguagcagaacau

SEQ ID NO: 60784 - RNA, 22 nt, Artificial Sequence
  Synthetic
acgagaaaguguagcagaacau

SEQ ID NO: 60785 - RNA, 23 nt, Artificial Sequence
  Synthetic
uacgagaaaguguagcagaacau

SEQ ID NO: 60786 - RNA, 24 nt, Artificial Sequence
  Synthetic
uuacgagaaaguguagcagaacau

SEQ ID NO: 60787 - RNA, 18 nt, Artificial Sequence
  Synthetic
ucaggagaauuagaacau

SEQ ID NO: 60788 - RNA, 20 nt, Artificial Sequence
  Synthetic
ugucaggagaauuagaacau

SEQ ID NO: 60789 - RNA, 21 nt, Artificial Sequence
  Synthetic
augucaggagaauuagaacau

SEQ ID NO: 60790 - RNA, 22 nt, Artificial Sequence
  Synthetic
caugucaggagaauuagaacau

SEQ ID NO: 60791 - RNA, 23 nt, Artificial Sequence
  Synthetic
ucaugucaggagaauuagaacau

SEQ ID NO: 60792 - RNA, 24 nt, Artificial Sequence
  Synthetic
uucaugucaggagaauuagaacau

SEQ ID NO: 60793 - RNA, 18 nt, Artificial Sequence
  Synthetic
ucugacuccaaggaacau

SEQ ID NO: 60794 - RNA, 19 nt, Artificial Sequence
  Synthetic
cucugacuccaaggaacau

SEQ ID NO: 60795 - RNA, 20 nt, Artificial Sequence
  Synthetic
ucucugacuccaaggaacau

SEQ ID NO: 60796 - RNA, 21 nt, Artificial Sequence
  Synthetic
aucucugacuccaaggaacau

SEQ ID NO: 60797 - RNA, 23 nt, Artificial Sequence
  Synthetic
ugaucucugacuccaaggaacau

SEQ ID NO: 60798 - RNA, 24 nt, Artificial Sequence
  Synthetic
uugaucucugacuccaaggaacau

SEQ ID NO: 60799 - RNA, 19 nt, Artificial Sequence
  Synthetic
ugggcauaagaaggaacau

SEQ ID NO: 60800 - RNA, 20 nt, Artificial Sequence
  Synthetic
cugggcauaagaaggaacau

SEQ ID NO: 60801 - RNA, 22 nt, Artificial Sequence
  Synthetic
cgcugggcauaagaaggaacau

SEQ ID NO: 60802 - RNA, 23 nt, Artificial Sequence
  Synthetic
acgcugggcauaagaaggaacau

SEQ ID NO: 60803 - RNA, 24 nt, Artificial Sequence
  Synthetic
aacgcugggcauaagaaggaacau

SEQ ID NO: 60804 - RNA, 18 nt, Artificial Sequence
  Synthetic
auaaaguaaaaugaacau

SEQ ID NO: 60805 - RNA, 19 nt, Artificial Sequence
  Synthetic
uauaaaguaaaaugaacau

SEQ ID NO: 60806 - RNA, 21 nt, Artificial Sequence
  Synthetic
uguauaaaguaaaaugaacau

SEQ ID NO: 60807 - RNA, 23 nt, Artificial Sequence
  Synthetic
aguguauaaaguaaaaugaacau

SEQ ID NO: 60808 - RNA, 24 nt, Artificial Sequence
  Synthetic
aaguguauaaaguaaaaugaacau

SEQ ID NO: 60809 - RNA, 18 nt, Artificial Sequence
  Synthetic
caaaaugccuuauaacau

SEQ ID NO: 60810 - RNA, 19 nt, Artificial Sequence
  Synthetic
acaaaaugccuuauaacau

SEQ ID NO: 60811 - RNA, 20 nt, Artificial Sequence
  Synthetic
cacaaaaugccuuauaacau

SEQ ID NO: 60812 - RNA, 21 nt, Artificial Sequence
  Synthetic
acacaaaaugccuuauaacau

SEQ ID NO: 60813 - RNA, 22 nt, Artificial Sequence
  Synthetic
aacacaaaaugccuuauaacau

SEQ ID NO: 60814 - RNA, 23 nt, Artificial Sequence
  Synthetic
uaacacaaaaugccuuauaacau

SEQ ID NO: 60815 - RNA, 24 nt, Artificial Sequence
  Synthetic
uuaacacaaaaugccuuauaacau

SEQ ID NO: 60816 - RNA, 18 nt, Artificial Sequence
  Synthetic
acaucugaaugcuaacau

SEQ ID NO: 60817 - RNA, 19 nt, Artificial Sequence
  Synthetic
aacaucugaaugcuaacau

SEQ ID NO: 60818 - RNA, 20 nt, Artificial Sequence
  Synthetic
uaacaucugaaugcuaacau

SEQ ID NO: 60819 - RNA, 21 nt, Artificial Sequence
  Synthetic
uuaacaucugaaugcuaacau

SEQ ID NO: 60820 - RNA, 22 nt, Artificial Sequence
  Synthetic
cuuaacaucugaaugcuaacau

SEQ ID NO: 60821 - RNA, 23 nt, Artificial Sequence
  Synthetic
ucuuaacaucugaaugcuaacau

SEQ ID NO: 60822 - RNA, 24 nt, Artificial Sequence
  Synthetic
aucuuaacaucugaaugcuaacau

SEQ ID NO: 60823 - RNA, 19 nt, Artificial Sequence
  Synthetic
agucagaucuggguaacau

SEQ ID NO: 60824 - RNA, 20 nt, Artificial Sequence
  Synthetic
cagucagaucuggguaacau

SEQ ID NO: 60825 - RNA, 21 nt, Artificial Sequence
  Synthetic
acagucagaucuggguaacau

SEQ ID NO: 60826 - RNA, 22 nt, Artificial Sequence
  Synthetic
cacagucagaucuggguaacau

SEQ ID NO: 60827 - RNA, 23 nt, Artificial Sequence
  Synthetic
acacagucagaucuggguaacau

SEQ ID NO: 60828 - RNA, 24 nt, Artificial Sequence
  Synthetic
uacacagucagaucuggguaacau

SEQ ID NO: 60829 - RNA, 18 nt, Artificial Sequence
  Synthetic
augucguuccuguaacau

SEQ ID NO: 60830 - RNA, 19 nt, Artificial Sequence
  Synthetic
aaugucguuccuguaacau

SEQ ID NO: 60831 - RNA, 21 nt, Artificial Sequence
  Synthetic
ugaaugucguuccuguaacau

SEQ ID NO: 60832 - RNA, 24 nt, Artificial Sequence
  Synthetic
uggugaaugucguuccuguaacau

SEQ ID NO: 60833 - RNA, 18 nt, Artificial Sequence
  Synthetic
ugggcaccauauuaacau

SEQ ID NO: 60834 - RNA, 20 nt, Artificial Sequence
  Synthetic
agugggcaccauauuaacau

SEQ ID NO: 60835 - RNA, 21 nt, Artificial Sequence
  Synthetic
cagugggcaccauauuaacau

SEQ ID NO: 60836 - RNA, 22 nt, Artificial Sequence
  Synthetic
acagugggcaccauauuaacau

SEQ ID NO: 60837 - RNA, 23 nt, Artificial Sequence
  Synthetic
aacagugggcaccauauuaacau

SEQ ID NO: 60838 - RNA, 24 nt, Artificial Sequence
  Synthetic
aaacagugggcaccauauuaacau

SEQ ID NO: 60839 - RNA, 18 nt, Artificial Sequence
  Synthetic
aaguaauuaucuuaacau

SEQ ID NO: 60840 - RNA, 21 nt, Artificial Sequence
  Synthetic
aggaaguaauuaucuuaacau

SEQ ID NO: 60841 - RNA, 22 nt, Artificial Sequence
  Synthetic
caggaaguaauuaucuuaacau

SEQ ID NO: 60842 - RNA, 23 nt, Artificial Sequence
  Synthetic
ucaggaaguaauuaucuuaacau

SEQ ID NO: 60843 - RNA, 24 nt, Artificial Sequence
  Synthetic
uucaggaaguaauuaucuuaacau

SEQ ID NO: 60844 - RNA, 18 nt, Artificial Sequence
  Synthetic
uaccagccaaguuaacau

SEQ ID NO: 60845 - RNA, 19 nt, Artificial Sequence
  Synthetic
auaccagccaaguuaacau

SEQ ID NO: 60846 - RNA, 20 nt, Artificial Sequence
  Synthetic
aauaccagccaaguuaacau

SEQ ID NO: 60847 - RNA, 21 nt, Artificial Sequence
  Synthetic
caauaccagccaaguuaacau

SEQ ID NO: 60848 - RNA, 23 nt, Artificial Sequence
  Synthetic
ugcaauaccagccaaguuaacau

SEQ ID NO: 60849 - RNA, 24 nt, Artificial Sequence
  Synthetic
uugcaauaccagccaaguuaacau

SEQ ID NO: 60850 - RNA, 18 nt, Artificial Sequence
  Synthetic
aguagcccaauuuaacau

SEQ ID NO: 60851 - RNA, 19 nt, Artificial Sequence
  Synthetic
uaguagcccaauuuaacau

SEQ ID NO: 60852 - RNA, 20 nt, Artificial Sequence
  Synthetic
uuaguagcccaauuuaacau

SEQ ID NO: 60853 - RNA, 21 nt, Artificial Sequence
  Synthetic
uuuaguagcccaauuuaacau

SEQ ID NO: 60854 - RNA, 22 nt, Artificial Sequence
  Synthetic
uuuuaguagcccaauuuaacau

SEQ ID NO: 60855 - RNA, 24 nt, Artificial Sequence
  Synthetic
uguuuuaguagcccaauuuaacau

SEQ ID NO: 60856 - RNA, 18 nt, Artificial Sequence
  Synthetic
cucugaugucuuuaacau

SEQ ID NO: 60857 - RNA, 21 nt, Artificial Sequence
  Synthetic
uggcucugaugucuuuaacau

SEQ ID NO: 60858 - RNA, 23 nt, Artificial Sequence
  Synthetic
uguggcucugaugucuuuaacau

SEQ ID NO: 60859 - RNA, 24 nt, Artificial Sequence
  Synthetic
uuguggcucugaugucuuuaacau

SEQ ID NO: 60860 - RNA, 18 nt, Artificial Sequence
  Synthetic
cauuaccauguaacacau

SEQ ID NO: 60861 - RNA, 19 nt, Artificial Sequence
  Synthetic
ccauuaccauguaacacau

SEQ ID NO: 60862 - RNA, 20 nt, Artificial Sequence
  Synthetic
accauuaccauguaacacau

SEQ ID NO: 60863 - RNA, 21 nt, Artificial Sequence
  Synthetic
caccauuaccauguaacacau

SEQ ID NO: 60864 - RNA, 22 nt, Artificial Sequence
  Synthetic
ccaccauuaccauguaacacau

SEQ ID NO: 60865 - RNA, 23 nt, Artificial Sequence
  Synthetic
uccaccauuaccauguaacacau

SEQ ID NO: 60866 - RNA, 24 nt, Artificial Sequence
  Synthetic
cuccaccauuaccauguaacacau

SEQ ID NO: 60867 - RNA, 18 nt, Artificial Sequence
  Synthetic
cgggcuugagauacacau

SEQ ID NO: 60868 - RNA, 19 nt, Artificial Sequence
  Synthetic
ccgggcuugagauacacau

SEQ ID NO: 60869 - RNA, 20 nt, Artificial Sequence
  Synthetic
uccgggcuugagauacacau

SEQ ID NO: 60870 - RNA, 22 nt, Artificial Sequence
  Synthetic
uguccgggcuugagauacacau

SEQ ID NO: 60871 - RNA, 23 nt, Artificial Sequence
  Synthetic
auguccgggcuugagauacacau

SEQ ID NO: 60872 - RNA, 19 nt, Artificial Sequence
  Synthetic
uguuuaauucauuacacau

SEQ ID NO: 60873 - RNA, 20 nt, Artificial Sequence
  Synthetic
auguuuaauucauuacacau

SEQ ID NO: 60874 - RNA, 22 nt, Artificial Sequence
  Synthetic
agauguuuaauucauuacacau

SEQ ID NO: 60875 - RNA, 23 nt, Artificial Sequence
  Synthetic
cagauguuuaauucauuacacau

SEQ ID NO: 60876 - RNA, 24 nt, Artificial Sequence
  Synthetic
acagauguuuaauucauuacacau

SEQ ID NO: 60877 - RNA, 18 nt, Artificial Sequence
  Synthetic
caccuuucccagccacau

SEQ ID NO: 60878 - RNA, 19 nt, Artificial Sequence
  Synthetic
ucaccuuucccagccacau

SEQ ID NO: 60879 - RNA, 20 nt, Artificial Sequence
  Synthetic
uucaccuuucccagccacau

SEQ ID NO: 60880 - RNA, 21 nt, Artificial Sequence
  Synthetic
auucaccuuucccagccacau

SEQ ID NO: 60881 - RNA, 22 nt, Artificial Sequence
  Synthetic
uauucaccuuucccagccacau

SEQ ID NO: 60882 - RNA, 23 nt, Artificial Sequence
  Synthetic
uuauucaccuuucccagccacau

SEQ ID NO: 60883 - RNA, 24 nt, Artificial Sequence
  Synthetic
auuauucaccuuucccagccacau

SEQ ID NO: 60884 - RNA, 18 nt, Artificial Sequence
  Synthetic
caauaaagccugccacau

SEQ ID NO: 60885 - RNA, 19 nt, Artificial Sequence
  Synthetic
acaauaaagccugccacau

SEQ ID NO: 60886 - RNA, 20 nt, Artificial Sequence
  Synthetic
cacaauaaagccugccacau

SEQ ID NO: 60887 - RNA, 22 nt, Artificial Sequence
  Synthetic
agcacaauaaagccugccacau

SEQ ID NO: 60888 - RNA, 23 nt, Artificial Sequence
  Synthetic
cagcacaauaaagccugccacau

SEQ ID NO: 60889 - RNA, 24 nt, Artificial Sequence
  Synthetic
acagcacaauaaagccugccacau

SEQ ID NO: 60890 - RNA, 19 nt, Artificial Sequence
  Synthetic
agaaccuugccuagcacau

SEQ ID NO: 60891 - RNA, 20 nt, Artificial Sequence
  Synthetic
aagaaccuugccuagcacau

SEQ ID NO: 60892 - RNA, 22 nt, Artificial Sequence
  Synthetic
ugaagaaccuugccuagcacau

SEQ ID NO: 60893 - RNA, 23 nt, Artificial Sequence
  Synthetic
augaagaaccuugccuagcacau

SEQ ID NO: 60894 - RNA, 24 nt, Artificial Sequence
  Synthetic
uaugaagaaccuugccuagcacau

SEQ ID NO: 60895 - RNA, 18 nt, Artificial Sequence
  Synthetic
aacugaguuccugcacau

SEQ ID NO: 60896 - RNA, 19 nt, Artificial Sequence
  Synthetic
uaacugaguuccugcacau

SEQ ID NO: 60897 - RNA, 21 nt, Artificial Sequence
  Synthetic
aguaacugaguuccugcacau

SEQ ID NO: 60898 - RNA, 22 nt, Artificial Sequence
  Synthetic
aaguaacugaguuccugcacau

SEQ ID NO: 60899 - RNA, 23 nt, Artificial Sequence
  Synthetic
uaaguaacugaguuccugcacau

SEQ ID NO: 60900 - RNA, 24 nt, Artificial Sequence
  Synthetic
uuaaguaacugaguuccugcacau

SEQ ID NO: 60901 - RNA, 18 nt, Artificial Sequence
  Synthetic
ugguucuuuccugcacau

SEQ ID NO: 60902 - RNA, 19 nt, Artificial Sequence
  Synthetic
uugguucuuuccugcacau

SEQ ID NO: 60903 - RNA, 20 nt, Artificial Sequence
  Synthetic
cuugguucuuuccugcacau

SEQ ID NO: 60904 - RNA, 21 nt, Artificial Sequence
  Synthetic
ucuugguucuuuccugcacau

SEQ ID NO: 60905 - RNA, 22 nt, Artificial Sequence
  Synthetic
uucuugguucuuuccugcacau

SEQ ID NO: 60906 - RNA, 23 nt, Artificial Sequence
  Synthetic
uuucuugguucuuuccugcacau

SEQ ID NO: 60907 - RNA, 24 nt, Artificial Sequence
  Synthetic
auuucuugguucuuuccugcacau

SEQ ID NO: 60908 - RNA, 18 nt, Artificial Sequence
  Synthetic
cucaagaagucugcacau

SEQ ID NO: 60909 - RNA, 19 nt, Artificial Sequence
  Synthetic
ucucaagaagucugcacau

SEQ ID NO: 60910 - RNA, 20 nt, Artificial Sequence
  Synthetic
uucucaagaagucugcacau

SEQ ID NO: 60911 - RNA, 21 nt, Artificial Sequence
  Synthetic
auucucaagaagucugcacau

SEQ ID NO: 60912 - RNA, 22 nt, Artificial Sequence
  Synthetic
cauucucaagaagucugcacau

SEQ ID NO: 60913 - RNA, 23 nt, Artificial Sequence
  Synthetic
ccauucucaagaagucugcacau

SEQ ID NO: 60914 - RNA, 24 nt, Artificial Sequence
  Synthetic
uccauucucaagaagucugcacau

SEQ ID NO: 60915 - RNA, 19 nt, Artificial Sequence
  Synthetic
uggguucucuguugcacau

SEQ ID NO: 60916 - RNA, 20 nt, Artificial Sequence
  Synthetic
auggguucucuguugcacau

SEQ ID NO: 60917 - RNA, 21 nt, Artificial Sequence
  Synthetic
uauggguucucuguugcacau

SEQ ID NO: 60918 - RNA, 22 nt, Artificial Sequence
  Synthetic
uuauggguucucuguugcacau

SEQ ID NO: 60919 - RNA, 24 nt, Artificial Sequence
  Synthetic
aguuauggguucucuguugcacau

SEQ ID NO: 60920 - RNA, 19 nt, Artificial Sequence
  Synthetic
aggccaguaauacucacau

SEQ ID NO: 60921 - RNA, 20 nt, Artificial Sequence
  Synthetic
uaggccaguaauacucacau

SEQ ID NO: 60922 - RNA, 18 nt, Artificial Sequence
  Synthetic
aauuugcauuagucacau

SEQ ID NO: 60923 - RNA, 19 nt, Artificial Sequence
  Synthetic
caauuugcauuagucacau

SEQ ID NO: 60924 - RNA, 21 nt, Artificial Sequence
  Synthetic
ugcaauuugcauuagucacau

SEQ ID NO: 60925 - RNA, 22 nt, Artificial Sequence
  Synthetic
uugcaauuugcauuagucacau

SEQ ID NO: 60926 - RNA, 23 nt, Artificial Sequence
  Synthetic
auugcaauuugcauuagucacau

SEQ ID NO: 60927 - RNA, 24 nt, Artificial Sequence
  Synthetic
cauugcaauuugcauuagucacau

SEQ ID NO: 60928 - RNA, 18 nt, Artificial Sequence
  Synthetic
uauuggaugcugucacau

SEQ ID NO: 60929 - RNA, 20 nt, Artificial Sequence
  Synthetic
aguauuggaugcugucacau

SEQ ID NO: 60930 - RNA, 22 nt, Artificial Sequence
  Synthetic
cgaguauuggaugcugucacau

SEQ ID NO: 60931 - RNA, 23 nt, Artificial Sequence
  Synthetic
ucgaguauuggaugcugucacau

SEQ ID NO: 60932 - RNA, 24 nt, Artificial Sequence
  Synthetic
aucgaguauuggaugcugucacau

SEQ ID NO: 60933 - RNA, 21 nt, Artificial Sequence
  Synthetic
uaauucuucucugaaagacau

SEQ ID NO: 60934 - RNA, 22 nt, Artificial Sequence
  Synthetic
uuaauucuucucugaaagacau

SEQ ID NO: 60935 - RNA, 23 nt, Artificial Sequence
  Synthetic
auuaauucuucucugaaagacau

SEQ ID NO: 60936 - RNA, 18 nt, Artificial Sequence
  Synthetic
acaugcauauuaagacau

SEQ ID NO: 60937 - RNA, 20 nt, Artificial Sequence
  Synthetic
agacaugcauauuaagacau

SEQ ID NO: 60938 - RNA, 23 nt, Artificial Sequence
  Synthetic
aggagacaugcauauuaagacau

SEQ ID NO: 60939 - RNA, 24 nt, Artificial Sequence
  Synthetic
uaggagacaugcauauuaagacau

SEQ ID NO: 60940 - RNA, 18 nt, Artificial Sequence
  Synthetic
uucaaucaagggagacau

SEQ ID NO: 60941 - RNA, 21 nt, Artificial Sequence
  Synthetic
agguucaaucaagggagacau

SEQ ID NO: 60942 - RNA, 22 nt, Artificial Sequence
  Synthetic
aagguucaaucaagggagacau

SEQ ID NO: 60943 - RNA, 23 nt, Artificial Sequence
  Synthetic
aaagguucaaucaagggagacau

SEQ ID NO: 60944 - RNA, 24 nt, Artificial Sequence
  Synthetic
aaaagguucaaucaagggagacau

SEQ ID NO: 60945 - RNA, 21 nt, Artificial Sequence
  Synthetic
auucaagaaaaaaauagacau

SEQ ID NO: 60946 - RNA, 23 nt, Artificial Sequence
  Synthetic
ugauucaagaaaaaaauagacau

SEQ ID NO: 60947 - RNA, 24 nt, Artificial Sequence
  Synthetic
cugauucaagaaaaaaauagacau

SEQ ID NO: 60948 - RNA, 21 nt, Artificial Sequence
  Synthetic
cuuuuugcauuucauagacau

SEQ ID NO: 60949 - RNA, 22 nt, Artificial Sequence
  Synthetic
ucuuuuugcauuucauagacau

SEQ ID NO: 60950 - RNA, 23 nt, Artificial Sequence
  Synthetic
aucuuuuugcauuucauagacau

SEQ ID NO: 60951 - RNA, 24 nt, Artificial Sequence
  Synthetic
uaucuuuuugcauuucauagacau

SEQ ID NO: 60952 - RNA, 18 nt, Artificial Sequence
  Synthetic
ccugucuccauaggacau

SEQ ID NO: 60953 - RNA, 19 nt, Artificial Sequence
  Synthetic
accugucuccauaggacau

SEQ ID NO: 60954 - RNA, 21 nt, Artificial Sequence
  Synthetic
ugaccugucuccauaggacau

SEQ ID NO: 60955 - RNA, 22 nt, Artificial Sequence
  Synthetic
cugaccugucuccauaggacau

SEQ ID NO: 60956 - RNA, 23 nt, Artificial Sequence
  Synthetic
ccugaccugucuccauaggacau

SEQ ID NO: 60957 - RNA, 24 nt, Artificial Sequence
  Synthetic
accugaccugucuccauaggacau

SEQ ID NO: 60958 - RNA, 18 nt, Artificial Sequence
  Synthetic
uuacaugcguauggacau

SEQ ID NO: 60959 - RNA, 19 nt, Artificial Sequence
  Synthetic
uuuacaugcguauggacau

SEQ ID NO: 60960 - RNA, 20 nt, Artificial Sequence
  Synthetic
uuuuacaugcguauggacau

SEQ ID NO: 60961 - RNA, 21 nt, Artificial Sequence
  Synthetic
auuuuacaugcguauggacau

SEQ ID NO: 60962 - RNA, 22 nt, Artificial Sequence
  Synthetic
uauuuuacaugcguauggacau

SEQ ID NO: 60963 - RNA, 23 nt, Artificial Sequence
  Synthetic
auauuuuacaugcguauggacau

SEQ ID NO: 60964 - RNA, 24 nt, Artificial Sequence
  Synthetic
uauauuuuacaugcguauggacau

SEQ ID NO: 60965 - RNA, 18 nt, Artificial Sequence
  Synthetic
acuaccuggacaugacau

SEQ ID NO: 60966 - RNA, 19 nt, Artificial Sequence
  Synthetic
uacuaccuggacaugacau

SEQ ID NO: 60967 - RNA, 20 nt, Artificial Sequence
  Synthetic
cuacuaccuggacaugacau

SEQ ID NO: 60968 - RNA, 21 nt, Artificial Sequence
  Synthetic
ccuacuaccuggacaugacau

SEQ ID NO: 60969 - RNA, 22 nt, Artificial Sequence
  Synthetic
cccuacuaccuggacaugacau

SEQ ID NO: 60970 - RNA, 24 nt, Artificial Sequence
  Synthetic
agcccuacuaccuggacaugacau

SEQ ID NO: 60971 - RNA, 18 nt, Artificial Sequence
  Synthetic
uauaugugaugaugacau

SEQ ID NO: 60972 - RNA, 19 nt, Artificial Sequence
  Synthetic
uuauaugugaugaugacau

SEQ ID NO: 60973 - RNA, 20 nt, Artificial Sequence
  Synthetic
uuuauaugugaugaugacau

SEQ ID NO: 60974 - RNA, 21 nt, Artificial Sequence
  Synthetic
cuuuauaugugaugaugacau

SEQ ID NO: 60975 - RNA, 22 nt, Artificial Sequence
  Synthetic
ucuuuauaugugaugaugacau

SEQ ID NO: 60976 - RNA, 24 nt, Artificial Sequence
  Synthetic
agucuuuauaugugaugaugacau

SEQ ID NO: 60977 - RNA, 18 nt, Artificial Sequence
  Synthetic
uuauucugucagugacau

SEQ ID NO: 60978 - RNA, 19 nt, Artificial Sequence
  Synthetic
auuauucugucagugacau

SEQ ID NO: 60979 - RNA, 20 nt, Artificial Sequence
  Synthetic
cauuauucugucagugacau

SEQ ID NO: 60980 - RNA, 21 nt, Artificial Sequence
  Synthetic
acauuauucugucagugacau

SEQ ID NO: 60981 - RNA, 22 nt, Artificial Sequence
  Synthetic
cacauuauucugucagugacau

SEQ ID NO: 60982 - RNA, 24 nt, Artificial Sequence
  Synthetic
cgcacauuauucugucagugacau

SEQ ID NO: 60983 - RNA, 18 nt, Artificial Sequence
  Synthetic
uuagugagauaaauacau

SEQ ID NO: 60984 - RNA, 20 nt, Artificial Sequence
  Synthetic
uguuagugagauaaauacau

SEQ ID NO: 60985 - RNA, 21 nt, Artificial Sequence
  Synthetic
auguuagugagauaaauacau

SEQ ID NO: 60986 - RNA, 22 nt, Artificial Sequence
  Synthetic
uauguuagugagauaaauacau

SEQ ID NO: 60987 - RNA, 23 nt, Artificial Sequence
  Synthetic
uuauguuagugagauaaauacau

SEQ ID NO: 60988 - RNA, 24 nt, Artificial Sequence
  Synthetic
uuuauguuagugagauaaauacau

SEQ ID NO: 60989 - RNA, 18 nt, Artificial Sequence
  Synthetic
ucucaccucagcauacau

SEQ ID NO: 60990 - RNA, 19 nt, Artificial Sequence
  Synthetic
uucucaccucagcauacau

SEQ ID NO: 60991 - RNA, 22 nt, Artificial Sequence
  Synthetic
ugguucucaccucagcauacau

SEQ ID NO: 60992 - RNA, 23 nt, Artificial Sequence
  Synthetic
augguucucaccucagcauacau

SEQ ID NO: 60993 - RNA, 24 nt, Artificial Sequence
  Synthetic
aaugguucucaccucagcauacau

SEQ ID NO: 60994 - RNA, 18 nt, Artificial Sequence
  Synthetic
uagaguaucaggauacau

SEQ ID NO: 60995 - RNA, 19 nt, Artificial Sequence
  Synthetic
uuagaguaucaggauacau

SEQ ID NO: 60996 - RNA, 20 nt, Artificial Sequence
  Synthetic
uuuagaguaucaggauacau

SEQ ID NO: 60997 - RNA, 21 nt, Artificial Sequence
  Synthetic
cuuuagaguaucaggauacau

SEQ ID NO: 60998 - RNA, 22 nt, Artificial Sequence
  Synthetic
ucuuuagaguaucaggauacau

SEQ ID NO: 60999 - RNA, 23 nt, Artificial Sequence
  Synthetic
aucuuuagaguaucaggauacau

SEQ ID NO: 61000 - RNA, 24 nt, Artificial Sequence
  Synthetic
uaucuuuagaguaucaggauacau

SEQ ID NO: 61001 - RNA, 21 nt, Artificial Sequence
  Synthetic
ugggaccugggaguuauacau

SEQ ID NO: 61002 - RNA, 22 nt, Artificial Sequence
  Synthetic
uugggaccugggaguuauacau

SEQ ID NO: 61003 - RNA, 23 nt, Artificial Sequence
  Synthetic
auugggaccugggaguuauacau

SEQ ID NO: 61004 - RNA, 24 nt, Artificial Sequence
  Synthetic
aauugggaccugggaguuauacau

SEQ ID NO: 61005 - RNA, 18 nt, Artificial Sequence
  Synthetic
uccuucuugugacuacau

SEQ ID NO: 61006 - RNA, 20 nt, Artificial Sequence
  Synthetic
uguccuucuugugacuacau

SEQ ID NO: 61007 - RNA, 21 nt, Artificial Sequence
  Synthetic
auguccuucuugugacuacau

SEQ ID NO: 61008 - RNA, 22 nt, Artificial Sequence
  Synthetic
aauguccuucuugugacuacau

SEQ ID NO: 61009 - RNA, 24 nt, Artificial Sequence
  Synthetic
agaauguccuucuugugacuacau

SEQ ID NO: 61010 - RNA, 18 nt, Artificial Sequence
  Synthetic
aguauuuaccuacuacau

SEQ ID NO: 61011 - RNA, 19 nt, Artificial Sequence
  Synthetic
aaguauuuaccuacuacau

SEQ ID NO: 61012 - RNA, 20 nt, Artificial Sequence
  Synthetic
aaaguauuuaccuacuacau

SEQ ID NO: 61013 - RNA, 21 nt, Artificial Sequence
  Synthetic
aaaaguauuuaccuacuacau

SEQ ID NO: 61014 - RNA, 18 nt, Artificial Sequence
  Synthetic
cauauauuugaccuacau

SEQ ID NO: 61015 - RNA, 19 nt, Artificial Sequence
  Synthetic
acauauauuugaccuacau

SEQ ID NO: 61016 - RNA, 20 nt, Artificial Sequence
  Synthetic
uacauauauuugaccuacau

SEQ ID NO: 61017 - RNA, 21 nt, Artificial Sequence
  Synthetic
uuacauauauuugaccuacau

SEQ ID NO: 61018 - RNA, 22 nt, Artificial Sequence
  Synthetic
uuuacauauauuugaccuacau

SEQ ID NO: 61019 - RNA, 23 nt, Artificial Sequence
  Synthetic
cuuuacauauauuugaccuacau

SEQ ID NO: 61020 - RNA, 21 nt, Artificial Sequence
  Synthetic
caacugaaaaaaauccuacau

SEQ ID NO: 61021 - RNA, 22 nt, Artificial Sequence
  Synthetic
ccaacugaaaaaaauccuacau

SEQ ID NO: 61022 - RNA, 23 nt, Artificial Sequence
  Synthetic
uccaacugaaaaaaauccuacau

SEQ ID NO: 61023 - RNA, 24 nt, Artificial Sequence
  Synthetic
cuccaacugaaaaaaauccuacau

SEQ ID NO: 61024 - RNA, 19 nt, Artificial Sequence
  Synthetic
agaacauucccugcuacau

SEQ ID NO: 61025 - RNA, 20 nt, Artificial Sequence
  Synthetic
cagaacauucccugcuacau

SEQ ID NO: 61026 - RNA, 22 nt, Artificial Sequence
  Synthetic
agcagaacauucccugcuacau

SEQ ID NO: 61027 - RNA, 18 nt, Artificial Sequence
  Synthetic
aaaugcaaggugcuacau

SEQ ID NO: 61028 - RNA, 19 nt, Artificial Sequence
  Synthetic
uaaaugcaaggugcuacau

SEQ ID NO: 61029 - RNA, 21 nt, Artificial Sequence
  Synthetic
uguaaaugcaaggugcuacau

SEQ ID NO: 61030 - RNA, 22 nt, Artificial Sequence
  Synthetic
auguaaaugcaaggugcuacau

SEQ ID NO: 61031 - RNA, 23 nt, Artificial Sequence
  Synthetic
aauguaaaugcaaggugcuacau

SEQ ID NO: 61032 - RNA, 24 nt, Artificial Sequence
  Synthetic
uaauguaaaugcaaggugcuacau

SEQ ID NO: 61033 - RNA, 18 nt, Artificial Sequence
  Synthetic
ugucuucucauucuacau

SEQ ID NO: 61034 - RNA, 19 nt, Artificial Sequence
  Synthetic
uugucuucucauucuacau

SEQ ID NO: 61035 - RNA, 20 nt, Artificial Sequence
  Synthetic
auugucuucucauucuacau

SEQ ID NO: 61036 - RNA, 21 nt, Artificial Sequence
  Synthetic
cauugucuucucauucuacau

SEQ ID NO: 61037 - RNA, 22 nt, Artificial Sequence
  Synthetic
ccauugucuucucauucuacau

SEQ ID NO: 61038 - RNA, 23 nt, Artificial Sequence
  Synthetic
cccauugucuucucauucuacau

SEQ ID NO: 61039 - RNA, 24 nt, Artificial Sequence
  Synthetic
ccccauugucuucucauucuacau

SEQ ID NO: 61040 - RNA, 19 nt, Artificial Sequence
  Synthetic
ugggggugagccaguacau

SEQ ID NO: 61041 - RNA, 20 nt, Artificial Sequence
  Synthetic
cugggggugagccaguacau

SEQ ID NO: 61042 - RNA, 21 nt, Artificial Sequence
  Synthetic
acugggggugagccaguacau

SEQ ID NO: 61043 - RNA, 23 nt, Artificial Sequence
  Synthetic
ugacugggggugagccaguacau

SEQ ID NO: 61044 - RNA, 24 nt, Artificial Sequence
  Synthetic
uugacugggggugagccaguacau

SEQ ID NO: 61045 - RNA, 19 nt, Artificial Sequence
  Synthetic
aguacguagaaacguacau

SEQ ID NO: 61046 - RNA, 20 nt, Artificial Sequence
  Synthetic
uaguacguagaaacguacau

SEQ ID NO: 61047 - RNA, 21 nt, Artificial Sequence
  Synthetic
auaguacguagaaacguacau

SEQ ID NO: 61048 - RNA, 22 nt, Artificial Sequence
  Synthetic
aauaguacguagaaacguacau

SEQ ID NO: 61049 - RNA, 24 nt, Artificial Sequence
  Synthetic
ugaauaguacguagaaacguacau

SEQ ID NO: 61050 - RNA, 18 nt, Artificial Sequence
  Synthetic
auaaagcaagugguacau

SEQ ID NO: 61051 - RNA, 19 nt, Artificial Sequence
  Synthetic
uauaaagcaagugguacau

SEQ ID NO: 61052 - RNA, 20 nt, Artificial Sequence
  Synthetic
auauaaagcaagugguacau

SEQ ID NO: 61053 - RNA, 21 nt, Artificial Sequence
  Synthetic
uauauaaagcaagugguacau

SEQ ID NO: 61054 - RNA, 22 nt, Artificial Sequence
  Synthetic
uuauauaaagcaagugguacau

SEQ ID NO: 61055 - RNA, 23 nt, Artificial Sequence
  Synthetic
uuuauauaaagcaagugguacau

SEQ ID NO: 61056 - RNA, 24 nt, Artificial Sequence
  Synthetic
uuuuauauaaagcaagugguacau

SEQ ID NO: 61057 - RNA, 18 nt, Artificial Sequence
  Synthetic
aaaguuugaauuguacau

SEQ ID NO: 61058 - RNA, 19 nt, Artificial Sequence
  Synthetic
uaaaguuugaauuguacau

SEQ ID NO: 61059 - RNA, 20 nt, Artificial Sequence
  Synthetic
auaaaguuugaauuguacau

SEQ ID NO: 61060 - RNA, 21 nt, Artificial Sequence
  Synthetic
cauaaaguuugaauuguacau

SEQ ID NO: 61061 - RNA, 22 nt, Artificial Sequence
  Synthetic
ucauaaaguuugaauuguacau

SEQ ID NO: 61062 - RNA, 23 nt, Artificial Sequence
  Synthetic
uucauaaaguuugaauuguacau

SEQ ID NO: 61063 - RNA, 24 nt, Artificial Sequence
  Synthetic
uuucauaaaguuugaauuguacau

SEQ ID NO: 61064 - RNA, 18 nt, Artificial Sequence
  Synthetic
cacugugcucuuguacau

SEQ ID NO: 61065 - RNA, 19 nt, Artificial Sequence
  Synthetic
ucacugugcucuuguacau

SEQ ID NO: 61066 - RNA, 20 nt, Artificial Sequence
  Synthetic
aucacugugcucuuguacau

SEQ ID NO: 61067 - RNA, 21 nt, Artificial Sequence
  Synthetic
aaucacugugcucuuguacau

SEQ ID NO: 61068 - RNA, 22 nt, Artificial Sequence
  Synthetic
aaaucacugugcucuuguacau

SEQ ID NO: 61069 - RNA, 23 nt, Artificial Sequence
  Synthetic
aaaaucacugugcucuuguacau

SEQ ID NO: 61070 - RNA, 24 nt, Artificial Sequence
  Synthetic
caaaaucacugugcucuuguacau

SEQ ID NO: 61071 - RNA, 18 nt, Artificial Sequence
  Synthetic
agugcuauuuuauuacau

SEQ ID NO: 61072 - RNA, 19 nt, Artificial Sequence
  Synthetic
aagugcuauuuuauuacau

SEQ ID NO: 61073 - RNA, 20 nt, Artificial Sequence
  Synthetic
uaagugcuauuuuauuacau

SEQ ID NO: 61074 - RNA, 21 nt, Artificial Sequence
  Synthetic
uuaagugcuauuuuauuacau

SEQ ID NO: 61075 - RNA, 22 nt, Artificial Sequence
  Synthetic
uuuaagugcuauuuuauuacau

SEQ ID NO: 61076 - RNA, 24 nt, Artificial Sequence
  Synthetic
uguuuaagugcuauuuuauuacau

SEQ ID NO: 61077 - RNA, 18 nt, Artificial Sequence
  Synthetic
aaucacacuuaaaaccau

SEQ ID NO: 61078 - RNA, 19 nt, Artificial Sequence
  Synthetic
caaucacacuuaaaaccau

SEQ ID NO: 61079 - RNA, 21 nt, Artificial Sequence
  Synthetic
agcaaucacacuuaaaaccau

SEQ ID NO: 61080 - RNA, 22 nt, Artificial Sequence
  Synthetic
uagcaaucacacuuaaaaccau

SEQ ID NO: 61081 - RNA, 23 nt, Artificial Sequence
  Synthetic
cuagcaaucacacuuaaaaccau

SEQ ID NO: 61082 - RNA, 24 nt, Artificial Sequence
  Synthetic
ucuagcaaucacacuuaaaaccau

SEQ ID NO: 61083 - RNA, 18 nt, Artificial Sequence
  Synthetic
uucaaacucggaaaccau

SEQ ID NO: 61084 - RNA, 19 nt, Artificial Sequence
  Synthetic
uuucaaacucggaaaccau

SEQ ID NO: 61085 - RNA, 20 nt, Artificial Sequence
  Synthetic
uuuucaaacucggaaaccau

SEQ ID NO: 61086 - RNA, 21 nt, Artificial Sequence
  Synthetic
cuuuucaaacucggaaaccau

SEQ ID NO: 61087 - RNA, 22 nt, Artificial Sequence
  Synthetic
acuuuucaaacucggaaaccau

SEQ ID NO: 61088 - RNA, 24 nt, Artificial Sequence
  Synthetic
agacuuuucaaacucggaaaccau

SEQ ID NO: 61089 - RNA, 18 nt, Artificial Sequence
  Synthetic
aaugguaaaagcaaccau

SEQ ID NO: 61090 - RNA, 19 nt, Artificial Sequence
  Synthetic
caaugguaaaagcaaccau

SEQ ID NO: 61091 - RNA, 20 nt, Artificial Sequence
  Synthetic
ccaaugguaaaagcaaccau

SEQ ID NO: 61092 - RNA, 21 nt, Artificial Sequence
  Synthetic
accaaugguaaaagcaaccau

SEQ ID NO: 61093 - RNA, 22 nt, Artificial Sequence
  Synthetic
aaccaaugguaaaagcaaccau

SEQ ID NO: 61094 - RNA, 23 nt, Artificial Sequence
  Synthetic
aaaccaaugguaaaagcaaccau

SEQ ID NO: 61095 - RNA, 24 nt, Artificial Sequence
  Synthetic
aaaaccaaugguaaaagcaaccau

SEQ ID NO: 61096 - RNA, 18 nt, Artificial Sequence
  Synthetic
uugauuauguucaaccau

SEQ ID NO: 61097 - RNA, 19 nt, Artificial Sequence
  Synthetic
auugauuauguucaaccau

SEQ ID NO: 61098 - RNA, 20 nt, Artificial Sequence
  Synthetic
uauugauuauguucaaccau

SEQ ID NO: 61099 - RNA, 21 nt, Artificial Sequence
  Synthetic
uuauugauuauguucaaccau

SEQ ID NO: 61100 - RNA, 22 nt, Artificial Sequence
  Synthetic
uuuauugauuauguucaaccau

SEQ ID NO: 61101 - RNA, 23 nt, Artificial Sequence
  Synthetic
uuuuauugauuauguucaaccau

SEQ ID NO: 61102 - RNA, 24 nt, Artificial Sequence
  Synthetic
uuuuuauugauuauguucaaccau

SEQ ID NO: 61103 - RNA, 19 nt, Artificial Sequence
  Synthetic
agagucuuaccagaaccau

SEQ ID NO: 61104 - RNA, 20 nt, Artificial Sequence
  Synthetic
uagagucuuaccagaaccau

SEQ ID NO: 61105 - RNA, 22 nt, Artificial Sequence
  Synthetic
uguagagucuuaccagaaccau

SEQ ID NO: 61106 - RNA, 23 nt, Artificial Sequence
  Synthetic
auguagagucuuaccagaaccau

SEQ ID NO: 61107 - RNA, 18 nt, Artificial Sequence
  Synthetic
uuaauauaucagaaccau

SEQ ID NO: 61108 - RNA, 19 nt, Artificial Sequence
  Synthetic
cuuaauauaucagaaccau

SEQ ID NO: 61109 - RNA, 20 nt, Artificial Sequence
  Synthetic
ccuuaauauaucagaaccau

SEQ ID NO: 61110 - RNA, 24 nt, Artificial Sequence
  Synthetic
ugggccuuaauauaucagaaccau

SEQ ID NO: 61111 - RNA, 21 nt, Artificial Sequence
  Synthetic
uuuuuaaaaaauaaacaccau

SEQ ID NO: 61112 - RNA, 23 nt, Artificial Sequence
  Synthetic
uguuuuuaaaaaauaaacaccau

SEQ ID NO: 61113 - RNA, 24 nt, Artificial Sequence
  Synthetic
auguuuuuaaaaaauaaacaccau

SEQ ID NO: 61114 - RNA, 18 nt, Artificial Sequence
  Synthetic
uguggcccucaccaccau

SEQ ID NO: 61115 - RNA, 19 nt, Artificial Sequence
  Synthetic
cuguggcccucaccaccau

SEQ ID NO: 61116 - RNA, 20 nt, Artificial Sequence
  Synthetic
ccuguggcccucaccaccau

SEQ ID NO: 61117 - RNA, 21 nt, Artificial Sequence
  Synthetic
cccuguggcccucaccaccau

SEQ ID NO: 61118 - RNA, 22 nt, Artificial Sequence
  Synthetic
ucccuguggcccucaccaccau

SEQ ID NO: 61119 - RNA, 23 nt, Artificial Sequence
  Synthetic
cucccuguggcccucaccaccau

SEQ ID NO: 61120 - RNA, 24 nt, Artificial Sequence
  Synthetic
ucucccuguggcccucaccaccau

SEQ ID NO: 61121 - RNA, 18 nt, Artificial Sequence
  Synthetic
acuacacauuaucaccau

SEQ ID NO: 61122 - RNA, 19 nt, Artificial Sequence
  Synthetic
uacuacacauuaucaccau

SEQ ID NO: 61123 - RNA, 20 nt, Artificial Sequence
  Synthetic
uuacuacacauuaucaccau

SEQ ID NO: 61124 - RNA, 21 nt, Artificial Sequence
  Synthetic
uuuacuacacauuaucaccau

SEQ ID NO: 61125 - RNA, 22 nt, Artificial Sequence
  Synthetic
uuuuacuacacauuaucaccau

SEQ ID NO: 61126 - RNA, 23 nt, Artificial Sequence
  Synthetic
cuuuuacuacacauuaucaccau

SEQ ID NO: 61127 - RNA, 24 nt, Artificial Sequence
  Synthetic
ucuuuuacuacacauuaucaccau

SEQ ID NO: 61128 - RNA, 18 nt, Artificial Sequence
  Synthetic
aauaugcuucaagaccau

SEQ ID NO: 61129 - RNA, 19 nt, Artificial Sequence
  Synthetic
aaauaugcuucaagaccau

SEQ ID NO: 61130 - RNA, 21 nt, Artificial Sequence
  Synthetic
agaaauaugcuucaagaccau

SEQ ID NO: 61131 - RNA, 24 nt, Artificial Sequence
  Synthetic
uggagaaauaugcuucaagaccau

SEQ ID NO: 61132 - RNA, 18 nt, Artificial Sequence
  Synthetic
uagacagcuugcgaccau

SEQ ID NO: 61133 - RNA, 21 nt, Artificial Sequence
  Synthetic
ugguagacagcuugcgaccau

SEQ ID NO: 61134 - RNA, 22 nt, Artificial Sequence
  Synthetic
cugguagacagcuugcgaccau

SEQ ID NO: 61135 - RNA, 23 nt, Artificial Sequence
  Synthetic
ucugguagacagcuugcgaccau

SEQ ID NO: 61136 - RNA, 24 nt, Artificial Sequence
  Synthetic
cucugguagacagcuugcgaccau

SEQ ID NO: 61137 - RNA, 18 nt, Artificial Sequence
  Synthetic
ugaaacuggauggaccau

SEQ ID NO: 61138 - RNA, 21 nt, Artificial Sequence
  Synthetic
uggugaaacuggauggaccau

SEQ ID NO: 61139 - RNA, 18 nt, Artificial Sequence
  Synthetic
ugcuacauauuggaccau

SEQ ID NO: 61140 - RNA, 19 nt, Artificial Sequence
  Synthetic
uugcuacauauuggaccau

SEQ ID NO: 61141 - RNA, 20 nt, Artificial Sequence
  Synthetic
uuugcuacauauuggaccau

SEQ ID NO: 61142 - RNA, 21 nt, Artificial Sequence
  Synthetic
auuugcuacauauuggaccau

SEQ ID NO: 61143 - RNA, 22 nt, Artificial Sequence
  Synthetic
cauuugcuacauauuggaccau

SEQ ID NO: 61144 - RNA, 23 nt, Artificial Sequence
  Synthetic
acauuugcuacauauuggaccau

SEQ ID NO: 61145 - RNA, 24 nt, Artificial Sequence
  Synthetic
cacauuugcuacauauuggaccau

SEQ ID NO: 61146 - RNA, 18 nt, Artificial Sequence
  Synthetic
agacgcuuaugcuaccau

SEQ ID NO: 61147 - RNA, 19 nt, Artificial Sequence
  Synthetic
cagacgcuuaugcuaccau

SEQ ID NO: 61148 - RNA, 20 nt, Artificial Sequence
  Synthetic
ccagacgcuuaugcuaccau

SEQ ID NO: 61149 - RNA, 21 nt, Artificial Sequence
  Synthetic
cccagacgcuuaugcuaccau

SEQ ID NO: 61150 - RNA, 22 nt, Artificial Sequence
  Synthetic
ccccagacgcuuaugcuaccau

SEQ ID NO: 61151 - RNA, 23 nt, Artificial Sequence
  Synthetic
cccccagacgcuuaugcuaccau

SEQ ID NO: 61152 - RNA, 18 nt, Artificial Sequence
  Synthetic
agacacgugcuaacccau

SEQ ID NO: 61153 - RNA, 19 nt, Artificial Sequence
  Synthetic
aagacacgugcuaacccau

SEQ ID NO: 61154 - RNA, 20 nt, Artificial Sequence
  Synthetic
uaagacacgugcuaacccau

SEQ ID NO: 61155 - RNA, 21 nt, Artificial Sequence
  Synthetic
uuaagacacgugcuaacccau

SEQ ID NO: 61156 - RNA, 22 nt, Artificial Sequence
  Synthetic
cuuaagacacgugcuaacccau

SEQ ID NO: 61157 - RNA, 23 nt, Artificial Sequence
  Synthetic
acuuaagacacgugcuaacccau

SEQ ID NO: 61158 - RNA, 24 nt, Artificial Sequence
  Synthetic
cacuuaagacacgugcuaacccau

SEQ ID NO: 61159 - RNA, 18 nt, Artificial Sequence
  Synthetic
aaagcaagaaaaccccau

SEQ ID NO: 61160 - RNA, 19 nt, Artificial Sequence
  Synthetic
caaagcaagaaaaccccau

SEQ ID NO: 61161 - RNA, 20 nt, Artificial Sequence
  Synthetic
acaaagcaagaaaaccccau

SEQ ID NO: 61162 - RNA, 21 nt, Artificial Sequence
  Synthetic
aacaaagcaagaaaaccccau

SEQ ID NO: 61163 - RNA, 22 nt, Artificial Sequence
  Synthetic
aaacaaagcaagaaaaccccau

SEQ ID NO: 61164 - RNA, 23 nt, Artificial Sequence
  Synthetic
aaaacaaagcaagaaaaccccau

SEQ ID NO: 61165 - RNA, 24 nt, Artificial Sequence
  Synthetic
uaaaacaaagcaagaaaaccccau

SEQ ID NO: 61166 - RNA, 18 nt, Artificial Sequence
  Synthetic
ugacucucuuggccccau

SEQ ID NO: 61167 - RNA, 19 nt, Artificial Sequence
  Synthetic
uugacucucuuggccccau

SEQ ID NO: 61168 - RNA, 20 nt, Artificial Sequence
  Synthetic
cuugacucucuuggccccau

SEQ ID NO: 61169 - RNA, 21 nt, Artificial Sequence
  Synthetic
ccuugacucucuuggccccau

SEQ ID NO: 61170 - RNA, 22 nt, Artificial Sequence
  Synthetic
uccuugacucucuuggccccau

SEQ ID NO: 61171 - RNA, 24 nt, Artificial Sequence
  Synthetic
aguccuugacucucuuggccccau

SEQ ID NO: 61172 - RNA, 18 nt, Artificial Sequence
  Synthetic
ugucuacauuguccccau

SEQ ID NO: 61173 - RNA, 20 nt, Artificial Sequence
  Synthetic
ugugucuacauuguccccau

SEQ ID NO: 61174 - RNA, 18 nt, Artificial Sequence
  Synthetic
agaaguuauuuuccccau

SEQ ID NO: 61175 - RNA, 19 nt, Artificial Sequence
  Synthetic
aagaaguuauuuuccccau

SEQ ID NO: 61176 - RNA, 20 nt, Artificial Sequence
  Synthetic
uaagaaguuauuuuccccau

SEQ ID NO: 61177 - RNA, 21 nt, Artificial Sequence
  Synthetic
uuaagaaguuauuuuccccau

SEQ ID NO: 61178 - RNA, 22 nt, Artificial Sequence
  Synthetic
uuuaagaaguuauuuuccccau

SEQ ID NO: 61179 - RNA, 23 nt, Artificial Sequence
  Synthetic
cuuuaagaaguuauuuuccccau

SEQ ID NO: 61180 - RNA, 18 nt, Artificial Sequence
  Synthetic
cagagcauaaaaucccau

SEQ ID NO: 61181 - RNA, 19 nt, Artificial Sequence
  Synthetic
acagagcauaaaaucccau

SEQ ID NO: 61182 - RNA, 20 nt, Artificial Sequence
  Synthetic
uacagagcauaaaaucccau

SEQ ID NO: 61183 - RNA, 22 nt, Artificial Sequence
  Synthetic
aguacagagcauaaaaucccau

SEQ ID NO: 61184 - RNA, 24 nt, Artificial Sequence
  Synthetic
agaguacagagcauaaaaucccau

SEQ ID NO: 61185 - RNA, 18 nt, Artificial Sequence
  Synthetic
caucucucagaaucccau

SEQ ID NO: 61186 - RNA, 19 nt, Artificial Sequence
  Synthetic
ccaucucucagaaucccau

SEQ ID NO: 61187 - RNA, 20 nt, Artificial Sequence
  Synthetic
cccaucucucagaaucccau

SEQ ID NO: 61188 - RNA, 21 nt, Artificial Sequence
  Synthetic
ucccaucucucagaaucccau

SEQ ID NO: 61189 - RNA, 22 nt, Artificial Sequence
  Synthetic
aucccaucucucagaaucccau

SEQ ID NO: 61190 - RNA, 23 nt, Artificial Sequence
  Synthetic
aaucccaucucucagaaucccau

SEQ ID NO: 61191 - RNA, 24 nt, Artificial Sequence
  Synthetic
aaaucccaucucucagaaucccau

SEQ ID NO: 61192 - RNA, 18 nt, Artificial Sequence
  Synthetic
auuuccucacucucccau

SEQ ID NO: 61193 - RNA, 19 nt, Artificial Sequence
  Synthetic
aauuuccucacucucccau

SEQ ID NO: 61194 - RNA, 20 nt, Artificial Sequence
  Synthetic
caauuuccucacucucccau

SEQ ID NO: 61195 - RNA, 21 nt, Artificial Sequence
  Synthetic
acaauuuccucacucucccau

SEQ ID NO: 61196 - RNA, 22 nt, Artificial Sequence
  Synthetic
aacaauuuccucacucucccau

SEQ ID NO: 61197 - RNA, 23 nt, Artificial Sequence
  Synthetic
caacaauuuccucacucucccau

SEQ ID NO: 61198 - RNA, 24 nt, Artificial Sequence
  Synthetic
ccaacaauuuccucacucucccau

SEQ ID NO: 61199 - RNA, 18 nt, Artificial Sequence
  Synthetic
ucuuguuauuauucccau

SEQ ID NO: 61200 - RNA, 19 nt, Artificial Sequence
  Synthetic
uucuuguuauuauucccau

SEQ ID NO: 61201 - RNA, 20 nt, Artificial Sequence
  Synthetic
uuucuuguuauuauucccau

SEQ ID NO: 61202 - RNA, 21 nt, Artificial Sequence
  Synthetic
cuuucuuguuauuauucccau

SEQ ID NO: 61203 - RNA, 22 nt, Artificial Sequence
  Synthetic
ccuuucuuguuauuauucccau

SEQ ID NO: 61204 - RNA, 23 nt, Artificial Sequence
  Synthetic
cccuuucuuguuauuauucccau

SEQ ID NO: 61205 - RNA, 24 nt, Artificial Sequence
  Synthetic
ccccuuucuuguuauuauucccau

SEQ ID NO: 61206 - RNA, 18 nt, Artificial Sequence
  Synthetic
aacagacuucuuucccau

SEQ ID NO: 61207 - RNA, 20 nt, Artificial Sequence
  Synthetic
cgaacagacuucuuucccau

SEQ ID NO: 61208 - RNA, 22 nt, Artificial Sequence
  Synthetic
agcgaacagacuucuuucccau

SEQ ID NO: 61209 - RNA, 23 nt, Artificial Sequence
  Synthetic
aagcgaacagacuucuuucccau

SEQ ID NO: 61210 - RNA, 24 nt, Artificial Sequence
  Synthetic
aaagcgaacagacuucuuucccau

SEQ ID NO: 61211 - RNA, 18 nt, Artificial Sequence
  Synthetic
aauuaaauguuaagccau

SEQ ID NO: 61212 - RNA, 19 nt, Artificial Sequence
  Synthetic
aaauuaaauguuaagccau

SEQ ID NO: 61213 - RNA, 20 nt, Artificial Sequence
  Synthetic
uaaauuaaauguuaagccau

SEQ ID NO: 61214 - RNA, 21 nt, Artificial Sequence
  Synthetic
auaaauuaaauguuaagccau

SEQ ID NO: 61215 - RNA, 22 nt, Artificial Sequence
  Synthetic
uauaaauuaaauguuaagccau

SEQ ID NO: 61216 - RNA, 23 nt, Artificial Sequence
  Synthetic
uuauaaauuaaauguuaagccau

SEQ ID NO: 61217 - RNA, 24 nt, Artificial Sequence
  Synthetic
uuuauaaauuaaauguuaagccau

SEQ ID NO: 61218 - RNA, 18 nt, Artificial Sequence
  Synthetic
ccacuccguuuuagccau

SEQ ID NO: 61219 - RNA, 19 nt, Artificial Sequence
  Synthetic
uccacuccguuuuagccau

SEQ ID NO: 61220 - RNA, 22 nt, Artificial Sequence
  Synthetic
ugguccacuccguuuuagccau

SEQ ID NO: 61221 - RNA, 23 nt, Artificial Sequence
  Synthetic
augguccacuccguuuuagccau

SEQ ID NO: 61222 - RNA, 24 nt, Artificial Sequence
  Synthetic
caugguccacuccguuuuagccau

SEQ ID NO: 61223 - RNA, 19 nt, Artificial Sequence
  Synthetic
ugauuucuuccauggccau

SEQ ID NO: 61224 - RNA, 20 nt, Artificial Sequence
  Synthetic
cugauuucuuccauggccau

SEQ ID NO: 61225 - RNA, 21 nt, Artificial Sequence
  Synthetic
ucugauuucuuccauggccau

SEQ ID NO: 61226 - RNA, 22 nt, Artificial Sequence
  Synthetic
uucugauuucuuccauggccau

SEQ ID NO: 61227 - RNA, 23 nt, Artificial Sequence
  Synthetic
uuucugauuucuuccauggccau

SEQ ID NO: 61228 - RNA, 20 nt, Artificial Sequence
  Synthetic
aggagauaccuaguggccau

SEQ ID NO: 61229 - RNA, 22 nt, Artificial Sequence
  Synthetic
ugaggagauaccuaguggccau

SEQ ID NO: 61230 - RNA, 23 nt, Artificial Sequence
  Synthetic
cugaggagauaccuaguggccau

SEQ ID NO: 61231 - RNA, 24 nt, Artificial Sequence
  Synthetic
acugaggagauaccuaguggccau

SEQ ID NO: 61232 - RNA, 19 nt, Artificial Sequence
  Synthetic
ugcaauuaggggaugccau

SEQ ID NO: 61233 - RNA, 20 nt, Artificial Sequence
  Synthetic
uugcaauuaggggaugccau

SEQ ID NO: 61234 - RNA, 21 nt, Artificial Sequence
  Synthetic
auugcaauuaggggaugccau

SEQ ID NO: 61235 - RNA, 22 nt, Artificial Sequence
  Synthetic
cauugcaauuaggggaugccau

SEQ ID NO: 61236 - RNA, 23 nt, Artificial Sequence
  Synthetic
acauugcaauuaggggaugccau

SEQ ID NO: 61237 - RNA, 24 nt, Artificial Sequence
  Synthetic
uacauugcaauuaggggaugccau

SEQ ID NO: 61238 - RNA, 18 nt, Artificial Sequence
  Synthetic
uaucagauaugaugccau

SEQ ID NO: 61239 - RNA, 19 nt, Artificial Sequence
  Synthetic
auaucagauaugaugccau

SEQ ID NO: 61240 - RNA, 20 nt, Artificial Sequence
  Synthetic
uauaucagauaugaugccau

SEQ ID NO: 61241 - RNA, 21 nt, Artificial Sequence
  Synthetic
uuauaucagauaugaugccau

SEQ ID NO: 61242 - RNA, 22 nt, Artificial Sequence
  Synthetic
uuuauaucagauaugaugccau

SEQ ID NO: 61243 - RNA, 23 nt, Artificial Sequence
  Synthetic
auuuauaucagauaugaugccau

SEQ ID NO: 61244 - RNA, 24 nt, Artificial Sequence
  Synthetic
uauuuauaucagauaugaugccau

SEQ ID NO: 61245 - RNA, 20 nt, Artificial Sequence
  Synthetic
agggucugaggccuugccau

SEQ ID NO: 61246 - RNA, 21 nt, Artificial Sequence
  Synthetic
aagggucugaggccuugccau

SEQ ID NO: 61247 - RNA, 22 nt, Artificial Sequence
  Synthetic
aaagggucugaggccuugccau

SEQ ID NO: 61248 - RNA, 23 nt, Artificial Sequence
  Synthetic
caaagggucugaggccuugccau

SEQ ID NO: 61249 - RNA, 24 nt, Artificial Sequence
  Synthetic
acaaagggucugaggccuugccau

SEQ ID NO: 61250 - RNA, 18 nt, Artificial Sequence
  Synthetic
acccaugugagaauccau

SEQ ID NO: 61251 - RNA, 19 nt, Artificial Sequence
  Synthetic
aacccaugugagaauccau

SEQ ID NO: 61252 - RNA, 20 nt, Artificial Sequence
  Synthetic
aaacccaugugagaauccau

SEQ ID NO: 61253 - RNA, 21 nt, Artificial Sequence
  Synthetic
aaaacccaugugagaauccau

SEQ ID NO: 61254 - RNA, 22 nt, Artificial Sequence
  Synthetic
uaaaacccaugugagaauccau

SEQ ID NO: 61255 - RNA, 23 nt, Artificial Sequence
  Synthetic
cuaaaacccaugugagaauccau

SEQ ID NO: 61256 - RNA, 24 nt, Artificial Sequence
  Synthetic
acuaaaacccaugugagaauccau

SEQ ID NO: 61257 - RNA, 18 nt, Artificial Sequence
  Synthetic
aacaacaagugcauccau

SEQ ID NO: 61258 - RNA, 19 nt, Artificial Sequence
  Synthetic
caacaacaagugcauccau

SEQ ID NO: 61259 - RNA, 22 nt, Artificial Sequence
  Synthetic
aggcaacaacaagugcauccau

SEQ ID NO: 61260 - RNA, 23 nt, Artificial Sequence
  Synthetic
uaggcaacaacaagugcauccau

SEQ ID NO: 61261 - RNA, 24 nt, Artificial Sequence
  Synthetic
uuaggcaacaacaagugcauccau

SEQ ID NO: 61262 - RNA, 19 nt, Artificial Sequence
  Synthetic
agagagugucaugauccau

SEQ ID NO: 61263 - RNA, 20 nt, Artificial Sequence
  Synthetic
cagagagugucaugauccau

SEQ ID NO: 61264 - RNA, 21 nt, Artificial Sequence
  Synthetic
ccagagagugucaugauccau

SEQ ID NO: 61265 - RNA, 18 nt, Artificial Sequence
  Synthetic
ugauguuuacauauccau

SEQ ID NO: 61266 - RNA, 21 nt, Artificial Sequence
  Synthetic
uggugauguuuacauauccau

SEQ ID NO: 61267 - RNA, 24 nt, Artificial Sequence
  Synthetic
ugguggugauguuuacauauccau

SEQ ID NO: 61268 - RNA, 18 nt, Artificial Sequence
  Synthetic
uuuccaugguauauccau

SEQ ID NO: 61269 - RNA, 19 nt, Artificial Sequence
  Synthetic
uuuuccaugguauauccau

SEQ ID NO: 61270 - RNA, 20 nt, Artificial Sequence
  Synthetic
uuuuuccaugguauauccau

SEQ ID NO: 61271 - RNA, 21 nt, Artificial Sequence
  Synthetic
uuuuuuccaugguauauccau

SEQ ID NO: 61272 - RNA, 22 nt, Artificial Sequence
  Synthetic
uuuuuuuccaugguauauccau

SEQ ID NO: 61273 - RNA, 23 nt, Artificial Sequence
  Synthetic
cuuuuuuuccaugguauauccau

SEQ ID NO: 61274 - RNA, 24 nt, Artificial Sequence
  Synthetic
ucuuuuuuuccaugguauauccau

SEQ ID NO: 61275 - RNA, 18 nt, Artificial Sequence
  Synthetic
cuauugcauucuauccau

SEQ ID NO: 61276 - RNA, 19 nt, Artificial Sequence
  Synthetic
ucuauugcauucuauccau

SEQ ID NO: 61277 - RNA, 20 nt, Artificial Sequence
  Synthetic
aucuauugcauucuauccau

SEQ ID NO: 61278 - RNA, 21 nt, Artificial Sequence
  Synthetic
aaucuauugcauucuauccau

SEQ ID NO: 61279 - RNA, 22 nt, Artificial Sequence
  Synthetic
uaaucuauugcauucuauccau

SEQ ID NO: 61280 - RNA, 23 nt, Artificial Sequence
  Synthetic
uuaaucuauugcauucuauccau

SEQ ID NO: 61281 - RNA, 24 nt, Artificial Sequence
  Synthetic
auuaaucuauugcauucuauccau

SEQ ID NO: 61282 - RNA, 18 nt, Artificial Sequence
  Synthetic
caacaauauucacuccau

SEQ ID NO: 61283 - RNA, 19 nt, Artificial Sequence
  Synthetic
ccaacaauauucacuccau

SEQ ID NO: 61284 - RNA, 20 nt, Artificial Sequence
  Synthetic
accaacaauauucacuccau

SEQ ID NO: 61285 - RNA, 21 nt, Artificial Sequence
  Synthetic
caccaacaauauucacuccau

SEQ ID NO: 61286 - RNA, 22 nt, Artificial Sequence
  Synthetic
ccaccaacaauauucacuccau

SEQ ID NO: 61287 - RNA, 24 nt, Artificial Sequence
  Synthetic
agccaccaacaauauucacuccau

SEQ ID NO: 61288 - RNA, 18 nt, Artificial Sequence
  Synthetic
uuugcagaaccccuccau

SEQ ID NO: 61289 - RNA, 20 nt, Artificial Sequence
  Synthetic
aguuugcagaaccccuccau

SEQ ID NO: 61290 - RNA, 21 nt, Artificial Sequence
  Synthetic
caguuugcagaaccccuccau

SEQ ID NO: 61291 - RNA, 23 nt, Artificial Sequence
  Synthetic
ugcaguuugcagaaccccuccau

SEQ ID NO: 61292 - RNA, 19 nt, Artificial Sequence
  Synthetic
agaggacuggcuccuccau

SEQ ID NO: 61293 - RNA, 20 nt, Artificial Sequence
  Synthetic
cagaggacuggcuccuccau

SEQ ID NO: 61294 - RNA, 21 nt, Artificial Sequence
  Synthetic
acagaggacuggcuccuccau

SEQ ID NO: 61295 - RNA, 22 nt, Artificial Sequence
  Synthetic
uacagaggacuggcuccuccau

SEQ ID NO: 61296 - RNA, 23 nt, Artificial Sequence
  Synthetic
auacagaggacuggcuccuccau

SEQ ID NO: 61297 - RNA, 24 nt, Artificial Sequence
  Synthetic
aauacagaggacuggcuccuccau

SEQ ID NO: 61298 - RNA, 18 nt, Artificial Sequence
  Synthetic
cauaccucucuucuccau

SEQ ID NO: 61299 - RNA, 19 nt, Artificial Sequence
  Synthetic
ucauaccucucuucuccau

SEQ ID NO: 61300 - RNA, 20 nt, Artificial Sequence
  Synthetic
uucauaccucucuucuccau

SEQ ID NO: 61301 - RNA, 21 nt, Artificial Sequence
  Synthetic
auucauaccucucuucuccau

SEQ ID NO: 61302 - RNA, 22 nt, Artificial Sequence
  Synthetic
uauucauaccucucuucuccau

SEQ ID NO: 61303 - RNA, 23 nt, Artificial Sequence
  Synthetic
uuauucauaccucucuucuccau

SEQ ID NO: 61304 - RNA, 24 nt, Artificial Sequence
  Synthetic
uuuauucauaccucucuucuccau

SEQ ID NO: 61305 - RNA, 18 nt, Artificial Sequence
  Synthetic
acaugcuguuuucuccau

SEQ ID NO: 61306 - RNA, 19 nt, Artificial Sequence
  Synthetic
uacaugcuguuuucuccau

SEQ ID NO: 61307 - RNA, 20 nt, Artificial Sequence
  Synthetic
auacaugcuguuuucuccau

SEQ ID NO: 61308 - RNA, 21 nt, Artificial Sequence
  Synthetic
cauacaugcuguuuucuccau

SEQ ID NO: 61309 - RNA, 22 nt, Artificial Sequence
  Synthetic
ucauacaugcuguuuucuccau

SEQ ID NO: 61310 - RNA, 24 nt, Artificial Sequence
  Synthetic
cgucauacaugcuguuuucuccau

SEQ ID NO: 61311 - RNA, 18 nt, Artificial Sequence
  Synthetic
cuuuaaguuuuucuccau

SEQ ID NO: 61312 - RNA, 19 nt, Artificial Sequence
  Synthetic
ccuuuaaguuuuucuccau

SEQ ID NO: 61313 - RNA, 20 nt, Artificial Sequence
  Synthetic
accuuuaaguuuuucuccau

SEQ ID NO: 61314 - RNA, 21 nt, Artificial Sequence
  Synthetic
aaccuuuaaguuuuucuccau

SEQ ID NO: 61315 - RNA, 22 nt, Artificial Sequence
  Synthetic
uaaccuuuaaguuuuucuccau

SEQ ID NO: 61316 - RNA, 23 nt, Artificial Sequence
  Synthetic
uuaaccuuuaaguuuuucuccau

SEQ ID NO: 61317 - RNA, 24 nt, Artificial Sequence
  Synthetic
uuuaaccuuuaaguuuuucuccau

SEQ ID NO: 61318 - RNA, 18 nt, Artificial Sequence
  Synthetic
uaucccaguuuuguccau

SEQ ID NO: 61319 - RNA, 19 nt, Artificial Sequence
  Synthetic
uuaucccaguuuuguccau

SEQ ID NO: 61320 - RNA, 20 nt, Artificial Sequence
  Synthetic
uuuaucccaguuuuguccau

SEQ ID NO: 61321 - RNA, 21 nt, Artificial Sequence
  Synthetic
auuuaucccaguuuuguccau

SEQ ID NO: 61322 - RNA, 22 nt, Artificial Sequence
  Synthetic
uauuuaucccaguuuuguccau

SEQ ID NO: 61323 - RNA, 23 nt, Artificial Sequence
  Synthetic
uuauuuaucccaguuuuguccau

SEQ ID NO: 61324 - RNA, 24 nt, Artificial Sequence
  Synthetic
auuauuuaucccaguuuuguccau

SEQ ID NO: 61325 - RNA, 18 nt, Artificial Sequence
  Synthetic
aaacuucaccaauuccau

SEQ ID NO: 61326 - RNA, 19 nt, Artificial Sequence
  Synthetic
uaaacuucaccaauuccau

SEQ ID NO: 61327 - RNA, 20 nt, Artificial Sequence
  Synthetic
auaaacuucaccaauuccau

SEQ ID NO: 61328 - RNA, 21 nt, Artificial Sequence
  Synthetic
aauaaacuucaccaauuccau

SEQ ID NO: 61329 - RNA, 22 nt, Artificial Sequence
  Synthetic
aaauaaacuucaccaauuccau

SEQ ID NO: 61330 - RNA, 23 nt, Artificial Sequence
  Synthetic
aaaauaaacuucaccaauuccau

SEQ ID NO: 61331 - RNA, 24 nt, Artificial Sequence
  Synthetic
uaaaauaaacuucaccaauuccau

SEQ ID NO: 61332 - RNA, 18 nt, Artificial Sequence
  Synthetic
cugauuuuacucuuccau

SEQ ID NO: 61333 - RNA, 19 nt, Artificial Sequence
  Synthetic
ucugauuuuacucuuccau

SEQ ID NO: 61334 - RNA, 21 nt, Artificial Sequence
  Synthetic
ugucugauuuuacucuuccau

SEQ ID NO: 61335 - RNA, 22 nt, Artificial Sequence
  Synthetic
augucugauuuuacucuuccau

SEQ ID NO: 61336 - RNA, 23 nt, Artificial Sequence
  Synthetic
aaugucugauuuuacucuuccau

SEQ ID NO: 61337 - RNA, 24 nt, Artificial Sequence
  Synthetic
aaaugucugauuuuacucuuccau

SEQ ID NO: 61338 - RNA, 22 nt, Artificial Sequence
  Synthetic
ugaaucuugucacuucuuccau

SEQ ID NO: 61339 - RNA, 23 nt, Artificial Sequence
  Synthetic
augaaucuugucacuucuuccau

SEQ ID NO: 61340 - RNA, 24 nt, Artificial Sequence
  Synthetic
uaugaaucuugucacuucuuccau

SEQ ID NO: 61341 - RNA, 19 nt, Artificial Sequence
  Synthetic
ugguaaguuucaguuccau

SEQ ID NO: 61342 - RNA, 20 nt, Artificial Sequence
  Synthetic
uugguaaguuucaguuccau

SEQ ID NO: 61343 - RNA, 22 nt, Artificial Sequence
  Synthetic
uguugguaaguuucaguuccau

SEQ ID NO: 61344 - RNA, 23 nt, Artificial Sequence
  Synthetic
uuguugguaaguuucaguuccau

SEQ ID NO: 61345 - RNA, 19 nt, Artificial Sequence
  Synthetic
uguuuauuaucuuuuccau

SEQ ID NO: 61346 - RNA, 20 nt, Artificial Sequence
  Synthetic
auguuuauuaucuuuuccau

SEQ ID NO: 61347 - RNA, 21 nt, Artificial Sequence
  Synthetic
cauguuuauuaucuuuuccau

SEQ ID NO: 61348 - RNA, 22 nt, Artificial Sequence
  Synthetic
ucauguuuauuaucuuuuccau

SEQ ID NO: 61349 - RNA, 23 nt, Artificial Sequence
  Synthetic
uucauguuuauuaucuuuuccau

SEQ ID NO: 61350 - RNA, 24 nt, Artificial Sequence
  Synthetic
uuucauguuuauuaucuuuuccau

SEQ ID NO: 61351 - RNA, 18 nt, Artificial Sequence
  Synthetic
ucuauacacaaaaagcau

SEQ ID NO: 61352 - RNA, 20 nt, Artificial Sequence
  Synthetic
ugucuauacacaaaaagcau

SEQ ID NO: 61353 - RNA, 21 nt, Artificial Sequence
  Synthetic
cugucuauacacaaaaagcau

SEQ ID NO: 61354 - RNA, 22 nt, Artificial Sequence
  Synthetic
ucugucuauacacaaaaagcau

SEQ ID NO: 61355 - RNA, 23 nt, Artificial Sequence
  Synthetic
cucugucuauacacaaaaagcau

SEQ ID NO: 61356 - RNA, 24 nt, Artificial Sequence
  Synthetic
acucugucuauacacaaaaagcau

SEQ ID NO: 61357 - RNA, 21 nt, Artificial Sequence
  Synthetic
aaaucaacaacauaaaagcau

SEQ ID NO: 61358 - RNA, 22 nt, Artificial Sequence
  Synthetic
caaaucaacaacauaaaagcau

SEQ ID NO: 61359 - RNA, 23 nt, Artificial Sequence
  Synthetic
acaaaucaacaacauaaaagcau

SEQ ID NO: 61360 - RNA, 18 nt, Artificial Sequence
  Synthetic
ugauacaacucuaagcau

SEQ ID NO: 61361 - RNA, 20 nt, Artificial Sequence
  Synthetic
ugugauacaacucuaagcau

SEQ ID NO: 61362 - RNA, 21 nt, Artificial Sequence
  Synthetic
augugauacaacucuaagcau

SEQ ID NO: 61363 - RNA, 22 nt, Artificial Sequence
  Synthetic
aaugugauacaacucuaagcau

SEQ ID NO: 61364 - RNA, 23 nt, Artificial Sequence
  Synthetic
aaaugugauacaacucuaagcau

SEQ ID NO: 61365 - RNA, 24 nt, Artificial Sequence
  Synthetic
uaaaugugauacaacucuaagcau

SEQ ID NO: 61366 - RNA, 18 nt, Artificial Sequence
  Synthetic
uccucauaagguaagcau

SEQ ID NO: 61367 - RNA, 19 nt, Artificial Sequence
  Synthetic
uuccucauaagguaagcau

SEQ ID NO: 61368 - RNA, 20 nt, Artificial Sequence
  Synthetic
auuccucauaagguaagcau

SEQ ID NO: 61369 - RNA, 21 nt, Artificial Sequence
  Synthetic
uauuccucauaagguaagcau

SEQ ID NO: 61370 - RNA, 23 nt, Artificial Sequence
  Synthetic
uguauuccucauaagguaagcau

SEQ ID NO: 61371 - RNA, 24 nt, Artificial Sequence
  Synthetic
uuguauuccucauaagguaagcau

SEQ ID NO: 61372 - RNA, 18 nt, Artificial Sequence
  Synthetic
uuaauagggaaacagcau

SEQ ID NO: 61373 - RNA, 20 nt, Artificial Sequence
  Synthetic
uguuaauagggaaacagcau

SEQ ID NO: 61374 - RNA, 21 nt, Artificial Sequence
  Synthetic
auguuaauagggaaacagcau

SEQ ID NO: 61375 - RNA, 22 nt, Artificial Sequence
  Synthetic
uauguuaauagggaaacagcau

SEQ ID NO: 61376 - RNA, 23 nt, Artificial Sequence
  Synthetic
uuauguuaauagggaaacagcau

SEQ ID NO: 61377 - RNA, 24 nt, Artificial Sequence
  Synthetic
uuuauguuaauagggaaacagcau

SEQ ID NO: 61378 - RNA, 18 nt, Artificial Sequence
  Synthetic
uaauuguuucaacagcau

SEQ ID NO: 61379 - RNA, 19 nt, Artificial Sequence
  Synthetic
uuaauuguuucaacagcau

SEQ ID NO: 61380 - RNA, 20 nt, Artificial Sequence
  Synthetic
uuuaauuguuucaacagcau

SEQ ID NO: 61381 - RNA, 21 nt, Artificial Sequence
  Synthetic
uuuuaauuguuucaacagcau

SEQ ID NO: 61382 - RNA, 22 nt, Artificial Sequence
  Synthetic
uuuuuaauuguuucaacagcau

SEQ ID NO: 61383 - RNA, 23 nt, Artificial Sequence
  Synthetic
cuuuuuaauuguuucaacagcau

SEQ ID NO: 61384 - RNA, 24 nt, Artificial Sequence
  Synthetic
ucuuuuuaauuguuucaacagcau

SEQ ID NO: 61385 - RNA, 18 nt, Artificial Sequence
  Synthetic
uagauauaauaccagcau

SEQ ID NO: 61386 - RNA, 19 nt, Artificial Sequence
  Synthetic
auagauauaauaccagcau

SEQ ID NO: 61387 - RNA, 21 nt, Artificial Sequence
  Synthetic
ugauagauauaauaccagcau

SEQ ID NO: 61388 - RNA, 22 nt, Artificial Sequence
  Synthetic
cugauagauauaauaccagcau

SEQ ID NO: 61389 - RNA, 23 nt, Artificial Sequence
  Synthetic
ucugauagauauaauaccagcau

SEQ ID NO: 61390 - RNA, 24 nt, Artificial Sequence
  Synthetic
uucugauagauauaauaccagcau

SEQ ID NO: 61391 - RNA, 18 nt, Artificial Sequence
  Synthetic
uuaacccccacgcagcau

SEQ ID NO: 61392 - RNA, 19 nt, Artificial Sequence
  Synthetic
uuuaacccccacgcagcau

SEQ ID NO: 61393 - RNA, 20 nt, Artificial Sequence
  Synthetic
auuuaacccccacgcagcau

SEQ ID NO: 61394 - RNA, 21 nt, Artificial Sequence
  Synthetic
aauuuaacccccacgcagcau

SEQ ID NO: 61395 - RNA, 22 nt, Artificial Sequence
  Synthetic
aaauuuaacccccacgcagcau

SEQ ID NO: 61396 - RNA, 23 nt, Artificial Sequence
  Synthetic
aaaauuuaacccccacgcagcau

SEQ ID NO: 61397 - RNA, 24 nt, Artificial Sequence
  Synthetic
uaaaauuuaacccccacgcagcau

SEQ ID NO: 61398 - RNA, 20 nt, Artificial Sequence
  Synthetic
uggaagacgaauaucagcau

SEQ ID NO: 61399 - RNA, 19 nt, Artificial Sequence
  Synthetic
agauuuuaaaguucagcau

SEQ ID NO: 61400 - RNA, 20 nt, Artificial Sequence
  Synthetic
aagauuuuaaaguucagcau

SEQ ID NO: 61401 - RNA, 21 nt, Artificial Sequence
  Synthetic
aaagauuuuaaaguucagcau

SEQ ID NO: 61402 - RNA, 23 nt, Artificial Sequence
  Synthetic
agaaagauuuuaaaguucagcau

SEQ ID NO: 61403 - RNA, 19 nt, Artificial Sequence
  Synthetic
ugugacuucaggagagcau

SEQ ID NO: 61404 - RNA, 20 nt, Artificial Sequence
  Synthetic
cugugacuucaggagagcau

SEQ ID NO: 61405 - RNA, 21 nt, Artificial Sequence
  Synthetic
ucugugacuucaggagagcau

SEQ ID NO: 61406 - RNA, 22 nt, Artificial Sequence
  Synthetic
uucugugacuucaggagagcau

SEQ ID NO: 61407 - RNA, 23 nt, Artificial Sequence
  Synthetic
uuucugugacuucaggagagcau

SEQ ID NO: 61408 - RNA, 24 nt, Artificial Sequence
  Synthetic
cuuucugugacuucaggagagcau

SEQ ID NO: 61409 - RNA, 18 nt, Artificial Sequence
  Synthetic
auucuuaugguagagcau

SEQ ID NO: 61410 - RNA, 19 nt, Artificial Sequence
  Synthetic
aauucuuaugguagagcau

SEQ ID NO: 61411 - RNA, 20 nt, Artificial Sequence
  Synthetic
uaauucuuaugguagagcau

SEQ ID NO: 61412 - RNA, 22 nt, Artificial Sequence
  Synthetic
uguaauucuuaugguagagcau

SEQ ID NO: 61413 - RNA, 23 nt, Artificial Sequence
  Synthetic
uuguaauucuuaugguagagcau

SEQ ID NO: 61414 - RNA, 24 nt, Artificial Sequence
  Synthetic
uuuguaauucuuaugguagagcau

SEQ ID NO: 61415 - RNA, 18 nt, Artificial Sequence
  Synthetic
acugagguaacugagcau

SEQ ID NO: 61416 - RNA, 19 nt, Artificial Sequence
  Synthetic
cacugagguaacugagcau

SEQ ID NO: 61417 - RNA, 20 nt, Artificial Sequence
  Synthetic
ccacugagguaacugagcau

SEQ ID NO: 61418 - RNA, 23 nt, Artificial Sequence
  Synthetic
aggccacugagguaacugagcau

SEQ ID NO: 61419 - RNA, 24 nt, Artificial Sequence
  Synthetic
aaggccacugagguaacugagcau

SEQ ID NO: 61420 - RNA, 18 nt, Artificial Sequence
  Synthetic
ccuugaagagcauagcau

SEQ ID NO: 61421 - RNA, 19 nt, Artificial Sequence
  Synthetic
uccuugaagagcauagcau

SEQ ID NO: 61422 - RNA, 20 nt, Artificial Sequence
  Synthetic
uuccuugaagagcauagcau

SEQ ID NO: 61423 - RNA, 21 nt, Artificial Sequence
  Synthetic
uuuccuugaagagcauagcau

SEQ ID NO: 61424 - RNA, 22 nt, Artificial Sequence
  Synthetic
uuuuccuugaagagcauagcau

SEQ ID NO: 61425 - RNA, 23 nt, Artificial Sequence
  Synthetic
uuuuuccuugaagagcauagcau

SEQ ID NO: 61426 - RNA, 24 nt, Artificial Sequence
  Synthetic
uuuuuuccuugaagagcauagcau

SEQ ID NO: 61427 - RNA, 18 nt, Artificial Sequence
  Synthetic
acaucacaaagguagcau

SEQ ID NO: 61428 - RNA, 19 nt, Artificial Sequence
  Synthetic
aacaucacaaagguagcau

SEQ ID NO: 61429 - RNA, 20 nt, Artificial Sequence
  Synthetic
caacaucacaaagguagcau

SEQ ID NO: 61430 - RNA, 21 nt, Artificial Sequence
  Synthetic
ccaacaucacaaagguagcau

SEQ ID NO: 61431 - RNA, 22 nt, Artificial Sequence
  Synthetic
accaacaucacaaagguagcau

SEQ ID NO: 61432 - RNA, 18 nt, Artificial Sequence
  Synthetic
ugaucagaaaacacgcau

SEQ ID NO: 61433 - RNA, 21 nt, Artificial Sequence
  Synthetic
aggugaucagaaaacacgcau

SEQ ID NO: 61434 - RNA, 22 nt, Artificial Sequence
  Synthetic
aaggugaucagaaaacacgcau

SEQ ID NO: 61435 - RNA, 23 nt, Artificial Sequence
  Synthetic
uaaggugaucagaaaacacgcau

SEQ ID NO: 61436 - RNA, 24 nt, Artificial Sequence
  Synthetic
auaaggugaucagaaaacacgcau

SEQ ID NO: 61437 - RNA, 18 nt, Artificial Sequence
  Synthetic
uugcuuaugaugccgcau

SEQ ID NO: 61438 - RNA, 19 nt, Artificial Sequence
  Synthetic
cuugcuuaugaugccgcau

SEQ ID NO: 61439 - RNA, 20 nt, Artificial Sequence
  Synthetic
acuugcuuaugaugccgcau

SEQ ID NO: 61440 - RNA, 21 nt, Artificial Sequence
  Synthetic
cacuugcuuaugaugccgcau

SEQ ID NO: 61441 - RNA, 22 nt, Artificial Sequence
  Synthetic
ucacuugcuuaugaugccgcau

SEQ ID NO: 61442 - RNA, 23 nt, Artificial Sequence
  Synthetic
aucacuugcuuaugaugccgcau

SEQ ID NO: 61443 - RNA, 24 nt, Artificial Sequence
  Synthetic
caucacuugcuuaugaugccgcau

SEQ ID NO: 61444 - RNA, 18 nt, Artificial Sequence
  Synthetic
cauagauuccaaaggcau

SEQ ID NO: 61445 - RNA, 20 nt, Artificial Sequence
  Synthetic
agcauagauuccaaaggcau

SEQ ID NO: 61446 - RNA, 21 nt, Artificial Sequence
  Synthetic
aagcauagauuccaaaggcau

SEQ ID NO: 61447 - RNA, 22 nt, Artificial Sequence
  Synthetic
aaagcauagauuccaaaggcau

SEQ ID NO: 61448 - RNA, 24 nt, Artificial Sequence
  Synthetic
ugaaagcauagauuccaaaggcau

SEQ ID NO: 61449 - RNA, 19 nt, Artificial Sequence
  Synthetic
agagaggggauaaaggcau

SEQ ID NO: 61450 - RNA, 20 nt, Artificial Sequence
  Synthetic
aagagaggggauaaaggcau

SEQ ID NO: 61451 - RNA, 22 nt, Artificial Sequence
  Synthetic
cgaagagaggggauaaaggcau

SEQ ID NO: 61452 - RNA, 24 nt, Artificial Sequence
  Synthetic
agcgaagagaggggauaaaggcau

SEQ ID NO: 61453 - RNA, 18 nt, Artificial Sequence
  Synthetic
aguuacuuguccaggcau

SEQ ID NO: 61454 - RNA, 19 nt, Artificial Sequence
  Synthetic
aaguuacuuguccaggcau

SEQ ID NO: 61455 - RNA, 20 nt, Artificial Sequence
  Synthetic
uaaguuacuuguccaggcau

SEQ ID NO: 61456 - RNA, 21 nt, Artificial Sequence
  Synthetic
uuaaguuacuuguccaggcau

SEQ ID NO: 61457 - RNA, 22 nt, Artificial Sequence
  Synthetic
cuuaaguuacuuguccaggcau

SEQ ID NO: 61458 - RNA, 23 nt, Artificial Sequence
  Synthetic
acuuaaguuacuuguccaggcau

SEQ ID NO: 61459 - RNA, 24 nt, Artificial Sequence
  Synthetic
aacuuaaguuacuuguccaggcau

SEQ ID NO: 61460 - RNA, 18 nt, Artificial Sequence
  Synthetic
aacugcauuucuaggcau

SEQ ID NO: 61461 - RNA, 20 nt, Artificial Sequence
  Synthetic
agaacugcauuucuaggcau

SEQ ID NO: 61462 - RNA, 21 nt, Artificial Sequence
  Synthetic
uagaacugcauuucuaggcau

SEQ ID NO: 61463 - RNA, 22 nt, Artificial Sequence
  Synthetic
uuagaacugcauuucuaggcau

SEQ ID NO: 61464 - RNA, 23 nt, Artificial Sequence
  Synthetic
uuuagaacugcauuucuaggcau

SEQ ID NO: 61465 - RNA, 24 nt, Artificial Sequence
  Synthetic
uuuuagaacugcauuucuaggcau

SEQ ID NO: 61466 - RNA, 18 nt, Artificial Sequence
  Synthetic
cagaaaaccauagggcau

SEQ ID NO: 61467 - RNA, 19 nt, Artificial Sequence
  Synthetic
acagaaaaccauagggcau

SEQ ID NO: 61468 - RNA, 20 nt, Artificial Sequence
  Synthetic
aacagaaaaccauagggcau

SEQ ID NO: 61469 - RNA, 21 nt, Artificial Sequence
  Synthetic
aaacagaaaaccauagggcau

SEQ ID NO: 61470 - RNA, 22 nt, Artificial Sequence
  Synthetic
caaacagaaaaccauagggcau

SEQ ID NO: 61471 - RNA, 23 nt, Artificial Sequence
  Synthetic
ccaaacagaaaaccauagggcau

SEQ ID NO: 61472 - RNA, 24 nt, Artificial Sequence
  Synthetic
cccaaacagaaaaccauagggcau

SEQ ID NO: 61473 - RNA, 18 nt, Artificial Sequence
  Synthetic
auuagcugguaguggcau

SEQ ID NO: 61474 - RNA, 19 nt, Artificial Sequence
  Synthetic
uauuagcugguaguggcau

SEQ ID NO: 61475 - RNA, 20 nt, Artificial Sequence
  Synthetic
uuauuagcugguaguggcau

SEQ ID NO: 61476 - RNA, 22 nt, Artificial Sequence
  Synthetic
aguuauuagcugguaguggcau

SEQ ID NO: 61477 - RNA, 23 nt, Artificial Sequence
  Synthetic
aaguuauuagcugguaguggcau

SEQ ID NO: 61478 - RNA, 24 nt, Artificial Sequence
  Synthetic
aaaguuauuagcugguaguggcau

SEQ ID NO: 61479 - RNA, 18 nt, Artificial Sequence
  Synthetic
uagaggaggagguggcau

SEQ ID NO: 61480 - RNA, 19 nt, Artificial Sequence
  Synthetic
uuagaggaggagguggcau

SEQ ID NO: 61481 - RNA, 20 nt, Artificial Sequence
  Synthetic
uuuagaggaggagguggcau

SEQ ID NO: 61482 - RNA, 21 nt, Artificial Sequence
  Synthetic
uuuuagaggaggagguggcau

SEQ ID NO: 61483 - RNA, 22 nt, Artificial Sequence
  Synthetic
uuuuuagaggaggagguggcau

SEQ ID NO: 61484 - RNA, 23 nt, Artificial Sequence
  Synthetic
cuuuuuagaggaggagguggcau

SEQ ID NO: 61485 - RNA, 18 nt, Artificial Sequence
  Synthetic
agagaaguccauuggcau

SEQ ID NO: 61486 - RNA, 19 nt, Artificial Sequence
  Synthetic
cagagaaguccauuggcau

SEQ ID NO: 61487 - RNA, 20 nt, Artificial Sequence
  Synthetic
ccagagaaguccauuggcau

SEQ ID NO: 61488 - RNA, 21 nt, Artificial Sequence
  Synthetic
uccagagaaguccauuggcau

SEQ ID NO: 61489 - RNA, 22 nt, Artificial Sequence
  Synthetic
auccagagaaguccauuggcau

SEQ ID NO: 61490 - RNA, 23 nt, Artificial Sequence
  Synthetic
cauccagagaaguccauuggcau

SEQ ID NO: 61491 - RNA, 24 nt, Artificial Sequence
  Synthetic
ccauccagagaaguccauuggcau

SEQ ID NO: 61492 - RNA, 18 nt, Artificial Sequence
  Synthetic
uuuucucugaacaugcau

SEQ ID NO: 61493 - RNA, 19 nt, Artificial Sequence
  Synthetic
auuuucucugaacaugcau

SEQ ID NO: 61494 - RNA, 20 nt, Artificial Sequence
  Synthetic
uauuuucucugaacaugcau

SEQ ID NO: 61495 - RNA, 22 nt, Artificial Sequence
  Synthetic
uguauuuucucugaacaugcau

SEQ ID NO: 61496 - RNA, 23 nt, Artificial Sequence
  Synthetic
uuguauuuucucugaacaugcau

SEQ ID NO: 61497 - RNA, 24 nt, Artificial Sequence
  Synthetic
uuuguauuuucucugaacaugcau

SEQ ID NO: 61498 - RNA, 18 nt, Artificial Sequence
  Synthetic
acccccuuugccaugcau

SEQ ID NO: 61499 - RNA, 19 nt, Artificial Sequence
  Synthetic
aacccccuuugccaugcau

SEQ ID NO: 61500 - RNA, 20 nt, Artificial Sequence
  Synthetic
aaacccccuuugccaugcau

SEQ ID NO: 61501 - RNA, 21 nt, Artificial Sequence
  Synthetic
aaaacccccuuugccaugcau

SEQ ID NO: 61502 - RNA, 22 nt, Artificial Sequence
  Synthetic
uaaaacccccuuugccaugcau

SEQ ID NO: 61503 - RNA, 23 nt, Artificial Sequence
  Synthetic
auaaaacccccuuugccaugcau

SEQ ID NO: 61504 - RNA, 24 nt, Artificial Sequence
  Synthetic
uauaaaacccccuuugccaugcau

SEQ ID NO: 61505 - RNA, 18 nt, Artificial Sequence
  Synthetic
uuuuuuagauguaugcau

SEQ ID NO: 61506 - RNA, 19 nt, Artificial Sequence
  Synthetic
uuuuuuuagauguaugcau

SEQ ID NO: 61507 - RNA, 20 nt, Artificial Sequence
  Synthetic
uuuuuuuuagauguaugcau

SEQ ID NO: 61508 - RNA, 21 nt, Artificial Sequence
  Synthetic
uuuuuuuuuagauguaugcau

SEQ ID NO: 61509 - RNA, 22 nt, Artificial Sequence
  Synthetic
uuuuuuuuuuagauguaugcau

SEQ ID NO: 61510 - RNA, 23 nt, Artificial Sequence
  Synthetic
uuuuuuuuuuuagauguaugcau

SEQ ID NO: 61511 - RNA, 24 nt, Artificial Sequence
  Synthetic
uuuuuuuuuuuuagauguaugcau

SEQ ID NO: 61512 - RNA, 18 nt, Artificial Sequence
  Synthetic
agguggugacaggugcau

SEQ ID NO: 61513 - RNA, 19 nt, Artificial Sequence
  Synthetic
aagguggugacaggugcau

SEQ ID NO: 61514 - RNA, 20 nt, Artificial Sequence
  Synthetic
caagguggugacaggugcau

SEQ ID NO: 61515 - RNA, 21 nt, Artificial Sequence
  Synthetic
ucaagguggugacaggugcau

SEQ ID NO: 61516 - RNA, 22 nt, Artificial Sequence
  Synthetic
cucaagguggugacaggugcau

SEQ ID NO: 61517 - RNA, 24 nt, Artificial Sequence
  Synthetic
ugcucaagguggugacaggugcau

SEQ ID NO: 61518 - RNA, 18 nt, Artificial Sequence
  Synthetic
cuaaccuuugaauugcau

SEQ ID NO: 61519 - RNA, 19 nt, Artificial Sequence
  Synthetic
acuaaccuuugaauugcau

SEQ ID NO: 61520 - RNA, 20 nt, Artificial Sequence
  Synthetic
aacuaaccuuugaauugcau

SEQ ID NO: 61521 - RNA, 18 nt, Artificial Sequence
  Synthetic
uacgaugaaaaaaaucau

SEQ ID NO: 61522 - RNA, 20 nt, Artificial Sequence
  Synthetic
aguacgaugaaaaaaaucau

SEQ ID NO: 61523 - RNA, 21 nt, Artificial Sequence
  Synthetic
aaguacgaugaaaaaaaucau

SEQ ID NO: 61524 - RNA, 22 nt, Artificial Sequence
  Synthetic
aaaguacgaugaaaaaaaucau

SEQ ID NO: 61525 - RNA, 23 nt, Artificial Sequence
  Synthetic
aaaaguacgaugaaaaaaaucau

SEQ ID NO: 61526 - RNA, 24 nt, Artificial Sequence
  Synthetic
uaaaaguacgaugaaaaaaaucau

SEQ ID NO: 61527 - RNA, 18 nt, Artificial Sequence
  Synthetic
aaugacaccacaaaucau

SEQ ID NO: 61528 - RNA, 19 nt, Artificial Sequence
  Synthetic
caaugacaccacaaaucau

SEQ ID NO: 61529 - RNA, 20 nt, Artificial Sequence
  Synthetic
ccaaugacaccacaaaucau

SEQ ID NO: 61530 - RNA, 21 nt, Artificial Sequence
  Synthetic
cccaaugacaccacaaaucau

SEQ ID NO: 61531 - RNA, 22 nt, Artificial Sequence
  Synthetic
acccaaugacaccacaaaucau

SEQ ID NO: 61532 - RNA, 23 nt, Artificial Sequence
  Synthetic
uacccaaugacaccacaaaucau

SEQ ID NO: 61533 - RNA, 24 nt, Artificial Sequence
  Synthetic
uuacccaaugacaccacaaaucau

SEQ ID NO: 61534 - RNA, 18 nt, Artificial Sequence
  Synthetic
aauuauaguucaaaucau

SEQ ID NO: 61535 - RNA, 19 nt, Artificial Sequence
  Synthetic
aaauuauaguucaaaucau

SEQ ID NO: 61536 - RNA, 20 nt, Artificial Sequence
  Synthetic
uaaauuauaguucaaaucau

SEQ ID NO: 61537 - RNA, 21 nt, Artificial Sequence
  Synthetic
uuaaauuauaguucaaaucau

SEQ ID NO: 61538 - RNA, 22 nt, Artificial Sequence
  Synthetic
uuuaaauuauaguucaaaucau

SEQ ID NO: 61539 - RNA, 23 nt, Artificial Sequence
  Synthetic
uuuuaaauuauaguucaaaucau

SEQ ID NO: 61540 - RNA, 24 nt, Artificial Sequence
  Synthetic
uuuuuaaauuauaguucaaaucau

SEQ ID NO: 61541 - RNA, 21 nt, Artificial Sequence
  Synthetic
ucuuugcuuuucugcaaucau

SEQ ID NO: 61542 - RNA, 22 nt, Artificial Sequence
  Synthetic
uucuuugcuuuucugcaaucau

SEQ ID NO: 61543 - RNA, 23 nt, Artificial Sequence
  Synthetic
uuucuuugcuuuucugcaaucau

SEQ ID NO: 61544 - RNA, 18 nt, Artificial Sequence
  Synthetic
auuuguacugauaaucau

SEQ ID NO: 61545 - RNA, 19 nt, Artificial Sequence
  Synthetic
aauuuguacugauaaucau

SEQ ID NO: 61546 - RNA, 20 nt, Artificial Sequence
  Synthetic
aaauuuguacugauaaucau

SEQ ID NO: 61547 - RNA, 21 nt, Artificial Sequence
  Synthetic
uaaauuuguacugauaaucau

SEQ ID NO: 61548 - RNA, 22 nt, Artificial Sequence
  Synthetic
uuaaauuuguacugauaaucau

SEQ ID NO: 61549 - RNA, 23 nt, Artificial Sequence
  Synthetic
uuuaaauuuguacugauaaucau

SEQ ID NO: 61550 - RNA, 24 nt, Artificial Sequence
  Synthetic
uuuuaaauuuguacugauaaucau

SEQ ID NO: 61551 - RNA, 19 nt, Artificial Sequence
  Synthetic
ugaaguuauauuuaaucau

SEQ ID NO: 61552 - RNA, 20 nt, Artificial Sequence
  Synthetic
augaaguuauauuuaaucau

SEQ ID NO: 61553 - RNA, 21 nt, Artificial Sequence
  Synthetic
aaugaaguuauauuuaaucau

SEQ ID NO: 61554 - RNA, 22 nt, Artificial Sequence
  Synthetic
uaaugaaguuauauuuaaucau

SEQ ID NO: 61555 - RNA, 23 nt, Artificial Sequence
  Synthetic
cuaaugaaguuauauuuaaucau

SEQ ID NO: 61556 - RNA, 24 nt, Artificial Sequence
  Synthetic
ucuaaugaaguuauauuuaaucau

SEQ ID NO: 61557 - RNA, 18 nt, Artificial Sequence
  Synthetic
caaccucagagccaucau

SEQ ID NO: 61558 - RNA, 19 nt, Artificial Sequence
  Synthetic
ccaaccucagagccaucau

SEQ ID NO: 61559 - RNA, 20 nt, Artificial Sequence
  Synthetic
cccaaccucagagccaucau

SEQ ID NO: 61560 - RNA, 21 nt, Artificial Sequence
  Synthetic
ccccaaccucagagccaucau

SEQ ID NO: 61561 - RNA, 22 nt, Artificial Sequence
  Synthetic
uccccaaccucagagccaucau

SEQ ID NO: 61562 - RNA, 23 nt, Artificial Sequence
  Synthetic
cuccccaaccucagagccaucau

SEQ ID NO: 61563 - RNA, 24 nt, Artificial Sequence
  Synthetic
ucuccccaaccucagagccaucau

SEQ ID NO: 61564 - RNA, 21 nt, Artificial Sequence
  Synthetic
uguuuguguuuuuuucaucau

SEQ ID NO: 61565 - RNA, 22 nt, Artificial Sequence
  Synthetic
uuguuuguguuuuuuucaucau

SEQ ID NO: 61566 - RNA, 23 nt, Artificial Sequence
  Synthetic
cuuguuuguguuuuuuucaucau

SEQ ID NO: 61567 - RNA, 24 nt, Artificial Sequence
  Synthetic
ccuuguuuguguuuuuuucaucau

SEQ ID NO: 61568 - RNA, 18 nt, Artificial Sequence
  Synthetic
uaauuugucugcuaucau

SEQ ID NO: 61569 - RNA, 19 nt, Artificial Sequence
  Synthetic
auaauuugucugcuaucau

SEQ ID NO: 61570 - RNA, 20 nt, Artificial Sequence
  Synthetic
uauaauuugucugcuaucau

SEQ ID NO: 61571 - RNA, 21 nt, Artificial Sequence
  Synthetic
uuauaauuugucugcuaucau

SEQ ID NO: 61572 - RNA, 22 nt, Artificial Sequence
  Synthetic
uuuauaauuugucugcuaucau

SEQ ID NO: 61573 - RNA, 24 nt, Artificial Sequence
  Synthetic
uguuuauaauuugucugcuaucau

SEQ ID NO: 61574 - RNA, 18 nt, Artificial Sequence
  Synthetic
aaacucuccucguaucau

SEQ ID NO: 61575 - RNA, 19 nt, Artificial Sequence
  Synthetic
caaacucuccucguaucau

SEQ ID NO: 61576 - RNA, 20 nt, Artificial Sequence
  Synthetic
ucaaacucuccucguaucau

SEQ ID NO: 61577 - RNA, 21 nt, Artificial Sequence
  Synthetic
aucaaacucuccucguaucau

SEQ ID NO: 61578 - RNA, 22 nt, Artificial Sequence
  Synthetic
aaucaaacucuccucguaucau

SEQ ID NO: 61579 - RNA, 23 nt, Artificial Sequence
  Synthetic
aaaucaaacucuccucguaucau

SEQ ID NO: 61580 - RNA, 24 nt, Artificial Sequence
  Synthetic
aaaaucaaacucuccucguaucau

SEQ ID NO: 61581 - RNA, 21 nt, Artificial Sequence
  Synthetic
uuaucaauucaccauuaucau

SEQ ID NO: 61582 - RNA, 22 nt, Artificial Sequence
  Synthetic
auuaucaauucaccauuaucau

SEQ ID NO: 61583 - RNA, 23 nt, Artificial Sequence
  Synthetic
uauuaucaauucaccauuaucau

SEQ ID NO: 61584 - RNA, 18 nt, Artificial Sequence
  Synthetic
aggacuuuagucccucau

SEQ ID NO: 61585 - RNA, 19 nt, Artificial Sequence
  Synthetic
caggacuuuagucccucau

SEQ ID NO: 61586 - RNA, 21 nt, Artificial Sequence
  Synthetic
agcaggacuuuagucccucau

SEQ ID NO: 61587 - RNA, 22 nt, Artificial Sequence
  Synthetic
aagcaggacuuuagucccucau

SEQ ID NO: 61588 - RNA, 23 nt, Artificial Sequence
  Synthetic
uaagcaggacuuuagucccucau

SEQ ID NO: 61589 - RNA, 24 nt, Artificial Sequence
  Synthetic
cuaagcaggacuuuagucccucau

SEQ ID NO: 61590 - RNA, 18 nt, Artificial Sequence
  Synthetic
uccuauacauuagcucau

SEQ ID NO: 61591 - RNA, 19 nt, Artificial Sequence
  Synthetic
uuccuauacauuagcucau

SEQ ID NO: 61592 - RNA, 20 nt, Artificial Sequence
  Synthetic
uuuccuauacauuagcucau

SEQ ID NO: 61593 - RNA, 21 nt, Artificial Sequence
  Synthetic
auuuccuauacauuagcucau

SEQ ID NO: 61594 - RNA, 22 nt, Artificial Sequence
  Synthetic
uauuuccuauacauuagcucau

SEQ ID NO: 61595 - RNA, 24 nt, Artificial Sequence
  Synthetic
aguauuuccuauacauuagcucau

SEQ ID NO: 61596 - RNA, 18 nt, Artificial Sequence
  Synthetic
acugagaauaaaucucau

SEQ ID NO: 61597 - RNA, 19 nt, Artificial Sequence
  Synthetic
aacugagaauaaaucucau

SEQ ID NO: 61598 - RNA, 21 nt, Artificial Sequence
  Synthetic
agaacugagaauaaaucucau

SEQ ID NO: 61599 - RNA, 22 nt, Artificial Sequence
  Synthetic
uagaacugagaauaaaucucau

SEQ ID NO: 61600 - RNA, 23 nt, Artificial Sequence
  Synthetic
auagaacugagaauaaaucucau

SEQ ID NO: 61601 - RNA, 24 nt, Artificial Sequence
  Synthetic
uauagaacugagaauaaaucucau

SEQ ID NO: 61602 - RNA, 18 nt, Artificial Sequence
  Synthetic
cagcccugaaacucucau

SEQ ID NO: 61603 - RNA, 19 nt, Artificial Sequence
  Synthetic
ccagcccugaaacucucau

SEQ ID NO: 61604 - RNA, 20 nt, Artificial Sequence
  Synthetic
uccagcccugaaacucucau

SEQ ID NO: 61605 - RNA, 21 nt, Artificial Sequence
  Synthetic
cuccagcccugaaacucucau

SEQ ID NO: 61606 - RNA, 22 nt, Artificial Sequence
  Synthetic
ucuccagcccugaaacucucau

SEQ ID NO: 61607 - RNA, 23 nt, Artificial Sequence
  Synthetic
aucuccagcccugaaacucucau

SEQ ID NO: 61608 - RNA, 24 nt, Artificial Sequence
  Synthetic
caucuccagcccugaaacucucau

SEQ ID NO: 61609 - RNA, 18 nt, Artificial Sequence
  Synthetic
aagauuauuaucucucau

SEQ ID NO: 61610 - RNA, 19 nt, Artificial Sequence
  Synthetic
caagauuauuaucucucau

SEQ ID NO: 61611 - RNA, 20 nt, Artificial Sequence
  Synthetic
acaagauuauuaucucucau

SEQ ID NO: 61612 - RNA, 21 nt, Artificial Sequence
  Synthetic
uacaagauuauuaucucucau

SEQ ID NO: 61613 - RNA, 22 nt, Artificial Sequence
  Synthetic
cuacaagauuauuaucucucau

SEQ ID NO: 61614 - RNA, 23 nt, Artificial Sequence
  Synthetic
ucuacaagauuauuaucucucau

SEQ ID NO: 61615 - RNA, 24 nt, Artificial Sequence
  Synthetic
aucuacaagauuauuaucucucau

SEQ ID NO: 61616 - RNA, 23 nt, Artificial Sequence
  Synthetic
uggcuggaauuuauuuuucucau

SEQ ID NO: 61617 - RNA, 24 nt, Artificial Sequence
  Synthetic
uuggcuggaauuuauuuuucucau

SEQ ID NO: 61618 - RNA, 21 nt, Artificial Sequence
  Synthetic
auagggcauggaaaaagucau

SEQ ID NO: 61619 - RNA, 22 nt, Artificial Sequence
  Synthetic
aauagggcauggaaaaagucau

SEQ ID NO: 61620 - RNA, 23 nt, Artificial Sequence
  Synthetic
aaauagggcauggaaaaagucau

SEQ ID NO: 61621 - RNA, 18 nt, Artificial Sequence
  Synthetic
ugucugagggccagucau

SEQ ID NO: 61622 - RNA, 19 nt, Artificial Sequence
  Synthetic
cugucugagggccagucau

SEQ ID NO: 61623 - RNA, 21 nt, Artificial Sequence
  Synthetic
ugcugucugagggccagucau

SEQ ID NO: 61624 - RNA, 22 nt, Artificial Sequence
  Synthetic
augcugucugagggccagucau

SEQ ID NO: 61625 - RNA, 24 nt, Artificial Sequence
  Synthetic
agaugcugucugagggccagucau

SEQ ID NO: 61626 - RNA, 20 nt, Artificial Sequence
  Synthetic
ugggauuacucggcagucau

SEQ ID NO: 61627 - RNA, 21 nt, Artificial Sequence
  Synthetic
cugggauuacucggcagucau

SEQ ID NO: 61628 - RNA, 22 nt, Artificial Sequence
  Synthetic
ucugggauuacucggcagucau

SEQ ID NO: 61629 - RNA, 23 nt, Artificial Sequence
  Synthetic
cucugggauuacucggcagucau

SEQ ID NO: 61630 - RNA, 24 nt, Artificial Sequence
  Synthetic
ccucugggauuacucggcagucau

SEQ ID NO: 61631 - RNA, 18 nt, Artificial Sequence
  Synthetic
cacaguuccacaggucau

SEQ ID NO: 61632 - RNA, 19 nt, Artificial Sequence
  Synthetic
ccacaguuccacaggucau

SEQ ID NO: 61633 - RNA, 20 nt, Artificial Sequence
  Synthetic
accacaguuccacaggucau

SEQ ID NO: 61634 - RNA, 21 nt, Artificial Sequence
  Synthetic
aaccacaguuccacaggucau

SEQ ID NO: 61635 - RNA, 24 nt, Artificial Sequence
  Synthetic
uggaaccacaguuccacaggucau

SEQ ID NO: 61636 - RNA, 18 nt, Artificial Sequence
  Synthetic
agucuaacccugggucau

SEQ ID NO: 61637 - RNA, 19 nt, Artificial Sequence
  Synthetic
aagucuaacccugggucau

SEQ ID NO: 61638 - RNA, 20 nt, Artificial Sequence
  Synthetic
uaagucuaacccugggucau

SEQ ID NO: 61639 - RNA, 21 nt, Artificial Sequence
  Synthetic
cuaagucuaacccugggucau

SEQ ID NO: 61640 - RNA, 22 nt, Artificial Sequence
  Synthetic
ucuaagucuaacccugggucau

SEQ ID NO: 61641 - RNA, 23 nt, Artificial Sequence
  Synthetic
cucuaagucuaacccugggucau

SEQ ID NO: 61642 - RNA, 24 nt, Artificial Sequence
  Synthetic
ucucuaagucuaacccugggucau

SEQ ID NO: 61643 - RNA, 18 nt, Artificial Sequence
  Synthetic
aaaaugagcaagugucau

SEQ ID NO: 61644 - RNA, 20 nt, Artificial Sequence
  Synthetic
ugaaaaugagcaagugucau

SEQ ID NO: 61645 - RNA, 22 nt, Artificial Sequence
  Synthetic
ugugaaaaugagcaagugucau

SEQ ID NO: 61646 - RNA, 24 nt, Artificial Sequence
  Synthetic
cgugugaaaaugagcaagugucau

SEQ ID NO: 61647 - RNA, 18 nt, Artificial Sequence
  Synthetic
auaggauauaugugucau

SEQ ID NO: 61648 - RNA, 20 nt, Artificial Sequence
  Synthetic
agauaggauauaugugucau

SEQ ID NO: 61649 - RNA, 21 nt, Artificial Sequence
  Synthetic
uagauaggauauaugugucau

SEQ ID NO: 61650 - RNA, 22 nt, Artificial Sequence
  Synthetic
uuagauaggauauaugugucau

SEQ ID NO: 61651 - RNA, 23 nt, Artificial Sequence
  Synthetic
auuagauaggauauaugugucau

SEQ ID NO: 61652 - RNA, 24 nt, Artificial Sequence
  Synthetic
uauuagauaggauauaugugucau

SEQ ID NO: 61653 - RNA, 18 nt, Artificial Sequence
  Synthetic
acccucauaggcauucau

SEQ ID NO: 61654 - RNA, 21 nt, Artificial Sequence
  Synthetic
uggacccucauaggcauucau

SEQ ID NO: 61655 - RNA, 22 nt, Artificial Sequence
  Synthetic
uuggacccucauaggcauucau

SEQ ID NO: 61656 - RNA, 23 nt, Artificial Sequence
  Synthetic
cuuggacccucauaggcauucau

SEQ ID NO: 61657 - RNA, 24 nt, Artificial Sequence
  Synthetic
ucuuggacccucauaggcauucau

SEQ ID NO: 61658 - RNA, 18 nt, Artificial Sequence
  Synthetic
uguuacccccagauucau

SEQ ID NO: 61659 - RNA, 19 nt, Artificial Sequence
  Synthetic
cuguuacccccagauucau

SEQ ID NO: 61660 - RNA, 20 nt, Artificial Sequence
  Synthetic
ccuguuacccccagauucau

SEQ ID NO: 61661 - RNA, 21 nt, Artificial Sequence
  Synthetic
accuguuacccccagauucau

SEQ ID NO: 61662 - RNA, 22 nt, Artificial Sequence
  Synthetic
uaccuguuacccccagauucau

SEQ ID NO: 61663 - RNA, 23 nt, Artificial Sequence
  Synthetic
cuaccuguuacccccagauucau

SEQ ID NO: 61664 - RNA, 18 nt, Artificial Sequence
  Synthetic
caagcauuagaacuucau

SEQ ID NO: 61665 - RNA, 19 nt, Artificial Sequence
  Synthetic
acaagcauuagaacuucau

SEQ ID NO: 61666 - RNA, 23 nt, Artificial Sequence
  Synthetic
agggacaagcauuagaacuucau

SEQ ID NO: 61667 - RNA, 18 nt, Artificial Sequence
  Synthetic
caauacugccugcuucau

SEQ ID NO: 61668 - RNA, 19 nt, Artificial Sequence
  Synthetic
ucaauacugccugcuucau

SEQ ID NO: 61669 - RNA, 20 nt, Artificial Sequence
  Synthetic
cucaauacugccugcuucau

SEQ ID NO: 61670 - RNA, 22 nt, Artificial Sequence
  Synthetic
ugcucaauacugccugcuucau

SEQ ID NO: 61671 - RNA, 23 nt, Artificial Sequence
  Synthetic
uugcucaauacugccugcuucau

SEQ ID NO: 61672 - RNA, 24 nt, Artificial Sequence
  Synthetic
cuugcucaauacugccugcuucau

SEQ ID NO: 61673 - RNA, 18 nt, Artificial Sequence
  Synthetic
ugauuuaguuaucuucau

SEQ ID NO: 61674 - RNA, 20 nt, Artificial Sequence
  Synthetic
agugauuuaguuaucuucau

SEQ ID NO: 61675 - RNA, 21 nt, Artificial Sequence
  Synthetic
cagugauuuaguuaucuucau

SEQ ID NO: 61676 - RNA, 23 nt, Artificial Sequence
  Synthetic
agcagugauuuaguuaucuucau

SEQ ID NO: 61677 - RNA, 24 nt, Artificial Sequence
  Synthetic
aagcagugauuuaguuaucuucau

SEQ ID NO: 61678 - RNA, 19 nt, Artificial Sequence
  Synthetic
aggucucuggauucuucau

SEQ ID NO: 61679 - RNA, 20 nt, Artificial Sequence
  Synthetic
aaggucucuggauucuucau

SEQ ID NO: 61680 - RNA, 21 nt, Artificial Sequence
  Synthetic
caaggucucuggauucuucau

SEQ ID NO: 61681 - RNA, 22 nt, Artificial Sequence
  Synthetic
ucaaggucucuggauucuucau

SEQ ID NO: 61682 - RNA, 23 nt, Artificial Sequence
  Synthetic
aucaaggucucuggauucuucau

SEQ ID NO: 61683 - RNA, 24 nt, Artificial Sequence
  Synthetic
uaucaaggucucuggauucuucau

SEQ ID NO: 61684 - RNA, 21 nt, Artificial Sequence
  Synthetic
cggggaagggacagcguucau

SEQ ID NO: 61685 - RNA, 23 nt, Artificial Sequence
  Synthetic
agcggggaagggacagcguucau

SEQ ID NO: 61686 - RNA, 24 nt, Artificial Sequence
  Synthetic
uagcggggaagggacagcguucau

SEQ ID NO: 61687 - RNA, 19 nt, Artificial Sequence
  Synthetic
agaaggaguggggguucau

SEQ ID NO: 61688 - RNA, 23 nt, Artificial Sequence
  Synthetic
agggagaaggaguggggguucau

SEQ ID NO: 61689 - RNA, 18 nt, Artificial Sequence
  Synthetic
agcuugauagcuguucau

SEQ ID NO: 61690 - RNA, 19 nt, Artificial Sequence
  Synthetic
uagcuugauagcuguucau

SEQ ID NO: 61691 - RNA, 20 nt, Artificial Sequence
  Synthetic
auagcuugauagcuguucau

SEQ ID NO: 61692 - RNA, 21 nt, Artificial Sequence
  Synthetic
aauagcuugauagcuguucau

SEQ ID NO: 61693 - RNA, 23 nt, Artificial Sequence
  Synthetic
ugaauagcuugauagcuguucau

SEQ ID NO: 61694 - RNA, 24 nt, Artificial Sequence
  Synthetic
augaauagcuugauagcuguucau

SEQ ID NO: 61695 - RNA, 21 nt, Artificial Sequence
  Synthetic
uuaacuuucuuaaguguucau

SEQ ID NO: 61696 - RNA, 22 nt, Artificial Sequence
  Synthetic
uuuaacuuucuuaaguguucau

SEQ ID NO: 61697 - RNA, 23 nt, Artificial Sequence
  Synthetic
auuuaacuuucuuaaguguucau

SEQ ID NO: 61698 - RNA, 24 nt, Artificial Sequence
  Synthetic
cauuuaacuuucuuaaguguucau

SEQ ID NO: 61699 - RNA, 18 nt, Artificial Sequence
  Synthetic
aacuuuguauaauuucau

SEQ ID NO: 61700 - RNA, 19 nt, Artificial Sequence
  Synthetic
uaacuuuguauaauuucau

SEQ ID NO: 61701 - RNA, 20 nt, Artificial Sequence
  Synthetic
auaacuuuguauaauuucau

SEQ ID NO: 61702 - RNA, 21 nt, Artificial Sequence
  Synthetic
uauaacuuuguauaauuucau

SEQ ID NO: 61703 - RNA, 22 nt, Artificial Sequence
  Synthetic
cuauaacuuuguauaauuucau

SEQ ID NO: 61704 - RNA, 23 nt, Artificial Sequence
  Synthetic
acuauaacuuuguauaauuucau

SEQ ID NO: 61705 - RNA, 24 nt, Artificial Sequence
  Synthetic
uacuauaacuuuguauaauuucau

SEQ ID NO: 61706 - RNA, 18 nt, Artificial Sequence
  Synthetic
augguuuuaucauuucau

SEQ ID NO: 61707 - RNA, 19 nt, Artificial Sequence
  Synthetic
aaugguuuuaucauuucau

SEQ ID NO: 61708 - RNA, 20 nt, Artificial Sequence
  Synthetic
uaaugguuuuaucauuucau

SEQ ID NO: 61709 - RNA, 21 nt, Artificial Sequence
  Synthetic
uuaaugguuuuaucauuucau

SEQ ID NO: 61710 - RNA, 22 nt, Artificial Sequence
  Synthetic
cuuaaugguuuuaucauuucau

SEQ ID NO: 61711 - RNA, 23 nt, Artificial Sequence
  Synthetic
ccuuaaugguuuuaucauuucau

SEQ ID NO: 61712 - RNA, 24 nt, Artificial Sequence
  Synthetic
accuuaaugguuuuaucauuucau

SEQ ID NO: 61713 - RNA, 21 nt, Artificial Sequence
  Synthetic
aaaaaaaaacuauacuuucau

SEQ ID NO: 61714 - RNA, 22 nt, Artificial Sequence
  Synthetic
aaaaaaaaaacuauacuuucau

SEQ ID NO: 61715 - RNA, 24 nt, Artificial Sequence
  Synthetic
ugaaaaaaaaaacuauacuuucau

SEQ ID NO: 61716 - RNA, 18 nt, Artificial Sequence
  Synthetic
aaaagcacgauuuuucau

SEQ ID NO: 61717 - RNA, 20 nt, Artificial Sequence
  Synthetic
cgaaaagcacgauuuuucau

SEQ ID NO: 61718 - RNA, 21 nt, Artificial Sequence
  Synthetic
ucgaaaagcacgauuuuucau

SEQ ID NO: 61719 - RNA, 22 nt, Artificial Sequence
  Synthetic
aucgaaaagcacgauuuuucau

SEQ ID NO: 61720 - RNA, 23 nt, Artificial Sequence
  Synthetic
uaucgaaaagcacgauuuuucau

SEQ ID NO: 61721 - RNA, 21 nt, Artificial Sequence
  Synthetic
aucuaagguuuggaaaaagau

SEQ ID NO: 61722 - RNA, 22 nt, Artificial Sequence
  Synthetic
aaucuaagguuuggaaaaagau

SEQ ID NO: 61723 - RNA, 23 nt, Artificial Sequence
  Synthetic
aaaucuaagguuuggaaaaagau

SEQ ID NO: 61724 - RNA, 24 nt, Artificial Sequence
  Synthetic
uaaaucuaagguuuggaaaaagau

SEQ ID NO: 61725 - RNA, 22 nt, Artificial Sequence
  Synthetic
agauuguuuuuuauaaaaagau

SEQ ID NO: 61726 - RNA, 24 nt, Artificial Sequence
  Synthetic
ugagauuguuuuuuauaaaaagau

SEQ ID NO: 61727 - RNA, 18 nt, Artificial Sequence
  Synthetic
ucuggggugacaaaagau

SEQ ID NO: 61728 - RNA, 20 nt, Artificial Sequence
  Synthetic
ugucuggggugacaaaagau

SEQ ID NO: 61729 - RNA, 23 nt, Artificial Sequence
  Synthetic
uggugucuggggugacaaaagau

SEQ ID NO: 61730 - RNA, 18 nt, Artificial Sequence
  Synthetic
aacauguguaagaaagau

SEQ ID NO: 61731 - RNA, 19 nt, Artificial Sequence
  Synthetic
aaacauguguaagaaagau

SEQ ID NO: 61732 - RNA, 21 nt, Artificial Sequence
  Synthetic
ugaaacauguguaagaaagau

SEQ ID NO: 61733 - RNA, 22 nt, Artificial Sequence
  Synthetic
uugaaacauguguaagaaagau

SEQ ID NO: 61734 - RNA, 23 nt, Artificial Sequence
  Synthetic
uuugaaacauguguaagaaagau

SEQ ID NO: 61735 - RNA, 24 nt, Artificial Sequence
  Synthetic
cuuugaaacauguguaagaaagau

SEQ ID NO: 61736 - RNA, 19 nt, Artificial Sequence
  Synthetic
ugguauuuccgagaaagau

SEQ ID NO: 61737 - RNA, 22 nt, Artificial Sequence
  Synthetic
aggugguauuuccgagaaagau

SEQ ID NO: 61738 - RNA, 23 nt, Artificial Sequence
  Synthetic
aaggugguauuuccgagaaagau

SEQ ID NO: 61739 - RNA, 18 nt, Artificial Sequence
  Synthetic
cagguccaggagaaagau

SEQ ID NO: 61740 - RNA, 19 nt, Artificial Sequence
  Synthetic
ccagguccaggagaaagau

SEQ ID NO: 61741 - RNA, 20 nt, Artificial Sequence
  Synthetic
cccagguccaggagaaagau

SEQ ID NO: 61742 - RNA, 21 nt, Artificial Sequence
  Synthetic
acccagguccaggagaaagau

SEQ ID NO: 61743 - RNA, 22 nt, Artificial Sequence
  Synthetic
aacccagguccaggagaaagau

SEQ ID NO: 61744 - RNA, 23 nt, Artificial Sequence
  Synthetic
aaacccagguccaggagaaagau

SEQ ID NO: 61745 - RNA, 24 nt, Artificial Sequence
  Synthetic
aaaacccagguccaggagaaagau

SEQ ID NO: 61746 - RNA, 21 nt, Artificial Sequence
  Synthetic
uuucuuuuuaaggggaaagau

SEQ ID NO: 61747 - RNA, 23 nt, Artificial Sequence
  Synthetic
uguuucuuuuuaaggggaaagau

SEQ ID NO: 61748 - RNA, 24 nt, Artificial Sequence
  Synthetic
auguuucuuuuuaaggggaaagau

SEQ ID NO: 61749 - RNA, 21 nt, Artificial Sequence
  Synthetic
agggugauuuuuauuaaagau

SEQ ID NO: 61750 - RNA, 22 nt, Artificial Sequence
  Synthetic
cagggugauuuuuauuaaagau

SEQ ID NO: 61751 - RNA, 23 nt, Artificial Sequence
  Synthetic
acagggugauuuuuauuaaagau

SEQ ID NO: 61752 - RNA, 24 nt, Artificial Sequence
  Synthetic
aacagggugauuuuuauuaaagau

SEQ ID NO: 61753 - RNA, 18 nt, Artificial Sequence
  Synthetic
auugauucaaaucaagau

SEQ ID NO: 61754 - RNA, 19 nt, Artificial Sequence
  Synthetic
uauugauucaaaucaagau

SEQ ID NO: 61755 - RNA, 20 nt, Artificial Sequence
  Synthetic
uuauugauucaaaucaagau

SEQ ID NO: 61756 - RNA, 22 nt, Artificial Sequence
  Synthetic
aguuauugauucaaaucaagau

SEQ ID NO: 61757 - RNA, 23 nt, Artificial Sequence
  Synthetic
uaguuauugauucaaaucaagau

SEQ ID NO: 61758 - RNA, 18 nt, Artificial Sequence
  Synthetic
auacucauacaucaagau

SEQ ID NO: 61759 - RNA, 19 nt, Artificial Sequence
  Synthetic
uauacucauacaucaagau

SEQ ID NO: 61760 - RNA, 20 nt, Artificial Sequence
  Synthetic
uuauacucauacaucaagau

SEQ ID NO: 61761 - RNA, 21 nt, Artificial Sequence
  Synthetic
uuuauacucauacaucaagau

SEQ ID NO: 61762 - RNA, 22 nt, Artificial Sequence
  Synthetic
cuuuauacucauacaucaagau

SEQ ID NO: 61763 - RNA, 23 nt, Artificial Sequence
  Synthetic
ucuuuauacucauacaucaagau

SEQ ID NO: 61764 - RNA, 24 nt, Artificial Sequence
  Synthetic
aucuuuauacucauacaucaagau

SEQ ID NO: 61765 - RNA, 21 nt, Artificial Sequence
  Synthetic
cgggaagcucugcuucaagau

SEQ ID NO: 61766 - RNA, 22 nt, Artificial Sequence
  Synthetic
ccgggaagcucugcuucaagau

SEQ ID NO: 61767 - RNA, 21 nt, Artificial Sequence
  Synthetic
aacauagaggaaaaagaagau

SEQ ID NO: 61768 - RNA, 22 nt, Artificial Sequence
  Synthetic
aaacauagaggaaaaagaagau

SEQ ID NO: 61769 - RNA, 23 nt, Artificial Sequence
  Synthetic
uaaacauagaggaaaaagaagau

SEQ ID NO: 61770 - RNA, 24 nt, Artificial Sequence
  Synthetic
uuaaacauagaggaaaaagaagau

SEQ ID NO: 61771 - RNA, 20 nt, Artificial Sequence
  Synthetic
aggaggcaguaucagaagau

SEQ ID NO: 61772 - RNA, 21 nt, Artificial Sequence
  Synthetic
aaggaggcaguaucagaagau

SEQ ID NO: 61773 - RNA, 23 nt, Artificial Sequence
  Synthetic
agaaggaggcaguaucagaagau

SEQ ID NO: 61774 - RNA, 18 nt, Artificial Sequence
  Synthetic
ucaauggaaguagaagau

SEQ ID NO: 61775 - RNA, 20 nt, Artificial Sequence
  Synthetic
ugucaauggaaguagaagau

SEQ ID NO: 61776 - RNA, 22 nt, Artificial Sequence
  Synthetic
agugucaauggaaguagaagau

SEQ ID NO: 61777 - RNA, 23 nt, Artificial Sequence
  Synthetic
uagugucaauggaaguagaagau

SEQ ID NO: 61778 - RNA, 21 nt, Artificial Sequence
  Synthetic
aacauauuuugggaggaagau

SEQ ID NO: 61779 - RNA, 22 nt, Artificial Sequence
  Synthetic
uaacauauuuugggaggaagau

SEQ ID NO: 61780 - RNA, 24 nt, Artificial Sequence
  Synthetic
aguaacauauuuugggaggaagau

SEQ ID NO: 61781 - RNA, 18 nt, Artificial Sequence
  Synthetic
cauuuucuuagggaagau

SEQ ID NO: 61782 - RNA, 19 nt, Artificial Sequence
  Synthetic
ccauuuucuuagggaagau

SEQ ID NO: 61783 - RNA, 20 nt, Artificial Sequence
  Synthetic
uccauuuucuuagggaagau

SEQ ID NO: 61784 - RNA, 21 nt, Artificial Sequence
  Synthetic
auccauuuucuuagggaagau

SEQ ID NO: 61785 - RNA, 22 nt, Artificial Sequence
  Synthetic
aauccauuuucuuagggaagau

SEQ ID NO: 61786 - RNA, 24 nt, Artificial Sequence
  Synthetic
agaauccauuuucuuagggaagau

SEQ ID NO: 61787 - RNA, 18 nt, Artificial Sequence
  Synthetic
uaagcagacugugaagau

SEQ ID NO: 61788 - RNA, 20 nt, Artificial Sequence
  Synthetic
uguaagcagacugugaagau

SEQ ID NO: 61789 - RNA, 22 nt, Artificial Sequence
  Synthetic
aguguaagcagacugugaagau

SEQ ID NO: 61790 - RNA, 24 nt, Artificial Sequence
  Synthetic
agaguguaagcagacugugaagau

SEQ ID NO: 61791 - RNA, 19 nt, Artificial Sequence
  Synthetic
agcacucuaauauuaagau

SEQ ID NO: 61792 - RNA, 21 nt, Artificial Sequence
  Synthetic
agagcacucuaauauuaagau

SEQ ID NO: 61793 - RNA, 22 nt, Artificial Sequence
  Synthetic
cagagcacucuaauauuaagau

SEQ ID NO: 61794 - RNA, 23 nt, Artificial Sequence
  Synthetic
ucagagcacucuaauauuaagau

SEQ ID NO: 61795 - RNA, 19 nt, Artificial Sequence
  Synthetic
uguuaggaauaaaacagau

SEQ ID NO: 61796 - RNA, 21 nt, Artificial Sequence
  Synthetic
uguguuaggaauaaaacagau

SEQ ID NO: 61797 - RNA, 22 nt, Artificial Sequence
  Synthetic
cuguguuaggaauaaaacagau

SEQ ID NO: 61798 - RNA, 23 nt, Artificial Sequence
  Synthetic
ccuguguuaggaauaaaacagau

SEQ ID NO: 61799 - RNA, 18 nt, Artificial Sequence
  Synthetic
ugauauggcuagacagau

SEQ ID NO: 61800 - RNA, 19 nt, Artificial Sequence
  Synthetic
augauauggcuagacagau

SEQ ID NO: 61801 - RNA, 20 nt, Artificial Sequence
  Synthetic
uaugauauggcuagacagau

SEQ ID NO: 61802 - RNA, 21 nt, Artificial Sequence
  Synthetic
auaugauauggcuagacagau

SEQ ID NO: 61803 - RNA, 22 nt, Artificial Sequence
  Synthetic
uauaugauauggcuagacagau

SEQ ID NO: 61804 - RNA, 23 nt, Artificial Sequence
  Synthetic
cuauaugauauggcuagacagau

SEQ ID NO: 61805 - RNA, 18 nt, Artificial Sequence
  Synthetic
acauguacaaaaccagau

SEQ ID NO: 61806 - RNA, 19 nt, Artificial Sequence
  Synthetic
aacauguacaaaaccagau

SEQ ID NO: 61807 - RNA, 20 nt, Artificial Sequence
  Synthetic
caacauguacaaaaccagau

SEQ ID NO: 61808 - RNA, 21 nt, Artificial Sequence
  Synthetic
ccaacauguacaaaaccagau

SEQ ID NO: 61809 - RNA, 23 nt, Artificial Sequence
  Synthetic
ugccaacauguacaaaaccagau

SEQ ID NO: 61810 - RNA, 24 nt, Artificial Sequence
  Synthetic
uugccaacauguacaaaaccagau

SEQ ID NO: 61811 - RNA, 18 nt, Artificial Sequence
  Synthetic
aguaagaccuuuccagau

SEQ ID NO: 61812 - RNA, 19 nt, Artificial Sequence
  Synthetic
caguaagaccuuuccagau

SEQ ID NO: 61813 - RNA, 20 nt, Artificial Sequence
  Synthetic
ccaguaagaccuuuccagau

SEQ ID NO: 61814 - RNA, 21 nt, Artificial Sequence
  Synthetic
uccaguaagaccuuuccagau

SEQ ID NO: 61815 - RNA, 22 nt, Artificial Sequence
  Synthetic
cuccaguaagaccuuuccagau

SEQ ID NO: 61816 - RNA, 23 nt, Artificial Sequence
  Synthetic
ccuccaguaagaccuuuccagau

SEQ ID NO: 61817 - RNA, 24 nt, Artificial Sequence
  Synthetic
uccuccaguaagaccuuuccagau

SEQ ID NO: 61818 - RNA, 18 nt, Artificial Sequence
  Synthetic
cagcagccugcugcagau

SEQ ID NO: 61819 - RNA, 19 nt, Artificial Sequence
  Synthetic
ucagcagccugcugcagau

SEQ ID NO: 61820 - RNA, 20 nt, Artificial Sequence
  Synthetic
cucagcagccugcugcagau

SEQ ID NO: 61821 - RNA, 22 nt, Artificial Sequence
  Synthetic
ugcucagcagccugcugcagau

SEQ ID NO: 61822 - RNA, 23 nt, Artificial Sequence
  Synthetic
cugcucagcagccugcugcagau

SEQ ID NO: 61823 - RNA, 24 nt, Artificial Sequence
  Synthetic
acugcucagcagccugcugcagau

SEQ ID NO: 61824 - RNA, 19 nt, Artificial Sequence
  Synthetic
agaaaagcuguuugcagau

SEQ ID NO: 61825 - RNA, 21 nt, Artificial Sequence
  Synthetic
agagaaaagcuguuugcagau

SEQ ID NO: 61826 - RNA, 22 nt, Artificial Sequence
  Synthetic
uagagaaaagcuguuugcagau

SEQ ID NO: 61827 - RNA, 21 nt, Artificial Sequence
  Synthetic
acuuagcuuccaagaucagau

SEQ ID NO: 61828 - RNA, 22 nt, Artificial Sequence
  Synthetic
cacuuagcuuccaagaucagau

SEQ ID NO: 61829 - RNA, 23 nt, Artificial Sequence
  Synthetic
ucacuuagcuuccaagaucagau

SEQ ID NO: 61830 - RNA, 24 nt, Artificial Sequence
  Synthetic
cucacuuagcuuccaagaucagau

SEQ ID NO: 61831 - RNA, 18 nt, Artificial Sequence
  Synthetic
aucuggucuuucucagau

SEQ ID NO: 61832 - RNA, 19 nt, Artificial Sequence
  Synthetic
caucuggucuuucucagau

SEQ ID NO: 61833 - RNA, 20 nt, Artificial Sequence
  Synthetic
ccaucuggucuuucucagau

SEQ ID NO: 61834 - RNA, 21 nt, Artificial Sequence
  Synthetic
cccaucuggucuuucucagau

SEQ ID NO: 61835 - RNA, 22 nt, Artificial Sequence
  Synthetic
acccaucuggucuuucucagau

SEQ ID NO: 61836 - RNA, 24 nt, Artificial Sequence
  Synthetic
agacccaucuggucuuucucagau

SEQ ID NO: 61837 - RNA, 18 nt, Artificial Sequence
  Synthetic
aaaaguacacagucagau

SEQ ID NO: 61838 - RNA, 19 nt, Artificial Sequence
  Synthetic
uaaaaguacacagucagau

SEQ ID NO: 61839 - RNA, 20 nt, Artificial Sequence
  Synthetic
cuaaaaguacacagucagau

SEQ ID NO: 61840 - RNA, 24 nt, Artificial Sequence
  Synthetic
ugggcuaaaaguacacagucagau

SEQ ID NO: 61841 - RNA, 19 nt, Artificial Sequence
  Synthetic
uggaguuuagaggucagau

SEQ ID NO: 61842 - RNA, 20 nt, Artificial Sequence
  Synthetic
uuggaguuuagaggucagau

SEQ ID NO: 61843 - RNA, 21 nt, Artificial Sequence
  Synthetic
uuuggaguuuagaggucagau

SEQ ID NO: 61844 - RNA, 22 nt, Artificial Sequence
  Synthetic
cuuuggaguuuagaggucagau

SEQ ID NO: 61845 - RNA, 23 nt, Artificial Sequence
  Synthetic
acuuuggaguuuagaggucagau

SEQ ID NO: 61846 - RNA, 24 nt, Artificial Sequence
  Synthetic
cacuuuggaguuuagaggucagau

SEQ ID NO: 61847 - RNA, 19 nt, Artificial Sequence
  Synthetic
ugugcagugacuuucagau

SEQ ID NO: 61848 - RNA, 20 nt, Artificial Sequence
  Synthetic
augugcagugacuuucagau

SEQ ID NO: 61849 - RNA, 21 nt, Artificial Sequence
  Synthetic
caugugcagugacuuucagau

SEQ ID NO: 61850 - RNA, 22 nt, Artificial Sequence
  Synthetic
ccaugugcagugacuuucagau

SEQ ID NO: 61851 - RNA, 23 nt, Artificial Sequence
  Synthetic
cccaugugcagugacuuucagau

SEQ ID NO: 61852 - RNA, 24 nt, Artificial Sequence
  Synthetic
ucccaugugcagugacuuucagau

SEQ ID NO: 61853 - RNA, 21 nt, Artificial Sequence
  Synthetic
ucaacuguaguagaaagagau

SEQ ID NO: 61854 - RNA, 22 nt, Artificial Sequence
  Synthetic
aucaacuguaguagaaagagau

SEQ ID NO: 61855 - RNA, 23 nt, Artificial Sequence
  Synthetic
aaucaacuguaguagaaagagau

SEQ ID NO: 61856 - RNA, 24 nt, Artificial Sequence
  Synthetic
uaaucaacuguaguagaaagagau

SEQ ID NO: 61857 - RNA, 19 nt, Artificial Sequence
  Synthetic
uggaaggguagaaagagau

SEQ ID NO: 61858 - RNA, 21 nt, Artificial Sequence
  Synthetic
aguggaaggguagaaagagau

SEQ ID NO: 61859 - RNA, 22 nt, Artificial Sequence
  Synthetic
caguggaaggguagaaagagau

SEQ ID NO: 61860 - RNA, 23 nt, Artificial Sequence
  Synthetic
ccaguggaaggguagaaagagau

SEQ ID NO: 61861 - RNA, 18 nt, Artificial Sequence
  Synthetic
acauucuaaaacagagau

SEQ ID NO: 61862 - RNA, 19 nt, Artificial Sequence
  Synthetic
uacauucuaaaacagagau

SEQ ID NO: 61863 - RNA, 20 nt, Artificial Sequence
  Synthetic
uuacauucuaaaacagagau

SEQ ID NO: 61864 - RNA, 21 nt, Artificial Sequence
  Synthetic
uuuacauucuaaaacagagau

SEQ ID NO: 61865 - RNA, 22 nt, Artificial Sequence
  Synthetic
auuuacauucuaaaacagagau

SEQ ID NO: 61866 - RNA, 23 nt, Artificial Sequence
  Synthetic
aauuuacauucuaaaacagagau

SEQ ID NO: 61867 - RNA, 18 nt, Artificial Sequence
  Synthetic
uguuauuuaaacagagau

SEQ ID NO: 61868 - RNA, 19 nt, Artificial Sequence
  Synthetic
auguuauuuaaacagagau

SEQ ID NO: 61869 - RNA, 20 nt, Artificial Sequence
  Synthetic
cauguuauuuaaacagagau

SEQ ID NO: 61870 - RNA, 21 nt, Artificial Sequence
  Synthetic
ccauguuauuuaaacagagau

SEQ ID NO: 61871 - RNA, 23 nt, Artificial Sequence
  Synthetic
agccauguuauuuaaacagagau

SEQ ID NO: 61872 - RNA, 19 nt, Artificial Sequence
  Synthetic
agagccgaggcccagagau

SEQ ID NO: 61873 - RNA, 20 nt, Artificial Sequence
  Synthetic
aagagccgaggcccagagau

SEQ ID NO: 61874 - RNA, 21 nt, Artificial Sequence
  Synthetic
uaagagccgaggcccagagau

SEQ ID NO: 61875 - RNA, 23 nt, Artificial Sequence
  Synthetic
aguaagagccgaggcccagagau

SEQ ID NO: 61876 - RNA, 24 nt, Artificial Sequence
  Synthetic
uaguaagagccgaggcccagagau

SEQ ID NO: 61877 - RNA, 21 nt, Artificial Sequence
  Synthetic
cuucaucuguacaauagagau

SEQ ID NO: 61878 - RNA, 22 nt, Artificial Sequence
  Synthetic
acuucaucuguacaauagagau

SEQ ID NO: 61879 - RNA, 23 nt, Artificial Sequence
  Synthetic
uacuucaucuguacaauagagau

SEQ ID NO: 61880 - RNA, 24 nt, Artificial Sequence
  Synthetic
uuacuucaucuguacaauagagau

SEQ ID NO: 61881 - RNA, 19 nt, Artificial Sequence
  Synthetic
agggaagcauuuuagagau

SEQ ID NO: 61882 - RNA, 20 nt, Artificial Sequence
  Synthetic
uagggaagcauuuuagagau

SEQ ID NO: 61883 - RNA, 21 nt, Artificial Sequence
  Synthetic
uuagggaagcauuuuagagau

SEQ ID NO: 61884 - RNA, 22 nt, Artificial Sequence
  Synthetic
auuagggaagcauuuuagagau

SEQ ID NO: 61885 - RNA, 23 nt, Artificial Sequence
  Synthetic
aauuagggaagcauuuuagagau

SEQ ID NO: 61886 - RNA, 24 nt, Artificial Sequence
  Synthetic
aaauuagggaagcauuuuagagau

SEQ ID NO: 61887 - RNA, 18 nt, Artificial Sequence
  Synthetic
acuguaacaagaugagau

SEQ ID NO: 61888 - RNA, 20 nt, Artificial Sequence
  Synthetic
ugacuguaacaagaugagau

SEQ ID NO: 61889 - RNA, 21 nt, Artificial Sequence
  Synthetic
augacuguaacaagaugagau

SEQ ID NO: 61890 - RNA, 22 nt, Artificial Sequence
  Synthetic
aaugacuguaacaagaugagau

SEQ ID NO: 61891 - RNA, 23 nt, Artificial Sequence
  Synthetic
uaaugacuguaacaagaugagau

SEQ ID NO: 61892 - RNA, 24 nt, Artificial Sequence
  Synthetic
uuaaugacuguaacaagaugagau

SEQ ID NO: 61893 - RNA, 18 nt, Artificial Sequence
  Synthetic
augaaaaugcucugagau

SEQ ID NO: 61894 - RNA, 19 nt, Artificial Sequence
  Synthetic
uaugaaaaugcucugagau

SEQ ID NO: 61895 - RNA, 20 nt, Artificial Sequence
  Synthetic
uuaugaaaaugcucugagau

SEQ ID NO: 61896 - RNA, 22 nt, Artificial Sequence
  Synthetic
aguuaugaaaaugcucugagau

SEQ ID NO: 61897 - RNA, 23 nt, Artificial Sequence
  Synthetic
caguuaugaaaaugcucugagau

SEQ ID NO: 61898 - RNA, 24 nt, Artificial Sequence
  Synthetic
ccaguuaugaaaaugcucugagau

SEQ ID NO: 61899 - RNA, 18 nt, Artificial Sequence
  Synthetic
cuucugaggaggugagau

SEQ ID NO: 61900 - RNA, 20 nt, Artificial Sequence
  Synthetic
ugcuucugaggaggugagau

SEQ ID NO: 61901 - RNA, 21 nt, Artificial Sequence
  Synthetic
uugcuucugaggaggugagau

SEQ ID NO: 61902 - RNA, 22 nt, Artificial Sequence
  Synthetic
auugcuucugaggaggugagau

SEQ ID NO: 61903 - RNA, 24 nt, Artificial Sequence
  Synthetic
agauugcuucugaggaggugagau

SEQ ID NO: 61904 - RNA, 19 nt, Artificial Sequence
  Synthetic
agacccuaauaaaauagau

SEQ ID NO: 61905 - RNA, 20 nt, Artificial Sequence
  Synthetic
aagacccuaauaaaauagau

SEQ ID NO: 61906 - RNA, 21 nt, Artificial Sequence
  Synthetic
caagacccuaauaaaauagau

SEQ ID NO: 61907 - RNA, 22 nt, Artificial Sequence
  Synthetic
acaagacccuaauaaaauagau

SEQ ID NO: 61908 - RNA, 23 nt, Artificial Sequence
  Synthetic
aacaagacccuaauaaaauagau

SEQ ID NO: 61909 - RNA, 24 nt, Artificial Sequence
  Synthetic
caacaagacccuaauaaaauagau

SEQ ID NO: 61910 - RNA, 18 nt, Artificial Sequence
  Synthetic
auugccagagaaauagau

SEQ ID NO: 61911 - RNA, 19 nt, Artificial Sequence
  Synthetic
aauugccagagaaauagau

SEQ ID NO: 61912 - RNA, 20 nt, Artificial Sequence
  Synthetic
uaauugccagagaaauagau

SEQ ID NO: 61913 - RNA, 21 nt, Artificial Sequence
  Synthetic
uuaauugccagagaaauagau

SEQ ID NO: 61914 - RNA, 23 nt, Artificial Sequence
  Synthetic
uguuaauugccagagaaauagau

SEQ ID NO: 61915 - RNA, 24 nt, Artificial Sequence
  Synthetic
auguuaauugccagagaaauagau

SEQ ID NO: 61916 - RNA, 18 nt, Artificial Sequence
  Synthetic
caaucucugugaauagau

SEQ ID NO: 61917 - RNA, 19 nt, Artificial Sequence
  Synthetic
ucaaucucugugaauagau

SEQ ID NO: 61918 - RNA, 20 nt, Artificial Sequence
  Synthetic
uucaaucucugugaauagau

SEQ ID NO: 61919 - RNA, 21 nt, Artificial Sequence
  Synthetic
cuucaaucucugugaauagau

SEQ ID NO: 61920 - RNA, 22 nt, Artificial Sequence
  Synthetic
ucuucaaucucugugaauagau

SEQ ID NO: 61921 - RNA, 24 nt, Artificial Sequence
  Synthetic
ugucuucaaucucugugaauagau

SEQ ID NO: 61922 - RNA, 18 nt, Artificial Sequence
  Synthetic
agaugguauuuaauagau

SEQ ID NO: 61923 - RNA, 19 nt, Artificial Sequence
  Synthetic
cagaugguauuuaauagau

SEQ ID NO: 61924 - RNA, 20 nt, Artificial Sequence
  Synthetic
ccagaugguauuuaauagau

SEQ ID NO: 61925 - RNA, 21 nt, Artificial Sequence
  Synthetic
uccagaugguauuuaauagau

SEQ ID NO: 61926 - RNA, 22 nt, Artificial Sequence
  Synthetic
auccagaugguauuuaauagau

SEQ ID NO: 61927 - RNA, 23 nt, Artificial Sequence
  Synthetic
uauccagaugguauuuaauagau

SEQ ID NO: 61928 - RNA, 24 nt, Artificial Sequence
  Synthetic
auauccagaugguauuuaauagau

SEQ ID NO: 61929 - RNA, 18 nt, Artificial Sequence
  Synthetic
ucuucuucucgcauagau

SEQ ID NO: 61930 - RNA, 19 nt, Artificial Sequence
  Synthetic
cucuucuucucgcauagau

SEQ ID NO: 61931 - RNA, 20 nt, Artificial Sequence
  Synthetic
ucucuucuucucgcauagau

SEQ ID NO: 61932 - RNA, 21 nt, Artificial Sequence
  Synthetic
uucucuucuucucgcauagau

SEQ ID NO: 61933 - RNA, 22 nt, Artificial Sequence
  Synthetic
auucucuucuucucgcauagau

SEQ ID NO: 61934 - RNA, 23 nt, Artificial Sequence
  Synthetic
uauucucuucuucucgcauagau

SEQ ID NO: 61935 - RNA, 24 nt, Artificial Sequence
  Synthetic
auauucucuucuucucgcauagau

SEQ ID NO: 61936 - RNA, 18 nt, Artificial Sequence
  Synthetic
cauuaaucacuacuagau

SEQ ID NO: 61937 - RNA, 19 nt, Artificial Sequence
  Synthetic
acauuaaucacuacuagau

SEQ ID NO: 61938 - RNA, 20 nt, Artificial Sequence
  Synthetic
aacauuaaucacuacuagau

SEQ ID NO: 61939 - RNA, 22 nt, Artificial Sequence
  Synthetic
ugaacauuaaucacuacuagau

SEQ ID NO: 61940 - RNA, 24 nt, Artificial Sequence
  Synthetic
agugaacauuaaucacuacuagau

SEQ ID NO: 61941 - RNA, 19 nt, Artificial Sequence
  Synthetic
aguuugauaaacccuagau

SEQ ID NO: 61942 - RNA, 20 nt, Artificial Sequence
  Synthetic
uaguuugauaaacccuagau

SEQ ID NO: 61943 - RNA, 22 nt, Artificial Sequence
  Synthetic
uguaguuugauaaacccuagau

SEQ ID NO: 61944 - RNA, 23 nt, Artificial Sequence
  Synthetic
cuguaguuugauaaacccuagau

SEQ ID NO: 61945 - RNA, 24 nt, Artificial Sequence
  Synthetic
ucuguaguuugauaaacccuagau

SEQ ID NO: 61946 - RNA, 18 nt, Artificial Sequence
  Synthetic
aacuacuaaaugcuagau

SEQ ID NO: 61947 - RNA, 19 nt, Artificial Sequence
  Synthetic
caacuacuaaaugcuagau

SEQ ID NO: 61948 - RNA, 21 nt, Artificial Sequence
  Synthetic
ugcaacuacuaaaugcuagau

SEQ ID NO: 61949 - RNA, 22 nt, Artificial Sequence
  Synthetic
augcaacuacuaaaugcuagau

SEQ ID NO: 61950 - RNA, 23 nt, Artificial Sequence
  Synthetic
caugcaacuacuaaaugcuagau

SEQ ID NO: 61951 - RNA, 24 nt, Artificial Sequence
  Synthetic
acaugcaacuacuaaaugcuagau

SEQ ID NO: 61952 - RNA, 18 nt, Artificial Sequence
  Synthetic
aaaaucuacuugcuagau

SEQ ID NO: 61953 - RNA, 19 nt, Artificial Sequence
  Synthetic
uaaaaucuacuugcuagau

SEQ ID NO: 61954 - RNA, 21 nt, Artificial Sequence
  Synthetic
aguaaaaucuacuugcuagau

SEQ ID NO: 61955 - RNA, 22 nt, Artificial Sequence
  Synthetic
aaguaaaaucuacuugcuagau

SEQ ID NO: 61956 - RNA, 23 nt, Artificial Sequence
  Synthetic
uaaguaaaaucuacuugcuagau

SEQ ID NO: 61957 - RNA, 24 nt, Artificial Sequence
  Synthetic
uuaaguaaaaucuacuugcuagau

SEQ ID NO: 61958 - RNA, 18 nt, Artificial Sequence
  Synthetic
aucuaauauaaauuagau

SEQ ID NO: 61959 - RNA, 19 nt, Artificial Sequence
  Synthetic
aaucuaauauaaauuagau

SEQ ID NO: 61960 - RNA, 20 nt, Artificial Sequence
  Synthetic
caaucuaauauaaauuagau

SEQ ID NO: 61961 - RNA, 22 nt, Artificial Sequence
  Synthetic
ugcaaucuaauauaaauuagau

SEQ ID NO: 61962 - RNA, 24 nt, Artificial Sequence
  Synthetic
agugcaaucuaauauaaauuagau

SEQ ID NO: 61963 - RNA, 18 nt, Artificial Sequence
  Synthetic
uguuagggaugcuuagau

SEQ ID NO: 61964 - RNA, 19 nt, Artificial Sequence
  Synthetic
cuguuagggaugcuuagau

SEQ ID NO: 61965 - RNA, 20 nt, Artificial Sequence
  Synthetic
ucuguuagggaugcuuagau

SEQ ID NO: 61966 - RNA, 21 nt, Artificial Sequence
  Synthetic
aucuguuagggaugcuuagau

SEQ ID NO: 61967 - RNA, 22 nt, Artificial Sequence
  Synthetic
caucuguuagggaugcuuagau

SEQ ID NO: 61968 - RNA, 23 nt, Artificial Sequence
  Synthetic
ucaucuguuagggaugcuuagau

SEQ ID NO: 61969 - RNA, 18 nt, Artificial Sequence
  Synthetic
cccaacaugugcuuagau

SEQ ID NO: 61970 - RNA, 20 nt, Artificial Sequence
  Synthetic
ugcccaacaugugcuuagau

SEQ ID NO: 61971 - RNA, 21 nt, Artificial Sequence
  Synthetic
augcccaacaugugcuuagau

SEQ ID NO: 61972 - RNA, 23 nt, Artificial Sequence
  Synthetic
ugaugcccaacaugugcuuagau

SEQ ID NO: 61973 - RNA, 18 nt, Artificial Sequence
  Synthetic
cucugguguuucuuagau

SEQ ID NO: 61974 - RNA, 19 nt, Artificial Sequence
  Synthetic
ucucugguguuucuuagau

SEQ ID NO: 61975 - RNA, 20 nt, Artificial Sequence
  Synthetic
uucucugguguuucuuagau

SEQ ID NO: 61976 - RNA, 21 nt, Artificial Sequence
  Synthetic
auucucugguguuucuuagau

SEQ ID NO: 61977 - RNA, 22 nt, Artificial Sequence
  Synthetic
aauucucugguguuucuuagau

SEQ ID NO: 61978 - RNA, 24 nt, Artificial Sequence
  Synthetic
agaauucucugguguuucuuagau

SEQ ID NO: 61979 - RNA, 18 nt, Artificial Sequence
  Synthetic
aaccuccggugguuagau

SEQ ID NO: 61980 - RNA, 21 nt, Artificial Sequence
  Synthetic
aggaaccuccggugguuagau

SEQ ID NO: 61981 - RNA, 22 nt, Artificial Sequence
  Synthetic
uaggaaccuccggugguuagau

SEQ ID NO: 61982 - RNA, 23 nt, Artificial Sequence
  Synthetic
uuaggaaccuccggugguuagau

SEQ ID NO: 61983 - RNA, 18 nt, Artificial Sequence
  Synthetic
agauagcugcugaccgau

SEQ ID NO: 61984 - RNA, 21 nt, Artificial Sequence
  Synthetic
cggagauagcugcugaccgau

SEQ ID NO: 61985 - RNA, 22 nt, Artificial Sequence
  Synthetic
acggagauagcugcugaccgau

SEQ ID NO: 61986 - RNA, 24 nt, Artificial Sequence
  Synthetic
ugacggagauagcugcugaccgau

SEQ ID NO: 61987 - RNA, 18 nt, Artificial Sequence
  Synthetic
uuaucuuucagaaaggau

SEQ ID NO: 61988 - RNA, 19 nt, Artificial Sequence
  Synthetic
uuuaucuuucagaaaggau

SEQ ID NO: 61989 - RNA, 21 nt, Artificial Sequence
  Synthetic
aguuuaucuuucagaaaggau

SEQ ID NO: 61990 - RNA, 22 nt, Artificial Sequence
  Synthetic
uaguuuaucuuucagaaaggau

SEQ ID NO: 61991 - RNA, 19 nt, Artificial Sequence
  Synthetic
ugguagaaagggaaaggau

SEQ ID NO: 61992 - RNA, 20 nt, Artificial Sequence
  Synthetic
uugguagaaagggaaaggau

SEQ ID NO: 61993 - RNA, 24 nt, Artificial Sequence
  Synthetic
aggguugguagaaagggaaaggau

SEQ ID NO: 61994 - RNA, 18 nt, Artificial Sequence
  Synthetic
cuuugugcagagaaggau

SEQ ID NO: 61995 - RNA, 19 nt, Artificial Sequence
  Synthetic
ccuuugugcagagaaggau

SEQ ID NO: 61996 - RNA, 20 nt, Artificial Sequence
  Synthetic
uccuuugugcagagaaggau

SEQ ID NO: 61997 - RNA, 21 nt, Artificial Sequence
  Synthetic
cuccuuugugcagagaaggau

SEQ ID NO: 61998 - RNA, 22 nt, Artificial Sequence
  Synthetic
ccuccuuugugcagagaaggau

SEQ ID NO: 61999 - RNA, 23 nt, Artificial Sequence
  Synthetic
uccuccuuugugcagagaaggau

SEQ ID NO: 62000 - RNA, 24 nt, Artificial Sequence
  Synthetic
cuccuccuuugugcagagaaggau

SEQ ID NO: 62001 - RNA, 18 nt, Artificial Sequence
  Synthetic
auaacuuccuagaaggau

SEQ ID NO: 62002 - RNA, 19 nt, Artificial Sequence
  Synthetic
aauaacuuccuagaaggau

SEQ ID NO: 62003 - RNA, 20 nt, Artificial Sequence
  Synthetic
aaauaacuuccuagaaggau

SEQ ID NO: 62004 - RNA, 21 nt, Artificial Sequence
  Synthetic
caaauaacuuccuagaaggau

SEQ ID NO: 62005 - RNA, 22 nt, Artificial Sequence
  Synthetic
ucaaauaacuuccuagaaggau

SEQ ID NO: 62006 - RNA, 23 nt, Artificial Sequence
  Synthetic
uucaaauaacuuccuagaaggau

SEQ ID NO: 62007 - RNA, 24 nt, Artificial Sequence
  Synthetic
cuucaaauaacuuccuagaaggau

SEQ ID NO: 62008 - RNA, 23 nt, Artificial Sequence
  Synthetic
ugggggucucagucuggaaggau

SEQ ID NO: 62009 - RNA, 24 nt, Artificial Sequence
  Synthetic
uugggggucucagucuggaaggau

SEQ ID NO: 62010 - RNA, 18 nt, Artificial Sequence
  Synthetic
cagauuuuguugaaggau

SEQ ID NO: 62011 - RNA, 19 nt, Artificial Sequence
  Synthetic
ucagauuuuguugaaggau

SEQ ID NO: 62012 - RNA, 20 nt, Artificial Sequence
  Synthetic
uucagauuuuguugaaggau

SEQ ID NO: 62013 - RNA, 21 nt, Artificial Sequence
  Synthetic
auucagauuuuguugaaggau

SEQ ID NO: 62014 - RNA, 22 nt, Artificial Sequence
  Synthetic
uauucagauuuuguugaaggau

SEQ ID NO: 62015 - RNA, 23 nt, Artificial Sequence
  Synthetic
auauucagauuuuguugaaggau

SEQ ID NO: 62016 - RNA, 24 nt, Artificial Sequence
  Synthetic
cauauucagauuuuguugaaggau

SEQ ID NO: 62017 - RNA, 18 nt, Artificial Sequence
  Synthetic
ugucagugacauaaggau

SEQ ID NO: 62018 - RNA, 19 nt, Artificial Sequence
  Synthetic
cugucagugacauaaggau

SEQ ID NO: 62019 - RNA, 20 nt, Artificial Sequence
  Synthetic
ucugucagugacauaaggau

SEQ ID NO: 62020 - RNA, 21 nt, Artificial Sequence
  Synthetic
uucugucagugacauaaggau

SEQ ID NO: 62021 - RNA, 22 nt, Artificial Sequence
  Synthetic
auucugucagugacauaaggau

SEQ ID NO: 62022 - RNA, 23 nt, Artificial Sequence
  Synthetic
uauucugucagugacauaaggau

SEQ ID NO: 62023 - RNA, 24 nt, Artificial Sequence
  Synthetic
uuauucugucagugacauaaggau

SEQ ID NO: 62024 - RNA, 18 nt, Artificial Sequence
  Synthetic
caguuuagcaaacaggau

SEQ ID NO: 62025 - RNA, 19 nt, Artificial Sequence
  Synthetic
ccaguuuagcaaacaggau

SEQ ID NO: 62026 - RNA, 20 nt, Artificial Sequence
  Synthetic
cccaguuuagcaaacaggau

SEQ ID NO: 62027 - RNA, 22 nt, Artificial Sequence
  Synthetic
agcccaguuuagcaaacaggau

SEQ ID NO: 62028 - RNA, 23 nt, Artificial Sequence
  Synthetic
cagcccaguuuagcaaacaggau

SEQ ID NO: 62029 - RNA, 24 nt, Artificial Sequence
  Synthetic
acagcccaguuuagcaaacaggau

SEQ ID NO: 62030 - RNA, 18 nt, Artificial Sequence
  Synthetic
aacagacuauuacaggau

SEQ ID NO: 62031 - RNA, 19 nt, Artificial Sequence
  Synthetic
uaacagacuauuacaggau

SEQ ID NO: 62032 - RNA, 20 nt, Artificial Sequence
  Synthetic
auaacagacuauuacaggau

SEQ ID NO: 62033 - RNA, 21 nt, Artificial Sequence
  Synthetic
cauaacagacuauuacaggau

SEQ ID NO: 62034 - RNA, 22 nt, Artificial Sequence
  Synthetic
ucauaacagacuauuacaggau

SEQ ID NO: 62035 - RNA, 24 nt, Artificial Sequence
  Synthetic
ugucauaacagacuauuacaggau

SEQ ID NO: 62036 - RNA, 19 nt, Artificial Sequence
  Synthetic
agagaguguagaccaggau

SEQ ID NO: 62037 - RNA, 20 nt, Artificial Sequence
  Synthetic
cagagaguguagaccaggau

SEQ ID NO: 62038 - RNA, 21 nt, Artificial Sequence
  Synthetic
ccagagaguguagaccaggau

SEQ ID NO: 62039 - RNA, 22 nt, Artificial Sequence
  Synthetic
accagagaguguagaccaggau

SEQ ID NO: 62040 - RNA, 23 nt, Artificial Sequence
  Synthetic
caccagagaguguagaccaggau

SEQ ID NO: 62041 - RNA, 24 nt, Artificial Sequence
  Synthetic
ccaccagagaguguagaccaggau

SEQ ID NO: 62042 - RNA, 18 nt, Artificial Sequence
  Synthetic
cuucucugcuagcaggau

SEQ ID NO: 62043 - RNA, 19 nt, Artificial Sequence
  Synthetic
ucuucucugcuagcaggau

SEQ ID NO: 62044 - RNA, 20 nt, Artificial Sequence
  Synthetic
aucuucucugcuagcaggau

SEQ ID NO: 62045 - RNA, 21 nt, Artificial Sequence
  Synthetic
uaucuucucugcuagcaggau

SEQ ID NO: 62046 - RNA, 22 nt, Artificial Sequence
  Synthetic
auaucuucucugcuagcaggau

SEQ ID NO: 62047 - RNA, 23 nt, Artificial Sequence
  Synthetic
cauaucuucucugcuagcaggau

SEQ ID NO: 62048 - RNA, 24 nt, Artificial Sequence
  Synthetic
ucauaucuucucugcuagcaggau

SEQ ID NO: 62049 - RNA, 18 nt, Artificial Sequence
  Synthetic
aauacuaugagucaggau

SEQ ID NO: 62050 - RNA, 20 nt, Artificial Sequence
  Synthetic
ugaauacuaugagucaggau

SEQ ID NO: 62051 - RNA, 21 nt, Artificial Sequence
  Synthetic
augaauacuaugagucaggau

SEQ ID NO: 62052 - RNA, 22 nt, Artificial Sequence
  Synthetic
aaugaauacuaugagucaggau

SEQ ID NO: 62053 - RNA, 23 nt, Artificial Sequence
  Synthetic
uaaugaauacuaugagucaggau

SEQ ID NO: 62054 - RNA, 24 nt, Artificial Sequence
  Synthetic
uuaaugaauacuaugagucaggau

SEQ ID NO: 62055 - RNA, 21 nt, Artificial Sequence
  Synthetic
uacaauagcaauggugaggau

SEQ ID NO: 62056 - RNA, 22 nt, Artificial Sequence
  Synthetic
uuacaauagcaauggugaggau

SEQ ID NO: 62057 - RNA, 24 nt, Artificial Sequence
  Synthetic
aguuacaauagcaauggugaggau

SEQ ID NO: 62058 - RNA, 18 nt, Artificial Sequence
  Synthetic
ugauguauaaaauaggau

SEQ ID NO: 62059 - RNA, 19 nt, Artificial Sequence
  Synthetic
cugauguauaaaauaggau

SEQ ID NO: 62060 - RNA, 20 nt, Artificial Sequence
  Synthetic
ucugauguauaaaauaggau

SEQ ID NO: 62061 - RNA, 21 nt, Artificial Sequence
  Synthetic
uucugauguauaaaauaggau

SEQ ID NO: 62062 - RNA, 22 nt, Artificial Sequence
  Synthetic
uuucugauguauaaaauaggau

SEQ ID NO: 62063 - RNA, 23 nt, Artificial Sequence
  Synthetic
auuucugauguauaaaauaggau

SEQ ID NO: 62064 - RNA, 24 nt, Artificial Sequence
  Synthetic
cauuucugauguauaaaauaggau

SEQ ID NO: 62065 - RNA, 18 nt, Artificial Sequence
  Synthetic
cuucaauccacauaggau

SEQ ID NO: 62066 - RNA, 19 nt, Artificial Sequence
  Synthetic
ucuucaauccacauaggau

SEQ ID NO: 62067 - RNA, 20 nt, Artificial Sequence
  Synthetic
uucuucaauccacauaggau

SEQ ID NO: 62068 - RNA, 21 nt, Artificial Sequence
  Synthetic
cuucuucaauccacauaggau

SEQ ID NO: 62069 - RNA, 22 nt, Artificial Sequence
  Synthetic
ccuucuucaauccacauaggau

SEQ ID NO: 62070 - RNA, 23 nt, Artificial Sequence
  Synthetic
cccuucuucaauccacauaggau

SEQ ID NO: 62071 - RNA, 24 nt, Artificial Sequence
  Synthetic
acccuucuucaauccacauaggau

SEQ ID NO: 62072 - RNA, 18 nt, Artificial Sequence
  Synthetic
uucuagaaagaguaggau

SEQ ID NO: 62073 - RNA, 19 nt, Artificial Sequence
  Synthetic
uuucuagaaagaguaggau

SEQ ID NO: 62074 - RNA, 20 nt, Artificial Sequence
  Synthetic
uuuucuagaaagaguaggau

SEQ ID NO: 62075 - RNA, 22 nt, Artificial Sequence
  Synthetic
uguuuucuagaaagaguaggau

SEQ ID NO: 62076 - RNA, 23 nt, Artificial Sequence
  Synthetic
auguuuucuagaaagaguaggau

SEQ ID NO: 62077 - RNA, 24 nt, Artificial Sequence
  Synthetic
aauguuuucuagaaagaguaggau

SEQ ID NO: 62078 - RNA, 18 nt, Artificial Sequence
  Synthetic
uuaggcacuuccagggau

SEQ ID NO: 62079 - RNA, 20 nt, Artificial Sequence
  Synthetic
uguuaggcacuuccagggau

SEQ ID NO: 62080 - RNA, 22 nt, Artificial Sequence
  Synthetic
uguguuaggcacuuccagggau

SEQ ID NO: 62081 - RNA, 23 nt, Artificial Sequence
  Synthetic
auguguuaggcacuuccagggau

SEQ ID NO: 62082 - RNA, 24 nt, Artificial Sequence
  Synthetic
uauguguuaggcacuuccagggau

SEQ ID NO: 62083 - RNA, 18 nt, Artificial Sequence
  Synthetic
uggcaaggaugaggggau

SEQ ID NO: 62084 - RNA, 20 nt, Artificial Sequence
  Synthetic
aguggcaaggaugaggggau

SEQ ID NO: 62085 - RNA, 21 nt, Artificial Sequence
  Synthetic
aaguggcaaggaugaggggau

SEQ ID NO: 62086 - RNA, 23 nt, Artificial Sequence
  Synthetic
ugaaguggcaaggaugaggggau

SEQ ID NO: 62087 - RNA, 24 nt, Artificial Sequence
  Synthetic
cugaaguggcaaggaugaggggau

SEQ ID NO: 62088 - RNA, 21 nt, Artificial Sequence
  Synthetic
aggaacccuugagcuggggau

SEQ ID NO: 62089 - RNA, 22 nt, Artificial Sequence
  Synthetic
aaggaacccuugagcuggggau

SEQ ID NO: 62090 - RNA, 24 nt, Artificial Sequence
  Synthetic
agaaggaacccuugagcuggggau

SEQ ID NO: 62091 - RNA, 19 nt, Artificial Sequence
  Synthetic
aggaauggggaaaugggau

SEQ ID NO: 62092 - RNA, 20 nt, Artificial Sequence
  Synthetic
caggaauggggaaaugggau

SEQ ID NO: 62093 - RNA, 21 nt, Artificial Sequence
  Synthetic
acaggaauggggaaaugggau

SEQ ID NO: 62094 - RNA, 22 nt, Artificial Sequence
  Synthetic
uacaggaauggggaaaugggau

SEQ ID NO: 62095 - RNA, 23 nt, Artificial Sequence
  Synthetic
uuacaggaauggggaaaugggau

SEQ ID NO: 62096 - RNA, 24 nt, Artificial Sequence
  Synthetic
auuacaggaauggggaaaugggau

SEQ ID NO: 62097 - RNA, 18 nt, Artificial Sequence
  Synthetic
uaagcagggagaugggau

SEQ ID NO: 62098 - RNA, 19 nt, Artificial Sequence
  Synthetic
cuaagcagggagaugggau

SEQ ID NO: 62099 - RNA, 20 nt, Artificial Sequence
  Synthetic
acuaagcagggagaugggau

SEQ ID NO: 62100 - RNA, 21 nt, Artificial Sequence
  Synthetic
aacuaagcagggagaugggau

SEQ ID NO: 62101 - RNA, 22 nt, Artificial Sequence
  Synthetic
caacuaagcagggagaugggau

SEQ ID NO: 62102 - RNA, 23 nt, Artificial Sequence
  Synthetic
acaacuaagcagggagaugggau

SEQ ID NO: 62103 - RNA, 24 nt, Artificial Sequence
  Synthetic
aacaacuaagcagggagaugggau

SEQ ID NO: 62104 - RNA, 19 nt, Artificial Sequence
  Synthetic
ugugguccacuccugggau

SEQ ID NO: 62105 - RNA, 20 nt, Artificial Sequence
  Synthetic
cugugguccacuccugggau

SEQ ID NO: 62106 - RNA, 23 nt, Artificial Sequence
  Synthetic
uggcugugguccacuccugggau

SEQ ID NO: 62107 - RNA, 24 nt, Artificial Sequence
  Synthetic
cuggcugugguccacuccugggau

SEQ ID NO: 62108 - RNA, 19 nt, Artificial Sequence
  Synthetic
agaugacuguggcugggau

SEQ ID NO: 62109 - RNA, 21 nt, Artificial Sequence
  Synthetic
agagaugacuguggcugggau

SEQ ID NO: 62110 - RNA, 22 nt, Artificial Sequence
  Synthetic
aagagaugacuguggcugggau

SEQ ID NO: 62111 - RNA, 23 nt, Artificial Sequence
  Synthetic
caagagaugacuguggcugggau

SEQ ID NO: 62112 - RNA, 24 nt, Artificial Sequence
  Synthetic
ucaagagaugacuguggcugggau

SEQ ID NO: 62113 - RNA, 18 nt, Artificial Sequence
  Synthetic
cugaauucgaugugggau

SEQ ID NO: 62114 - RNA, 19 nt, Artificial Sequence
  Synthetic
acugaauucgaugugggau

SEQ ID NO: 62115 - RNA, 20 nt, Artificial Sequence
  Synthetic
aacugaauucgaugugggau

SEQ ID NO: 62116 - RNA, 21 nt, Artificial Sequence
  Synthetic
aaacugaauucgaugugggau

SEQ ID NO: 62117 - RNA, 23 nt, Artificial Sequence
  Synthetic
agaaacugaauucgaugugggau

SEQ ID NO: 62118 - RNA, 24 nt, Artificial Sequence
  Synthetic
cagaaacugaauucgaugugggau

SEQ ID NO: 62119 - RNA, 23 nt, Artificial Sequence
  Synthetic
uggaaaaagaagggaaaauggau

SEQ ID NO: 62120 - RNA, 18 nt, Artificial Sequence
  Synthetic
cuuuugacccgcauggau

SEQ ID NO: 62121 - RNA, 19 nt, Artificial Sequence
  Synthetic
ccuuuugacccgcauggau

SEQ ID NO: 62122 - RNA, 20 nt, Artificial Sequence
  Synthetic
uccuuuugacccgcauggau

SEQ ID NO: 62123 - RNA, 21 nt, Artificial Sequence
  Synthetic
uuccuuuugacccgcauggau

SEQ ID NO: 62124 - RNA, 22 nt, Artificial Sequence
  Synthetic
uuuccuuuugacccgcauggau

SEQ ID NO: 62125 - RNA, 23 nt, Artificial Sequence
  Synthetic
auuuccuuuugacccgcauggau

SEQ ID NO: 62126 - RNA, 24 nt, Artificial Sequence
  Synthetic
aauuuccuuuugacccgcauggau

SEQ ID NO: 62127 - RNA, 18 nt, Artificial Sequence
  Synthetic
uuucuuuaccucauggau

SEQ ID NO: 62128 - RNA, 19 nt, Artificial Sequence
  Synthetic
uuuucuuuaccucauggau

SEQ ID NO: 62129 - RNA, 22 nt, Artificial Sequence
  Synthetic
ugguuuucuuuaccucauggau

SEQ ID NO: 62130 - RNA, 23 nt, Artificial Sequence
  Synthetic
uugguuuucuuuaccucauggau

SEQ ID NO: 62131 - RNA, 24 nt, Artificial Sequence
  Synthetic
uuugguuuucuuuaccucauggau

SEQ ID NO: 62132 - RNA, 22 nt, Artificial Sequence
  Synthetic
uguggugaguccacugauggau

SEQ ID NO: 62133 - RNA, 23 nt, Artificial Sequence
  Synthetic
uuguggugaguccacugauggau

SEQ ID NO: 62134 - RNA, 24 nt, Artificial Sequence
  Synthetic
auuguggugaguccacugauggau

SEQ ID NO: 62135 - RNA, 18 nt, Artificial Sequence
  Synthetic
cacaauauaguuauggau

SEQ ID NO: 62136 - RNA, 19 nt, Artificial Sequence
  Synthetic
ucacaauauaguuauggau

SEQ ID NO: 62137 - RNA, 20 nt, Artificial Sequence
  Synthetic
uucacaauauaguuauggau

SEQ ID NO: 62138 - RNA, 21 nt, Artificial Sequence
  Synthetic
auucacaauauaguuauggau

SEQ ID NO: 62139 - RNA, 22 nt, Artificial Sequence
  Synthetic
cauucacaauauaguuauggau

SEQ ID NO: 62140 - RNA, 23 nt, Artificial Sequence
  Synthetic
acauucacaauauaguuauggau

SEQ ID NO: 62141 - RNA, 24 nt, Artificial Sequence
  Synthetic
cacauucacaauauaguuauggau

SEQ ID NO: 62142 - RNA, 21 nt, Artificial Sequence
  Synthetic
ugggauaagugaaagcuggau

SEQ ID NO: 62143 - RNA, 22 nt, Artificial Sequence
  Synthetic
augggauaagugaaagcuggau

SEQ ID NO: 62144 - RNA, 23 nt, Artificial Sequence
  Synthetic
uaugggauaagugaaagcuggau

SEQ ID NO: 62145 - RNA, 24 nt, Artificial Sequence
  Synthetic
uuaugggauaagugaaagcuggau

SEQ ID NO: 62146 - RNA, 18 nt, Artificial Sequence
  Synthetic
auagucaaucaaguggau

SEQ ID NO: 62147 - RNA, 19 nt, Artificial Sequence
  Synthetic
aauagucaaucaaguggau

SEQ ID NO: 62148 - RNA, 20 nt, Artificial Sequence
  Synthetic
caauagucaaucaaguggau

SEQ ID NO: 62149 - RNA, 22 nt, Artificial Sequence
  Synthetic
ugcaauagucaaucaaguggau

SEQ ID NO: 62150 - RNA, 23 nt, Artificial Sequence
  Synthetic
uugcaauagucaaucaaguggau

SEQ ID NO: 62151 - RNA, 18 nt, Artificial Sequence
  Synthetic
cuucauccaucgguggau

SEQ ID NO: 62152 - RNA, 19 nt, Artificial Sequence
  Synthetic
acuucauccaucgguggau

SEQ ID NO: 62153 - RNA, 20 nt, Artificial Sequence
  Synthetic
uacuucauccaucgguggau

SEQ ID NO: 62154 - RNA, 21 nt, Artificial Sequence
  Synthetic
cuacuucauccaucgguggau

SEQ ID NO: 62155 - RNA, 22 nt, Artificial Sequence
  Synthetic
ucuacuucauccaucgguggau

SEQ ID NO: 62156 - RNA, 23 nt, Artificial Sequence
  Synthetic
uucuacuucauccaucgguggau

SEQ ID NO: 62157 - RNA, 18 nt, Artificial Sequence
  Synthetic
cucuaaguuauuguggau

SEQ ID NO: 62158 - RNA, 19 nt, Artificial Sequence
  Synthetic
ucucuaaguuauuguggau

SEQ ID NO: 62159 - RNA, 20 nt, Artificial Sequence
  Synthetic
uucucuaaguuauuguggau

SEQ ID NO: 62160 - RNA, 21 nt, Artificial Sequence
  Synthetic
uuucucuaaguuauuguggau

SEQ ID NO: 62161 - RNA, 22 nt, Artificial Sequence
  Synthetic
uuuucucuaaguuauuguggau

SEQ ID NO: 62162 - RNA, 23 nt, Artificial Sequence
  Synthetic
uuuuucucuaaguuauuguggau

SEQ ID NO: 62163 - RNA, 19 nt, Artificial Sequence
  Synthetic
ugaaagcaggaauuuggau

SEQ ID NO: 62164 - RNA, 20 nt, Artificial Sequence
  Synthetic
uugaaagcaggaauuuggau

SEQ ID NO: 62165 - RNA, 21 nt, Artificial Sequence
  Synthetic
cuugaaagcaggaauuuggau

SEQ ID NO: 62166 - RNA, 22 nt, Artificial Sequence
  Synthetic
ucuugaaagcaggaauuuggau

SEQ ID NO: 62167 - RNA, 23 nt, Artificial Sequence
  Synthetic
aucuugaaagcaggaauuuggau

SEQ ID NO: 62168 - RNA, 24 nt, Artificial Sequence
  Synthetic
aaucuugaaagcaggaauuuggau

SEQ ID NO: 62169 - RNA, 21 nt, Artificial Sequence
  Synthetic
aguuauuagaaauaaaaugau

SEQ ID NO: 62170 - RNA, 22 nt, Artificial Sequence
  Synthetic
caguuauuagaaauaaaaugau

SEQ ID NO: 62171 - RNA, 23 nt, Artificial Sequence
  Synthetic
ccaguuauuagaaauaaaaugau

SEQ ID NO: 62172 - RNA, 24 nt, Artificial Sequence
  Synthetic
accaguuauuagaaauaaaaugau

SEQ ID NO: 62173 - RNA, 18 nt, Artificial Sequence
  Synthetic
cacgguuucuaaaaugau

SEQ ID NO: 62174 - RNA, 19 nt, Artificial Sequence
  Synthetic
ccacgguuucuaaaaugau

SEQ ID NO: 62175 - RNA, 21 nt, Artificial Sequence
  Synthetic
ugccacgguuucuaaaaugau

SEQ ID NO: 62176 - RNA, 22 nt, Artificial Sequence
  Synthetic
augccacgguuucuaaaaugau

SEQ ID NO: 62177 - RNA, 23 nt, Artificial Sequence
  Synthetic
aaugccacgguuucuaaaaugau

SEQ ID NO: 62178 - RNA, 24 nt, Artificial Sequence
  Synthetic
uaaugccacgguuucuaaaaugau

SEQ ID NO: 62179 - RNA, 19 nt, Artificial Sequence
  Synthetic
agaaaugacuucaaaugau

SEQ ID NO: 62180 - RNA, 20 nt, Artificial Sequence
  Synthetic
aagaaaugacuucaaaugau

SEQ ID NO: 62181 - RNA, 21 nt, Artificial Sequence
  Synthetic
uaagaaaugacuucaaaugau

SEQ ID NO: 62182 - RNA, 22 nt, Artificial Sequence
  Synthetic
uuaagaaaugacuucaaaugau

SEQ ID NO: 62183 - RNA, 23 nt, Artificial Sequence
  Synthetic
auuaagaaaugacuucaaaugau

SEQ ID NO: 62184 - RNA, 24 nt, Artificial Sequence
  Synthetic
cauuaagaaaugacuucaaaugau

SEQ ID NO: 62185 - RNA, 18 nt, Artificial Sequence
  Synthetic
ucaauagagggaaaugau

SEQ ID NO: 62186 - RNA, 19 nt, Artificial Sequence
  Synthetic
uucaauagagggaaaugau

SEQ ID NO: 62187 - RNA, 20 nt, Artificial Sequence
  Synthetic
uuucaauagagggaaaugau

SEQ ID NO: 62188 - RNA, 21 nt, Artificial Sequence
  Synthetic
auuucaauagagggaaaugau

SEQ ID NO: 62189 - RNA, 22 nt, Artificial Sequence
  Synthetic
cauuucaauagagggaaaugau

SEQ ID NO: 62190 - RNA, 23 nt, Artificial Sequence
  Synthetic
acauuucaauagagggaaaugau

SEQ ID NO: 62191 - RNA, 24 nt, Artificial Sequence
  Synthetic
aacauuucaauagagggaaaugau

SEQ ID NO: 62192 - RNA, 18 nt, Artificial Sequence
  Synthetic
aaucacugaguaaaugau

SEQ ID NO: 62193 - RNA, 20 nt, Artificial Sequence
  Synthetic
agaaucacugaguaaaugau

SEQ ID NO: 62194 - RNA, 21 nt, Artificial Sequence
  Synthetic
aagaaucacugaguaaaugau

SEQ ID NO: 62195 - RNA, 22 nt, Artificial Sequence
  Synthetic
uaagaaucacugaguaaaugau

SEQ ID NO: 62196 - RNA, 23 nt, Artificial Sequence
  Synthetic
auaagaaucacugaguaaaugau

SEQ ID NO: 62197 - RNA, 24 nt, Artificial Sequence
  Synthetic
cauaagaaucacugaguaaaugau

SEQ ID NO: 62198 - RNA, 18 nt, Artificial Sequence
  Synthetic
auaauaacuuacaaugau

SEQ ID NO: 62199 - RNA, 19 nt, Artificial Sequence
  Synthetic
uauaauaacuuacaaugau

SEQ ID NO: 62200 - RNA, 20 nt, Artificial Sequence
  Synthetic
uuauaauaacuuacaaugau

SEQ ID NO: 62201 - RNA, 21 nt, Artificial Sequence
  Synthetic
auuauaauaacuuacaaugau

SEQ ID NO: 62202 - RNA, 22 nt, Artificial Sequence
  Synthetic
cauuauaauaacuuacaaugau

SEQ ID NO: 62203 - RNA, 24 nt, Artificial Sequence
  Synthetic
agcauuauaauaacuuacaaugau

SEQ ID NO: 62204 - RNA, 18 nt, Artificial Sequence
  Synthetic
uuugccuucuccaaugau

SEQ ID NO: 62205 - RNA, 19 nt, Artificial Sequence
  Synthetic
auuugccuucuccaaugau

SEQ ID NO: 62206 - RNA, 20 nt, Artificial Sequence
  Synthetic
aauuugccuucuccaaugau

SEQ ID NO: 62207 - RNA, 21 nt, Artificial Sequence
  Synthetic
caauuugccuucuccaaugau

SEQ ID NO: 62208 - RNA, 22 nt, Artificial Sequence
  Synthetic
ccaauuugccuucuccaaugau

SEQ ID NO: 62209 - RNA, 24 nt, Artificial Sequence
  Synthetic
ugccaauuugccuucuccaaugau

SEQ ID NO: 62210 - RNA, 18 nt, Artificial Sequence
  Synthetic
ugcaaccagaucaaugau

SEQ ID NO: 62211 - RNA, 19 nt, Artificial Sequence
  Synthetic
augcaaccagaucaaugau

SEQ ID NO: 62212 - RNA, 21 nt, Artificial Sequence
  Synthetic
ugaugcaaccagaucaaugau

SEQ ID NO: 62213 - RNA, 22 nt, Artificial Sequence
  Synthetic
cugaugcaaccagaucaaugau

SEQ ID NO: 62214 - RNA, 23 nt, Artificial Sequence
  Synthetic
acugaugcaaccagaucaaugau

SEQ ID NO: 62215 - RNA, 24 nt, Artificial Sequence
  Synthetic
aacugaugcaaccagaucaaugau

SEQ ID NO: 62216 - RNA, 18 nt, Artificial Sequence
  Synthetic
cuaccaauuaucaaugau

SEQ ID NO: 62217 - RNA, 19 nt, Artificial Sequence
  Synthetic
ucuaccaauuaucaaugau

SEQ ID NO: 62218 - RNA, 21 nt, Artificial Sequence
  Synthetic
ugucuaccaauuaucaaugau

SEQ ID NO: 62219 - RNA, 22 nt, Artificial Sequence
  Synthetic
augucuaccaauuaucaaugau

SEQ ID NO: 62220 - RNA, 23 nt, Artificial Sequence
  Synthetic
caugucuaccaauuaucaaugau

SEQ ID NO: 62221 - RNA, 24 nt, Artificial Sequence
  Synthetic
ccaugucuaccaauuaucaaugau

SEQ ID NO: 62222 - RNA, 18 nt, Artificial Sequence
  Synthetic
uaguuuuucccacaugau

SEQ ID NO: 62223 - RNA, 19 nt, Artificial Sequence
  Synthetic
auaguuuuucccacaugau

SEQ ID NO: 62224 - RNA, 20 nt, Artificial Sequence
  Synthetic
uauaguuuuucccacaugau

SEQ ID NO: 62225 - RNA, 21 nt, Artificial Sequence
  Synthetic
uuauaguuuuucccacaugau

SEQ ID NO: 62226 - RNA, 22 nt, Artificial Sequence
  Synthetic
uuuauaguuuuucccacaugau

SEQ ID NO: 62227 - RNA, 23 nt, Artificial Sequence
  Synthetic
auuuauaguuuuucccacaugau

SEQ ID NO: 62228 - RNA, 24 nt, Artificial Sequence
  Synthetic
uauuuauaguuuuucccacaugau

SEQ ID NO: 62229 - RNA, 18 nt, Artificial Sequence
  Synthetic
cuuuaauacauacaugau

SEQ ID NO: 62230 - RNA, 19 nt, Artificial Sequence
  Synthetic
acuuuaauacauacaugau

SEQ ID NO: 62231 - RNA, 20 nt, Artificial Sequence
  Synthetic
aacuuuaauacauacaugau

SEQ ID NO: 62232 - RNA, 21 nt, Artificial Sequence
  Synthetic
aaacuuuaauacauacaugau

SEQ ID NO: 62233 - RNA, 22 nt, Artificial Sequence
  Synthetic
uaaacuuuaauacauacaugau

SEQ ID NO: 62234 - RNA, 23 nt, Artificial Sequence
  Synthetic
auaaacuuuaauacauacaugau

SEQ ID NO: 62235 - RNA, 24 nt, Artificial Sequence
  Synthetic
cauaaacuuuaauacauacaugau

SEQ ID NO: 62236 - RNA, 18 nt, Artificial Sequence
  Synthetic
aaacauacaacucaugau

SEQ ID NO: 62237 - RNA, 20 nt, Artificial Sequence
  Synthetic
ugaaacauacaacucaugau

SEQ ID NO: 62238 - RNA, 22 nt, Artificial Sequence
  Synthetic
ugugaaacauacaacucaugau

SEQ ID NO: 62239 - RNA, 23 nt, Artificial Sequence
  Synthetic
uugugaaacauacaacucaugau

SEQ ID NO: 62240 - RNA, 24 nt, Artificial Sequence
  Synthetic
auugugaaacauacaacucaugau

SEQ ID NO: 62241 - RNA, 18 nt, Artificial Sequence
  Synthetic
uucauuuugccucaugau

SEQ ID NO: 62242 - RNA, 20 nt, Artificial Sequence
  Synthetic
aguucauuuugccucaugau

SEQ ID NO: 62243 - RNA, 21 nt, Artificial Sequence
  Synthetic
uaguucauuuugccucaugau

SEQ ID NO: 62244 - RNA, 22 nt, Artificial Sequence
  Synthetic
uuaguucauuuugccucaugau

SEQ ID NO: 62245 - RNA, 23 nt, Artificial Sequence
  Synthetic
auuaguucauuuugccucaugau

SEQ ID NO: 62246 - RNA, 24 nt, Artificial Sequence
  Synthetic
cauuaguucauuuugccucaugau

SEQ ID NO: 62247 - RNA, 18 nt, Artificial Sequence
  Synthetic
ucccagguauuucaugau

SEQ ID NO: 62248 - RNA, 20 nt, Artificial Sequence
  Synthetic
ugucccagguauuucaugau

SEQ ID NO: 62249 - RNA, 21 nt, Artificial Sequence
  Synthetic
uugucccagguauuucaugau

SEQ ID NO: 62250 - RNA, 22 nt, Artificial Sequence
  Synthetic
uuugucccagguauuucaugau

SEQ ID NO: 62251 - RNA, 23 nt, Artificial Sequence
  Synthetic
cuuugucccagguauuucaugau

SEQ ID NO: 62252 - RNA, 24 nt, Artificial Sequence
  Synthetic
acuuugucccagguauuucaugau

SEQ ID NO: 62253 - RNA, 18 nt, Artificial Sequence
  Synthetic
augauuuucuuugaugau

SEQ ID NO: 62254 - RNA, 20 nt, Artificial Sequence
  Synthetic
ugaugauuuucuuugaugau

SEQ ID NO: 62255 - RNA, 21 nt, Artificial Sequence
  Synthetic
uugaugauuuucuuugaugau

SEQ ID NO: 62256 - RNA, 23 nt, Artificial Sequence
  Synthetic
uguugaugauuuucuuugaugau

SEQ ID NO: 62257 - RNA, 24 nt, Artificial Sequence
  Synthetic
uuguugaugauuuucuuugaugau

SEQ ID NO: 62258 - RNA, 19 nt, Artificial Sequence
  Synthetic
agguuuuaguuuauaugau

SEQ ID NO: 62259 - RNA, 20 nt, Artificial Sequence
  Synthetic
aagguuuuaguuuauaugau

SEQ ID NO: 62260 - RNA, 21 nt, Artificial Sequence
  Synthetic
caagguuuuaguuuauaugau

SEQ ID NO: 62261 - RNA, 22 nt, Artificial Sequence
  Synthetic
acaagguuuuaguuuauaugau

SEQ ID NO: 62262 - RNA, 19 nt, Artificial Sequence
  Synthetic
agacccauuuuuauaugau

SEQ ID NO: 62263 - RNA, 20 nt, Artificial Sequence
  Synthetic
uagacccauuuuuauaugau

SEQ ID NO: 62264 - RNA, 22 nt, Artificial Sequence
  Synthetic
uguagacccauuuuuauaugau

SEQ ID NO: 62265 - RNA, 23 nt, Artificial Sequence
  Synthetic
auguagacccauuuuuauaugau

SEQ ID NO: 62266 - RNA, 24 nt, Artificial Sequence
  Synthetic
aauguagacccauuuuuauaugau

SEQ ID NO: 62267 - RNA, 18 nt, Artificial Sequence
  Synthetic
aacuugaauaauuaugau

SEQ ID NO: 62268 - RNA, 19 nt, Artificial Sequence
  Synthetic
uaacuugaauaauuaugau

SEQ ID NO: 62269 - RNA, 20 nt, Artificial Sequence
  Synthetic
uuaacuugaauaauuaugau

SEQ ID NO: 62270 - RNA, 21 nt, Artificial Sequence
  Synthetic
uuuaacuugaauaauuaugau

SEQ ID NO: 62271 - RNA, 23 nt, Artificial Sequence
  Synthetic
uguuuaacuugaauaauuaugau

SEQ ID NO: 62272 - RNA, 24 nt, Artificial Sequence
  Synthetic
auguuuaacuugaauaauuaugau

SEQ ID NO: 62273 - RNA, 18 nt, Artificial Sequence
  Synthetic
uucacuguggccacugau

SEQ ID NO: 62274 - RNA, 19 nt, Artificial Sequence
  Synthetic
uuucacuguggccacugau

SEQ ID NO: 62275 - RNA, 20 nt, Artificial Sequence
  Synthetic
auuucacuguggccacugau

SEQ ID NO: 62276 - RNA, 21 nt, Artificial Sequence
  Synthetic
aauuucacuguggccacugau

SEQ ID NO: 62277 - RNA, 22 nt, Artificial Sequence
  Synthetic
uaauuucacuguggccacugau

SEQ ID NO: 62278 - RNA, 23 nt, Artificial Sequence
  Synthetic
cuaauuucacuguggccacugau

SEQ ID NO: 62279 - RNA, 24 nt, Artificial Sequence
  Synthetic
acuaauuucacuguggccacugau

SEQ ID NO: 62280 - RNA, 18 nt, Artificial Sequence
  Synthetic
aaacaauaagagacugau

SEQ ID NO: 62281 - RNA, 20 nt, Artificial Sequence
  Synthetic
agaaacaauaagagacugau

SEQ ID NO: 62282 - RNA, 21 nt, Artificial Sequence
  Synthetic
aagaaacaauaagagacugau

SEQ ID NO: 62283 - RNA, 24 nt, Artificial Sequence
  Synthetic
aggaagaaacaauaagagacugau

SEQ ID NO: 62284 - RNA, 21 nt, Artificial Sequence
  Synthetic
caccguccccacuuuacugau

SEQ ID NO: 62285 - RNA, 22 nt, Artificial Sequence
  Synthetic
ccaccguccccacuuuacugau

SEQ ID NO: 62286 - RNA, 23 nt, Artificial Sequence
  Synthetic
uccaccguccccacuuuacugau

SEQ ID NO: 62287 - RNA, 24 nt, Artificial Sequence
  Synthetic
cuccaccguccccacuuuacugau

SEQ ID NO: 62288 - RNA, 18 nt, Artificial Sequence
  Synthetic
aagucaagcauaccugau

SEQ ID NO: 62289 - RNA, 20 nt, Artificial Sequence
  Synthetic
ugaagucaagcauaccugau

SEQ ID NO: 62290 - RNA, 22 nt, Artificial Sequence
  Synthetic
ugugaagucaagcauaccugau

SEQ ID NO: 62291 - RNA, 23 nt, Artificial Sequence
  Synthetic
cugugaagucaagcauaccugau

SEQ ID NO: 62292 - RNA, 24 nt, Artificial Sequence
  Synthetic
acugugaagucaagcauaccugau

SEQ ID NO: 62293 - RNA, 18 nt, Artificial Sequence
  Synthetic
uguaugaugaauccugau

SEQ ID NO: 62294 - RNA, 19 nt, Artificial Sequence
  Synthetic
uuguaugaugaauccugau

SEQ ID NO: 62295 - RNA, 20 nt, Artificial Sequence
  Synthetic
auuguaugaugaauccugau

SEQ ID NO: 62296 - RNA, 21 nt, Artificial Sequence
  Synthetic
cauuguaugaugaauccugau

SEQ ID NO: 62297 - RNA, 22 nt, Artificial Sequence
  Synthetic
acauuguaugaugaauccugau

SEQ ID NO: 62298 - RNA, 23 nt, Artificial Sequence
  Synthetic
aacauuguaugaugaauccugau

SEQ ID NO: 62299 - RNA, 19 nt, Artificial Sequence
  Synthetic
ugagcacugucaggcugau

SEQ ID NO: 62300 - RNA, 20 nt, Artificial Sequence
  Synthetic
uugagcacugucaggcugau

SEQ ID NO: 62301 - RNA, 22 nt, Artificial Sequence
  Synthetic
aguugagcacugucaggcugau

SEQ ID NO: 62302 - RNA, 24 nt, Artificial Sequence
  Synthetic
ugaguugagcacugucaggcugau

SEQ ID NO: 62303 - RNA, 18 nt, Artificial Sequence
  Synthetic
acacucuagaaugcugau

SEQ ID NO: 62304 - RNA, 19 nt, Artificial Sequence
  Synthetic
aacacucuagaaugcugau

SEQ ID NO: 62305 - RNA, 20 nt, Artificial Sequence
  Synthetic
aaacacucuagaaugcugau

SEQ ID NO: 62306 - RNA, 21 nt, Artificial Sequence
  Synthetic
aaaacacucuagaaugcugau

SEQ ID NO: 62307 - RNA, 22 nt, Artificial Sequence
  Synthetic
aaaaacacucuagaaugcugau

SEQ ID NO: 62308 - RNA, 23 nt, Artificial Sequence
  Synthetic
aaaaaacacucuagaaugcugau

SEQ ID NO: 62309 - RNA, 24 nt, Artificial Sequence
  Synthetic
uaaaaaacacucuagaaugcugau

SEQ ID NO: 62310 - RNA, 18 nt, Artificial Sequence
  Synthetic
cacaucaaauguucugau

SEQ ID NO: 62311 - RNA, 19 nt, Artificial Sequence
  Synthetic
ucacaucaaauguucugau

SEQ ID NO: 62312 - RNA, 20 nt, Artificial Sequence
  Synthetic
uucacaucaaauguucugau

SEQ ID NO: 62313 - RNA, 23 nt, Artificial Sequence
  Synthetic
agguucacaucaaauguucugau

SEQ ID NO: 62314 - RNA, 18 nt, Artificial Sequence
  Synthetic
cuaaugugaguuucugau

SEQ ID NO: 62315 - RNA, 19 nt, Artificial Sequence
  Synthetic
ccuaaugugaguuucugau

SEQ ID NO: 62316 - RNA, 20 nt, Artificial Sequence
  Synthetic
uccuaaugugaguuucugau

SEQ ID NO: 62317 - RNA, 21 nt, Artificial Sequence
  Synthetic
uuccuaaugugaguuucugau

SEQ ID NO: 62318 - RNA, 22 nt, Artificial Sequence
  Synthetic
auuccuaaugugaguuucugau

SEQ ID NO: 62319 - RNA, 23 nt, Artificial Sequence
  Synthetic
cauuccuaaugugaguuucugau

SEQ ID NO: 62320 - RNA, 24 nt, Artificial Sequence
  Synthetic
ccauuccuaaugugaguuucugau

SEQ ID NO: 62321 - RNA, 18 nt, Artificial Sequence
  Synthetic
caaaugaaccaaagugau

SEQ ID NO: 62322 - RNA, 19 nt, Artificial Sequence
  Synthetic
acaaaugaaccaaagugau

SEQ ID NO: 62323 - RNA, 21 nt, Artificial Sequence
  Synthetic
ugacaaaugaaccaaagugau

SEQ ID NO: 62324 - RNA, 24 nt, Artificial Sequence
  Synthetic
uggugacaaaugaaccaaagugau

SEQ ID NO: 62325 - RNA, 18 nt, Artificial Sequence
  Synthetic
aguuuugaauuaagugau

SEQ ID NO: 62326 - RNA, 20 nt, Artificial Sequence
  Synthetic
agaguuuugaauuaagugau

SEQ ID NO: 62327 - RNA, 21 nt, Artificial Sequence
  Synthetic
aagaguuuugaauuaagugau

SEQ ID NO: 62328 - RNA, 22 nt, Artificial Sequence
  Synthetic
aaagaguuuugaauuaagugau

SEQ ID NO: 62329 - RNA, 23 nt, Artificial Sequence
  Synthetic
caaagaguuuugaauuaagugau

SEQ ID NO: 62330 - RNA, 18 nt, Artificial Sequence
  Synthetic
cugccaauauucagugau

SEQ ID NO: 62331 - RNA, 19 nt, Artificial Sequence
  Synthetic
ucugccaauauucagugau

SEQ ID NO: 62332 - RNA, 20 nt, Artificial Sequence
  Synthetic
cucugccaauauucagugau

SEQ ID NO: 62333 - RNA, 21 nt, Artificial Sequence
  Synthetic
ucucugccaauauucagugau

SEQ ID NO: 62334 - RNA, 22 nt, Artificial Sequence
  Synthetic
cucucugccaauauucagugau

SEQ ID NO: 62335 - RNA, 23 nt, Artificial Sequence
  Synthetic
ucucucugccaauauucagugau

SEQ ID NO: 62336 - RNA, 24 nt, Artificial Sequence
  Synthetic
aucucucugccaauauucagugau

SEQ ID NO: 62337 - RNA, 18 nt, Artificial Sequence
  Synthetic
uacaaccacguccgugau

SEQ ID NO: 62338 - RNA, 19 nt, Artificial Sequence
  Synthetic
cuacaaccacguccgugau

SEQ ID NO: 62339 - RNA, 20 nt, Artificial Sequence
  Synthetic
ccuacaaccacguccgugau

SEQ ID NO: 62340 - RNA, 21 nt, Artificial Sequence
  Synthetic
uccuacaaccacguccgugau

SEQ ID NO: 62341 - RNA, 23 nt, Artificial Sequence
  Synthetic
aguccuacaaccacguccgugau

SEQ ID NO: 62342 - RNA, 24 nt, Artificial Sequence
  Synthetic
caguccuacaaccacguccgugau

SEQ ID NO: 62343 - RNA, 18 nt, Artificial Sequence
  Synthetic
auuaauuccguaggugau

SEQ ID NO: 62344 - RNA, 19 nt, Artificial Sequence
  Synthetic
aauuaauuccguaggugau

SEQ ID NO: 62345 - RNA, 20 nt, Artificial Sequence
  Synthetic
aaauuaauuccguaggugau

SEQ ID NO: 62346 - RNA, 23 nt, Artificial Sequence
  Synthetic
aggaaauuaauuccguaggugau

SEQ ID NO: 62347 - RNA, 21 nt, Artificial Sequence
  Synthetic
ucagguuguugugagggugau

SEQ ID NO: 62348 - RNA, 22 nt, Artificial Sequence
  Synthetic
uucagguuguugugagggugau

SEQ ID NO: 62349 - RNA, 23 nt, Artificial Sequence
  Synthetic
cuucagguuguugugagggugau

SEQ ID NO: 62350 - RNA, 24 nt, Artificial Sequence
  Synthetic
ucuucagguuguugugagggugau

SEQ ID NO: 62351 - RNA, 18 nt, Artificial Sequence
  Synthetic
cuaaguauaucuggugau

SEQ ID NO: 62352 - RNA, 19 nt, Artificial Sequence
  Synthetic
ccuaaguauaucuggugau

SEQ ID NO: 62353 - RNA, 20 nt, Artificial Sequence
  Synthetic
uccuaaguauaucuggugau

SEQ ID NO: 62354 - RNA, 21 nt, Artificial Sequence
  Synthetic
uuccuaaguauaucuggugau

SEQ ID NO: 62355 - RNA, 22 nt, Artificial Sequence
  Synthetic
uuuccuaaguauaucuggugau

SEQ ID NO: 62356 - RNA, 23 nt, Artificial Sequence
  Synthetic
auuuccuaaguauaucuggugau

SEQ ID NO: 62357 - RNA, 24 nt, Artificial Sequence
  Synthetic
cauuuccuaaguauaucuggugau

SEQ ID NO: 62358 - RNA, 18 nt, Artificial Sequence
  Synthetic
cuaaaucaggacugugau

SEQ ID NO: 62359 - RNA, 19 nt, Artificial Sequence
  Synthetic
ucuaaaucaggacugugau

SEQ ID NO: 62360 - RNA, 20 nt, Artificial Sequence
  Synthetic
cucuaaaucaggacugugau

SEQ ID NO: 62361 - RNA, 22 nt, Artificial Sequence
  Synthetic
ugcucuaaaucaggacugugau

SEQ ID NO: 62362 - RNA, 23 nt, Artificial Sequence
  Synthetic
cugcucuaaaucaggacugugau

SEQ ID NO: 62363 - RNA, 24 nt, Artificial Sequence
  Synthetic
ccugcucuaaaucaggacugugau

SEQ ID NO: 62364 - RNA, 18 nt, Artificial Sequence
  Synthetic
acacauucugacugugau

SEQ ID NO: 62365 - RNA, 20 nt, Artificial Sequence
  Synthetic
ugacacauucugacugugau

SEQ ID NO: 62366 - RNA, 22 nt, Artificial Sequence
  Synthetic
agugacacauucugacugugau

SEQ ID NO: 62367 - RNA, 23 nt, Artificial Sequence
  Synthetic
aagugacacauucugacugugau

SEQ ID NO: 62368 - RNA, 24 nt, Artificial Sequence
  Synthetic
aaagugacacauucugacugugau

SEQ ID NO: 62369 - RNA, 21 nt, Artificial Sequence
  Synthetic
agaaauauaaaauacugugau

SEQ ID NO: 62370 - RNA, 23 nt, Artificial Sequence
  Synthetic
agagaaauauaaaauacugugau

SEQ ID NO: 62371 - RNA, 24 nt, Artificial Sequence
  Synthetic
aagagaaauauaaaauacugugau

SEQ ID NO: 62372 - RNA, 19 nt, Artificial Sequence
  Synthetic
agauaccuucaucugugau

SEQ ID NO: 62373 - RNA, 21 nt, Artificial Sequence
  Synthetic
ugagauaccuucaucugugau

SEQ ID NO: 62374 - RNA, 22 nt, Artificial Sequence
  Synthetic
augagauaccuucaucugugau

SEQ ID NO: 62375 - RNA, 23 nt, Artificial Sequence
  Synthetic
uaugagauaccuucaucugugau

SEQ ID NO: 62376 - RNA, 24 nt, Artificial Sequence
  Synthetic
auaugagauaccuucaucugugau

SEQ ID NO: 62377 - RNA, 21 nt, Artificial Sequence
  Synthetic
uaaagaaaaauauugugugau

SEQ ID NO: 62378 - RNA, 22 nt, Artificial Sequence
  Synthetic
cuaaagaaaaauauugugugau

SEQ ID NO: 62379 - RNA, 24 nt, Artificial Sequence
  Synthetic
agcuaaagaaaaauauugugugau

SEQ ID NO: 62380 - RNA, 19 nt, Artificial Sequence
  Synthetic
uguacuugcaaauugugau

SEQ ID NO: 62381 - RNA, 20 nt, Artificial Sequence
  Synthetic
auguacuugcaaauugugau

SEQ ID NO: 62382 - RNA, 21 nt, Artificial Sequence
  Synthetic
uauguacuugcaaauugugau

SEQ ID NO: 62383 - RNA, 22 nt, Artificial Sequence
  Synthetic
auauguacuugcaaauugugau

SEQ ID NO: 62384 - RNA, 23 nt, Artificial Sequence
  Synthetic
uauauguacuugcaaauugugau

SEQ ID NO: 62385 - RNA, 24 nt, Artificial Sequence
  Synthetic
auauauguacuugcaaauugugau

SEQ ID NO: 62386 - RNA, 21 nt, Artificial Sequence
  Synthetic
ugaaaguaguagaguugugau

SEQ ID NO: 62387 - RNA, 22 nt, Artificial Sequence
  Synthetic
uugaaaguaguagaguugugau

SEQ ID NO: 62388 - RNA, 23 nt, Artificial Sequence
  Synthetic
uuugaaaguaguagaguugugau

SEQ ID NO: 62389 - RNA, 24 nt, Artificial Sequence
  Synthetic
uuuugaaaguaguagaguugugau

SEQ ID NO: 62390 - RNA, 18 nt, Artificial Sequence
  Synthetic
uuuuaagauaccauugau

SEQ ID NO: 62391 - RNA, 19 nt, Artificial Sequence
  Synthetic
uuuuuaagauaccauugau

SEQ ID NO: 62392 - RNA, 21 nt, Artificial Sequence
  Synthetic
uguuuuuaagauaccauugau

SEQ ID NO: 62393 - RNA, 22 nt, Artificial Sequence
  Synthetic
cuguuuuuaagauaccauugau

SEQ ID NO: 62394 - RNA, 23 nt, Artificial Sequence
  Synthetic
acuguuuuuaagauaccauugau

SEQ ID NO: 62395 - RNA, 24 nt, Artificial Sequence
  Synthetic
uacuguuuuuaagauaccauugau

SEQ ID NO: 62396 - RNA, 18 nt, Artificial Sequence
  Synthetic
ccuucauggcugcuugau

SEQ ID NO: 62397 - RNA, 19 nt, Artificial Sequence
  Synthetic
uccuucauggcugcuugau

SEQ ID NO: 62398 - RNA, 20 nt, Artificial Sequence
  Synthetic
uuccuucauggcugcuugau

SEQ ID NO: 62399 - RNA, 21 nt, Artificial Sequence
  Synthetic
auuccuucauggcugcuugau

SEQ ID NO: 62400 - RNA, 22 nt, Artificial Sequence
  Synthetic
cauuccuucauggcugcuugau

SEQ ID NO: 62401 - RNA, 23 nt, Artificial Sequence
  Synthetic
acauuccuucauggcugcuugau

SEQ ID NO: 62402 - RNA, 24 nt, Artificial Sequence
  Synthetic
aacauuccuucauggcugcuugau

SEQ ID NO: 62403 - RNA, 18 nt, Artificial Sequence
  Synthetic
uuuuguugaagaguugau

SEQ ID NO: 62404 - RNA, 19 nt, Artificial Sequence
  Synthetic
uuuuuguugaagaguugau

SEQ ID NO: 62405 - RNA, 20 nt, Artificial Sequence
  Synthetic
uuuuuuguugaagaguugau

SEQ ID NO: 62406 - RNA, 22 nt, Artificial Sequence
  Synthetic
uguuuuuuguugaagaguugau

SEQ ID NO: 62407 - RNA, 23 nt, Artificial Sequence
  Synthetic
auguuuuuuguugaagaguugau

SEQ ID NO: 62408 - RNA, 18 nt, Artificial Sequence
  Synthetic
uucauguugcagguugau

SEQ ID NO: 62409 - RNA, 19 nt, Artificial Sequence
  Synthetic
cuucauguugcagguugau

SEQ ID NO: 62410 - RNA, 20 nt, Artificial Sequence
  Synthetic
ucuucauguugcagguugau

SEQ ID NO: 62411 - RNA, 21 nt, Artificial Sequence
  Synthetic
uucuucauguugcagguugau

SEQ ID NO: 62412 - RNA, 22 nt, Artificial Sequence
  Synthetic
cuucuucauguugcagguugau

SEQ ID NO: 62413 - RNA, 23 nt, Artificial Sequence
  Synthetic
acuucuucauguugcagguugau

SEQ ID NO: 62414 - RNA, 24 nt, Artificial Sequence
  Synthetic
cacuucuucauguugcagguugau

SEQ ID NO: 62415 - RNA, 18 nt, Artificial Sequence
  Synthetic
uguaugcaaucuguugau

SEQ ID NO: 62416 - RNA, 19 nt, Artificial Sequence
  Synthetic
auguaugcaaucuguugau

SEQ ID NO: 62417 - RNA, 20 nt, Artificial Sequence
  Synthetic
aauguaugcaaucuguugau

SEQ ID NO: 62418 - RNA, 21 nt, Artificial Sequence
  Synthetic
aaauguaugcaaucuguugau

SEQ ID NO: 62419 - RNA, 23 nt, Artificial Sequence
  Synthetic
agaaauguaugcaaucuguugau

SEQ ID NO: 62420 - RNA, 19 nt, Artificial Sequence
  Synthetic
agcacaguaacuauuugau

SEQ ID NO: 62421 - RNA, 20 nt, Artificial Sequence
  Synthetic
aagcacaguaacuauuugau

SEQ ID NO: 62422 - RNA, 21 nt, Artificial Sequence
  Synthetic
aaagcacaguaacuauuugau

SEQ ID NO: 62423 - RNA, 23 nt, Artificial Sequence
  Synthetic
ugaaagcacaguaacuauuugau

SEQ ID NO: 62424 - RNA, 24 nt, Artificial Sequence
  Synthetic
uugaaagcacaguaacuauuugau

SEQ ID NO: 62425 - RNA, 18 nt, Artificial Sequence
  Synthetic
uaugaacaggacuuugau

SEQ ID NO: 62426 - RNA, 19 nt, Artificial Sequence
  Synthetic
cuaugaacaggacuuugau

SEQ ID NO: 62427 - RNA, 20 nt, Artificial Sequence
  Synthetic
ucuaugaacaggacuuugau

SEQ ID NO: 62428 - RNA, 21 nt, Artificial Sequence
  Synthetic
cucuaugaacaggacuuugau

SEQ ID NO: 62429 - RNA, 22 nt, Artificial Sequence
  Synthetic
acucuaugaacaggacuuugau

SEQ ID NO: 62430 - RNA, 23 nt, Artificial Sequence
  Synthetic
uacucuaugaacaggacuuugau

SEQ ID NO: 62431 - RNA, 24 nt, Artificial Sequence
  Synthetic
uuacucuaugaacaggacuuugau

SEQ ID NO: 62432 - RNA, 18 nt, Artificial Sequence
  Synthetic
uugugucuauacuuugau

SEQ ID NO: 62433 - RNA, 19 nt, Artificial Sequence
  Synthetic
uuugugucuauacuuugau

SEQ ID NO: 62434 - RNA, 21 nt, Artificial Sequence
  Synthetic
uguuugugucuauacuuugau

SEQ ID NO: 62435 - RNA, 24 nt, Artificial Sequence
  Synthetic
agguguuugugucuauacuuugau

SEQ ID NO: 62436 - RNA, 18 nt, Artificial Sequence
  Synthetic
acuagaauguacuuugau

SEQ ID NO: 62437 - RNA, 19 nt, Artificial Sequence
  Synthetic
aacuagaauguacuuugau

SEQ ID NO: 62438 - RNA, 21 nt, Artificial Sequence
  Synthetic
agaacuagaauguacuuugau

SEQ ID NO: 62439 - RNA, 22 nt, Artificial Sequence
  Synthetic
aagaacuagaauguacuuugau

SEQ ID NO: 62440 - RNA, 23 nt, Artificial Sequence
  Synthetic
aaagaacuagaauguacuuugau

SEQ ID NO: 62441 - RNA, 24 nt, Artificial Sequence
  Synthetic
uaaagaacuagaauguacuuugau

SEQ ID NO: 62442 - RNA, 18 nt, Artificial Sequence
  Synthetic
accaaacagaaguuugau

SEQ ID NO: 62443 - RNA, 19 nt, Artificial Sequence
  Synthetic
aaccaaacagaaguuugau

SEQ ID NO: 62444 - RNA, 21 nt, Artificial Sequence
  Synthetic
agaaccaaacagaaguuugau

SEQ ID NO: 62445 - RNA, 22 nt, Artificial Sequence
  Synthetic
aagaaccaaacagaaguuugau

SEQ ID NO: 62446 - RNA, 24 nt, Artificial Sequence
  Synthetic
ugaagaaccaaacagaaguuugau

SEQ ID NO: 62447 - RNA, 18 nt, Artificial Sequence
  Synthetic
auauaccauugaaaauau

SEQ ID NO: 62448 - RNA, 19 nt, Artificial Sequence
  Synthetic
uauauaccauugaaaauau

SEQ ID NO: 62449 - RNA, 20 nt, Artificial Sequence
  Synthetic
uuauauaccauugaaaauau

SEQ ID NO: 62450 - RNA, 22 nt, Artificial Sequence
  Synthetic
uguuauauaccauugaaaauau

SEQ ID NO: 62451 - RNA, 24 nt, Artificial Sequence
  Synthetic
uguguuauauaccauugaaaauau

SEQ ID NO: 62452 - RNA, 18 nt, Artificial Sequence
  Synthetic
uaacaaugaggcaaauau

SEQ ID NO: 62453 - RNA, 19 nt, Artificial Sequence
  Synthetic
uuaacaaugaggcaaauau

SEQ ID NO: 62454 - RNA, 20 nt, Artificial Sequence
  Synthetic
uuuaacaaugaggcaaauau

SEQ ID NO: 62455 - RNA, 21 nt, Artificial Sequence
  Synthetic
uuuuaacaaugaggcaaauau

SEQ ID NO: 62456 - RNA, 22 nt, Artificial Sequence
  Synthetic
cuuuuaacaaugaggcaaauau

SEQ ID NO: 62457 - RNA, 24 nt, Artificial Sequence
  Synthetic
agcuuuuaacaaugaggcaaauau

SEQ ID NO: 62458 - RNA, 18 nt, Artificial Sequence
  Synthetic
cugugguaguucaaauau

SEQ ID NO: 62459 - RNA, 19 nt, Artificial Sequence
  Synthetic
acugugguaguucaaauau

SEQ ID NO: 62460 - RNA, 20 nt, Artificial Sequence
  Synthetic
uacugugguaguucaaauau

SEQ ID NO: 62461 - RNA, 21 nt, Artificial Sequence
  Synthetic
uuacugugguaguucaaauau

SEQ ID NO: 62462 - RNA, 22 nt, Artificial Sequence
  Synthetic
uuuacugugguaguucaaauau

SEQ ID NO: 62463 - RNA, 23 nt, Artificial Sequence
  Synthetic
cuuuacugugguaguucaaauau

SEQ ID NO: 62464 - RNA, 24 nt, Artificial Sequence
  Synthetic
ucuuuacugugguaguucaaauau

SEQ ID NO: 62465 - RNA, 18 nt, Artificial Sequence
  Synthetic
auuucaaacucgaaauau

SEQ ID NO: 62466 - RNA, 19 nt, Artificial Sequence
  Synthetic
aauuucaaacucgaaauau

SEQ ID NO: 62467 - RNA, 20 nt, Artificial Sequence
  Synthetic
aaauuucaaacucgaaauau

SEQ ID NO: 62468 - RNA, 21 nt, Artificial Sequence
  Synthetic
aaaauuucaaacucgaaauau

SEQ ID NO: 62469 - RNA, 22 nt, Artificial Sequence
  Synthetic
aaaaauuucaaacucgaaauau

SEQ ID NO: 62470 - RNA, 23 nt, Artificial Sequence
  Synthetic
caaaaauuucaaacucgaaauau

SEQ ID NO: 62471 - RNA, 24 nt, Artificial Sequence
  Synthetic
acaaaaauuucaaacucgaaauau

SEQ ID NO: 62472 - RNA, 18 nt, Artificial Sequence
  Synthetic
acauaggaaaggaaauau

SEQ ID NO: 62473 - RNA, 19 nt, Artificial Sequence
  Synthetic
uacauaggaaaggaaauau

SEQ ID NO: 62474 - RNA, 20 nt, Artificial Sequence
  Synthetic
uuacauaggaaaggaaauau

SEQ ID NO: 62475 - RNA, 21 nt, Artificial Sequence
  Synthetic
uuuacauaggaaaggaaauau

SEQ ID NO: 62476 - RNA, 22 nt, Artificial Sequence
  Synthetic
auuuacauaggaaaggaaauau

SEQ ID NO: 62477 - RNA, 23 nt, Artificial Sequence
  Synthetic
cauuuacauaggaaaggaaauau

SEQ ID NO: 62478 - RNA, 24 nt, Artificial Sequence
  Synthetic
ccauuuacauaggaaaggaaauau

SEQ ID NO: 62479 - RNA, 18 nt, Artificial Sequence
  Synthetic
augaccaaauuacaauau

SEQ ID NO: 62480 - RNA, 19 nt, Artificial Sequence
  Synthetic
uaugaccaaauuacaauau

SEQ ID NO: 62481 - RNA, 20 nt, Artificial Sequence
  Synthetic
auaugaccaaauuacaauau

SEQ ID NO: 62482 - RNA, 21 nt, Artificial Sequence
  Synthetic
aauaugaccaaauuacaauau

SEQ ID NO: 62483 - RNA, 22 nt, Artificial Sequence
  Synthetic
uaauaugaccaaauuacaauau

SEQ ID NO: 62484 - RNA, 23 nt, Artificial Sequence
  Synthetic
cuaauaugaccaaauuacaauau

SEQ ID NO: 62485 - RNA, 24 nt, Artificial Sequence
  Synthetic
ccuaauaugaccaaauuacaauau

SEQ ID NO: 62486 - RNA, 18 nt, Artificial Sequence
  Synthetic
auguuucaguuacaauau

SEQ ID NO: 62487 - RNA, 20 nt, Artificial Sequence
  Synthetic
agauguuucaguuacaauau

SEQ ID NO: 62488 - RNA, 21 nt, Artificial Sequence
  Synthetic
uagauguuucaguuacaauau

SEQ ID NO: 62489 - RNA, 22 nt, Artificial Sequence
  Synthetic
auagauguuucaguuacaauau

SEQ ID NO: 62490 - RNA, 23 nt, Artificial Sequence
  Synthetic
cauagauguuucaguuacaauau

SEQ ID NO: 62491 - RNA, 24 nt, Artificial Sequence
  Synthetic
acauagauguuucaguuacaauau

SEQ ID NO: 62492 - RNA, 18 nt, Artificial Sequence
  Synthetic
acuaaauucugccaauau

SEQ ID NO: 62493 - RNA, 19 nt, Artificial Sequence
  Synthetic
uacuaaauucugccaauau

SEQ ID NO: 62494 - RNA, 20 nt, Artificial Sequence
  Synthetic
uuacuaaauucugccaauau

SEQ ID NO: 62495 - RNA, 21 nt, Artificial Sequence
  Synthetic
cuuacuaaauucugccaauau

SEQ ID NO: 62496 - RNA, 24 nt, Artificial Sequence
  Synthetic
uggcuuacuaaauucugccaauau

SEQ ID NO: 62497 - RNA, 18 nt, Artificial Sequence
  Synthetic
auauaggauugccaauau

SEQ ID NO: 62498 - RNA, 19 nt, Artificial Sequence
  Synthetic
cauauaggauugccaauau

SEQ ID NO: 62499 - RNA, 20 nt, Artificial Sequence
  Synthetic
ccauauaggauugccaauau

SEQ ID NO: 62500 - RNA, 22 nt, Artificial Sequence
  Synthetic
agccauauaggauugccaauau

SEQ ID NO: 62501 - RNA, 24 nt, Artificial Sequence
  Synthetic
ugagccauauaggauugccaauau

SEQ ID NO: 62502 - RNA, 18 nt, Artificial Sequence
  Synthetic
acaaagguuauccaauau

SEQ ID NO: 62503 - RNA, 19 nt, Artificial Sequence
  Synthetic
cacaaagguuauccaauau

SEQ ID NO: 62504 - RNA, 20 nt, Artificial Sequence
  Synthetic
ccacaaagguuauccaauau

SEQ ID NO: 62505 - RNA, 21 nt, Artificial Sequence
  Synthetic
uccacaaagguuauccaauau

SEQ ID NO: 62506 - RNA, 22 nt, Artificial Sequence
  Synthetic
cuccacaaagguuauccaauau

SEQ ID NO: 62507 - RNA, 23 nt, Artificial Sequence
  Synthetic
ucuccacaaagguuauccaauau

SEQ ID NO: 62508 - RNA, 24 nt, Artificial Sequence
  Synthetic
aucuccacaaagguuauccaauau

SEQ ID NO: 62509 - RNA, 18 nt, Artificial Sequence
  Synthetic
aacucugccucucaauau

SEQ ID NO: 62510 - RNA, 19 nt, Artificial Sequence
  Synthetic
caacucugccucucaauau

SEQ ID NO: 62511 - RNA, 20 nt, Artificial Sequence
  Synthetic
ccaacucugccucucaauau

SEQ ID NO: 62512 - RNA, 21 nt, Artificial Sequence
  Synthetic
uccaacucugccucucaauau

SEQ ID NO: 62513 - RNA, 22 nt, Artificial Sequence
  Synthetic
uuccaacucugccucucaauau

SEQ ID NO: 62514 - RNA, 23 nt, Artificial Sequence
  Synthetic
auuccaacucugccucucaauau

SEQ ID NO: 62515 - RNA, 24 nt, Artificial Sequence
  Synthetic
aauuccaacucugccucucaauau

SEQ ID NO: 62516 - RNA, 19 nt, Artificial Sequence
  Synthetic
agauuaauaaugucaauau

SEQ ID NO: 62517 - RNA, 20 nt, Artificial Sequence
  Synthetic
aagauuaauaaugucaauau

SEQ ID NO: 62518 - RNA, 21 nt, Artificial Sequence
  Synthetic
aaagauuaauaaugucaauau

SEQ ID NO: 62519 - RNA, 24 nt, Artificial Sequence
  Synthetic
aggaaagauuaauaaugucaauau

SEQ ID NO: 62520 - RNA, 18 nt, Artificial Sequence
  Synthetic
auagcuagagaagaauau

SEQ ID NO: 62521 - RNA, 19 nt, Artificial Sequence
  Synthetic
aauagcuagagaagaauau

SEQ ID NO: 62522 - RNA, 20 nt, Artificial Sequence
  Synthetic
caauagcuagagaagaauau

SEQ ID NO: 62523 - RNA, 18 nt, Artificial Sequence
  Synthetic
ucuuuucugagagaauau

SEQ ID NO: 62524 - RNA, 19 nt, Artificial Sequence
  Synthetic
uucuuuucugagagaauau

SEQ ID NO: 62525 - RNA, 20 nt, Artificial Sequence
  Synthetic
uuucuuuucugagagaauau

SEQ ID NO: 62526 - RNA, 21 nt, Artificial Sequence
  Synthetic
cuuucuuuucugagagaauau

SEQ ID NO: 62527 - RNA, 22 nt, Artificial Sequence
  Synthetic
acuuucuuuucugagagaauau

SEQ ID NO: 62528 - RNA, 23 nt, Artificial Sequence
  Synthetic
aacuuucuuuucugagagaauau

SEQ ID NO: 62529 - RNA, 24 nt, Artificial Sequence
  Synthetic
caacuuucuuuucugagagaauau

SEQ ID NO: 62530 - RNA, 18 nt, Artificial Sequence
  Synthetic
uuuuccaggguagaauau

SEQ ID NO: 62531 - RNA, 19 nt, Artificial Sequence
  Synthetic
uuuuuccaggguagaauau

SEQ ID NO: 62532 - RNA, 20 nt, Artificial Sequence
  Synthetic
uuuuuuccaggguagaauau

SEQ ID NO: 62533 - RNA, 21 nt, Artificial Sequence
  Synthetic
auuuuuuccaggguagaauau

SEQ ID NO: 62534 - RNA, 22 nt, Artificial Sequence
  Synthetic
aauuuuuuccaggguagaauau

SEQ ID NO: 62535 - RNA, 24 nt, Artificial Sequence
  Synthetic
agaauuuuuuccaggguagaauau

SEQ ID NO: 62536 - RNA, 18 nt, Artificial Sequence
  Synthetic
auuacaguugaugaauau

SEQ ID NO: 62537 - RNA, 19 nt, Artificial Sequence
  Synthetic
aauuacaguugaugaauau

SEQ ID NO: 62538 - RNA, 21 nt, Artificial Sequence
  Synthetic
ugaauuacaguugaugaauau

SEQ ID NO: 62539 - RNA, 22 nt, Artificial Sequence
  Synthetic
augaauuacaguugaugaauau

SEQ ID NO: 62540 - RNA, 24 nt, Artificial Sequence
  Synthetic
ugaugaauuacaguugaugaauau

SEQ ID NO: 62541 - RNA, 19 nt, Artificial Sequence
  Synthetic
agauucccuuggugaauau

SEQ ID NO: 62542 - RNA, 21 nt, Artificial Sequence
  Synthetic
agagauucccuuggugaauau

SEQ ID NO: 62543 - RNA, 23 nt, Artificial Sequence
  Synthetic
agagagauucccuuggugaauau

SEQ ID NO: 62544 - RNA, 19 nt, Artificial Sequence
  Synthetic
aggauaacugaaauaauau

SEQ ID NO: 62545 - RNA, 20 nt, Artificial Sequence
  Synthetic
aaggauaacugaaauaauau

SEQ ID NO: 62546 - RNA, 21 nt, Artificial Sequence
  Synthetic
aaaggauaacugaaauaauau

SEQ ID NO: 62547 - RNA, 22 nt, Artificial Sequence
  Synthetic
caaaggauaacugaaauaauau

SEQ ID NO: 62548 - RNA, 23 nt, Artificial Sequence
  Synthetic
ucaaaggauaacugaaauaauau

SEQ ID NO: 62549 - RNA, 24 nt, Artificial Sequence
  Synthetic
uucaaaggauaacugaaauaauau

SEQ ID NO: 62550 - RNA, 18 nt, Artificial Sequence
  Synthetic
agggguauuuaauaauau

SEQ ID NO: 62551 - RNA, 19 nt, Artificial Sequence
  Synthetic
cagggguauuuaauaauau

SEQ ID NO: 62552 - RNA, 20 nt, Artificial Sequence
  Synthetic
acagggguauuuaauaauau

SEQ ID NO: 62553 - RNA, 21 nt, Artificial Sequence
  Synthetic
uacagggguauuuaauaauau

SEQ ID NO: 62554 - RNA, 22 nt, Artificial Sequence
  Synthetic
auacagggguauuuaauaauau

SEQ ID NO: 62555 - RNA, 23 nt, Artificial Sequence
  Synthetic
aauacagggguauuuaauaauau

SEQ ID NO: 62556 - RNA, 24 nt, Artificial Sequence
  Synthetic
uaauacagggguauuuaauaauau

SEQ ID NO: 62557 - RNA, 19 nt, Artificial Sequence
  Synthetic
agagugggaaagauaauau

SEQ ID NO: 62558 - RNA, 20 nt, Artificial Sequence
  Synthetic
aagagugggaaagauaauau

SEQ ID NO: 62559 - RNA, 18 nt, Artificial Sequence
  Synthetic
ucucccucuuucuaauau

SEQ ID NO: 62560 - RNA, 19 nt, Artificial Sequence
  Synthetic
uucucccucuuucuaauau

SEQ ID NO: 62561 - RNA, 20 nt, Artificial Sequence
  Synthetic
auucucccucuuucuaauau

SEQ ID NO: 62562 - RNA, 21 nt, Artificial Sequence
  Synthetic
aauucucccucuuucuaauau

SEQ ID NO: 62563 - RNA, 22 nt, Artificial Sequence
  Synthetic
aaauucucccucuuucuaauau

SEQ ID NO: 62564 - RNA, 23 nt, Artificial Sequence
  Synthetic
aaaauucucccucuuucuaauau

SEQ ID NO: 62565 - RNA, 24 nt, Artificial Sequence
  Synthetic
aaaaauucucccucuuucuaauau

SEQ ID NO: 62566 - RNA, 18 nt, Artificial Sequence
  Synthetic
agaaugaaugcuuaauau

SEQ ID NO: 62567 - RNA, 19 nt, Artificial Sequence
  Synthetic
aagaaugaaugcuuaauau

SEQ ID NO: 62568 - RNA, 20 nt, Artificial Sequence
  Synthetic
uaagaaugaaugcuuaauau

SEQ ID NO: 62569 - RNA, 21 nt, Artificial Sequence
  Synthetic
uuaagaaugaaugcuuaauau

SEQ ID NO: 62570 - RNA, 22 nt, Artificial Sequence
  Synthetic
auuaagaaugaaugcuuaauau

SEQ ID NO: 62571 - RNA, 23 nt, Artificial Sequence
  Synthetic
uauuaagaaugaaugcuuaauau

SEQ ID NO: 62572 - RNA, 24 nt, Artificial Sequence
  Synthetic
uuauuaagaaugaaugcuuaauau

SEQ ID NO: 62573 - RNA, 18 nt, Artificial Sequence
  Synthetic
caaaggaaagguuaauau

SEQ ID NO: 62574 - RNA, 19 nt, Artificial Sequence
  Synthetic
ucaaaggaaagguuaauau

SEQ ID NO: 62575 - RNA, 21 nt, Artificial Sequence
  Synthetic
agucaaaggaaagguuaauau

SEQ ID NO: 62576 - RNA, 22 nt, Artificial Sequence
  Synthetic
aagucaaaggaaagguuaauau

SEQ ID NO: 62577 - RNA, 23 nt, Artificial Sequence
  Synthetic
aaagucaaaggaaagguuaauau

SEQ ID NO: 62578 - RNA, 24 nt, Artificial Sequence
  Synthetic
uaaagucaaaggaaagguuaauau

SEQ ID NO: 62579 - RNA, 18 nt, Artificial Sequence
  Synthetic
auaacaaaccuuuaauau

SEQ ID NO: 62580 - RNA, 19 nt, Artificial Sequence
  Synthetic
uauaacaaaccuuuaauau

SEQ ID NO: 62581 - RNA, 20 nt, Artificial Sequence
  Synthetic
auauaacaaaccuuuaauau

SEQ ID NO: 62582 - RNA, 21 nt, Artificial Sequence
  Synthetic
uauauaacaaaccuuuaauau

SEQ ID NO: 62583 - RNA, 22 nt, Artificial Sequence
  Synthetic
auauauaacaaaccuuuaauau

SEQ ID NO: 62584 - RNA, 23 nt, Artificial Sequence
  Synthetic
cauauauaacaaaccuuuaauau

SEQ ID NO: 62585 - RNA, 24 nt, Artificial Sequence
  Synthetic
acauauauaacaaaccuuuaauau

SEQ ID NO: 62586 - RNA, 19 nt, Artificial Sequence
  Synthetic
uguaaaguccaaaacauau

SEQ ID NO: 62587 - RNA, 20 nt, Artificial Sequence
  Synthetic
cuguaaaguccaaaacauau

SEQ ID NO: 62588 - RNA, 22 nt, Artificial Sequence
  Synthetic
agcuguaaaguccaaaacauau

SEQ ID NO: 62589 - RNA, 23 nt, Artificial Sequence
  Synthetic
cagcuguaaaguccaaaacauau

SEQ ID NO: 62590 - RNA, 24 nt, Artificial Sequence
  Synthetic
ucagcuguaaaguccaaaacauau

SEQ ID NO: 62591 - RNA, 21 nt, Artificial Sequence
  Synthetic
aggauuaauaucaaaacauau

SEQ ID NO: 62592 - RNA, 23 nt, Artificial Sequence
  Synthetic
agaggauuaauaucaaaacauau

SEQ ID NO: 62593 - RNA, 24 nt, Artificial Sequence
  Synthetic
aagaggauuaauaucaaaacauau

SEQ ID NO: 62594 - RNA, 18 nt, Artificial Sequence
  Synthetic
ugagaggcagaaacauau

SEQ ID NO: 62595 - RNA, 19 nt, Artificial Sequence
  Synthetic
cugagaggcagaaacauau

SEQ ID NO: 62596 - RNA, 20 nt, Artificial Sequence
  Synthetic
ccugagaggcagaaacauau

SEQ ID NO: 62597 - RNA, 22 nt, Artificial Sequence
  Synthetic
ugccugagaggcagaaacauau

SEQ ID NO: 62598 - RNA, 23 nt, Artificial Sequence
  Synthetic
cugccugagaggcagaaacauau

SEQ ID NO: 62599 - RNA, 24 nt, Artificial Sequence
  Synthetic
ucugccugagaggcagaaacauau

SEQ ID NO: 62600 - RNA, 18 nt, Artificial Sequence
  Synthetic
uuacuuuaguuaacauau

SEQ ID NO: 62601 - RNA, 19 nt, Artificial Sequence
  Synthetic
auuacuuuaguuaacauau

SEQ ID NO: 62602 - RNA, 20 nt, Artificial Sequence
  Synthetic
cauuacuuuaguuaacauau

SEQ ID NO: 62603 - RNA, 21 nt, Artificial Sequence
  Synthetic
ucauuacuuuaguuaacauau

SEQ ID NO: 62604 - RNA, 22 nt, Artificial Sequence
  Synthetic
aucauuacuuuaguuaacauau

SEQ ID NO: 62605 - RNA, 23 nt, Artificial Sequence
  Synthetic
aaucauuacuuuaguuaacauau

SEQ ID NO: 62606 - RNA, 24 nt, Artificial Sequence
  Synthetic
aaaucauuacuuuaguuaacauau

SEQ ID NO: 62607 - RNA, 18 nt, Artificial Sequence
  Synthetic
ugagaaauuaagacauau

SEQ ID NO: 62608 - RNA, 19 nt, Artificial Sequence
  Synthetic
cugagaaauuaagacauau

SEQ ID NO: 62609 - RNA, 21 nt, Artificial Sequence
  Synthetic
agcugagaaauuaagacauau

SEQ ID NO: 62610 - RNA, 22 nt, Artificial Sequence
  Synthetic
cagcugagaaauuaagacauau

SEQ ID NO: 62611 - RNA, 23 nt, Artificial Sequence
  Synthetic
acagcugagaaauuaagacauau

SEQ ID NO: 62612 - RNA, 24 nt, Artificial Sequence
  Synthetic
uacagcugagaaauuaagacauau

SEQ ID NO: 62613 - RNA, 18 nt, Artificial Sequence
  Synthetic
ccauuaugguuuacauau

SEQ ID NO: 62614 - RNA, 21 nt, Artificial Sequence
  Synthetic
aggccauuaugguuuacauau

SEQ ID NO: 62615 - RNA, 22 nt, Artificial Sequence
  Synthetic
aaggccauuaugguuuacauau

SEQ ID NO: 62616 - RNA, 23 nt, Artificial Sequence
  Synthetic
uaaggccauuaugguuuacauau

SEQ ID NO: 62617 - RNA, 24 nt, Artificial Sequence
  Synthetic
uuaaggccauuaugguuuacauau

SEQ ID NO: 62618 - RNA, 18 nt, Artificial Sequence
  Synthetic
uagugguuuauuccauau

SEQ ID NO: 62619 - RNA, 19 nt, Artificial Sequence
  Synthetic
auagugguuuauuccauau

SEQ ID NO: 62620 - RNA, 20 nt, Artificial Sequence
  Synthetic
aauagugguuuauuccauau

SEQ ID NO: 62621 - RNA, 21 nt, Artificial Sequence
  Synthetic
aaauagugguuuauuccauau

SEQ ID NO: 62622 - RNA, 22 nt, Artificial Sequence
  Synthetic
uaaauagugguuuauuccauau

SEQ ID NO: 62623 - RNA, 23 nt, Artificial Sequence
  Synthetic
auaaauagugguuuauuccauau

SEQ ID NO: 62624 - RNA, 24 nt, Artificial Sequence
  Synthetic
aauaaauagugguuuauuccauau

SEQ ID NO: 62625 - RNA, 18 nt, Artificial Sequence
  Synthetic
uuuuguucauaagcauau

SEQ ID NO: 62626 - RNA, 19 nt, Artificial Sequence
  Synthetic
uuuuuguucauaagcauau

SEQ ID NO: 62627 - RNA, 20 nt, Artificial Sequence
  Synthetic
cuuuuuguucauaagcauau

SEQ ID NO: 62628 - RNA, 21 nt, Artificial Sequence
  Synthetic
acuuuuuguucauaagcauau

SEQ ID NO: 62629 - RNA, 22 nt, Artificial Sequence
  Synthetic
aacuuuuuguucauaagcauau

SEQ ID NO: 62630 - RNA, 24 nt, Artificial Sequence
  Synthetic
agaacuuuuuguucauaagcauau

SEQ ID NO: 62631 - RNA, 18 nt, Artificial Sequence
  Synthetic
auaguuucacgagcauau

SEQ ID NO: 62632 - RNA, 19 nt, Artificial Sequence
  Synthetic
uauaguuucacgagcauau

SEQ ID NO: 62633 - RNA, 20 nt, Artificial Sequence
  Synthetic
auauaguuucacgagcauau

SEQ ID NO: 62634 - RNA, 21 nt, Artificial Sequence
  Synthetic
aauauaguuucacgagcauau

SEQ ID NO: 62635 - RNA, 23 nt, Artificial Sequence
  Synthetic
agaauauaguuucacgagcauau

SEQ ID NO: 62636 - RNA, 24 nt, Artificial Sequence
  Synthetic
aagaauauaguuucacgagcauau

SEQ ID NO: 62637 - RNA, 18 nt, Artificial Sequence
  Synthetic
cuagugacaugagcauau

SEQ ID NO: 62638 - RNA, 19 nt, Artificial Sequence
  Synthetic
acuagugacaugagcauau

SEQ ID NO: 62639 - RNA, 21 nt, Artificial Sequence
  Synthetic
agacuagugacaugagcauau

SEQ ID NO: 62640 - RNA, 23 nt, Artificial Sequence
  Synthetic
agagacuagugacaugagcauau

SEQ ID NO: 62641 - RNA, 18 nt, Artificial Sequence
  Synthetic
caaugugaacaugcauau

SEQ ID NO: 62642 - RNA, 19 nt, Artificial Sequence
  Synthetic
ucaaugugaacaugcauau

SEQ ID NO: 62643 - RNA, 20 nt, Artificial Sequence
  Synthetic
cucaaugugaacaugcauau

SEQ ID NO: 62644 - RNA, 21 nt, Artificial Sequence
  Synthetic
ucucaaugugaacaugcauau

SEQ ID NO: 62645 - RNA, 22 nt, Artificial Sequence
  Synthetic
uucucaaugugaacaugcauau

SEQ ID NO: 62646 - RNA, 23 nt, Artificial Sequence
  Synthetic
uuucucaaugugaacaugcauau

SEQ ID NO: 62647 - RNA, 24 nt, Artificial Sequence
  Synthetic
uuuucucaaugugaacaugcauau

SEQ ID NO: 62648 - RNA, 18 nt, Artificial Sequence
  Synthetic
aaugcuuuuacugcauau

SEQ ID NO: 62649 - RNA, 19 nt, Artificial Sequence
  Synthetic
uaaugcuuuuacugcauau

SEQ ID NO: 62650 - RNA, 20 nt, Artificial Sequence
  Synthetic
auaaugcuuuuacugcauau

SEQ ID NO: 62651 - RNA, 21 nt, Artificial Sequence
  Synthetic
aauaaugcuuuuacugcauau

SEQ ID NO: 62652 - RNA, 22 nt, Artificial Sequence
  Synthetic
aaauaaugcuuuuacugcauau

SEQ ID NO: 62653 - RNA, 24 nt, Artificial Sequence
  Synthetic
ugaaauaaugcuuuuacugcauau

SEQ ID NO: 62654 - RNA, 18 nt, Artificial Sequence
  Synthetic
uuuauuuguaaaucauau

SEQ ID NO: 62655 - RNA, 19 nt, Artificial Sequence
  Synthetic
auuuauuuguaaaucauau

SEQ ID NO: 62656 - RNA, 20 nt, Artificial Sequence
  Synthetic
cauuuauuuguaaaucauau

SEQ ID NO: 62657 - RNA, 21 nt, Artificial Sequence
  Synthetic
acauuuauuuguaaaucauau

SEQ ID NO: 62658 - RNA, 22 nt, Artificial Sequence
  Synthetic
uacauuuauuuguaaaucauau

SEQ ID NO: 62659 - RNA, 24 nt, Artificial Sequence
  Synthetic
uguacauuuauuuguaaaucauau

SEQ ID NO: 62660 - RNA, 18 nt, Artificial Sequence
  Synthetic
ugugaaauaaggucauau

SEQ ID NO: 62661 - RNA, 19 nt, Artificial Sequence
  Synthetic
augugaaauaaggucauau

SEQ ID NO: 62662 - RNA, 20 nt, Artificial Sequence
  Synthetic
uaugugaaauaaggucauau

SEQ ID NO: 62663 - RNA, 21 nt, Artificial Sequence
  Synthetic
cuaugugaaauaaggucauau

SEQ ID NO: 62664 - RNA, 22 nt, Artificial Sequence
  Synthetic
ucuaugugaaauaaggucauau

SEQ ID NO: 62665 - RNA, 23 nt, Artificial Sequence
  Synthetic
cucuaugugaaauaaggucauau

SEQ ID NO: 62666 - RNA, 24 nt, Artificial Sequence
  Synthetic
acucuaugugaaauaaggucauau

SEQ ID NO: 62667 - RNA, 18 nt, Artificial Sequence
  Synthetic
aaggaccagaggucauau

SEQ ID NO: 62668 - RNA, 19 nt, Artificial Sequence
  Synthetic
aaaggaccagaggucauau

SEQ ID NO: 62669 - RNA, 20 nt, Artificial Sequence
  Synthetic
aaaaggaccagaggucauau

SEQ ID NO: 62670 - RNA, 22 nt, Artificial Sequence
  Synthetic
agaaaaggaccagaggucauau

SEQ ID NO: 62671 - RNA, 23 nt, Artificial Sequence
  Synthetic
cagaaaaggaccagaggucauau

SEQ ID NO: 62672 - RNA, 24 nt, Artificial Sequence
  Synthetic
acagaaaaggaccagaggucauau

SEQ ID NO: 62673 - RNA, 18 nt, Artificial Sequence
  Synthetic
cuauaaagggauucauau

SEQ ID NO: 62674 - RNA, 19 nt, Artificial Sequence
  Synthetic
acuauaaagggauucauau

SEQ ID NO: 62675 - RNA, 21 nt, Artificial Sequence
  Synthetic
agacuauaaagggauucauau

SEQ ID NO: 62676 - RNA, 22 nt, Artificial Sequence
  Synthetic
aagacuauaaagggauucauau

SEQ ID NO: 62677 - RNA, 19 nt, Artificial Sequence
  Synthetic
uguagagauucaaagauau

SEQ ID NO: 62678 - RNA, 20 nt, Artificial Sequence
  Synthetic
cuguagagauucaaagauau

SEQ ID NO: 62679 - RNA, 21 nt, Artificial Sequence
  Synthetic
ccuguagagauucaaagauau

SEQ ID NO: 62680 - RNA, 22 nt, Artificial Sequence
  Synthetic
uccuguagagauucaaagauau

SEQ ID NO: 62681 - RNA, 23 nt, Artificial Sequence
  Synthetic
uuccuguagagauucaaagauau

SEQ ID NO: 62682 - RNA, 24 nt, Artificial Sequence
  Synthetic
auuccuguagagauucaaagauau

SEQ ID NO: 62683 - RNA, 18 nt, Artificial Sequence
  Synthetic
aguauauuugaaagauau

SEQ ID NO: 62684 - RNA, 19 nt, Artificial Sequence
  Synthetic
aaguauauuugaaagauau

SEQ ID NO: 62685 - RNA, 20 nt, Artificial Sequence
  Synthetic
uaaguauauuugaaagauau

SEQ ID NO: 62686 - RNA, 21 nt, Artificial Sequence
  Synthetic
auaaguauauuugaaagauau

SEQ ID NO: 62687 - RNA, 22 nt, Artificial Sequence
  Synthetic
cauaaguauauuugaaagauau

SEQ ID NO: 62688 - RNA, 23 nt, Artificial Sequence
  Synthetic
ucauaaguauauuugaaagauau

SEQ ID NO: 62689 - RNA, 24 nt, Artificial Sequence
  Synthetic
uucauaaguauauuugaaagauau

SEQ ID NO: 62690 - RNA, 18 nt, Artificial Sequence
  Synthetic
ucaagguacugcagauau

SEQ ID NO: 62691 - RNA, 19 nt, Artificial Sequence
  Synthetic
cucaagguacugcagauau

SEQ ID NO: 62692 - RNA, 21 nt, Artificial Sequence
  Synthetic
ugcucaagguacugcagauau

SEQ ID NO: 62693 - RNA, 22 nt, Artificial Sequence
  Synthetic
cugcucaagguacugcagauau

SEQ ID NO: 62694 - RNA, 24 nt, Artificial Sequence
  Synthetic
ugcugcucaagguacugcagauau

SEQ ID NO: 62695 - RNA, 18 nt, Artificial Sequence
  Synthetic
cauugaaacaagagauau

SEQ ID NO: 62696 - RNA, 19 nt, Artificial Sequence
  Synthetic
ccauugaaacaagagauau

SEQ ID NO: 62697 - RNA, 21 nt, Artificial Sequence
  Synthetic
ugccauugaaacaagagauau

SEQ ID NO: 62698 - RNA, 23 nt, Artificial Sequence
  Synthetic
agugccauugaaacaagagauau

SEQ ID NO: 62699 - RNA, 24 nt, Artificial Sequence
  Synthetic
aagugccauugaaacaagagauau

SEQ ID NO: 62700 - RNA, 18 nt, Artificial Sequence
  Synthetic
cagaauuuuaauagauau

SEQ ID NO: 62701 - RNA, 19 nt, Artificial Sequence
  Synthetic
ccagaauuuuaauagauau

SEQ ID NO: 62702 - RNA, 20 nt, Artificial Sequence
  Synthetic
uccagaauuuuaauagauau

SEQ ID NO: 62703 - RNA, 21 nt, Artificial Sequence
  Synthetic
cuccagaauuuuaauagauau

SEQ ID NO: 62704 - RNA, 22 nt, Artificial Sequence
  Synthetic
acuccagaauuuuaauagauau

SEQ ID NO: 62705 - RNA, 23 nt, Artificial Sequence
  Synthetic
uacuccagaauuuuaauagauau

SEQ ID NO: 62706 - RNA, 24 nt, Artificial Sequence
  Synthetic
cuacuccagaauuuuaauagauau

SEQ ID NO: 62707 - RNA, 19 nt, Artificial Sequence
  Synthetic
agacugcuuucaaggauau

SEQ ID NO: 62708 - RNA, 21 nt, Artificial Sequence
  Synthetic
agagacugcuuucaaggauau

SEQ ID NO: 62709 - RNA, 22 nt, Artificial Sequence
  Synthetic
cagagacugcuuucaaggauau

SEQ ID NO: 62710 - RNA, 23 nt, Artificial Sequence
  Synthetic
ucagagacugcuuucaaggauau

SEQ ID NO: 62711 - RNA, 18 nt, Artificial Sequence
  Synthetic
aggcacuuagaaggauau

SEQ ID NO: 62712 - RNA, 19 nt, Artificial Sequence
  Synthetic
aaggcacuuagaaggauau

SEQ ID NO: 62713 - RNA, 20 nt, Artificial Sequence
  Synthetic
aaaggcacuuagaaggauau

SEQ ID NO: 62714 - RNA, 21 nt, Artificial Sequence
  Synthetic
caaaggcacuuagaaggauau

SEQ ID NO: 62715 - RNA, 23 nt, Artificial Sequence
  Synthetic
agcaaaggcacuuagaaggauau

SEQ ID NO: 62716 - RNA, 24 nt, Artificial Sequence
  Synthetic
uagcaaaggcacuuagaaggauau

SEQ ID NO: 62717 - RNA, 18 nt, Artificial Sequence
  Synthetic
agaaagagaugaggauau

SEQ ID NO: 62718 - RNA, 19 nt, Artificial Sequence
  Synthetic
uagaaagagaugaggauau

SEQ ID NO: 62719 - RNA, 23 nt, Artificial Sequence
  Synthetic
aggguagaaagagaugaggauau

SEQ ID NO: 62720 - RNA, 24 nt, Artificial Sequence
  Synthetic
aaggguagaaagagaugaggauau

SEQ ID NO: 62721 - RNA, 18 nt, Artificial Sequence
  Synthetic
uuguucuaagauggauau

SEQ ID NO: 62722 - RNA, 19 nt, Artificial Sequence
  Synthetic
auuguucuaagauggauau

SEQ ID NO: 62723 - RNA, 20 nt, Artificial Sequence
  Synthetic
aauuguucuaagauggauau

SEQ ID NO: 62724 - RNA, 21 nt, Artificial Sequence
  Synthetic
uaauuguucuaagauggauau

SEQ ID NO: 62725 - RNA, 22 nt, Artificial Sequence
  Synthetic
uuaauuguucuaagauggauau

SEQ ID NO: 62726 - RNA, 23 nt, Artificial Sequence
  Synthetic
cuuaauuguucuaagauggauau

SEQ ID NO: 62727 - RNA, 24 nt, Artificial Sequence
  Synthetic
ucuuaauuguucuaagauggauau

SEQ ID NO: 62728 - RNA, 22 nt, Artificial Sequence
  Synthetic
uguggaguagauagcuggauau

SEQ ID NO: 62729 - RNA, 24 nt, Artificial Sequence
  Synthetic
uguguggaguagauagcuggauau

SEQ ID NO: 62730 - RNA, 18 nt, Artificial Sequence
  Synthetic
uauuuucuugcaugauau

SEQ ID NO: 62731 - RNA, 19 nt, Artificial Sequence
  Synthetic
auauuuucuugcaugauau

SEQ ID NO: 62732 - RNA, 21 nt, Artificial Sequence
  Synthetic
ugauauuuucuugcaugauau

SEQ ID NO: 62733 - RNA, 22 nt, Artificial Sequence
  Synthetic
uugauauuuucuugcaugauau

SEQ ID NO: 62734 - RNA, 23 nt, Artificial Sequence
  Synthetic
auugauauuuucuugcaugauau

SEQ ID NO: 62735 - RNA, 24 nt, Artificial Sequence
  Synthetic
uauugauauuuucuugcaugauau

SEQ ID NO: 62736 - RNA, 18 nt, Artificial Sequence
  Synthetic
uguauaauggacugauau

SEQ ID NO: 62737 - RNA, 19 nt, Artificial Sequence
  Synthetic
cuguauaauggacugauau

SEQ ID NO: 62738 - RNA, 20 nt, Artificial Sequence
  Synthetic
ucuguauaauggacugauau

SEQ ID NO: 62739 - RNA, 21 nt, Artificial Sequence
  Synthetic
uucuguauaauggacugauau

SEQ ID NO: 62740 - RNA, 22 nt, Artificial Sequence
  Synthetic
uuucuguauaauggacugauau

SEQ ID NO: 62741 - RNA, 23 nt, Artificial Sequence
  Synthetic
uuuucuguauaauggacugauau

SEQ ID NO: 62742 - RNA, 24 nt, Artificial Sequence
  Synthetic
uuuuucuguauaauggacugauau

SEQ ID NO: 62743 - RNA, 18 nt, Artificial Sequence
  Synthetic
uacaggauauguugauau

SEQ ID NO: 62744 - RNA, 19 nt, Artificial Sequence
  Synthetic
auacaggauauguugauau

SEQ ID NO: 62745 - RNA, 20 nt, Artificial Sequence
  Synthetic
aauacaggauauguugauau

SEQ ID NO: 62746 - RNA, 21 nt, Artificial Sequence
  Synthetic
aaauacaggauauguugauau

SEQ ID NO: 62747 - RNA, 22 nt, Artificial Sequence
  Synthetic
caaauacaggauauguugauau

SEQ ID NO: 62748 - RNA, 23 nt, Artificial Sequence
  Synthetic
ucaaauacaggauauguugauau

SEQ ID NO: 62749 - RNA, 24 nt, Artificial Sequence
  Synthetic
uucaaauacaggauauguugauau

SEQ ID NO: 62750 - RNA, 18 nt, Artificial Sequence
  Synthetic
uuuuauugacuuugauau

SEQ ID NO: 62751 - RNA, 19 nt, Artificial Sequence
  Synthetic
cuuuuauugacuuugauau

SEQ ID NO: 62752 - RNA, 20 nt, Artificial Sequence
  Synthetic
ucuuuuauugacuuugauau

SEQ ID NO: 62753 - RNA, 22 nt, Artificial Sequence
  Synthetic
ugucuuuuauugacuuugauau

SEQ ID NO: 62754 - RNA, 24 nt, Artificial Sequence
  Synthetic
agugucuuuuauugacuuugauau

SEQ ID NO: 62755 - RNA, 18 nt, Artificial Sequence
  Synthetic
uucuccauauacauauau

SEQ ID NO: 62756 - RNA, 19 nt, Artificial Sequence
  Synthetic
auucuccauauacauauau

SEQ ID NO: 62757 - RNA, 20 nt, Artificial Sequence
  Synthetic
aauucuccauauacauauau

SEQ ID NO: 62758 - RNA, 21 nt, Artificial Sequence
  Synthetic
aaauucuccauauacauauau

SEQ ID NO: 62759 - RNA, 22 nt, Artificial Sequence
  Synthetic
aaaauucuccauauacauauau

SEQ ID NO: 62760 - RNA, 23 nt, Artificial Sequence
  Synthetic
caaaauucuccauauacauauau

SEQ ID NO: 62761 - RNA, 24 nt, Artificial Sequence
  Synthetic
acaaaauucuccauauacauauau

SEQ ID NO: 62762 - RNA, 21 nt, Artificial Sequence
  Synthetic
auugaggaagaaaucauauau

SEQ ID NO: 62763 - RNA, 22 nt, Artificial Sequence
  Synthetic
aauugaggaagaaaucauauau

SEQ ID NO: 62764 - RNA, 23 nt, Artificial Sequence
  Synthetic
uaauugaggaagaaaucauauau

SEQ ID NO: 62765 - RNA, 24 nt, Artificial Sequence
  Synthetic
cuaauugaggaagaaaucauauau

SEQ ID NO: 62766 - RNA, 18 nt, Artificial Sequence
  Synthetic
agauaaguauucauauau

SEQ ID NO: 62767 - RNA, 20 nt, Artificial Sequence
  Synthetic
agagauaaguauucauauau

SEQ ID NO: 62768 - RNA, 21 nt, Artificial Sequence
  Synthetic
uagagauaaguauucauauau

SEQ ID NO: 62769 - RNA, 22 nt, Artificial Sequence
  Synthetic
uuagagauaaguauucauauau

SEQ ID NO: 62770 - RNA, 23 nt, Artificial Sequence
  Synthetic
uuuagagauaaguauucauauau

SEQ ID NO: 62771 - RNA, 24 nt, Artificial Sequence
  Synthetic
uuuuagagauaaguauucauauau

SEQ ID NO: 62772 - RNA, 18 nt, Artificial Sequence
  Synthetic
auaugauuaaggauauau

SEQ ID NO: 62773 - RNA, 19 nt, Artificial Sequence
  Synthetic
aauaugauuaaggauauau

SEQ ID NO: 62774 - RNA, 20 nt, Artificial Sequence
  Synthetic
caauaugauuaaggauauau

SEQ ID NO: 62775 - RNA, 21 nt, Artificial Sequence
  Synthetic
acaauaugauuaaggauauau

SEQ ID NO: 62776 - RNA, 22 nt, Artificial Sequence
  Synthetic
uacaauaugauuaaggauauau

SEQ ID NO: 62777 - RNA, 23 nt, Artificial Sequence
  Synthetic
auacaauaugauuaaggauauau

SEQ ID NO: 62778 - RNA, 24 nt, Artificial Sequence
  Synthetic
uauacaauaugauuaaggauauau

SEQ ID NO: 62779 - RNA, 21 nt, Artificial Sequence
  Synthetic
aauuauauacuguauauauau

SEQ ID NO: 62780 - RNA, 22 nt, Artificial Sequence
  Synthetic
aaauuauauacuguauauauau

SEQ ID NO: 62781 - RNA, 24 nt, Artificial Sequence
  Synthetic
agaaauuauauacuguauauauau

SEQ ID NO: 62782 - RNA, 19 nt, Artificial Sequence
  Synthetic
aggcguggccacccuauau

SEQ ID NO: 62783 - RNA, 20 nt, Artificial Sequence
  Synthetic
caggcguggccacccuauau

SEQ ID NO: 62784 - RNA, 21 nt, Artificial Sequence
  Synthetic
ccaggcguggccacccuauau

SEQ ID NO: 62785 - RNA, 22 nt, Artificial Sequence
  Synthetic
accaggcguggccacccuauau

SEQ ID NO: 62786 - RNA, 23 nt, Artificial Sequence
  Synthetic
aaccaggcguggccacccuauau

SEQ ID NO: 62787 - RNA, 24 nt, Artificial Sequence
  Synthetic
uaaccaggcguggccacccuauau

SEQ ID NO: 62788 - RNA, 18 nt, Artificial Sequence
  Synthetic
cugucuuggucccuauau

SEQ ID NO: 62789 - RNA, 19 nt, Artificial Sequence
  Synthetic
ccugucuuggucccuauau

SEQ ID NO: 62790 - RNA, 20 nt, Artificial Sequence
  Synthetic
uccugucuuggucccuauau

SEQ ID NO: 62791 - RNA, 21 nt, Artificial Sequence
  Synthetic
auccugucuuggucccuauau

SEQ ID NO: 62792 - RNA, 22 nt, Artificial Sequence
  Synthetic
uauccugucuuggucccuauau

SEQ ID NO: 62793 - RNA, 23 nt, Artificial Sequence
  Synthetic
cuauccugucuuggucccuauau

SEQ ID NO: 62794 - RNA, 24 nt, Artificial Sequence
  Synthetic
ucuauccugucuuggucccuauau

SEQ ID NO: 62795 - RNA, 19 nt, Artificial Sequence
  Synthetic
ugauauagggaaaguauau

SEQ ID NO: 62796 - RNA, 20 nt, Artificial Sequence
  Synthetic
uugauauagggaaaguauau

SEQ ID NO: 62797 - RNA, 21 nt, Artificial Sequence
  Synthetic
auugauauagggaaaguauau

SEQ ID NO: 62798 - RNA, 22 nt, Artificial Sequence
  Synthetic
cauugauauagggaaaguauau

SEQ ID NO: 62799 - RNA, 24 nt, Artificial Sequence
  Synthetic
cgcauugauauagggaaaguauau

SEQ ID NO: 62800 - RNA, 18 nt, Artificial Sequence
  Synthetic
augacaaaaucaguauau

SEQ ID NO: 62801 - RNA, 19 nt, Artificial Sequence
  Synthetic
uaugacaaaaucaguauau

SEQ ID NO: 62802 - RNA, 20 nt, Artificial Sequence
  Synthetic
auaugacaaaaucaguauau

SEQ ID NO: 62803 - RNA, 21 nt, Artificial Sequence
  Synthetic
uauaugacaaaaucaguauau

SEQ ID NO: 62804 - RNA, 22 nt, Artificial Sequence
  Synthetic
uuauaugacaaaaucaguauau

SEQ ID NO: 62805 - RNA, 23 nt, Artificial Sequence
  Synthetic
uuuauaugacaaaaucaguauau

SEQ ID NO: 62806 - RNA, 24 nt, Artificial Sequence
  Synthetic
auuuauaugacaaaaucaguauau

SEQ ID NO: 62807 - RNA, 18 nt, Artificial Sequence
  Synthetic
uuaaugacaauaguauau

SEQ ID NO: 62808 - RNA, 19 nt, Artificial Sequence
  Synthetic
uuuaaugacaauaguauau

SEQ ID NO: 62809 - RNA, 20 nt, Artificial Sequence
  Synthetic
cuuuaaugacaauaguauau

SEQ ID NO: 62810 - RNA, 21 nt, Artificial Sequence
  Synthetic
ucuuuaaugacaauaguauau

SEQ ID NO: 62811 - RNA, 22 nt, Artificial Sequence
  Synthetic
cucuuuaaugacaauaguauau

SEQ ID NO: 62812 - RNA, 23 nt, Artificial Sequence
  Synthetic
acucuuuaaugacaauaguauau

SEQ ID NO: 62813 - RNA, 24 nt, Artificial Sequence
  Synthetic
cacucuuuaaugacaauaguauau

SEQ ID NO: 62814 - RNA, 18 nt, Artificial Sequence
  Synthetic
cccucauaagaauuauau

SEQ ID NO: 62815 - RNA, 19 nt, Artificial Sequence
  Synthetic
ucccucauaagaauuauau

SEQ ID NO: 62816 - RNA, 21 nt, Artificial Sequence
  Synthetic
agucccucauaagaauuauau

SEQ ID NO: 62817 - RNA, 22 nt, Artificial Sequence
  Synthetic
uagucccucauaagaauuauau

SEQ ID NO: 62818 - RNA, 23 nt, Artificial Sequence
  Synthetic
uuagucccucauaagaauuauau

SEQ ID NO: 62819 - RNA, 24 nt, Artificial Sequence
  Synthetic
uuuagucccucauaagaauuauau

SEQ ID NO: 62820 - RNA, 18 nt, Artificial Sequence
  Synthetic
uccuuuuaauaauuauau

SEQ ID NO: 62821 - RNA, 19 nt, Artificial Sequence
  Synthetic
cuccuuuuaauaauuauau

SEQ ID NO: 62822 - RNA, 21 nt, Artificial Sequence
  Synthetic
agcuccuuuuaauaauuauau

SEQ ID NO: 62823 - RNA, 24 nt, Artificial Sequence
  Synthetic
aggagcuccuuuuaauaauuauau

SEQ ID NO: 62824 - RNA, 18 nt, Artificial Sequence
  Synthetic
cuucauuucccauuauau

SEQ ID NO: 62825 - RNA, 19 nt, Artificial Sequence
  Synthetic
acuucauuucccauuauau

SEQ ID NO: 62826 - RNA, 20 nt, Artificial Sequence
  Synthetic
cacuucauuucccauuauau

SEQ ID NO: 62827 - RNA, 21 nt, Artificial Sequence
  Synthetic
ucacuucauuucccauuauau

SEQ ID NO: 62828 - RNA, 23 nt, Artificial Sequence
  Synthetic
cgucacuucauuucccauuauau

SEQ ID NO: 62829 - RNA, 24 nt, Artificial Sequence
  Synthetic
ucgucacuucauuucccauuauau

SEQ ID NO: 62830 - RNA, 21 nt, Artificial Sequence
  Synthetic
aguuuucuacuauuauuauau

SEQ ID NO: 62831 - RNA, 23 nt, Artificial Sequence
  Synthetic
ugaguuuucuacuauuauuauau

SEQ ID NO: 62832 - RNA, 24 nt, Artificial Sequence
  Synthetic
uugaguuuucuacuauuauuauau

SEQ ID NO: 62833 - RNA, 19 nt, Artificial Sequence
  Synthetic
uguuacaguagucuuauau

SEQ ID NO: 62834 - RNA, 20 nt, Artificial Sequence
  Synthetic
cuguuacaguagucuuauau

SEQ ID NO: 62835 - RNA, 21 nt, Artificial Sequence
  Synthetic
acuguuacaguagucuuauau

SEQ ID NO: 62836 - RNA, 24 nt, Artificial Sequence
  Synthetic
uggacuguuacaguagucuuauau

SEQ ID NO: 62837 - RNA, 18 nt, Artificial Sequence
  Synthetic
uuacuugauuucuuauau

SEQ ID NO: 62838 - RNA, 19 nt, Artificial Sequence
  Synthetic
cuuacuugauuucuuauau

SEQ ID NO: 62839 - RNA, 20 nt, Artificial Sequence
  Synthetic
ccuuacuugauuucuuauau

SEQ ID NO: 62840 - RNA, 21 nt, Artificial Sequence
  Synthetic
accuuacuugauuucuuauau

SEQ ID NO: 62841 - RNA, 22 nt, Artificial Sequence
  Synthetic
aaccuuacuugauuucuuauau

SEQ ID NO: 62842 - RNA, 23 nt, Artificial Sequence
  Synthetic
caaccuuacuugauuucuuauau

SEQ ID NO: 62843 - RNA, 24 nt, Artificial Sequence
  Synthetic
ucaaccuuacuugauuucuuauau

SEQ ID NO: 62844 - RNA, 18 nt, Artificial Sequence
  Synthetic
ucuuuguauauguuauau

SEQ ID NO: 62845 - RNA, 19 nt, Artificial Sequence
  Synthetic
cucuuuguauauguuauau

SEQ ID NO: 62846 - RNA, 21 nt, Artificial Sequence
  Synthetic
ugcucuuuguauauguuauau

SEQ ID NO: 62847 - RNA, 22 nt, Artificial Sequence
  Synthetic
uugcucuuuguauauguuauau

SEQ ID NO: 62848 - RNA, 23 nt, Artificial Sequence
  Synthetic
auugcucuuuguauauguuauau

SEQ ID NO: 62849 - RNA, 24 nt, Artificial Sequence
  Synthetic
cauugcucuuuguauauguuauau

SEQ ID NO: 62850 - RNA, 18 nt, Artificial Sequence
  Synthetic
caccuauaugauuuauau

SEQ ID NO: 62851 - RNA, 19 nt, Artificial Sequence
  Synthetic
ccaccuauaugauuuauau

SEQ ID NO: 62852 - RNA, 20 nt, Artificial Sequence
  Synthetic
uccaccuauaugauuuauau

SEQ ID NO: 62853 - RNA, 21 nt, Artificial Sequence
  Synthetic
auccaccuauaugauuuauau

SEQ ID NO: 62854 - RNA, 22 nt, Artificial Sequence
  Synthetic
uauccaccuauaugauuuauau

SEQ ID NO: 62855 - RNA, 23 nt, Artificial Sequence
  Synthetic
uuauccaccuauaugauuuauau

SEQ ID NO: 62856 - RNA, 24 nt, Artificial Sequence
  Synthetic
uuuauccaccuauaugauuuauau

SEQ ID NO: 62857 - RNA, 22 nt, Artificial Sequence
  Synthetic
agacuggccuauuuauuuauau

SEQ ID NO: 62858 - RNA, 23 nt, Artificial Sequence
  Synthetic
aagacuggccuauuuauuuauau

SEQ ID NO: 62859 - RNA, 24 nt, Artificial Sequence
  Synthetic
uaagacuggccuauuuauuuauau

SEQ ID NO: 62860 - RNA, 18 nt, Artificial Sequence
  Synthetic
acgguuacuccuuuauau

SEQ ID NO: 62861 - RNA, 19 nt, Artificial Sequence
  Synthetic
aacgguuacuccuuuauau

SEQ ID NO: 62862 - RNA, 20 nt, Artificial Sequence
  Synthetic
aaacgguuacuccuuuauau

SEQ ID NO: 62863 - RNA, 21 nt, Artificial Sequence
  Synthetic
caaacgguuacuccuuuauau

SEQ ID NO: 62864 - RNA, 22 nt, Artificial Sequence
  Synthetic
ucaaacgguuacuccuuuauau

SEQ ID NO: 62865 - RNA, 23 nt, Artificial Sequence
  Synthetic
aucaaacgguuacuccuuuauau

SEQ ID NO: 62866 - RNA, 24 nt, Artificial Sequence
  Synthetic
caucaaacgguuacuccuuuauau

SEQ ID NO: 62867 - RNA, 18 nt, Artificial Sequence
  Synthetic
aauagaacaauuuuauau

SEQ ID NO: 62868 - RNA, 20 nt, Artificial Sequence
  Synthetic
agaauagaacaauuuuauau

SEQ ID NO: 62869 - RNA, 21 nt, Artificial Sequence
  Synthetic
cagaauagaacaauuuuauau

SEQ ID NO: 62870 - RNA, 22 nt, Artificial Sequence
  Synthetic
acagaauagaacaauuuuauau

SEQ ID NO: 62871 - RNA, 18 nt, Artificial Sequence
  Synthetic
uauuuuaggagaaacuau

SEQ ID NO: 62872 - RNA, 19 nt, Artificial Sequence
  Synthetic
cuauuuuaggagaaacuau

SEQ ID NO: 62873 - RNA, 21 nt, Artificial Sequence
  Synthetic
agcuauuuuaggagaaacuau

SEQ ID NO: 62874 - RNA, 22 nt, Artificial Sequence
  Synthetic
aagcuauuuuaggagaaacuau

SEQ ID NO: 62875 - RNA, 23 nt, Artificial Sequence
  Synthetic
caagcuauuuuaggagaaacuau

SEQ ID NO: 62876 - RNA, 24 nt, Artificial Sequence
  Synthetic
acaagcuauuuuaggagaaacuau

SEQ ID NO: 62877 - RNA, 19 nt, Artificial Sequence
  Synthetic
ugcaaaugcaggaaacuau

SEQ ID NO: 62878 - RNA, 20 nt, Artificial Sequence
  Synthetic
cugcaaaugcaggaaacuau

SEQ ID NO: 62879 - RNA, 21 nt, Artificial Sequence
  Synthetic
ucugcaaaugcaggaaacuau

SEQ ID NO: 62880 - RNA, 22 nt, Artificial Sequence
  Synthetic
cucugcaaaugcaggaaacuau

SEQ ID NO: 62881 - RNA, 23 nt, Artificial Sequence
  Synthetic
acucugcaaaugcaggaaacuau

SEQ ID NO: 62882 - RNA, 24 nt, Artificial Sequence
  Synthetic
aacucugcaaaugcaggaaacuau

SEQ ID NO: 62883 - RNA, 18 nt, Artificial Sequence
  Synthetic
aaaugaaucucuaacuau

SEQ ID NO: 62884 - RNA, 20 nt, Artificial Sequence
  Synthetic
agaaaugaaucucuaacuau

SEQ ID NO: 62885 - RNA, 21 nt, Artificial Sequence
  Synthetic
aagaaaugaaucucuaacuau

SEQ ID NO: 62886 - RNA, 22 nt, Artificial Sequence
  Synthetic
aaagaaaugaaucucuaacuau

SEQ ID NO: 62887 - RNA, 23 nt, Artificial Sequence
  Synthetic
uaaagaaaugaaucucuaacuau

SEQ ID NO: 62888 - RNA, 19 nt, Artificial Sequence
  Synthetic
ugaaguuaaucugcacuau

SEQ ID NO: 62889 - RNA, 21 nt, Artificial Sequence
  Synthetic
ugugaaguuaaucugcacuau

SEQ ID NO: 62890 - RNA, 22 nt, Artificial Sequence
  Synthetic
cugugaaguuaaucugcacuau

SEQ ID NO: 62891 - RNA, 23 nt, Artificial Sequence
  Synthetic
acugugaaguuaaucugcacuau

SEQ ID NO: 62892 - RNA, 24 nt, Artificial Sequence
  Synthetic
aacugugaaguuaaucugcacuau

SEQ ID NO: 62893 - RNA, 18 nt, Artificial Sequence
  Synthetic
ucaguuauucaucacuau

SEQ ID NO: 62894 - RNA, 19 nt, Artificial Sequence
  Synthetic
uucaguuauucaucacuau

SEQ ID NO: 62895 - RNA, 20 nt, Artificial Sequence
  Synthetic
cuucaguuauucaucacuau

SEQ ID NO: 62896 - RNA, 23 nt, Artificial Sequence
  Synthetic
uggcuucaguuauucaucacuau

SEQ ID NO: 62897 - RNA, 24 nt, Artificial Sequence
  Synthetic
auggcuucaguuauucaucacuau

SEQ ID NO: 62898 - RNA, 21 nt, Artificial Sequence
  Synthetic
auauauuuuuugaaagacuau

SEQ ID NO: 62899 - RNA, 22 nt, Artificial Sequence
  Synthetic
uauauauuuuuugaaagacuau

SEQ ID NO: 62900 - RNA, 23 nt, Artificial Sequence
  Synthetic
uuauauauuuuuugaaagacuau

SEQ ID NO: 62901 - RNA, 24 nt, Artificial Sequence
  Synthetic
auuauauauuuuuugaaagacuau

SEQ ID NO: 62902 - RNA, 18 nt, Artificial Sequence
  Synthetic
ucuuaguuaauagacuau

SEQ ID NO: 62903 - RNA, 19 nt, Artificial Sequence
  Synthetic
uucuuaguuaauagacuau

SEQ ID NO: 62904 - RNA, 20 nt, Artificial Sequence
  Synthetic
uuucuuaguuaauagacuau

SEQ ID NO: 62905 - RNA, 21 nt, Artificial Sequence
  Synthetic
cuuucuuaguuaauagacuau

SEQ ID NO: 62906 - RNA, 23 nt, Artificial Sequence
  Synthetic
ugcuuucuuaguuaauagacuau

SEQ ID NO: 62907 - RNA, 18 nt, Artificial Sequence
  Synthetic
ugccuguugggggacuau

SEQ ID NO: 62908 - RNA, 19 nt, Artificial Sequence
  Synthetic
augccuguugggggacuau

SEQ ID NO: 62909 - RNA, 21 nt, Artificial Sequence
  Synthetic
agaugccuguugggggacuau

SEQ ID NO: 62910 - RNA, 22 nt, Artificial Sequence
  Synthetic
aagaugccuguugggggacuau

SEQ ID NO: 62911 - RNA, 23 nt, Artificial Sequence
  Synthetic
aaagaugccuguugggggacuau

SEQ ID NO: 62912 - RNA, 18 nt, Artificial Sequence
  Synthetic
uuacugaagacugacuau

SEQ ID NO: 62913 - RNA, 19 nt, Artificial Sequence
  Synthetic
auuacugaagacugacuau

SEQ ID NO: 62914 - RNA, 20 nt, Artificial Sequence
  Synthetic
aauuacugaagacugacuau

SEQ ID NO: 62915 - RNA, 21 nt, Artificial Sequence
  Synthetic
aaauuacugaagacugacuau

SEQ ID NO: 62916 - RNA, 23 nt, Artificial Sequence
  Synthetic
agaaauuacugaagacugacuau

SEQ ID NO: 62917 - RNA, 24 nt, Artificial Sequence
  Synthetic
cagaaauuacugaagacugacuau

SEQ ID NO: 62918 - RNA, 18 nt, Artificial Sequence
  Synthetic
accucauagagugacuau

SEQ ID NO: 62919 - RNA, 20 nt, Artificial Sequence
  Synthetic
ugaccucauagagugacuau

SEQ ID NO: 62920 - RNA, 21 nt, Artificial Sequence
  Synthetic
uugaccucauagagugacuau

SEQ ID NO: 62921 - RNA, 22 nt, Artificial Sequence
  Synthetic
auugaccucauagagugacuau

SEQ ID NO: 62922 - RNA, 23 nt, Artificial Sequence
  Synthetic
uauugaccucauagagugacuau

SEQ ID NO: 62923 - RNA, 24 nt, Artificial Sequence
  Synthetic
uuauugaccucauagagugacuau

SEQ ID NO: 62924 - RNA, 18 nt, Artificial Sequence
  Synthetic
uaaaugguaaauuacuau

SEQ ID NO: 62925 - RNA, 20 nt, Artificial Sequence
  Synthetic
uguaaaugguaaauuacuau

SEQ ID NO: 62926 - RNA, 21 nt, Artificial Sequence
  Synthetic
auguaaaugguaaauuacuau

SEQ ID NO: 62927 - RNA, 22 nt, Artificial Sequence
  Synthetic
uauguaaaugguaaauuacuau

SEQ ID NO: 62928 - RNA, 23 nt, Artificial Sequence
  Synthetic
auauguaaaugguaaauuacuau

SEQ ID NO: 62929 - RNA, 24 nt, Artificial Sequence
  Synthetic
uauauguaaaugguaaauuacuau

SEQ ID NO: 62930 - RNA, 18 nt, Artificial Sequence
  Synthetic
accauguccaauuacuau

SEQ ID NO: 62931 - RNA, 19 nt, Artificial Sequence
  Synthetic
aaccauguccaauuacuau

SEQ ID NO: 62932 - RNA, 21 nt, Artificial Sequence
  Synthetic
agaaccauguccaauuacuau

SEQ ID NO: 62933 - RNA, 22 nt, Artificial Sequence
  Synthetic
aagaaccauguccaauuacuau

SEQ ID NO: 62934 - RNA, 23 nt, Artificial Sequence
  Synthetic
aaagaaccauguccaauuacuau

SEQ ID NO: 62935 - RNA, 24 nt, Artificial Sequence
  Synthetic
uaaagaaccauguccaauuacuau

SEQ ID NO: 62936 - RNA, 21 nt, Artificial Sequence
  Synthetic
aauuuuuuuuccuuuuacuau

SEQ ID NO: 62937 - RNA, 22 nt, Artificial Sequence
  Synthetic
caauuuuuuuuccuuuuacuau

SEQ ID NO: 62938 - RNA, 23 nt, Artificial Sequence
  Synthetic
ucaauuuuuuuuccuuuuacuau

SEQ ID NO: 62939 - RNA, 24 nt, Artificial Sequence
  Synthetic
cucaauuuuuuuuccuuuuacuau

SEQ ID NO: 62940 - RNA, 18 nt, Artificial Sequence
  Synthetic
ccuuuuagggcaaccuau

SEQ ID NO: 62941 - RNA, 19 nt, Artificial Sequence
  Synthetic
uccuuuuagggcaaccuau

SEQ ID NO: 62942 - RNA, 20 nt, Artificial Sequence
  Synthetic
uuccuuuuagggcaaccuau

SEQ ID NO: 62943 - RNA, 21 nt, Artificial Sequence
  Synthetic
cuuccuuuuagggcaaccuau

SEQ ID NO: 62944 - RNA, 22 nt, Artificial Sequence
  Synthetic
ccuuccuuuuagggcaaccuau

SEQ ID NO: 62945 - RNA, 23 nt, Artificial Sequence
  Synthetic
accuuccuuuuagggcaaccuau

SEQ ID NO: 62946 - RNA, 24 nt, Artificial Sequence
  Synthetic
uaccuuccuuuuagggcaaccuau

SEQ ID NO: 62947 - RNA, 18 nt, Artificial Sequence
  Synthetic
acuauuaguauaaccuau

SEQ ID NO: 62948 - RNA, 19 nt, Artificial Sequence
  Synthetic
cacuauuaguauaaccuau

SEQ ID NO: 62949 - RNA, 20 nt, Artificial Sequence
  Synthetic
ucacuauuaguauaaccuau

SEQ ID NO: 62950 - RNA, 21 nt, Artificial Sequence
  Synthetic
aucacuauuaguauaaccuau

SEQ ID NO: 62951 - RNA, 22 nt, Artificial Sequence
  Synthetic
caucacuauuaguauaaccuau

SEQ ID NO: 62952 - RNA, 24 nt, Artificial Sequence
  Synthetic
ugcaucacuauuaguauaaccuau

SEQ ID NO: 62953 - RNA, 18 nt, Artificial Sequence
  Synthetic
uucuuucuacucaccuau

SEQ ID NO: 62954 - RNA, 19 nt, Artificial Sequence
  Synthetic
uuucuuucuacucaccuau

SEQ ID NO: 62955 - RNA, 21 nt, Artificial Sequence
  Synthetic
cguuucuuucuacucaccuau

SEQ ID NO: 62956 - RNA, 22 nt, Artificial Sequence
  Synthetic
ccguuucuuucuacucaccuau

SEQ ID NO: 62957 - RNA, 23 nt, Artificial Sequence
  Synthetic
uccguuucuuucuacucaccuau

SEQ ID NO: 62958 - RNA, 24 nt, Artificial Sequence
  Synthetic
uuccguuucuuucuacucaccuau

SEQ ID NO: 62959 - RNA, 18 nt, Artificial Sequence
  Synthetic
uucucuggcagagccuau

SEQ ID NO: 62960 - RNA, 19 nt, Artificial Sequence
  Synthetic
auucucuggcagagccuau

SEQ ID NO: 62961 - RNA, 21 nt, Artificial Sequence
  Synthetic
ugauucucuggcagagccuau

SEQ ID NO: 62962 - RNA, 22 nt, Artificial Sequence
  Synthetic
uugauucucuggcagagccuau

SEQ ID NO: 62963 - RNA, 23 nt, Artificial Sequence
  Synthetic
auugauucucuggcagagccuau

SEQ ID NO: 62964 - RNA, 18 nt, Artificial Sequence
  Synthetic
uuuguguauguggccuau

SEQ ID NO: 62965 - RNA, 19 nt, Artificial Sequence
  Synthetic
cuuuguguauguggccuau

SEQ ID NO: 62966 - RNA, 20 nt, Artificial Sequence
  Synthetic
acuuuguguauguggccuau

SEQ ID NO: 62967 - RNA, 21 nt, Artificial Sequence
  Synthetic
aacuuuguguauguggccuau

SEQ ID NO: 62968 - RNA, 23 nt, Artificial Sequence
  Synthetic
ugaacuuuguguauguggccuau

SEQ ID NO: 62969 - RNA, 24 nt, Artificial Sequence
  Synthetic
uugaacuuuguguauguggccuau

SEQ ID NO: 62970 - RNA, 20 nt, Artificial Sequence
  Synthetic
aggaaauucugaccuccuau

SEQ ID NO: 62971 - RNA, 21 nt, Artificial Sequence
  Synthetic
caggaaauucugaccuccuau

SEQ ID NO: 62972 - RNA, 22 nt, Artificial Sequence
  Synthetic
ccaggaaauucugaccuccuau

SEQ ID NO: 62973 - RNA, 23 nt, Artificial Sequence
  Synthetic
cccaggaaauucugaccuccuau

SEQ ID NO: 62974 - RNA, 24 nt, Artificial Sequence
  Synthetic
ucccaggaaauucugaccuccuau

SEQ ID NO: 62975 - RNA, 18 nt, Artificial Sequence
  Synthetic
aguaacuaaggcagcuau

SEQ ID NO: 62976 - RNA, 19 nt, Artificial Sequence
  Synthetic
uaguaacuaaggcagcuau

SEQ ID NO: 62977 - RNA, 21 nt, Artificial Sequence
  Synthetic
uguaguaacuaaggcagcuau

SEQ ID NO: 62978 - RNA, 22 nt, Artificial Sequence
  Synthetic
auguaguaacuaaggcagcuau

SEQ ID NO: 62979 - RNA, 23 nt, Artificial Sequence
  Synthetic
uauguaguaacuaaggcagcuau

SEQ ID NO: 62980 - RNA, 18 nt, Artificial Sequence
  Synthetic
uagugcccugcuagcuau

SEQ ID NO: 62981 - RNA, 19 nt, Artificial Sequence
  Synthetic
auagugcccugcuagcuau

SEQ ID NO: 62982 - RNA, 21 nt, Artificial Sequence
  Synthetic
ugauagugcccugcuagcuau

SEQ ID NO: 62983 - RNA, 22 nt, Artificial Sequence
  Synthetic
augauagugcccugcuagcuau

SEQ ID NO: 62984 - RNA, 23 nt, Artificial Sequence
  Synthetic
aaugauagugcccugcuagcuau

SEQ ID NO: 62985 - RNA, 24 nt, Artificial Sequence
  Synthetic
caaugauagugcccugcuagcuau

SEQ ID NO: 62986 - RNA, 21 nt, Artificial Sequence
  Synthetic
acaguauacauggugggcuau

SEQ ID NO: 62987 - RNA, 22 nt, Artificial Sequence
  Synthetic
uacaguauacauggugggcuau

SEQ ID NO: 62988 - RNA, 24 nt, Artificial Sequence
  Synthetic
aguacaguauacauggugggcuau

SEQ ID NO: 62989 - RNA, 18 nt, Artificial Sequence
  Synthetic
ccacaaaucuauugcuau

SEQ ID NO: 62990 - RNA, 19 nt, Artificial Sequence
  Synthetic
cccacaaaucuauugcuau

SEQ ID NO: 62991 - RNA, 21 nt, Artificial Sequence
  Synthetic
ugcccacaaaucuauugcuau

SEQ ID NO: 62992 - RNA, 23 nt, Artificial Sequence
  Synthetic
agugcccacaaaucuauugcuau

SEQ ID NO: 62993 - RNA, 24 nt, Artificial Sequence
  Synthetic
cagugcccacaaaucuauugcuau

SEQ ID NO: 62994 - RNA, 19 nt, Artificial Sequence
  Synthetic
ugaugaugagguuugcuau

SEQ ID NO: 62995 - RNA, 20 nt, Artificial Sequence
  Synthetic
augaugaugagguuugcuau

SEQ ID NO: 62996 - RNA, 21 nt, Artificial Sequence
  Synthetic
caugaugaugagguuugcuau

SEQ ID NO: 62997 - RNA, 23 nt, Artificial Sequence
  Synthetic
ugcaugaugaugagguuugcuau

SEQ ID NO: 62998 - RNA, 21 nt, Artificial Sequence
  Synthetic
uauauauuccuacacaucuau

SEQ ID NO: 62999 - RNA, 22 nt, Artificial Sequence
  Synthetic
uuauauauuccuacacaucuau

SEQ ID NO: 63000 - RNA, 23 nt, Artificial Sequence
  Synthetic
auuauauauuccuacacaucuau

SEQ ID NO: 63001 - RNA, 24 nt, Artificial Sequence
  Synthetic
uauuauauauuccuacacaucuau

SEQ ID NO: 63002 - RNA, 18 nt, Artificial Sequence
  Synthetic
aaaauugguucacucuau

SEQ ID NO: 63003 - RNA, 19 nt, Artificial Sequence
  Synthetic
aaaaauugguucacucuau

SEQ ID NO: 63004 - RNA, 20 nt, Artificial Sequence
  Synthetic
aaaaaauugguucacucuau

SEQ ID NO: 63005 - RNA, 22 nt, Artificial Sequence
  Synthetic
agaaaaaauugguucacucuau

SEQ ID NO: 63006 - RNA, 23 nt, Artificial Sequence
  Synthetic
uagaaaaaauugguucacucuau

SEQ ID NO: 63007 - RNA, 18 nt, Artificial Sequence
  Synthetic
cccauguucauacucuau

SEQ ID NO: 63008 - RNA, 19 nt, Artificial Sequence
  Synthetic
ucccauguucauacucuau

SEQ ID NO: 63009 - RNA, 20 nt, Artificial Sequence
  Synthetic
uucccauguucauacucuau

SEQ ID NO: 63010 - RNA, 21 nt, Artificial Sequence
  Synthetic
cuucccauguucauacucuau

SEQ ID NO: 63011 - RNA, 22 nt, Artificial Sequence
  Synthetic
ucuucccauguucauacucuau

SEQ ID NO: 63012 - RNA, 23 nt, Artificial Sequence
  Synthetic
uucuucccauguucauacucuau

SEQ ID NO: 63013 - RNA, 24 nt, Artificial Sequence
  Synthetic
uuucuucccauguucauacucuau

SEQ ID NO: 63014 - RNA, 21 nt, Artificial Sequence
  Synthetic
agguuaacucauuuucucuau

SEQ ID NO: 63015 - RNA, 22 nt, Artificial Sequence
  Synthetic
aagguuaacucauuuucucuau

SEQ ID NO: 63016 - RNA, 24 nt, Artificial Sequence
  Synthetic
agaagguuaacucauuuucucuau

SEQ ID NO: 63017 - RNA, 18 nt, Artificial Sequence
  Synthetic
cuuccauugacauucuau

SEQ ID NO: 63018 - RNA, 19 nt, Artificial Sequence
  Synthetic
acuuccauugacauucuau

SEQ ID NO: 63019 - RNA, 20 nt, Artificial Sequence
  Synthetic
uacuuccauugacauucuau

SEQ ID NO: 63020 - RNA, 22 nt, Artificial Sequence
  Synthetic
uguacuuccauugacauucuau

SEQ ID NO: 63021 - RNA, 23 nt, Artificial Sequence
  Synthetic
uuguacuuccauugacauucuau

SEQ ID NO: 63022 - RNA, 24 nt, Artificial Sequence
  Synthetic
auuguacuuccauugacauucuau

SEQ ID NO: 63023 - RNA, 18 nt, Artificial Sequence
  Synthetic
agaguugagauauucuau

SEQ ID NO: 63024 - RNA, 19 nt, Artificial Sequence
  Synthetic
aagaguugagauauucuau

SEQ ID NO: 63025 - RNA, 20 nt, Artificial Sequence
  Synthetic
aaagaguugagauauucuau

SEQ ID NO: 63026 - RNA, 22 nt, Artificial Sequence
  Synthetic
agaaagaguugagauauucuau

SEQ ID NO: 63027 - RNA, 23 nt, Artificial Sequence
  Synthetic
uagaaagaguugagauauucuau

SEQ ID NO: 63028 - RNA, 24 nt, Artificial Sequence
  Synthetic
auagaaagaguugagauauucuau

SEQ ID NO: 63029 - RNA, 18 nt, Artificial Sequence
  Synthetic
cuuguaguuuucuucuau

SEQ ID NO: 63030 - RNA, 19 nt, Artificial Sequence
  Synthetic
ucuuguaguuuucuucuau

SEQ ID NO: 63031 - RNA, 20 nt, Artificial Sequence
  Synthetic
uucuuguaguuuucuucuau

SEQ ID NO: 63032 - RNA, 23 nt, Artificial Sequence
  Synthetic
ugguucuuguaguuuucuucuau

SEQ ID NO: 63033 - RNA, 24 nt, Artificial Sequence
  Synthetic
uugguucuuguaguuuucuucuau

SEQ ID NO: 63034 - RNA, 18 nt, Artificial Sequence
  Synthetic
ugaauuucagaguucuau

SEQ ID NO: 63035 - RNA, 19 nt, Artificial Sequence
  Synthetic
augaauuucagaguucuau

SEQ ID NO: 63036 - RNA, 20 nt, Artificial Sequence
  Synthetic
aaugaauuucagaguucuau

SEQ ID NO: 63037 - RNA, 21 nt, Artificial Sequence
  Synthetic
uaaugaauuucagaguucuau

SEQ ID NO: 63038 - RNA, 22 nt, Artificial Sequence
  Synthetic
uuaaugaauuucagaguucuau

SEQ ID NO: 63039 - RNA, 23 nt, Artificial Sequence
  Synthetic
cuuaaugaauuucagaguucuau

SEQ ID NO: 63040 - RNA, 24 nt, Artificial Sequence
  Synthetic
ucuuaaugaauuucagaguucuau

SEQ ID NO: 63041 - RNA, 18 nt, Artificial Sequence
  Synthetic
uaaugccuguguuucuau

SEQ ID NO: 63042 - RNA, 19 nt, Artificial Sequence
  Synthetic
uuaaugccuguguuucuau

SEQ ID NO: 63043 - RNA, 21 nt, Artificial Sequence
  Synthetic
aguuaaugccuguguuucuau

SEQ ID NO: 63044 - RNA, 22 nt, Artificial Sequence
  Synthetic
uaguuaaugccuguguuucuau

SEQ ID NO: 63045 - RNA, 24 nt, Artificial Sequence
  Synthetic
aguaguuaaugccuguguuucuau

SEQ ID NO: 63046 - RNA, 19 nt, Artificial Sequence
  Synthetic
ugugagucaauuuuucuau

SEQ ID NO: 63047 - RNA, 20 nt, Artificial Sequence
  Synthetic
augugagucaauuuuucuau

SEQ ID NO: 63048 - RNA, 21 nt, Artificial Sequence
  Synthetic
caugugagucaauuuuucuau

SEQ ID NO: 63049 - RNA, 23 nt, Artificial Sequence
  Synthetic
ugcaugugagucaauuuuucuau

SEQ ID NO: 63050 - RNA, 24 nt, Artificial Sequence
  Synthetic
augcaugugagucaauuuuucuau

SEQ ID NO: 63051 - RNA, 20 nt, Artificial Sequence
  Synthetic
uggccagguuugccaaguau

SEQ ID NO: 63052 - RNA, 22 nt, Artificial Sequence
  Synthetic
aguggccagguuugccaaguau

SEQ ID NO: 63053 - RNA, 24 nt, Artificial Sequence
  Synthetic
agaguggccagguuugccaaguau

SEQ ID NO: 63054 - RNA, 19 nt, Artificial Sequence
  Synthetic
ugcuugcauaaagaaguau

SEQ ID NO: 63055 - RNA, 20 nt, Artificial Sequence
  Synthetic
cugcuugcauaaagaaguau

SEQ ID NO: 63056 - RNA, 21 nt, Artificial Sequence
  Synthetic
ccugcuugcauaaagaaguau

SEQ ID NO: 63057 - RNA, 18 nt, Artificial Sequence
  Synthetic
aacugagaucagaaguau

SEQ ID NO: 63058 - RNA, 19 nt, Artificial Sequence
  Synthetic
uaacugagaucagaaguau

SEQ ID NO: 63059 - RNA, 20 nt, Artificial Sequence
  Synthetic
cuaacugagaucagaaguau

SEQ ID NO: 63060 - RNA, 21 nt, Artificial Sequence
  Synthetic
ucuaacugagaucagaaguau

SEQ ID NO: 63061 - RNA, 22 nt, Artificial Sequence
  Synthetic
aucuaacugagaucagaaguau

SEQ ID NO: 63062 - RNA, 23 nt, Artificial Sequence
  Synthetic
caucuaacugagaucagaaguau

SEQ ID NO: 63063 - RNA, 24 nt, Artificial Sequence
  Synthetic
acaucuaacugagaucagaaguau

SEQ ID NO: 63064 - RNA, 18 nt, Artificial Sequence
  Synthetic
uauagcucuuagaaguau

SEQ ID NO: 63065 - RNA, 19 nt, Artificial Sequence
  Synthetic
cuauagcucuuagaaguau

SEQ ID NO: 63066 - RNA, 21 nt, Artificial Sequence
  Synthetic
agcuauagcucuuagaaguau

SEQ ID NO: 63067 - RNA, 22 nt, Artificial Sequence
  Synthetic
aagcuauagcucuuagaaguau

SEQ ID NO: 63068 - RNA, 23 nt, Artificial Sequence
  Synthetic
uaagcuauagcucuuagaaguau

SEQ ID NO: 63069 - RNA, 24 nt, Artificial Sequence
  Synthetic
auaagcuauagcucuuagaaguau

SEQ ID NO: 63070 - RNA, 18 nt, Artificial Sequence
  Synthetic
caaaacuggccgaaguau

SEQ ID NO: 63071 - RNA, 19 nt, Artificial Sequence
  Synthetic
acaaaacuggccgaaguau

SEQ ID NO: 63072 - RNA, 20 nt, Artificial Sequence
  Synthetic
uacaaaacuggccgaaguau

SEQ ID NO: 63073 - RNA, 22 nt, Artificial Sequence
  Synthetic
aguacaaaacuggccgaaguau

SEQ ID NO: 63074 - RNA, 23 nt, Artificial Sequence
  Synthetic
caguacaaaacuggccgaaguau

SEQ ID NO: 63075 - RNA, 24 nt, Artificial Sequence
  Synthetic
ccaguacaaaacuggccgaaguau

SEQ ID NO: 63076 - RNA, 18 nt, Artificial Sequence
  Synthetic
ucuuuaauaucuaaguau

SEQ ID NO: 63077 - RNA, 19 nt, Artificial Sequence
  Synthetic
cucuuuaauaucuaaguau

SEQ ID NO: 63078 - RNA, 20 nt, Artificial Sequence
  Synthetic
ucucuuuaauaucuaaguau

SEQ ID NO: 63079 - RNA, 21 nt, Artificial Sequence
  Synthetic
aucucuuuaauaucuaaguau

SEQ ID NO: 63080 - RNA, 22 nt, Artificial Sequence
  Synthetic
uaucucuuuaauaucuaaguau

SEQ ID NO: 63081 - RNA, 23 nt, Artificial Sequence
  Synthetic
auaucucuuuaauaucuaaguau

SEQ ID NO: 63082 - RNA, 24 nt, Artificial Sequence
  Synthetic
uauaucucuuuaauaucuaaguau

SEQ ID NO: 63083 - RNA, 18 nt, Artificial Sequence
  Synthetic
uucaucccucuccaguau

SEQ ID NO: 63084 - RNA, 19 nt, Artificial Sequence
  Synthetic
auucaucccucuccaguau

SEQ ID NO: 63085 - RNA, 20 nt, Artificial Sequence
  Synthetic
uauucaucccucuccaguau

SEQ ID NO: 63086 - RNA, 21 nt, Artificial Sequence
  Synthetic
cuauucaucccucuccaguau

SEQ ID NO: 63087 - RNA, 22 nt, Artificial Sequence
  Synthetic
ccuauucaucccucuccaguau

SEQ ID NO: 63088 - RNA, 24 nt, Artificial Sequence
  Synthetic
ugccuauucaucccucuccaguau

SEQ ID NO: 63089 - RNA, 18 nt, Artificial Sequence
  Synthetic
uggaaaaugggagaguau

SEQ ID NO: 63090 - RNA, 19 nt, Artificial Sequence
  Synthetic
auggaaaaugggagaguau

SEQ ID NO: 63091 - RNA, 20 nt, Artificial Sequence
  Synthetic
cauggaaaaugggagaguau

SEQ ID NO: 63092 - RNA, 22 nt, Artificial Sequence
  Synthetic
agcauggaaaaugggagaguau

SEQ ID NO: 63093 - RNA, 23 nt, Artificial Sequence
  Synthetic
aagcauggaaaaugggagaguau

SEQ ID NO: 63094 - RNA, 24 nt, Artificial Sequence
  Synthetic
aaagcauggaaaaugggagaguau

SEQ ID NO: 63095 - RNA, 18 nt, Artificial Sequence
  Synthetic
acuguaucuuuagaguau

SEQ ID NO: 63096 - RNA, 19 nt, Artificial Sequence
  Synthetic
aacuguaucuuuagaguau

SEQ ID NO: 63097 - RNA, 20 nt, Artificial Sequence
  Synthetic
aaacuguaucuuuagaguau

SEQ ID NO: 63098 - RNA, 21 nt, Artificial Sequence
  Synthetic
aaaacuguaucuuuagaguau

SEQ ID NO: 63099 - RNA, 22 nt, Artificial Sequence
  Synthetic
uaaaacuguaucuuuagaguau

SEQ ID NO: 63100 - RNA, 23 nt, Artificial Sequence
  Synthetic
uuaaaacuguaucuuuagaguau

SEQ ID NO: 63101 - RNA, 24 nt, Artificial Sequence
  Synthetic
cuuaaaacuguaucuuuagaguau

SEQ ID NO: 63102 - RNA, 18 nt, Artificial Sequence
  Synthetic
agucuucaucaugaguau

SEQ ID NO: 63103 - RNA, 19 nt, Artificial Sequence
  Synthetic
cagucuucaucaugaguau

SEQ ID NO: 63104 - RNA, 20 nt, Artificial Sequence
  Synthetic
acagucuucaucaugaguau

SEQ ID NO: 63105 - RNA, 21 nt, Artificial Sequence
  Synthetic
aacagucuucaucaugaguau

SEQ ID NO: 63106 - RNA, 22 nt, Artificial Sequence
  Synthetic
uaacagucuucaucaugaguau

SEQ ID NO: 63107 - RNA, 24 nt, Artificial Sequence
  Synthetic
uguaacagucuucaucaugaguau

SEQ ID NO: 63108 - RNA, 19 nt, Artificial Sequence
  Synthetic
ugucuuacucauauaguau

SEQ ID NO: 63109 - RNA, 20 nt, Artificial Sequence
  Synthetic
augucuuacucauauaguau

SEQ ID NO: 63110 - RNA, 21 nt, Artificial Sequence
  Synthetic
aaugucuuacucauauaguau

SEQ ID NO: 63111 - RNA, 22 nt, Artificial Sequence
  Synthetic
aaaugucuuacucauauaguau

SEQ ID NO: 63112 - RNA, 23 nt, Artificial Sequence
  Synthetic
uaaaugucuuacucauauaguau

SEQ ID NO: 63113 - RNA, 24 nt, Artificial Sequence
  Synthetic
uuaaaugucuuacucauauaguau

SEQ ID NO: 63114 - RNA, 18 nt, Artificial Sequence
  Synthetic
cugauuuaauuguaguau

SEQ ID NO: 63115 - RNA, 19 nt, Artificial Sequence
  Synthetic
ucugauuuaauuguaguau

SEQ ID NO: 63116 - RNA, 20 nt, Artificial Sequence
  Synthetic
cucugauuuaauuguaguau

SEQ ID NO: 63117 - RNA, 21 nt, Artificial Sequence
  Synthetic
acucugauuuaauuguaguau

SEQ ID NO: 63118 - RNA, 22 nt, Artificial Sequence
  Synthetic
cacucugauuuaauuguaguau

SEQ ID NO: 63119 - RNA, 24 nt, Artificial Sequence
  Synthetic
ugcacucugauuuaauuguaguau

SEQ ID NO: 63120 - RNA, 18 nt, Artificial Sequence
  Synthetic
agaaauuugaauuaguau

SEQ ID NO: 63121 - RNA, 19 nt, Artificial Sequence
  Synthetic
uagaaauuugaauuaguau

SEQ ID NO: 63122 - RNA, 20 nt, Artificial Sequence
  Synthetic
uuagaaauuugaauuaguau

SEQ ID NO: 63123 - RNA, 22 nt, Artificial Sequence
  Synthetic
aguuagaaauuugaauuaguau

SEQ ID NO: 63124 - RNA, 24 nt, Artificial Sequence
  Synthetic
cgaguuagaaauuugaauuaguau

SEQ ID NO: 63125 - RNA, 18 nt, Artificial Sequence
  Synthetic
cuuucauuuuauuaguau

SEQ ID NO: 63126 - RNA, 19 nt, Artificial Sequence
  Synthetic
acuuucauuuuauuaguau

SEQ ID NO: 63127 - RNA, 20 nt, Artificial Sequence
  Synthetic
uacuuucauuuuauuaguau

SEQ ID NO: 63128 - RNA, 21 nt, Artificial Sequence
  Synthetic
uuacuuucauuuuauuaguau

SEQ ID NO: 63129 - RNA, 22 nt, Artificial Sequence
  Synthetic
cuuacuuucauuuuauuaguau

SEQ ID NO: 63130 - RNA, 23 nt, Artificial Sequence
  Synthetic
ccuuacuuucauuuuauuaguau

SEQ ID NO: 63131 - RNA, 24 nt, Artificial Sequence
  Synthetic
uccuuacuuucauuuuauuaguau

SEQ ID NO: 63132 - RNA, 19 nt, Artificial Sequence
  Synthetic
ugcuuguguuacuuaguau

SEQ ID NO: 63133 - RNA, 20 nt, Artificial Sequence
  Synthetic
uugcuuguguuacuuaguau

SEQ ID NO: 63134 - RNA, 21 nt, Artificial Sequence
  Synthetic
auugcuuguguuacuuaguau

SEQ ID NO: 63135 - RNA, 22 nt, Artificial Sequence
  Synthetic
uauugcuuguguuacuuaguau

SEQ ID NO: 63136 - RNA, 24 nt, Artificial Sequence
  Synthetic
uguauugcuuguguuacuuaguau

SEQ ID NO: 63137 - RNA, 18 nt, Artificial Sequence
  Synthetic
ucagcuuugauugcguau

SEQ ID NO: 63138 - RNA, 19 nt, Artificial Sequence
  Synthetic
cucagcuuugauugcguau

SEQ ID NO: 63139 - RNA, 20 nt, Artificial Sequence
  Synthetic
ucucagcuuugauugcguau

SEQ ID NO: 63140 - RNA, 21 nt, Artificial Sequence
  Synthetic
acuaauuucuaccuaagguau

SEQ ID NO: 63141 - RNA, 23 nt, Artificial Sequence
  Synthetic
ugacuaauuucuaccuaagguau

SEQ ID NO: 63142 - RNA, 24 nt, Artificial Sequence
  Synthetic
uugacuaauuucuaccuaagguau

SEQ ID NO: 63143 - RNA, 18 nt, Artificial Sequence
  Synthetic
aggacugucuggagguau

SEQ ID NO: 63144 - RNA, 19 nt, Artificial Sequence
  Synthetic
caggacugucuggagguau

SEQ ID NO: 63145 - RNA, 20 nt, Artificial Sequence
  Synthetic
ccaggacugucuggagguau

SEQ ID NO: 63146 - RNA, 21 nt, Artificial Sequence
  Synthetic
uccaggacugucuggagguau

SEQ ID NO: 63147 - RNA, 24 nt, Artificial Sequence
  Synthetic
ugguccaggacugucuggagguau

SEQ ID NO: 63148 - RNA, 18 nt, Artificial Sequence
  Synthetic
uuuccuuacuuuagguau

SEQ ID NO: 63149 - RNA, 19 nt, Artificial Sequence
  Synthetic
uuuuccuuacuuuagguau

SEQ ID NO: 63150 - RNA, 20 nt, Artificial Sequence
  Synthetic
cuuuuccuuacuuuagguau

SEQ ID NO: 63151 - RNA, 22 nt, Artificial Sequence
  Synthetic
ugcuuuuccuuacuuuagguau

SEQ ID NO: 63152 - RNA, 23 nt, Artificial Sequence
  Synthetic
cugcuuuuccuuacuuuagguau

SEQ ID NO: 63153 - RNA, 24 nt, Artificial Sequence
  Synthetic
ucugcuuuuccuuacuuuagguau

SEQ ID NO: 63154 - RNA, 18 nt, Artificial Sequence
  Synthetic
augggggugaguggguau

SEQ ID NO: 63155 - RNA, 19 nt, Artificial Sequence
  Synthetic
aaugggggugaguggguau

SEQ ID NO: 63156 - RNA, 20 nt, Artificial Sequence
  Synthetic
aaaugggggugaguggguau

SEQ ID NO: 63157 - RNA, 22 nt, Artificial Sequence
  Synthetic
agaaaugggggugaguggguau

SEQ ID NO: 63158 - RNA, 23 nt, Artificial Sequence
  Synthetic
aagaaaugggggugaguggguau

SEQ ID NO: 63159 - RNA, 24 nt, Artificial Sequence
  Synthetic
caagaaaugggggugaguggguau

SEQ ID NO: 63160 - RNA, 21 nt, Artificial Sequence
  Synthetic
ugggaucugcaugguggguau

SEQ ID NO: 63161 - RNA, 22 nt, Artificial Sequence
  Synthetic
cugggaucugcaugguggguau

SEQ ID NO: 63162 - RNA, 24 nt, Artificial Sequence
  Synthetic
ugcugggaucugcaugguggguau

SEQ ID NO: 63163 - RNA, 18 nt, Artificial Sequence
  Synthetic
cggggaggaggcugguau

SEQ ID NO: 63164 - RNA, 19 nt, Artificial Sequence
  Synthetic
ucggggaggaggcugguau

SEQ ID NO: 63165 - RNA, 22 nt, Artificial Sequence
  Synthetic
uggucggggaggaggcugguau

SEQ ID NO: 63166 - RNA, 23 nt, Artificial Sequence
  Synthetic
uuggucggggaggaggcugguau

SEQ ID NO: 63167 - RNA, 24 nt, Artificial Sequence
  Synthetic
auuggucggggaggaggcugguau

SEQ ID NO: 63168 - RNA, 21 nt, Artificial Sequence
  Synthetic
cuauuacaugucuuuugguau

SEQ ID NO: 63169 - RNA, 22 nt, Artificial Sequence
  Synthetic
ucuauuacaugucuuuugguau

SEQ ID NO: 63170 - RNA, 23 nt, Artificial Sequence
  Synthetic
uucuauuacaugucuuuugguau

SEQ ID NO: 63171 - RNA, 24 nt, Artificial Sequence
  Synthetic
auucuauuacaugucuuuugguau

SEQ ID NO: 63172 - RNA, 19 nt, Artificial Sequence
  Synthetic
agaauauuguagaauguau

SEQ ID NO: 63173 - RNA, 20 nt, Artificial Sequence
  Synthetic
aagaauauuguagaauguau

SEQ ID NO: 63174 - RNA, 23 nt, Artificial Sequence
  Synthetic
uggaagaauauuguagaauguau

SEQ ID NO: 63175 - RNA, 24 nt, Artificial Sequence
  Synthetic
cuggaagaauauuguagaauguau

SEQ ID NO: 63176 - RNA, 18 nt, Artificial Sequence
  Synthetic
aaaugugauauaauguau

SEQ ID NO: 63177 - RNA, 20 nt, Artificial Sequence
  Synthetic
ugaaaugugauauaauguau

SEQ ID NO: 63178 - RNA, 22 nt, Artificial Sequence
  Synthetic
ugugaaaugugauauaauguau

SEQ ID NO: 63179 - RNA, 23 nt, Artificial Sequence
  Synthetic
augugaaaugugauauaauguau

SEQ ID NO: 63180 - RNA, 24 nt, Artificial Sequence
  Synthetic
aaugugaaaugugauauaauguau

SEQ ID NO: 63181 - RNA, 22 nt, Artificial Sequence
  Synthetic
agaaaaaaaaaaucuaauguau

SEQ ID NO: 63182 - RNA, 23 nt, Artificial Sequence
  Synthetic
aagaaaaaaaaaaucuaauguau

SEQ ID NO: 63183 - RNA, 24 nt, Artificial Sequence
  Synthetic
caagaaaaaaaaaaucuaauguau

SEQ ID NO: 63184 - RNA, 18 nt, Artificial Sequence
  Synthetic
auuuauaguaccauguau

SEQ ID NO: 63185 - RNA, 19 nt, Artificial Sequence
  Synthetic
uauuuauaguaccauguau

SEQ ID NO: 63186 - RNA, 20 nt, Artificial Sequence
  Synthetic
uuauuuauaguaccauguau

SEQ ID NO: 63187 - RNA, 21 nt, Artificial Sequence
  Synthetic
auuauuuauaguaccauguau

SEQ ID NO: 63188 - RNA, 22 nt, Artificial Sequence
  Synthetic
aauuauuuauaguaccauguau

SEQ ID NO: 63189 - RNA, 23 nt, Artificial Sequence
  Synthetic
aaauuauuuauaguaccauguau

SEQ ID NO: 63190 - RNA, 18 nt, Artificial Sequence
  Synthetic
uuucaaucauauauguau

SEQ ID NO: 63191 - RNA, 21 nt, Artificial Sequence
  Synthetic
ugguuucaaucauauauguau

SEQ ID NO: 63192 - RNA, 24 nt, Artificial Sequence
  Synthetic
uggugguuucaaucauauauguau

SEQ ID NO: 63193 - RNA, 18 nt, Artificial Sequence
  Synthetic
ugauuauccauuauguau

SEQ ID NO: 63194 - RNA, 20 nt, Artificial Sequence
  Synthetic
cgugauuauccauuauguau

SEQ ID NO: 63195 - RNA, 22 nt, Artificial Sequence
  Synthetic
agcgugauuauccauuauguau

SEQ ID NO: 63196 - RNA, 23 nt, Artificial Sequence
  Synthetic
aagcgugauuauccauuauguau

SEQ ID NO: 63197 - RNA, 24 nt, Artificial Sequence
  Synthetic
caagcgugauuauccauuauguau

SEQ ID NO: 63198 - RNA, 18 nt, Artificial Sequence
  Synthetic
uucauggucugacuguau

SEQ ID NO: 63199 - RNA, 19 nt, Artificial Sequence
  Synthetic
uuucauggucugacuguau

SEQ ID NO: 63200 - RNA, 21 nt, Artificial Sequence
  Synthetic
uguuucauggucugacuguau

SEQ ID NO: 63201 - RNA, 22 nt, Artificial Sequence
  Synthetic
uuguuucauggucugacuguau

SEQ ID NO: 63202 - RNA, 23 nt, Artificial Sequence
  Synthetic
cuuguuucauggucugacuguau

SEQ ID NO: 63203 - RNA, 24 nt, Artificial Sequence
  Synthetic
ucuuguuucauggucugacuguau

SEQ ID NO: 63204 - RNA, 18 nt, Artificial Sequence
  Synthetic
cucaggagaagccuguau

SEQ ID NO: 63205 - RNA, 19 nt, Artificial Sequence
  Synthetic
ucucaggagaagccuguau

SEQ ID NO: 63206 - RNA, 20 nt, Artificial Sequence
  Synthetic
cucucaggagaagccuguau

SEQ ID NO: 63207 - RNA, 22 nt, Artificial Sequence
  Synthetic
ugcucucaggagaagccuguau

SEQ ID NO: 63208 - RNA, 23 nt, Artificial Sequence
  Synthetic
cugcucucaggagaagccuguau

SEQ ID NO: 63209 - RNA, 24 nt, Artificial Sequence
  Synthetic
ucugcucucaggagaagccuguau

SEQ ID NO: 63210 - RNA, 18 nt, Artificial Sequence
  Synthetic
aaauuuauuaagcuguau

SEQ ID NO: 63211 - RNA, 19 nt, Artificial Sequence
  Synthetic
caaauuuauuaagcuguau

SEQ ID NO: 63212 - RNA, 20 nt, Artificial Sequence
  Synthetic
acaaauuuauuaagcuguau

SEQ ID NO: 63213 - RNA, 18 nt, Artificial Sequence
  Synthetic
acacugaaauugcuguau

SEQ ID NO: 63214 - RNA, 22 nt, Artificial Sequence
  Synthetic
ugggacacugaaauugcuguau

SEQ ID NO: 63215 - RNA, 23 nt, Artificial Sequence
  Synthetic
cugggacacugaaauugcuguau

SEQ ID NO: 63216 - RNA, 24 nt, Artificial Sequence
  Synthetic
ucugggacacugaaauugcuguau

SEQ ID NO: 63217 - RNA, 18 nt, Artificial Sequence
  Synthetic
uauaaaugaggucuguau

SEQ ID NO: 63218 - RNA, 19 nt, Artificial Sequence
  Synthetic
auauaaaugaggucuguau

SEQ ID NO: 63219 - RNA, 20 nt, Artificial Sequence
  Synthetic
aauauaaaugaggucuguau

SEQ ID NO: 63220 - RNA, 21 nt, Artificial Sequence
  Synthetic
aaauauaaaugaggucuguau

SEQ ID NO: 63221 - RNA, 23 nt, Artificial Sequence
  Synthetic
ugaaauauaaaugaggucuguau

SEQ ID NO: 63222 - RNA, 22 nt, Artificial Sequence
  Synthetic
aggggagaauguucuucuguau

SEQ ID NO: 63223 - RNA, 23 nt, Artificial Sequence
  Synthetic
aaggggagaauguucuucuguau

SEQ ID NO: 63224 - RNA, 18 nt, Artificial Sequence
  Synthetic
cuuuugacuucuguguau

SEQ ID NO: 63225 - RNA, 19 nt, Artificial Sequence
  Synthetic
acuuuugacuucuguguau

SEQ ID NO: 63226 - RNA, 20 nt, Artificial Sequence
  Synthetic
uacuuuugacuucuguguau

SEQ ID NO: 63227 - RNA, 21 nt, Artificial Sequence
  Synthetic
auacuuuugacuucuguguau

SEQ ID NO: 63228 - RNA, 22 nt, Artificial Sequence
  Synthetic
uauacuuuugacuucuguguau

SEQ ID NO: 63229 - RNA, 23 nt, Artificial Sequence
  Synthetic
uuauacuuuugacuucuguguau

SEQ ID NO: 63230 - RNA, 24 nt, Artificial Sequence
  Synthetic
uuuauacuuuugacuucuguguau

SEQ ID NO: 63231 - RNA, 19 nt, Artificial Sequence
  Synthetic
agucacuuuuacauuguau

SEQ ID NO: 63232 - RNA, 20 nt, Artificial Sequence
  Synthetic
uagucacuuuuacauuguau

SEQ ID NO: 63233 - RNA, 21 nt, Artificial Sequence
  Synthetic
uuagucacuuuuacauuguau

SEQ ID NO: 63234 - RNA, 22 nt, Artificial Sequence
  Synthetic
auuagucacuuuuacauuguau

SEQ ID NO: 63235 - RNA, 23 nt, Artificial Sequence
  Synthetic
aauuagucacuuuuacauuguau

SEQ ID NO: 63236 - RNA, 24 nt, Artificial Sequence
  Synthetic
uaauuagucacuuuuacauuguau

SEQ ID NO: 63237 - RNA, 21 nt, Artificial Sequence
  Synthetic
aguucuauaguuugauuguau

SEQ ID NO: 63238 - RNA, 22 nt, Artificial Sequence
  Synthetic
caguucuauaguuugauuguau

SEQ ID NO: 63239 - RNA, 24 nt, Artificial Sequence
  Synthetic
ugcaguucuauaguuugauuguau

SEQ ID NO: 63240 - RNA, 18 nt, Artificial Sequence
  Synthetic
uggaaggauauauuguau

SEQ ID NO: 63241 - RNA, 20 nt, Artificial Sequence
  Synthetic
uguggaaggauauauuguau

SEQ ID NO: 63242 - RNA, 21 nt, Artificial Sequence
  Synthetic
uuguggaaggauauauuguau

SEQ ID NO: 63243 - RNA, 23 nt, Artificial Sequence
  Synthetic
uguuguggaaggauauauuguau

SEQ ID NO: 63244 - RNA, 24 nt, Artificial Sequence
  Synthetic
uuguuguggaaggauauauuguau

SEQ ID NO: 63245 - RNA, 18 nt, Artificial Sequence
  Synthetic
caucucccuggcuuguau

SEQ ID NO: 63246 - RNA, 19 nt, Artificial Sequence
  Synthetic
acaucucccuggcuuguau

SEQ ID NO: 63247 - RNA, 20 nt, Artificial Sequence
  Synthetic
uacaucucccuggcuuguau

SEQ ID NO: 63248 - RNA, 22 nt, Artificial Sequence
  Synthetic
aguacaucucccuggcuuguau

SEQ ID NO: 63249 - RNA, 24 nt, Artificial Sequence
  Synthetic
cgaguacaucucccuggcuuguau

SEQ ID NO: 63250 - RNA, 21 nt, Artificial Sequence
  Synthetic
uuuauuaauuaaaauuuguau

SEQ ID NO: 63251 - RNA, 22 nt, Artificial Sequence
  Synthetic
uuuuauuaauuaaaauuuguau

SEQ ID NO: 63252 - RNA, 23 nt, Artificial Sequence
  Synthetic
auuuuauuaauuaaaauuuguau

SEQ ID NO: 63253 - RNA, 24 nt, Artificial Sequence
  Synthetic
aauuuuauuaauuaaaauuuguau

SEQ ID NO: 63254 - RNA, 18 nt, Artificial Sequence
  Synthetic
uccaaucuguauuuguau

SEQ ID NO: 63255 - RNA, 19 nt, Artificial Sequence
  Synthetic
uuccaaucuguauuuguau

SEQ ID NO: 63256 - RNA, 20 nt, Artificial Sequence
  Synthetic
uuuccaaucuguauuuguau

SEQ ID NO: 63257 - RNA, 21 nt, Artificial Sequence
  Synthetic
uuuuccaaucuguauuuguau

SEQ ID NO: 63258 - RNA, 22 nt, Artificial Sequence
  Synthetic
uuuuuccaaucuguauuuguau

SEQ ID NO: 63259 - RNA, 23 nt, Artificial Sequence
  Synthetic
uuuuuuccaaucuguauuuguau

SEQ ID NO: 63260 - RNA, 24 nt, Artificial Sequence
  Synthetic
uuuuuuuccaaucuguauuuguau

SEQ ID NO: 63261 - RNA, 18 nt, Artificial Sequence
  Synthetic
uaucucccuauuuuguau

SEQ ID NO: 63262 - RNA, 19 nt, Artificial Sequence
  Synthetic
uuaucucccuauuuuguau

SEQ ID NO: 63263 - RNA, 20 nt, Artificial Sequence
  Synthetic
cuuaucucccuauuuuguau

SEQ ID NO: 63264 - RNA, 18 nt, Artificial Sequence
  Synthetic
cucucuucuaaaaauuau

SEQ ID NO: 63265 - RNA, 19 nt, Artificial Sequence
  Synthetic
acucucuucuaaaaauuau

SEQ ID NO: 63266 - RNA, 20 nt, Artificial Sequence
  Synthetic
aacucucuucuaaaaauuau

SEQ ID NO: 63267 - RNA, 21 nt, Artificial Sequence
  Synthetic
uaacucucuucuaaaaauuau

SEQ ID NO: 63268 - RNA, 22 nt, Artificial Sequence
  Synthetic
uuaacucucuucuaaaaauuau

SEQ ID NO: 63269 - RNA, 23 nt, Artificial Sequence
  Synthetic
uuuaacucucuucuaaaaauuau

SEQ ID NO: 63270 - RNA, 24 nt, Artificial Sequence
  Synthetic
cuuuaacucucuucuaaaaauuau

SEQ ID NO: 63271 - RNA, 21 nt, Artificial Sequence
  Synthetic
uggcuuuuaaauuaaaauuau

SEQ ID NO: 63272 - RNA, 22 nt, Artificial Sequence
  Synthetic
auggcuuuuaaauuaaaauuau

SEQ ID NO: 63273 - RNA, 23 nt, Artificial Sequence
  Synthetic
uauggcuuuuaaauuaaaauuau

SEQ ID NO: 63274 - RNA, 24 nt, Artificial Sequence
  Synthetic
uuauggcuuuuaaauuaaaauuau

SEQ ID NO: 63275 - RNA, 21 nt, Artificial Sequence
  Synthetic
cuaaauauggauauaaauuau

SEQ ID NO: 63276 - RNA, 22 nt, Artificial Sequence
  Synthetic
ucuaaauauggauauaaauuau

SEQ ID NO: 63277 - RNA, 23 nt, Artificial Sequence
  Synthetic
cucuaaauauggauauaaauuau

SEQ ID NO: 63278 - RNA, 18 nt, Artificial Sequence
  Synthetic
ugucuuagccugaauuau

SEQ ID NO: 63279 - RNA, 19 nt, Artificial Sequence
  Synthetic
augucuuagccugaauuau

SEQ ID NO: 63280 - RNA, 20 nt, Artificial Sequence
  Synthetic
caugucuuagccugaauuau

SEQ ID NO: 63281 - RNA, 21 nt, Artificial Sequence
  Synthetic
acaugucuuagccugaauuau

SEQ ID NO: 63282 - RNA, 22 nt, Artificial Sequence
  Synthetic
cacaugucuuagccugaauuau

SEQ ID NO: 63283 - RNA, 24 nt, Artificial Sequence
  Synthetic
agcacaugucuuagccugaauuau

SEQ ID NO: 63284 - RNA, 18 nt, Artificial Sequence
  Synthetic
uaaguuagguugaauuau

SEQ ID NO: 63285 - RNA, 19 nt, Artificial Sequence
  Synthetic
uuaaguuagguugaauuau

SEQ ID NO: 63286 - RNA, 21 nt, Artificial Sequence
  Synthetic
aguuaaguuagguugaauuau

SEQ ID NO: 63287 - RNA, 22 nt, Artificial Sequence
  Synthetic
uaguuaaguuagguugaauuau

SEQ ID NO: 63288 - RNA, 23 nt, Artificial Sequence
  Synthetic
auaguuaaguuagguugaauuau

SEQ ID NO: 63289 - RNA, 24 nt, Artificial Sequence
  Synthetic
uauaguuaaguuagguugaauuau

SEQ ID NO: 63290 - RNA, 18 nt, Artificial Sequence
  Synthetic
cugugaaaaaauaauuau

SEQ ID NO: 63291 - RNA, 19 nt, Artificial Sequence
  Synthetic
acugugaaaaaauaauuau

SEQ ID NO: 63292 - RNA, 22 nt, Artificial Sequence
  Synthetic
uggacugugaaaaaauaauuau

SEQ ID NO: 63293 - RNA, 23 nt, Artificial Sequence
  Synthetic
uuggacugugaaaaaauaauuau

SEQ ID NO: 63294 - RNA, 24 nt, Artificial Sequence
  Synthetic
uuuggacugugaaaaaauaauuau

SEQ ID NO: 63295 - RNA, 19 nt, Artificial Sequence
  Synthetic
ugaacggacugauaauuau

SEQ ID NO: 63296 - RNA, 20 nt, Artificial Sequence
  Synthetic
uugaacggacugauaauuau

SEQ ID NO: 63297 - RNA, 21 nt, Artificial Sequence
  Synthetic
uuugaacggacugauaauuau

SEQ ID NO: 63298 - RNA, 22 nt, Artificial Sequence
  Synthetic
uuuugaacggacugauaauuau

SEQ ID NO: 63299 - RNA, 23 nt, Artificial Sequence
  Synthetic
uuuuugaacggacugauaauuau

SEQ ID NO: 63300 - RNA, 24 nt, Artificial Sequence
  Synthetic
cuuuuugaacggacugauaauuau

SEQ ID NO: 63301 - RNA, 18 nt, Artificial Sequence
  Synthetic
ucauaaaauucuaauuau

SEQ ID NO: 63302 - RNA, 19 nt, Artificial Sequence
  Synthetic
cucauaaaauucuaauuau

SEQ ID NO: 63303 - RNA, 20 nt, Artificial Sequence
  Synthetic
ucucauaaaauucuaauuau

SEQ ID NO: 63304 - RNA, 21 nt, Artificial Sequence
  Synthetic
cucucauaaaauucuaauuau

SEQ ID NO: 63305 - RNA, 22 nt, Artificial Sequence
  Synthetic
acucucauaaaauucuaauuau

SEQ ID NO: 63306 - RNA, 23 nt, Artificial Sequence
  Synthetic
cacucucauaaaauucuaauuau

SEQ ID NO: 63307 - RNA, 24 nt, Artificial Sequence
  Synthetic
ucacucucauaaaauucuaauuau

SEQ ID NO: 63308 - RNA, 18 nt, Artificial Sequence
  Synthetic
acauacuuaaaacauuau

SEQ ID NO: 63309 - RNA, 20 nt, Artificial Sequence
  Synthetic
agacauacuuaaaacauuau

SEQ ID NO: 63310 - RNA, 21 nt, Artificial Sequence
  Synthetic
uagacauacuuaaaacauuau

SEQ ID NO: 63311 - RNA, 22 nt, Artificial Sequence
  Synthetic
uuagacauacuuaaaacauuau

SEQ ID NO: 63312 - RNA, 24 nt, Artificial Sequence
  Synthetic
uguuagacauacuuaaaacauuau

SEQ ID NO: 63313 - RNA, 18 nt, Artificial Sequence
  Synthetic
ccucuuacuugacauuau

SEQ ID NO: 63314 - RNA, 19 nt, Artificial Sequence
  Synthetic
uccucuuacuugacauuau

SEQ ID NO: 63315 - RNA, 20 nt, Artificial Sequence
  Synthetic
uuccucuuacuugacauuau

SEQ ID NO: 63316 - RNA, 21 nt, Artificial Sequence
  Synthetic
uuuccucuuacuugacauuau

SEQ ID NO: 63317 - RNA, 22 nt, Artificial Sequence
  Synthetic
uuuuccucuuacuugacauuau

SEQ ID NO: 63318 - RNA, 23 nt, Artificial Sequence
  Synthetic
cuuuuccucuuacuugacauuau

SEQ ID NO: 63319 - RNA, 24 nt, Artificial Sequence
  Synthetic
ucuuuuccucuuacuugacauuau

SEQ ID NO: 63320 - RNA, 18 nt, Artificial Sequence
  Synthetic
uuccuggaaauccauuau

SEQ ID NO: 63321 - RNA, 20 nt, Artificial Sequence
  Synthetic
aguuccuggaaauccauuau

SEQ ID NO: 63322 - RNA, 21 nt, Artificial Sequence
  Synthetic
aaguuccuggaaauccauuau

SEQ ID NO: 63323 - RNA, 22 nt, Artificial Sequence
  Synthetic
uaaguuccuggaaauccauuau

SEQ ID NO: 63324 - RNA, 24 nt, Artificial Sequence
  Synthetic
uguaaguuccuggaaauccauuau

SEQ ID NO: 63325 - RNA, 18 nt, Artificial Sequence
  Synthetic
uggauuuguauccauuau

SEQ ID NO: 63326 - RNA, 19 nt, Artificial Sequence
  Synthetic
auggauuuguauccauuau

SEQ ID NO: 63327 - RNA, 20 nt, Artificial Sequence
  Synthetic
cauggauuuguauccauuau

SEQ ID NO: 63328 - RNA, 22 nt, Artificial Sequence
  Synthetic
ugcauggauuuguauccauuau

SEQ ID NO: 63329 - RNA, 23 nt, Artificial Sequence
  Synthetic
augcauggauuuguauccauuau

SEQ ID NO: 63330 - RNA, 24 nt, Artificial Sequence
  Synthetic
aaugcauggauuuguauccauuau

SEQ ID NO: 63331 - RNA, 18 nt, Artificial Sequence
  Synthetic
aaauuauaauagcauuau

SEQ ID NO: 63332 - RNA, 19 nt, Artificial Sequence
  Synthetic
aaaauuauaauagcauuau

SEQ ID NO: 63333 - RNA, 20 nt, Artificial Sequence
  Synthetic
caaaauuauaauagcauuau

SEQ ID NO: 63334 - RNA, 21 nt, Artificial Sequence
  Synthetic
acaaaauuauaauagcauuau

SEQ ID NO: 63335 - RNA, 23 nt, Artificial Sequence
  Synthetic
agacaaaauuauaauagcauuau

SEQ ID NO: 63336 - RNA, 24 nt, Artificial Sequence
  Synthetic
aagacaaaauuauaauagcauuau

SEQ ID NO: 63337 - RNA, 19 nt, Artificial Sequence
  Synthetic
uggauggagugugcauuau

SEQ ID NO: 63338 - RNA, 20 nt, Artificial Sequence
  Synthetic
uuggauggagugugcauuau

SEQ ID NO: 63339 - RNA, 21 nt, Artificial Sequence
  Synthetic
cuuggauggagugugcauuau

SEQ ID NO: 63340 - RNA, 22 nt, Artificial Sequence
  Synthetic
ucuuggauggagugugcauuau

SEQ ID NO: 63341 - RNA, 23 nt, Artificial Sequence
  Synthetic
uucuuggauggagugugcauuau

SEQ ID NO: 63342 - RNA, 20 nt, Artificial Sequence
  Synthetic
aggcaaauaguagucauuau

SEQ ID NO: 63343 - RNA, 21 nt, Artificial Sequence
  Synthetic
aaggcaaauaguagucauuau

SEQ ID NO: 63344 - RNA, 18 nt, Artificial Sequence
  Synthetic
uguaagauuauggauuau

SEQ ID NO: 63345 - RNA, 19 nt, Artificial Sequence
  Synthetic
uuguaagauuauggauuau

SEQ ID NO: 63346 - RNA, 20 nt, Artificial Sequence
  Synthetic
auuguaagauuauggauuau

SEQ ID NO: 63347 - RNA, 18 nt, Artificial Sequence
  Synthetic
cuugguuaccuugauuau

SEQ ID NO: 63348 - RNA, 19 nt, Artificial Sequence
  Synthetic
acuugguuaccuugauuau

SEQ ID NO: 63349 - RNA, 20 nt, Artificial Sequence
  Synthetic
uacuugguuaccuugauuau

SEQ ID NO: 63350 - RNA, 21 nt, Artificial Sequence
  Synthetic
auacuugguuaccuugauuau

SEQ ID NO: 63351 - RNA, 22 nt, Artificial Sequence
  Synthetic
uauacuugguuaccuugauuau

SEQ ID NO: 63352 - RNA, 23 nt, Artificial Sequence
  Synthetic
auauacuugguuaccuugauuau

SEQ ID NO: 63353 - RNA, 24 nt, Artificial Sequence
  Synthetic
cauauacuugguuaccuugauuau

SEQ ID NO: 63354 - RNA, 18 nt, Artificial Sequence
  Synthetic
cuccuaugccuugauuau

SEQ ID NO: 63355 - RNA, 19 nt, Artificial Sequence
  Synthetic
acuccuaugccuugauuau

SEQ ID NO: 63356 - RNA, 20 nt, Artificial Sequence
  Synthetic
aacuccuaugccuugauuau

SEQ ID NO: 63357 - RNA, 21 nt, Artificial Sequence
  Synthetic
uaacuccuaugccuugauuau

SEQ ID NO: 63358 - RNA, 22 nt, Artificial Sequence
  Synthetic
uuaacuccuaugccuugauuau

SEQ ID NO: 63359 - RNA, 23 nt, Artificial Sequence
  Synthetic
cuuaacuccuaugccuugauuau

SEQ ID NO: 63360 - RNA, 24 nt, Artificial Sequence
  Synthetic
ccuuaacuccuaugccuugauuau

SEQ ID NO: 63361 - RNA, 18 nt, Artificial Sequence
  Synthetic
aauugacacguauauuau

SEQ ID NO: 63362 - RNA, 20 nt, Artificial Sequence
  Synthetic
ugaauugacacguauauuau

SEQ ID NO: 63363 - RNA, 21 nt, Artificial Sequence
  Synthetic
augaauugacacguauauuau

SEQ ID NO: 63364 - RNA, 22 nt, Artificial Sequence
  Synthetic
uaugaauugacacguauauuau

SEQ ID NO: 63365 - RNA, 23 nt, Artificial Sequence
  Synthetic
cuaugaauugacacguauauuau

SEQ ID NO: 63366 - RNA, 24 nt, Artificial Sequence
  Synthetic
ucuaugaauugacacguauauuau

SEQ ID NO: 63367 - RNA, 18 nt, Artificial Sequence
  Synthetic
ugagugaaaugcuauuau

SEQ ID NO: 63368 - RNA, 19 nt, Artificial Sequence
  Synthetic
augagugaaaugcuauuau

SEQ ID NO: 63369 - RNA, 20 nt, Artificial Sequence
  Synthetic
caugagugaaaugcuauuau

SEQ ID NO: 63370 - RNA, 21 nt, Artificial Sequence
  Synthetic
ucaugagugaaaugcuauuau

SEQ ID NO: 63371 - RNA, 22 nt, Artificial Sequence
  Synthetic
aucaugagugaaaugcuauuau

SEQ ID NO: 63372 - RNA, 23 nt, Artificial Sequence
  Synthetic
aaucaugagugaaaugcuauuau

SEQ ID NO: 63373 - RNA, 24 nt, Artificial Sequence
  Synthetic
caaucaugagugaaaugcuauuau

SEQ ID NO: 63374 - RNA, 21 nt, Artificial Sequence
  Synthetic
auaguuauugauuauuauuau

SEQ ID NO: 63375 - RNA, 23 nt, Artificial Sequence
  Synthetic
ugauaguuauugauuauuauuau

SEQ ID NO: 63376 - RNA, 24 nt, Artificial Sequence
  Synthetic
augauaguuauugauuauuauuau

SEQ ID NO: 63377 - RNA, 18 nt, Artificial Sequence
  Synthetic
aagagucucucuuauuau

SEQ ID NO: 63378 - RNA, 19 nt, Artificial Sequence
  Synthetic
caagagucucucuuauuau

SEQ ID NO: 63379 - RNA, 20 nt, Artificial Sequence
  Synthetic
ucaagagucucucuuauuau

SEQ ID NO: 63380 - RNA, 21 nt, Artificial Sequence
  Synthetic
aucaagagucucucuuauuau

SEQ ID NO: 63381 - RNA, 22 nt, Artificial Sequence
  Synthetic
aaucaagagucucucuuauuau

SEQ ID NO: 63382 - RNA, 23 nt, Artificial Sequence
  Synthetic
aaaucaagagucucucuuauuau

SEQ ID NO: 63383 - RNA, 18 nt, Artificial Sequence
  Synthetic
ugccuccagcuaacuuau

SEQ ID NO: 63384 - RNA, 19 nt, Artificial Sequence
  Synthetic
cugccuccagcuaacuuau

SEQ ID NO: 63385 - RNA, 20 nt, Artificial Sequence
  Synthetic
acugccuccagcuaacuuau

SEQ ID NO: 63386 - RNA, 21 nt, Artificial Sequence
  Synthetic
uacugccuccagcuaacuuau

SEQ ID NO: 63387 - RNA, 22 nt, Artificial Sequence
  Synthetic
uuacugccuccagcuaacuuau

SEQ ID NO: 63388 - RNA, 23 nt, Artificial Sequence
  Synthetic
cuuacugccuccagcuaacuuau

SEQ ID NO: 63389 - RNA, 19 nt, Artificial Sequence
  Synthetic
uguaaccaagcacacuuau

SEQ ID NO: 63390 - RNA, 20 nt, Artificial Sequence
  Synthetic
auguaaccaagcacacuuau

SEQ ID NO: 63391 - RNA, 21 nt, Artificial Sequence
  Synthetic
cauguaaccaagcacacuuau

SEQ ID NO: 63392 - RNA, 22 nt, Artificial Sequence
  Synthetic
ucauguaaccaagcacacuuau

SEQ ID NO: 63393 - RNA, 23 nt, Artificial Sequence
  Synthetic
uucauguaaccaagcacacuuau

SEQ ID NO: 63394 - RNA, 24 nt, Artificial Sequence
  Synthetic
auucauguaaccaagcacacuuau

SEQ ID NO: 63395 - RNA, 18 nt, Artificial Sequence
  Synthetic
auuuuugcagacacuuau

SEQ ID NO: 63396 - RNA, 19 nt, Artificial Sequence
  Synthetic
uauuuuugcagacacuuau

SEQ ID NO: 63397 - RNA, 20 nt, Artificial Sequence
  Synthetic
uuauuuuugcagacacuuau

SEQ ID NO: 63398 - RNA, 21 nt, Artificial Sequence
  Synthetic
auuauuuuugcagacacuuau

SEQ ID NO: 63399 - RNA, 18 nt, Artificial Sequence
  Synthetic
uuguaccuuuugacuuau

SEQ ID NO: 63400 - RNA, 19 nt, Artificial Sequence
  Synthetic
uuuguaccuuuugacuuau

SEQ ID NO: 63401 - RNA, 20 nt, Artificial Sequence
  Synthetic
auuuguaccuuuugacuuau

SEQ ID NO: 63402 - RNA, 24 nt, Artificial Sequence
  Synthetic
agggauuuguaccuuuugacuuau

SEQ ID NO: 63403 - RNA, 18 nt, Artificial Sequence
  Synthetic
uucuaccuagauacuuau

SEQ ID NO: 63404 - RNA, 19 nt, Artificial Sequence
  Synthetic
auucuaccuagauacuuau

SEQ ID NO: 63405 - RNA, 20 nt, Artificial Sequence
  Synthetic
aauucuaccuagauacuuau

SEQ ID NO: 63406 - RNA, 21 nt, Artificial Sequence
  Synthetic
caauucuaccuagauacuuau

SEQ ID NO: 63407 - RNA, 22 nt, Artificial Sequence
  Synthetic
acaauucuaccuagauacuuau

SEQ ID NO: 63408 - RNA, 24 nt, Artificial Sequence
  Synthetic
ugacaauucuaccuagauacuuau

SEQ ID NO: 63409 - RNA, 18 nt, Artificial Sequence
  Synthetic
uuaaguuaugguacuuau

SEQ ID NO: 63410 - RNA, 19 nt, Artificial Sequence
  Synthetic
cuuaaguuaugguacuuau

SEQ ID NO: 63411 - RNA, 20 nt, Artificial Sequence
  Synthetic
acuuaaguuaugguacuuau

SEQ ID NO: 63412 - RNA, 21 nt, Artificial Sequence
  Synthetic
cacuuaaguuaugguacuuau

SEQ ID NO: 63413 - RNA, 22 nt, Artificial Sequence
  Synthetic
acacuuaaguuaugguacuuau

SEQ ID NO: 63414 - RNA, 23 nt, Artificial Sequence
  Synthetic
uacacuuaaguuaugguacuuau

SEQ ID NO: 63415 - RNA, 24 nt, Artificial Sequence
  Synthetic
auacacuuaaguuaugguacuuau

SEQ ID NO: 63416 - RNA, 18 nt, Artificial Sequence
  Synthetic
auguaaauuauuacuuau

SEQ ID NO: 63417 - RNA, 19 nt, Artificial Sequence
  Synthetic
cauguaaauuauuacuuau

SEQ ID NO: 63418 - RNA, 20 nt, Artificial Sequence
  Synthetic
ucauguaaauuauuacuuau

SEQ ID NO: 63419 - RNA, 21 nt, Artificial Sequence
  Synthetic
aucauguaaauuauuacuuau

SEQ ID NO: 63420 - RNA, 22 nt, Artificial Sequence
  Synthetic
uaucauguaaauuauuacuuau

SEQ ID NO: 63421 - RNA, 23 nt, Artificial Sequence
  Synthetic
auaucauguaaauuauuacuuau

SEQ ID NO: 63422 - RNA, 24 nt, Artificial Sequence
  Synthetic
aauaucauguaaauuauuacuuau

SEQ ID NO: 63423 - RNA, 18 nt, Artificial Sequence
  Synthetic
uugcuugguguuacuuau

SEQ ID NO: 63424 - RNA, 19 nt, Artificial Sequence
  Synthetic
cuugcuugguguuacuuau

SEQ ID NO: 63425 - RNA, 20 nt, Artificial Sequence
  Synthetic
ucuugcuugguguuacuuau

SEQ ID NO: 63426 - RNA, 23 nt, Artificial Sequence
  Synthetic
uggucuugcuugguguuacuuau

SEQ ID NO: 63427 - RNA, 24 nt, Artificial Sequence
  Synthetic
auggucuugcuugguguuacuuau

SEQ ID NO: 63428 - RNA, 18 nt, Artificial Sequence
  Synthetic
cauuugucauuggcuuau

SEQ ID NO: 63429 - RNA, 19 nt, Artificial Sequence
  Synthetic
acauuugucauuggcuuau

SEQ ID NO: 63430 - RNA, 20 nt, Artificial Sequence
  Synthetic
cacauuugucauuggcuuau

SEQ ID NO: 63431 - RNA, 21 nt, Artificial Sequence
  Synthetic
ucacauuugucauuggcuuau

SEQ ID NO: 63432 - RNA, 22 nt, Artificial Sequence
  Synthetic
uucacauuugucauuggcuuau

SEQ ID NO: 63433 - RNA, 23 nt, Artificial Sequence
  Synthetic
uuucacauuugucauuggcuuau

SEQ ID NO: 63434 - RNA, 24 nt, Artificial Sequence
  Synthetic
auuucacauuugucauuggcuuau

SEQ ID NO: 63435 - RNA, 18 nt, Artificial Sequence
  Synthetic
auuccacaagaugcuuau

SEQ ID NO: 63436 - RNA, 19 nt, Artificial Sequence
  Synthetic
uauuccacaagaugcuuau

SEQ ID NO: 63437 - RNA, 20 nt, Artificial Sequence
  Synthetic
auauuccacaagaugcuuau

SEQ ID NO: 63438 - RNA, 21 nt, Artificial Sequence
  Synthetic
uauauuccacaagaugcuuau

SEQ ID NO: 63439 - RNA, 22 nt, Artificial Sequence
  Synthetic
uuauauuccacaagaugcuuau

SEQ ID NO: 63440 - RNA, 23 nt, Artificial Sequence
  Synthetic
cuuauauuccacaagaugcuuau

SEQ ID NO: 63441 - RNA, 24 nt, Artificial Sequence
  Synthetic
ucuuauauuccacaagaugcuuau

SEQ ID NO: 63442 - RNA, 18 nt, Artificial Sequence
  Synthetic
aaagccauggaaucuuau

SEQ ID NO: 63443 - RNA, 19 nt, Artificial Sequence
  Synthetic
caaagccauggaaucuuau

SEQ ID NO: 63444 - RNA, 20 nt, Artificial Sequence
  Synthetic
acaaagccauggaaucuuau

SEQ ID NO: 63445 - RNA, 21 nt, Artificial Sequence
  Synthetic
aacaaagccauggaaucuuau

SEQ ID NO: 63446 - RNA, 22 nt, Artificial Sequence
  Synthetic
aaacaaagccauggaaucuuau

SEQ ID NO: 63447 - RNA, 23 nt, Artificial Sequence
  Synthetic
caaacaaagccauggaaucuuau

SEQ ID NO: 63448 - RNA, 24 nt, Artificial Sequence
  Synthetic
ucaaacaaagccauggaaucuuau

SEQ ID NO: 63449 - RNA, 18 nt, Artificial Sequence
  Synthetic
ccaagucacuaaucuuau

SEQ ID NO: 63450 - RNA, 19 nt, Artificial Sequence
  Synthetic
uccaagucacuaaucuuau

SEQ ID NO: 63451 - RNA, 20 nt, Artificial Sequence
  Synthetic
uuccaagucacuaaucuuau

SEQ ID NO: 63452 - RNA, 21 nt, Artificial Sequence
  Synthetic
cuuccaagucacuaaucuuau

SEQ ID NO: 63453 - RNA, 22 nt, Artificial Sequence
  Synthetic
ucuuccaagucacuaaucuuau

SEQ ID NO: 63454 - RNA, 23 nt, Artificial Sequence
  Synthetic
aucuuccaagucacuaaucuuau

SEQ ID NO: 63455 - RNA, 24 nt, Artificial Sequence
  Synthetic
uaucuuccaagucacuaaucuuau

SEQ ID NO: 63456 - RNA, 18 nt, Artificial Sequence
  Synthetic
cucauggauuuaucuuau

SEQ ID NO: 63457 - RNA, 19 nt, Artificial Sequence
  Synthetic
ccucauggauuuaucuuau

SEQ ID NO: 63458 - RNA, 20 nt, Artificial Sequence
  Synthetic
cccucauggauuuaucuuau

SEQ ID NO: 63459 - RNA, 23 nt, Artificial Sequence
  Synthetic
aggcccucauggauuuaucuuau

SEQ ID NO: 63460 - RNA, 24 nt, Artificial Sequence
  Synthetic
aaggcccucauggauuuaucuuau

SEQ ID NO: 63461 - RNA, 20 nt, Artificial Sequence
  Synthetic
uggaaaacaaguguucuuau

SEQ ID NO: 63462 - RNA, 22 nt, Artificial Sequence
  Synthetic
aguggaaaacaaguguucuuau

SEQ ID NO: 63463 - RNA, 18 nt, Artificial Sequence
  Synthetic
ugaugaaagguuucuuau

SEQ ID NO: 63464 - RNA, 19 nt, Artificial Sequence
  Synthetic
uugaugaaagguuucuuau

SEQ ID NO: 63465 - RNA, 20 nt, Artificial Sequence
  Synthetic
auugaugaaagguuucuuau

SEQ ID NO: 63466 - RNA, 22 nt, Artificial Sequence
  Synthetic
agauugaugaaagguuucuuau

SEQ ID NO: 63467 - RNA, 23 nt, Artificial Sequence
  Synthetic
cagauugaugaaagguuucuuau

SEQ ID NO: 63468 - RNA, 24 nt, Artificial Sequence
  Synthetic
ucagauugaugaaagguuucuuau

SEQ ID NO: 63469 - RNA, 18 nt, Artificial Sequence
  Synthetic
ugguguccugaaaguuau

SEQ ID NO: 63470 - RNA, 19 nt, Artificial Sequence
  Synthetic
cugguguccugaaaguuau

SEQ ID NO: 63471 - RNA, 20 nt, Artificial Sequence
  Synthetic
ucugguguccugaaaguuau

SEQ ID NO: 63472 - RNA, 21 nt, Artificial Sequence
  Synthetic
uucugguguccugaaaguuau

SEQ ID NO: 63473 - RNA, 23 nt, Artificial Sequence
  Synthetic
aguucugguguccugaaaguuau

SEQ ID NO: 63474 - RNA, 24 nt, Artificial Sequence
  Synthetic
uaguucugguguccugaaaguuau

SEQ ID NO: 63475 - RNA, 19 nt, Artificial Sequence
  Synthetic
aggauuuuccuaaaguuau

SEQ ID NO: 63476 - RNA, 20 nt, Artificial Sequence
  Synthetic
uaggauuuuccuaaaguuau

SEQ ID NO: 63477 - RNA, 21 nt, Artificial Sequence
  Synthetic
uuaggauuuuccuaaaguuau

SEQ ID NO: 63478 - RNA, 22 nt, Artificial Sequence
  Synthetic
auuaggauuuuccuaaaguuau

SEQ ID NO: 63479 - RNA, 23 nt, Artificial Sequence
  Synthetic
cauuaggauuuuccuaaaguuau

SEQ ID NO: 63480 - RNA, 24 nt, Artificial Sequence
  Synthetic
acauuaggauuuuccuaaaguuau

SEQ ID NO: 63481 - RNA, 22 nt, Artificial Sequence
  Synthetic
uguaaauaauauuuaaaguuau

SEQ ID NO: 63482 - RNA, 23 nt, Artificial Sequence
  Synthetic
auguaaauaauauuuaaaguuau

SEQ ID NO: 63483 - RNA, 24 nt, Artificial Sequence
  Synthetic
cauguaaauaauauuuaaaguuau

SEQ ID NO: 63484 - RNA, 18 nt, Artificial Sequence
  Synthetic
uucuuuguaacaaguuau

SEQ ID NO: 63485 - RNA, 19 nt, Artificial Sequence
  Synthetic
uuucuuuguaacaaguuau

SEQ ID NO: 63486 - RNA, 20 nt, Artificial Sequence
  Synthetic
auuucuuuguaacaaguuau

SEQ ID NO: 63487 - RNA, 18 nt, Artificial Sequence
  Synthetic
uacugauguagaaguuau

SEQ ID NO: 63488 - RNA, 19 nt, Artificial Sequence
  Synthetic
uuacugauguagaaguuau

SEQ ID NO: 63489 - RNA, 20 nt, Artificial Sequence
  Synthetic
cuuacugauguagaaguuau

SEQ ID NO: 63490 - RNA, 21 nt, Artificial Sequence
  Synthetic
ucuuacugauguagaaguuau

SEQ ID NO: 63491 - RNA, 22 nt, Artificial Sequence
  Synthetic
uucuuacugauguagaaguuau

SEQ ID NO: 63492 - RNA, 23 nt, Artificial Sequence
  Synthetic
uuucuuacugauguagaaguuau

SEQ ID NO: 63493 - RNA, 24 nt, Artificial Sequence
  Synthetic
uuuucuuacugauguagaaguuau

SEQ ID NO: 63494 - RNA, 18 nt, Artificial Sequence
  Synthetic
aaacauauaaagaguuau

SEQ ID NO: 63495 - RNA, 19 nt, Artificial Sequence
  Synthetic
aaaacauauaaagaguuau

SEQ ID NO: 63496 - RNA, 21 nt, Artificial Sequence
  Synthetic
ugaaaacauauaaagaguuau

SEQ ID NO: 63497 - RNA, 22 nt, Artificial Sequence
  Synthetic
uugaaaacauauaaagaguuau

SEQ ID NO: 63498 - RNA, 23 nt, Artificial Sequence
  Synthetic
uuugaaaacauauaaagaguuau

SEQ ID NO: 63499 - RNA, 19 nt, Artificial Sequence
  Synthetic
uggacuuaauaauaguuau

SEQ ID NO: 63500 - RNA, 20 nt, Artificial Sequence
  Synthetic
auggacuuaauaauaguuau

SEQ ID NO: 63501 - RNA, 21 nt, Artificial Sequence
  Synthetic
aauggacuuaauaauaguuau

SEQ ID NO: 63502 - RNA, 22 nt, Artificial Sequence
  Synthetic
aaauggacuuaauaauaguuau

SEQ ID NO: 63503 - RNA, 23 nt, Artificial Sequence
  Synthetic
caaauggacuuaauaauaguuau

SEQ ID NO: 63504 - RNA, 24 nt, Artificial Sequence
  Synthetic
ccaaauggacuuaauaauaguuau

SEQ ID NO: 63505 - RNA, 18 nt, Artificial Sequence
  Synthetic
acaaauuuaugucguuau

SEQ ID NO: 63506 - RNA, 19 nt, Artificial Sequence
  Synthetic
cacaaauuuaugucguuau

SEQ ID NO: 63507 - RNA, 20 nt, Artificial Sequence
  Synthetic
acacaaauuuaugucguuau

SEQ ID NO: 63508 - RNA, 21 nt, Artificial Sequence
  Synthetic
cacacaaauuuaugucguuau

SEQ ID NO: 63509 - RNA, 22 nt, Artificial Sequence
  Synthetic
acacacaaauuuaugucguuau

SEQ ID NO: 63510 - RNA, 23 nt, Artificial Sequence
  Synthetic
uacacacaaauuuaugucguuau

SEQ ID NO: 63511 - RNA, 24 nt, Artificial Sequence
  Synthetic
uuacacacaaauuuaugucguuau

SEQ ID NO: 63512 - RNA, 18 nt, Artificial Sequence
  Synthetic
augucauauuuucguuau

SEQ ID NO: 63513 - RNA, 19 nt, Artificial Sequence
  Synthetic
uaugucauauuuucguuau

SEQ ID NO: 63514 - RNA, 20 nt, Artificial Sequence
  Synthetic
cuaugucauauuuucguuau

SEQ ID NO: 63515 - RNA, 21 nt, Artificial Sequence
  Synthetic
ucuaugucauauuuucguuau

SEQ ID NO: 63516 - RNA, 22 nt, Artificial Sequence
  Synthetic
cucuaugucauauuuucguuau

SEQ ID NO: 63517 - RNA, 23 nt, Artificial Sequence
  Synthetic
acucuaugucauauuuucguuau

SEQ ID NO: 63518 - RNA, 24 nt, Artificial Sequence
  Synthetic
aacucuaugucauauuuucguuau

SEQ ID NO: 63519 - RNA, 21 nt, Artificial Sequence
  Synthetic
aaugggaaaaggucagguuau

SEQ ID NO: 63520 - RNA, 22 nt, Artificial Sequence
  Synthetic
aaaugggaaaaggucagguuau

SEQ ID NO: 63521 - RNA, 23 nt, Artificial Sequence
  Synthetic
aaaaugggaaaaggucagguuau

SEQ ID NO: 63522 - RNA, 24 nt, Artificial Sequence
  Synthetic
uaaaaugggaaaaggucagguuau

SEQ ID NO: 63523 - RNA, 18 nt, Artificial Sequence
  Synthetic
uuauacucaaaugguuau

SEQ ID NO: 63524 - RNA, 21 nt, Artificial Sequence
  Synthetic
ugguuauacucaaaugguuau

SEQ ID NO: 63525 - RNA, 22 nt, Artificial Sequence
  Synthetic
cugguuauacucaaaugguuau

SEQ ID NO: 63526 - RNA, 24 nt, Artificial Sequence
  Synthetic
agcugguuauacucaaaugguuau

SEQ ID NO: 63527 - RNA, 18 nt, Artificial Sequence
  Synthetic
aucuuggaaggugguuau

SEQ ID NO: 63528 - RNA, 19 nt, Artificial Sequence
  Synthetic
uaucuuggaaggugguuau

SEQ ID NO: 63529 - RNA, 20 nt, Artificial Sequence
  Synthetic
uuaucuuggaaggugguuau

SEQ ID NO: 63530 - RNA, 21 nt, Artificial Sequence
  Synthetic
cuuaucuuggaaggugguuau

SEQ ID NO: 63531 - RNA, 22 nt, Artificial Sequence
  Synthetic
acuuaucuuggaaggugguuau

SEQ ID NO: 63532 - RNA, 23 nt, Artificial Sequence
  Synthetic
aacuuaucuuggaaggugguuau

SEQ ID NO: 63533 - RNA, 18 nt, Artificial Sequence
  Synthetic
auugaaacucacuguuau

SEQ ID NO: 63534 - RNA, 19 nt, Artificial Sequence
  Synthetic
cauugaaacucacuguuau

SEQ ID NO: 63535 - RNA, 20 nt, Artificial Sequence
  Synthetic
ucauugaaacucacuguuau

SEQ ID NO: 63536 - RNA, 21 nt, Artificial Sequence
  Synthetic
uucauugaaacucacuguuau

SEQ ID NO: 63537 - RNA, 22 nt, Artificial Sequence
  Synthetic
uuucauugaaacucacuguuau

SEQ ID NO: 63538 - RNA, 23 nt, Artificial Sequence
  Synthetic
auuucauugaaacucacuguuau

SEQ ID NO: 63539 - RNA, 18 nt, Artificial Sequence
  Synthetic
auugcuacuuucuguuau

SEQ ID NO: 63540 - RNA, 19 nt, Artificial Sequence
  Synthetic
uauugcuacuuucuguuau

SEQ ID NO: 63541 - RNA, 20 nt, Artificial Sequence
  Synthetic
cuauugcuacuuucuguuau

SEQ ID NO: 63542 - RNA, 21 nt, Artificial Sequence
  Synthetic
ccuauugcuacuuucuguuau

SEQ ID NO: 63543 - RNA, 22 nt, Artificial Sequence
  Synthetic
uccuauugcuacuuucuguuau

SEQ ID NO: 63544 - RNA, 23 nt, Artificial Sequence
  Synthetic
cuccuauugcuacuuucuguuau

SEQ ID NO: 63545 - RNA, 24 nt, Artificial Sequence
  Synthetic
ucuccuauugcuacuuucuguuau

SEQ ID NO: 63546 - RNA, 18 nt, Artificial Sequence
  Synthetic
ucugauaguuuuuguuau

SEQ ID NO: 63547 - RNA, 20 nt, Artificial Sequence
  Synthetic
agucugauaguuuuuguuau

SEQ ID NO: 63548 - RNA, 21 nt, Artificial Sequence
  Synthetic
uagucugauaguuuuuguuau

SEQ ID NO: 63549 - RNA, 22 nt, Artificial Sequence
  Synthetic
auagucugauaguuuuuguuau

SEQ ID NO: 63550 - RNA, 23 nt, Artificial Sequence
  Synthetic
aauagucugauaguuuuuguuau

SEQ ID NO: 63551 - RNA, 24 nt, Artificial Sequence
  Synthetic
uaauagucugauaguuuuuguuau

SEQ ID NO: 63552 - RNA, 21 nt, Artificial Sequence
  Synthetic
aaucuguaucuacaaauuuau

SEQ ID NO: 63553 - RNA, 22 nt, Artificial Sequence
  Synthetic
aaaucuguaucuacaaauuuau

SEQ ID NO: 63554 - RNA, 23 nt, Artificial Sequence
  Synthetic
caaaucuguaucuacaaauuuau

SEQ ID NO: 63555 - RNA, 24 nt, Artificial Sequence
  Synthetic
ucaaaucuguaucuacaaauuuau

SEQ ID NO: 63556 - RNA, 18 nt, Artificial Sequence
  Synthetic
uaaacaggugaaauuuau

SEQ ID NO: 63557 - RNA, 19 nt, Artificial Sequence
  Synthetic
auaaacaggugaaauuuau

SEQ ID NO: 63558 - RNA, 20 nt, Artificial Sequence
  Synthetic
aauaaacaggugaaauuuau

SEQ ID NO: 63559 - RNA, 19 nt, Artificial Sequence
  Synthetic
uguggacucuguaauuuau

SEQ ID NO: 63560 - RNA, 20 nt, Artificial Sequence
  Synthetic
auguggacucuguaauuuau

SEQ ID NO: 63561 - RNA, 21 nt, Artificial Sequence
  Synthetic
cauguggacucuguaauuuau

SEQ ID NO: 63562 - RNA, 22 nt, Artificial Sequence
  Synthetic
acauguggacucuguaauuuau

SEQ ID NO: 63563 - RNA, 23 nt, Artificial Sequence
  Synthetic
cacauguggacucuguaauuuau

SEQ ID NO: 63564 - RNA, 24 nt, Artificial Sequence
  Synthetic
ccacauguggacucuguaauuuau

SEQ ID NO: 63565 - RNA, 21 nt, Artificial Sequence
  Synthetic
aacauauuuuguguaauuuau

SEQ ID NO: 63566 - RNA, 22 nt, Artificial Sequence
  Synthetic
aaacauauuuuguguaauuuau

SEQ ID NO: 63567 - RNA, 24 nt, Artificial Sequence
  Synthetic
ugaaacauauuuuguguaauuuau

SEQ ID NO: 63568 - RNA, 18 nt, Artificial Sequence
  Synthetic
agaaguauuuuaauuuau

SEQ ID NO: 63569 - RNA, 19 nt, Artificial Sequence
  Synthetic
aagaaguauuuuaauuuau

SEQ ID NO: 63570 - RNA, 21 nt, Artificial Sequence
  Synthetic
ugaagaaguauuuuaauuuau

SEQ ID NO: 63571 - RNA, 22 nt, Artificial Sequence
  Synthetic
uugaagaaguauuuuaauuuau

SEQ ID NO: 63572 - RNA, 23 nt, Artificial Sequence
  Synthetic
cuugaagaaguauuuuaauuuau

SEQ ID NO: 63573 - RNA, 24 nt, Artificial Sequence
  Synthetic
ucuugaagaaguauuuuaauuuau

SEQ ID NO: 63574 - RNA, 21 nt, Artificial Sequence
  Synthetic
uuuguuaugcuucccauuuau

SEQ ID NO: 63575 - RNA, 22 nt, Artificial Sequence
  Synthetic
uuuuguuaugcuucccauuuau

SEQ ID NO: 63576 - RNA, 23 nt, Artificial Sequence
  Synthetic
auuuuguuaugcuucccauuuau

SEQ ID NO: 63577 - RNA, 24 nt, Artificial Sequence
  Synthetic
aauuuuguuaugcuucccauuuau

SEQ ID NO: 63578 - RNA, 18 nt, Artificial Sequence
  Synthetic
uaugaauacagcauuuau

SEQ ID NO: 63579 - RNA, 20 nt, Artificial Sequence
  Synthetic
aguaugaauacagcauuuau

SEQ ID NO: 63580 - RNA, 21 nt, Artificial Sequence
  Synthetic
aaguaugaauacagcauuuau

SEQ ID NO: 63581 - RNA, 22 nt, Artificial Sequence
  Synthetic
aaaguaugaauacagcauuuau

SEQ ID NO: 63582 - RNA, 23 nt, Artificial Sequence
  Synthetic
uaaaguaugaauacagcauuuau

SEQ ID NO: 63583 - RNA, 24 nt, Artificial Sequence
  Synthetic
uuaaaguaugaauacagcauuuau

SEQ ID NO: 63584 - RNA, 18 nt, Artificial Sequence
  Synthetic
aggguacuaaagauuuau

SEQ ID NO: 63585 - RNA, 20 nt, Artificial Sequence
  Synthetic
ugaggguacuaaagauuuau

SEQ ID NO: 63586 - RNA, 21 nt, Artificial Sequence
  Synthetic
augaggguacuaaagauuuau

SEQ ID NO: 63587 - RNA, 22 nt, Artificial Sequence
  Synthetic
caugaggguacuaaagauuuau

SEQ ID NO: 63588 - RNA, 23 nt, Artificial Sequence
  Synthetic
acaugaggguacuaaagauuuau

SEQ ID NO: 63589 - RNA, 24 nt, Artificial Sequence
  Synthetic
uacaugaggguacuaaagauuuau

SEQ ID NO: 63590 - RNA, 19 nt, Artificial Sequence
  Synthetic
aguaguagcaaauauuuau

SEQ ID NO: 63591 - RNA, 20 nt, Artificial Sequence
  Synthetic
aaguaguagcaaauauuuau

SEQ ID NO: 63592 - RNA, 21 nt, Artificial Sequence
  Synthetic
uaaguaguagcaaauauuuau

SEQ ID NO: 63593 - RNA, 23 nt, Artificial Sequence
  Synthetic
uguaaguaguagcaaauauuuau

SEQ ID NO: 63594 - RNA, 24 nt, Artificial Sequence
  Synthetic
uuguaaguaguagcaaauauuuau

SEQ ID NO: 63595 - RNA, 18 nt, Artificial Sequence
  Synthetic
cuauuuaggcauauuuau

SEQ ID NO: 63596 - RNA, 19 nt, Artificial Sequence
  Synthetic
acuauuuaggcauauuuau

SEQ ID NO: 63597 - RNA, 20 nt, Artificial Sequence
  Synthetic
aacuauuuaggcauauuuau

SEQ ID NO: 63598 - RNA, 22 nt, Artificial Sequence
  Synthetic
agaacuauuuaggcauauuuau

SEQ ID NO: 63599 - RNA, 23 nt, Artificial Sequence
  Synthetic
cagaacuauuuaggcauauuuau

SEQ ID NO: 63600 - RNA, 24 nt, Artificial Sequence
  Synthetic
ccagaacuauuuaggcauauuuau

SEQ ID NO: 63601 - RNA, 18 nt, Artificial Sequence
  Synthetic
auuuaaacagcuauuuau

SEQ ID NO: 63602 - RNA, 19 nt, Artificial Sequence
  Synthetic
uauuuaaacagcuauuuau

SEQ ID NO: 63603 - RNA, 20 nt, Artificial Sequence
  Synthetic
cuauuuaaacagcuauuuau

SEQ ID NO: 63604 - RNA, 24 nt, Artificial Sequence
  Synthetic
agggcuauuuaaacagcuauuuau

SEQ ID NO: 63605 - RNA, 18 nt, Artificial Sequence
  Synthetic
aaaauugugcuuauuuau

SEQ ID NO: 63606 - RNA, 20 nt, Artificial Sequence
  Synthetic
agaaaauugugcuuauuuau

SEQ ID NO: 63607 - RNA, 21 nt, Artificial Sequence
  Synthetic
uagaaaauugugcuuauuuau

SEQ ID NO: 63608 - RNA, 22 nt, Artificial Sequence
  Synthetic
cuagaaaauugugcuuauuuau

SEQ ID NO: 63609 - RNA, 23 nt, Artificial Sequence
  Synthetic
ccuagaaaauugugcuuauuuau

SEQ ID NO: 63610 - RNA, 24 nt, Artificial Sequence
  Synthetic
accuagaaaauugugcuuauuuau

SEQ ID NO: 63611 - RNA, 21 nt, Artificial Sequence
  Synthetic
cauugaggaaaauuuauuuau

SEQ ID NO: 63612 - RNA, 22 nt, Artificial Sequence
  Synthetic
ucauugaggaaaauuuauuuau

SEQ ID NO: 63613 - RNA, 23 nt, Artificial Sequence
  Synthetic
aucauugaggaaaauuuauuuau

SEQ ID NO: 63614 - RNA, 18 nt, Artificial Sequence
  Synthetic
uuucauguuaaacuuuau

SEQ ID NO: 63615 - RNA, 19 nt, Artificial Sequence
  Synthetic
cuuucauguuaaacuuuau

SEQ ID NO: 63616 - RNA, 20 nt, Artificial Sequence
  Synthetic
ccuuucauguuaaacuuuau

SEQ ID NO: 63617 - RNA, 21 nt, Artificial Sequence
  Synthetic
uccuuucauguuaaacuuuau

SEQ ID NO: 63618 - RNA, 23 nt, Artificial Sequence
  Synthetic
aguccuuucauguuaaacuuuau

SEQ ID NO: 63619 - RNA, 24 nt, Artificial Sequence
  Synthetic
caguccuuucauguuaaacuuuau

SEQ ID NO: 63620 - RNA, 18 nt, Artificial Sequence
  Synthetic
uaggcaagaaugcuuuau

SEQ ID NO: 63621 - RNA, 19 nt, Artificial Sequence
  Synthetic
auaggcaagaaugcuuuau

SEQ ID NO: 63622 - RNA, 21 nt, Artificial Sequence
  Synthetic
agauaggcaagaaugcuuuau

SEQ ID NO: 63623 - RNA, 22 nt, Artificial Sequence
  Synthetic
aagauaggcaagaaugcuuuau

SEQ ID NO: 63624 - RNA, 23 nt, Artificial Sequence
  Synthetic
uaagauaggcaagaaugcuuuau

SEQ ID NO: 63625 - RNA, 24 nt, Artificial Sequence
  Synthetic
uuaagauaggcaagaaugcuuuau

SEQ ID NO: 63626 - RNA, 18 nt, Artificial Sequence
  Synthetic
auuugugcugugcuuuau

SEQ ID NO: 63627 - RNA, 20 nt, Artificial Sequence
  Synthetic
agauuugugcugugcuuuau

SEQ ID NO: 63628 - RNA, 21 nt, Artificial Sequence
  Synthetic
uagauuugugcugugcuuuau

SEQ ID NO: 63629 - RNA, 22 nt, Artificial Sequence
  Synthetic
uuagauuugugcugugcuuuau

SEQ ID NO: 63630 - RNA, 23 nt, Artificial Sequence
  Synthetic
uuuagauuugugcugugcuuuau

SEQ ID NO: 63631 - RNA, 24 nt, Artificial Sequence
  Synthetic
cuuuagauuugugcugugcuuuau

SEQ ID NO: 63632 - RNA, 18 nt, Artificial Sequence
  Synthetic
cucgucuccuugcuuuau

SEQ ID NO: 63633 - RNA, 19 nt, Artificial Sequence
  Synthetic
acucgucuccuugcuuuau

SEQ ID NO: 63634 - RNA, 20 nt, Artificial Sequence
  Synthetic
uacucgucuccuugcuuuau

SEQ ID NO: 63635 - RNA, 21 nt, Artificial Sequence
  Synthetic
uuacucgucuccuugcuuuau

SEQ ID NO: 63636 - RNA, 22 nt, Artificial Sequence
  Synthetic
auuacucgucuccuugcuuuau

SEQ ID NO: 63637 - RNA, 23 nt, Artificial Sequence
  Synthetic
cauuacucgucuccuugcuuuau

SEQ ID NO: 63638 - RNA, 18 nt, Artificial Sequence
  Synthetic
aguuaguauuaucuuuau

SEQ ID NO: 63639 - RNA, 19 nt, Artificial Sequence
  Synthetic
aaguuaguauuaucuuuau

SEQ ID NO: 63640 - RNA, 20 nt, Artificial Sequence
  Synthetic
aaaguuaguauuaucuuuau

SEQ ID NO: 63641 - RNA, 21 nt, Artificial Sequence
  Synthetic
uaaaguuaguauuaucuuuau

SEQ ID NO: 63642 - RNA, 22 nt, Artificial Sequence
  Synthetic
cuaaaguuaguauuaucuuuau

SEQ ID NO: 63643 - RNA, 23 nt, Artificial Sequence
  Synthetic
acuaaaguuaguauuaucuuuau

SEQ ID NO: 63644 - RNA, 24 nt, Artificial Sequence
  Synthetic
cacuaaaguuaguauuaucuuuau

SEQ ID NO: 63645 - RNA, 18 nt, Artificial Sequence
  Synthetic
uauugugucugucuuuau

SEQ ID NO: 63646 - RNA, 20 nt, Artificial Sequence
  Synthetic
uguauugugucugucuuuau

SEQ ID NO: 63647 - RNA, 22 nt, Artificial Sequence
  Synthetic
aguguauugugucugucuuuau

SEQ ID NO: 63648 - RNA, 23 nt, Artificial Sequence
  Synthetic
uaguguauugugucugucuuuau

SEQ ID NO: 63649 - RNA, 21 nt, Artificial Sequence
  Synthetic
cuuuuccuuaaauuucuuuau

SEQ ID NO: 63650 - RNA, 22 nt, Artificial Sequence
  Synthetic
ccuuuuccuuaaauuucuuuau

SEQ ID NO: 63651 - RNA, 23 nt, Artificial Sequence
  Synthetic
uccuuuuccuuaaauuucuuuau

SEQ ID NO: 63652 - RNA, 22 nt, Artificial Sequence
  Synthetic
aggugugaauuacacaguuuau

SEQ ID NO: 63653 - RNA, 23 nt, Artificial Sequence
  Synthetic
caggugugaauuacacaguuuau

SEQ ID NO: 63654 - RNA, 18 nt, Artificial Sequence
  Synthetic
auguauccaugaguuuau

SEQ ID NO: 63655 - RNA, 19 nt, Artificial Sequence
  Synthetic
aauguauccaugaguuuau

SEQ ID NO: 63656 - RNA, 20 nt, Artificial Sequence
  Synthetic
uaauguauccaugaguuuau

SEQ ID NO: 63657 - RNA, 21 nt, Artificial Sequence
  Synthetic
uuaauguauccaugaguuuau

SEQ ID NO: 63658 - RNA, 22 nt, Artificial Sequence
  Synthetic
uuuaauguauccaugaguuuau

SEQ ID NO: 63659 - RNA, 23 nt, Artificial Sequence
  Synthetic
cuuuaauguauccaugaguuuau

SEQ ID NO: 63660 - RNA, 24 nt, Artificial Sequence
  Synthetic
acuuuaauguauccaugaguuuau

SEQ ID NO: 63661 - RNA, 18 nt, Artificial Sequence
  Synthetic
auguucuauaucguuuau

SEQ ID NO: 63662 - RNA, 20 nt, Artificial Sequence
  Synthetic
ugauguucuauaucguuuau

SEQ ID NO: 63663 - RNA, 22 nt, Artificial Sequence
  Synthetic
ugugauguucuauaucguuuau

SEQ ID NO: 63664 - RNA, 23 nt, Artificial Sequence
  Synthetic
uugugauguucuauaucguuuau

SEQ ID NO: 63665 - RNA, 18 nt, Artificial Sequence
  Synthetic
uggucaccauggguuuau

SEQ ID NO: 63666 - RNA, 19 nt, Artificial Sequence
  Synthetic
auggucaccauggguuuau

SEQ ID NO: 63667 - RNA, 21 nt, Artificial Sequence
  Synthetic
ugauggucaccauggguuuau

SEQ ID NO: 63668 - RNA, 18 nt, Artificial Sequence
  Synthetic
cacacaagagugguuuau

SEQ ID NO: 63669 - RNA, 19 nt, Artificial Sequence
  Synthetic
ucacacaagagugguuuau

SEQ ID NO: 63670 - RNA, 20 nt, Artificial Sequence
  Synthetic
aucacacaagagugguuuau

SEQ ID NO: 63671 - RNA, 21 nt, Artificial Sequence
  Synthetic
aaucacacaagagugguuuau

SEQ ID NO: 63672 - RNA, 22 nt, Artificial Sequence
  Synthetic
uaaucacacaagagugguuuau

SEQ ID NO: 63673 - RNA, 23 nt, Artificial Sequence
  Synthetic
uuaaucacacaagagugguuuau

SEQ ID NO: 63674 - RNA, 24 nt, Artificial Sequence
  Synthetic
uuuaaucacacaagagugguuuau

SEQ ID NO: 63675 - RNA, 22 nt, Artificial Sequence
  Synthetic
uguaaauaaauuugcauuuuau

SEQ ID NO: 63676 - RNA, 23 nt, Artificial Sequence
  Synthetic
auguaaauaaauuugcauuuuau

SEQ ID NO: 63677 - RNA, 21 nt, Artificial Sequence
  Synthetic
aucuucuuuugaagauuuuau

SEQ ID NO: 63678 - RNA, 23 nt, Artificial Sequence
  Synthetic
ugaucuucuuuugaagauuuuau

SEQ ID NO: 63679 - RNA, 24 nt, Artificial Sequence
  Synthetic
uugaucuucuuuugaagauuuuau

SEQ ID NO: 63680 - RNA, 18 nt, Artificial Sequence
  Synthetic
ugggacccuggauuuuau

SEQ ID NO: 63681 - RNA, 20 nt, Artificial Sequence
  Synthetic
cgugggacccuggauuuuau

SEQ ID NO: 63682 - RNA, 21 nt, Artificial Sequence
  Synthetic
acgugggacccuggauuuuau

SEQ ID NO: 63683 - RNA, 22 nt, Artificial Sequence
  Synthetic
cacgugggacccuggauuuuau

SEQ ID NO: 63684 - RNA, 23 nt, Artificial Sequence
  Synthetic
ucacgugggacccuggauuuuau

SEQ ID NO: 63685 - RNA, 18 nt, Artificial Sequence
  Synthetic
agacaagaccacuuuuau

SEQ ID NO: 63686 - RNA, 19 nt, Artificial Sequence
  Synthetic
cagacaagaccacuuuuau

SEQ ID NO: 63687 - RNA, 20 nt, Artificial Sequence
  Synthetic
acagacaagaccacuuuuau

SEQ ID NO: 63688 - RNA, 21 nt, Artificial Sequence
  Synthetic
cacagacaagaccacuuuuau

SEQ ID NO: 63689 - RNA, 22 nt, Artificial Sequence
  Synthetic
ccacagacaagaccacuuuuau

SEQ ID NO: 63690 - RNA, 23 nt, Artificial Sequence
  Synthetic
uccacagacaagaccacuuuuau

SEQ ID NO: 63691 - RNA, 18 nt, Artificial Sequence
  Synthetic
aguauucuauuguuuuau

SEQ ID NO: 63692 - RNA, 19 nt, Artificial Sequence
  Synthetic
caguauucuauuguuuuau

SEQ ID NO: 63693 - RNA, 20 nt, Artificial Sequence
  Synthetic
ucaguauucuauuguuuuau

SEQ ID NO: 63694 - RNA, 21 nt, Artificial Sequence
  Synthetic
uucaguauucuauuguuuuau

SEQ ID NO: 63695 - RNA, 22 nt, Artificial Sequence
  Synthetic
auucaguauucuauuguuuuau

SEQ ID NO: 63696 - RNA, 23 nt, Artificial Sequence
  Synthetic
aauucaguauucuauuguuuuau

SEQ ID NO: 63697 - RNA, 24 nt, Artificial Sequence
  Synthetic
uaauucaguauucuauuguuuuau

SEQ ID NO: 63698 - RNA, 18 nt, Artificial Sequence
  Synthetic
agcucaagugauuuuuau

SEQ ID NO: 63699 - RNA, 19 nt, Artificial Sequence
  Synthetic
aagcucaagugauuuuuau

SEQ ID NO: 63700 - RNA, 21 nt, Artificial Sequence
  Synthetic
ugaagcucaagugauuuuuau

SEQ ID NO: 63701 - RNA, 24 nt, Artificial Sequence
  Synthetic
uggugaagcucaagugauuuuuau

SEQ ID NO: 63702 - RNA, 21 nt, Artificial Sequence
  Synthetic
aaugaguuuucguauuuuuau

SEQ ID NO: 63703 - RNA, 23 nt, Artificial Sequence
  Synthetic
agaaugaguuuucguauuuuuau

SEQ ID NO: 63704 - RNA, 21 nt, Artificial Sequence
  Synthetic
uacugucuaaauuauuuuuau

SEQ ID NO: 63705 - RNA, 22 nt, Artificial Sequence
  Synthetic
uuacugucuaaauuauuuuuau

SEQ ID NO: 63706 - RNA, 24 nt, Artificial Sequence
  Synthetic
aguuacugucuaaauuauuuuuau

SEQ ID NO: 63707 - RNA, 18 nt, Artificial Sequence
  Synthetic
uuugcugaugcuuuuuau

SEQ ID NO: 63708 - RNA, 19 nt, Artificial Sequence
  Synthetic
cuuugcugaugcuuuuuau

SEQ ID NO: 63709 - RNA, 20 nt, Artificial Sequence
  Synthetic
ccuuugcugaugcuuuuuau

SEQ ID NO: 63710 - RNA, 21 nt, Artificial Sequence
  Synthetic
uccuuugcugaugcuuuuuau

SEQ ID NO: 63711 - RNA, 22 nt, Artificial Sequence
  Synthetic
auccuuugcugaugcuuuuuau

SEQ ID NO: 63712 - RNA, 23 nt, Artificial Sequence
  Synthetic
uauccuuugcugaugcuuuuuau

SEQ ID NO: 63713 - RNA, 24 nt, Artificial Sequence
  Synthetic
auauccuuugcugaugcuuuuuau

SEQ ID NO: 63714 - RNA, 18 nt, Artificial Sequence
  Synthetic
aacauauagaguuuuuau

SEQ ID NO: 63715 - RNA, 19 nt, Artificial Sequence
  Synthetic
caacauauagaguuuuuau

SEQ ID NO: 63716 - RNA, 20 nt, Artificial Sequence
  Synthetic
ucaacauauagaguuuuuau

SEQ ID NO: 63717 - RNA, 21 nt, Artificial Sequence
  Synthetic
cucaacauauagaguuuuuau

SEQ ID NO: 63718 - RNA, 22 nt, Artificial Sequence
  Synthetic
acucaacauauagaguuuuuau

SEQ ID NO: 63719 - RNA, 23 nt, Artificial Sequence
  Synthetic
aacucaacauauagaguuuuuau

SEQ ID NO: 63720 - RNA, 24 nt, Artificial Sequence
  Synthetic
caacucaacauauagaguuuuuau

SEQ ID NO: 63721 - RNA, 21 nt, Artificial Sequence
  Synthetic
uauauuugcccauuuuuuuau

SEQ ID NO: 63722 - RNA, 22 nt, Artificial Sequence
  Synthetic
auauauuugcccauuuuuuuau

SEQ ID NO: 63723 - RNA, 23 nt, Artificial Sequence
  Synthetic
cauauauuugcccauuuuuuuau

SEQ ID NO: 63724 - RNA, 24 nt, Artificial Sequence
  Synthetic
ucauauauuugcccauuuuuuuau

SEQ ID NO: 63725 - RNA, 18 nt, Artificial Sequence
  Synthetic
uucaccugaacaaaaacu

SEQ ID NO: 63726 - RNA, 19 nt, Artificial Sequence
  Synthetic
uuucaccugaacaaaaacu

SEQ ID NO: 63727 - RNA, 21 nt, Artificial Sequence
  Synthetic
aguuucaccugaacaaaaacu

SEQ ID NO: 63728 - RNA, 22 nt, Artificial Sequence
  Synthetic
uaguuucaccugaacaaaaacu

SEQ ID NO: 63729 - RNA, 23 nt, Artificial Sequence
  Synthetic
cuaguuucaccugaacaaaaacu

SEQ ID NO: 63730 - RNA, 18 nt, Artificial Sequence
  Synthetic
ucaaguuggauaaaaacu

SEQ ID NO: 63731 - RNA, 19 nt, Artificial Sequence
  Synthetic
aucaaguuggauaaaaacu

SEQ ID NO: 63732 - RNA, 20 nt, Artificial Sequence
  Synthetic
aaucaaguuggauaaaaacu

SEQ ID NO: 63733 - RNA, 21 nt, Artificial Sequence
  Synthetic
aaaucaaguuggauaaaaacu

SEQ ID NO: 63734 - RNA, 24 nt, Artificial Sequence
  Synthetic
aggaaaucaaguuggauaaaaacu

SEQ ID NO: 63735 - RNA, 18 nt, Artificial Sequence
  Synthetic
aaaauguuuuucaaaacu

SEQ ID NO: 63736 - RNA, 19 nt, Artificial Sequence
  Synthetic
uaaaauguuuuucaaaacu

SEQ ID NO: 63737 - RNA, 21 nt, Artificial Sequence
  Synthetic
uguaaaauguuuuucaaaacu

SEQ ID NO: 63738 - RNA, 22 nt, Artificial Sequence
  Synthetic
uuguaaaauguuuuucaaaacu

SEQ ID NO: 63739 - RNA, 24 nt, Artificial Sequence
  Synthetic
aguuguaaaauguuuuucaaaacu

SEQ ID NO: 63740 - RNA, 18 nt, Artificial Sequence
  Synthetic
aguagggccaagaaaacu

SEQ ID NO: 63741 - RNA, 22 nt, Artificial Sequence
  Synthetic
ugggaguagggccaagaaaacu

SEQ ID NO: 63742 - RNA, 23 nt, Artificial Sequence
  Synthetic
uugggaguagggccaagaaaacu

SEQ ID NO: 63743 - RNA, 24 nt, Artificial Sequence
  Synthetic
uuugggaguagggccaagaaaacu

SEQ ID NO: 63744 - RNA, 18 nt, Artificial Sequence
  Synthetic
uauuuuauagagaaaacu

SEQ ID NO: 63745 - RNA, 19 nt, Artificial Sequence
  Synthetic
uuauuuuauagagaaaacu

SEQ ID NO: 63746 - RNA, 20 nt, Artificial Sequence
  Synthetic
cuuauuuuauagagaaaacu

SEQ ID NO: 63747 - RNA, 21 nt, Artificial Sequence
  Synthetic
ucuuauuuuauagagaaaacu

SEQ ID NO: 63748 - RNA, 23 nt, Artificial Sequence
  Synthetic
agucuuauuuuauagagaaaacu

SEQ ID NO: 63749 - RNA, 24 nt, Artificial Sequence
  Synthetic
aagucuuauuuuauagagaaaacu

SEQ ID NO: 63750 - RNA, 19 nt, Artificial Sequence
  Synthetic
ugcuguguacuggaaaacu

SEQ ID NO: 63751 - RNA, 20 nt, Artificial Sequence
  Synthetic
uugcuguguacuggaaaacu

SEQ ID NO: 63752 - RNA, 21 nt, Artificial Sequence
  Synthetic
cuugcuguguacuggaaaacu

SEQ ID NO: 63753 - RNA, 22 nt, Artificial Sequence
  Synthetic
ccuugcuguguacuggaaaacu

SEQ ID NO: 63754 - RNA, 23 nt, Artificial Sequence
  Synthetic
accuugcuguguacuggaaaacu

SEQ ID NO: 63755 - RNA, 24 nt, Artificial Sequence
  Synthetic
aaccuugcuguguacuggaaaacu

SEQ ID NO: 63756 - RNA, 18 nt, Artificial Sequence
  Synthetic
cauaaccagagacaaacu

SEQ ID NO: 63757 - RNA, 19 nt, Artificial Sequence
  Synthetic
ucauaaccagagacaaacu

SEQ ID NO: 63758 - RNA, 21 nt, Artificial Sequence
  Synthetic
ugucauaaccagagacaaacu

SEQ ID NO: 63759 - RNA, 22 nt, Artificial Sequence
  Synthetic
augucauaaccagagacaaacu

SEQ ID NO: 63760 - RNA, 23 nt, Artificial Sequence
  Synthetic
aaugucauaaccagagacaaacu

SEQ ID NO: 63761 - RNA, 24 nt, Artificial Sequence
  Synthetic
uaaugucauaaccagagacaaacu

SEQ ID NO: 63762 - RNA, 20 nt, Artificial Sequence
  Synthetic
aggaccacacgagacaaacu

SEQ ID NO: 63763 - RNA, 21 nt, Artificial Sequence
  Synthetic
caggaccacacgagacaaacu

SEQ ID NO: 63764 - RNA, 22 nt, Artificial Sequence
  Synthetic
acaggaccacacgagacaaacu

SEQ ID NO: 63765 - RNA, 23 nt, Artificial Sequence
  Synthetic
aacaggaccacacgagacaaacu

SEQ ID NO: 63766 - RNA, 18 nt, Artificial Sequence
  Synthetic
accauagaaauccaaacu

SEQ ID NO: 63767 - RNA, 19 nt, Artificial Sequence
  Synthetic
aaccauagaaauccaaacu

SEQ ID NO: 63768 - RNA, 21 nt, Artificial Sequence
  Synthetic
agaaccauagaaauccaaacu

SEQ ID NO: 63769 - RNA, 22 nt, Artificial Sequence
  Synthetic
uagaaccauagaaauccaaacu

SEQ ID NO: 63770 - RNA, 23 nt, Artificial Sequence
  Synthetic
uuagaaccauagaaauccaaacu

SEQ ID NO: 63771 - RNA, 24 nt, Artificial Sequence
  Synthetic
cuuagaaccauagaaauccaaacu

SEQ ID NO: 63772 - RNA, 19 nt, Artificial Sequence
  Synthetic
aguguucauuguccaaacu

SEQ ID NO: 63773 - RNA, 20 nt, Artificial Sequence
  Synthetic
uaguguucauuguccaaacu

SEQ ID NO: 63774 - RNA, 21 nt, Artificial Sequence
  Synthetic
cuaguguucauuguccaaacu

SEQ ID NO: 63775 - RNA, 23 nt, Artificial Sequence
  Synthetic
ugcuaguguucauuguccaaacu

SEQ ID NO: 63776 - RNA, 24 nt, Artificial Sequence
  Synthetic
augcuaguguucauuguccaaacu

SEQ ID NO: 63777 - RNA, 18 nt, Artificial Sequence
  Synthetic
agacuuaacuuccaaacu

SEQ ID NO: 63778 - RNA, 19 nt, Artificial Sequence
  Synthetic
uagacuuaacuuccaaacu

SEQ ID NO: 63779 - RNA, 20 nt, Artificial Sequence
  Synthetic
auagacuuaacuuccaaacu

SEQ ID NO: 63780 - RNA, 21 nt, Artificial Sequence
  Synthetic
aauagacuuaacuuccaaacu

SEQ ID NO: 63781 - RNA, 22 nt, Artificial Sequence
  Synthetic
aaauagacuuaacuuccaaacu

SEQ ID NO: 63782 - RNA, 23 nt, Artificial Sequence
  Synthetic
aaaauagacuuaacuuccaaacu

SEQ ID NO: 63783 - RNA, 24 nt, Artificial Sequence
  Synthetic
aaaaauagacuuaacuuccaaacu

SEQ ID NO: 63784 - RNA, 18 nt, Artificial Sequence
  Synthetic
cucaaauguagucaaacu

SEQ ID NO: 63785 - RNA, 19 nt, Artificial Sequence
  Synthetic
ucucaaauguagucaaacu

SEQ ID NO: 63786 - RNA, 21 nt, Artificial Sequence
  Synthetic
ugucucaaauguagucaaacu

SEQ ID NO: 63787 - RNA, 22 nt, Artificial Sequence
  Synthetic
cugucucaaauguagucaaacu

SEQ ID NO: 63788 - RNA, 23 nt, Artificial Sequence
  Synthetic
ucugucucaaauguagucaaacu

SEQ ID NO: 63789 - RNA, 24 nt, Artificial Sequence
  Synthetic
aucugucucaaauguagucaaacu

SEQ ID NO: 63790 - RNA, 18 nt, Artificial Sequence
  Synthetic
uuaugcguguuucaaacu

SEQ ID NO: 63791 - RNA, 19 nt, Artificial Sequence
  Synthetic
uuuaugcguguuucaaacu

SEQ ID NO: 63792 - RNA, 20 nt, Artificial Sequence
  Synthetic
uuuuaugcguguuucaaacu

SEQ ID NO: 63793 - RNA, 21 nt, Artificial Sequence
  Synthetic
auuuuaugcguguuucaaacu

SEQ ID NO: 63794 - RNA, 22 nt, Artificial Sequence
  Synthetic
uauuuuaugcguguuucaaacu

SEQ ID NO: 63795 - RNA, 24 nt, Artificial Sequence
  Synthetic
uguauuuuaugcguguuucaaacu

SEQ ID NO: 63796 - RNA, 21 nt, Artificial Sequence
  Synthetic
uauuuccaagauggagaaacu

SEQ ID NO: 63797 - RNA, 22 nt, Artificial Sequence
  Synthetic
uuauuuccaagauggagaaacu

SEQ ID NO: 63798 - RNA, 23 nt, Artificial Sequence
  Synthetic
cuuauuuccaagauggagaaacu

SEQ ID NO: 63799 - RNA, 24 nt, Artificial Sequence
  Synthetic
ucuuauuuccaagauggagaaacu

SEQ ID NO: 63800 - RNA, 18 nt, Artificial Sequence
  Synthetic
uauugcagaugagaaacu

SEQ ID NO: 63801 - RNA, 19 nt, Artificial Sequence
  Synthetic
auauugcagaugagaaacu

SEQ ID NO: 63802 - RNA, 21 nt, Artificial Sequence
  Synthetic
agauauugcagaugagaaacu

SEQ ID NO: 63803 - RNA, 22 nt, Artificial Sequence
  Synthetic
uagauauugcagaugagaaacu

SEQ ID NO: 63804 - RNA, 23 nt, Artificial Sequence
  Synthetic
auagauauugcagaugagaaacu

SEQ ID NO: 63805 - RNA, 24 nt, Artificial Sequence
  Synthetic
aauagauauugcagaugagaaacu

SEQ ID NO: 63806 - RNA, 18 nt, Artificial Sequence
  Synthetic
uaaagcaucaaggaaacu

SEQ ID NO: 63807 - RNA, 19 nt, Artificial Sequence
  Synthetic
cuaaagcaucaaggaaacu

SEQ ID NO: 63808 - RNA, 20 nt, Artificial Sequence
  Synthetic
ccuaaagcaucaaggaaacu

SEQ ID NO: 63809 - RNA, 21 nt, Artificial Sequence
  Synthetic
uccuaaagcaucaaggaaacu

SEQ ID NO: 63810 - RNA, 22 nt, Artificial Sequence
  Synthetic
cuccuaaagcaucaaggaaacu

SEQ ID NO: 63811 - RNA, 23 nt, Artificial Sequence
  Synthetic
acuccuaaagcaucaaggaaacu

SEQ ID NO: 63812 - RNA, 24 nt, Artificial Sequence
  Synthetic
uacuccuaaagcaucaaggaaacu

SEQ ID NO: 63813 - RNA, 18 nt, Artificial Sequence
  Synthetic
aaaucuaggcuugaaacu

SEQ ID NO: 63814 - RNA, 19 nt, Artificial Sequence
  Synthetic
caaaucuaggcuugaaacu

SEQ ID NO: 63815 - RNA, 20 nt, Artificial Sequence
  Synthetic
acaaaucuaggcuugaaacu

SEQ ID NO: 63816 - RNA, 21 nt, Artificial Sequence
  Synthetic
cacaaaucuaggcuugaaacu

SEQ ID NO: 63817 - RNA, 22 nt, Artificial Sequence
  Synthetic
ccacaaaucuaggcuugaaacu

SEQ ID NO: 63818 - RNA, 23 nt, Artificial Sequence
  Synthetic
uccacaaaucuaggcuugaaacu

SEQ ID NO: 63819 - RNA, 24 nt, Artificial Sequence
  Synthetic
uuccacaaaucuaggcuugaaacu

SEQ ID NO: 63820 - RNA, 18 nt, Artificial Sequence
  Synthetic
cugccaauaguauaaacu

SEQ ID NO: 63821 - RNA, 19 nt, Artificial Sequence
  Synthetic
acugccaauaguauaaacu

SEQ ID NO: 63822 - RNA, 20 nt, Artificial Sequence
  Synthetic
uacugccaauaguauaaacu

SEQ ID NO: 63823 - RNA, 21 nt, Artificial Sequence
  Synthetic
cuacugccaauaguauaaacu

SEQ ID NO: 63824 - RNA, 22 nt, Artificial Sequence
  Synthetic
acuacugccaauaguauaaacu

SEQ ID NO: 63825 - RNA, 23 nt, Artificial Sequence
  Synthetic
uacuacugccaauaguauaaacu

SEQ ID NO: 63826 - RNA, 24 nt, Artificial Sequence
  Synthetic
uuacuacugccaauaguauaaacu

SEQ ID NO: 63827 - RNA, 18 nt, Artificial Sequence
  Synthetic
caauaaucuaguuaaacu

SEQ ID NO: 63828 - RNA, 20 nt, Artificial Sequence
  Synthetic
agcaauaaucuaguuaaacu

SEQ ID NO: 63829 - RNA, 21 nt, Artificial Sequence
  Synthetic
uagcaauaaucuaguuaaacu

SEQ ID NO: 63830 - RNA, 22 nt, Artificial Sequence
  Synthetic
uuagcaauaaucuaguuaaacu

SEQ ID NO: 63831 - RNA, 23 nt, Artificial Sequence
  Synthetic
uuuagcaauaaucuaguuaaacu

SEQ ID NO: 63832 - RNA, 24 nt, Artificial Sequence
  Synthetic
auuuagcaauaaucuaguuaaacu

SEQ ID NO: 63833 - RNA, 21 nt, Artificial Sequence
  Synthetic
ugaacaaagccuuuuuaaacu

SEQ ID NO: 63834 - RNA, 23 nt, Artificial Sequence
  Synthetic
cgugaacaaagccuuuuuaaacu

SEQ ID NO: 63835 - RNA, 24 nt, Artificial Sequence
  Synthetic
acgugaacaaagccuuuuuaaacu

SEQ ID NO: 63836 - RNA, 21 nt, Artificial Sequence
  Synthetic
ucaacacuuuggaaaacaacu

SEQ ID NO: 63837 - RNA, 22 nt, Artificial Sequence
  Synthetic
aucaacacuuuggaaaacaacu

SEQ ID NO: 63838 - RNA, 23 nt, Artificial Sequence
  Synthetic
uaucaacacuuuggaaaacaacu

SEQ ID NO: 63839 - RNA, 24 nt, Artificial Sequence
  Synthetic
uuaucaacacuuuggaaaacaacu

SEQ ID NO: 63840 - RNA, 18 nt, Artificial Sequence
  Synthetic
uacguagggcaaccaacu

SEQ ID NO: 63841 - RNA, 19 nt, Artificial Sequence
  Synthetic
uuacguagggcaaccaacu

SEQ ID NO: 63842 - RNA, 20 nt, Artificial Sequence
  Synthetic
uuuacguagggcaaccaacu

SEQ ID NO: 63843 - RNA, 21 nt, Artificial Sequence
  Synthetic
cuuuacguagggcaaccaacu

SEQ ID NO: 63844 - RNA, 22 nt, Artificial Sequence
  Synthetic
acuuuacguagggcaaccaacu

SEQ ID NO: 63845 - RNA, 23 nt, Artificial Sequence
  Synthetic
cacuuuacguagggcaaccaacu

SEQ ID NO: 63846 - RNA, 24 nt, Artificial Sequence
  Synthetic
acacuuuacguagggcaaccaacu

SEQ ID NO: 63847 - RNA, 18 nt, Artificial Sequence
  Synthetic
uucugaugacucccaacu

SEQ ID NO: 63848 - RNA, 19 nt, Artificial Sequence
  Synthetic
auucugaugacucccaacu

SEQ ID NO: 63849 - RNA, 20 nt, Artificial Sequence
  Synthetic
cauucugaugacucccaacu

SEQ ID NO: 63850 - RNA, 21 nt, Artificial Sequence
  Synthetic
ccauucugaugacucccaacu

SEQ ID NO: 63851 - RNA, 22 nt, Artificial Sequence
  Synthetic
cccauucugaugacucccaacu

SEQ ID NO: 63852 - RNA, 23 nt, Artificial Sequence
  Synthetic
ccccauucugaugacucccaacu

SEQ ID NO: 63853 - RNA, 24 nt, Artificial Sequence
  Synthetic
uccccauucugaugacucccaacu

SEQ ID NO: 63854 - RNA, 18 nt, Artificial Sequence
  Synthetic
auguaagcucucccaacu

SEQ ID NO: 63855 - RNA, 19 nt, Artificial Sequence
  Synthetic
cauguaagcucucccaacu

SEQ ID NO: 63856 - RNA, 20 nt, Artificial Sequence
  Synthetic
acauguaagcucucccaacu

SEQ ID NO: 63857 - RNA, 21 nt, Artificial Sequence
  Synthetic
aacauguaagcucucccaacu

SEQ ID NO: 63858 - RNA, 22 nt, Artificial Sequence
  Synthetic
aaacauguaagcucucccaacu

SEQ ID NO: 63859 - RNA, 23 nt, Artificial Sequence
  Synthetic
aaaacauguaagcucucccaacu

SEQ ID NO: 63860 - RNA, 24 nt, Artificial Sequence
  Synthetic
caaaacauguaagcucucccaacu

SEQ ID NO: 63861 - RNA, 19 nt, Artificial Sequence
  Synthetic
agacauacagagcucaacu

SEQ ID NO: 63862 - RNA, 20 nt, Artificial Sequence
  Synthetic
cagacauacagagcucaacu

SEQ ID NO: 63863 - RNA, 21 nt, Artificial Sequence
  Synthetic
ucagacauacagagcucaacu

SEQ ID NO: 63864 - RNA, 22 nt, Artificial Sequence
  Synthetic
aucagacauacagagcucaacu

SEQ ID NO: 63865 - RNA, 23 nt, Artificial Sequence
  Synthetic
aaucagacauacagagcucaacu

SEQ ID NO: 63866 - RNA, 24 nt, Artificial Sequence
  Synthetic
aaaucagacauacagagcucaacu

SEQ ID NO: 63867 - RNA, 19 nt, Artificial Sequence
  Synthetic
ugccuucagaguuucaacu

SEQ ID NO: 63868 - RNA, 20 nt, Artificial Sequence
  Synthetic
augccuucagaguuucaacu

SEQ ID NO: 63869 - RNA, 21 nt, Artificial Sequence
  Synthetic
aaugccuucagaguuucaacu

SEQ ID NO: 63870 - RNA, 22 nt, Artificial Sequence
  Synthetic
aaaugccuucagaguuucaacu

SEQ ID NO: 63871 - RNA, 23 nt, Artificial Sequence
  Synthetic
aaaaugccuucagaguuucaacu

SEQ ID NO: 63872 - RNA, 18 nt, Artificial Sequence
  Synthetic
ccagcccaauaaagaacu

SEQ ID NO: 63873 - RNA, 19 nt, Artificial Sequence
  Synthetic
cccagcccaauaaagaacu

SEQ ID NO: 63874 - RNA, 21 nt, Artificial Sequence
  Synthetic
cgcccagcccaauaaagaacu

SEQ ID NO: 63875 - RNA, 22 nt, Artificial Sequence
  Synthetic
acgcccagcccaauaaagaacu

SEQ ID NO: 63876 - RNA, 23 nt, Artificial Sequence
  Synthetic
cacgcccagcccaauaaagaacu

SEQ ID NO: 63877 - RNA, 24 nt, Artificial Sequence
  Synthetic
ccacgcccagcccaauaaagaacu

SEQ ID NO: 63878 - RNA, 18 nt, Artificial Sequence
  Synthetic
auaucaagcauaagaacu

SEQ ID NO: 63879 - RNA, 19 nt, Artificial Sequence
  Synthetic
uauaucaagcauaagaacu

SEQ ID NO: 63880 - RNA, 21 nt, Artificial Sequence
  Synthetic
aguauaucaagcauaagaacu

SEQ ID NO: 63881 - RNA, 22 nt, Artificial Sequence
  Synthetic
aaguauaucaagcauaagaacu

SEQ ID NO: 63882 - RNA, 23 nt, Artificial Sequence
  Synthetic
aaaguauaucaagcauaagaacu

SEQ ID NO: 63883 - RNA, 24 nt, Artificial Sequence
  Synthetic
uaaaguauaucaagcauaagaacu

SEQ ID NO: 63884 - RNA, 18 nt, Artificial Sequence
  Synthetic
aaauccaucuccagaacu

SEQ ID NO: 63885 - RNA, 19 nt, Artificial Sequence
  Synthetic
uaaauccaucuccagaacu

SEQ ID NO: 63886 - RNA, 20 nt, Artificial Sequence
  Synthetic
cuaaauccaucuccagaacu

SEQ ID NO: 63887 - RNA, 21 nt, Artificial Sequence
  Synthetic
ucuaaauccaucuccagaacu

SEQ ID NO: 63888 - RNA, 22 nt, Artificial Sequence
  Synthetic
aucuaaauccaucuccagaacu

SEQ ID NO: 63889 - RNA, 23 nt, Artificial Sequence
  Synthetic
aaucuaaauccaucuccagaacu

SEQ ID NO: 63890 - RNA, 18 nt, Artificial Sequence
  Synthetic
cucuguuucuauagaacu

SEQ ID NO: 63891 - RNA, 20 nt, Artificial Sequence
  Synthetic
ugcucuguuucuauagaacu

SEQ ID NO: 63892 - RNA, 21 nt, Artificial Sequence
  Synthetic
uugcucuguuucuauagaacu

SEQ ID NO: 63893 - RNA, 22 nt, Artificial Sequence
  Synthetic
auugcucuguuucuauagaacu

SEQ ID NO: 63894 - RNA, 23 nt, Artificial Sequence
  Synthetic
cauugcucuguuucuauagaacu

SEQ ID NO: 63895 - RNA, 24 nt, Artificial Sequence
  Synthetic
ccauugcucuguuucuauagaacu

SEQ ID NO: 63896 - RNA, 18 nt, Artificial Sequence
  Synthetic
auggugucagaaggaacu

SEQ ID NO: 63897 - RNA, 19 nt, Artificial Sequence
  Synthetic
cauggugucagaaggaacu

SEQ ID NO: 63898 - RNA, 21 nt, Artificial Sequence
  Synthetic
agcauggugucagaaggaacu

SEQ ID NO: 63899 - RNA, 22 nt, Artificial Sequence
  Synthetic
aagcauggugucagaaggaacu

SEQ ID NO: 63900 - RNA, 23 nt, Artificial Sequence
  Synthetic
aaagcauggugucagaaggaacu

SEQ ID NO: 63901 - RNA, 18 nt, Artificial Sequence
  Synthetic
uuaggguucaggggaacu

SEQ ID NO: 63902 - RNA, 19 nt, Artificial Sequence
  Synthetic
uuuaggguucaggggaacu

SEQ ID NO: 63903 - RNA, 20 nt, Artificial Sequence
  Synthetic
uuuuaggguucaggggaacu

SEQ ID NO: 63904 - RNA, 21 nt, Artificial Sequence
  Synthetic
auuuuaggguucaggggaacu

SEQ ID NO: 63905 - RNA, 22 nt, Artificial Sequence
  Synthetic
uauuuuaggguucaggggaacu

SEQ ID NO: 63906 - RNA, 24 nt, Artificial Sequence
  Synthetic
aguauuuuaggguucaggggaacu

SEQ ID NO: 63907 - RNA, 18 nt, Artificial Sequence
  Synthetic
cugggcgaagggggaacu

SEQ ID NO: 63908 - RNA, 18 nt, Artificial Sequence
  Synthetic
cucacucucuggggaacu

SEQ ID NO: 63909 - RNA, 19 nt, Artificial Sequence
  Synthetic
ucucacucucuggggaacu

SEQ ID NO: 63910 - RNA, 20 nt, Artificial Sequence
  Synthetic
cucucacucucuggggaacu

SEQ ID NO: 63911 - RNA, 21 nt, Artificial Sequence
  Synthetic
ucucucacucucuggggaacu

SEQ ID NO: 63912 - RNA, 22 nt, Artificial Sequence
  Synthetic
cucucucacucucuggggaacu

SEQ ID NO: 63913 - RNA, 23 nt, Artificial Sequence
  Synthetic
ucucucucacucucuggggaacu

SEQ ID NO: 63914 - RNA, 24 nt, Artificial Sequence
  Synthetic
cucucucucacucucuggggaacu

SEQ ID NO: 63915 - RNA, 19 nt, Artificial Sequence
  Synthetic
ugaauugcaaucuggaacu

SEQ ID NO: 63916 - RNA, 20 nt, Artificial Sequence
  Synthetic
augaauugcaaucuggaacu

SEQ ID NO: 63917 - RNA, 22 nt, Artificial Sequence
  Synthetic
agaugaauugcaaucuggaacu

SEQ ID NO: 63918 - RNA, 23 nt, Artificial Sequence
  Synthetic
uagaugaauugcaaucuggaacu

SEQ ID NO: 63919 - RNA, 24 nt, Artificial Sequence
  Synthetic
auagaugaauugcaaucuggaacu

SEQ ID NO: 63920 - RNA, 18 nt, Artificial Sequence
  Synthetic
ugguaucugaugugaacu

SEQ ID NO: 63921 - RNA, 19 nt, Artificial Sequence
  Synthetic
augguaucugaugugaacu

SEQ ID NO: 63922 - RNA, 20 nt, Artificial Sequence
  Synthetic
aaugguaucugaugugaacu

SEQ ID NO: 63923 - RNA, 21 nt, Artificial Sequence
  Synthetic
uaaugguaucugaugugaacu

SEQ ID NO: 63924 - RNA, 22 nt, Artificial Sequence
  Synthetic
uuaaugguaucugaugugaacu

SEQ ID NO: 63925 - RNA, 23 nt, Artificial Sequence
  Synthetic
cuuaaugguaucugaugugaacu

SEQ ID NO: 63926 - RNA, 24 nt, Artificial Sequence
  Synthetic
acuuaaugguaucugaugugaacu

SEQ ID NO: 63927 - RNA, 18 nt, Artificial Sequence
  Synthetic
caaaacagauuuugaacu

SEQ ID NO: 63928 - RNA, 19 nt, Artificial Sequence
  Synthetic
ccaaaacagauuuugaacu

SEQ ID NO: 63929 - RNA, 24 nt, Artificial Sequence
  Synthetic
uggggccaaaacagauuuugaacu

SEQ ID NO: 63930 - RNA, 18 nt, Artificial Sequence
  Synthetic
cgauuuauaaaaauaacu

SEQ ID NO: 63931 - RNA, 19 nt, Artificial Sequence
  Synthetic
ucgauuuauaaaaauaacu

SEQ ID NO: 63932 - RNA, 20 nt, Artificial Sequence
  Synthetic
uucgauuuauaaaaauaacu

SEQ ID NO: 63933 - RNA, 21 nt, Artificial Sequence
  Synthetic
auucgauuuauaaaaauaacu

SEQ ID NO: 63934 - RNA, 22 nt, Artificial Sequence
  Synthetic
uauucgauuuauaaaaauaacu

SEQ ID NO: 63935 - RNA, 23 nt, Artificial Sequence
  Synthetic
uuauucgauuuauaaaaauaacu

SEQ ID NO: 63936 - RNA, 24 nt, Artificial Sequence
  Synthetic
cuuauucgauuuauaaaaauaacu

SEQ ID NO: 63937 - RNA, 18 nt, Artificial Sequence
  Synthetic
agugaugauagaauaacu

SEQ ID NO: 63938 - RNA, 19 nt, Artificial Sequence
  Synthetic
aagugaugauagaauaacu

SEQ ID NO: 63939 - RNA, 21 nt, Artificial Sequence
  Synthetic
ugaagugaugauagaauaacu

SEQ ID NO: 63940 - RNA, 22 nt, Artificial Sequence
  Synthetic
augaagugaugauagaauaacu

SEQ ID NO: 63941 - RNA, 23 nt, Artificial Sequence
  Synthetic
uaugaagugaugauagaauaacu

SEQ ID NO: 63942 - RNA, 24 nt, Artificial Sequence
  Synthetic
uuaugaagugaugauagaauaacu

SEQ ID NO: 63943 - RNA, 18 nt, Artificial Sequence
  Synthetic
acaaauaagcacauaacu

SEQ ID NO: 63944 - RNA, 19 nt, Artificial Sequence
  Synthetic
aacaaauaagcacauaacu

SEQ ID NO: 63945 - RNA, 20 nt, Artificial Sequence
  Synthetic
uaacaaauaagcacauaacu

SEQ ID NO: 63946 - RNA, 21 nt, Artificial Sequence
  Synthetic
uuaacaaauaagcacauaacu

SEQ ID NO: 63947 - RNA, 22 nt, Artificial Sequence
  Synthetic
uuuaacaaauaagcacauaacu

SEQ ID NO: 63948 - RNA, 24 nt, Artificial Sequence
  Synthetic
uguuuaacaaauaagcacauaacu

SEQ ID NO: 63949 - RNA, 18 nt, Artificial Sequence
  Synthetic
ucuuucagugucauaacu

SEQ ID NO: 63950 - RNA, 20 nt, Artificial Sequence
  Synthetic
ugucuuucagugucauaacu

SEQ ID NO: 63951 - RNA, 21 nt, Artificial Sequence
  Synthetic
augucuuucagugucauaacu

SEQ ID NO: 63952 - RNA, 22 nt, Artificial Sequence
  Synthetic
caugucuuucagugucauaacu

SEQ ID NO: 63953 - RNA, 23 nt, Artificial Sequence
  Synthetic
ucaugucuuucagugucauaacu

SEQ ID NO: 63954 - RNA, 24 nt, Artificial Sequence
  Synthetic
aucaugucuuucagugucauaacu

SEQ ID NO: 63955 - RNA, 19 nt, Artificial Sequence
  Synthetic
ugccuacuccuguauaacu

SEQ ID NO: 63956 - RNA, 22 nt, Artificial Sequence
  Synthetic
aggugccuacuccuguauaacu

SEQ ID NO: 63957 - RNA, 23 nt, Artificial Sequence
  Synthetic
caggugccuacuccuguauaacu

SEQ ID NO: 63958 - RNA, 18 nt, Artificial Sequence
  Synthetic
cuuaaagaacuuauaacu

SEQ ID NO: 63959 - RNA, 19 nt, Artificial Sequence
  Synthetic
ucuuaaagaacuuauaacu

SEQ ID NO: 63960 - RNA, 20 nt, Artificial Sequence
  Synthetic
cucuuaaagaacuuauaacu

SEQ ID NO: 63961 - RNA, 21 nt, Artificial Sequence
  Synthetic
ucucuuaaagaacuuauaacu

SEQ ID NO: 63962 - RNA, 22 nt, Artificial Sequence
  Synthetic
aucucuuaaagaacuuauaacu

SEQ ID NO: 63963 - RNA, 23 nt, Artificial Sequence
  Synthetic
uaucucuuaaagaacuuauaacu

SEQ ID NO: 63964 - RNA, 24 nt, Artificial Sequence
  Synthetic
auaucucuuaaagaacuuauaacu

SEQ ID NO: 63965 - RNA, 18 nt, Artificial Sequence
  Synthetic
uuauugcuauuuauaacu

SEQ ID NO: 63966 - RNA, 19 nt, Artificial Sequence
  Synthetic
uuuauugcuauuuauaacu

SEQ ID NO: 63967 - RNA, 20 nt, Artificial Sequence
  Synthetic
uuuuauugcuauuuauaacu

SEQ ID NO: 63968 - RNA, 21 nt, Artificial Sequence
  Synthetic
auuuuauugcuauuuauaacu

SEQ ID NO: 63969 - RNA, 22 nt, Artificial Sequence
  Synthetic
aauuuuauugcuauuuauaacu

SEQ ID NO: 63970 - RNA, 23 nt, Artificial Sequence
  Synthetic
aaauuuuauugcuauuuauaacu

SEQ ID NO: 63971 - RNA, 24 nt, Artificial Sequence
  Synthetic
uaaauuuuauugcuauuuauaacu

SEQ ID NO: 63972 - RNA, 18 nt, Artificial Sequence
  Synthetic
agguacccaagucuaacu

SEQ ID NO: 63973 - RNA, 20 nt, Artificial Sequence
  Synthetic
agagguacccaagucuaacu

SEQ ID NO: 63974 - RNA, 21 nt, Artificial Sequence
  Synthetic
aagagguacccaagucuaacu

SEQ ID NO: 63975 - RNA, 24 nt, Artificial Sequence
  Synthetic
uggaagagguacccaagucuaacu

SEQ ID NO: 63976 - RNA, 18 nt, Artificial Sequence
  Synthetic
uaaaacuaaugucuaacu

SEQ ID NO: 63977 - RNA, 19 nt, Artificial Sequence
  Synthetic
auaaaacuaaugucuaacu

SEQ ID NO: 63978 - RNA, 20 nt, Artificial Sequence
  Synthetic
aauaaaacuaaugucuaacu

SEQ ID NO: 63979 - RNA, 23 nt, Artificial Sequence
  Synthetic
uggaauaaaacuaaugucuaacu

SEQ ID NO: 63980 - RNA, 24 nt, Artificial Sequence
  Synthetic
cuggaauaaaacuaaugucuaacu

SEQ ID NO: 63981 - RNA, 18 nt, Artificial Sequence
  Synthetic
ccacagguauuucuaacu

SEQ ID NO: 63982 - RNA, 19 nt, Artificial Sequence
  Synthetic
uccacagguauuucuaacu

SEQ ID NO: 63983 - RNA, 20 nt, Artificial Sequence
  Synthetic
uuccacagguauuucuaacu

SEQ ID NO: 63984 - RNA, 22 nt, Artificial Sequence
  Synthetic
uguuccacagguauuucuaacu

SEQ ID NO: 63985 - RNA, 23 nt, Artificial Sequence
  Synthetic
auguuccacagguauuucuaacu

SEQ ID NO: 63986 - RNA, 18 nt, Artificial Sequence
  Synthetic
aagaaauaagcauuaacu

SEQ ID NO: 63987 - RNA, 19 nt, Artificial Sequence
  Synthetic
caagaaauaagcauuaacu

SEQ ID NO: 63988 - RNA, 20 nt, Artificial Sequence
  Synthetic
acaagaaauaagcauuaacu

SEQ ID NO: 63989 - RNA, 21 nt, Artificial Sequence
  Synthetic
aacaagaaauaagcauuaacu

SEQ ID NO: 63990 - RNA, 22 nt, Artificial Sequence
  Synthetic
aaacaagaaauaagcauuaacu

SEQ ID NO: 63991 - RNA, 23 nt, Artificial Sequence
  Synthetic
uaaacaagaaauaagcauuaacu

SEQ ID NO: 63992 - RNA, 24 nt, Artificial Sequence
  Synthetic
uuaaacaagaaauaagcauuaacu

SEQ ID NO: 63993 - RNA, 18 nt, Artificial Sequence
  Synthetic
caauucgguugauuaacu

SEQ ID NO: 63994 - RNA, 19 nt, Artificial Sequence
  Synthetic
ucaauucgguugauuaacu

SEQ ID NO: 63995 - RNA, 23 nt, Artificial Sequence
  Synthetic
ugggucaauucgguugauuaacu

SEQ ID NO: 63996 - RNA, 24 nt, Artificial Sequence
  Synthetic
cugggucaauucgguugauuaacu

SEQ ID NO: 63997 - RNA, 19 nt, Artificial Sequence
  Synthetic
aggacacauucuaaacacu

SEQ ID NO: 63998 - RNA, 20 nt, Artificial Sequence
  Synthetic
caggacacauucuaaacacu

SEQ ID NO: 63999 - RNA, 21 nt, Artificial Sequence
  Synthetic
ccaggacacauucuaaacacu

SEQ ID NO: 64000 - RNA, 23 nt, Artificial Sequence
  Synthetic
ugccaggacacauucuaaacacu

SEQ ID NO: 64001 - RNA, 18 nt, Artificial Sequence
  Synthetic
uaagugguaaagaacacu

SEQ ID NO: 64002 - RNA, 20 nt, Artificial Sequence
  Synthetic
cguaagugguaaagaacacu

SEQ ID NO: 64003 - RNA, 21 nt, Artificial Sequence
  Synthetic
acguaagugguaaagaacacu

SEQ ID NO: 64004 - RNA, 22 nt, Artificial Sequence
  Synthetic
cacguaagugguaaagaacacu

SEQ ID NO: 64005 - RNA, 23 nt, Artificial Sequence
  Synthetic
ucacguaagugguaaagaacacu

SEQ ID NO: 64006 - RNA, 24 nt, Artificial Sequence
  Synthetic
aucacguaagugguaaagaacacu

SEQ ID NO: 64007 - RNA, 18 nt, Artificial Sequence
  Synthetic
uuacugcugaagaacacu

SEQ ID NO: 64008 - RNA, 20 nt, Artificial Sequence
  Synthetic
aguuacugcugaagaacacu

SEQ ID NO: 64009 - RNA, 22 nt, Artificial Sequence
  Synthetic
ugaguuacugcugaagaacacu

SEQ ID NO: 64010 - RNA, 23 nt, Artificial Sequence
  Synthetic
cugaguuacugcugaagaacacu

SEQ ID NO: 64011 - RNA, 24 nt, Artificial Sequence
  Synthetic
ucugaguuacugcugaagaacacu

SEQ ID NO: 64012 - RNA, 19 nt, Artificial Sequence
  Synthetic
agcuccaacuugccacacu

SEQ ID NO: 64013 - RNA, 20 nt, Artificial Sequence
  Synthetic
uagcuccaacuugccacacu

SEQ ID NO: 64014 - RNA, 21 nt, Artificial Sequence
  Synthetic
uuagcuccaacuugccacacu

SEQ ID NO: 64015 - RNA, 22 nt, Artificial Sequence
  Synthetic
cuuagcuccaacuugccacacu

SEQ ID NO: 64016 - RNA, 23 nt, Artificial Sequence
  Synthetic
ccuuagcuccaacuugccacacu

SEQ ID NO: 64017 - RNA, 19 nt, Artificial Sequence
  Synthetic
ugcagcuuuacuccacacu

SEQ ID NO: 64018 - RNA, 20 nt, Artificial Sequence
  Synthetic
cugcagcuuuacuccacacu

SEQ ID NO: 64019 - RNA, 22 nt, Artificial Sequence
  Synthetic
agcugcagcuuuacuccacacu

SEQ ID NO: 64020 - RNA, 23 nt, Artificial Sequence
  Synthetic
cagcugcagcuuuacuccacacu

SEQ ID NO: 64021 - RNA, 24 nt, Artificial Sequence
  Synthetic
ucagcugcagcuuuacuccacacu

SEQ ID NO: 64022 - RNA, 18 nt, Artificial Sequence
  Synthetic
cagucucuggcgcacacu

SEQ ID NO: 64023 - RNA, 19 nt, Artificial Sequence
  Synthetic
ucagucucuggcgcacacu

SEQ ID NO: 64024 - RNA, 21 nt, Artificial Sequence
  Synthetic
ugucagucucuggcgcacacu

SEQ ID NO: 64025 - RNA, 22 nt, Artificial Sequence
  Synthetic
cugucagucucuggcgcacacu

SEQ ID NO: 64026 - RNA, 24 nt, Artificial Sequence
  Synthetic
ugcugucagucucuggcgcacacu

SEQ ID NO: 64027 - RNA, 18 nt, Artificial Sequence
  Synthetic
aauguugaauuugacacu

SEQ ID NO: 64028 - RNA, 19 nt, Artificial Sequence
  Synthetic
aaauguugaauuugacacu

SEQ ID NO: 64029 - RNA, 20 nt, Artificial Sequence
  Synthetic
uaaauguugaauuugacacu

SEQ ID NO: 64030 - RNA, 21 nt, Artificial Sequence
  Synthetic
cuaaauguugaauuugacacu

SEQ ID NO: 64031 - RNA, 22 nt, Artificial Sequence
  Synthetic
ccuaaauguugaauuugacacu

SEQ ID NO: 64032 - RNA, 24 nt, Artificial Sequence
  Synthetic
agccuaaauguugaauuugacacu

SEQ ID NO: 64033 - RNA, 18 nt, Artificial Sequence
  Synthetic
aagguauagaaauacacu

SEQ ID NO: 64034 - RNA, 19 nt, Artificial Sequence
  Synthetic
uaagguauagaaauacacu

SEQ ID NO: 64035 - RNA, 21 nt, Artificial Sequence
  Synthetic
uguaagguauagaaauacacu

SEQ ID NO: 64036 - RNA, 22 nt, Artificial Sequence
  Synthetic
uuguaagguauagaaauacacu

SEQ ID NO: 64037 - RNA, 23 nt, Artificial Sequence
  Synthetic
uuuguaagguauagaaauacacu

SEQ ID NO: 64038 - RNA, 24 nt, Artificial Sequence
  Synthetic
cuuuguaagguauagaaauacacu

SEQ ID NO: 64039 - RNA, 18 nt, Artificial Sequence
  Synthetic
caccacaucuggaccacu

SEQ ID NO: 64040 - RNA, 19 nt, Artificial Sequence
  Synthetic
acaccacaucuggaccacu

SEQ ID NO: 64041 - RNA, 20 nt, Artificial Sequence
  Synthetic
aacaccacaucuggaccacu

SEQ ID NO: 64042 - RNA, 21 nt, Artificial Sequence
  Synthetic
uaacaccacaucuggaccacu

SEQ ID NO: 64043 - RNA, 22 nt, Artificial Sequence
  Synthetic
uuaacaccacaucuggaccacu

SEQ ID NO: 64044 - RNA, 23 nt, Artificial Sequence
  Synthetic
cuuaacaccacaucuggaccacu

SEQ ID NO: 64045 - RNA, 19 nt, Artificial Sequence
  Synthetic
uggugaaaucugacccacu

SEQ ID NO: 64046 - RNA, 20 nt, Artificial Sequence
  Synthetic
uuggugaaaucugacccacu

SEQ ID NO: 64047 - RNA, 21 nt, Artificial Sequence
  Synthetic
cuuggugaaaucugacccacu

SEQ ID NO: 64048 - RNA, 22 nt, Artificial Sequence
  Synthetic
ucuuggugaaaucugacccacu

SEQ ID NO: 64049 - RNA, 18 nt, Artificial Sequence
  Synthetic
acucccaagcuccccacu

SEQ ID NO: 64050 - RNA, 19 nt, Artificial Sequence
  Synthetic
cacucccaagcuccccacu

SEQ ID NO: 64051 - RNA, 20 nt, Artificial Sequence
  Synthetic
ucacucccaagcuccccacu

SEQ ID NO: 64052 - RNA, 21 nt, Artificial Sequence
  Synthetic
cucacucccaagcuccccacu

SEQ ID NO: 64053 - RNA, 22 nt, Artificial Sequence
  Synthetic
ccucacucccaagcuccccacu

SEQ ID NO: 64054 - RNA, 23 nt, Artificial Sequence
  Synthetic
accucacucccaagcuccccacu

SEQ ID NO: 64055 - RNA, 24 nt, Artificial Sequence
  Synthetic
uaccucacucccaagcuccccacu

SEQ ID NO: 64056 - RNA, 18 nt, Artificial Sequence
  Synthetic
aagccuccucaucccacu

SEQ ID NO: 64057 - RNA, 19 nt, Artificial Sequence
  Synthetic
aaagccuccucaucccacu

SEQ ID NO: 64058 - RNA, 22 nt, Artificial Sequence
  Synthetic
aggaaagccuccucaucccacu

SEQ ID NO: 64059 - RNA, 19 nt, Artificial Sequence
  Synthetic
uguacuugcaucucccacu

SEQ ID NO: 64060 - RNA, 22 nt, Artificial Sequence
  Synthetic
agguguacuugcaucucccacu

SEQ ID NO: 64061 - RNA, 23 nt, Artificial Sequence
  Synthetic
aagguguacuugcaucucccacu

SEQ ID NO: 64062 - RNA, 24 nt, Artificial Sequence
  Synthetic
caagguguacuugcaucucccacu

SEQ ID NO: 64063 - RNA, 18 nt, Artificial Sequence
  Synthetic
cauaguugaagucccacu

SEQ ID NO: 64064 - RNA, 19 nt, Artificial Sequence
  Synthetic
ucauaguugaagucccacu

SEQ ID NO: 64065 - RNA, 20 nt, Artificial Sequence
  Synthetic
aucauaguugaagucccacu

SEQ ID NO: 64066 - RNA, 21 nt, Artificial Sequence
  Synthetic
uaucauaguugaagucccacu

SEQ ID NO: 64067 - RNA, 22 nt, Artificial Sequence
  Synthetic
auaucauaguugaagucccacu

SEQ ID NO: 64068 - RNA, 23 nt, Artificial Sequence
  Synthetic
aauaucauaguugaagucccacu

SEQ ID NO: 64069 - RNA, 24 nt, Artificial Sequence
  Synthetic
aaauaucauaguugaagucccacu

SEQ ID NO: 64070 - RNA, 19 nt, Artificial Sequence
  Synthetic
agauguguauaaagccacu

SEQ ID NO: 64071 - RNA, 21 nt, Artificial Sequence
  Synthetic
ugagauguguauaaagccacu

SEQ ID NO: 64072 - RNA, 22 nt, Artificial Sequence
  Synthetic
augagauguguauaaagccacu

SEQ ID NO: 64073 - RNA, 23 nt, Artificial Sequence
  Synthetic
aaugagauguguauaaagccacu

SEQ ID NO: 64074 - RNA, 24 nt, Artificial Sequence
  Synthetic
aaaugagauguguauaaagccacu

SEQ ID NO: 64075 - RNA, 18 nt, Artificial Sequence
  Synthetic
acucucaauuuagccacu

SEQ ID NO: 64076 - RNA, 19 nt, Artificial Sequence
  Synthetic
uacucucaauuuagccacu

SEQ ID NO: 64077 - RNA, 20 nt, Artificial Sequence
  Synthetic
cuacucucaauuuagccacu

SEQ ID NO: 64078 - RNA, 21 nt, Artificial Sequence
  Synthetic
ccuacucucaauuuagccacu

SEQ ID NO: 64079 - RNA, 22 nt, Artificial Sequence
  Synthetic
uccuacucucaauuuagccacu

SEQ ID NO: 64080 - RNA, 23 nt, Artificial Sequence
  Synthetic
uuccuacucucaauuuagccacu

SEQ ID NO: 64081 - RNA, 24 nt, Artificial Sequence
  Synthetic
cuuccuacucucaauuuagccacu

SEQ ID NO: 64082 - RNA, 19 nt, Artificial Sequence
  Synthetic
ugaaaacagaauggccacu

SEQ ID NO: 64083 - RNA, 20 nt, Artificial Sequence
  Synthetic
cugaaaacagaauggccacu

SEQ ID NO: 64084 - RNA, 21 nt, Artificial Sequence
  Synthetic
ccugaaaacagaauggccacu

SEQ ID NO: 64085 - RNA, 22 nt, Artificial Sequence
  Synthetic
cccugaaaacagaauggccacu

SEQ ID NO: 64086 - RNA, 23 nt, Artificial Sequence
  Synthetic
ucccugaaaacagaauggccacu

SEQ ID NO: 64087 - RNA, 24 nt, Artificial Sequence
  Synthetic
cucccugaaaacagaauggccacu

SEQ ID NO: 64088 - RNA, 18 nt, Artificial Sequence
  Synthetic
uguuaggaaagauccacu

SEQ ID NO: 64089 - RNA, 19 nt, Artificial Sequence
  Synthetic
uuguuaggaaagauccacu

SEQ ID NO: 64090 - RNA, 20 nt, Artificial Sequence
  Synthetic
cuuguuaggaaagauccacu

SEQ ID NO: 64091 - RNA, 21 nt, Artificial Sequence
  Synthetic
acuuguuaggaaagauccacu

SEQ ID NO: 64092 - RNA, 22 nt, Artificial Sequence
  Synthetic
aacuuguuaggaaagauccacu

SEQ ID NO: 64093 - RNA, 23 nt, Artificial Sequence
  Synthetic
aaacuuguuaggaaagauccacu

SEQ ID NO: 64094 - RNA, 24 nt, Artificial Sequence
  Synthetic
aaaacuuguuaggaaagauccacu

SEQ ID NO: 64095 - RNA, 21 nt, Artificial Sequence
  Synthetic
uggcagagggagggcagcacu

SEQ ID NO: 64096 - RNA, 23 nt, Artificial Sequence
  Synthetic
uguggcagagggagggcagcacu

SEQ ID NO: 64097 - RNA, 24 nt, Artificial Sequence
  Synthetic
cuguggcagagggagggcagcacu

SEQ ID NO: 64098 - RNA, 18 nt, Artificial Sequence
  Synthetic
ucuucacuuuguagcacu

SEQ ID NO: 64099 - RNA, 19 nt, Artificial Sequence
  Synthetic
aucuucacuuuguagcacu

SEQ ID NO: 64100 - RNA, 20 nt, Artificial Sequence
  Synthetic
uaucuucacuuuguagcacu

SEQ ID NO: 64101 - RNA, 22 nt, Artificial Sequence
  Synthetic
uguaucuucacuuuguagcacu

SEQ ID NO: 64102 - RNA, 23 nt, Artificial Sequence
  Synthetic
auguaucuucacuuuguagcacu

SEQ ID NO: 64103 - RNA, 24 nt, Artificial Sequence
  Synthetic
uauguaucuucacuuuguagcacu

SEQ ID NO: 64104 - RNA, 18 nt, Artificial Sequence
  Synthetic
uauuugcuuucuggcacu

SEQ ID NO: 64105 - RNA, 19 nt, Artificial Sequence
  Synthetic
uuauuugcuuucuggcacu

SEQ ID NO: 64106 - RNA, 23 nt, Artificial Sequence
  Synthetic
aggguuauuugcuuucuggcacu

SEQ ID NO: 64107 - RNA, 24 nt, Artificial Sequence
  Synthetic
aaggguuauuugcuuucuggcacu

SEQ ID NO: 64108 - RNA, 18 nt, Artificial Sequence
  Synthetic
ucacuggacaugugcacu

SEQ ID NO: 64109 - RNA, 19 nt, Artificial Sequence
  Synthetic
aucacuggacaugugcacu

SEQ ID NO: 64110 - RNA, 20 nt, Artificial Sequence
  Synthetic
aaucacuggacaugugcacu

SEQ ID NO: 64111 - RNA, 22 nt, Artificial Sequence
  Synthetic
ugaaucacuggacaugugcacu

SEQ ID NO: 64112 - RNA, 23 nt, Artificial Sequence
  Synthetic
augaaucacuggacaugugcacu

SEQ ID NO: 64113 - RNA, 24 nt, Artificial Sequence
  Synthetic
aaugaaucacuggacaugugcacu

SEQ ID NO: 64114 - RNA, 18 nt, Artificial Sequence
  Synthetic
aacacuaguuugugcacu

SEQ ID NO: 64115 - RNA, 19 nt, Artificial Sequence
  Synthetic
aaacacuaguuugugcacu

SEQ ID NO: 64116 - RNA, 20 nt, Artificial Sequence
  Synthetic
caaacacuaguuugugcacu

SEQ ID NO: 64117 - RNA, 21 nt, Artificial Sequence
  Synthetic
ccaaacacuaguuugugcacu

SEQ ID NO: 64118 - RNA, 23 nt, Artificial Sequence
  Synthetic
ugccaaacacuaguuugugcacu

SEQ ID NO: 64119 - RNA, 24 nt, Artificial Sequence
  Synthetic
augccaaacacuaguuugugcacu

SEQ ID NO: 64120 - RNA, 18 nt, Artificial Sequence
  Synthetic
auucuuaaacauugcacu

SEQ ID NO: 64121 - RNA, 19 nt, Artificial Sequence
  Synthetic
uauucuuaaacauugcacu

SEQ ID NO: 64122 - RNA, 20 nt, Artificial Sequence
  Synthetic
auauucuuaaacauugcacu

SEQ ID NO: 64123 - RNA, 21 nt, Artificial Sequence
  Synthetic
uauauucuuaaacauugcacu

SEQ ID NO: 64124 - RNA, 22 nt, Artificial Sequence
  Synthetic
uuauauucuuaaacauugcacu

SEQ ID NO: 64125 - RNA, 23 nt, Artificial Sequence
  Synthetic
uuuauauucuuaaacauugcacu

SEQ ID NO: 64126 - RNA, 21 nt, Artificial Sequence
  Synthetic
agagacuucgagagaaucacu

SEQ ID NO: 64127 - RNA, 22 nt, Artificial Sequence
  Synthetic
uagagacuucgagagaaucacu

SEQ ID NO: 64128 - RNA, 24 nt, Artificial Sequence
  Synthetic
aguagagacuucgagagaaucacu

SEQ ID NO: 64129 - RNA, 18 nt, Artificial Sequence
  Synthetic
auuaccuuuuuacucacu

SEQ ID NO: 64130 - RNA, 19 nt, Artificial Sequence
  Synthetic
cauuaccuuuuuacucacu

SEQ ID NO: 64131 - RNA, 22 nt, Artificial Sequence
  Synthetic
uggcauuaccuuuuuacucacu

SEQ ID NO: 64132 - RNA, 23 nt, Artificial Sequence
  Synthetic
auggcauuaccuuuuuacucacu

SEQ ID NO: 64133 - RNA, 24 nt, Artificial Sequence
  Synthetic
uauggcauuaccuuuuuacucacu

SEQ ID NO: 64134 - RNA, 18 nt, Artificial Sequence
  Synthetic
uuuguacguaggcucacu

SEQ ID NO: 64135 - RNA, 19 nt, Artificial Sequence
  Synthetic
uuuuguacguaggcucacu

SEQ ID NO: 64136 - RNA, 20 nt, Artificial Sequence
  Synthetic
auuuuguacguaggcucacu

SEQ ID NO: 64137 - RNA, 21 nt, Artificial Sequence
  Synthetic
cauuuuguacguaggcucacu

SEQ ID NO: 64138 - RNA, 22 nt, Artificial Sequence
  Synthetic
ucauuuuguacguaggcucacu

SEQ ID NO: 64139 - RNA, 18 nt, Artificial Sequence
  Synthetic
augcuuccuaaucucacu

SEQ ID NO: 64140 - RNA, 19 nt, Artificial Sequence
  Synthetic
uaugcuuccuaaucucacu

SEQ ID NO: 64141 - RNA, 20 nt, Artificial Sequence
  Synthetic
cuaugcuuccuaaucucacu

SEQ ID NO: 64142 - RNA, 21 nt, Artificial Sequence
  Synthetic
ccuaugcuuccuaaucucacu

SEQ ID NO: 64143 - RNA, 22 nt, Artificial Sequence
  Synthetic
uccuaugcuuccuaaucucacu

SEQ ID NO: 64144 - RNA, 23 nt, Artificial Sequence
  Synthetic
cuccuaugcuuccuaaucucacu

SEQ ID NO: 64145 - RNA, 24 nt, Artificial Sequence
  Synthetic
ucuccuaugcuuccuaaucucacu

SEQ ID NO: 64146 - RNA, 18 nt, Artificial Sequence
  Synthetic
aaaacauuuguucucacu

SEQ ID NO: 64147 - RNA, 19 nt, Artificial Sequence
  Synthetic
uaaaacauuuguucucacu

SEQ ID NO: 64148 - RNA, 20 nt, Artificial Sequence
  Synthetic
cuaaaacauuuguucucacu

SEQ ID NO: 64149 - RNA, 21 nt, Artificial Sequence
  Synthetic
ccuaaaacauuuguucucacu

SEQ ID NO: 64150 - RNA, 23 nt, Artificial Sequence
  Synthetic
agccuaaaacauuuguucucacu

SEQ ID NO: 64151 - RNA, 18 nt, Artificial Sequence
  Synthetic
ugguaugucagagucacu

SEQ ID NO: 64152 - RNA, 20 nt, Artificial Sequence
  Synthetic
agugguaugucagagucacu

SEQ ID NO: 64153 - RNA, 21 nt, Artificial Sequence
  Synthetic
uagugguaugucagagucacu

SEQ ID NO: 64154 - RNA, 23 nt, Artificial Sequence
  Synthetic
aguagugguaugucagagucacu

SEQ ID NO: 64155 - RNA, 18 nt, Artificial Sequence
  Synthetic
aaugaccaggacgucacu

SEQ ID NO: 64156 - RNA, 20 nt, Artificial Sequence
  Synthetic
agaaugaccaggacgucacu

SEQ ID NO: 64157 - RNA, 23 nt, Artificial Sequence
  Synthetic
uggagaaugaccaggacgucacu

SEQ ID NO: 64158 - RNA, 24 nt, Artificial Sequence
  Synthetic
cuggagaaugaccaggacgucacu

SEQ ID NO: 64159 - RNA, 18 nt, Artificial Sequence
  Synthetic
augcucaggcccgucacu

SEQ ID NO: 64160 - RNA, 19 nt, Artificial Sequence
  Synthetic
uaugcucaggcccgucacu

SEQ ID NO: 64161 - RNA, 20 nt, Artificial Sequence
  Synthetic
uuaugcucaggcccgucacu

SEQ ID NO: 64162 - RNA, 22 nt, Artificial Sequence
  Synthetic
uguuaugcucaggcccgucacu

SEQ ID NO: 64163 - RNA, 23 nt, Artificial Sequence
  Synthetic
auguuaugcucaggcccgucacu

SEQ ID NO: 64164 - RNA, 24 nt, Artificial Sequence
  Synthetic
uauguuaugcucaggcccgucacu

SEQ ID NO: 64165 - RNA, 18 nt, Artificial Sequence
  Synthetic
caguuagucugugucacu

SEQ ID NO: 64166 - RNA, 19 nt, Artificial Sequence
  Synthetic
ccaguuagucugugucacu

SEQ ID NO: 64167 - RNA, 20 nt, Artificial Sequence
  Synthetic
uccaguuagucugugucacu

SEQ ID NO: 64168 - RNA, 21 nt, Artificial Sequence
  Synthetic
cuccaguuagucugugucacu

SEQ ID NO: 64169 - RNA, 22 nt, Artificial Sequence
  Synthetic
ucuccaguuagucugugucacu

SEQ ID NO: 64170 - RNA, 23 nt, Artificial Sequence
  Synthetic
uucuccaguuagucugugucacu

SEQ ID NO: 64171 - RNA, 24 nt, Artificial Sequence
  Synthetic
uuucuccaguuagucugugucacu

SEQ ID NO: 64172 - RNA, 21 nt, Artificial Sequence
  Synthetic
ccauuaaaugugauauucacu

SEQ ID NO: 64173 - RNA, 23 nt, Artificial Sequence
  Synthetic
ugccauuaaaugugauauucacu

SEQ ID NO: 64174 - RNA, 24 nt, Artificial Sequence
  Synthetic
uugccauuaaaugugauauucacu

SEQ ID NO: 64175 - RNA, 18 nt, Artificial Sequence
  Synthetic
uaaugccucuucuucacu

SEQ ID NO: 64176 - RNA, 19 nt, Artificial Sequence
  Synthetic
auaaugccucuucuucacu

SEQ ID NO: 64177 - RNA, 20 nt, Artificial Sequence
  Synthetic
uauaaugccucuucuucacu

SEQ ID NO: 64178 - RNA, 21 nt, Artificial Sequence
  Synthetic
uuauaaugccucuucuucacu

SEQ ID NO: 64179 - RNA, 22 nt, Artificial Sequence
  Synthetic
uuuauaaugccucuucuucacu

SEQ ID NO: 64180 - RNA, 23 nt, Artificial Sequence
  Synthetic
auuuauaaugccucuucuucacu

SEQ ID NO: 64181 - RNA, 24 nt, Artificial Sequence
  Synthetic
uauuuauaaugccucuucuucacu

SEQ ID NO: 64182 - RNA, 18 nt, Artificial Sequence
  Synthetic
ccugauaaggccaagacu

SEQ ID NO: 64183 - RNA, 19 nt, Artificial Sequence
  Synthetic
uccugauaaggccaagacu

SEQ ID NO: 64184 - RNA, 20 nt, Artificial Sequence
  Synthetic
auccugauaaggccaagacu

SEQ ID NO: 64185 - RNA, 21 nt, Artificial Sequence
  Synthetic
aauccugauaaggccaagacu

SEQ ID NO: 64186 - RNA, 23 nt, Artificial Sequence
  Synthetic
agaauccugauaaggccaagacu

SEQ ID NO: 64187 - RNA, 24 nt, Artificial Sequence
  Synthetic
uagaauccugauaaggccaagacu

SEQ ID NO: 64188 - RNA, 18 nt, Artificial Sequence
  Synthetic
ucauauaacuugaagacu

SEQ ID NO: 64189 - RNA, 19 nt, Artificial Sequence
  Synthetic
uucauauaacuugaagacu

SEQ ID NO: 64190 - RNA, 20 nt, Artificial Sequence
  Synthetic
auucauauaacuugaagacu

SEQ ID NO: 64191 - RNA, 21 nt, Artificial Sequence
  Synthetic
cauucauauaacuugaagacu

SEQ ID NO: 64192 - RNA, 22 nt, Artificial Sequence
  Synthetic
ucauucauauaacuugaagacu

SEQ ID NO: 64193 - RNA, 18 nt, Artificial Sequence
  Synthetic
cuugccuaccauaagacu

SEQ ID NO: 64194 - RNA, 19 nt, Artificial Sequence
  Synthetic
acuugccuaccauaagacu

SEQ ID NO: 64195 - RNA, 20 nt, Artificial Sequence
  Synthetic
uacuugccuaccauaagacu

SEQ ID NO: 64196 - RNA, 21 nt, Artificial Sequence
  Synthetic
auacuugccuaccauaagacu

SEQ ID NO: 64197 - RNA, 22 nt, Artificial Sequence
  Synthetic
cauacuugccuaccauaagacu

SEQ ID NO: 64198 - RNA, 23 nt, Artificial Sequence
  Synthetic
acauacuugccuaccauaagacu

SEQ ID NO: 64199 - RNA, 24 nt, Artificial Sequence
  Synthetic
aacauacuugccuaccauaagacu

SEQ ID NO: 64200 - RNA, 18 nt, Artificial Sequence
  Synthetic
cccaggcaugaacagacu

SEQ ID NO: 64201 - RNA, 20 nt, Artificial Sequence
  Synthetic
ugcccaggcaugaacagacu

SEQ ID NO: 64202 - RNA, 21 nt, Artificial Sequence
  Synthetic
augcccaggcaugaacagacu

SEQ ID NO: 64203 - RNA, 22 nt, Artificial Sequence
  Synthetic
aaugcccaggcaugaacagacu

SEQ ID NO: 64204 - RNA, 24 nt, Artificial Sequence
  Synthetic
ugaaugcccaggcaugaacagacu

SEQ ID NO: 64205 - RNA, 19 nt, Artificial Sequence
  Synthetic
agauguguguauacagacu

SEQ ID NO: 64206 - RNA, 22 nt, Artificial Sequence
  Synthetic
uggagauguguguauacagacu

SEQ ID NO: 64207 - RNA, 23 nt, Artificial Sequence
  Synthetic
uuggagauguguguauacagacu

SEQ ID NO: 64208 - RNA, 24 nt, Artificial Sequence
  Synthetic
cuuggagauguguguauacagacu

SEQ ID NO: 64209 - RNA, 18 nt, Artificial Sequence
  Synthetic
cgaaggugcagccagacu

SEQ ID NO: 64210 - RNA, 19 nt, Artificial Sequence
  Synthetic
ucgaaggugcagccagacu

SEQ ID NO: 64211 - RNA, 21 nt, Artificial Sequence
  Synthetic
agucgaaggugcagccagacu

SEQ ID NO: 64212 - RNA, 23 nt, Artificial Sequence
  Synthetic
ugagucgaaggugcagccagacu

SEQ ID NO: 64213 - RNA, 18 nt, Artificial Sequence
  Synthetic
uuugcaaaguaucagacu

SEQ ID NO: 64214 - RNA, 19 nt, Artificial Sequence
  Synthetic
uuuugcaaaguaucagacu

SEQ ID NO: 64215 - RNA, 20 nt, Artificial Sequence
  Synthetic
auuuugcaaaguaucagacu

SEQ ID NO: 64216 - RNA, 21 nt, Artificial Sequence
  Synthetic
cauuuugcaaaguaucagacu

SEQ ID NO: 64217 - RNA, 22 nt, Artificial Sequence
  Synthetic
ucauuuugcaaaguaucagacu

SEQ ID NO: 64218 - RNA, 23 nt, Artificial Sequence
  Synthetic
aucauuuugcaaaguaucagacu

SEQ ID NO: 64219 - RNA, 24 nt, Artificial Sequence
  Synthetic
aaucauuuugcaaaguaucagacu

SEQ ID NO: 64220 - RNA, 18 nt, Artificial Sequence
  Synthetic
ugcugcagucuagagacu

SEQ ID NO: 64221 - RNA, 19 nt, Artificial Sequence
  Synthetic
augcugcagucuagagacu

SEQ ID NO: 64222 - RNA, 20 nt, Artificial Sequence
  Synthetic
aaugcugcagucuagagacu

SEQ ID NO: 64223 - RNA, 21 nt, Artificial Sequence
  Synthetic
aaaugcugcagucuagagacu

SEQ ID NO: 64224 - RNA, 23 nt, Artificial Sequence
  Synthetic
agaaaugcugcagucuagagacu

SEQ ID NO: 64225 - RNA, 24 nt, Artificial Sequence
  Synthetic
aagaaaugcugcagucuagagacu

SEQ ID NO: 64226 - RNA, 18 nt, Artificial Sequence
  Synthetic
uuuaacuuauuggagacu

SEQ ID NO: 64227 - RNA, 19 nt, Artificial Sequence
  Synthetic
cuuuaacuuauuggagacu

SEQ ID NO: 64228 - RNA, 20 nt, Artificial Sequence
  Synthetic
ucuuuaacuuauuggagacu

SEQ ID NO: 64229 - RNA, 21 nt, Artificial Sequence
  Synthetic
uucuuuaacuuauuggagacu

SEQ ID NO: 64230 - RNA, 22 nt, Artificial Sequence
  Synthetic
cuucuuuaacuuauuggagacu

SEQ ID NO: 64231 - RNA, 23 nt, Artificial Sequence
  Synthetic
ucuucuuuaacuuauuggagacu

SEQ ID NO: 64232 - RNA, 21 nt, Artificial Sequence
  Synthetic
auguaaaauagacaugagacu

SEQ ID NO: 64233 - RNA, 23 nt, Artificial Sequence
  Synthetic
ugauguaaaauagacaugagacu

SEQ ID NO: 64234 - RNA, 24 nt, Artificial Sequence
  Synthetic
augauguaaaauagacaugagacu

SEQ ID NO: 64235 - RNA, 21 nt, Artificial Sequence
  Synthetic
auuuauuauuauuuuuagacu

SEQ ID NO: 64236 - RNA, 24 nt, Artificial Sequence
  Synthetic
uggauuuauuauuauuuuuagacu

SEQ ID NO: 64237 - RNA, 19 nt, Artificial Sequence
  Synthetic
agccuaaaauggaaggacu

SEQ ID NO: 64238 - RNA, 20 nt, Artificial Sequence
  Synthetic
aagccuaaaauggaaggacu

SEQ ID NO: 64239 - RNA, 21 nt, Artificial Sequence
  Synthetic
aaagccuaaaauggaaggacu

SEQ ID NO: 64240 - RNA, 22 nt, Artificial Sequence
  Synthetic
aaaagccuaaaauggaaggacu

SEQ ID NO: 64241 - RNA, 23 nt, Artificial Sequence
  Synthetic
aaaaagccuaaaauggaaggacu

SEQ ID NO: 64242 - RNA, 18 nt, Artificial Sequence
  Synthetic
cugauagugcuaaggacu

SEQ ID NO: 64243 - RNA, 19 nt, Artificial Sequence
  Synthetic
ccugauagugcuaaggacu

SEQ ID NO: 64244 - RNA, 21 nt, Artificial Sequence
  Synthetic
agccugauagugcuaaggacu

SEQ ID NO: 64245 - RNA, 22 nt, Artificial Sequence
  Synthetic
cagccugauagugcuaaggacu

SEQ ID NO: 64246 - RNA, 23 nt, Artificial Sequence
  Synthetic
acagccugauagugcuaaggacu

SEQ ID NO: 64247 - RNA, 24 nt, Artificial Sequence
  Synthetic
aacagccugauagugcuaaggacu

SEQ ID NO: 64248 - RNA, 18 nt, Artificial Sequence
  Synthetic
uaguuggggauacggacu

SEQ ID NO: 64249 - RNA, 21 nt, Artificial Sequence
  Synthetic
agguaguuggggauacggacu

SEQ ID NO: 64250 - RNA, 22 nt, Artificial Sequence
  Synthetic
aagguaguuggggauacggacu

SEQ ID NO: 64251 - RNA, 24 nt, Artificial Sequence
  Synthetic
agaagguaguuggggauacggacu

SEQ ID NO: 64252 - RNA, 19 nt, Artificial Sequence
  Synthetic
uggaaagagaauguggacu

SEQ ID NO: 64253 - RNA, 20 nt, Artificial Sequence
  Synthetic
cuggaaagagaauguggacu

SEQ ID NO: 64254 - RNA, 21 nt, Artificial Sequence
  Synthetic
ucuggaaagagaauguggacu

SEQ ID NO: 64255 - RNA, 22 nt, Artificial Sequence
  Synthetic
aucuggaaagagaauguggacu

SEQ ID NO: 64256 - RNA, 23 nt, Artificial Sequence
  Synthetic
aaucuggaaagagaauguggacu

SEQ ID NO: 64257 - RNA, 24 nt, Artificial Sequence
  Synthetic
aaaucuggaaagagaauguggacu

SEQ ID NO: 64258 - RNA, 18 nt, Artificial Sequence
  Synthetic
ccuaagauggguuggacu

SEQ ID NO: 64259 - RNA, 19 nt, Artificial Sequence
  Synthetic
cccuaagauggguuggacu

SEQ ID NO: 64260 - RNA, 20 nt, Artificial Sequence
  Synthetic
ucccuaagauggguuggacu

SEQ ID NO: 64261 - RNA, 21 nt, Artificial Sequence
  Synthetic
cucccuaagauggguuggacu

SEQ ID NO: 64262 - RNA, 22 nt, Artificial Sequence
  Synthetic
acucccuaagauggguuggacu

SEQ ID NO: 64263 - RNA, 23 nt, Artificial Sequence
  Synthetic
aacucccuaagauggguuggacu

SEQ ID NO: 64264 - RNA, 24 nt, Artificial Sequence
  Synthetic
aaacucccuaagauggguuggacu

SEQ ID NO: 64265 - RNA, 18 nt, Artificial Sequence
  Synthetic
ucaacagcuuauaugacu

SEQ ID NO: 64266 - RNA, 19 nt, Artificial Sequence
  Synthetic
uucaacagcuuauaugacu

SEQ ID NO: 64267 - RNA, 20 nt, Artificial Sequence
  Synthetic
cuucaacagcuuauaugacu

SEQ ID NO: 64268 - RNA, 21 nt, Artificial Sequence
  Synthetic
ucuucaacagcuuauaugacu

SEQ ID NO: 64269 - RNA, 22 nt, Artificial Sequence
  Synthetic
uucuucaacagcuuauaugacu

SEQ ID NO: 64270 - RNA, 23 nt, Artificial Sequence
  Synthetic
uuucuucaacagcuuauaugacu

SEQ ID NO: 64271 - RNA, 19 nt, Artificial Sequence
  Synthetic
ugccuuaugguguaugacu

SEQ ID NO: 64272 - RNA, 20 nt, Artificial Sequence
  Synthetic
augccuuaugguguaugacu

SEQ ID NO: 64273 - RNA, 21 nt, Artificial Sequence
  Synthetic
uaugccuuaugguguaugacu

SEQ ID NO: 64274 - RNA, 22 nt, Artificial Sequence
  Synthetic
uuaugccuuaugguguaugacu

SEQ ID NO: 64275 - RNA, 23 nt, Artificial Sequence
  Synthetic
uuuaugccuuaugguguaugacu

SEQ ID NO: 64276 - RNA, 24 nt, Artificial Sequence
  Synthetic
cuuuaugccuuaugguguaugacu

SEQ ID NO: 64277 - RNA, 18 nt, Artificial Sequence
  Synthetic
cuccuuugcuuuaugacu

SEQ ID NO: 64278 - RNA, 19 nt, Artificial Sequence
  Synthetic
ccuccuuugcuuuaugacu

SEQ ID NO: 64279 - RNA, 20 nt, Artificial Sequence
  Synthetic
uccuccuuugcuuuaugacu

SEQ ID NO: 64280 - RNA, 21 nt, Artificial Sequence
  Synthetic
auccuccuuugcuuuaugacu

SEQ ID NO: 64281 - RNA, 22 nt, Artificial Sequence
  Synthetic
uauccuccuuugcuuuaugacu

SEQ ID NO: 64282 - RNA, 23 nt, Artificial Sequence
  Synthetic
cuauccuccuuugcuuuaugacu

SEQ ID NO: 64283 - RNA, 24 nt, Artificial Sequence
  Synthetic
ucuauccuccuuugcuuuaugacu

SEQ ID NO: 64284 - RNA, 19 nt, Artificial Sequence
  Synthetic
uggaucuuuauggcugacu

SEQ ID NO: 64285 - RNA, 20 nt, Artificial Sequence
  Synthetic
cuggaucuuuauggcugacu

SEQ ID NO: 64286 - RNA, 21 nt, Artificial Sequence
  Synthetic
ucuggaucuuuauggcugacu

SEQ ID NO: 64287 - RNA, 22 nt, Artificial Sequence
  Synthetic
uucuggaucuuuauggcugacu

SEQ ID NO: 64288 - RNA, 23 nt, Artificial Sequence
  Synthetic
uuucuggaucuuuauggcugacu

SEQ ID NO: 64289 - RNA, 24 nt, Artificial Sequence
  Synthetic
auuucuggaucuuuauggcugacu

SEQ ID NO: 64290 - RNA, 19 nt, Artificial Sequence
  Synthetic
uguuuuaaauguucugacu

SEQ ID NO: 64291 - RNA, 21 nt, Artificial Sequence
  Synthetic
uguguuuuaaauguucugacu

SEQ ID NO: 64292 - RNA, 22 nt, Artificial Sequence
  Synthetic
auguguuuuaaauguucugacu

SEQ ID NO: 64293 - RNA, 23 nt, Artificial Sequence
  Synthetic
uauguguuuuaaauguucugacu

SEQ ID NO: 64294 - RNA, 24 nt, Artificial Sequence
  Synthetic
cuauguguuuuaaauguucugacu

SEQ ID NO: 64295 - RNA, 18 nt, Artificial Sequence
  Synthetic
auaugaaucccagugacu

SEQ ID NO: 64296 - RNA, 19 nt, Artificial Sequence
  Synthetic
aauaugaaucccagugacu

SEQ ID NO: 64297 - RNA, 21 nt, Artificial Sequence
  Synthetic
ugaauaugaaucccagugacu

SEQ ID NO: 64298 - RNA, 22 nt, Artificial Sequence
  Synthetic
uugaauaugaaucccagugacu

SEQ ID NO: 64299 - RNA, 23 nt, Artificial Sequence
  Synthetic
cuugaauaugaaucccagugacu

SEQ ID NO: 64300 - RNA, 24 nt, Artificial Sequence
  Synthetic
ccuugaauaugaaucccagugacu

SEQ ID NO: 64301 - RNA, 18 nt, Artificial Sequence
  Synthetic
acccauuccucagugacu

SEQ ID NO: 64302 - RNA, 19 nt, Artificial Sequence
  Synthetic
cacccauuccucagugacu

SEQ ID NO: 64303 - RNA, 21 nt, Artificial Sequence
  Synthetic
ugcacccauuccucagugacu

SEQ ID NO: 64304 - RNA, 24 nt, Artificial Sequence
  Synthetic
uggugcacccauuccucagugacu

SEQ ID NO: 64305 - RNA, 22 nt, Artificial Sequence
  Synthetic
agagacucugauauaauugacu

SEQ ID NO: 64306 - RNA, 23 nt, Artificial Sequence
  Synthetic
aagagacucugauauaauugacu

SEQ ID NO: 64307 - RNA, 24 nt, Artificial Sequence
  Synthetic
uaagagacucugauauaauugacu

SEQ ID NO: 64308 - RNA, 18 nt, Artificial Sequence
  Synthetic
auuaguucugaguugacu

SEQ ID NO: 64309 - RNA, 19 nt, Artificial Sequence
  Synthetic
uauuaguucugaguugacu

SEQ ID NO: 64310 - RNA, 20 nt, Artificial Sequence
  Synthetic
auauuaguucugaguugacu

SEQ ID NO: 64311 - RNA, 22 nt, Artificial Sequence
  Synthetic
ugauauuaguucugaguugacu

SEQ ID NO: 64312 - RNA, 23 nt, Artificial Sequence
  Synthetic
augauauuaguucugaguugacu

SEQ ID NO: 64313 - RNA, 24 nt, Artificial Sequence
  Synthetic
aaugauauuaguucugaguugacu

SEQ ID NO: 64314 - RNA, 18 nt, Artificial Sequence
  Synthetic
aaccacaccacaaauacu

SEQ ID NO: 64315 - RNA, 19 nt, Artificial Sequence
  Synthetic
caaccacaccacaaauacu

SEQ ID NO: 64316 - RNA, 21 nt, Artificial Sequence
  Synthetic
ugcaaccacaccacaaauacu

SEQ ID NO: 64317 - RNA, 22 nt, Artificial Sequence
  Synthetic
augcaaccacaccacaaauacu

SEQ ID NO: 64318 - RNA, 23 nt, Artificial Sequence
  Synthetic
aaugcaaccacaccacaaauacu

SEQ ID NO: 64319 - RNA, 24 nt, Artificial Sequence
  Synthetic
caaugcaaccacaccacaaauacu

SEQ ID NO: 64320 - RNA, 18 nt, Artificial Sequence
  Synthetic
aagacacagggaaauacu

SEQ ID NO: 64321 - RNA, 19 nt, Artificial Sequence
  Synthetic
aaagacacagggaaauacu

SEQ ID NO: 64322 - RNA, 20 nt, Artificial Sequence
  Synthetic
uaaagacacagggaaauacu

SEQ ID NO: 64323 - RNA, 21 nt, Artificial Sequence
  Synthetic
uuaaagacacagggaaauacu

SEQ ID NO: 64324 - RNA, 22 nt, Artificial Sequence
  Synthetic
uuuaaagacacagggaaauacu

SEQ ID NO: 64325 - RNA, 23 nt, Artificial Sequence
  Synthetic
uuuuaaagacacagggaaauacu

SEQ ID NO: 64326 - RNA, 18 nt, Artificial Sequence
  Synthetic
aaugauaauugaaauacu

SEQ ID NO: 64327 - RNA, 19 nt, Artificial Sequence
  Synthetic
aaaugauaauugaaauacu

SEQ ID NO: 64328 - RNA, 20 nt, Artificial Sequence
  Synthetic
caaaugauaauugaaauacu

SEQ ID NO: 64329 - RNA, 21 nt, Artificial Sequence
  Synthetic
ucaaaugauaauugaaauacu

SEQ ID NO: 64330 - RNA, 23 nt, Artificial Sequence
  Synthetic
agucaaaugauaauugaaauacu

SEQ ID NO: 64331 - RNA, 24 nt, Artificial Sequence
  Synthetic
cagucaaaugauaauugaaauacu

SEQ ID NO: 64332 - RNA, 18 nt, Artificial Sequence
  Synthetic
augaaaucugucaauacu

SEQ ID NO: 64333 - RNA, 19 nt, Artificial Sequence
  Synthetic
aaugaaaucugucaauacu

SEQ ID NO: 64334 - RNA, 20 nt, Artificial Sequence
  Synthetic
aaaugaaaucugucaauacu

SEQ ID NO: 64335 - RNA, 21 nt, Artificial Sequence
  Synthetic
aaaaugaaaucugucaauacu

SEQ ID NO: 64336 - RNA, 23 nt, Artificial Sequence
  Synthetic
agaaaaugaaaucugucaauacu

SEQ ID NO: 64337 - RNA, 24 nt, Artificial Sequence
  Synthetic
aagaaaaugaaaucugucaauacu

SEQ ID NO: 64338 - RNA, 21 nt, Artificial Sequence
  Synthetic
uggggaaugguggagaauacu

SEQ ID NO: 64339 - RNA, 22 nt, Artificial Sequence
  Synthetic
uuggggaaugguggagaauacu

SEQ ID NO: 64340 - RNA, 23 nt, Artificial Sequence
  Synthetic
cuuggggaaugguggagaauacu

SEQ ID NO: 64341 - RNA, 24 nt, Artificial Sequence
  Synthetic
ccuuggggaaugguggagaauacu

SEQ ID NO: 64342 - RNA, 18 nt, Artificial Sequence
  Synthetic
uaucauuuaaugaauacu

SEQ ID NO: 64343 - RNA, 19 nt, Artificial Sequence
  Synthetic
auaucauuuaaugaauacu

SEQ ID NO: 64344 - RNA, 20 nt, Artificial Sequence
  Synthetic
cauaucauuuaaugaauacu

SEQ ID NO: 64345 - RNA, 21 nt, Artificial Sequence
  Synthetic
ucauaucauuuaaugaauacu

SEQ ID NO: 64346 - RNA, 22 nt, Artificial Sequence
  Synthetic
uucauaucauuuaaugaauacu

SEQ ID NO: 64347 - RNA, 24 nt, Artificial Sequence
  Synthetic
aguucauaucauuuaaugaauacu

SEQ ID NO: 64348 - RNA, 18 nt, Artificial Sequence
  Synthetic
cuuaaaauuaaacauacu

SEQ ID NO: 64349 - RNA, 20 nt, Artificial Sequence
  Synthetic
agcuuaaaauuaaacauacu

SEQ ID NO: 64350 - RNA, 21 nt, Artificial Sequence
  Synthetic
uagcuuaaaauuaaacauacu

SEQ ID NO: 64351 - RNA, 22 nt, Artificial Sequence
  Synthetic
auagcuuaaaauuaaacauacu

SEQ ID NO: 64352 - RNA, 24 nt, Artificial Sequence
  Synthetic
ugauagcuuaaaauuaaacauacu

SEQ ID NO: 64353 - RNA, 18 nt, Artificial Sequence
  Synthetic
uacaaggcacuacauacu

SEQ ID NO: 64354 - RNA, 19 nt, Artificial Sequence
  Synthetic
uuacaaggcacuacauacu

SEQ ID NO: 64355 - RNA, 20 nt, Artificial Sequence
  Synthetic
uuuacaaggcacuacauacu

SEQ ID NO: 64356 - RNA, 21 nt, Artificial Sequence
  Synthetic
auuuacaaggcacuacauacu

SEQ ID NO: 64357 - RNA, 22 nt, Artificial Sequence
  Synthetic
uauuuacaaggcacuacauacu

SEQ ID NO: 64358 - RNA, 23 nt, Artificial Sequence
  Synthetic
uuauuuacaaggcacuacauacu

SEQ ID NO: 64359 - RNA, 24 nt, Artificial Sequence
  Synthetic
uuuauuuacaaggcacuacauacu

SEQ ID NO: 64360 - RNA, 18 nt, Artificial Sequence
  Synthetic
ugcccuuauuuacauacu

SEQ ID NO: 64361 - RNA, 19 nt, Artificial Sequence
  Synthetic
cugcccuuauuuacauacu

SEQ ID NO: 64362 - RNA, 21 nt, Artificial Sequence
  Synthetic
ugcugcccuuauuuacauacu

SEQ ID NO: 64363 - RNA, 22 nt, Artificial Sequence
  Synthetic
augcugcccuuauuuacauacu

SEQ ID NO: 64364 - RNA, 23 nt, Artificial Sequence
  Synthetic
caugcugcccuuauuuacauacu

SEQ ID NO: 64365 - RNA, 24 nt, Artificial Sequence
  Synthetic
ucaugcugcccuuauuuacauacu

SEQ ID NO: 64366 - RNA, 18 nt, Artificial Sequence
  Synthetic
uggccugcagaccauacu

SEQ ID NO: 64367 - RNA, 19 nt, Artificial Sequence
  Synthetic
uuggccugcagaccauacu

SEQ ID NO: 64368 - RNA, 20 nt, Artificial Sequence
  Synthetic
uuuggccugcagaccauacu

SEQ ID NO: 64369 - RNA, 21 nt, Artificial Sequence
  Synthetic
uuuuggccugcagaccauacu

SEQ ID NO: 64370 - RNA, 22 nt, Artificial Sequence
  Synthetic
auuuuggccugcagaccauacu

SEQ ID NO: 64371 - RNA, 24 nt, Artificial Sequence
  Synthetic
ugauuuuggccugcagaccauacu

SEQ ID NO: 64372 - RNA, 18 nt, Artificial Sequence
  Synthetic
cucuuagccuggcauacu

SEQ ID NO: 64373 - RNA, 19 nt, Artificial Sequence
  Synthetic
ccucuuagccuggcauacu

SEQ ID NO: 64374 - RNA, 20 nt, Artificial Sequence
  Synthetic
accucuuagccuggcauacu

SEQ ID NO: 64375 - RNA, 21 nt, Artificial Sequence
  Synthetic
uaccucuuagccuggcauacu

SEQ ID NO: 64376 - RNA, 22 nt, Artificial Sequence
  Synthetic
auaccucuuagccuggcauacu

SEQ ID NO: 64377 - RNA, 23 nt, Artificial Sequence
  Synthetic
cauaccucuuagccuggcauacu

SEQ ID NO: 64378 - RNA, 24 nt, Artificial Sequence
  Synthetic
ccauaccucuuagccuggcauacu

SEQ ID NO: 64379 - RNA, 18 nt, Artificial Sequence
  Synthetic
ugggguaauugucauacu

SEQ ID NO: 64380 - RNA, 19 nt, Artificial Sequence
  Synthetic
augggguaauugucauacu

SEQ ID NO: 64381 - RNA, 20 nt, Artificial Sequence
  Synthetic
aaugggguaauugucauacu

SEQ ID NO: 64382 - RNA, 21 nt, Artificial Sequence
  Synthetic
uaaugggguaauugucauacu

SEQ ID NO: 64383 - RNA, 22 nt, Artificial Sequence
  Synthetic
uuaaugggguaauugucauacu

SEQ ID NO: 64384 - RNA, 23 nt, Artificial Sequence
  Synthetic
auuaaugggguaauugucauacu

SEQ ID NO: 64385 - RNA, 24 nt, Artificial Sequence
  Synthetic
cauuaaugggguaauugucauacu

SEQ ID NO: 64386 - RNA, 18 nt, Artificial Sequence
  Synthetic
uuuucuaccuaagauacu

SEQ ID NO: 64387 - RNA, 19 nt, Artificial Sequence
  Synthetic
uuuuucuaccuaagauacu

SEQ ID NO: 64388 - RNA, 20 nt, Artificial Sequence
  Synthetic
cuuuuucuaccuaagauacu

SEQ ID NO: 64389 - RNA, 21 nt, Artificial Sequence
  Synthetic
acuuuuucuaccuaagauacu

SEQ ID NO: 64390 - RNA, 22 nt, Artificial Sequence
  Synthetic
cacuuuuucuaccuaagauacu

SEQ ID NO: 64391 - RNA, 23 nt, Artificial Sequence
  Synthetic
ucacuuuuucuaccuaagauacu

SEQ ID NO: 64392 - RNA, 24 nt, Artificial Sequence
  Synthetic
aucacuuuuucuaccuaagauacu

SEQ ID NO: 64393 - RNA, 18 nt, Artificial Sequence
  Synthetic
cuauaaguuucggauacu

SEQ ID NO: 64394 - RNA, 19 nt, Artificial Sequence
  Synthetic
ucuauaaguuucggauacu

SEQ ID NO: 64395 - RNA, 20 nt, Artificial Sequence
  Synthetic
cucuauaaguuucggauacu

SEQ ID NO: 64396 - RNA, 21 nt, Artificial Sequence
  Synthetic
ucucuauaaguuucggauacu

SEQ ID NO: 64397 - RNA, 22 nt, Artificial Sequence
  Synthetic
uucucuauaaguuucggauacu

SEQ ID NO: 64398 - RNA, 23 nt, Artificial Sequence
  Synthetic
cuucucuauaaguuucggauacu

SEQ ID NO: 64399 - RNA, 24 nt, Artificial Sequence
  Synthetic
ucuucucuauaaguuucggauacu

SEQ ID NO: 64400 - RNA, 18 nt, Artificial Sequence
  Synthetic
caauacacuguugauacu

SEQ ID NO: 64401 - RNA, 19 nt, Artificial Sequence
  Synthetic
ucaauacacuguugauacu

SEQ ID NO: 64402 - RNA, 20 nt, Artificial Sequence
  Synthetic
aucaauacacuguugauacu

SEQ ID NO: 64403 - RNA, 22 nt, Artificial Sequence
  Synthetic
ugaucaauacacuguugauacu

SEQ ID NO: 64404 - RNA, 23 nt, Artificial Sequence
  Synthetic
uugaucaauacacuguugauacu

SEQ ID NO: 64405 - RNA, 24 nt, Artificial Sequence
  Synthetic
uuugaucaauacacuguugauacu

SEQ ID NO: 64406 - RNA, 18 nt, Artificial Sequence
  Synthetic
aauaaaaugugcuauacu

SEQ ID NO: 64407 - RNA, 20 nt, Artificial Sequence
  Synthetic
ugaauaaaaugugcuauacu

SEQ ID NO: 64408 - RNA, 21 nt, Artificial Sequence
  Synthetic
augaauaaaaugugcuauacu

SEQ ID NO: 64409 - RNA, 22 nt, Artificial Sequence
  Synthetic
aaugaauaaaaugugcuauacu

SEQ ID NO: 64410 - RNA, 18 nt, Artificial Sequence
  Synthetic
uuuguguaguaguauacu

SEQ ID NO: 64411 - RNA, 19 nt, Artificial Sequence
  Synthetic
uuuuguguaguaguauacu

SEQ ID NO: 64412 - RNA, 19 nt, Artificial Sequence
  Synthetic
aggcuucuucguuuauacu

SEQ ID NO: 64413 - RNA, 21 nt, Artificial Sequence
  Synthetic
ugaggcuucuucguuuauacu

SEQ ID NO: 64414 - RNA, 22 nt, Artificial Sequence
  Synthetic
augaggcuucuucguuuauacu

SEQ ID NO: 64415 - RNA, 23 nt, Artificial Sequence
  Synthetic
caugaggcuucuucguuuauacu

SEQ ID NO: 64416 - RNA, 24 nt, Artificial Sequence
  Synthetic
ccaugaggcuucuucguuuauacu

SEQ ID NO: 64417 - RNA, 18 nt, Artificial Sequence
  Synthetic
ucccuuuaauuuuauacu

SEQ ID NO: 64418 - RNA, 19 nt, Artificial Sequence
  Synthetic
uucccuuuaauuuuauacu

SEQ ID NO: 64419 - RNA, 20 nt, Artificial Sequence
  Synthetic
auucccuuuaauuuuauacu

SEQ ID NO: 64420 - RNA, 21 nt, Artificial Sequence
  Synthetic
aauucccuuuaauuuuauacu

SEQ ID NO: 64421 - RNA, 23 nt, Artificial Sequence
  Synthetic
agaauucccuuuaauuuuauacu

SEQ ID NO: 64422 - RNA, 24 nt, Artificial Sequence
  Synthetic
uagaauucccuuuaauuuuauacu

SEQ ID NO: 64423 - RNA, 18 nt, Artificial Sequence
  Synthetic
ugaauguaugauacuacu

SEQ ID NO: 64424 - RNA, 20 nt, Artificial Sequence
  Synthetic
cgugaauguaugauacuacu

SEQ ID NO: 64425 - RNA, 22 nt, Artificial Sequence
  Synthetic
agcgugaauguaugauacuacu

SEQ ID NO: 64426 - RNA, 18 nt, Artificial Sequence
  Synthetic
cauauucacaggccuacu

SEQ ID NO: 64427 - RNA, 19 nt, Artificial Sequence
  Synthetic
ucauauucacaggccuacu

SEQ ID NO: 64428 - RNA, 20 nt, Artificial Sequence
  Synthetic
cucauauucacaggccuacu

SEQ ID NO: 64429 - RNA, 21 nt, Artificial Sequence
  Synthetic
ccucauauucacaggccuacu

SEQ ID NO: 64430 - RNA, 22 nt, Artificial Sequence
  Synthetic
uccucauauucacaggccuacu

SEQ ID NO: 64431 - RNA, 23 nt, Artificial Sequence
  Synthetic
auccucauauucacaggccuacu

SEQ ID NO: 64432 - RNA, 24 nt, Artificial Sequence
  Synthetic
uauccucauauucacaggccuacu

SEQ ID NO: 64433 - RNA, 19 nt, Artificial Sequence
  Synthetic
ugaagggacaucagcuacu

SEQ ID NO: 64434 - RNA, 20 nt, Artificial Sequence
  Synthetic
cugaagggacaucagcuacu

SEQ ID NO: 64435 - RNA, 22 nt, Artificial Sequence
  Synthetic
agcugaagggacaucagcuacu

SEQ ID NO: 64436 - RNA, 23 nt, Artificial Sequence
  Synthetic
aagcugaagggacaucagcuacu

SEQ ID NO: 64437 - RNA, 24 nt, Artificial Sequence
  Synthetic
caagcugaagggacaucagcuacu

SEQ ID NO: 64438 - RNA, 18 nt, Artificial Sequence
  Synthetic
caaacuauuucugcuacu

SEQ ID NO: 64439 - RNA, 20 nt, Artificial Sequence
  Synthetic
agcaaacuauuucugcuacu

SEQ ID NO: 64440 - RNA, 21 nt, Artificial Sequence
  Synthetic
uagcaaacuauuucugcuacu

SEQ ID NO: 64441 - RNA, 22 nt, Artificial Sequence
  Synthetic
auagcaaacuauuucugcuacu

SEQ ID NO: 64442 - RNA, 23 nt, Artificial Sequence
  Synthetic
aauagcaaacuauuucugcuacu

SEQ ID NO: 64443 - RNA, 24 nt, Artificial Sequence
  Synthetic
uaauagcaaacuauuucugcuacu

SEQ ID NO: 64444 - RNA, 18 nt, Artificial Sequence
  Synthetic
ccucucccaaaaucuacu

SEQ ID NO: 64445 - RNA, 19 nt, Artificial Sequence
  Synthetic
uccucucccaaaaucuacu

SEQ ID NO: 64446 - RNA, 20 nt, Artificial Sequence
  Synthetic
uuccucucccaaaaucuacu

SEQ ID NO: 64447 - RNA, 21 nt, Artificial Sequence
  Synthetic
auuccucucccaaaaucuacu

SEQ ID NO: 64448 - RNA, 22 nt, Artificial Sequence
  Synthetic
uauuccucucccaaaaucuacu

SEQ ID NO: 64449 - RNA, 23 nt, Artificial Sequence
  Synthetic
auauuccucucccaaaaucuacu

SEQ ID NO: 64450 - RNA, 24 nt, Artificial Sequence
  Synthetic
uauauuccucucccaaaaucuacu

SEQ ID NO: 64451 - RNA, 18 nt, Artificial Sequence
  Synthetic
uaagcaaacaguucuacu

SEQ ID NO: 64452 - RNA, 20 nt, Artificial Sequence
  Synthetic
uguaagcaaacaguucuacu

SEQ ID NO: 64453 - RNA, 22 nt, Artificial Sequence
  Synthetic
aguguaagcaaacaguucuacu

SEQ ID NO: 64454 - RNA, 24 nt, Artificial Sequence
  Synthetic
ugaguguaagcaaacaguucuacu

SEQ ID NO: 64455 - RNA, 18 nt, Artificial Sequence
  Synthetic
uaaauaaucauuucuacu

SEQ ID NO: 64456 - RNA, 19 nt, Artificial Sequence
  Synthetic
uuaaauaaucauuucuacu

SEQ ID NO: 64457 - RNA, 20 nt, Artificial Sequence
  Synthetic
auuaaauaaucauuucuacu

SEQ ID NO: 64458 - RNA, 22 nt, Artificial Sequence
  Synthetic
ugauuaaauaaucauuucuacu

SEQ ID NO: 64459 - RNA, 23 nt, Artificial Sequence
  Synthetic
augauuaaauaaucauuucuacu

SEQ ID NO: 64460 - RNA, 24 nt, Artificial Sequence
  Synthetic
uaugauuaaauaaucauuucuacu

SEQ ID NO: 64461 - RNA, 18 nt, Artificial Sequence
  Synthetic
uacuauaugcuaaguacu

SEQ ID NO: 64462 - RNA, 19 nt, Artificial Sequence
  Synthetic
auacuauaugcuaaguacu

SEQ ID NO: 64463 - RNA, 20 nt, Artificial Sequence
  Synthetic
aauacuauaugcuaaguacu

SEQ ID NO: 64464 - RNA, 21 nt, Artificial Sequence
  Synthetic
aaauacuauaugcuaaguacu

SEQ ID NO: 64465 - RNA, 22 nt, Artificial Sequence
  Synthetic
caaauacuauaugcuaaguacu

SEQ ID NO: 64466 - RNA, 24 nt, Artificial Sequence
  Synthetic
agcaaauacuauaugcuaaguacu

SEQ ID NO: 64467 - RNA, 18 nt, Artificial Sequence
  Synthetic
ugauauaugccagguacu

SEQ ID NO: 64468 - RNA, 19 nt, Artificial Sequence
  Synthetic
augauauaugccagguacu

SEQ ID NO: 64469 - RNA, 20 nt, Artificial Sequence
  Synthetic
caugauauaugccagguacu

SEQ ID NO: 64470 - RNA, 21 nt, Artificial Sequence
  Synthetic
acaugauauaugccagguacu

SEQ ID NO: 64471 - RNA, 22 nt, Artificial Sequence
  Synthetic
uacaugauauaugccagguacu

SEQ ID NO: 64472 - RNA, 24 nt, Artificial Sequence
  Synthetic
aguacaugauauaugccagguacu

SEQ ID NO: 64473 - RNA, 19 nt, Artificial Sequence
  Synthetic
agaaaaaucaggggguacu

SEQ ID NO: 64474 - RNA, 22 nt, Artificial Sequence
  Synthetic
aggagaaaaaucaggggguacu

SEQ ID NO: 64475 - RNA, 23 nt, Artificial Sequence
  Synthetic
aaggagaaaaaucaggggguacu

SEQ ID NO: 64476 - RNA, 24 nt, Artificial Sequence
  Synthetic
aaaggagaaaaaucaggggguacu

SEQ ID NO: 64477 - RNA, 18 nt, Artificial Sequence
  Synthetic
aggagaugcuuugguacu

SEQ ID NO: 64478 - RNA, 22 nt, Artificial Sequence
  Synthetic
ugggaggagaugcuuugguacu

SEQ ID NO: 64479 - RNA, 18 nt, Artificial Sequence
  Synthetic
uguuucuuuuuugguacu

SEQ ID NO: 64480 - RNA, 20 nt, Artificial Sequence
  Synthetic
aguguuucuuuuuugguacu

SEQ ID NO: 64481 - RNA, 21 nt, Artificial Sequence
  Synthetic
aaguguuucuuuuuugguacu

SEQ ID NO: 64482 - RNA, 24 nt, Artificial Sequence
  Synthetic
uggaaguguuucuuuuuugguacu

SEQ ID NO: 64483 - RNA, 18 nt, Artificial Sequence
  Synthetic
cuuugaugauaauguacu

SEQ ID NO: 64484 - RNA, 20 nt, Artificial Sequence
  Synthetic
agcuuugaugauaauguacu

SEQ ID NO: 64485 - RNA, 21 nt, Artificial Sequence
  Synthetic
uagcuuugaugauaauguacu

SEQ ID NO: 64486 - RNA, 22 nt, Artificial Sequence
  Synthetic
cuagcuuugaugauaauguacu

SEQ ID NO: 64487 - RNA, 23 nt, Artificial Sequence
  Synthetic
ccuagcuuugaugauaauguacu

SEQ ID NO: 64488 - RNA, 24 nt, Artificial Sequence
  Synthetic
uccuagcuuugaugauaauguacu

SEQ ID NO: 64489 - RNA, 18 nt, Artificial Sequence
  Synthetic
uucaguagcacauguacu

SEQ ID NO: 64490 - RNA, 19 nt, Artificial Sequence
  Synthetic
cuucaguagcacauguacu

SEQ ID NO: 64491 - RNA, 20 nt, Artificial Sequence
  Synthetic
ucuucaguagcacauguacu

SEQ ID NO: 64492 - RNA, 21 nt, Artificial Sequence
  Synthetic
cucuucaguagcacauguacu

SEQ ID NO: 64493 - RNA, 22 nt, Artificial Sequence
  Synthetic
ccucuucaguagcacauguacu

SEQ ID NO: 64494 - RNA, 23 nt, Artificial Sequence
  Synthetic
accucuucaguagcacauguacu

SEQ ID NO: 64495 - RNA, 24 nt, Artificial Sequence
  Synthetic
caccucuucaguagcacauguacu

SEQ ID NO: 64496 - RNA, 18 nt, Artificial Sequence
  Synthetic
uguacuauaacuuguacu

SEQ ID NO: 64497 - RNA, 19 nt, Artificial Sequence
  Synthetic
uuguacuauaacuuguacu

SEQ ID NO: 64498 - RNA, 20 nt, Artificial Sequence
  Synthetic
cuuguacuauaacuuguacu

SEQ ID NO: 64499 - RNA, 21 nt, Artificial Sequence
  Synthetic
ucuuguacuauaacuuguacu

SEQ ID NO: 64500 - RNA, 22 nt, Artificial Sequence
  Synthetic
aucuuguacuauaacuuguacu

SEQ ID NO: 64501 - RNA, 23 nt, Artificial Sequence
  Synthetic
uaucuuguacuauaacuuguacu

SEQ ID NO: 64502 - RNA, 19 nt, Artificial Sequence
  Synthetic
agaauauacucagauuacu

SEQ ID NO: 64503 - RNA, 20 nt, Artificial Sequence
  Synthetic
aagaauauacucagauuacu

SEQ ID NO: 64504 - RNA, 21 nt, Artificial Sequence
  Synthetic
caagaauauacucagauuacu

SEQ ID NO: 64505 - RNA, 22 nt, Artificial Sequence
  Synthetic
ucaagaauauacucagauuacu

SEQ ID NO: 64506 - RNA, 23 nt, Artificial Sequence
  Synthetic
cucaagaauauacucagauuacu

SEQ ID NO: 64507 - RNA, 24 nt, Artificial Sequence
  Synthetic
acucaagaauauacucagauuacu

SEQ ID NO: 64508 - RNA, 18 nt, Artificial Sequence
  Synthetic
ugcgugaaacaccuuacu

SEQ ID NO: 64509 - RNA, 19 nt, Artificial Sequence
  Synthetic
augcgugaaacaccuuacu

SEQ ID NO: 64510 - RNA, 20 nt, Artificial Sequence
  Synthetic
uaugcgugaaacaccuuacu

SEQ ID NO: 64511 - RNA, 21 nt, Artificial Sequence
  Synthetic
auaugcgugaaacaccuuacu

SEQ ID NO: 64512 - RNA, 22 nt, Artificial Sequence
  Synthetic
aauaugcgugaaacaccuuacu

SEQ ID NO: 64513 - RNA, 23 nt, Artificial Sequence
  Synthetic
uaauaugcgugaaacaccuuacu

SEQ ID NO: 64514 - RNA, 24 nt, Artificial Sequence
  Synthetic
auaauaugcgugaaacaccuuacu

SEQ ID NO: 64515 - RNA, 20 nt, Artificial Sequence
  Synthetic
uggaaugaagcuaucuuacu

SEQ ID NO: 64516 - RNA, 21 nt, Artificial Sequence
  Synthetic
auggaaugaagcuaucuuacu

SEQ ID NO: 64517 - RNA, 22 nt, Artificial Sequence
  Synthetic
aauggaaugaagcuaucuuacu

SEQ ID NO: 64518 - RNA, 18 nt, Artificial Sequence
  Synthetic
aauuucucauuucuuacu

SEQ ID NO: 64519 - RNA, 19 nt, Artificial Sequence
  Synthetic
caauuucucauuucuuacu

SEQ ID NO: 64520 - RNA, 20 nt, Artificial Sequence
  Synthetic
acaauuucucauuucuuacu

SEQ ID NO: 64521 - RNA, 21 nt, Artificial Sequence
  Synthetic
uacaauuucucauuucuuacu

SEQ ID NO: 64522 - RNA, 22 nt, Artificial Sequence
  Synthetic
cuacaauuucucauuucuuacu

SEQ ID NO: 64523 - RNA, 24 nt, Artificial Sequence
  Synthetic
agcuacaauuucucauuucuuacu

SEQ ID NO: 64524 - RNA, 18 nt, Artificial Sequence
  Synthetic
cuugaaauauugguuacu

SEQ ID NO: 64525 - RNA, 20 nt, Artificial Sequence
  Synthetic
ugcuugaaauauugguuacu

SEQ ID NO: 64526 - RNA, 21 nt, Artificial Sequence
  Synthetic
augcuugaaauauugguuacu

SEQ ID NO: 64527 - RNA, 22 nt, Artificial Sequence
  Synthetic
uaugcuugaaauauugguuacu

SEQ ID NO: 64528 - RNA, 23 nt, Artificial Sequence
  Synthetic
cuaugcuugaaauauugguuacu

SEQ ID NO: 64529 - RNA, 24 nt, Artificial Sequence
  Synthetic
acuaugcuugaaauauugguuacu

SEQ ID NO: 64530 - RNA, 19 nt, Artificial Sequence
  Synthetic
aguaaauaaccaauuuacu

SEQ ID NO: 64531 - RNA, 20 nt, Artificial Sequence
  Synthetic
uaguaaauaaccaauuuacu

SEQ ID NO: 64532 - RNA, 22 nt, Artificial Sequence
  Synthetic
aguaguaaauaaccaauuuacu

SEQ ID NO: 64533 - RNA, 23 nt, Artificial Sequence
  Synthetic
aaguaguaaauaaccaauuuacu

SEQ ID NO: 64534 - RNA, 21 nt, Artificial Sequence
  Synthetic
uccuaccuaucaauauuuacu

SEQ ID NO: 64535 - RNA, 22 nt, Artificial Sequence
  Synthetic
uuccuaccuaucaauauuuacu

SEQ ID NO: 64536 - RNA, 23 nt, Artificial Sequence
  Synthetic
auuccuaccuaucaauauuuacu

SEQ ID NO: 64537 - RNA, 24 nt, Artificial Sequence
  Synthetic
aauuccuaccuaucaauauuuacu

SEQ ID NO: 64538 - RNA, 21 nt, Artificial Sequence
  Synthetic
auuaacuacauaauauuuacu

SEQ ID NO: 64539 - RNA, 22 nt, Artificial Sequence
  Synthetic
uauuaacuacauaauauuuacu

SEQ ID NO: 64540 - RNA, 23 nt, Artificial Sequence
  Synthetic
uuauuaacuacauaauauuuacu

SEQ ID NO: 64541 - RNA, 24 nt, Artificial Sequence
  Synthetic
auuauuaacuacauaauauuuacu

SEQ ID NO: 64542 - RNA, 18 nt, Artificial Sequence
  Synthetic
aguuaauguuacuuuacu

SEQ ID NO: 64543 - RNA, 19 nt, Artificial Sequence
  Synthetic
caguuaauguuacuuuacu

SEQ ID NO: 64544 - RNA, 20 nt, Artificial Sequence
  Synthetic
acaguuaauguuacuuuacu

SEQ ID NO: 64545 - RNA, 21 nt, Artificial Sequence
  Synthetic
aacaguuaauguuacuuuacu

SEQ ID NO: 64546 - RNA, 22 nt, Artificial Sequence
  Synthetic
aaacaguuaauguuacuuuacu

SEQ ID NO: 64547 - RNA, 23 nt, Artificial Sequence
  Synthetic
uaaacaguuaauguuacuuuacu

SEQ ID NO: 64548 - RNA, 24 nt, Artificial Sequence
  Synthetic
cuaaacaguuaauguuacuuuacu

SEQ ID NO: 64549 - RNA, 18 nt, Artificial Sequence
  Synthetic
aaugaagaggauuuuacu

SEQ ID NO: 64550 - RNA, 19 nt, Artificial Sequence
  Synthetic
uaaugaagaggauuuuacu

SEQ ID NO: 64551 - RNA, 20 nt, Artificial Sequence
  Synthetic
auaaugaagaggauuuuacu

SEQ ID NO: 64552 - RNA, 21 nt, Artificial Sequence
  Synthetic
cauaaugaagaggauuuuacu

SEQ ID NO: 64553 - RNA, 22 nt, Artificial Sequence
  Synthetic
acauaaugaagaggauuuuacu

SEQ ID NO: 64554 - RNA, 23 nt, Artificial Sequence
  Synthetic
aacauaaugaagaggauuuuacu

SEQ ID NO: 64555 - RNA, 24 nt, Artificial Sequence
  Synthetic
caacauaaugaagaggauuuuacu

SEQ ID NO: 64556 - RNA, 18 nt, Artificial Sequence
  Synthetic
ugcacaugcucuuuuacu

SEQ ID NO: 64557 - RNA, 19 nt, Artificial Sequence
  Synthetic
uugcacaugcucuuuuacu

SEQ ID NO: 64558 - RNA, 20 nt, Artificial Sequence
  Synthetic
uuugcacaugcucuuuuacu

SEQ ID NO: 64559 - RNA, 21 nt, Artificial Sequence
  Synthetic
uuuugcacaugcucuuuuacu

SEQ ID NO: 64560 - RNA, 22 nt, Artificial Sequence
  Synthetic
uuuuugcacaugcucuuuuacu

SEQ ID NO: 64561 - RNA, 24 nt, Artificial Sequence
  Synthetic
uguuuuugcacaugcucuuuuacu

SEQ ID NO: 64562 - RNA, 18 nt, Artificial Sequence
  Synthetic
cuguaacuuuaaaaaccu

SEQ ID NO: 64563 - RNA, 19 nt, Artificial Sequence
  Synthetic
acuguaacuuuaaaaaccu

SEQ ID NO: 64564 - RNA, 20 nt, Artificial Sequence
  Synthetic
aacuguaacuuuaaaaaccu

SEQ ID NO: 64565 - RNA, 21 nt, Artificial Sequence
  Synthetic
uaacuguaacuuuaaaaaccu

SEQ ID NO: 64566 - RNA, 22 nt, Artificial Sequence
  Synthetic
uuaacuguaacuuuaaaaaccu

SEQ ID NO: 64567 - RNA, 23 nt, Artificial Sequence
  Synthetic
auuaacuguaacuuuaaaaaccu

SEQ ID NO: 64568 - RNA, 24 nt, Artificial Sequence
  Synthetic
uauuaacuguaacuuuaaaaaccu

SEQ ID NO: 64569 - RNA, 18 nt, Artificial Sequence
  Synthetic
agaucuuuuagcaaaccu

SEQ ID NO: 64570 - RNA, 20 nt, Artificial Sequence
  Synthetic
agagaucuuuuagcaaaccu

SEQ ID NO: 64571 - RNA, 22 nt, Artificial Sequence
  Synthetic
agagagaucuuuuagcaaaccu

SEQ ID NO: 64572 - RNA, 23 nt, Artificial Sequence
  Synthetic
aagagagaucuuuuagcaaaccu

SEQ ID NO: 64573 - RNA, 21 nt, Artificial Sequence
  Synthetic
auuuuuuuucuccucaaaccu

SEQ ID NO: 64574 - RNA, 22 nt, Artificial Sequence
  Synthetic
uauuuuuuuucuccucaaaccu

SEQ ID NO: 64575 - RNA, 24 nt, Artificial Sequence
  Synthetic
aguauuuuuuuucuccucaaaccu

SEQ ID NO: 64576 - RNA, 19 nt, Artificial Sequence
  Synthetic
agccuccucuccgaaaccu

SEQ ID NO: 64577 - RNA, 20 nt, Artificial Sequence
  Synthetic
aagccuccucuccgaaaccu

SEQ ID NO: 64578 - RNA, 21 nt, Artificial Sequence
  Synthetic
caagccuccucuccgaaaccu

SEQ ID NO: 64579 - RNA, 22 nt, Artificial Sequence
  Synthetic
ucaagccuccucuccgaaaccu

SEQ ID NO: 64580 - RNA, 23 nt, Artificial Sequence
  Synthetic
cucaagccuccucuccgaaaccu

SEQ ID NO: 64581 - RNA, 24 nt, Artificial Sequence
  Synthetic
acucaagccuccucuccgaaaccu

SEQ ID NO: 64582 - RNA, 18 nt, Artificial Sequence
  Synthetic
cucuaaaacuggaaaccu

SEQ ID NO: 64583 - RNA, 19 nt, Artificial Sequence
  Synthetic
ucucuaaaacuggaaaccu

SEQ ID NO: 64584 - RNA, 21 nt, Artificial Sequence
  Synthetic
ugucucuaaaacuggaaaccu

SEQ ID NO: 64585 - RNA, 22 nt, Artificial Sequence
  Synthetic
uugucucuaaaacuggaaaccu

SEQ ID NO: 64586 - RNA, 23 nt, Artificial Sequence
  Synthetic
auugucucuaaaacuggaaaccu

SEQ ID NO: 64587 - RNA, 24 nt, Artificial Sequence
  Synthetic
aauugucucuaaaacuggaaaccu

SEQ ID NO: 64588 - RNA, 18 nt, Artificial Sequence
  Synthetic
uaauguuauuggaaaccu

SEQ ID NO: 64589 - RNA, 20 nt, Artificial Sequence
  Synthetic
uguaauguuauuggaaaccu

SEQ ID NO: 64590 - RNA, 24 nt, Artificial Sequence
  Synthetic
uggguguaauguuauuggaaaccu

SEQ ID NO: 64591 - RNA, 18 nt, Artificial Sequence
  Synthetic
aucugauaagaacaaccu

SEQ ID NO: 64592 - RNA, 19 nt, Artificial Sequence
  Synthetic
caucugauaagaacaaccu

SEQ ID NO: 64593 - RNA, 20 nt, Artificial Sequence
  Synthetic
ucaucugauaagaacaaccu

SEQ ID NO: 64594 - RNA, 21 nt, Artificial Sequence
  Synthetic
cucaucugauaagaacaaccu

SEQ ID NO: 64595 - RNA, 22 nt, Artificial Sequence
  Synthetic
acucaucugauaagaacaaccu

SEQ ID NO: 64596 - RNA, 23 nt, Artificial Sequence
  Synthetic
aacucaucugauaagaacaaccu

SEQ ID NO: 64597 - RNA, 24 nt, Artificial Sequence
  Synthetic
aaacucaucugauaagaacaaccu

SEQ ID NO: 64598 - RNA, 18 nt, Artificial Sequence
  Synthetic
ccccaggacaagcaaccu

SEQ ID NO: 64599 - RNA, 19 nt, Artificial Sequence
  Synthetic
accccaggacaagcaaccu

SEQ ID NO: 64600 - RNA, 20 nt, Artificial Sequence
  Synthetic
uaccccaggacaagcaaccu

SEQ ID NO: 64601 - RNA, 21 nt, Artificial Sequence
  Synthetic
uuaccccaggacaagcaaccu

SEQ ID NO: 64602 - RNA, 22 nt, Artificial Sequence
  Synthetic
cuuaccccaggacaagcaaccu

SEQ ID NO: 64603 - RNA, 21 nt, Artificial Sequence
  Synthetic
agauguuaauccccagaaccu

SEQ ID NO: 64604 - RNA, 22 nt, Artificial Sequence
  Synthetic
aagauguuaauccccagaaccu

SEQ ID NO: 64605 - RNA, 24 nt, Artificial Sequence
  Synthetic
cgaagauguuaauccccagaaccu

SEQ ID NO: 64606 - RNA, 18 nt, Artificial Sequence
  Synthetic
cuuuucaaacaggaaccu

SEQ ID NO: 64607 - RNA, 19 nt, Artificial Sequence
  Synthetic
acuuuucaaacaggaaccu

SEQ ID NO: 64608 - RNA, 21 nt, Artificial Sequence
  Synthetic
agacuuuucaaacaggaaccu

SEQ ID NO: 64609 - RNA, 22 nt, Artificial Sequence
  Synthetic
uagacuuuucaaacaggaaccu

SEQ ID NO: 64610 - RNA, 23 nt, Artificial Sequence
  Synthetic
cuagacuuuucaaacaggaaccu

SEQ ID NO: 64611 - RNA, 24 nt, Artificial Sequence
  Synthetic
ucuagacuuuucaaacaggaaccu

SEQ ID NO: 64612 - RNA, 18 nt, Artificial Sequence
  Synthetic
uccuaaauugaggaaccu

SEQ ID NO: 64613 - RNA, 19 nt, Artificial Sequence
  Synthetic
uuccuaaauugaggaaccu

SEQ ID NO: 64614 - RNA, 20 nt, Artificial Sequence
  Synthetic
auuccuaaauugaggaaccu

SEQ ID NO: 64615 - RNA, 21 nt, Artificial Sequence
  Synthetic
aauuccuaaauugaggaaccu

SEQ ID NO: 64616 - RNA, 24 nt, Artificial Sequence
  Synthetic
uggaauuccuaaauugaggaaccu

SEQ ID NO: 64617 - RNA, 18 nt, Artificial Sequence
  Synthetic
agcuuaauacuauaaccu

SEQ ID NO: 64618 - RNA, 19 nt, Artificial Sequence
  Synthetic
aagcuuaauacuauaaccu

SEQ ID NO: 64619 - RNA, 21 nt, Artificial Sequence
  Synthetic
ugaagcuuaauacuauaaccu

SEQ ID NO: 64620 - RNA, 22 nt, Artificial Sequence
  Synthetic
uugaagcuuaauacuauaaccu

SEQ ID NO: 64621 - RNA, 23 nt, Artificial Sequence
  Synthetic
uuugaagcuuaauacuauaaccu

SEQ ID NO: 64622 - RNA, 24 nt, Artificial Sequence
  Synthetic
cuuugaagcuuaauacuauaaccu

SEQ ID NO: 64623 - RNA, 18 nt, Artificial Sequence
  Synthetic
aaacaucaaaacuaaccu

SEQ ID NO: 64624 - RNA, 19 nt, Artificial Sequence
  Synthetic
aaaacaucaaaacuaaccu

SEQ ID NO: 64625 - RNA, 21 nt, Artificial Sequence
  Synthetic
ugaaaacaucaaaacuaaccu

SEQ ID NO: 64626 - RNA, 22 nt, Artificial Sequence
  Synthetic
cugaaaacaucaaaacuaaccu

SEQ ID NO: 64627 - RNA, 23 nt, Artificial Sequence
  Synthetic
ccugaaaacaucaaaacuaaccu

SEQ ID NO: 64628 - RNA, 24 nt, Artificial Sequence
  Synthetic
accugaaaacaucaaaacuaaccu

SEQ ID NO: 64629 - RNA, 18 nt, Artificial Sequence
  Synthetic
uuuauucuccacuaaccu

SEQ ID NO: 64630 - RNA, 19 nt, Artificial Sequence
  Synthetic
uuuuauucuccacuaaccu

SEQ ID NO: 64631 - RNA, 20 nt, Artificial Sequence
  Synthetic
cuuuuauucuccacuaaccu

SEQ ID NO: 64632 - RNA, 21 nt, Artificial Sequence
  Synthetic
acuuuuauucuccacuaaccu

SEQ ID NO: 64633 - RNA, 22 nt, Artificial Sequence
  Synthetic
aacuuuuauucuccacuaaccu

SEQ ID NO: 64634 - RNA, 23 nt, Artificial Sequence
  Synthetic
uaacuuuuauucuccacuaaccu

SEQ ID NO: 64635 - RNA, 24 nt, Artificial Sequence
  Synthetic
auaacuuuuauucuccacuaaccu

SEQ ID NO: 64636 - RNA, 18 nt, Artificial Sequence
  Synthetic
cucacaguggaguaaccu

SEQ ID NO: 64637 - RNA, 19 nt, Artificial Sequence
  Synthetic
ccucacaguggaguaaccu

SEQ ID NO: 64638 - RNA, 20 nt, Artificial Sequence
  Synthetic
uccucacaguggaguaaccu

SEQ ID NO: 64639 - RNA, 22 nt, Artificial Sequence
  Synthetic
uguccucacaguggaguaaccu

SEQ ID NO: 64640 - RNA, 23 nt, Artificial Sequence
  Synthetic
cuguccucacaguggaguaaccu

SEQ ID NO: 64641 - RNA, 19 nt, Artificial Sequence
  Synthetic
agccucuccuuugacaccu
